United States Patent Application Publication US 2019/0348154 A1 - sequence listing, part 93

SEQ ID NO: 348089 - DNA, 2994 bp, Pseudomonas aeruginosa
gtgagcaagttgaattcaatcaccctgtcgaacctgcgcaaattcgggtcggaagtcaccatcgagctgagtcccggagcgactattttgctcgcgcccaatggtactggcaaaacaacggtatttgaggcgatcgagtttggcctaaccgggaaaatcgcgcgtctccgtgacgaccttgcccacatcattcgtgatgatcaggcggcagcgacagtcagtctgagtttttctgagttaactgcgacatcacgcgtgactgcagcgggcgaggtcagccgggacggagacttgagcagcgtcttccctaatgtgtctgcaaatgacatcccattcttgctgcgtctaactcacctcttggatcagagggagaacgggtggatcgttaatgcagaagaaaaggaagccggaacccagttggcgaagctgccgattggtcgcgacggttctaaagctcgcgccaacctcgctgccgttcgacggtcgctgacggagcaaaaagcccgtgcggaagaagtgttgattgggcatgagactgatttgagcgagtggactcgcctacttcaggagcgtgacatagctgctgccggtgcagtaggtgcattacgaccgctcgatcgaattgccgacgctctctctgacgctgcaaaccagacgcaaagcctgagccagattccacctggcttattgaccgggcctgcaagccaggaggggctgacgattgcacactccgcactgaccgagatcttgcaagggaaggtcgaacggactcgggcgcatatttcaagccttgccttggtaaacgatcttgttgaaagctttgttgcggcgcaggagcagctcgaaaagctcaatgaagacctcgcggcagctagtcagacactcgataaacacgcgaacacgagggctgacggcaatgccgccttgcaggagcatcaggccagtatccactctgcacagcaagaacttaccagcatcgggcagcaacttgagcgtctgattggagaaaccactgcaaaacaggagatcgctcaccgaaatgacgcgttgacgtcagcgattgctgccctacgcgaggctgaagaaaattctcgtgtacttcgcgagcagcatgagcgcaaccaacgggttcgcaaccagcatgctcagattgacgcccagcttcatggcatcaaccagactgagcagcgcttggaggcgagccgtctaatgcttgccgactggcaggccactgagcagcaaatcagcgaggttgttcagcaaatcacggatctcggagtgctcatcgataaacagagcatcgatcgggatgccgaacgttcctcgtatgagacgtgtaaagctgcggaggccactgcccgatcattttatgagatgctcagttcttccgccgacgcaatccgtcaggccgttgcatccatagcgcaacatcttcccgctgaccaagatcaatgcccgctttgcctggagccgcatggtgcaaccaagcttcagtcccgtgtggctcaagcccttgaagcgatcaatccgagtttgactgcagctgagcagcgattgcgagctgctgtggaagcgttgacggccagtgaggtcgcggttgagaaagcgcagcaagcactagacttcagccgaatggagctgggtgctttggagtccagccgccaggatctgggaagacgagttgcgcagtttcgtaccgatccgattttggctagtgactcgctcccattggcaagggagtcgctcaggcagcaactcgatagtattgctcctgccaaaaagcgtttgactgatcagcgagcggctttggacgctctcccttcccctgaagcctttgaacaaaccgagggggccttcaactcggcacagcagatgctcgacttggcccgagttcaacagagcgaagcgtctacgcggctggatcaagcagttgccgcactggccgcgctcacctctggagaaccgctggctcgtacgcttgagcaactcactgcagaaaaagcgcagctggaacagcagatcagcgatctgaacgggaaggttgagactgtgcaatccgccctagacacccagcagcatcagttggttgagtcattaaccgcagtcaaggagatcgaggaagaaatccgaagggttcaaacgctccttcttcaaatccgcgcgagctggcaagagcaggatttgaccggcgacccacttgcggaagctgcgcaggcccgtgaagcgacactgcgcgctacgttgaccctcctggaggggtatgtttcagcactcgaaggcattggggtggagatctctgcttgggccaagctgaacgattcacaactggctcagcggttgattgatgctcagcgtcttgaccgatcagaagaggccttcgaagcgtacctcaatgacagcatcaacgcggcacgctccagcttcttgcagttgtccttgatctcggacgcgatggatttgctggacggctcactcaagaaagaaattgagaatgttcagaagcatgtcggcaaggtggtaccccgctggcaggcgctgctaaagcgtgtcgtgcgagagtccaggttccacgaggcaagcctgaaattcttcaactcgtataacaaggatcgtgccggcgtttctgtaccgcttggcaataaagcggtaccggtacctgatatcgcgagtgaggcacagttgacggatcttcaactgaccttcctgctctcaatggcgatgagtcatcagtggtctccttggaaagcactgttattggatgacccgactcagcatcacgacctggtacatgcctctgcggttttcgatttgctgcgtgactacatcgttgatcatggtttccaggtcgttatcgctacccatgatgctctgcaggctcgttacttcatgcgcaagctgcaaaacgacggaattgaggccaagatctggacgctcgtgccgactgaagatggcgtcactgcgcaagcagggagctggaaacagcgcattcaataa

SEQ ID NO: 348090 - DNA, 1416 bp, Pseudomonas aeruginosa
atgcgtatcaaagtgcactgccagaaccgtgtaggcatcctccgcgacatcctcaacctgctggtcgactatggcatcaacgtcaatcgcggcgaagtcggcggcgaccagggcaacgccatctacctgctctgtccgaacatgatcaacctccagttgcagtcgctgcggcccaagctggaggcggtgccgggggtcttcggggtcaagcgcgtcggcctgatgcccagcgagcgccggcacctggaactcaacgcgctgctcgccgccctggacttcccggtgctctcggtggacatgggcgggcagatcgtcgccgccaaccgtgccgccgcgcagttgctcggcgtgcgcgtcgacgaggtgccggggattccgctgtcgcgctatgtcgaggacctcgacctgcccgaactggtgcgcgccaacaaggcgcggatcaacgggctgcgggtcaaggtgaagggcgacgtgttcctcgccgacatcgcgccgctgcaatccgagcacgacgagagcgaggcactggctggagcggtgctgaccctgcatcgcgcggatcgcgtcggcgagcgcatctaccatgtgcgcaagcaggagctgcgtggcttcgacagtatcttccagagttcgcgggtaatggccgcggtggtccgcgaggcgcggcgcatggcgccgctggacgcgccgctgctgatcgagggcgagaccggcaccggcaaggagctgctggcgcgcgcctgccacctggccagcccgcgcgggcagtcgccgttcatggcgttgaactgcgccggcctgccggaatccatggccgagaccgagctgttcggctatggtccgggagccttcgagggcgcccgtccggaaggcaagctcggcctgctggagcttaccgccggcggcacgctgttcctcgacggcgtcggcgagatgagcccgcgcctgcaggccaagctgttgcgcttcctgcaggacggctgtttccgccgggtcggcagcgacgaggaggtgtacctggacgtgcgggtgatctgcgccacccaggtagacctgtccgaactctgcgccaagggcgaattccgccaggacctctatcaccgtctcaatgtgctctcgctgcacatcccgccgctgcgcgagtgcctggatggcctggcgccgctcgccgagcatttcctcgaccaggccagccggcagatcggctgcggcctgccgaagctttccgcgcaggcgctggaacgtctcgaacgctaccactggccgggcaacgtgcggcaattggaaaacgtgctgttccaggcggtttcgctgtgcgaagggggaacggtcaaggccgagcacatccgcctgccggactacggcgcaccgcagccgctgggggatttttgggtattcgggaaagggtgttgttag

SEQ ID NO: 348091 - DNA, 396 bp, Pseudomonas aeruginosa
atgaccgaccacgcagagctgcggagggtggctgcgctggctcatccagacgccgaatggttcatcgcgcgaaaccttgatcacccgaatatcgacaagccggcagcgtcattcatcgccaccgccacccccaaggccgtcctcgccctgctggacgagatcgacaggctcaaggcggagaacgaaagtctgctcgacgagctatccgcatgcaccgaacatccgggcggatgtgggtattggcgcgaggcagccaagcgtagaactgaagaacgcgatcagctcaaggcggagaacgaggcgctgcgaggggcggtcgagcaactcgccgagatgctgaacagcatccatgtccccatcgatcttaacgaaatcctcaaaggagccaagcaatga

SEQ ID NO: 348092 - DNA, 321 bp, Pseudomonas aeruginosa; identical to SEQ ID NO: 322269

SEQ ID NO: 348093 - DNA, 849 bp, Pseudomonas aeruginosa
ttgatagccgtcggcgccgaggttgatccttggcagagtggtgcgggccgcaccacccagctcgccgccggcgccgaggccaggacctggcagagtgatgcgggccgcatcacccagttcgccgtcggcgccgaggccaggacctggcagagtgatgcgggccgcatcacccagttcgccgtcggcgccgaggtcgatccttggcagagtgttgcgggccgcaccacccagctcggcgccggcgccgaggccaggacctggtggagtgttgcgggccgcaacacccagcttgccggcggcgccgaggccaggacctggcagagtgatgcgggccgcatcacccagttcgccgccggcgccgaggccaggacctggtggagtgttgcgggccgcaacacccagcttgccggcggcgccgaggccaggacctggcagagtgatgcgggccgcatcacccagctcggcgccggcgccgaggccaggacctggtggagtgttgcgggccgcaacacccagcttgccggcggcgccgaggccaggacctggcagagtgatgcgggccgcatcacccagctcggcgccggcgccgaggccaggacctggtggagtgttgcgggccgcaacacccagcttgccggcggcgccgaggccaggacctggcagagtgatgcgggccgcatcacccagctcggcgccggcgccgaggccaggacctggtggagtgttgcgggccgcaacacccagcttgccggcggcgccgaggccaggacctggcagagtgatgcgggccgcatcacccagttcgccgccggcgccgccccaagggaaaatcaccttgctcgacagtga

SEQ ID NO: 348094 - DNA, 390 bp, Pseudomonas aeruginosa
atgagcgatgacataaccaggatgctcacgcttcagtcgaaaacatccaccctcttcgattttccctatcgggttgcagggggttcatacctgaatcttaccttccgcaaaaaaggcaaagacctggacgccttcctcaagatcaccaaagggcagatgcagtgcggttatcgagactgcggtttcgctcttcgggtcggtgacggcaagacgcaaaagtggaccggggtacgcagttcgaccaacgacagcgacctgatgttcgttcgagacgctaagcagttggaagctatcgtcaaatcgggaaagcctttccggatcgctatcgagttcttccaggcaggagagcgcgttttcgagtttgacccggcagattacccaggcctatag

SEQ ID NO: 348095 - DNA, 429 bp, Pseudomonas aeruginosa
gtgctcgagcaagccgggctgaaggtggcagtgctacgtgcttcggttgatacctcccggcgcgaggactggatcctcgaccaggtcgaccgtggcatcgatgtgctgatcaccaacccggagctggtgaagaccgggttggacctgctggacttcccgaccatcgcgttcctgcagactgggtacaatgtgtacaccctgcagcaggccgcgcgacggtcgtggcggatcgggcagaagcacccggtgcgggtggtgttcttcggctacgccggcagctcgcagatcacctgcttgcagttgatggcgaagaagatcgctgtggctcaaagcacgtcgggagacgttcccgagtcaggtctcgactcgttgaaccaggatggggattcggtggagatggcgttggcacgacaactcattgcagcatga

SEQ ID NO: 348096 - DNA, 501 bp, Pseudomonas aeruginosa; identical to SEQ ID NO: 83644

SEQ ID NO: 348097 - DNA, 840 bp, Pseudomonas aeruginosa; identical to SEQ ID NO: 6027

SEQ ID NO: 348098 - DNA, 273 bp, Pseudomonas aeruginosa
atgctcgagcgcctcgccagcgagatgatgctcctggtcgtaggtcgggcgcttgaagctgtagtcccgctgggtctgtcgagccgtacgaacattttcgctgtagcggaaagaatgaagcaccggctgtgggttgtcgccctccggctgggcgctgaacagtaccgggccgccggcgatacgctcctggacgtagagccggtcgctgcagaccagggtgtggcggtgttcgtcgaagcggaagtagtagaccaggccttcctcgaaggctag

SEQ ID NO: 348099 - DNA, 354 bp, Pseudomonas aeruginosa
atggagtcaatgagatcgagcgagctggcgcaagctggattactgccgtgcccgttttgtggcggtgagccaaccgtaagcagctttccgggcgcccataacgtttggtgctcgaaccagccggttacctgtggcaaccgatccatgtatacgtcggagcaatggaaccgccgcgcccagccagccccggcgcaggatgatcgagaggcgcgagattgggagatgaaggcacaagggatcgagagcgtgatccactacgtggtaagcaagcgcgatcaagacttgctacgccaacacgccgccgataagcgggcagaggccaagcgtatatccggcctaggcggtgacgcgtga

SEQ ID NO: 348100 - DNA, 327 bp, Pseudomonas aeruginosa
atgagcatcaagactaccgggattgaactgaagtccttctggaaagacgattctgtctggccagctgactcctatgtcgatggtttgtacctgaaagtgaacggccaagatgcagatagcgaagacatcgaagctttgaatgatgcggaccaggttgttatcgaagacggatatttctgcgatgcgaatgacgatggcgaaagcctactgaccgttttcaaacggtggcgcaagaagcagaccactgtctacatctcagcttcatgcccgaaagaactggaagaggctgtacgtgctgcaattaaatccgctggcggagccgcctaa

SEQ ID NO: 348101 - DNA, 501 bp, Pseudomonas aeruginosa
atgaagaagatccttgccacgctggcattttgcacagtgctcgcgactcaagcctgggccgccgggctgatcgttgtcgaagacctcggcggcgcctcggcgctcccctactaccagggcctggatccgcagccatccgctgccgcaccaggacctggcgacctgggcatccgtggctcaggtgcgtttccagttcgctccgcccgcctttcgccaggacaggtccaggggcgcgccatcaacgctccaggcctgcaaccgctgttcctggtcggcgacgacacgctgtctcgaacctggctgaaagaacgagtcgacgagctccgaggcctccaagccgtgggcctggcagtgaacgtggccagcgaagcgcgcctgacggaaatccgggcctgggggaaaggacttcagatattgccggcgccggcggacgacctggtcgaccggctagggctgcggcactaccccgccctcatcacatccaccgccatccagcagtag

SEQ ID NO: 348102 - DNA, 270 bp, Pseudomonas aeruginosa
atgactactcacctgatcaccctagtcatcaagcagccgagcgacgctcaggcacgccaactcatgtaccaggggttgctcgacctgatctcacgctacggcggtgaggtggcgtccaaggccttagaggacgagtcgaccctctgcgagctgctggagcagatgctgcctgatgatgaggtagagcaagccaggaaacaggtgctcgaacttcatgccaagggccgccgatcgggccgcctgcaggcgccggcaagcctgaaggtgtaa

SEQ ID NO: 348103 - DNA, 129 bp, Pseudomonas aeruginosa
atgaacactcgccgcacagccatatggctaggcagcctcttcggcggcctgctgtacctcttcatcctggcagccggcccgatctggggcggcatcatcaccgcagaatctacggccactggccaataa

SEQ ID NO: 348104 - DNA, 216 bp, Pseudomonas aeruginosa
atgcttgctttgatctaccgtatgcgggtgcgaacccgagatcacctggccgagatgttcatccgaagaatctccacgatccacaaacgcgccaaggaggagctggagcaaatccaggcacgtcaacgtcagaagttggaacaactggcggccaccctggacggcgtggtgcagattctggttcaagagccggatgacaggaggctggtagcctga

SEQ ID NO: 348105 - DNA, 477 bp, Pseudomonas aeruginosa; identical to SEQ ID NO: 339550

SEQ ID NO: 348106 - DNA, 144 bp, Pseudomonas aeruginosa
atgaccgaaccaatgcaacgccccgaccacgaagcctcgcgctggccgcgcgacttcgatatccgccagcgctatgccgagcagcaggaactgcttgagccaccgccggcgcggccccgcgaagagcctaccgccgacgcctga

SEQ ID NO: 348107 - DNA, 927 bp, Pseudomonas aeruginosa
  misc_feature (130)..(130): n is a, c, g, or t
atgcaccgtctcgtcgtggtcgatggtcttggtccggtcgtggccgacccagtgggtctcgtcgttctcgacctcgatgtcctggttcttctcggcatggatgaacaactgctcggcgcccttcttgtcntccatgcggatctcgttgaagttggccggcgtgccgcccttgctcgaacggctcttggtgccgctctgggtagcgttcgccggcagctcgtagggcaccgtctgctcggcgttgtagacccgcccggtgatgatcggccggtccgggtcgccttcgaggaagctgacgatcacttcctggccgatccgcgggatctggatcgagccccagttcttccccgcccaggcctgcgagacgcgcatccagcaggagctgttctcgttggactggtcgtggcggtcccagtggaaatgcaccttgacccggccatactggtcggtccagatctcctcgcccttgggcccgaccaccaccgcagtctgcgggccacggacgatcggcagcggagtggtcggcaaggggcggtaggcctggccggcatcgatgcagtccagctcgctttcgaactgcgcgccgaccccgccgccgccggtctcgtagagttcctggaccacccggtactcggcgccgaccaccaggtactcgcggttctggtcctcgcgcgggtagccgctgagcttgaacaggtggcccgaacccaggccgcgggcgcggccgcgcaggcgcacccgttcgtagcgcgcctgcaaggcttcgatacgggtccgcgcgtactgctcgccgtcctggctctgcacgtattcgccggggtagtcgtacagcgggtagtcggccgccgcgtgcgagcgggcgatgttcgaacgcacctccaggcgcgcgccgggacgctggaagtcgtagtcgttgaggctcagtga

SEQ ID NO: 348108 - DNA, 1350 bp, Pseudomonas aeruginosa
atgagcggaccgaaagtcgtacgaatcgtcacccgggaagaagccatcgccacctgcgagcgcgacctgcaacgcctggacaaggccctcgcgcgctgggaaaaccaggccagccggctcgcccagctcagtgacgccgagcgcgccgccgcccacgcccgccgcgccagcctgcacgccctgctcgaacaggaacgctggctggacgtgcaactacaggtgaagatcgaaagcgaattcctcaagcgcgacctcgccgaacgcgaagagcgcgccattcgccaggccgcggaaacgcgccagcaacaccgccgcctccaggaaaacgccagcgccctgctccaggccctcgacgccaggcccgatgccgccagcgcggcactccggcaaaccctgcatacgctggccgacggcgtcctccgcgacgacgcggaagccctgctcgcccaaggcttcgccgccctcgccagcgcccccgccgaagaacgcctcagcgaagcccagcgcgaactcgcccagcgcctgaagaccgacgaaacgcccatgtccctggaacagtggcgcgcccgccagcaacaggacgccccgcacgaacagcgcctggcgcgcatcgaccggcacatcgccgaactgcaactgctgcaaggcgaggccagcgcccaagcgttcctcgagcgactggcacgcgccgaagccgaacagcgcccggagcgccgcaacctgctgctcgacagcctggtcctcgacctcgcccaggccgcccgcgaacaccagcagcaacgccagcgcctggaacacctgcaagacctcgccagcgaagtcgccgccctgggcgccgccgaacacgccgaactgctccagcgcgccgccgcctgccagcccgacagcgatccgcagcaactcgccgaactcaccgagcgatgcaacgccatcctcaccgcccacctccagcaacaggccgccctcgcccgccgccaggccgtgctccagggcctcgccagcctcggctacgaagtccgcgaaggcatggccaccgcctgggcgcagaccggcagggtcgtcctgcgcaaacccgccacccccggctacggcctggaagtcggcggcaaggccgacaacggccgcctgcaactgcgcgccgtcgccctcaacgccaaccgcgacagccagcgcgaccgcgacatcgaaaccctctggtgcggcgaattccaacgcctccaggccctgctcgccgcccagggcggcgaactcagcgtggaacgcgcgctgggagtgggggaagtggcgttgaaggagattggcgaggaggagcagcgggagatgggggtggtgcggcagagggggttgtga

SEQ ID NO: 348109 - DNA, 2853 bp, Pseudomonas aeruginosa
atggacaagacttaccagccgcacgccatcgagacttcctggtacgagacctgggagtccaacgactacttcgctccgagcggcgaaggccagccctacaccatcatgatcccgccgccgaacgtgaccggcagcctgcacatgggccatggcttcaacaacgcgatcatggacgcgctgatccgctaccgccgcatgcagggccgcaacaccctgtggcagccgggcaccgatcacgccggcatcgccacccagatggtggtcgagcgccagctcggcgcccagggcgtgagccgccacgacctcggccgggagaagttcctggagaaagtctgggaatggaaggaacagtccggcggcaacatcacccggcagattcgtcgcctgggctcctcggtggactggtcgcgcgagcgcttcaccatggacgacggcctctccgaagcggtcaaggaagccttcgtgcgcctgcatgaagacggcctgatctaccgcggcaaacgcctggtgaactgggacaccaagctgcacaccgcgatttccgacctggaagtggaaaaccacgacgagaagggccacctctggcacctgcgctacccgctggtgaacggcgcgaagaccagcgaaggcctggattacctggtggtcgccaccacccgtccggaaaccctgctaggcgacgccgcggtcgcggtgcacccggaagacgagcgctacgccaagctgatcggccagttcgccgaactgccgatcgtcggccggcacatcccgatcatcgccgacgagtacgtcgaccgcgaattcggcaccggctgcgtgaagatcaccccggcccacgacttcaacgactacgaagtgggcaagcgccacgacctgccgctgatcaacatcttcgacaagaacgccgcggtgctggcccaggcccaggtgttccacctcgacggcagcgtcaacccgaacctcgaccccagcctgccgcagagctacgccggcatggaccgcttcgccgcgcgcaaggccatcgtcgccgagttcgaggccatgggcttgctcgagaaggtcgacgaccacgcgctgaaagtaccgaagggcgaccgctccggcaccgtcatcgagccctggctgaccgaccagtggtacgtcagcaccaagccgctggccgaagacgccatcgccgccgtggaagacggccgtatccagttcgtgcccaagcagtacgagaacatgtacttctcctggatgcgcgacatccaggactggtgcatcagccgccagctctggtggggccaccgcatcccggcctggtacgacgaggccggcaacgtctacgtcggccgcgacgaggtcgaggtgcgcaccaagcacaagctcggcaacgaggtcgagttgcgccaggacgaagacgttctcgacacctggttcagctccggcctgtggaccttctccaccctcggctggccgcagcagaccgagttcctcaagaccttccaccccaccgacgtactggtcaccggcttcgacatcatcttcttctgggtcgcgcggatgatcatgctcaccatgcacctggtgaagaaccccgacggcaccccgcagatcccgttcaagaccgtctatgtccacggcctggtgcgcgacggccagggccagaagatgtccaagtccaagggcaacgtactcgacccgctggacatcgtcgacggcatcgacctcgataccctgctgcaaaagcgcaccagcggcatgatgcagccgaagctggcggagaagatcgccaagcagacccgcgccgaattccccgaaggcatcgccagctacggcaccgacgccctgcgcttcaccttctgctcgctggcctccaccggccgcgatatcaagttcgacatgggccgcgtcgaaggcttccgcaacttctgcaacaagatctggaacgccgccaacttcgtcatcgagaacaccgatggccaggacaccggggtcaacggcgagccggtcgagctgtcctcggtcgaccgctggatcatctcccagttgcagcgcaccgagcaggaagtcacccgccagctcgacgccttccgcttcgacctggccgcccaggccctctatgagttcatctgggacgagtactgcgcctggtacctggagctggtcaagccggtgctgtgggacgagaacgcccccatcgagcgccagcgcggcactcgtcgcaccctgatccgcgtgctggagacggccctgcgcctggcgcacccgttcatgccgttcatcaccgaggaaatctggcagcgcatcaagggccaggccggcaaggaaggtccgaccctgatgctgcaaccctggccggtggccgacgaaggcaggatcgacgccgccgccgaaggcgacatcgagtgggtcaaggcgctgatgctcggcgtgcggcagatccgcggcgagatgaacatctccatggccaagcgcatcgacatcatcctcaggaacgcctcgcccagcgaccaccgccgcctggccgacaacgagccgctgctgatgaaactggccaagctggaaagcatccgcgtgctggaagccggcgaggaagcgccgatgtccgccaccgccctggtcggcgacatggaagtattggtgccgatggccggcctgatcgacaagagcgccgaactggggcgcctggacaaggagatccagcgcctggaaggcgaggtcaagcgcgtcggcggcaagctgtccaacgaaggcttcgtcgccaaggccccggccgacgtgatcgagaaggaacgcgccaagctcgccgaggccgaacaggccctggccaagctggccgagcaacggcagaagatcgccgcgctctaa

SEQ ID NO: 348110 - DNA, 414 bp, Pseudomonas aeruginosa; identical to SEQ ID NO: 323808

SEQ ID NO: 348111 - DNA, 978 bp, Pseudomonas aeruginosa
atgatgcaggcctataagaataaatggttgcccctcagtgccctggcccttggcatggccctgtccttcggcgccaacgccgaagagcagaagtcggtggccgtgaccgccatcgtcgagcacccggcgctggacgccgctcgcgacggggtcaaggaggccctccaggaggccggctacgaagacggcaagaacctcaagtggcagtaccagagcgcccagggcaacaccggcaccgccgcgcagatcgcccgcaagttcatcggcgacaagcccgacgtgatcgtcggcatcgccactccatcggcccaggcgctggtggccgcgaccaagagcatcccgatcgtcttcagcaccgtcaccgacccggtcggcgcgcacctgacgccgagctgggaagcctccggcaccaacgtcaccggggtttccgacatgctcgcgctggacaagcagatcgagctgatcaagaaagtggtgccgggcgccaagcgcatcggcatggtctacaacccgggcgaagccaactccgtggtggtggtcaaggagctgaaggaactgctgccgaagatgggcctgagcctggtcgaagcctcggcaccgcgttcggtggacgtcagctcggcggcgcgcagcctggtcggcaaggtcgacgcgatctacaccaacaccgacaacaacgtggtgtccgcctacgaggcgctggtcaaggtcggcaacgacgcgaagatcccgctgatcgcctccgacaccgacagcgtcaagcgcggcgccatcgccgccctcggcattaactacaaggagatgggcaagcagaccggccgcatggtggtgcgcatcctcaagggcgagaagccgggcgagatcaagccggagaccagcgacaacctgcagctgttcgtcaatcccggggccgcgcagaagcaaggcgtgaccctgtccgacgaactgctcaagtcagccgcggaagtcatcaagtaa

SEQ ID NO: 348112 - DNA, 891 bp, Pseudomonas aeruginosa
atgtctctgttttccctgttcggtgccctggagatcggcctgatcttcagcctcgtggcactcggcgtgttcatctccttccgcctgctgcgcttccccgacctcacggtggacggcagcttcccgctcggcggcgcggtctgcgcgaccctcatcgcccttggctgggacccgtacagcgcgaccctggcggccaccgccgccggtgcactggccgggctggccaccggcctgctcaacgtcaagctgaagatcatggacctgctcgccagcatcctgatgatgatcgcgctctactcgatcaacctgcgcatcatgggcaagcccaacgtaccgctgatcgccgagccgacattgttcaccctgctgcagccggaatggctcagcgactacgtgttccggccgctgctgctggtgttcatcgtgatcgccgcgaagctgctgctggactggttcttcaccacccagaaaggcctggcgatccgcgccaccggctccaacccgcggatggcccgtgcccagggggtcaacaccggcggcatgatcctgctcggcatggccatctccaacgcgctggtggcgttggccggcgcgctgttcgcgcagacccagggcggcgccgatatctccatgggtatcggcaccatcgtcatcggcctggcggcggtgatcgtcggcgagagcatcctgccctcgcgccggctgatcctggcgaccctcgcggtgatcctcggtgccatcgtctaccgcttcttcatcgccctggcgctgaacagcgatttcatcggcttgcaggcccaagacctgaacctggtcaccgcggtgctggtcaccgtcgccctggtgattccgatgatgaagaaacgcctgctcggcaagaagggagcctga

SEQ ID NO: 348113 - DNA, 795 bp, Pseudomonas aeruginosa
atgctcagcgcgaagaacctgaagatcaccttcaaccccggcacccccatcgagacccgcgccctgcgcggcctgtcgctggacatcccggccggccagttcgtcaccgtgatcggctccaacggcgccggcaagtcgaccttcctcaacgcagtctccggcgacctgccgatcgacagcgggcagatcctgatcgacgacgaagacgtcacccgcaagccggtctgggcccgcgccaaccgcgtcgcgcgggtgttccaggaccccatggcgggtacctgcgaggacctcaccatcgaggagaacatggccctggcgcagcgtcgcggtgccggtcgcggcctcggcagggcggtgcaggcatcgatgcgcgacggtttccgggaaagcctggcgaccctcggcctcggcctggagaaccgcctcggcgaccgcatcggcctgctctccggcggccagcgccaggccgtcagcctgctgatggcggcgctgcagccgtcgcgcatcctgttgctcgacgaacacaccgcggcgctcgacccgcgcaccgccgacttcgtcctgcatctcaccgcacggatcgtcgccgagaagaaactcaccaccatgatggtcacccacagcatgcgccaggcgctggacgtgggcgagcgcacggtgatgctgcaccaaggccaggtggtgctggacgtctccggcgagcaacgcaagggcctcgacgtaccggacctgctggcgatgttcgagaaggtgcgcggcgagaagctcgccgacgacgccctcctcctcggctga

SEQ ID NO: 348114 - DNA, 1833 bp, Pseudomonas aeruginosa
atgaacctcgaactgctctgggtggtcggcctgctcgccaccaccgtcgccctcttcatccacaaccgcctgcgcctggacgtgatcgccctgctggtgatcatggccttcagcgtcagcggaacccttaccctcaacgaagccctggccggcttcagcgatcccagcgtgatactgatcgccgcgctgttcgtgatcggcgaaggcctggtgcgtaccggggtggcctaccaggtcggcgactggctgatcgcccgcgccggcagcagcgaagcgcgcctgctggtactgctgatgctggcggtggccgggttgggctcggtgatgagttccaccggggtggtggcgatcttcatcccggtggtcctgagcatcgccgccaagctgaagatccctccgggccggctgatgatgccgctggccttcgccggactgatcagcggcatgatgaccctggtcgccacgccaccgaacatggtggtcaacagcgagctggcgcgcgagggtcatgccggcttcggcttcttcgccttcaccccgataggcctcatggtgctcgccatcggcgtggcctacatgctgctcacgcgcaactggctgaacgccgccagcccggcggaagtcggcgcgccgaaggcacggcggaccctgcgcgacctgatccgcgactatcgcctggccggccgcgaacggcgcctgcaggtccagctcggctcgccgttgatcggcagcaccctggaagaactgcaactgcgcacccgcctgggcgccaacgtggtcggcctggagcgggtacgcaagttccacagcgaggtggtcaaggtcggcggcagcaccgagctgaaggcgggcgacgtgttgctgctggacgtcttcgcccctccggaggacatggaccggcgctgcgccgagctgaacctggtgcgcctgccgttccgcgccagctacttcatcgaccagtcgcgggaggtcggcatggccgaggtgactctgccgccggactccaccctgctcggcaagagcgtcctggagctgggcttccgttcgcagtacgggctcaacgtggtcggcctgcgtcgcgaccacgaagcgctcaccgacggcatgctggaagagaagctgcgcctgggcgataccctgctggtgatcggcgcctggaaggcgatccgccagttgcagggacgcaaccgcgatttcctggtgctcagcctgccggcggagatcgacgaggtggcgccggccctgagcaaggcgccgcacgccctgctcagcctggccgtgatggtggcgctgatggtcagcggggtggtgcccaacgtggtcgcggcactggtcggctgcctgttgatgggcctgttccgttgcatcgacatggacggcgcctaccgcgccatccattggcaaagcctggtcctgatcgtcggcatgctgcccttcgccctggccctgcagaagaccggcggtatcgacctggtggtctcgctgctggtcgacgccctcggcgacgccggcccgcgcgtgctgctggccagcctgttcctgctcaccgcggccatcggcctgttcatctccaacaccgctaccgcggtgctgatggcgccgatcgccatcgccaccgccaagcagatcggcgcctcgccctaccccttcgccatggtggtggcggtggcggcctcggcagccttcatgacgccgatttcctcgccggtgaacaccctggtgctgggccctggccaataccgcttcggcgacttcgtccggatcggcgtgccatttaccctgctggtgatgttcgtctgcgtgctggtgattccgtggctgtttccattgtga

SEQ ID NO: 348115 - DNA, 1011 bp, Pseudomonas aeruginosa
atgccccgcccgaccagcccgcatcccgacgccgagcgcaagagcgccagcccgctgcacccgcgcaatcgccacctgggacgctacgactttccgcgcctgatcgccggcagcccggaactggagcgcttcgtcatcctcaatccgtacggcaggcagagcatcgacttcgctgatccggcggcggtgaaagccttcaaccgcgcgctgctacaacagttctacgacgtacgcgagtgggatatacccgatggttacctgtgcccgcccatccccggtcgcgccgactacctgcactacctggccgacctgctcggcaccagccacgatggcctgattccacgcggtcccggcctgcgtgcgctggacgtcggaaccggagccaactgcatctacccgctgctcggccaccacgaatacggctggcgcttcgtcggcgccgacatcgacccgcaatcgctggcctcggccgctgcgatcctcgccgccaacccacgcttcgccgctgccatcgagttgcgccggcagcctgatcgcaggcagatattccagggcctgatcggcgtcgatgagcgcttcgacatgaccctctgcaacccgcccttccacgcctcgctggacgaagccacgcgcggcagccggcgcaagtggaagaacctcggcaagctcgacccgacccgtaccctgccgctactgaactttggcggccagggcgccgagctgtactgcgagggcggcgaagcggccttcctggccggcatggccgaggaaagccgggcgttcgccacgcaggtgttctggttcaccaccctggtatccaaggcgagcaacctgccgaacctccaggagcgcctgaagacgttgggcgccagcgatatccgcgtggtggacatggcccagggacagaagcagagccgcttcgtcgcctggacctacctcgacaagaagcagcgccgggcctggcgcaaggagcgttggacagcagccctcctggaaccactgggcgaatag

SEQ ID NO: 348116 - DNA, 351 bp, Pseudomonas aeruginosa
atgaatccactctaccgcgccgccatccaccagctttttctcgctctcgatctcccgacgcccaatgacgaggagagcgtactcagcctgcaggtgggcccgcatctctgccatctggcagaacatccgaccgatcacctgttgatgttcacccgcctggaaggacaaggagacgctacggccagcgagcagaacctgttcagccaggacccttgcaagccgatcctgggccgcgaccccgaaagcggcgaacggctgctctggaaccgccagcccttgcagttgctggacagggcccagatccaccatcaactcgaacaactggtcgccgccgccgaagagctacgctga

SEQ ID NO: 348117 - DNA, 123 bp, Pseudomonas aeruginosa; identical to SEQ ID NO: 319710

SEQ ID NO: 348118 - DNA, 612 bp, Pseudomonas aeruginosa
atgcaactgatcggtatgctggattcgccttttgtgcgccgggtcgccatcgccctgcgcctgctggacctgccctacgagcaccggccgctgtcggtgttccgcaatttccaggcgttcagcctgttcaacccgatggtcaaggcgcccacgctggtgctggacgatggcaccgtgctgatggactccagcctgatcctcgattacctggagtgcctggccggccgcgaacgcagtctgctgccgcaacggccgcaggcccgtgcacgggcgttgagtctgatcggcgcggcgctggtggcctgcgagaaatccgtgcagatctactacgaactgaacctgcgtcccgaggaacgccgccacggcccctggctggagcgggtggaggggcagttgctggcggcctacgactggctggaggcagcgctgcgccaggagccgctggcacgcgacggtggcatcgagctggtcggggtgaccgtcgcggtggcctggcgcttcagccaactggtggtcgcggagcgggtcgccgccagcgaatacccggaactggcaagctattcggattatgcggaggggttgccggtgttcctcgagacgccgccggtctga

SEQ ID NO: 348119 - DNA, 897 bp, Pseudomonas aeruginosa
atgagcgacctccctcccctcaccgccctgcgcagcttcgaagcggtcgcccggctcggcagcatcagccaggccgccagcgagctgcacgtcacccactcagcgatcagccagcagatcaagctgctggaaaacctcctcggcctggccctgttcgtccgcgaggggcgcggcctgcgcctgagcgagaacggccggttctacgccctgcaggtacgcgcctcgctgggcgagatcgccgacgccacgcgggtggtgcgggcgcgtccacgggagggtgagctggtggtcacggtgatgccgtccttcggcctgaactggctgctgccgcgcctgccgcgctttcgcgagcgccatccgcactgtcgcgtgcggctggtcgccagtcttgacgtgcagaacctgcgccagggcctggccgacctcggcgtacgcatcggcaagggcgactgggaaggggtcggtcgggaacgcctgttcgacgacgagttgctgatggtcgccgcgcccgacttcaacggcggccgcctgccgcgcacgccgagcgagatcgtcgcctgccctacactgcgctccaccgaatcctgggcgctctggtgccagcgcgccggcgtggcggaaccgcagcacggactgctgatcaatgactcgaacctgctgctggaagccgtgcgcctgggccagggcatcgccctggagcgtcgcagcctggtcgccggcgccctcgccgagggccgcctggtgcaactgggcgacatccgcgtgccctacccctatccctactggctggtctggccgcagcgcgagccgccgagcgaccgccaccaggccttcgccgactggctgcgcgaggaggcccggcgctaccaggccgagcaaccgccgctcagcgaatga

SEQ ID NO: 348120 - DNA, 543 bp, Pseudomonas aeruginosa; identical to SEQ ID NO: 319713

SEQ ID NO: 348121 - DNA, 471 bp, Pseudomonas aeruginosa
atgaatatcagcctgcatttcgaatcgcgcctgcaggccagccccgaacagctctggcggtggatcacctcggtggacgggatactccgcgagatacgcccgttgctgagcatgagcgtaccgcccggtatccgcagcctcgaagacctggaggtggtgccccggcgcccgctgttccgcagccacatgcgcctgttcggcttgctgccgctgggcacttcgcaactgaccctgctggagttgacgcccggccgcggcttcatcgaacagtcgccgatgaccggcatgcgcctctggcgccacgagcgacgcatcctgccgacaccgggcgaggccggggaatgcctgctggtcgaccagttgaccgtgcgcccgctattcgccgccggactggtacgctggttcctcacccgcatcttccggcatcgccaccgggtgctctgccggcagttccgcacggaccgccggtga

SEQ ID NO: 348122 - DNA, 1356 bp, Pseudomonas aeruginosa; identical to SEQ ID NO: 323807

SEQ ID NO: 348123 - DNA, 339 bp, Pseudomonas aeruginosa; identical to SEQ ID NO: 343272

SEQ ID NO: 348124 - DNA, 693 bp, Pseudomonas aeruginosa
atgaaaaataagcagaaaaaagaacttatagagtcagcgcgccgatttattgaggcagaaggagaagggattctaacaagctacgaagagtcatcaaagctacttctttgctggttggaagtattgcgaacccattttttgaccaaaacagctgacaaactgctttttgccgtatcctcatcggttcgtgaggcggctgctctctctgccttgggacttgttagaccagctttgttttctctgcgcgcgcaagccgacttgctactaagttggctctactttaaggatcaccctatagagtatgataacttgtgtagaactggcgatggttttgttttaaagaaagaggtattgaaatatttgactgattattatcctggcttcagtgagcgtcttggtgtcctaaacgcgacagcaacacgatccgaactagatgtgtatcgcctactgtcagctcacgttcattcacaaagtccgtttgtaatagctgaagttaaagaactcaaagacatcgttcgccccaaagaaatttcaattcaatgcgctcggctacagaaagacgtcggggaatatttaaatgatattctactctctgttggacttctcagcgaggcagcaactccagagacaataagtttatcattgattggaaggctgaagacgcaaggacagcgctccgtaatgtttaagtag

SEQ ID NO: 348125 - DNA, 1113 bp, Pseudomonas aeruginosa
atgaactggcatatcacctatggctcggtttgcagcggcatcgaggccgcgagcgtggcctggcacatgctggggtttcgcgccagttggttcgccgagatcgaacccttcccgtccgccgtactggcccaacgctggccggcggtacccaacctgggcgacatgaccaagctcgcccgcgaggtgctgctgggaatcatcgccgcgccgctgatcctggtgggcggcacgccgtgccaggacttctccgtagccggtatgcgcgccggcctggccggcgagcgcggcgccctgacaatgaaattcgtggagctcgcagatgcaattgaccatgttcgaccagacggagacgagtgcgtcgttgtctgggaaaacgtccccggcgtcctgtccgacaaaggcaacgcgttcggcaacttcctcgcagccctggtgggcgaatccgaagcgctggagccgtcagggccccgatggacgaacgctggttgtgtgtatggaccccgccgagcagccgcatggcgggttctggatgcccaatatttcggactggcccaacgacgcaagcgtgtgttcgttgtcgcaagtgctcgagcagacttcgatcccgcagcggtacttcttgagcgcgaaggcctgcgcagggatcatccgccgcgccgaggcgaggggcaagaccttgccggacgcgctcctttcggccctgcgctccacgccaacgccggtggccaggttgcggtctgcatcactggcgacatcactcacaccctgaaggcggaaggcttcgacgccagcgaggatggaactggccgcggccaaccaatcgttgccgatgtcgcgccgacgctccgctccgtcaacttccgcagccacagcaacccggccacgcaggccgacagcttggtgatcgcctccgcagtacggcgcctcactccgcgcgaatgcgagcgcctgcagggattccccgacgactacaccctcatcccgtggcgcgggaagcccgctgaggaatgccctgacggacctcgctacaaggccatcggcaacagcaaagcagtgcctgttgtgcgctggatcggacggcgactactgcaacaactggagagaaccgcatga

SEQ ID NO: 348126 - DNA, 219 bp, Pseudomonas aeruginosa
atgatcaccgccaaggaagccgacgctctcgccgatcacgccctgggccagtacttccgggcctgcggctgcacaacgccggaggacgtccggaaggccggtgagatggtcatcagcaaagcagcgcgcgggatcgagaagtactgcggcaccgagaaggccgtcgacgttctccagcgcacctggttgcacatcgagccgccgcggagggggtcatga

SEQ ID NO: 348127 - DNA, 600 bp, Pseudomonas aeruginosa
atgacgagcctttgcccatctgccaacaccagcggaacggcgccgcttcctcgctcgcgcaggcgcgctcgaatcgtcgtgacgacactggccgcctgcggcttcgctgcgctggcctgggcgtccttcgtatcgccgctgccgcgcctgacctacaacccgtccgacagcgtggcggtcggctggtatcgcgtcgatcctctcgaccaccgggccggctcgctgccacgtccgttgtccgtggacagcatcgtgctcgtcccgctgcccgcggaggccgccgtgctggctgcgcaacgcggctacctgccgatgcgcgtgccgctgctcaagcgcatcggcgccatcgcgccgcaggaggtgtgtatcgcgggcggcatcgtccgcatcgacggcgtgccttcggccgccgtgctgcgtgccgaccggctgggccgtccgctgccatccttgcagctttgccgccgcctcgcaccgggtgagctgttcctgttgagcgtgaccaatccggcgtcgttcgacagccggtatttcggcccggttgctgtatccaccgtgctcggtgttgcgcgtccggtctggctggagacacgccgatga

SEQ ID NO: 348128 - DNA, 759 bp, Pseudomonas aeruginosa
atggccgatcgaagcgtcgattcttggtatcccaccgctgcgtatctctattcgttgcacctggacggtcccgcactcgcctgggagtatctgcgccgccatcccaactaccggcgcgactggctgcgccgtcgccagcagccggaggccgcgcacgcctgggggctgcgcctgctggaagacccgacgctggatgcgcgtgacgcgcatccagcctggttccctgaccatgccgccgtgctccagctctaccctgatgccgacccaccgctgcaagcacacgccttcgagttctggtgcatccccggtcacaaacacctggttcacgacggcaagcgcctcttactgacggcgcgctggcccggctgctgcgtgaggctcgcactggcgccgggcttggtcgacggtcttgcctacgtctatgccgttcgcgcgggcgccgtgccttgcgcaagccatcgcacgataacggccgagttggacaagctggcgacgctgaatgcgacggccgcgcctgcggcagcggcccgtgcgcggcccacacccgccgcgctgctggaactgcacaccttgcaggcgctcgacgcgaccctcgcgggcgcgtccttgcgcgaaatcgccgaagggctgttcggcaccgaagccgtggccgccggttggtatgccgacggtggcctgcgctcgcgcgtgcgccgcctcgtgcggcgcggccaaacgctgatgcgcggcggctaccgccgccttgcacagctcgattga

SEQ ID NO: 348129 - DNA, 351 bp, Pseudomonas aeruginosa
gtgaaccagccacttcttaccaccgaacaacgtacgcaactgctcgcggccgggaaggcgcgcgcggccggccatagcatcgacccgttgcctgtcgtgcggctgttcacgccggacgcgcacgcgacctggctgctggttgcgctcgatcccgccgatggtgataccgcctggggcttgatcgacctcggcatcggaatgccgacgctggggacggtcaagctgtccgatctggctggcatcgtcgggccgcgtcagcggcccatccggcgcgacctgtatttccgcgccacccggccgctatcggagtacgtgcaactcgcgcagcgcgacggctccatcccggattga

SEQ ID NO: 348130 - DNA, 828 bp, Pseudomonas aeruginosa
atgcaactcgcatcccgtttcgcttcccgctcccccatgctgcgcgccgatcatcccttgtcggatgaccagatacaccgcgtggccccctccatctttgccgaggacaagcacgacagccgttccgcgcggtacagctacatccccaccgccgccgtgctgaccgagcttcgcaaggaaggttttcaacccttcatggtctgccagacccgcgtgcgcgacgaaggcaagcgcgcgcacacgaaacacatgatccggctgcgccatgccagccagatcgacggcagcaccgccaacgaaatcattctgctgaactcgcacgacggcaccagcagctaccagatgctggcgggcatgttccgcttcgtgtgctgcaacggcttggtctgcggcgacaccgtggcggacgtgcgcgtgcaccacaaaggcgacgtagccgggcacgtcatcgaaggcgcgtatgaagtcttgcacggcttcgagcgtgcgcaagcctcccgcgatgccatgcaggccatcacgctggacaacggcgaggccgaagtcttcgcccgcgccgcgctcgccctcaagtacgacgacccggacaagcccgcgccgatcacggaaagccaagtgctggccccgcgccggttcgatgaccgccgccccgatctgtggagcgtgttcaaccgaacgcaagagaacttgacgcaaggcggactgatgggccgcagcgccaacggacgccgccagcgcacgcgccccgtgcagggcatcgaccagaacgtgcgcctgaaccgcgccctgtggctgctggccgatggcatgcgccagttgaaagcctga

SEQ ID NO: 348131 - DNA, 396 bp, Pseudomonas aeruginosa
atgaacgacaaatcgcatgtttcgctggaacgccgtgtctgcctggtctgcggcactccttttgataccggcagcatcctgctcgacaagcacctgcgcgcgagcatggagcgctacacgacgacgggctggggcctgtgcgccgaacaccagaagctgttcgacgagggcttcgtcgcgctggtcgaatgcgaccctgagcgcagcggcaagccgtcgggcgcggatcgcttgaagccgagtgaggcgtatcgcacgggccgcctggcgcacctgaaacgcaaaaccttcgccgccatgttcaatgtgcagctcgcggccgatcaggtttgcgtcttcgtcgaacccggcatcatcgagcgcattcaggcgatggtgtcgccggcgtcgagttga

SEQ ID NO: 348132 - DNA, 696 bp, Pseudomonas aeruginosa
atgaacgctacagaatctgcccaacaaacccgtctgctgacgccggccgaactggccgcttgcatcaagctgttccgtgagatgcggcaatggtcacaggagcaactggccgccatttccggcctcaacgtgcggacgatccagcgagtcgaacaaggtttgtccgctagtcttgatacgcgccgcgcccttgccaacgcgttcgagttcgaggacatcgacgctctcaacaaaccgttcactatcccgacggacgaggaattcaaagcggcgaaagagaagttcgaccgggagcacgttaccctgacggccatcccgctgacgaccggcaagcagttggccaggttggccgagtcctgcacgatggacttgtcagagccagccttcgagctgacccgcgaagcggacgaggcattcgccatgctggtggattacttccgtgagtaccgggactgcgccgatgtctacaacgaaacacagaagttcgacgtgtacgacgagatgcaatcccacatcgacgcgctccaggcgctcggtgtctcactgcgctacgccacgcgcaaggtacaagtgaagtggggatcagacccggacagcaagccgatggccgccacggtgctgtatgtggtcggctttccgctcggcaaggaacccgagcagtttgcaacgccaaaatctgccggcatccgtctgtag

SEQ ID NO: 348133 - DNA, 1491 bp, Pseudomonas aeruginosa
atggacacccaacagctcaaggtgttcgcggagcgcttgcgcgcctacctcgaacgccacaacctcaccctcaaacacggccagacgctcgatctgatcgcagccatccccggcctgcgcaactggcccgaagtcaacgccttccctgcacgggtatctgctgcgcaatgggacagccactcggccgaccgactcgtcaaacgcatcgggaaactgcatgcgctgatcctgccggtcgatgaactgcaccgggcgctggatccgatgagcgccaacgtcctgaaggtctggcccgatggtcccgtgcccggcgtgtatgtgacgacttcgcaggaggccatcgacgcggccatcgccaagtacgaagccgccaccgacggcgcgctgctctacgcagaggacgccggccgttcttcggacgctgccatcgacctgggcgagcacggtctgttctcgcgcggcatggatcgactgcccagcggcacgctagtcgtagtcggccccgtgccgctgacgcaggaatcctggagcgacaacaaggaccgcctgaacaccgccgccaatctcgcccactcgtcctcactgcgcgtcgttgtcctggcggagacgccgctgcccgagaatctgcacagcgacatcgacctgctgctgcggcccgacgatgaaggtctcgacagcgaacccgttgacgtgctcggcattgttaccgagtcgggcgatctccaagtggtgcagccgttcgttcagcgccgcgcggcgccggcagcgcagcacttcacgaccacccagcgtttgccgcaagtgctcgaagatgcactgcgactggcggtgacaaagcgcccctatgggatcatcgtgctcggcatcacgcctggcgatacacagcgcaaggcgctggtcgaagcggtgttgccgctgaccgaacacgcgggaccagccgttcgcatacagccgacgttccgccctggctacggcaaagacgataccccgttgtcgccgcatttcgaggggcttccagtcttcccttccatcgagagtgcctatgcgcatggctaccgccgcatggtgatcgagtcctcccaccacggtgccggcgaagcaatcgctcggcatgcgcatgaggtgtgcttcttgattcgctccttctcgaccgaagttgctggcgcctggatgagcagcctgccggctcagatcgacaagcccaatgcgctcgatgtcgtcacggctgtcctgtgcgccgccgacgtgccggccaaagcggagacagtgacgatctgcgatgcctttgtcggcggtgcgtcaccggcacctacggatgatgacatcgacaggctggcggaacacatggaggcacatcgcgctgtgcggtggcaggagcagttggacgcattgttggtcgcccgaaaagtgacacccgcgcaagtcaagaaggccctgcgtcgccacaacgtggacgactacttggcctcacgcaaagcggcacaggtgtag

SEQ ID NO: 348134 - DNA, 819 bp, Pseudomonas aeruginosa
atgaaggcccatccatttactcgccccaccattgtcgccgcggtcgaatttctcgggcaaatgctgacgcaggcgaagttcgatcaactcgcggtgcggctggggctggacgatgaaatcccccaaggaacggcaaagagcgtgaccgcgaagagtgctttgctggcgcgcattgtcaaccaacgcgcgacgcagatcgtcagcaccttggacgggcctgtgactctggccgaagctgcggtacgcgaaggggttggaatgaccgtgccacagtacgcgaaggccgagcaggagcgttttcttcgggggttggcgctcgacggctacgttgtctcctgggatggggacgcacgaacgccattgctgcgcgcagcgctgcctggcgaagtggatcttcctgcggccgatgacgaagttcaccaattgctgaagcagttcggattcaacgtgccgctggggcacttagaccaagccatcgacgcgcacacgcgcggcgactgggcagcggcgaacagccagatacgcacgtttctggaaggcttgctcagcgacatcgcctcgcacattgatccgcagaagtctgccgagctggcttcgagcgagaaccgccgcgcctggctggcggagcgcggtttcctgtcgagcagcaggaatgaatggaccaacgatggaaagaactatttgaacggcttgttcaagatgctgcataccgatggctcgcaccccggcctctcggacgaagatcacagtacgttccgactgcaccttggacttatcactggccggacgttgcttcgccgccttaacaacggtcgctga

SEQ ID NO: 348135 - DNA, 1200 bp, Pseudomonas aeruginosa
atggccaagatcaagctcaccaagtccgcagtcgatgcggcaaaacccgaagcgcaagccatcgagctgcgcgacaccctcgttcccggcttcctgtgcaagattacaccggccggtcgcaaggtcttcatgctccagtaccgcacgaatgccggcgagcggcgcaagccggcgttgggcatgtacggagaactgaccgtcgaacaagcccgctcgctggcgcagaactggctggccgaggttcgccggggcggtgatcccggcgctgccaaagccgaggcgcgcaaagcacccaccgttgaagagttgtgcaagaagttcatggaggactactccaagaagcgcaacaagcccagcacccgcgtcggctatcaaggcgtcatcaaccgcaacatcattccgctcctggggcgcaggaaggttcaggacgtgaagcggcccgacatcgcggggctgatggaaaagctctcgtacaagccgaccgaagcgaacaaggtcttcagcgtcttgcgcaagatgttcaacctggccgaagtgtggggcttccgcccggacggcaccaatccttgccgtcatgtcccgatgttccctgccggtaagtcaacccacctcatcagcgacgaggacatgggcaagctgttccggcagctcgacaagatcgaggccgaagggtcggagaactacgtcatccctctggcgatccgcctgcaattcgagttcgctggccgccgctccgaaatcgtcacgctcgaatgggaatgggtcgatctggaaaaccgtcgcgtcgtctggcccgacagcaagaccggcggcatgtccaagcccatgagcgaggaagcctaccggctgctctcgatggcgccgcgcgaagaaggcgctcgctacgtgctgccgtcgccacgccatccggggcaacacctgaccacgggcgagtattacggcggatggtgccgcgcgctcaaggcggcgggcgcgacgcacgtgggtacgcacggcatccgccatcgctcggcgaccgacattgccaactcgggtatcccggtgaaggtcggcatggcactgacggcgcacaagaccgtggtgatgttcatgcgctacgtccacaccgaggatgatccggtgcgcaaggcggccgagctggtggcgaaccggcgcaagacgattaccggcgcctcgtgctctacggaggtggcggcatga

SEQ ID NO: 348136 - DNA, 597 bp, Pseudomonas aeruginosa; identical to SEQ ID NO: 341575

SEQ ID NO: 348137 - DNA, 630 bp, Pseudomonas aeruginosa
atgaacatcctccggctccaaccgatacaactcctcatccggctccatgcacagccggcatccgagtctcgtataaaaatccaccgtgttctgcgacggcgtagccgaaacgtagagcgcgctggcgccgaggtggcgggcctgggtggcggcgaggtggaagaggtgggcgccgaggccgcggcggcggtaggcgtggctgaggtggaggaacttcagttgcagccagtcgcgctcggggccgaggcggcgcgggtcgaggactaccgcgccgatcaggcggccttggtcgaacaggccgaggaaccagccgccgcggtcgaagcagtcgagcaggatcggcgtgtagtgctcggcctcgccctccggccagccgcgcatgtcgtagaactcggggcgcagcaccagttggccggcctcgacggaatacaggtgttcgatcacttcgctgcggtcgatctcccagaccagggggatttcgtcgcggcgcagcaggcgttcttcggtcatcgtggtttccttgcgctaaggccgtacatcagcggcaggcgcggacgatcggcgggcggcagcatgcgtccgccgccgccgtcgcgcatgccgtcgaagccggcccagccgttggcgtag

SEQ ID NO: 348138 - DNA, 654 bp, Pseudomonas aeruginosa
atggaagagtactggaccagactggagcgttggctgataatgaaattttcattcctaattccagaagaaataaagaacgcaacgctggcgaataaagatcttacatctgtttcggagatctctgcaggccatagagcttttttgctatttaactctatagtaatggcttcgggcgcctctgttggtttctggcttggtgctctaatagatgagggtatacttgaaactgttataacttttagtggggtgattatagggtttgttattacggcgatgttgttttctggtaggagcgcatttgctattggcttgaacctccagcaagtaaaggtttaccggattaagactaagtatatgctgctttcgcaggcgaatactctattttcttttttgttctgtttggggttctgtattgctactctttttgcgttgaagctaaaggcggagtctagctctttgattttaagctctgtgtctttctcttttttgtttctgggtgggtacaggactcttcttctgccatatcaaatttatgaggttcatagtttttccctagataatttagtggatgagattgcggactctgagcgggatcaactgcgctcggatggggaggctagacttagagcgttagaggctggcagacctgagtga

SEQ ID NO: 348139 - DNA, 180 bp, Pseudomonas aeruginosa
atgaattcgcaacacaccgataccgccaagcgccgcgtgatccccttcaatacgcagcagcacaccggtggcgccatcatcgacgcccagggccgggagatcccgatcaccgaggtgatgatccagcgcgcctgccgcgaactggacaggtccctggagcaggaacagaagcaggcctga

SEQ ID NO: 348140 - DNA, 597 bp, Pseudomonas aeruginosa
atggacaaggacgtatccggcgcgctgcgccgcctgttgctgctcgccatgctcggactgccgctggtggcggccgctgcggtcgaaccgcagcgactggtggatgcggcgcgtgcccaggtgggcgtgaccctgggctacgacccggcctaccggcaactggactatccgggcggcgacgtgccgctgcagaccggggtctgcaccgacgtggtggtccgtgcgctgcgcggacaggggctggatctacagaaggcggtgcacgaggacatgcgtcgccacttcgcggcctacccgcagcaatggggaatgaaaggcaccgaccgcaacatcgatcaccgccgcgtaccgaacctgatgacctggttcagccgccagggcctggccctggcgcctagccgcgacgcttccgcctaccgggccggagacatagtcgcctggcgcctggacaacggcctgctgcatatcggcgtgctttccgatcgcaggctggagggcaggccgctggtgttgcacaacatcggtgccggcgtgcgggaagaggacctgctgttccgctaccaggtcatcggccactaccgcttcccgcagggctga

SEQ ID NO: 348141 - DNA, 282 bp, Pseudomonas aeruginosa
atgttcaaggtcaacgaatacttcgacggcaccgtcaaatccatcgccttcgacatgaccgccggcccggccaccatcggcgtgatggcggcaggcgaatacgagttcggcaccagccagttggagatcatgcatgtggtcgccggcgcgctgacggtcaagctgccgggcagcgacgagtggcaggaatacgccagcggcagccagttcaccgtcccggcgaacagcaagttccagctcaaggtcgcccaggacaccgcctacctctgcgaatatcgctga

SEQ ID NO: 348142 - DNA, 552 bp, Pseudomonas aeruginosa; identical to SEQ ID NO: 333787

SEQ ID NO: 348143 - DNA, 867 bp, Pseudomonas aeruginosa; identical to SEQ ID NO: 319763

SEQ ID NO: 348144 - DNA, 342 bp, Pseudomonas aeruginosa; identical to SEQ ID NO: 319764

SEQ ID NO: 348145 - DNA, 756 bp, Pseudomonas aeruginosa
atgcggttgcacaaacgctcgctggtctgggggctcgccttgagcgggctggccgtcgtgctggcggccgcctggtgggcgagccaggcgtcgcgggagccggctctgtggagcgagctgcgggtgccgccggcgtttgccatcccgcgcgatttcgacctgggcgaataccgcttgagctggggcggcaagagcctcgccctgtcagtggcaggtagcgctcggccgccgttgtgggagagcgagggcggttttctcggggccgggcgggaaagcgccggtcgcctgcagttgcgctgccaggagcagagcctggagagcttcgaactggtcggtcgacgcttgtccctgaaggggcacctgcgctgcgccgatggccggctcagcgcctacgagctgtcgttcgagccgcgccagggcggcgtggaggtgcgcgtcgcgctggcggacagcgagctgaaccgggtcgccctgtcctggcggcgtggagcgggggagcgcttgtccggtatcgtcgatgacgaggcggaaggtcgctcctgggtcttgccggccggggtcgccggctactggagttccgctggcaacgccttcctcggccactcgacggcggcgcaatccctcgacctgcgcgagccgggccgcgtgcaatggcgggcagcgacggagtcggccagggcctggctgttcgctgccggcaaccgcgagcagtggcagcttcgcagcgcgcgtctcgaggcggaaacgcgccgctga

SEQ ID NO: 348146 - DNA, 255 bp, Pseudomonas aeruginosa; identical to SEQ ID NO: 319766

SEQ ID NO: 348147 - DNA, 609 bp, Pseudomonas aeruginosa; identical to SEQ ID NO: 333786

SEQ ID NO: 348148 - DNA, 1287 bp, Pseudomonas aeruginosa
atggctgacaaaaaagcgcagttgatcatcgagggctcagcccccgtcgaactgcccgtcctatccggtaccatgggtcccgatgtagtggatgtacggggcctcaccgccacgggccacttcaccttcgatcctggcttcatgtcgaccgcctcctgcgagtcgaagatcacctatatcgacggcgacaaaggcgtcctccttcatcgcggctaccccatcgagcaactggcagagaaatccgactacctggaaacctgctacctgctgctgaacggcgagctgcccaccgccgcgcagaaggaacagttcgtcggcaccatcaagaaccacaccatggttcacgagcagttgaagaccttcttcaacggcttccgccgcgacgcccatccgatggccgtgatgtgcggcgtgatcggcgccctctcggccttctaccacgactccctggacatcaataacccgaagcatcgcgaagtctccgcgcatcgcctgatcgccaagatgccgaccatcgccgccatggtgtacaagtactccaagggcgagccgatgatgtatccgcgtaacgacctgaactacgcggaaaacttcctccacatgatgttcaacaccccctgcgagaccaagccgatcagccccgtgctggccaaggccatggaccgcatcttcattctccacgccgaccacgagcagaacgcctccacctccacggtgcgtctggccggctcctccggcgccaatccgttcgcctgcatcgcctccggcatcgccgccctgtggggaccggcccatggcggcgcgaacgaagcggtgctgcgcatgctcgacgagatcggcgacgtgtccaacatcgacaagttcgtcgagaaggccaaggacaagaacgatccgttcaagctgatgggcttcggccatcgtgtctacaagaacttcgacccgcgcgccaaggtcatgaagcagacctgcgacgaggtcctccaggagctgggcatcaacgacccgcaactggaactggcgatgaagctggaagaaatcgcccgccacgacccctacttcgtggaacgcaacctgtacccgaacgtcgacttctactcggggatcatcctcaaggcgatcggcattccgaccagcatgttcaccgtgatcttcgccctggcacgtaccgtcggctggatctcgcactggcaggaaatgctctccggcccctacaagatcggccgcccgcgccagctctataccggccacacccagcgcgacttcaccgccctcaaggatcgcggctga

SEQ ID NO: 348149 - DNA, 387 bp, Pseudomonas aeruginosa; identical to SEQ ID NO: 319769

SEQ ID NO: 348150 - DNA, 375 bp, Pseudomonas aeruginosa; identical to SEQ ID NO: 319770

SEQ ID NO: 348151 - DNA, 1773 bp, Pseudomonas aeruginosa
atggctagcattcgtacactttcctttgacgccatcatcgtcggtggcggtggcgccggcatgcgtgccgcgctgcaactggcccagggcggccacaagaccgccgtggtgaccaaggtcttcccgacccgttcccacaccgtatccgcacagggtggcatcacctgcgcgatcgcttcggccgacccgaacgacgattggcgttggcacatgtacgacaccgtcaagggctccgactacatcggtgaccaggacgcgatcgaatacatgtgttccgtcggccccgaggccgtgttcgagctcgagcacatgggcctgccgttctcccgtaccgaaaccggccgcatctaccagcgtccgttcggcggccagtccaaggacttcggcaagggtggccaggccgcccgtacctgcgccgccgccgaccgtaccggccacgcgctgctgcacaccctgtaccaggccaacctgaagaatggcacttcgttcctcaacgagtggtacgcggtcgacctggtgaagaaccaggacggcgcggtggtcggcatcatcgccatctgcatcgagaccggcgagaccgtctacatccgttccaaggccgtggtcctggccactggcggtgccggccgtatctacgcctccaccaccaacgcgctgatcaacaccggtgacggcgtgggcatggccctgcgtgccggcgtgccggtgcaggacatcgagatgtggcagttccacccgaccggcatcgccggcgccggtgtactggtcaccgaaggttgccgcggcgaaggcggttacctgatcaacgcccacggcgagcgcttcatggagcgttatgcgccgaacgcgaaggacctggccggccgcgacgtagtcgcccgttccatggtcaaggaagtcctggccggcaacggcgtgggcccgaacaaggaccacgtgctgctgaagctcgaccacctcggcgaggaagtcctgcacagccgcctgcccggcatctgcgaactgtccaagaccttcgcccacgtcgacccggtcgttgcgccgatcccggtgatcccgacctgccactacatgatgggtggcgttgctaccaacatccatggccaggccatcacccaggacgccaacggcaacgaccagatcgtcgaaggcctgttcgccgtgggcgaagtggcctgcgtatcggtacacggcgccaaccgcctgggcggcaactcgctgctcgacctggtggtattcggccgtgccgccggtctgcacctggaaaaagcgctgaaagagggcatcgacgcccgcggcgcttccgagagcgacctggaagcctccttcaagcgcctgaacggcgtgaacgagcgcaccagcggcgaagaagtcgctccgctcaagcgcgagctgcaaagctgcatgcagaactacttcggtgtgttccgcaccggcgagtacatgcagaagggcatcgcccagctggccgacctgcgcgagcgtatcgccaacgtcaagatcaacgacaagagccaggcattcaacaccgcgcgcatcgaagcgctggaactgcaaaacctcctcgaggtggccgaggccaccgcgatcgcggccgagcaccgcaaggagtcccgtggcgcccacgcccgtgaagacttcgaggagcgcgacgacgagaactggctgtgccacaccctgtacttcccgggtgagaagcgcgtatccaagcgttccgtcaacttcgcgccgaagaccgttccggcattcgaacccaaggttcggacttactaa

SEQ ID NO: 348152 - DNA, 708 bp, Pseudomonas aeruginosa
atgttgcaagtgagtgtttatcgttacaaccccgacaaagatgctgcgccgtacatgcaggatttccaggtcgacaccaacggcaaggacgtgatggtcctcgacgtgctggcgctgatcaaggaacaggacgagggcttctcctaccgtcgttcctgccgtgaaggcgtctgcggctccgatggcatgaacatcaacggcaagaacggcctggcctgcatcaccccgctgtcggccgccggcctgaagggcggcaagctggtgatccgtccgctgcccggcctgccggtcattcgtgacctggtcgtggacatgagcatcttctacaagcaatacgagaaggtgaagccgttcctgcagaacgatacgccggccccggccatcgagcgtctgcagaccccggaagagcgcgagaagctggacggtctgtacgagtgcatcctgtgcgcctgctgctcgacctcctgcccgtccttctggtggaaccccgacaagttcctcggtccggccgcactgctgcaagcctatcgtttcctggccgacagccgtgacaccaagaccgaagagcgcctggcttcgctggacgacccgttcagtgtgttccgctgccgcggaatcatgaactgcgtgaacgtttgcccgaagggtctgaacccgaccaaggcgatcggccacgtgcgtaatatgctgctgcagagcggaacctga

SEQ ID NO: 348153 - DNA, 2832 bp, Pseudomonas aeruginosa
atgcacgaaagcgtaatgcagcggatgtggaacagtgcccatctatccggtggtaacgctgcctacgtcgaagagctctacgagctctacctgcacgaccctaacgctgtgccagaagagtggcgcacgtatttccagaagcttcccgccgatggcaatcccgcccccgacgtctcgcactccacagtgcgcgatcatttcgtcctgctggccaagaaccagcgccgtgcccagccggtttccgccggtagcgtgagcagcgagcacgagaagaagcaggtcgaagtccttcgtctcattcacgcttaccgtctccgcggccaccaggcttccaccctcgacccgctcggcctgtggcagcgtcccgcgcctgccgacctgtcgatcgaccactacggtctgacgggtgccgacctggacaccactttccgcaccggtgagctttacatcggcaaggaagaggcgaccctgcgtgaaatcgtcgacagcctgaagagcacctactgcggtaccttcggcgccgagttcatgcacatcgtcgattccgagcagcgcaagtggttcctccagcgcctggaaagcgtgcgtggccgtcccggcttctccgccgaggcgcgtgcgcacctgctcgagcgcctgaccgcggccgaaggcctggagaagtacctgggcaccaagtacccgggcaccaagcgtttcggcctggaaggcggcgaaagcctgatcccgatggtcgacgagatcatccagcgctgcggttcctacggcgccaaggaaatcgtcatcggcatggcccaccgcggtcgcctgaacgtcctggtcaacaccctgggcaagaacccgcgcgacctgttcgacgagttcgaaggcaagaagatcgtcgagctgggctccggtgacgtgaagtaccaccagggcttctcctcgaacgtgatgaccagcggtggcgaagtccacctggcgctggcgttcaacccgtcgcacctggaaatcgtttccccggtggtcgagggttccgttcgtgctcgccaggaccgccgcaaggacagctccggcgacaaggtggtaccgatttccatccacggcgatgccgccttcgcgggccagggcgtggtcatggaaaccttccagatgtcgcagacccgcgcctacaagaccggtggcaccatccacctggtgatcaacaaccaggtcggtttcaccaccagccgccaggacgatgcgcgttccaccgagtacgccaccgacgtggcgaagatgattcaggcgccgatcttccacgtcaacggcgacgatcccgaagccgtgctgttcgtcacccagctggccgtcgactaccgcatgcagttcaagcgtgacgtagtcatcgacctggtctgctaccgtcgccgcggccacaacgaggcggacgagccgagcggcacccagccgctgatgtaccagcagatcgccaagcagcgtactacccgcgagctgtacgccgatgccctggtgaatgccggcgtgctcagcgccgagcaggttcagtcgaagatcgacgactaccgcgacgccctggacaacggcctgcacgtggtgaagagcctggtcaaggaacccaacaaggaactgttcgtcgactggcgtccgtacctgggtcatgcctggaccgcgcgtcacgacacccgcttcgacctgaagaccctgcaggaactgtccagcaagatgctggaagtgccggaaggcttcgtggttcagcgccaggtttcgaagatctacgaagatcgccagaagatggcggccggtggcctgccgatcaactggggcttcgccgagaccctggcctacgcgaccctgctgttcgaaggccatccggtacggatgaccggccaggacgtcggccgtggcaccttctcgcaccgtcacgcggtgctgcacaaccagaaggatgactcggtctacgtaccgctggccaatctgttcgacggccagccgcgcctggatatctacgattccttcctttcggaagaggccgtgctggcgttcgaatacggtttcgccaccaccacgccgaattcgctggtgatctgggaagcccagttcggcgacttcgccaacggcgcccaggtggtcatcgaccagttcatcaccagtggcgaaagcaaatggggccgactctgcggcctgaccatgctgctgccgcacggctatgaggggcagggcccggagcactcctccgcgcgcctggagcgctacctgcagctctgtgccgagcagaacatccaggtctgcgtgccgaccaccccggctcaggtctaccacatgcttcgccgtcaggtgatccgcccgctgcgcaagccgctggtggtgatgacgccgaagtccctgctgcgtcacaagctcgccatctcgaccctggaagatctggccaacggttccttccagaccgtgatcccggaaatcgacagcctggatccgaagaaggtcgaccgcgtcgtgctgtgcagcggcaaggtgtactacgacctgctggagaagcgtcgcgcggaaggccgcgaagataccgcgatcgtccgtatcgagcagctgtatccgttcccggaagacgacctggcggaagttctggctccgtacaagaacctcaagcacatcgtctggtgccaggaagagccgatgaaccagggcgcctggttctgcagccagcatcacatgcgtcgtgtcatcgccgcgcacaagaagggcctcaacctcgagtacgccggccgcgaaggctccgctgctccggcttgcggctacgcctcgatgcacgccgagcagcaggaaaaactgctgcaagacgcctttactgtttaa

SEQ ID NO: 348154 - DNA, 1230 bp, Pseudomonas aeruginosa
atggctatcgaaatcaaagccccaaccttcccggaatcggtcgccgacggcaccgtcgccacctggcacaagaagccgggcgaagcagtcaagcgcgacgaactgatcgtcgacatcgagaccgacaaggtggtcatcgaggttctcgccgaggctgacggcgtgctggccgagatcatcaagaacgaaggcgacaccgttctgagcaacgagctgctcggcaagctgaacgaaggcggcgccgccgctccggccgctccggctgccgctgcgcccgccgccgctccggctgcacaggccgccgctccggccgccgctggcggcgacgacgccatcctgtccccggccgcgcgcaagctggccgaggaagccggcatcgatccgaacagcatcgccggcaccggcaagggcggtcgcgtgaccaaggaagacgtggtcgctgcggtcgaagcgaagaagaacgccccggccgccccggccaagcctgccgccccggctgccgaggcgccgatcttcgccgccggcgaccgtgtcgagaagcgcgtgccgatgacccgcctgcgggccaaggtcgccgagcgcctggtcgaggcgcagtccgccatggccatgctgaccaccttcaacgaggtcaacatgaagccgatcatggacctgcgttcgaagtacaaggacctgttcgagaagaagcacaacggcgtgcgcctgggcttcatgtccttcttcgtcaaggccgccaccgaggcgctgaagcgcttcccgggggtcaacgcttccatcgacggcaacgacatcgtctaccacggctaccaggacatcggtgttgccgtttccagcgaccgcggcctggtggttccggtactgcgtaacgccgagttcatgagcctggccgagatcgagggcggcatcgccaacttcggcaagaaggcgaaggaaggcaagctgactatcgaagacatgaccggcggcaccttcaccatctccaacggtggcgtgttcggttccctgctgtcgaccccgatcgtcaacccgccgcagaccgccatcctcggcatgcacaagatccaggagcgcccgatggccgtgaacggccaagtggtgatcctgccgatgatgtacctggcgctgtcctacgaccaccgtctgatcgacggcaaggaagcggtgagcttcctggtggcgatcaaggacctgctggaagatccggctcgcctgctgctggacgtctga

SEQ ID NO: 348155 - DNA, 1437 bp, Pseudomonas aeruginosa
atgagccagaaattcgacgtggtagtgattggtgccggccccggcggttacgttgccgccatccgcgctgcccagctgggcctgaagaccgcctgcatcgagaagtacatcggcaaggaaggcaaggtggcgctcggcggtacctgcctgaacgttggctgcatcccgtccaaggcgctgctggacagctcctacaagtaccatgaggccaaagaggccttcaaagtccatggtatcgaagccaagggcgtcaccatcgacgttccggcgatggttgcgcgcaaggccaacatcgtcaagaacctgaccggcggcatcgctaccctgttcaaggccaacggcgtgacctccttcgaaggccacggcaagctgctggccaacaagcaggtggaagtgaccggtctggacggcaagacccaggtcctggaagccgagaacgtgatcatcgcttccggctcccgcccggtggagatcccgccggccccgctgaccgacgacatcatcgtcgactccaccggcgccctggaattccaggccgtgccgaagaagctgggtgtgatcggcgccggcgtcatcggtctggagctgggttcggtatgggcccgcctgggtgccgaggtgaccgtgctggaagccctggacaagttcctcccggctgccgacgagcagatcgccaaggaagccctgaaggtcctgaccaagcaaggcctgaacattcgcctgggtgcccgcgtgaccgcttcggaagtgaagaagaagcaggtcaccgtgaccttcaccgacgccaacggcgagcagaaggaaaccttcgacaagctgatcgtcgcggtcggccgtcgcccggtgaccaccgacctgctggccgccgacagcggcgtgaccctggacgagcgtggcttcatctacgtcgacgaccactgcaagaccagcgttccgggcgtcttcgccatcggtgacgtggttcgcggcgcgatgctcgcgcacaaggcctcggaagagggcgtgatggtcgccgagcgcatcgccggccacaaggcgcagatgaactacgacctgattccgtcggtcatctacacccacccggaaatcgcctgggtcggcaagaccgagcagaccctcaaggccgagggcgtcgaagtcaacgtcggcaccttcccgttcgccgccagcggtcgtgcgatggcggccaacgacaccaccggcctggtcaaggtcatcgccgatgcgaagaccgaccgcgtcctgggcgtccacgtgatcggcccgagcgccgccgagctggtacagcaaggcgcgatcggcatggaattcggcaccagcgccgaagacctgggcatgatggtcttctctcacccgacgctgtccgaagccctgcacgaagctgccctggcagtgaatggccatgccatccacatcgccaaccgcaagaagcgctga

SEQ ID NO: 348156 - DNA, 1167 bp, Pseudomonas aeruginosa; identical to SEQ ID NO: 319776

SEQ ID NO: 348157 - DNA, 888 bp, Pseudomonas aeruginosa
atgagcgtcctgatcaacaaagacaccaaagtcatctgccaaggcttcaccggtagccagggcaccttccactccgaacaggccatcgcctatggcaccaagatggtcggcggcgtgacccccggcaagggcggcaccacccacctcggcctgccggtgttcaataccgtcaaggaagccgtggaagccaccggcgccgaagcctcggtcatctacgttccggctccgttctgcaaggactcgatcctggaagcggcattcggcggcatcaagctgatcgtctgcatcaccgaaggcatcccgaccctcgacatgctggacgccaaggtcaagtgcgacgagctgggcgtacgcctgatcggcccgaactgcccgggcgtgatcactcccggcgagtgcaagatcggcatcatgccgggtcacatccacctgccgggcaaggtaggcatcgtgtcgcgttccggcaccctgacctacgaagccgtgaagcagaccaccgacgccggcttcggccagtccacctgcgtgggcatcggcggcgacccgatcccgggctccaacttcatcgacatcctgaagctgttccaggaagatccgcagaccgaagccatcgtcatgatcggcgagatcggcggttccgccgaagaagaagccgcggccttcatcaaggccaacgtgaccaagccggtggtgtcctacatcgctggtgtgactgcccctccgggcaaacgcatgggccacgccggcgccatcatctccggcggcaagggcaccgcggacgagaagttcgccgccctgcaggacgccggtgtgaagaccgtgcgttccctggccgacatcggcaaggccctggccgagctgaccggttgggaagtgaagaaggcctga

SEQ ID NO: 348158 - DNA, 1314 bp, Pseudomonas aeruginosa
atgactcatttgaaagggttcgacctgctcgcccttggcttcatgacgttcgcgctttttctcggcgcgggtaacatcatctttcctcccagtgccggcatggcggcgggcgaacacgtatggagcgcggctttcggcttcctccttaccggtgtcggcctgccgttgctgacggtggtcgccctggcccgggtcggaggcggtattggccgcctgacccagccgatcgggcggcgcgcgggagtggcgttcgccatcgccgtctatcttgccatcggcccgctgttcgccaccccgcgtacagccgtggtgtccttcgagatgggcgtcgcgcccttcaccggggacggcggcgtgccgttgctcatctataccgtcgcttacttctccgtggttctgttcctggtgctgaacccgggtcgccttgtcgaccgggtcggaaaggtcatcacgccggtgctgctgtcggccctgctggtccttggcggcgcggcgatcttcgcgccggcgggagagatcggcagcagttccggcgagtaccagagcgcgcccctggtgcagggcttcctgcagggctacctgaccatggataccctcggtgcgctggtcttcggtatcgtcatcgccaccgccattcgcgaccgcggcatcagcgacagccggctggtcacgcgctattccatgatcgctggggtcatcgccgccaccggcctgtccctggtctacctggcgctgttctatcttggcgccaccagccagggcatcgccggcgacgcccagaatggcgtacagatcctcaccgcctatgtgcagcagacctttggcgtttccggcagcctgttgctggcggtggtcatcaccctggcctgcctgaccacggcggtagggctgatcacggcgtgcggcgagttcttcagcgacctgctgccggtttcgtacaagacggtggtgatcgtgttctcgctgttcagcctgctggtcgccaaccagggactgacccagttgatcagcctttcggtaccggttctggtgggactctatccgctcgccatcgtgctgatcgccctgagcctgttcgaccggctctgggtgtcggccccgcgggtgttcgtgccggtgatgatcgtcgcgctgctcttcggcatcgtcgacgggctgggggcggccaagctgaacgggtgggtgccggacgtcttcgccaagcttccgctcgccgatcagagccttggctggctgctgccggtatccattgcgctggtcctggcagtcgtttgcgatcggctgctgggcaagccgcgcgaagcggtcgcctga

SEQ ID NO: 348159 - DNA, 765 bp, Pseudomonas aeruginosa; identical to SEQ ID NO: 347176

SEQ ID NO: 348160 - DNA, 237 bp, Pseudomonas aeruginosa; identical to SEQ ID NO: 319780

SEQ ID NO: 348161 - DNA, 474 bp, Pseudomonas aeruginosa
atgtcggaaaatcctctcctcgagcgcgcccggcgctttctctcggccttgcgtcattgccaggtgctggggttgacggtcgaggccgccgacgaaaaaggactgaccctgcgcctgccctacagccaggcgatcatcggcaacccggaaagcggggtcgtccacggcggcgcgatcaccaccctgatggacaccacctgtggtatttccacggtctgcgtgctgccggacttcgagatctgcccgacgctcgacctgcgcatcgactacatgcatcccgccgaaccgcacaaggatgtctatggcttcgccgagtgctaccgggtcacgccgaacgtgatcttcacccgcggcttcgcctaccaggacgatccgggccagcccatcgcccatgtcgtcggcgctttcatgcgcatgggcggttcggcccgcgccggggcggccaggccggccgcgcagggaggtgcggcatga

SEQ ID NO: 348162 - DNA, 447 bp, Pseudomonas aeruginosa
atgagcccgaccagcctcgagcaactggtccgcgacgcgcgtcggaacaacgactacagcccgctggtggagctgatcccgtacgccaagctgctcggcatcgaatgcctgcgcctgggcgacgacatggtcttccgcctgccggcgaacaaggacaacatcggcaacccgaccctgccggccatccatggcggcgtgatcgccggcttcatggagcatgcggcgatgttgcacctgctgaccttcatgagcattccgcacctgccgaagatcatcgatttctccatcgactacctgcgtgccgggcacttccgcgatacctacgcgcaatgccaggtctggcgccaggggcgacgggtggcgaacgtcgcgatcaacgcctggcagaccacccagggcgagcccatcgccactgcgcgggcgcatttcaaggtggacgagccgtga

SEQ ID NO: 348163 - DNA, 1233 bp, Pseudomonas aeruginosa
atggatgccttgctgattctgggcggcctgctgctgatggtcgccggctatatctgggtcatcgtcctggccttcggtaccggtctgctgtggggttacggcagccttttcccgccggtggcgctggcctatatcggcgtgcactggcgtacggcgcgcaagggcgtcgggctggccgcgctgggttgcatcccgctggtggtcggcctggcgctgctggccagtcacgacgctgcgcgactggaggcgatcctcagcctgcgctggctgaagccggaggccaggccgccggcggaactggccatcgcgctcagcggggatttcaacggcaagcctttcgcgccgcagagcggcgagttgatcggcggcgtgctgagcctgcgccaggggcacgatttctacgcccagcgcgagctgcagatccgccttccggcacagccgctcggggcgctgcgcctggacgtgctgcccgaggacggcggcgcgttgccagaagtcgagctgagctggctgcaaccggatcaggacctgcccgaggcgcgtcgtctcctgcgtggctataccttgcacctggacctgcggcccaaggcgccgaaccgcctggagggcgagttccacctgagcctgccgagcgactaccggaccaccctcagcggccacgtcgagctgtataccgaccggctgcgctatcggcacggcaaggtcgacctgggctacgactccgacgataccctagccctggtcttgcgcgactatctgcagcgacgtttcgccagccgcgacgtcagcctcgtgcgggcgccgtcctggcgcgcggccagtcatgcgcggccgctgcgtatcgaggccctggtggccggccaggctcaggtgctggagctgacgctggagaagaacgcccggcgggagtggacggtgcgcggcgacgcgttccccgccttgccggcggagcctgcgaccgtggccgcggcggcggcgccgcccgagccgcaggcgctgccggcgccgggtaacgccaccctcgacctggagctggtccaggtcgaaccgcagcgctacagccagcgcctggtcaaggccactacggtacgcgggcgtatcgccgagggccgtttcaccggcctcgacagcgaggggcgcctggtgatccgccgggaaatgcccggtgcgggggaggcgagctacctgttgcgcccggcggagatcgcccgtctcgaactgctcgaacgctag

SEQ ID NO: 348164 - DNA, 1905 bp, Pseudomonas aeruginosa
atgagcgtggaaacccaaaaagagacactgggctttcagactgaagtgaagcaactgcttcacctgatgattcattctctctattcgaacaaggaaatcttcctccgcgaactgatttccaacgcctcggacgccgccgacaagctgcgtttcgaagccctggccaatcccgagctgctcgagggcggcgccgagctgaagatccgcgtcagcttcgacaaggaagccaacaccgtcaccctggaagacaacggcatcggcatgagccgcgaggatgtggtgactcacctgggcaccatcgccaagtccgggaccgccgacttcctgaagaacttgtctggcgaccagaagaaggattcgcacctgatcggccagttcggcgtcggtttctacagcgccttcatcgtcgccgacaaggtcgatgtctactcccgtcgcgccggccagccggccagcgaaggggtgcactggtcgtcgaagggcgagggcgagttcgacgtcgctaccatcgacaagcccgagcgcggtacccgcatcgtcctccacctgaaaaagggcgaggaggagttcgccgatggctggcgcctgcgcaacgtgatcaagaaatactccgatcacatcgctttgccgatcgagctgcccaaggaattccacggcgaagaggccgacaagccggccgagccggaatgggaaacggtcaaccgcgccagcgcgctgtggacccgtccgcgcgccgaggtgaaggacgaggaataccaggagttctacaagcacgtcgcccatgacttcgagaacccgctgagctggagccacaacaaggtcgaaggcaagctggaatacacctcgctgctctacgtgccgggccgcgcgccgttcgacctgtaccatcgcgaagcgccgcggggcctgaagctgtacgtacagcgcgtgttcatcatggaccaggccgacgagttcctgccgctgtacctgcgcttcatcaagggtgtggtcgactccaacgacctgtcgctgaacgtctcccgggaaatcctgcagaaggatccggtgatcgactcgatgaagtcggcgttgaccaagcgcgtgctggacatgctggagaagctggcgaagaacgagccggagcagtacaagaccttctggaagaacttcggccaggtcctcaaggaaggcccggcggaagacttcggcaacaaggagaagatcgccggcctgctgcgcttcgcctccaccggcgacgattcgggcgagcagagcgtagcgctggccgactacatcggtcggatgaaggaaggccaggacaagatctactacctcaccggcgagagctactcgcaggtgaagaacagcccgcacctggaagtcttccgcaagaagggcatcgaggtgctgctgctcaccgatcgcatcgacgagtggctgatgagctacctgccggagttcgacggcaagcagttcgtcgatgtcgcccgcggcgacctggatctgggcagcctggactcggaagaggacaagaaggcccaggaagaagtcgccaagagcaaggaaggcctgatcgagcgcctgaagaaggtgctcgacgagcaggtcagcgaagtccgcgtttcccaccgcctgaccgattcgccggcgatcctcgccatcggcgaacaggaccttggcctgcagatgcgccagatcctcgaggccagcgggcagaaagtgccggactcgaagccgatcttcgagatcaacccgcagcatccgctgatcgagaagctggatgcggagccggacgaggaccgcttcggcgagctgtcgcatattctcttcgaccaggccgccctggccgcgggggacagcctcaaggatccgggcgcctacgtacgccgactgaacaagctgctggtggagctgtccgcttaa

SEQ ID NO: 348165 - DNA, 726 bp, Pseudomonas aeruginosa; identical to SEQ ID NO: 319785

SEQ ID NO: 348166 - DNA, 822 bp, Pseudomonas aeruginosa; identical to SEQ ID NO: 319786

SEQ ID NO: 348167 - DNA, 783 bp, Pseudomonas aeruginosa
atgccgcaaacgggacaagaacgcgacctgccgcgattccgcagcctgccctgcgcggtgtacctgcgcgccttcgagatgcccgccgggcaccgggtggagatgcacgagcacccctggggccaactgatgtacgccgccagcggcaccttgcgcgccagcaccgagcggcacagctatctggtgccggcgcagcgggcgctgtggattccgccgggcgtccggcacgccgcggaggcttgcaaccctgtgctgttccgcagtctctacctggatcgttcgctgcccggcggttgccgggtactggaggtgtccggcctgctgcgcgaactgttgctgcgggcggcggagtttccccgtgaatatccgccgggtggcgaggccgagcgtctcatgcaggtggtcgccgatgaggtcgggcgccttcgcgaggcgccgctgaacctgccgttgcctggcgacccgcgcttgcgccggatcaccgacgcgctacaggcggatcccgccgatccgcgcggcatctcggattgggcgggactggtgggggcgtcccgacggaccctggcgcggttgttccgcgagcagacccagttgtcgtttcgcgagtggcgccagcgcctgcgtctgctcaacgcggtcgccgcgctggaggagggcgccagcgtgacgcgggtggccagcgaccttggctacgactccacctcggcgttcatcagcctgttccagcgtcatttcggccagacccccggttgcttcgcccgctccctgcgcttgcccaactga

SEQ ID NO: 348168 - DNA, 1302 bp, Pseudomonas aeruginosa
atgaagaaggcaacacgcatcggcctctgggcctccggcagcctcgtcgcgctcgccgccatcgccctcggctacgcctggcaaccggccatcgggccactggaaggcacacccggtcccttcagcgccgagcagatcgcccgcggcgaacgcctcgccgccctcggcgactgcgcggtctgccacactcgcgaaggcggcccgcgcaacgccggcggacgggccttgccgacgccgttcgggacgatctacagcagcaacctcacgccggatcgcgcgagcggcatcggtggctggtcctaccccgccttcgagcgggccatgcggcatggcgtggcccgcgacggcagctacctgtatccggcgttcccttacaccgccttcaccaggactcgcgacgaagacctgaaggccctgtacgcctacctgatgagccagccggcggtgcacagcgaaacgcctgccaaccagctgccgttccccttcgaccaacgccagctgatggccggctggaacctgctgttcctggagcccggcgcctaccgcgacgagccgacgcgcaaccagcaatggaaccgcggcgcctatctcgccgaaggcctcggccattgcagcgcctgccactcgccgcgcaatgcgctcggcgcggaaaagtccggcagcgcgcacttcgccggcggcgaggcggagggctggaccgcgccagccttgaacgccagttcgccggcgcccatcgcctggagcgaggaggccctctacgcctacctccgccacggctattcggcctaccacggagtcgccagcgggccgatggcgccagtggtcggcgaaggcctggccaagcagtcggacgaggacctgcgggccctggcccattaccttgcgtcctacgccgctgccccggccggggaaaccgatcagcaacaggcgcaacgcctcgaccggcagggctacggccgcgtgcaaccgcccagcggcagcggcgcgcgcctgttcgccggggcctgcctggcctgccaccatgacggcgacggaccgcgcttcttcggcgtgcgtccatccctggcgctgaacagcaatgtgcatgcggacagcccggacaacctgctgcggatcatcctcgacggcatccacagcccggccaccggcgacctcggctatatgcccggcttccgccacagcctcgacgaccggcaagtcgccgccctggccaactacctgcgcgagcgtttcgccggcaagcccgcctggccggacctcgcggccaaggcggcaagcctgcgccgacaggcggcgccctga

SEQ ID NO: 348169 - DNA, 2247 bp, Pseudomonas aeruginosa
atgagcctggccaatccctcgcgacgcggcttcctcaaggccggcggcctgctgctggtcaccgtcaacctgcccgccccgctgctcgcccttgccgagcagggcgccaccgacctgccgctggaccaggtcgactcgttcatcgccattgccgcggacggcaaggtcaccgccttctgcggccacgtcgaccttggtaccggcatccgcacggcactggcgcagatcgtcgccgaagagttggacgtcgcgttcgagcaggtcgagatgatcctcggcgacacccgtcgcacaccggaccaggggccgaccatcgccagcgccagcatccaggtcagcgccgtgccgctgcgccaggccgccgccgaagcccggcgcttcctcctgcgccaggccggaagccatttcccggtgcatccggacagcctgcgcagcgaaaacggccaggtcttcgccgccgccaatccgcagcgacggatcggctacggcgagttgctgcgaggccagcgcttcaacctgaacatcgacggcaaggcgccgctcaagccgcgcagcgagtaccgtctggtcggtaagccggtgcgtcgggtggacatcccggcgaagctgaccggtcaactgacctatgtccacgacatgcgcttgcccggcatgctgcatggacgagtggtacgcccgccctataccggcgcggatgtcagcgccccgctcggcagcggcctgctggcggtggacgaaagctcggtcgccgggctgccggggctggtcaaggtggtcgtgatcggcgacttcgtcggcgtggtctgcgaacgcgaggagcaggcgatccgcgccgcgcgccagctcaaggtgcgctggaaggactggcagggcctgccgccgctggaacccgaccggctcgaggacacgcttcgccggcatccgaagaagccacgcacgctgcacgactcacccggtctcgagcagcacctcgcgggcatcgcccggccgctgtcggccacctatgtctggccctaccagttgcacgcctccatcggcccttcctgcgccctcgccgaggtcgatgcgcagcgcgctcgcgtctggtccggcacgcagaacccgcacgacctgcgcaacgacctggccaggctgctgcagcgcgagaccggggacatcgaggtgattcgcatggaagccgccggctgctacggacgcaacggcgccgacgacgtcagcgccgacgccgtgctcctggcgcagacggtgggccggccggtgcgggtacaactgatgcgcgaacaggaacatggctgggaaccgaaaggcaccgcgcaactgatcgaggtccgcggcggtctcgacgagcaaggccgggtggcggcctacgacttcgccacctgctacccctccaacggcgcgccgaccctggccctgctcctcaccgggcggatcccggccaccccgcaggtggccgacatgggcgaccgcaccgcgatcccgcaataccgctacccgcggatgcgggtggtggccaacgacgccgcccccatcgtccgcgcgtcctggatgcgcggcgtctcggcgctgccgaacgtgttcgcccatgagtcctacgtcgacgaactggcgcacctggccggcatcgaccccatcgccttccgccgccgctacctggacgaccagcgcgccctggcgctgatcgacgccctggtcgcccgcgccggctggcagccacgcacctcccccaacccagaggcgcgccgggacggcttgctgaagggacgcggcttcgcctatgcgcgctacttccacagcaagtttcccggtttcggcgccgcctgggccgcctggatcgtcgacgtcgaggtgaacccggagaacggcgcggtgcgcgtcgccaaggtctgggtcgcccatgactgcgggcagatggtcaatcccgatggggtcaggcaccaggtccacggcaacgtcatccagtccaccagccgggtactcaaggagttcgccaccttcgaccgccgtggcgtcaccagcctggaatggggcggctacccgatcctcggcttccccgaactgccggagatcgacgtactgctgctcgaccgccccgagcagccaccgatgggcgctggcgagtcagcctcggtgcccagcgccgcggccatcgccaatgcgatcttcgacgctaccggggcgcgcctgcgacaggtgccgttcactccggaacgcgtactcgcggcgctgcgcagcgcgcaggcctga

SEQ ID NO: 348170 - DNA, 492 bp, Pseudomonas aeruginosa; identical to SEQ ID NO: 347187

SEQ ID NO: 348171 - DNA, 423 bp, Pseudomonas aeruginosa; identical to SEQ ID NO: 319791

SEQ ID NO: 348172 - DNA, 906 bp, Pseudomonas aeruginosa; identical to SEQ ID NO: 319792

SEQ ID NO: 348173 - DNA, 897 bp, Pseudomonas aeruginosa
atgccgcggctgctggaggcgatggacaaaggccgggtcgaccatgtgatgctcagcggcgtcgcggtcgccaagaaatggcacgaggacgagccgaagcggccgcgctactacgctggtgacgatgccggagcctattggtacagcgccaccgacgtgatcgtggcggcggcggtgaaatccctgccagccgagcagcggcggcgcgtgcatccgttcctgaccggtttcaacccgaccgacaagaacgccgacgcgcacatccgtcgcatgctggagctggacccgggactctggcagggcatcggcgagatctttacccgtcacgacgacctcaccgcgctgacctacggcgacgtgccgagggccaacaacgaggcgctggcgcgggtctatcacctggccgccgaattcgacctgccggtgttgctgcacgccaacgtcacttccaagcgcgaacgcaacccgctgtacctggcggaaatcgaggagcccctgcgcaatcacccgcatgtgcggttcatctgggcccatgccgggaccagcatggagatccatcgccaccagaagaaactggacttcctcctgccgacccttcggcgtctgctacagcgctacccgaacctctacatcgacctgtcctggtcggtgttgcgcccgtacctgctggacgagcagggcaagcccgatccgcagtggctggcactggtcgagcggtttccgcaacgcttcatgctcggttccgatgtggtcggccagttcgacagcctgcccgagttgatggcgagcttcgatccgttcctcgacgccttgcccgagcaggtcgctcgccaggtggcgcgggacaacttcctggcggtgctgccgcgccagcccgccgatccgcgaggcgaataa

SEQ ID NO: 348174 - DNA, 477 bp, Pseudomonas aeruginosa
atgtccttcatccgttcttgcatcagtcgttccgtcttcctgctcggcgccggcgtcgccgtggcggcgcaggccgaggtgcgtatcgacggccccatcgaatatggcgtgttcgaaagccgctaccaggatttccagcccggcgaacgggtattgacccgtggcgagcagaacatccagcagaccaccgaagtcccggccaagctcggcaccaagttcggcatgcgttatcaactcagcggcaagcaggaaggcgatacgcctttgacgctgctctacctcaccccgggcgtggtcactccggatggtcagcggcatgacaagttcgaagtggtgcagaagctggtgccgggcgcgccgaccgatgtcatggcctacgaattcaccgagccgcacgaagtggtgaagggcgaatggcggttgatggtgttccagggcgatcgcctgctggcggagaaatccttcgacgtgcgctga

SEQ ID NO: 348175 - DNA, 441 bp, Pseudomonas aeruginosa
atggtcaagcgcaccagccacaagcaagccagttgtccagtcgcccgcccgctggacgtgatcggcgacggctggtcgatgctcatcgtgcgcgatgccttcgaaggactgacgcgcttcggcgaattccagaagagcctcggcctggccaagaacatcctggcggcgcgcctgcgcaacctggtggagcacggcgtgatggtggcggtcccggccgaaagcggcagtcaccaggaataccgtctgactgacaagggacgcgcgctcttccccctgctggtggcgattcggcagtggggcgaggactatttcttcgccccggacgaatcccatgtccgcttggtcgagcgcgacagcggccagccggtgccgcgcctgcaggtacgcgccggcgacggcagtccgctcgccgcggaagatacccgggtcagcagggactga

SEQ ID NO: 348176 - DNA, 1626 bp, Pseudomonas aeruginosa
atgtctttgcgcagtatgcccatcgcgacccgtgccgccctgagtttcgccctgatcaccgctctgctggtcatcaccggcatcttttccctgaaccggatgggttcgctcaacgaagcctcttcggacatcagcgacaactggctgcctagcgtccgcgaaagcgccgagttgaacgttctgctcgccgaactgcggcaggtgcaactggcccatgtgctggcggcggacgatagcagcaagcgcttcctggaaagccgcatgacggaaatcggcaaggaactgaccgatcgcgagggcgcctaccaacggctgatcagtggtgccgacgagcgctcgatctacgagcgctacctggctacccggcagacgctcctgcaaagccagcagaccctggtgcagatgtcgcgcagcaagccgctggaagagacccgccagtacaccgaaagcaccttgctcgaccagtaccgcgccacccagcagcaactgcaggcgctgatcgacttcaacgtcaagggcgccagccaggccagccacacggccgatgaggtctatgacagcgccttcgccgcagtgatcggcgtactgctggtcgccggcctcgctaccgtggtactggcctggctgttcacccgcagcatcacccaaccgatcggcgaggcgctgcgagtggccgaggtgatcgcttccggtgacctcaccagccgcatcgacacctctggccgcgacgaaccggccaagctgctggtcgccctccagggcatgcaggcacaactgcgccagaccatccagcagatcggcagctcggcgacccaactggcctccgccgcggaggaactcagcgccgtcaccgagcagggcaaccgctcgctgacccagcagaacgacgaaatccagatggccgccaccgcggtcaacgagatgaccgccgccgtcgaggaagtggcgcgcaacgccagctccacctcggacgcctcgtccgcctccgagcaatcggcgcagaacggacgccagcgggtactggagacggtccaggcgatccgcctgatgagcgaagaagtggacaatacctcggcgctggttggcggcctggcggaaaaggcccaggacatttccaaggtcctcgacgtgatccgcggtatcgccgaacagaccaatctcctggcgctcaacgcggccatcgaggcggctcgcgccggcgagcagggccgcggtttcgccgtggtcgccgacgaggttcgcgccctcgcccatcgcacccaggaatccacccgcgagatcgagcagatgatcgccaacatccaggaaggcaccggcgccgcggtcggcgccatggacagcagcagcgtacgcgcccgcaacatgctggagatcgccgaagccgccggcctggcgctcaacgagatcgcggagcgggtcggccagatcaacgagcgtaccctggtgatcgccagcgcctccgagcagcaggcccaggttgcccgcgaggtcgaccgcaacctggtgaacatccgcgacatctcgctgcagacgtccgccggctccaaccagaccgccgccgccagccaggaactgtcgcaactggccatcgacctgaacaacatggtcacccgcttcgtcgtctga

SEQ ID NO: 348177 - DNA, 1218 bp, Pseudomonas aeruginosa
atgcgtcgcgtcgttatcaccggtctgggcatcgtttcctgcctcggcaatgacaaagacaccgtttccgccaacctccgtgcgggtcggcccggcattcgcttcaatccgtcctacgccgagatgggcctgcgcagccacgtttccggttcggtcgacctgaacctcgaagagctgatcgatcgcaaggtcttccgcttcatgggcgatgccgccgcctacgcctacctggcgatggagcaggcgatcaaggactccggcctgactccggaacagatttccaacccccgcaccggcctgatcgccggctccggcggcgcttccaccctgaaccagatggaagccatcgacaccctgcgcgagaaaggcgtcaagcgcatcggcccataccgcgtgacccgcaccatgggcagcaccgtatcggcctgcctggccacaccgttccagatcaagggcgtcaactactcgatctcctccgcctgcgccaccagcgcccattgcatcggccaagccatggaacagatccagttgggcaagcaggacgtggtcttcgccggcggcggcgaagaggaacactggagccagagctgcctgttcgacgccatgggcgccctctccacccagtacaacgacacgccggaaaaggcctcccgcgcctacgacgccaagcgtgacggcttcgtcatcgccggcggcggcggcatggtggtggtcgaggagctggagcatgcgctcaagcgcggcgccaagatctacgccgagatcgtcggctacggcgccacctccgacggctacgacatggtcgccccgagcggcgaaggcgcgatccgctgcatgcagcaggcgctggccaccgtcgacgcgccgatcgactacctgaacacccacggcacctccaccccggtcggcgacgtcgccgagatccgaggcgtgcgcgaagtgttcggcgacaaggcgccggccatcagctcgacgaagagcctgtccggccactcgctgggcgccgccggcgtacacgaggcgatctattgcctgctgatgatggaaggcggcttcatcgccggctccgccaacatcgacgaactcgacccggaagtggccgacctgccgattctccgcgagacccgcgagaacgccaagctcgataccgtcatgagcaacagcttcggcttcggcggcaccaacgccaccctggtcctcaagcgctggcagggttga

SEQ ID NO: 348178 - DNA, 516 bp, Pseudomonas aeruginosa
atgaccaaacaacacgccttcacccgagaagacctgctgcgctgcagtcgcggcgagctgttcggcccgggtaacgcgcaacttcccgcccccaacatgctgatgatcgatcgcatcgttcacatcagcgatgtcggcggcaagtatggcaagggcgagctggtcgccgagctggatatcaacccggacctatggttcttcgcctgtcacttcgaaggcgatccggtcatgcccggttgcctgggcctggatgccatgtggcagctggtcggtttctacctcggctggcagggcaaccccggccgcggccgcgccctgggttcgggcgaagtgaagttcttcggtcaggttctgccgacagcgaagaaggtcacgtataacattcatatcaagcgcacgatcaatcgttcgctggtcctggccatcgccgacggcaccgtcagcgtcgatggccgcgaaatctacagtgccgaaggcctccgcgtcggcctgttcacctccactgacagcttctaa

SEQ ID NO: 348179 - DNA, 1956 bp, Pseudomonas aeruginosa
atgagccagcgccacggctgggacatccgtacccgcatgctggcgatcagcctgggcccggcgctgctgctgaccctgttgctcaccgcctacttcacctactcgcgcctgcaggacctgcgccaggaactgacccataccggccagttgatcgccgaccagttggcgccggccgccgaatacggcgtgatcgccggcaacacgcccgtgctgcagaagctgctgcaggccaccctcgacaccccgcatgtgcgcttcatcgaggtacgcgaccgcaacgacaatatcctggtgtacgtcgaacagttgcccggcgcgttgcagaacgccgcgccgatcgacatcttccactccaccatccagcgccagcgtatcgccctggccagcgacccgctgctggatggcgccagcgaaggcgacggccagtccggcgaggactacctcggccgggtggtggtcggcatgtccaacgacgccttcagccagcggcaacaggaaatcctcctgaaggccgccctgctggccgccttcgccctgatcctcaccttcctcgtcgcgcgccgcctggcgcagcgcctgtcggcgccgatcagcaccatgggccaggcggtcgaggcgatccagagcggcgactacaagaccagcctgccgatcctcgacgacggcgagatcggcgacctggcccgtcacatcaacaatctcgccagcgggctggaccgcgcgagccgggaacaggaacaggcgatcagccaattgatcagcgcccgcgaggaagcggagcaggcgaaccgggcgaagtccgacttcctggcgatgatgagccacgagcttcgcaccccgatgaatggcgtgctgggcatgctgcaactgctggaaaccaccgagcagacccgcgaacaggccgagtacacggcgctggccaccgagtccaccgaacacctgctgaaggtcatcaacgacattctcgatttctcaaggatcgaacgcggcgcgctggaactggagtgcatccccttcaacctgctggaactggtgcaaggctccgccctggtgttccagcacagcgcccagcaacgcggactggcgctggaattgcagatccaggccggcctggagaatatcgaggtctgcggcgatccgacgcggatccgacagatcctggtgaatctgctgggtaatgcgctgaagttcaccgaggaaggcgccatccatctcagcctggagtggcaggctctcgatcacgacgtactgtggctgacctgcgcggtgcacgacagcggcatcggcatctcgccggaacgcctggaacatatgttcgacgccttccagcaggcggattcgtcgatttcccgacgctacggcggcaccgggctcggcctggcgatcgccaggaccctggcggaacggatgggcggcaccctgcaggcagagagcaaggaaggctcgggatcgaccttcaccctggagattccgctgcccttccagcagtcgccggcgcaccggcagcaggccgccggcgacgccgccccggtcgccgccggtcaggaaatcctcctggtcgaggacaatccggtgaaccagacagtcatagaagccatgttgcgcagcctcggctatcgcgtcaccctggtcgccgacggtatccaggcggtacgcagcgccgagcgccagcgctacgacgcgatcctgatggactgccgcctgccggtgctcgacggctactcggcgacacgggaaatcagggcccaggagaacggccggcaggtaccgatcatcgccctgaccgccaacgccctgcagggcgatcgggagaactgcctgcaggcgggaatgaacgattacctggccaagccattcaaacgggcggaattgcaacgcatactgcaacgctggatcggctcgcagccggaactccccgtgacatcgaacgaaaccggacgaggggagccggagtga

SEQ ID NO: 348180 - DNA, 930 bp, Pseudomonas aeruginosa
atgcgtcgcttgcgccccgcccgccgggctttccaggcgctgctcgcgctcgtcttctgctgtctcccgcatgtcggcgaggccgcgcaactggtcctggtcagcgccaaccagggggccgcggtgaacgcctttcgcgatgccctggcgcagcgacgaccgcaggaccaggtggaactgcgcacgcccgcggccctggcggaggggatggtcttcgccgacgacacccgcctgctcctgctcggccccgaggccctggcctggcgcctgcgccagcaccgggcgccgccgaccctggcgctgctgctcaaccgggtcgatggccagcgcctgctgccaggcgccaacggacatggcggacacggcgtcggaggtctctgcgtactctggagcgacccgccggcgtcccgccagctccgcctggcgcgcctgatcctgccgggcatccagcgcatcggcgtgctctacggcaaggacagcgaattcctcctcgacgagcttcgccgcgaggcccgcagccaggggctccagctgttcgtcgccagcagcagcggcaacgacgacccgcgcccgctgcagttcctgctcggcaatagtgacctgctgctcggcatcgacgacaaacagctgtacaactcgcagagcatcaagagcctgctgctcggaagctacgccaagaaccgcgcgctgctcggccccaccgcagccttcgtcaaggccggcagcctggcgagcagctacagcgaccaggaggattggctggacaccctcgacgaattgctcggccaggcgcccaggcactggcccctcagcctctatccagggcatttcaaggtgctcggcaatcggcaggtagcccgttccctgggtatcgacctggccagcgacgccgacctcggccggcgcctcgccgaaggagaagaaccatga

SEQ ID NO: 348181 - DNA, 2109 bp, Pseudomonas aeruginosa
gtgcccatcgcttcacgtgctcccgcctccctgaccctgctggccctgctgttcggcggcaagctcgcggccgccgacctgttcaacgatcccagcggcgttcccgaagtattgaccgcgacacgcctgaaacaatccccggcggaagttcccggcagcatcagcgtgctcgaccgcgagctgatcgtcgccagcggcgcccgcgacattcccgaactgatgcgcctggtcccgggcatgatggtcggctacctgtccggcaaccagcccacggtcaactaccacggcaccagcatgtcgggggcgcggcgcctgcaggtgctgatcgacggccgctcggtgtaccgcccgggccttgccagcgtcgactggagcgacctgccgctggccctcgaggatgtcgagcggatcgaagtgttccgtgggccgaataccgtcagctacggcgccaacgcattgatgggggtgatcaacatcatcacccgcgcccccggcgagtcgcccggcacgcgcctgaagtacacggcgggccagcgcggcatccgcgactggtacgccagccagagcatcgccctggaagacagcgacttccgcctgtcgctgtccggccaggaagacgacggcttcgaccgcgaccacgacggtcacgccctgcgcgacggccgccggctcagccgcttcaacctcaacgccagccacagcctggcgccgaaccagagcctggagtggcaactggcggccaaggaaggctcgaaccagcacccctacgcctatcgctcgccgtttccccaggttcccgacgacatcgacaactccgatacgctcgcccacgactatgccggttcgctgcgctggaatgtcgacctcgacccgcgccacagcttctatatacaaggctacgcacagcactgggagcgccggcaggaatggaacgcctgcgaggcggccattgccttcagcccgcaactggcgcagctctgggaactgaacccggactacctgcgcaggttcgccgacgatccgacccggctgccgcccggcagcgcccaggagttgcaactggcgacccaggtcctcgaccagctacgcaacggcggactgcgcccggtctgcggacgggtcgaccgcaacatccgggaaagccgctacgacctggagatgcaggacaccctcagcctgggcgacaacctgcgcctgctgaacggcctgagctaccgctacgaccaggcaaactccgagaccttctacggcggcagggtcagcagccagatctggcggctgttcagccaattggagtggcatgccggcgaacactggctgctgcagggcggggggatgctcgaagacgtcgagggctccggcagttcgttcagcccgcggctggcggtgaactacctgttcaacccccagcacagcctgcgcgcggtctattcggaggcagtgcggtcaccgggcatgtacgaaaacgacgtcgactggcgctaccgggtccgccacctgacaccggcgccctatgggcagagcgaagcctactacttcgccagcgcccacggccccggcgacctgggcaaggaacacacccgttcgcgcgagatcggctacaacggttttttccgcgagaccgggctggccgtggatgtacgcctgttccacgaggaaatcaccggactgatcagcgatccgctcagcgtcgtcgacttcagtccggacaacggcgatcgcatccgcttctccggcgcggaaggccagctcgactggcgcctgggcctacgcgaccgcctgcgcgccacctacgcctatctcgactacgacgccaccagtcgctacgaccggcgcctgaccgcccgccacggcggctcggccggctggatgcacgactggggccaaggctggtccagcgccctcttctattatggcgacgactcgctcaatggacatcgtttcgaacgcgtcgacctgcgcctggccaagcgcattcccctgggcaaggccgccctggaactggccggcatgctccagcagcgtctcgacgacgaaccgctgacgtttcccgacaaccgctacgacagccgccacctgctctacttcagcgccgaggtgacgttctag

SEQ ID NO: 348182 - DNA, 1023 bp, Pseudomonas aeruginosa
atgacagagcagcaaccgattgccgtgctcggcggcggcagtttcggcaccgccatcgccaacctgctggccgagaacggccaggcggtccgccagtggatgcgcgacccggagcaggccgaggcgatccgcagccgacgcgagaacccgcgctacctgaaaggggtcaaggtgcatcccggggtcgagccggtcaccgacctggagcgcaccctggccgattgccaactgatcttcgtcgccttgccctccagcgccctgcgcaaggtgctgcaaccacatcaggcggcattgacgggcaagctgctggtgagcctgaccaagggcatcgaggcgcacaccttcaagctgatgagtgagatcctcgaggaaatcgccccgcaagcccgcatcggggtgatttccggcccgaacctggcgcgcgagatcgcagagcacgagctgaccgccacggtggtcgccagcgaggacgacgagctgtgcgcccgcgtccaggcggccctgcacggccgcaccttccgcgtctacgccagccgcgaccgcttcggagtggaactcggcggtgcgctgaagaacgtctacgcgatcatggccggcctggccgcggcgatggacatgggcgagaacacccgcagcatgctgattacccgcgcgctggcggaaatgacccggttcgccgtcaagctcggtgccaacccgatgacctttctcggcctcgccggcgtcggcgacctgatcgtcacctgttcctcgccgaagagccgcaactaccaggtcggccacgccctcggcgaggggctcagcctggaggaggcggtatcgcgcatgggcgagaccgcggagggtgtgaacactctcaaggtactcaaggaaaagtccgacgagatgcaggtgtacatgccgctggtcgccggtctccatgcgatcctcttcgaaggccgcaccctggcgcaggtcatccagctgctgatgcgcggcgagccgaagaccgacgtcgatttcattcccaccaccggcttctga

SEQ ID NO: 348183 - DNA, 465 bp, Pseudomonas aeruginosa
gtgaaactctggctgttgcgccacggcgaggccgaaccgcacgccagccgagattccgagcggcgcctgaccgcccatggacgcaaggaggtgctgcagagcgccgcgcggctggccgggttgccgctggacgggattctcgccagcccctacgtgcgcgcccagcagaccgccgagctggtgcgcgaggcattgggcctggtcgagccggtcggcaccgcgccctggttgacccccgacgacgatccgcgcgaggtgctcggtttcctcgacgagcgcagcgagcgcaatctcctgctggtcagccaccagcccctggtcggggcgctgggcggtctgctggtgcatggcaaccggcgcgatccgttgccgatgagcactgcctcgctggccgaactggaaggcgacttcgccgccgccgggctgatgaccctggtctcgctgcatcacccgcggcacggctag

SEQ ID NO: 348184 - DNA, 1668 bp, Pseudomonas aeruginosa
gtggtcactgcaaatcgtctgccgctcgaagtcttcttcgagcgcgaaaagcgtcatccgcaacggcgttacctggtgcagcccatcggtggcggccgggtcgaggagctgagctggggcgaggtgggcgaccaggcgcggcgtgcagccgcctggttgcgcagcctggatctccccgccggcagccgtatcgcgatcatctcgaagaactgtgcgcactggatcgtcactgacctggcgatctggatggccgggcacgtttccgtccccctctatcccaatctcaccgccgagtcggcgcgccaggtgctggagcattccgagtcggcggtggtcttcgtcggcaagctcgacgactggccggcgatggcgcccggagtccccgagggcataccgaccgtggccatgccgttgcacccggaagggcgtttcgaccgccagtggagcgacctgcaggcctgcgcgccgctcgaaggcgacacgccgaccgccgccgagcaactcgccaccctgatctacacctctggaaccaccggcgtgcccaagggggtgatgcacaacttcagcagtttcgccttcgccgccagccgcggcgtggaactgttcggcacccgcgaagacgaccggatgctctcctacctgccgctgtgccacgtggcggagcggatgttcgtcgagatggggtcgctctacgggggaaccacggtgttcttcgccgaaagcctggacaccttcgtcgaggacatgaagcgtgcgcggccgaccctgctgttcggcgtgccgcgcatctggaccaagttccagatgggggtgtattcgaagatgccggcgcagaagctcgaccgcctgctgaagctgccgttcctcggccgcatcgtcggtcgcaaggtgctcgccgggctaggcctggacgcggtgcgctacgcgctctgcggcgcggcgccggtacccgaggcgctgctgctctggtatcgccgcctgggcctggatgtgctcgaggtctacgggatgaccgagaacagcggttactcccacgtctgccggcccggcaggcagaagaccggctggatcggccagaacagccccggcgtcgaggtacgcatcagcgacgagggcgaggtgcaggtgcgtagcggcgcgaccatggtcggctactacaaggagccggagaagaccgcagaggtgctcaccgccgacggtttcctgcgcaccggcgacaagggcgagcaggacgccgaaggcaacctgcgcctgaccgggcggatgaaggaaatcttcaagaccagcaagggcaagtacgtggcgccggcgccgatcgagaaccgcctggcggtgcacgatcgcatcgagcaggtctgcgtggtcggcgagggcctcagcgcgccgctggggctctgcgtgctctccgaggtcggtcgccgggaggccctcaacggtacccgcggggcgctggaaagcagcctgcgggcgcacctggaacaggtcaacggtgcgctcgacaagcacgagcgcctggtcggcctggtcctggtgcaggaaacctgggcggtggacaacggtttcctcacgccgaccttgaagatcaagcgcaatatggtggaaggtgcctatggctcgcgcttccacgaatgggtggaacgccgcgaggccgtgctctggcacgaatga

SEQ ID NO: 348185 - DNA, 438 bp, Pseudomonas aeruginosa; identical to SEQ ID NO: 319806

SEQ ID NO: 348186 - DNA, 825 bp, Pseudomonas aeruginosa; identical to SEQ ID NO: 319807

SEQ ID NO: 348187 - DNA, 642 bp, Pseudomonas aeruginosa; identical to SEQ ID NO: 319808

SEQ ID NO: 348188 - DNA, 813 bp, Pseudomonas aeruginosa
atgtcgcaatcggttttcttcgcccacgccaacggcttcccgtcggctacctacgccaagctgttcgaggcgttggcgccggagtatcgggtggatcacctggaaatgcacgggcacgacccgcgttttccggtgaacgacaactgggacaacctggtggacgaactgctgcaccacctcgccagcctggaacagccggtctggggcgtcggccattccctcggcggcgtgctgcactaccacgcggcgctgcgccggccggaactctaccgcggcgtggtgatgctcgattcgccggtgctgaccctcgccgaccgcctggtgatccgtgccgccaagcgcttcggcttcatcgaccggatcactccggccgggcgcaccctggggcgtcgcgaggcgttccccgacctggaagaggcgcgggcgtacttctccggcaaggcgctgttccgccgcttcgaccccgattgcctggaggcctacgtacgccacgggctggccgacagcggcggcggttccggcctgcgcctgcgcttcgatccggccaccgagatcagcatctaccgtagcgtgccgcacagcagtccggggcgtccacgacagttgcaggtgccgctggcgatggtgcgcgggcgacacagcaaggtggtgttgccgcaccacacccggctgatccgggcgatgccgcgcggcgagttcatgtcgctgcccggcggccacatgttcccgctggagcgcccgcgggaaaccgccgaactgctgaaaggcgtgttcgatcgctggtcgcgggcgaccgaggagcgttcggcatga

SEQ ID NO: 348189 - DNA, 861 bp, Pseudomonas aeruginosa; identical to SEQ ID NO: 347204

SEQ ID NO: 348190 - DNA, 663 bp, Pseudomonas aeruginosa; identical to SEQ ID NO: 347205

SEQ ID NO: 348191 - DNA, 807 bp, Pseudomonas aeruginosa; identical to SEQ ID NO: 347206

SEQ ID NO: 348192 - DNA, 1068 bp, Pseudomonas aeruginosa
atgttcgataacgatcggctgttgcttcgcgtgctgctgttcggtctgctcggtgccagtctctgggtgctggcgccattctggtcggcgctgttctgggccgcggtgctggctttcgccagttggccgctgatgcgcatgctcacgcgcctgctcggtggccgcgagtcgctggcggcgggcctgctgaccctgggctggatcgtcctggtggcattgccgctgatctggctcggcttcggcctggcggacaacgttcgctcgctgatggagctgctgaagaatctccaggtcgagggcctgccgccgccgccttcgtggatggccggcgtaccgctgatcggcgaccgcctgatcggctggtgggactccatcgaccaacagggcgtggcgttcttctacgtgctcaagccctatgtcggcgaggtcggcaactggctgctggcgcgcagcgcgaagatcggcggagggatcctggaactggtcctcagcctgatcctgatcttcttcttctaccgcgacgggccgcgcctggagtccatcgtccaccgtgccctggagcgcctgatcggcaaccgcgcggagcactatcgcgaccttgtcgccggcaccgtacagcgggtggtcaacggggtgatcggtaccgccgcggcgcaagccctgctggcctggatcggcttcatgatcgccggcgtaccgggagccatgctgctcggcctgctgaccttcgcctgcagcctactgatggtcccgccgctggtctggggtccggccaccgcctggctgttcttcaagggcgactatggccacggggtgttcctcggcctgtggggcttcttcatcatcagcggggtggacaacatcctcaaaccctacctgatcagccgtggcggcaacctgccgctggtggtggtgctgctcggggtattcggcggcctgctggcgttcggcttcatgggcctgttcctcggcccgatcctgctggcagtggcctacaacctgctcagcgactggatcgccagcacgccgcggacgccgcccgccgaagggcgcggcccggatgcctga

SEQ ID NO: 348193 - DNA, 1275 bp, Pseudomonas aeruginosa; identical to SEQ ID NO: 347207

SEQ ID NO: 348194 - DNA, 648 bp, Pseudomonas aeruginosa
gtgaccattcccctcaagcgctccctggtggacatcgccctggagcagatccgccagcgcatcgacgccggccattggccgctcggccagcgcctgccgccggagccggaactcgccgagctgctcggcatgagccgcaacaccgtgcgcgaagcggtgcgcgtgctgaccttctccggcgtgctggaagtccgccagggcgacggcacctacgtgcgcgcctgcgccgatccgctggaaaccatgctggtgctggcgcgcagcgcggtgcagcactccctggaggcacgcgggatgatcgagatcgaggcggcgcgcctggcagccgttcgccgcgacgacagcgacctgagcgcattgcgcgagtatctcgacgcatcgcgccagcgctacggcagcgacgacctgcaggactacatagagcacgacgtccgcttccaccaacggatggtcgatgccgcccacaatccggtgctcagcgaactctaccgctatttctcgcaggtcatccggacctcgctggaacgcaccatggccgacccacaaagggcccagccctgcttcgagctgcaccagcaactgttcgacgccatagaacgcggagacccggacgctgccgccgcggccaaccgcgcactgctgatctga

SEQ ID NO: 348195 - DNA, 1530 bp, Pseudomonas aeruginosa
atgcccgatattcgttgtatcgccgtggtcggtaccggtgcgatgggcaccgggatcgcccagatcgccgcccaggccggcctgaccgtatggctgttcgacagccgcgccgaggccgccgccgaggcacgccagcgcctgcagcagaccttcgagagcctgtgcgacaaaggcaagctgagcgccgccgacgccgcggccgcgcaaaaccggctgcgggtggcggaacacctggaacaactgggcgactgcgaactggtggtggaggccatcgtcgagcgcctggaggccaagcaggaattgctgcgccggctggaagccatagtcgcgccggagaccatcctcgccagcaatacctcgtcgctgtcgatcaccgccatcgccgccgcctgcgagcggccgcagcgggtcgccggttttcacttcttcaacccggtgccgctgatgcgcgtggtcgaggtggtcgacggcctggccagcgctccggaagtcggcgacgccctgctcgccctcgccgcgcgcctgggccaccgcggtgtacggaccaaggacagccccggcttcatcgtcaaccatgccggccgcgcctatggcaccgaggccctgcgcatcctcggcgaaggcgtcgccgaatgcgccgagatcgaccgtgtgctgcgcgagtgtgccggcttccgcatggggccgttcgaactgctcgatcttaccggcctcgacgtgtcgcacccggtaatggaatcgatctaccagcagtactaccaggaaccgcgctaccgcccgcacccgctgacccgccagttgctcgccgccggccgtctcgggcgcaagagcggccagggcttctatcgctacgtcgacggccagccgcaggacaagcccggtccgcaaccggtgccgcaggccgccatccggcccccggtgtggctgggctgcgaaaacgaggacgaccgccgcacgctcgccgaactgctgcatcgcctcggcgtcgagccggaaaccggcgaacgcccttccgccgcagcgctctgcctgctggccgcctggggcgaggacctgagcagcgccgtgcagcgcttcgcctgtcccgccgagcgcagcgtcggcatcgacctgctctgcgacctcgagcgccggcgctgcctgatgctctcgccactgactaccccggccatgcgcgacgccgcccacgcgctactggctggcgacggcgtcggggtcacggtgctgcgcgacagtcccggcttcgtcgtccagcgggtactggcgatgatcgtcaacctcgcctgcgacatcgcccagcagggcattgccagcgtcgaggatatcgaccaggcggtgcacctcggcctcggctatcctcacggcccgctggaatggggcgaccgcctcggcccgcggcgcctgctgagcattctccagcgcttgcagacgcttaccggtgacccgcgctaccggcccagtccctggctgcgccgacgagcgcaactgggcatgtccctgcgcgccggcgaaaccgccgccgtaggctga

SEQ ID NO: 348196 - DNA, 786 bp, Pseudomonas aeruginosa
atgtccgccgatccttcgcccgtggtcctgctcgaatttcccgcagccgatatagccctgcttcgcctcaatcgtccgcaagccaggaacgcgctgaacgaccaagtgcgccagcgcctcgccagccacttccagacgctcggcgcggatccggcgatccgcgtcatcgtgctcaccggcgactcgcgctgctttgcagctggcgccgatctccgcgatctctcgacgagcacggcgatcggcctgtacggccgccacggcgagcgctactgggaagccatcgcgcgctgcccgaagccggtgatcgccgcggtcaacggcttcgccctgggcggcggctgcgaactggcgatgcattgcgacctgatcgtcgccggcgagtcggcacagttcgcccagccggagatcaaggtcggggtgatgccgggtgccggcggcacccagcgcctggtacgggcggtgggcaagttccaggcgctgcgcatgctgttcaccggctgcctggtgaaggctccgcaagcgctggccatgggcctggtcagcgaagtggtggcggacgagtcgacgctggcgcgcgccctggaactggccatggagatcgcccgcctgccccctctggcgctggcgcagatcaaggaggtggtcctggccggtgccgacctgccgctggacagtgccctggccctggaacgcaaggcgttccagttgctgttcgactcgcaggaccagaaggaaggcatgcaggccttcctggagaaacgcccgccgaactaccaggggaaatag

SEQ ID NO: 348197 - DNA, 867 bp, Pseudomonas aeruginosa
atgcgcggcaacgacgagcgccggagtccggcggaaggtgccagtacggaagcggaagtgtccgccttcgaagctgtgctgatcgacccgatgcaggagaaagacgaggaactcaaggaccgccagttcgtcaccgcgctggcccgcgggttggaattgctgcgctgtttcacgccacgggaaagcctgctgggcaaccaggaactggcgaagaagaccggcctgccgaagccgacggtgtcgcgtctgacccacaccctgacccggctgggctatctgcgtcacctgccgcatagcggcaagtatcaattggaagtgggggtgatgtcgttcggctacgcgatgctctcgaacctgtcgattcgcgcgctcgcccgcccgttgatggaagagatggccggctacgccaaggccgcggtggccatggcggcccgcgaccggctgagcatggtctacctcgacgtggtgcatggcgaggccaacctgaccatgcgtcgccaggtcggcagccacctctcgctgcaccgcagcgcgatcggccgggcctgcctggcggcgatgccggaggacgagcgggaattcatcctcgggcacattcgcaagcgccacccggaagactggccggaagtgcgcaaggggctggagcgggccttccgcgactatgccgactacggcttctgcctgtcgcttggcgagtggcaacgcgacgtcaacgcggtgggcgtggccttgcaccatgagagccatgggctgctggcgttcaattgcggcgggccgagtttccatctcaagcgcgagaaactggaggacgacatcggcccgcgcctgctgcacatggtccacaacatcgaggccgccacccgctga

SEQ ID NO: 348198 - DNA, 1155 bp, Pseudomonas aeruginosa
atgattcgtgatccggaaaccctgaacctgctgctggacagcatccgccagttcgtccgcgaaagcctggtgcctcatgagcaggaagtggcggaaaccgaccgcatccccgaggcgatcatcgcccgcatgcgcgagatgggcctgttcggcctgtcgatcccggaggcctacggcggcctcggggtgaccatggaggaagaggtgagcatcgccttcgagctggggcggacctcgccggcgttccgttcgctgctgggcaccaacaacggcatcggctcccagggcatcgtcatcgacggcaccgaagaacagaagcggcgctacctgccgcgcctggcgtcgggcgaactgctcagttcgttctgcctcaccgaaccggactccggttccgacgccgcctcgctgaagaccacggcggtgcgtgacggcgagcactacgtgctcaacggtaccaagcgcttcatcaccaacgccccgcaggccggcatctacaccgtgatggcgcgcaccgacccggcgatccgtggcgccggcggaatctccgctttcgtcgtcgagcgcggtacgcccgggctgtccctgggcaagccggatcgcaagatgggacagaagggcgcgcatacctgtgacgtgatcttcgatgactgccgggtgcctgccagtcagttgatcggcggggtcgagggcgtcggcttcaagaccgcgatgaaggtgctcgacaagggccgcctgcacatcgccgcagtctgtgtgggggtcgccgagcggatgctcgaggatgcgttgcgctatgccctggaacgcaagcagttcggccagccgatcgccgagttccagttgatccaggcgatgcttgccgacagcaaggccgaagcctacgcggcgcgctgcatggtcatcgacgccgcgcggcagcgcgacgaaggccgcgatgtcggtaccgaggcgtcctgcgccaagctgttcgcctcggaaatgtgcggccgcgtcgccgaccgcgcggtgcagatattcggcggcgccggctatatcggcgactacgggatcgagcgcttctatcgcgacgtgcggctgttccgcatctacgagggcaccacgcagatccagcaactgctgatcgcccgcaacatgatccgcgccgcccagggctag

SEQ ID NO: 348199 - DNA, 1695 bp, Pseudomonas aeruginosa
atgaacagccacgagattctcttgatcctggcctttttcgccctggtcctggtgcctgcaccgttcctcgggcgctactgcttcaaggtgatggaaggccaacgcaatctcctcagcgcgccgctggcgccactggagcgcgtctgctatcgcctgttcggcgtcgatcctgcgagcgagcaggactggaagacctacaccctggcgctgctggcattcaacctggccggcctggtcctgctgttctcgatcctcatgctgcagggcagcctgccgctgaacccgcagcacctgccgggcctggaatggaccctggcgttcaacaccgcggtcagtttcgtcaccaacaccaactggcaggcctacagcggcgaggcctcgctgagctacttcagccagatggtcggcctcacggtgcagaacttcgtcagcgcggcggtcggcctctgcgtgctggtggccctggcgcgcggcatcagccgccgctccacacgacagctgggcaacttctggggcgacctgacccgcggcaccctctacgtgctgctgccgctgtgcctgctgctggcgttgctgctggtctggcagggcgtgccgcagaccttcttcgactatgtccatgccaccaccttgcaaggcgccgagcagaccatcccgctcggcccggcggccagccagatcgccatcaagcagctgggcaccaatggcggcggcttcttcggcgtcaactcgacccatccgttcgagaacccgagcgcctggagcaacctgttcgaagtggcctcgatcatcctgatcccggcggcgctggtattcaccttcggccattacgtgaaggacctgcgccagagccgcgcgatcctcggctgcatgctgctgctgttctgcctcggcctgggcctgtcgctgtgggccgaataccagccgaacccggcgctggcgcagttgccgatcgagcagggcgcgccgatggagggcaaggagagtcgcttcggcaccgccgccagcatgctctgggcgatcaccaccaccgccgcctcgaacggctcggtgaacgccatgcacgacagcctgagccccctgggtggcatgctgccgctgctgaacatgatgctcggcgaggtgatcttcggcggcgtcggcgccggcctctacggcatgctgctgttcgtcctgatcgcggtgttcctcgccggcctgatggtcgggcggacgccggagtacctgggcaagaaactcgaggcgaaggaggtccgcctgctggtcttcaccctgctggtgatgcctgtcggcgtgctggtgctcggcgccatcgccgccagcctgccggggccggcctcggcggtgaccaatcccggcccgcacggcttcagccaactgctctacgcctacacctcggggagcgccaacaacggctctgcgtttgccggtttcggtgccaacacgccgttccacaacctgatgatcggcctggccatgctcatcggccgcttcggctacatcctgccgatcctcgccatcgccggcagcctggcggcgaagaaggccagcccggtggggccgaacagtttcccgacccatggtccgctgttcgtcagcctgctcaccgtgaccatcctgctggtcggcggcctgactttcctgccgaccctggccctcggcccgatcgctgaacaactgagcctcggcttctga

SEQ ID NO: 348200 - DNA, 2073 bp, Pseudomonas aeruginosa
atgaacgctcagacccaggcgtccaagaacgccttgcacaaatcgctcgaacgtcgccacaacgcgtccaccagcctcgccgccttgtggcggccggcgctgctgcaagccttcgtcaagctcgacccgcgccagttgctgcgctcgccggtgatgctggtggtcgaactgaccgccgtgctcaccaccttgctgtgcttcgtccccgaccaggcggtgccgacctcggtggcgctgcagatcgccctctggctgtggttcaccgtgctcttcgccaatttcgccgaagcgctcgccgagggacgtggcaaggcccgcgcggacagtctcaaggccggcagccagggcctctccgccaataagcggcgcgccgacggcagtttcgagagcgtcgctgccagcagcctgcgcaagggcgacgtggtacgggtccaggccggcgagatgattcccggcgacggcgaagtcatcgaaggcgtggcggcggtcaacgaggccgccatcaccggtgaatcggcgccggtgatccgcgagtccggcggcgaccgctcggcggtgaccggcaacacccaggtggtgtccgactggctgctggtgcggatcggcgccaacccgggcgagtcgaccctggaccggatgatcgccctggtggaaggcgccaagcggcagaagacccccaacgaagtagcgctggacatcctgctgatcggcctgaccctgatcttcctgctggtggtggtgaccctcaagccgttcgccctgttcgccggcggcaacctgccgctggtgttcctggtggcgctgctggtgacgctgatcccgaccaccatcggcggcctgctctcggccatcggcatcgccggcatggaccgcctggtgcgcctgaacgtgatcgccaagtccggtcgcgcggtggaggcggccggcgacgtccacgtgctgctgctcgacaagaccggcaccatcaccttcggcaaccgccgctgcagcgcgctgtacgccgcgccgggggtgagcggcaaggaactggccgagggcgcgttgctggcctcgctggccgacgacaccccggaaggcaagtcgatcgtcgaatacctgcgcatcctgcatccgatcgaggagccgcgccgcgaggaactgacgccgatcgccttcagcgcggaaacccgcctgtccggggtcgactggaacggccaggtgtaccgcaagggggcggtggatgcggcgctgcgcttcatcgacctgccgcgggagaagatgcccgaggtgctttcgcgggaggtggacaagatcgcccagagcggcggcaccccgctgctggtggtagccaacggccggctgctcggcgccattcacctgaaggacgtggtcaagccgggcattcgcgagcgcttcgccgaactgcgccggctgggcatccgcaccgtgatggtgaccggcgacaacccgctgaccgccgctgccatcgccgccgaggctggggtcgacgacgtgatcgccgaggctaccccggagaagaaattggcgcggattcgccaggagcagggcgaaggtcgcctggtggcgatgtgcggtgacggtgccaacgacgccccggcgctggctcaggccgacgtcggcatggccatgaacgacggcacccaggccgcccgcgaggcggccaacctggtcgacctggacagcgacccgaccaagctgctcgacgtggtccaggtgggcaaggagttgctggtcacccgcggcgcgctgaccaccttttccatcgccaacgacgtggccaagtacttcgccatcctgccggcgctgttcgtcggcatctacccgcagctcgacgtgctcaacgtgatgcgcctgcaaagcccgcagagcgcgatcctgtcggccatcgtgttcaacgcgctgatcatcgtcgcgttgatcccattggccttgcgcggcgtgcgggttcaggcggcggacgcttcgcaactgctgcagcgcaacctgctgatctatggcgtcggcggcctggtggcgccgttcctcgggatcaaggcgatcgacctgctgctgaccgccgtcggcctggcatga

SEQ ID NO: 348201 - DNA, 552 bp, Pseudomonas aeruginosa
atgttcaagcaactccgtccggcactggcgtcactgctggtgctgagcatggtcaccggcgtggcctatccgctgctggtcaccggtatcgcccaactggcgttccccgagcaggccaatggcagcctgctgcgcgacgccgagggcaaggtgctcggctcgcggctgatcgcgcagaagttcgacggcgaggagtggttccattcgcggccttcggcgggcgactacgccaccgtttccagtgccgcgagcaacctggcgccgagcaacccggcactggccgagcgcatcgccagggacgccgcccaggagcgtatcgccgaccaggggccggtgccgctggcgctggtcactacctccggtagcggactcgatccgcagctgccgccgcaggccgcgcgttaccaggcgctgcgggtggccacggcgcgcgggctgccgctgcggctggtggaagacctggtggaaagccacaccgagcggccgctggtggggccggcggtggtcaacgtgctggcgctgaacatggcgctggcggggttgaagcgctag

SEQ ID NO: 348202 - DNA, 2658 bp, Pseudomonas aeruginosa
atgaccgacaccgcacgcgccgacgcgctgctggccgacctgcccgctgacgggcgcggccgcctgaaagtctttctcggcgcggcgccgggggtgggcaagaccttcgccatgctgcaggccgcccaggcccagttgcgccagggcgtgaaactgcgcgccggggtggtcgagacccactcgcgggcggaaaccgagtccctcctcgcaggcgtgccgcagcagccgctgcgcagcctcgagtatcgagggatgaaactgcaggaaatggacctcgacggtctcctcgccgacccgccggcgctggccctggtcgacgaactggcccacagcaacgttcccggcagccgccacgccaagcgctggcaggacatccaggagttgctggcggcgggaatcgacgtctacacaacggtcaacgtccagcacctggagagcctcaacgaccaggtccgcgacatcaccggcgtgcaggtccgcgagacggtgccggactgggtgttgcaggaggcctacgagatcgtcctcatcgacctgccgccgcgcgagctgctggagcgcctgcgcgagggcaaggtctacgtgccggaacaggcgcgggcggcgatcgatgcgttcttctcgcagaccaacctcaccgcgctgcgtgaactggcgatgcagaccgccgccgcgcgggtcgacgccgacctcaaccaccgctaccgccagcgcggcgaggaagcgccggcgttgcgcgggcggctgctggtgggcatcgacggtgacgaacaggccgaacgcctggtgcgccacgcctgccgggtcgccgaacgtcggcacctgccctggagcgtggtacacgtcgataccggcggcttgcgcggcgagcaggcgcggatgcgcctgcagggtgcgcagcaactggccgagcggctcggcggcgagatcgtcgtgctgcgcgccggcgaggtggcgcggaccctcctgcaacatgcccgcgagcgccgcgccagcctggtcctggttggccagtcgcggcgccgctggtaccgccgggccttcggcggtggtctcgccgggcgtctgctgcgcgacggccagggcctggagatcagtgccctggacagcgaggccgacctgcgcccggcggaaccgcggccacgctatccggtggtgtggaacgactatctgctggcgctgctggcgaccgccctggccagcggcctggcctggatcgtggcgcacctgctggagctgccgaacatctccctggtgttcctgatggcggtgctgctggtggcagtgcgcagcagcctgatgccggcactgttgtgcgcggtggcgtcgttcctggcctatgacttcctgttcatcccgccgcatttttccttcgccatccatcgccacgaagacctgctgagcctggcgttcttcctgttcatggccggcctcaccggcaacctggcggcacgccagcggcgccagctggaggcgctgcgcgatacccaggaggaaaccagcctgctgctggatctgtcgcgcaagctcaccgccgccaccgaccgccaggcggtgctggccgccgccgcccagcagttcgacgactggaaggacgtcgaggtctgcctgctcggtcaggtcaatggcgagtggaagaccgaggccggcgtgcagcggcaactcgccgaccaggaacgggtcgccgcggactgggcctgggcccacgaccagccggccggcctcggtactggcacgctgcccggaggacgctggtggtggtggccgctgtcggcggaagagggaccgctggcactgctcggtgtcgcgccgcttgacggccagccgctgagcccgcagcgccggcgcctgctcgccgccctcggccagcccctggcccaggccctggcgcgggctcgcctggccgaggacctggaggccgcgcgcctgcacggcgagaccgagcaactgcgcagcgccttgctcgcctcggtctcccacgacctgcgcacgccgctgacggccatgcgcggctccatcgacagcctgctggcgctgggtgaggcgatcccgccggcggatcgtcgcgaactgctggaaagcacccgcgacgaggccgagcgactggaccgctatatccagaacctgctcgacatgacccgtctcggccacggtggcctgaagctggcgcgcgactgggtggcgccgggcgacatcgtcggcagcgcgctgaaccgcctgcgcgcggtgctggcgccgtaccgggtgcaggcgatcgtggccaacgacctgccgttgctctacgtgcatgcggcgctgatcgagcaggcgctgatcaacgtgctggaaaatgccgcgcgcttctcgccgaaccacggccggttgcgcatcgaggtcagccaggatgccgccgagctgcgtttcgcggtgagcgacgaggggccggggattcccgaggccgagcgggagaagatcttcgacatgttctacaccgctgcccgtggcgaccgcggtggccagggcaccggcctgggcctggcgatctgccagggcatgatcggcgcccacggcgggcgtatcagcgtcggcgaaggcctcgacggtcgcggcaccacgctggtcctgcacctgccgctgcatccgcagccggacctcgggcaactggagggcgacgaatga

SEQ ID NO: 348203 - DNA, 693 bp, Pseudomonas aeruginosa; identical to SEQ ID NO: 319824

SEQ ID NO: 348204 - DNA, 909 bp, Pseudomonas aeruginosa
atgcagcaactgttgaacgagattctcgatgaagtccgcccgctgatcgggcgcggcaaggtcgccgactacattcccgcgctcgccggcgtcgagccgaaccaactggggatcgccgtgtacagccgcgacggcgagctgttccatgccggcgacgccctgcggccgttttccatccagagcatttccaaggtgttcagcctggtccaggcgatccagcattccggcgaggacatctggcaacgcctcggccacgagccctccggccagcctttcaactccctggtgcagctggagttcgagcgcggcaagccgcgcaacccgttcatcaatgccggcgccctggtgatctgcgacatcaaccagtcgcgtttcgccgcgccggcgcaatcgatgcgcgatttcgtccggcgcctgtgcggcaacccggaagtggtgtcggactcggtggtggcgcgctcggagtaccagcaccgctcgcgcaacgcggcggcggcctacctgatgaaatcgttcggtaacttccacaacgacgtcgaggcggtgctgctcagctatttccatcattgcgcgctgcgcatgagctgcgtcgacctggcgcgggcgttctgcttcctcgccgacaagggcttctgcaagcacagcggcgagcaggtactcaacgagcggcagaccaagcaggtcaacgcgatcatggccaccagcgggctctacgacgaggccggcaactttgcctatcgggtcggcctgccgggcaagagcggtgtcggcggcggtatcatcgcggtagtgccggggcgcttcacggtctgtgtctggtcgccggaactgaacgccgcgggcaattcgctggcgggtatcgccgcgctggagaaactcagcgagcggatcggctggtcgatcttctga

SEQ ID NO: 348205 - DNA, 606 bp, Pseudomonas aeruginosa
atgtcccgtccgatccccgtttcccgtgtcttcgcctgcctcaccgttctcgccgcctgcgcgcatgccggcgccgccgaaccggactggcgtggctacaccagcgaacagcagcagcgcagcgtgctggccgtcgagcaggacgccgaggccatcaacaagcgctactacgacagtgccttcgaggaattcctgccggaactggagcaactggaactcagcctggcgcagcccgtcgtcgccgtcgacgagaaaggcctgctgggcgactggaagtgccgctcgacccaggccgaccagtacggcatctatcgctatccgaacttccagtgccgcatccggcgtaccgaccgcggcctgttcctggagaagaccagcggttcgcagcgggtcagcggctacctgttccgcgaaggcacgcagcgctacgtgttcctcggcggcgccacggtcaacgacgagccccaggtggccttcagtggcctggcccacggcgcgccggctgagtccgacgtggtcgcgctgctgcgcccgcacgccggtggcttcctcctgctgttcccggaacggcgcggcggctacgaggtcctcgagttcagccgctga

SEQ ID NO: 348206 - DNA, 1038 bp, Pseudomonas aeruginosa
atgagcaaacaggtcgccctggtattgggctccggcggtgcgcgcggctacgcgcacatcggcgtgatcgaggaactcgaggcacgcggctatgagatcacctgcatcgccggttgttccatgggctcggtgatcggcggcatctacgccgccggcaagctgcgcgagtaccgcgagtgggtggaaagcctggattacctcgacgtgctgcgcctgctcgacgtcagcttccgcctcggcgcgatccgcggcgagcgggtgttcggcaagatccacgagatcctcggcgaggtaaacatcgaggacctgtcgattccctacacggcggttgccaccgacctcaccaaccagcaggaaatctggttccaggaaggctgcctgcaccaggccatgcgcgcctcggcggcaatccccagcctgttcacaccggtcatgcagggcagccgcatgctggtcgacggcggcctgctcaacccgttgccgatcgtgccggtggtgtcggcccacagcgacctgatcatcgcggtcaacctcaacgccaccaaccagaagcagtaccacctgccggtgatcgagcgtccggccgcgctcaaggggcgcttcgacagcatgatcgagagcctcggccacaaactctcgttcttccgccgccacggcgacgacaataccccgccggagctgagcgccgacgccctgctccatccggttccggcggaatccgaggagcccgccgagccgcaactgcaacagccggccgcggcgccgcaaggcaaggactcgccgaagtcggccagcggcaccacggtggtggaaagcagcggtccggcatcgctgctggaactggtcaaccagagcttcgaggtgatgcagacctcgctggcgcagtacaagatcgccggctacccgccggacatcctgatcaacgtgccgaagcgggtctgccgcttcttcgagttctacaaggcgccggaactgatcgccctcggccggcagatcgccagcgacaccctggaccgctacgaggaagacaacgcctga

SEQ ID NO: 348207 - DNA, 279 bp, Pseudomonas aeruginosa; identical to SEQ ID NO: 319828

SEQ ID NO: 348208 - DNA, 1035 bp, Pseudomonas aeruginosa
atgagcgaggcgatccgcctgacccagtacagccacggcgccggctgcggctgcaagatttcgcccaaggtactggaggtgatcctcgccggcagcggcgcgcagaacctcgatccgaagctctgggtcggcaacgcctcgcgcgacgacgcggctgtctacgccctcgacgaggagcgcggggtggtctccaccaccgatttcttcatgccgatcgtcgacgaccccttcgatttcggccgtatcgccgcgaccaacgccatcagcgatatctacgccatgggcggcgacccgctgatggccatcgccatcctcggctggccggtcaacgtgctggccgcggaagtcgcccgcgaggtgatcgccggcggccgcaaggtctgcgaggaagccggcatcccgctggccggcggacactccatcgacgcccccgagccgatcttcggcctggccgtgaccggcgtggtggagaagcgcttcatgaaacgcaacgacaccgccgaggccggctgcaggctgtacctgaccaagccgctgggcatcggcatcctcaccactgccgagaagaaggccaggctgcgcgccgaggacgtcggcgtggcgcgtgactggatgtgcaccctgaacaggcccggcgcgcgcttcggccggttggcgggggtcaaggcgatgaccgacgtcaccggtttcggcctgctcggccacctggtggaaatggccgacggcagcaagctcaccgcacgcgtggagtacgccgcggtaccgcgcctggccagtgccgaatattacctggagcagggctgcgtgcctggcggcacactgcgcaacttcgacagctatggcgagcgcatcgcgccactgccggaagtgcagaagctgttgctttgcgatccgcagaccagcggcggcctgctggtggcggtggctccggaaggcgaggcggagttcctcgccgtggcggcggaactcggcctgcaactggcgccgatcggcgagctggtcgagcgacagagtctcgcggtacaggtgctgtaa

SEQ ID NO: 348209 - DNA, 1110 bp, Pseudomonas aeruginosa
atgcgcgacaacacccagcactaccgcgaactgtttctcgacgatatccccctgatggatgtgcgcgccccggtggagtaccacaagggcgcctttcccaacactgtcaaccggccgctgatgaacgacatcgagcggcagaaggtcggcaccagctacaagcagcacggccagcaggccgccatcgcccttggccacgaactggtctgcggggcgctcaaggccgaacggctggcggcctggaaagccttcgccgaagccaacccgaacggctacctgtattgcttccgcggcggcctgcgctcgcagatcgtccagcagtggctgaagcaggacgccggcatcgactacccacgggtgatcggcggctacaaggcgttgcgcaacttccttttcgaaaccacccgcgcggcggtcgacgagtgcgatttcgtgctggtcggcggccttactggttgcggcaagaccgaggtgatcgcggcgctggacaacagcctcgatctcgaaggccacgccaaccatcgcggctccagctttggccggcgagccacgccgcagccggcgcagatcgacttcgagaaccgcctggccatcgacatcctgaagaagcgtcatcgtggcgtcggccagttcgtcctcgaggacgaggggcggatcgtcggcagctgctccttgccgctggagctgtaccagggtatgcagagctacccgctggtctggctggaggatgccttcgagcagcgtgtcgagcgtatcctcagggactacgtgatcgatctgcgcagcgagttcgaacgcgtggtgggcgtggaggagggcttcgccgccttctccgcctacctgcagaagagcctcgccggcatcgtcaagcgcctcggcggcgagcgctaccagcggctggcggcgatcctcgtgcaggcgctggaagagcagggccgcgacggctcggtggatacccatcgcggctggatcgaggggctgctcaaggagtactacgacccgatgtacgccttccagcggcagagcaaggaagaccgcgtggagttccgcggcaaccaggccgaggtgatcggctacctgcgccagcgtcaggcgttgcggccatcgtag

SEQ ID NO: 348210 - DNA, 348 bp, Pseudomonas aeruginosa; identical to SEQ ID NO: 347224

SEQ ID NO: 348211 - DNA, 609 bp, Pseudomonas aeruginosa; identical to SEQ ID NO: 319832

SEQ ID NO: 348212 - DNA, 408 bp, Pseudomonas aeruginosa; identical to SEQ ID NO: 319833

SEQ ID NO: 348213 - DNA, 1959 bp, Pseudomonas aeruginosa
atgctggggttgctgcgcaggcgtctggccgatctcggcacggcgaagaaactggccatcggttttaccctggtcctgctattgaccgcgctggtggccgcgctcgcggtgctctcgctgcatgcgctggggcagcgcttcgcgcgcctgcaggagatgagcgcgatcaatcgcgacgtgctggaggttcgccaggccgagaaggaatttgccctgcacggggaaaagagcgacgccgagcgcttgcgccagcgcctggccgcgacccttgaacgggtgggccggctcaaggccgacggcgacgccgatcaggcgcttggcatggccgaggtggagcaggtgctggcggcatacctagaagcgttcggccgcttcgagcagtccatccagggacgccaattggcttgggaaagcgccagttggtcgctgaacggcgccgccaacagcctcgatatcctccagtccagcctggccgaggatggcgcctatgcgctgaaggagagccaggggcacgacggcgagccgctgttgcagcaggcggcccaggtcgcccaggtcaatcgcctggtccttcaggggctggacgaggcccgctcgcgtctcgaagcgcgcgccgcggatgcgcaggaggggccgccaaaatcgctgcgcgaggcgctggagctggcagcccggctggagcaggcgatcaccgacgatgcctacgtgtcggtggtcaaggacgtgctgaccaatatccgcggtttcgccgacaagctcgccgagtaccgcgccagtcagctccaggagcggcagatgtacgccgccatgggcgagcgcgccgggcaggtgatggcgcgtgtcgaccgtagctgggaggcgcagcagcaggccatgctccacagcctgcggacaaactccctgctgatcgtcggcgccgccgtgctggcgctgctggtgggcctgggcgcggccttcggcatcagcctgctgatcgtccgtccgctgcgccaggcgatgggtgtggcgcagcggatcgccgaaggcgaccttgcggtacgggtcgacagcgagcggcgcgacgaggttggccaactgatggccgcgatgcgcgccatgaccggcagcctgcgcggtatcgtcagccagttgcaggacggcgtcgggcggattgccggcgcttccgaggcgctgtccggcgttaccacgcgcacccgcctgggaatcgacagccagcgggcggaaaccgaacaggtggccacggcgatgaaccagatggccgccaccgtccatgaagtggcgcacaacgccgaggaagccgcgggggcggcggaaagcgccgacggcaaggtcagcgtcggccaggaggtggtacgccagaccctggagcggatcgagcgactggccgaggcggtgcgcgcggccaccgccagcgtcgaggcgctgagcgccgacagccagcgcatcggcagcgtgctggacgtgatcaagagcgtggccgagcagaccaacctgctggcgctgaacgccgccatcgaggcggcgcgggccggcgaccagggtcgaggcttcgccgtggtcgccgacgaggtgcgggcgctggcgcggcgcacccaacagtccacggccgagatcgagaccctgatcggtgccttgcagaatggcacgcagcaggcggtgcagcgtatgcagcgcagccaccagttggtggaccagagcgtcgacgacgcgttgcagaccgaggcggcgctgggcaacatcgctacggcggtggcgctgatccagcagatgaaccagcagatcgccgcagcctccgagcagcagagcgcggtcgccgaggagatcaaccgcagcgtcacggcgatccgcgaggtggccgatcagtcggcccaggccatgcagtcgacggcttcgtccagcgaacaactggcggagctggggcgcgaactacagggcatggtcaggcatttccgcttgtag

SEQ ID NO: 348214 - DNA, 1722 bp, Pseudomonas aeruginosa
atgccactcgcccgctgggtacccggactcgatagcctgctccactaccgccgcgcctggttccgtccggatgtccaggccgggctgtcggtagcggcgatccagatccccaccgccatcgcctacgcccagatcgccggcttcccgccccaggtaggcctctatgcgtgcatcctgccgatgctgatctacgccctgatcggcagctcgcggcagttgatggtaggccccgacgcggcgaccgcggcgatggtcgccgccgccatcaccccgctggcggcgggcgatccgcagcgcctggtggacctgtcgatgatcgtcgcgatcatggtcgggctgttctccatcgtcgccggcctggcccgcgccgggttcatcgccagcttcctctcgcgaccgatcctggtcggctacctcaacggcatcggcctgagcctgctggtcgggcaactgggcaagctgttcggctacgaggcggcgaccagcggcttcgtcgccggcatcctcgcgctgctggggaacctgctgcacatccattggccgacgctgatcctcggcagcctctcgctcttgctgatggtgctgctgccgcggcgcttcccgcagttgcccggggcgctctgcggcgtcctcctggccagcctcgccgcggcgctgctgggcctggatcgctacggcgtggaactgcttggcgaggtaccggccgggctgccgcaactgagctggccgcagaccagcctggaggaactgaaaagcctgctgcgcgacgccaccggcatcacggtggtcagcttctgcagcgccatgctcaccgcgcgcagcttcgccgcccgtcacggctacagcatcaacgccaaccacgaattcgtcgccctcggcctggccaacatcggcgccggggtctcccagggcttcgccatcagcggcgccgactcacgcaccgcggtgaatgacatggtcggcggcaagacccaactggtcggcgtggtcgccgcgctggtgatcgccgccaccctgttgctgctgaacaagcccctgggctgggtgccgatgccggcgctcggtgcggtcctgttgctggccggctggggcctgatcgacgtgcaggcgctgaaaggcttctggaagctcagccgcttcgagttcagcctctgcctgctgaccaccgtcggcgtgctcagcgtcggcgtgctgccgggaatcttcgtcgcggtcagcatcgccgtactgcgcctgctctactacacctatcgcccgagcgacgcggtgctcggctggatgcacggcatcgacggccaggtcgagctggccaagtacccgcaggccaccactcttcccggcctggtgatctaccgcttcgacgcccccctgctgttcttcaacgccgactacttcaagcagcgggtgcttgccgtggtggacggcagcgagcggccgaatgcggtgctgctcaacgccgaagccatgaccaacctcgacattagcggcctggccaccctccacgaggtgcaacagatcctcaaggcccagggcgtgcacctgtcgctggcgcgggtgaccgggcagacgctggacctgctgcaacgctcgagcatgctcggcgagatcaagccgccgctggtgttcagctcggtgcgctccggggtcagtgcctatcgctactggctgcgccagcaggaaagactcgccgcccaggccgcggctacaagcggaaatgcctga

SEQ ID NO: 348215 - DNA, 1005 bp, Pseudomonas aeruginosa
atgacctcccagatcaatcggcaataccagttggcccagcgtcccagcgggctgcccggccgcgacaccttcagtttcgtcgaaaccccgctcggcgaaccggccgagggccagatcctggtgaagaacgagtacctgtcgctggacccggcgatgcgcggctggatgaacgacgcccgctcctacatcccgccggtggggatcggcgaggtgatgcgtgcgctcggcgtcggcaaggtgctggtttcgaagcaccccggcttccaggccggcgactacgtcaacggcgccctcggcgtgcaggactatttcatcggcgagcccaagggtttctacaaggtcgacccgtcccgcgcgccgctgccacgctatctctcggcgctgggcatgaccggcatgaccgcctacttcgcgttgctcgacgtcggccagccgaagaacggcgagaccgtggtgatctccggcgccgccggtgcggtgggcagcgttgccgggcagatcgccaggctcaagggctgccgggtggtgggcatcgccggcggcgccgagaaatgtcgcttcctggtcgaagaactgggcttcgacggcgccatcgactacaagaacgaagacctcgccgccggactcaagcgcgaatgcccgaagggtatcgatgtgttcttcgacaacgtcggcggcgaaatcctcgacacagtgctcacccgcatcgccttcaaggcacgcatcgtcctctgcggggcgatcagccagtacaacaacaaggaagcggtgcgcggcccggccaactacctgtcgctgctggtcaatcgggcgcgcatggaaggcatggtggtgatggactatgcccagcgcttcccagaaggcctgaaggagatggccacctggctggcggaaggcaagctgcaatcgcgcgaggacatcgtcgaaggcctggagaccttccccgaaacgctgctcaagctgttcagcggggaaaacttcggcaagttggtgttgaaggtctga

SEQ ID NO: 348216 - DNA, 762 bp, Pseudomonas aeruginosa
atgagcaaacttctttccggccaggtcgcactggtcactggcggtgcggcgggcatcggccgcgctaccgcgctggccttcgccgccgccggggtcaaggtggtggtcgccgacctggacagcgccggcggcgagggcacggtcgaagcgatccgccaggcaggtggcgaagccctcttcattcgctgcgacgtcacccgcgacgccgaggtcaaggcgctggtagagggttgcgcggcggcctacggccgtctcgactacgccttcaacaacgccggtatcgagatcgagcagggcaagctggccgacggcaacgaagccgagttcgacgccatcatggctgtcaacgtgaagggcgtctggttgtgcatgaagcaccagatcccgctgatgctggcccagggcggtggcgcgatcgtcaacaccgcctcggtcgccgggctcggcgcggcgccgaagatgagcatctacgctgcttccaagcacgcggtgatcggcctgaccaaatcggcggcgatcgagtacgcgaagaagggcatccgcgtcaacgccgtgtgtccggcggtgatcgacaccgacatgttccgccgcgcctacgaggccgatccgcgcaaggccgagttcgccgccgcgatgcatccgctgggtcgggtcgggcgggtcgaagaaatcgccgccgcggtgctctatctgtgcagcgacaacgcaggcttcaccaccggtatcgccttgccggtggacggcggggcgacggcgatctga

SEQ ID NO: 348217 - DNA, 477 bp, Pseudomonas aeruginosa; identical to SEQ ID NO: 319841

SEQ ID NO: 348218 - DNA, 1167 bp, Pseudomonas aeruginosa
atggccttctctgaacgcatctcccgcctgaaaagctccttgatccgcgaaatccttgccgcggcgcagcgtccggaggtgatgtcgttcgccggcgggctgccggccgagccgatgctgccgaaggtgcagtgggagcagatgccggcctccatgggccagtacggcatgagcgaaggcgagcctgccctgcgcgaagccatcgccgccgaagcgcgtgccctcggcgtcccctgcgaggcgagccaggtgctgatcgtcagcggttcgcagcagaccctcgacctggccagcaagctgttcatcgatccgggcaccgaggtgctgctcgaggcgccgacctacctcgccgcgctacaggccttccaattgttcggcgccgattgcgtgaccgtgccgctgggtgccgagggccccgacctggttgccctgcggcagcgcctggagcgacacaagccggccttcgcctacctgatcccgactttccagaatccgtccggcgtgcgctacagcgaggaacgccgcgacgcggtggcggcgctgctagacgaattcggcgtgaccctgatcgaagacgaaccctatcgcgaactggtgttcgacgagggccgcgcaaccccgctggtcagccgcctgcgcaagtccagctggatctataccggcacggtgtcgaagaccctgctgccgggcctgcgcgtcggtttcctgatcgccaccccggacctgttcccccacctgctgcggctgaaacagtcggccgacctgcataccaaccgggtagggcagtggcaggcgctgcaatggttcggcagcgaggcctaccgccagcacctggccgaactgcgcgagttctaccgggtccgccgcgacgccatgcaggaggcgctgctggagcacttcggcgagctggccgaatggaatatcccggagggcgggctgttcttctggctgaccctcaggcagccgctggatacccgcaccctgctccagccggcgctggccgccgatgtcgcattcatgcccggcgaacctttcttcgccgagccggagcagaacctcgggcgtctgcggctgaacttcagccacgtcgccccggagcgcctgcacgaaggcctgcggcgcctggccaaggtcgtccgcgacgcccaggccgccgaagcggcctga

SEQ ID NO: 348219 - DNA, 603 bp, Pseudomonas aeruginosa
atgtacaaggtctacggtgattaccgttcgggcaactgctacaagatcaagctggccatgtcgctgctcggcatcgactaccagtggataccggtggacattctcaagggcgagacccagaccccggagttcctggcgaagaaccccaacggcaagataccggtgctggagctggaggacggcagtttcctgtgggagtccaacgccatcctcaacttcctcgccgacggcagcgccctgttgcccagcgaaccgcgcctgcgcacccaggtgctgcaatggcaattcttcgagcaatacagccatgagccctatgtggccgtggcgcgcttcatcaagctctacctcggcctcccggaagcccgccgcgccgagttcgaagagaagaagatcggcggctacaaggccctcgacgtcatggagaaacagctgtcgcgcacgccattcctggtcggcgaacagttctccatcgccgatatcaccctctacgcctacacccatgtcgcccatgaaggcggcttcgacctgacggcctacccggcgatccgcgcgtggatcaagcgagtgggggaggtgccggggtatgtggggatgctggattga

SEQ ID NO: 348220 - DNA, 1557 bp, Pseudomonas aeruginosa
atgacctattcgagcaagctctcctcgcattatctggaactcgcggaacagccgatttcaaaggatgtctttgcgggtgaggatgtgcgtttttccagcgaatacgaggcgctggaaaatgagctgggcaaggcgctctcgctccatgagaacggccagaccgactggttgaaaatcctggaaaacagcgaagcgctgcttcgtgcccaatccaaggacctgcgtgttgcagcctggttgacctgggccctctaccaacgggaatcctttcccggtttgctggccggactgggattgctggaacgtctgtgcagccggcactgggtcgagatccatccgctcaaggcgcgcactcgcgccgcggccattgcctggctggtgccccggctggagcaggcgctgaacgagaacgtaccgatcaaggagcaactccccctgttccggcgtctcgccgagcacctggaaaaactcgataccgcgctgaccgcgcaactgggcgacgacgcgcccttgttgctgccgatcagccgacgcctttcgggcatgctccagcgcgccgccgacaaccagcccgaacctggcgtggtcggcgccgtggtggcccaggtcaagcaggcggccagccagttgctggcgccgggtgcgcccatcgacaacgagcgcgacgcccacaaggccatgcgcgcccagcaggaggccgcacgccccctgtgcgcctggtggctgaagcagaaagccaccgatctgcgcgcgctgcgcctcaaccgaacgatgctttggctgcccatcgagtccatgcccgagcgcaatgccgaacaggtcaccgcgctaaggggagtgccggcggacaagctgaaaagctaccaggagcgtttcgcccagggcctgtacgccgatctcctggtggagctggaggcgagcctggcacgggcgccgttctggttcgacggccagcgcctggtctgggagtgcctgcaagggctcaacgccgagcaggcgatgcgggaagtcgaaatgcatttcgccttgctcctgcagcgtctgccggggctggtggagctgcgtttccacgacggcagcgcattcgccgatgcggccacccgcggctggatcagcgcccatgtcatgccccatctccagaacgacagtgcgccgcgcaaggtcgagaccgtggccctgcaggccgaatgggacgtcgccctggacgaggtccagccggtgttgcgcaaggacggcctgaaggcggcggtacaggtgttgaagcagggcatgaagcgcgcccacggcgggcgcgcccggttcttctggcaactgagcctcgcgcgactgtgcttcctggcgaagaagtacgagctggccaagacccagctggagagcctcgaccatcagttgcacgaatcgggattgcacgcctgggagcccgatctggcgctggatgtactgcacctgctgcatagctgctgcgagctgttgccgcagaaccacgccgtgcgagaacgcaaggaagacatttatcgcaggctgtgccacctcgatctcgaggtggtgctcgaatag

SEQ ID NO: 348221 - DNA, 507 bp, Pseudomonas aeruginosa
atggccaaagaaggctcggtagccccaaaggaacgcatcaacgtcaccttcaagcccgccactggcggtgcccaggaagaaatcgaactgccgttgaagctactggcgatcggcgattacacccagcgcgcggatgagcgcaaggtggaggaccgcaagccgatcggcatcgacaagatgaccttcgacgaggtcctggccaagcaggagctggggctgacgctgagcgtacccaatcgtctccaggaggagggcggcagcgacgagctggcggtggggctgcagatcaactcgatgaaggacttcaacccggccagcatcgtcgagcaggtgcccgagctgaagaagctgatggagttgcgcgatgcgctggtggccctcaagggcccgctgggcaacgccccggcgttccgcaaggccatcgaaagcgtactcgccgacgacgagtcccgtagccgtgtgctgggcgagctggggctgagcgccgccccctcccaggacgcctga

SEQ ID NO: 348222 - DNA, 1476 bp, Pseudomonas aeruginosa
atgagcaccagtgccgcacagcaaggccggaaccagaacggcgaatacaacattctcgacagcatcatcgccgagacccgcctgagcccggacgacgaggcctacgacatcgccaagcgcggcgtctccgccttcatcgaggaattgctcaagccgcagaacgacggcgagccggtgaagaaggcgatggtcgaccggatgatcgccgagatcgacgccaagctcagcacgcagatggacgagatcctccatcatcccgatttccaggcgctggagtcggcctggcgcggcctgcaactgctggtcgaccgcaccaacttccgcgagaacatcaagatcgagattctcagcgtttccaagcaggacctgctggacgatttcgaggactcgcccgaggtgatgcagtccggcctgtacaagcacatctacaccgccgaatacggccagttcggtggccagccggtcggcgccatcatcgccaactactacatgtcgcccagttcgcccgacgtcaagctgatgcaatacgtctccagcgtggcctgcatggcccatgcgccattcgtggcggccgccggtccgaagttcttcggcctggaaagctttaccggcctgccggacctgaaggacctgaaggatcatttcgaaggcccgcagttcgccaagtggcagagcttccgccagtccgaggattcccgctacgtggcgctgaccgtaccgcgcttcctgctgcgcacgccctacgatccggaagagaatccggtcaagtcgttcgcctacaaggagaccgtggccaacagccacgagcattacctgtggggcaacaccgcctatgccttcggcaccaagctgaccgacagcttcgccaagtatcgctggtgcccgaacatcatcgggccgcagagcggcggtgcggtagaggacctgccgttgcaccacttcgagagcatgggcgagatcgagaccaagatccccaccgaggtgctggtgtccgatcgccgcgagtacgaactggccgaggaaggcttcatttccctgaccatgcgcaagggcagcgacaacgccgcgttcttctccgccagctcggtgcagaagccgaagttcttcggcatcagcgccgaaggcaaggccgcggagctgaactacaagctcggcacccagttgccgtacatgatgatcgtcaaccgcctggcccattacctgaaggtcctgcaacgcgaacagctggggtcgtggaaggagcgtaccgacctcgagctggagctgaacaagtggatccgccagtacgtcgccgaccaggaaaaccccagcgccgaagtgcgcggccgtcgcccgctgcgcgctgcacagatcatcgtcagtgacgtcgagggcgagccgggctggtaccgcgtcagcctgaacgtgcgcccccacttcaagtacatgggggcggacttcaccctgtcgctggtcggcaagctggacaaagagtaa

SEQ ID NO: 348223 - DNA, 408 bp, Pseudomonas aeruginosa
atgaccggatacggcagcctgttcgagcgcctgaacggcgacgcggataagcgcgtcggctggagccgcgaggtttccgccatggcgtcggtggctgcccatctgggcaagatgctcagcacccgggcgggcagcgtgcagacgctgtccgactacgggttgcccgatctcaacgacatgcgcctgagcctgcacgactccctgagccaggcccgctcggccatcgaaggtttcatcgaggcttacgaaccgcgcttgagcgacgtgcgtgtcgtttccctgccacgcgacaacgaccagctccgcctggccttcagcatcgaagggttgctggaggtggaaggtttcaagcgccaggtgagtttttccgcatgcctggatggcagcggccaggtgaaggtcagctaa

SEQ ID NO: 348224 - DNA, 1008 bp, Pseudomonas aeruginosa
atggaaaccgcgcatgggtttgcagcccctgctgtaagcgcgctggcccggggcattcgcgagtactcgctgttccaggcggtcctgctggtcatggatcgcctgcgccaggaacatcccggcctgggagacgaggcgctctacgatcagttggaattccaggccaatcctagcctcggcttcccgggcagcgatgtcgatcgggtggagttcttcgaagagcgcggcatgctgcgggcgcggctgcgtttcaacctgatcggcttgttcggtgccagttcgccgttgccggcgttctacagcgagcaggctctgggcgacagcgaggagggcaatcctacgcggaacttcctcgatctcttccatcaccgcctgcatcggctgctgttgccgatctggcgcaagtaccgctaccgggtgagcttccagagcggcgcgagcgatgcgttttccgcccaattgttcgccctcgtcggattgggcggggaagagatccgcaaggccagggaactgaactggaaacgcctgctgccctacctgggcctgctcagcctgcgggcgcactcggcggccttgatcgagtcggtgctgcgctactacttcaagcatgccgaactggtcgccgagcagtgtatcgaacggcgcgtcgcgatcctcgaagagcagcgcaaccggctcggcctgttcaacagccagcttggcgaagacgcggtgctgggcgaacgggtccgcgaccgcagcggcaagttccgcattcatatccgccagctcgactggcagcgcttccacgagttcctgccgatcggtcccggctaccagccgctttgcgcgctggttcgcttcaccctgcgcgacccgctcgactacgacatccggctggtcttgcgccacgaggaaatccgtgagttccgcatcggcgcgcagaacgcctgccgccttggctggaccagctggctgggccgggagcgcgcggatggcgtggtgacgctgggcagcaagattcattaa

SEQ ID NO: 348225 - DNA, 2628 bp, Pseudomonas aeruginosa
atgatcaacgtagacctgcaacaactgattcaggcgctggatgccgacacccggcgcgacctcgaaggctcggccgagcgctgcgtagcccgtggtggcagcaaggtactggtggaggacctgttgctgggcctgctggagcgtccccagggactgctggcgcgcgccctgcaggatgccgcggtggacgccggcgaactcaacgccgcgttgcaagcgcggggcgagcatagtgcctcgcgcaatccggtgttcgcgcccgagctggtgcagtggctgcaggatgcgctgttgctggccaacctcgaactgggccgtagccagatcgaccaggcggcattgatcctggccctgctacgcaacccgttgcgctatgccggcagccgctaccagccgctgctggcgcggctcgacatcgagcggttgaaggatttcgcgctctcgcagccgctggagggcgcgcccagcggcaagccgggcggcggcgagtccctgttgcagcgtttcacccacaaccttacccagcaggcgcgcgacggcaagctcgatccggtgctctgtcgcgacggggctattcgccagatggtcgacatcctggcccgtcggcggaaaaacaaccccatcgtggtcggcgaggccggcgtcggcaagaccgccatcgtcgaaggcctggcctcgcggatcgccgcaggggaagtgccgccggcgctgagggacgtcgagctgttgtccctcgacatgggcctgttgcaggccggtgccagcgtgaagggcgagttcgagcggcgcctgaaaggcgtcatcgacgaagtgaaggcagcgctcaggccgaccatcctgttcatcgacgaggcccatacgcttatcggcgcgggcggtcaggccggcggctcggatgccgccaacctgctaaagccggccctggcacgtggcgagttgcgcaccatcgcggcgacgacctgggccgaatacaagaagtatttcgagaaggacccggcgctggcccggcgcttccagcccgtgcagttgcatgagccgagcgttgccgaggcggtgacgatcctgcgtggcctggcccgggtttacgaggaaagccacggtatctacctgcgcgacgacgcggtggtggccgccgccgaactgtccgcccgctacctggcgggtcgccagttgccggacaaggccgtcgacgtcctcgacaccgcctgtgcgcgggtgcgcatcagcctggcggcggcgccggagagtctcgagcgcctgcgcggcgagctggccgaaggcgagcgccagcgccaggccctgcgccgcgatgccgaggcaggcctgccgatcgaccacgatgccctgcaggcgctggaggagcgcctggcccaggcggaaagcgagcggcacgtacaggaggaccagtggagccgccagcgcgaactcgccgagcgcctgctcgccctgcgccagcaattggccagggcccgcgaggcgaaccgggaagagcagggcggcgaggcgaacgcggagactttcccggccgacgagcatggcggtgtcgaagccctggaaaaggcccttcacgaaacccgccaggcactcgccgatgcccaggcccaggggcggctggtcagcttcgaggtctgcccgcgcctggttgccgaggtgatcggcgcctggaccggcgtaccggtggaacaactggcgcgggaacacaacgccaaggtgatggggttcgctgacgacctgcgggcgcggatccgtggccaggaacaggcggtcagcgccctggaccgcgcgatgcgcgccaccgcggccgggctgaacaagcccgatgcgccggtcggcgtgtttctgctggtgggcccgagcggggtgggcaagaccgagaccgcgctggcgctggccgacctgctgtatggcggcgagcgtttcatcaccaccatcaacatgtccgagttccaggagaagcacaccgtctcgcgcctgatcggcgcgccgcccggctatgtcggctatggcgagggtggcatgctcaccgaggcggtacgccagaagccctattcggtgatattgctggacgaggtggagaaggccgatccggacgtgctcaacctgttctaccagatcttcgacaagggcgtggccaacgatggcgaagggcgcgagatcgatttccgcaataccttgatcctgatgacctccaacctcgccagcgagcacatcgccgcgctttgccaggacggcgcgcggccttccgccgaactcctggaggaaaccatccggccggcgctcagccggcatttcaagccggcgctgctggcgcgcatgcgcgtggtgccttactacccggtgggcggcccggtactgcgcgagctgatcgagatcaagctgcaacgcctcggcgagcgcctggcgcgccgtcaactggctttcgactacagccaggcgctggtgggccacctggccgagcgttgcacccagagcgacagcggcgcacggttgatcgaccacctgctggacacgcacctgctgccgctggtggccgaccgtttgctggaagcgatggcgcgcgacgagcgtctcgagcgggtccatgcgacgctgggcgagcacggccgcgtgctctgcgagttcgcctga

SEQ ID NO: 348226 - DNA, 1512 bp, Pseudomonas aeruginosa
atgttcagccgcgtaccgcaacccctggccttcgccgaagccctgctcgctcagttcggcgcgctgtcgcgggaaaccgacatcacggccctgctgggcggtttcgcacgcgcagtcggcgaactcagcggctgcgagctgagccagttgtatctgctcgaccagacccataccgcgctcaccctcaacgccgaatgccgggacggcctgttgcaggcgctggagccgtcgagcctgccggcggactacaccggcgagcagttgctgcagttcgccctgtgccagaaccgcgtggtcagtctcgtcgacctgccgtcgcggctgcacgagaccggcttcctgccggcaggggagcagccctggctgtccctgctctgcgttccgctggtgagcccggagaaaacggtcgagggcatggtggtctgcgctacccggcgcccactggacctgcagggattcgcccatccactgggccagctgggctcgttcgtgctggcccagctgcatctgctgcaacgcctctcgcaaccctccggcgagccgcagggaccgtccagcgcaccggtggtcagcggctacgggctgatcggcaggagcgcggcgatgcgtgagacctgccgcctgatcagcaaggtcctgcacaacccctataccgtgttgctgcagggcgagaccggcaccggcaaggaggtggtcgcacgggcgatccacgagtacggcccgcggcgtgcacaggcgttcgtggtgcagaactgcgcggcgtttccggaaaacctgctggaaagcgagctgttcggctaccgcaagggcgcctttaccggtgccgagcgcgatcgtcccgggttgttcgatgccgcggatggcggaaccctgctgctcgacgaaatcggcgacatgcccctctcgctccaggccaagctgttgcgcgtgttgcaggaaggcgagattcgcccgctcggcggcaacgacacgcacaaggtcgatgtacgcatcatcgccgctacccaccgtgacctcgccctgctggtacgcgatggcaagttccgcgaagacctctactaccggctggcgcagtttcccatcgagttgccgccgttgcgccagcgcgagggcgacgccctcgaactggcccggcatttcgccgagcgcgcctgcgtgttcctgcgccgcgcgccgctgggctggtccgcggaagcgctggaactgctcgacggctatggctttcccggcaacgttcgggagctgaagggactggtggaatgcgcggtactgctctgcgaaggcgagatgctgctggccgaacacttttccctgcgcgcgcccccggaagcggaggcgccgctcaagctgcgcgagcatctggagcagatcgaacgggacctgctgctcgcctgcctgcgcaggaacgctggcaaccagaccctcgccgcgcgcgaactgggtctgccgcgacgaaccctgatctatcgcatgggacgcctgaacattcatttcggcgatccccggacctga

SEQ ID NO: 348227 - DNA, 141 bp, Pseudomonas aeruginosa
atgcctgttcgtcactggcccgccgtgcttctggccctggccgtcctctgcggcctcgccggttgcagcggcaactacaaattcaacgacggcgactatcgcccgcttggcgatccgcaggcggtcaatcgcggcaagtga

SEQ ID NO: 348228 - DNA, 1194 bp, Pseudomonas aeruginosa
atggaactggtattggaaatgctcagcgccaagcaattcgtaccgacggagctatgcagcaagaccttcggcaggaacggcggcctcatcggccgcggcggtgagtgcgattgggcgattcccgatcgcaagcggcacctgtccaagcagcatgcgcgggtcagctatcgcaacggcgcgttctacctgaccgacaccagcagcaacggcatccgcgccggcaacggcagccgcctgccgcatggcgagccgcagcgcatcgagcaggacagcgtcttcctgctcggcgacttcgagatccgcgcgcggttgctgcgcgagcccgacgagctcgccatggacgtcgggcggccgcagccggcgggcagcatcattccggacgatgccttcctggccctcgatccgttgcaggcgctcgaccaggacggtgcagatgcctacgaactcgacgacctgagcgcgatcgcccagcccagccaggaggccggggcgcgtgcggactacgcgcggatcgacatggaaagcctggtcgtaccggagctggtgcccgccccggcggctccgcaggaacccgtggaaagtccgcgtccgggtcgcgacgaagccttctggcagcgtttcggccaggccctgggaatggacctcgaaggcctcgacggcgctgcgcgcgaagcgctggcgatcgacgccgccggtttgctgcggcagtgcatcggcggcttgcagcagagcctgcggactcgcagcgaactgaagaacgaactgcgcctgtcgctgagcacgttgcgcgataccggcaagaatcccttgcgcttcagcgccgatgccagcgaggcgctggggcatctgctacgggatggcaagcctggccagttgagtggcgaacaggccgtcgcacgcagtttccgcgacctccaggcgcaccaggtggcgctgctcggcgccagccgggcggcggtgcgcgcgaccctcgagcatttctcgccgcagcagctggccctgcgtttcgagcgcgacggtcgccggccgttgctggccacctcgggcagccgctggcgtgcctacggtcgctaccaccagtcgctatgccaggacgacgattggagcgagcgtctgttggcgcgtgatttcgcccaggcctacgaagagcaggttcgcctgatttccaccctctacaccgagcaccaaggatga

SEQ ID NO: 348229 - DNA, 507 bp, Pseudomonas aeruginosa; identical to SEQ ID NO: 347242

SEQ ID NO: 348230 - DNA, 1332 bp, Pseudomonas aeruginosa
atgaacgtgcacaagatcgtctggcaggaaggcatgctgctgcgcccgcagcacctgcaacacaacgaccgctactacgacaaccagatgaaggcccggacccagttgctgggcagctacaactggggcttcctcgccctggagctggaccgccagttcctcaacatgggcaagctggtgatcagccaggcctccggcgtattgcccgacggcagcctgttcgaactcggcggcaacaccgagccgctcgccctcgacgtgccgcccaatacctcgaacgtgccgatctacctggccctgccgctggtcaccggcaaccacatcgaggcgcgccggccggagcaggccgaggtcctggcgcgctataccgcctatgacctggaggtggcggactccaacgccggcgaggattccatggtgcaggtcagctgcgcgcggccggattttcgcctgctgctcggcgagcagcagagcgaccaggcctacgtcaaactgaaggtggcggtggtgctggataccacgccggacggggtgatcagcctcgaccccgacttcgtgccgagctacctccacgcccacgcatccgcctacctgctgtcctgcctgaaggaggtgatcagcatgctcggccatcgcggcgacaccatcgccgagcgtatccggtccaatggcaaggtcggcggcgcggaggtcggcgatttcatgatgctgcaactgatcaatcgcaccgagttgctgctgcgccactacctgggattggagcaggtgcatccggagcagttgtaccgggtgctgctgaccatgctcggcgacctcgccaccttcggcagcgagagcaagcgtccgcgcctggacagccgttaccagcacagcgaccagggcgccagcttccgcaggctgatggaggcgatccgccaggtcctgtcgatggtgctcgagcagcatgccatcgaactgcctctccaggcccgccagtacggcatcctggtctcgcccctgcacgaccacaagctgctcggcagcgcctcgttcgtgctcgccgccagtgccaattgcgagtcggaggaactgcgccagcggctgcccgcgcatctcaaggtgggtgcggtcgagcacattcgccaactggtcaacctgcacctgccggggatccgggtcaagccgctgccggtggcgccgcggcagatcccgttccactccaacaagacctatttcattctcgaacccaacgccgaggacatggcccagctggagcgctccggcggtttcgcgttccacgtatccggcgagttctccgagcttgaactgaaattctgggccatcaggaactga

SEQ ID NO: 348231 - DNA, 870 bp, Pseudomonas aeruginosa
atgatcaaggaaagggaataccacgaggacgagaagaccgtcctcctcgatcaccagggacaggtaccggcccaggggccgctgaccgatttcgccgaaccgccgcgcttcgaacagctcgaggagcggatgatctacgcggcgcgcctgcgtccgggcgaggccttcaacgtcagcctgaacccgctggtggcggcggcttccgaactgctttcggaagtggtccggctcaagcacagcaccgtgctggagaaccttgcggcgctcaaggagcggttgacctccgccatgaagctcttcgaattccgcgccgtgcaggatggcgtggaaaacagccaggtcatggcggcgcgctacgtgctgtgcacggtggtcgacgaggcggtggtgaccaccccgtggggcaacgaaagcgaatggtcgaagatcagcctgctgagcagcttccataacgagaccttcggcggcgagaagttcttccagttgctcgaccggctgtcgaagaacccggtcaagcacctgccgatgctggagctgatgtacctctgcctggccctcggcttcgagggcaagtaccgggtgatggctcgcggcgtgctcgacctggacggtatttccgatgcgctctaccggcagatccgccagttgcgcggcgacgtgccgcgcgaactgtcgccgcactggcaggggctcagcgaccagcgtcgcggcctggtgcggatcgtgccctggtggatggtggcgctgttcaccctggtctgcctagtggtgatgtattcgggattcgcctgggttctcggcgaacaacgcgacacggtgctgcagccttaccagtcgctcgatgcggcggcaggacagcccggttcgtaa

SEQ ID NO: 348232 - DNA, 3516 bp, Pseudomonas aeruginosa
atgaaaaacttcttcaagaaagtcggcgccttcctgcgcaagacgtgggtctggacgctgttgctggtactcctggcggcattgctggtgtggttcgtcgggccgctgctggcggtcgccgactacaagttctgggaaagcccgacctcgcggttgctgagcatcagcctgatgttcctggtctgggggctggcgatggtcttcgtcagctggcgcgcgggagtgcggcgcaaggccgtcgaggacagcgacgagggccaggagcgcctgcgccgcgacggtctgatcgaagacgaacagaaggaattgcgcagccgcttcaaggacgccttgcgcaccctgaagacctccagcctgtaccgcggccgcagcgagcgctggcgcaacgagctgccctggtacctgctgatcggcccgcagggaagcggcaagaccagcctgctggacttttccggactggaattcccgatcaaccggatcgaccgcaagctgacccgcgacaccgccggcacgcgctactgcgactggtacttcgccgaccacggcgtcctgatcgacaccgccgggcgctacctgacccaagccgacggcgaggtcgacgggggcgcctgggcgaccctgctcggcctgttgcgcaagcgccgccgcgcacggccgctgaatggcgtgatggtgtcgattccggtggaaacgttgctcagcgacgacgagatggcgctggatacgctggctcgccaggtgcgcgcgcgcctgcaggaaatccagcagaccctgcacctcgatctgccggtctacctggtgctgagcaaggccgaccagttgctcggcttcgacgagttcttcgaccagttgagccgcgaggagagcgaccaggttctgggcaccagcttcggcaaggagcagaacggcaccgatgtgacggtcctgcgccaggcgttcgaggaccttctgcgacgcctgaacagccaggtgatcatgcgcatccaccaggagcgcgataccctgcgtcgcggtcgcatcctcgacttcccgcaccagcttggccagatcggcgagcggttgtgcctgttcgtcgaactcgccttcaccggcaaccgctaccagcgcgccagccgcctgcgcggcttctacctgaccagcgcgccgcacctggcccagcagctggacgaggacaccgccggcatcggcgccaacctggggatcgccagcggcctgctgccgaccctgcgcaacgggcgctcgcgcttcatccatcacctgctgagccaggtgatcttccccgaggccaacctggcaggtctcgatcgccgcgaacgcacgcgcatccactggggccagcgagccctgtacgtcggttcgctggcgctccttctgctattcggcctgctctgggctggcggtttctcggccaaccacgagcgcctggagcgggtccgcgagctggcgcagcaatgggcccagcagcgccaggcgcttggcgagcgcgaagacgccatggcggcgctgaagacgctggatagcagctatgcggcgaccaccgtgtttccgcccaaaggggaagtctcgctgcacgagcgcgccgggctgtaccagggcaacgaggtcaacccgccgctggccgcggcctatcgccgcgagctggagacgcaactgctgccgcgcgtggcacggatgctcgaagcgcagatccgcggcaacatgcagaatcgcgaacgcctgctcaacagcctgcgggcctacctgatgctgaatctgcgcgagcgccgcgagagcggatggctcaaggactgggtggctaccgactggtcgcagcgctatgccggcaacggcaccgtgcagaatggcctgaacacgcatttcgcccgtctgctcgagcaaccgttcagctatccgctgaacgagaccctggtggcccaggcacgccaggtgctgcgcagcgagtccctggccaacgtggtctaccgggtgctgcgcgaacaggcgcgaagcctgcccgagtatcgcttcggccagcacctggggccgcaggccggtctgttcgtcggcaccgactacgtgatcccgggcttctacacccagcagggctaccagcagtacttcgtggtccagggcgccagcctggtcaacgacatccttcgcgacaactgggtcctgggcgagggcagcgggatcagcgacatggacctgcggcgcctgatggtcgaactcgagcagctgtatttccgcgactacgcgaacttctggagcgaggcggtcggacgcctgggcctgctgccgttcaacgatgccggcgagggcgccgaccaggtttccgggctgctcgccgccaactcgccgatcctccagttgttgctggaggtccgtgagaacacccgtttcccggtcctggcggagagcgccgaggcgctggcagaggccagcgacaaggccgcggaaaagggcggcaagctgggcaaggcggccggcaaggccagggacgcgttggcgaagaacctgccggataccgcgaagaagtccctgcaacgccgcttcgagcccctgcatcgcctgctcgacgataacaacggcccggcggccgacctcaccccgctgttgcaggcgctcaacgagttgcagttgcaactcgccggactggcgcgcgccagccagccggagcaggcggctttcgacatggcgaagagccgcatgggcggccagcgcgatgccctgagcaacctgcgcaacgcctccgcgcgactgccgcgaccgctcggcggatggttcagcgtgctggccgaagacgcctggcggctggtcctcggcgatgcctacctgtatctcaaccagcgctaccagagcgagctgtacggtttctacagcaaggcgatcaacaagcgctacccgttcaacgcgcacagcgccagcgatgtcgcggtcagcgatttccgcgagttcttcaaggcgcagggcgtcgccgaacgcttcttcgaaacctacatgcggcccttcgtcagcggcgacccgggcagttaccgcctgcgcagcgtggacggttacagcctgccgatgtccaaggtctatctcgaccagatgggcacggcccagctgatccgccagagcttcttcgccgagaacccggccgagccacaggtgcgcttccgcctggagccctataccctcgatcctggcgtcagccgcgccgagttccgtttcgacggtcagtccatggagtaccgccacggcccgatcgtgccgatgtcgttcaagtggcccagcgacgccgacggcggccgcaccagcctggtgctggagaagatggccggacgaccggtgggaatcgaacgcaataccgggccctggtcgctgttcaggctgttcgacctgatgcagaccgagtacctcagcgggcgtgacgtgatggtgctcaaggccgacctgggcggcctgcgcgccaactacctgctgctcgcccagcgcacgccgaatccgttcgatctcgcggtcctgcgcagcttccgcatgccggtgcagctctga

SEQ ID NO: 348233 - DNA, 729 bp, Pseudomonas aeruginosa
atgcaacgcaccgagccctggcgcagcgcggcacgcacggatcgcggcaaggtccgcgcgcgcaacgaggatgccttcctggactgcccggatcgcgggctctgggcggtcgccgatggcatgggcgggcaccaggccggcgacctggccagccggatgatcgtcaccagcctggcggaactgccggcccgggcgggattcgacgagcgcctgaacgcgatgcgccagtgcctgcactggctcaaccggcgcctgggcgaggaactcaccctcagcgccgaacgcggcgacaggatcatcggcagtacggtggtggcgctggtcgtggagggttcgcgggcggcctgcgtgtgggtcggcgacagccgctgctacctgtggcgcggccagcggctgtaccagctgtcccgcgaccactcgctgttgcagcgactggtcgacgaacggcggatggatatcgagcaggcccgcgcctatccctcggcgcgcgcgctgacacgtgccgtcggcgccagcgaacaactggtgctggacgtgttggaactggaggtgcatcccggggatgtcttcctgctctgcagcgacgggctctacgaagagctgagcgccgatgcgctgggtcgcgcgttgagcctggcatcgccgcaggtggcggtggagcggctgttcgacggtgccctgagcggcgccgcacgggacaacctgacggccgtggtgatccgccaatga

SEQ ID NO: 348234 - DNA, 990 bp, Pseudomonas aeruginosa; identical to SEQ ID NO: 319859

SEQ ID NO: 348235 - DNA, 708 bp, Pseudomonas aeruginosa
atggcgggcttcctacatgttggttgtaacttttttaatagctattttgaactgcagttggggatgggctgtatggacctggaaaattttgggcaatgcctctcatatatgcaagaagttacgcaagggaagggggctttcgagatgctcttaccgtacgggggagcatttgtaggggttgtctttggtttttttctgaattttgcaaaagatgcggtgaaggagtctagagatgttgggagtaaaaaaatttgtatcgatgaagacgttcaccgcttcaaatactccttagagcataccgtggctgaatgtgtgacgatttttagaaatttctcgaactcgcttactcctgactcacatcgatttcctgttgggtttagcctgccgatgctggacgagtatttttcaaaagttgcgcataagtatagtgtggatgagcgttactatctgaaggaattgagtagttacttagaaagtctaaattgcaatttgagtcgggttgtgaagaatgatgccgaatcgcctgctgaattggcggcttgtatattgaatctgatgtctgatgcgatgttgtgtattggggtttgtagtcgcttttatggggaaaagaatgtttatgataggccggaggatatcttgttaagtctgggcttttcttcgtccgatgtcgagatgtatgaaagagcggtgaaactagtaaagaattaa

SEQ ID NO: 348236 - DNA, 1584 bp, Pseudomonas aeruginosa
atgaccgcatcagccggaagcccgaccacgatcatcatcgatctcgatcacagcgacactaatgcaaaacttgaagtgaaccagctcgttcagcatcagagctacaacaagctaagacagcgcattgccgcggatctggagagtttccagaggaaactgccaaccagagcggtaggtagcgcccctcctggcagcgggctggtttacttcattgatggcacccgcggcgcgggcaagtccactttcttgcaaagcgcttttcatgccctaggcaatgaaaagatcgggctgaacgtcagtcctctggcctatatcgatccgagccggattgagcgtagtgaaatcatcctgctaagcatcctgaaggcccttaaagaccgcattacgagctttagaaaaggcgccagtttggctggggagcaacttatcgagcgcttccgcgaacagttcaaaaagctcgctggtggcttgagcctgtttagctcgaaccacgaccagcttcaggatctagatccagagctcttttttgaatggggattagagcgcgcaggacacagtacggagctacgcaaaagcctccatgagctgctcgagttggcttgcacgattctagatgccgatgcgctcgtcctcgccttcgacgacgccgacacccatgcgcaacacgcacgcagcgtgctcgaatgcatacgcaaataccttgatactccaagccttgtggtcctggttactggcgatattgagctgtactcgctgatggtgagagaccatttttacgacagcttgggtgatgctaagcacggccaggggaaagaacgtgcggatcagcgccataagatggtcgaccacttagaagaccaatatctgctcaagcttttccccatgcaccgtcgcttacaattgcgcccactgtggaatctgcttcaacacgatgaaaatcggttccggctgacccattccaaatgggaaaagcagttaactgccaaagaattagtcagtaccttgatccggcgcggcctgcgaatcaaaaatccacgcgatcttgagctctatcaagagttcttacttaaacagcccttgcgctcggtgcttcaggtaatgtcgcgatgcgcgccctacctcacatcagaaggcgcaaatgatcaaaccgatacatgggacctagaactgtccgaagccctgagcgagagcttgcgcgcgttagctctgggtagtttgtataaattcggtgtggatgttgacgccatcgccgctcacgaattacctgcacttaccaaggctgttttcgacttggcagtccgcgatggtgacttcgacacggctgtgtacctccgcccccagccaagtgacgccgatctcaagaacagctttgcggcgctttcagcggatgtaacccgcctgtgcgcggaaaaaccggcggcgctaatcgactacatgctggccgcccccggtagcgtggcgctattcgggcaggttttacggcgcaagggtaaagaccttcagaccgaagaagctcgccagagccttcgcatacagttcgaacaatatatgggcattggtcgcaaagaggacgcactcaactag

SEQ ID NO: 348237 - DNA, 378 bp, Pseudomonas aeruginosa
gtggcgggtgaattcttccagttcgccttcctcgctgcgttcgcgcagcccctggcgctcggcgtcgacgtggcgctccagttcggcgaacttctccagttgccgctggcgttccagcagctctcgccggcactgccgcaggcgctcgcgctccccttcgaggcgctgcgcggcctcggcgcagtcctgttccaggccggcttccttttcccgcagcagccctacctgctgctgccaggcttccaggcgccggcggtcgagcatggccgcctggcaggcgagaaacagccgttgctcttcggccagtcgccagtcgcggtagtcccgttgcgccgcctggcgctcggtgtgttcctgcgccgcggcgcgaacccgtag

SEQ ID NO: 348238 - DNA, 2028 bp, Pseudomonas aeruginosa
atggatttgaagcagctggaattcctggtggcgctcgacgaaacgcggcatttcagccagacggcggcgcgctgccacgttagccagccgaccctgtcgatgcgcctgcgcagcctggaccgctacgccactctgaacaccaccgatcccgccgaaccgcacgacgcacacgctgcgctgctggccgaggaatgcgcgctggccatcagctacaacggtctgaaccatgccgtgatgatggtgacgccgcaggatctggaagagttcgtcgtcggcttcagcctcgctggcgggctgatcgagcgactcgatgacctgcgtgacctgcgcctgctcggcgacggcagcgcccgccgcgcggaggtgcaggtcagcccgcgggcgttctggacactcaagcagcagcgtcgccagctcgccggcaccagcggctgcgggctcaacttcatcagccggccaattccggataagtgggaaaccaccctgcaggagcgtgtcaccttcgcgcccggcgggcgccagctgtacgacagctacctgggcaccggtgggcgcctgaccgacaacttcggcctgcagctggacgtcaacaccatcagtggcgagtacggtcgcgagcattctgagaccgatgtgcagaactaccgcctgcgcggccagtgggatatcgatgacagccgcagcctgagtttcggcgtgcagcgctacatcgccgacatggacctggccggcgccctcagcgtggccgactacaaggacgacccgcggcagtcgacccgcaagctcgatcgtttcgaaggcgacagcgaccgcgtctggggcacctatactcaatacctcggcgccatgggcccgttcgacgacgtggaattcagctggaccaacttcgcccagcacagctatcgcaactttgttgtcgggctgcccttcgcgccggatgccacgccgaccaccctgcaggatgctccccgcgacttccgtgtctggggcagcgagccgcgcctgagcctcggcatcgacggtgatggcgtcagccagacctggctgcttggcgcccgcctggtcaaggaaaacgtcgacttcgatgtcgaccgtctgaacctgaataccggcgccacaagcgtggtgcgcgactgggtattcgataccaagggccaggccgcctatgtgagcaacgaaatcaagctgctcgacgaccgcctgaccctcacccccggcgtgcgctatgagcacgccaagatggagtacgccgacggcgtcagcggcatcgagcgcaagaccgtggccgaagagtggctgcccggtctgagcatcggctaccaggccagcgacgactggttcgtctacgccaacgcgcagcgctcgctgcgggtgcctcaggtgttccagatcgtcagggatggcgtggtgcaggcggaaatctcgcgcaactacgagaccggcgtgcgcttcaccccacaggacaacctgcgcatcgacttcggcctgtaccgcatcgacttcgacgaccagatcgtgttcgccaacagccgcttccagaatctcggcagcacccgccaccaggggatcgagaccgaggtgttctggacgccggccgcgctgccaaccctcgacctgcacgccggctacgcctacctcgatgccgagctgcgcaccggcgacttcaagggcaacgaggtgccgtacagctccaagcaccagttcaccgtcgatggtcgttaccgcttcgccgagttctggacctacagcctggatggcctctacgtcagcagcgcctataccgacgacgccaacagcgccgaggagaatgccagcgcctcagtaggcgagctgcccgcctactggatctggaacaccgccatcgagcgcgagttcaagctgcaggacgacagcgtgctgaccgcctcggccggcatcagcaacctgttcgaccgccagtactacttccgcggcatcgacaccagtcccgagggacgccagccagcaccgggccgtaccctgacactgggggtgaactaccgcttctga

SEQ ID NO: 348239 - DNA, 1131 bp, Pseudomonas aeruginosa
atgagtacgtcattcacgcttgcccaagaccatgcccccaatgtgcctgtcgctggaaagaatcgcgctcggcttgctgcggtgggcgtattcctcgcctcgctcggtctgttttcacttccggctggttcagcgctcgccgcagaagcgcttaaagcacagaccatccccgcaggtgcggacaacttctataaaagcgacagcgtcaccgtgcagaaggtgtctttcaaaaaccagtacaacatgcaggtaacaggcaatctggttacgccgaaaaacctgaatcgccaggccaagacgcccgccattatcgttggccaccctatgggcgcggtgaaggagcaaagctccatgctgtatgcgcagaagttggcggagcaaggcttcataaccttggccatcgatctgtcgttctggggggaaagcgagggtcaaccccgcaacctggtcgcccccgaactctacacggaagcgttcagcgccgctgtcgactacctcggcaccaccgatttcatcgaccgtgaccgtataggtgtactgggtatctgcggtagcggtggcttctccatcagcgcagccaagatagatccgcgtctgaaagccgttgccaccatcagcatgtacgacatgggcgcggtcacccgcaatggcctgaagcattcagtgacgctggagcaacgcaaagctctgctcgttaaggcggctgaacagcgctacaccgagtacaccactggcaagggcattttcctgagctatctgccggctcaacctactgccgaaacagacccagtgacgcgggagttctgggacttctaccgcacgccccgtggcatcgccattccggagggcatgacgcttgagcaaacgcagaaccgcatgctgaccagcgaagttcgcttcatgaatttctatcccttcaacgacattgaaagcatttcgccgcgcccgctgttgttcatcacaggcgaccaggcgcactccaaggaattcagcgaagacgccttccagcgtgctaccgagcctaaggagctttactacgtgaagggtgccgggcacgtcgatctctatgaccgtgccgatctgatcccgtgggaaaagctgaccgacttctaccagaagaatctcaagtaa

SEQ ID NO: 348240 - DNA, 894 bp, Pseudomonas aeruginosa
atggctcagaccaaaattaacgacctgcaagcattcgtggccgtagcccgtgaacagagctttaccaaggctgcggtcaaactgggcgtgacctcttctgcgctcagccacacggtgcgggggcttgaggagcgactaggcgttcggttgctctcgcgcacgactcggaatgtctcgacgaccgaggcgggtgacagattgatgcgctccatcgccccgctgttcgagcagattgctgccgaggtcgaggcgttgaatgacctgcgcgataagccacgaggaaccatccgtatcacctgtacggatgattcgattgagctgtgcgtcagggcgaagctgaagaagttttcggagcagtacccggacatagtgctggaactgttcgtcgactatggcttcaccaatgtggtggaggagcgcttcgacgccggcatacgtttgggagaggcaattagcaaggacatgattgccgtgcgaatcggcagggactggcgcctgtcactggtcgcctcaccggcttacttcgaacagaacccagtgcctgaaactccctacgacttgatgaagcacaactgcatcaacatccgccaccggccatccggaacgatctacgcctgggagttcgagcgcgacggcaagccgttcacggtgaaaggggaagggccgttggtcttcaacagcatcatccacgtgctcaacgccgccttggatgggattggcattggctatgtacctgaggaactggtcgcgccttacctggctgatggccggctcaaggaagtgctgcccgagtggtgcccaaccttccagggttaccacctgtactacccaaaccggcggcaggcctctccggccttcgctgccctggtggaggcacttcgatatacgccttga

SEQ ID NO: 348241 - DNA, 1218 bp, Pseudomonas aeruginosa
atgaaaaacccaagcatcgagctggccctagaggcctctctcgccatagataaacccacccactggagcggtgtgtgggccatgacgctctgcgttttcgccttaatcgcgtcggagttcatgcccgttagcctgctgacgcctatcgcgactcagctcggcgtcagcgagggtctcgctggctatggcatcgccatatccggagcgttcgcggtgctgaccagcctgtccatttcgtccgtcgccggcgccatggatcgcaaaacgctgctgctgataatgacggccttgatgtgcgtctccggactggtcgtaggtttagccaatagctatttcatgtacatggtcgggcgcgccctgatcggtgtagtgatcggcggcttctggtcaatgtcggcagctgttgccatgcgtttggtgcctaccgaaagcgtgccgaaggccttggcaatcttcaatggtgggaatgccttggccaccgttgtggcggcccctctaggtagctacctcggtggtgtcgttggctggcgcggtgcgttcttctgcctcgtcccgattggactgatcgccttggtctggcaatgggtaagcctgccgtcgatgaaagcgaaaccacaggcaggaggctccccccatgtctttgctctattggccaaccccttggttgcgctcggcatgctcgctgttggcctgttcttcatgggccagttcgagctgttcacctacattcgtcctttcctggaaaccgtgacgcgcgtcgacgtgcccaccatttcgacaatgttgctggtacttggcattgccggcttccttggcaccatgcttatcggctcatttctgaagagaggcatctatcgcgcattgatcttcatgcctttgcttatggcggcattcggcattggcctggtggcgttcgggggatcggtagcgctggtatttatgctgctcgcactgtgggggctggtcgcaacagccgcgccagtgggctggtggtcatggctggctcaatcagtgccggacgaagcagaggcagggggcgggctgatggtggcagtgattcagctgtctattgcattgggctccaccttaggtggggtgctatgcgatacccacggctaccagaccacgttcacagcggcagcgattcttctgattgcgtctgctggggcggctttgctcaccgccagagctaagcaagcagcaacagctaaatcttga

SEQ ID NO: 348242 - DNA, 609 bp, Pseudomonas aeruginosa
atgcgtaaacccagtcctaccccttctttcaaggctcaccacaccgacggtctgcccagcctgggcatgcgcctgcaccatgcacgcaaggttgccgggctgaccctcaagcaggtggccgtcgccgccagctgctcggagagtctgatctccaagctggagaacgatgctgcgtcaccttcgctggcgatgcttcaccgcctggcaggggccctgggtagcaacgtgtcgacacttacatcggaggagtgggtatccgatgagccggtgctgcgtgctggagacaggccggtgaagcgtttcgtcaaacgcaacaaggatggcgagatcggtctggagcgcatcacccatctgcagaagggcggcctgctgcagggcaatatccatattgtggctccaggggtggccagcgatggtctgattgagcatcccggcgaggaaatgggttacgtactcacgggcagtatcgagcttactatcggtgagcacacctacagcctgacggcgggcgatgcttttcatttccccagcaacctaccccatggttaccgaaacggtggcgatagcgaagcgcgtattctctgggtcaataccccagttacgttctga

SEQ ID NO: 348243 - DNA, 714 bp, Pseudomonas aeruginosa
atgagccattcgaaccacgcccacgattaccccgcctgctgccagctcgacaacggcgcctcgctgggcaccaacgccaccctcaacgagccgctgtcggccgacggtacgccggaactcggcaagacatacaccgtgccggcacgctgcggccgtgccgtgcgcttgaaggcgggtgaggtcatcaagatcatcaacacccacggcacccaggtgtgcgacacctggctgttcaatgccaaagacctcagtgaatttctctccatggaacatgcccgcgcgcatatcgaccgaatcattccgaaggcgggtgacgagctgttcagcaaccgccgccggtccatcggcacgctgctcaccgacacctcgccaggcgtgcacgacaccctgatcgccgcctgcgatctgcatcgctacaccaacctcggtgttgagggttaccacgatagctgcgccgacaatatgcgcctggccttgcaggccatcggtttgcgtgcccgcgaagtccctcagccattcaacctgtggatgaacattccggtcaattcggactacagcatcgagtggctgcctccggtatccaaggccggtgactacgtggagatccaggcagctatagactgcgtggtggtcatgtcggcctgcccacaggacatcgtgccgatcaacgacctgaatccggtggaagtgcactttgtggtcagtgccggctaa

SEQ ID NO: 348244 - DNA, 1233 bp, Pseudomonas aeruginosa
atgaatgccgaacgggtgatggcggcggtgcgtgccgagcgtctgcatggcctgctcgataccctggccgggttcggcgcgttacaggccggcgggatgaatcgccaagcgctttccgcagaagatttcgaggcgcgtgcctggctgatcggcgaggcgcagcgtatcggttgccgcgtatggacggatgcctgcgccaatctgttcatccgcctcgacggcctggaggatctgccgccagtgatgaccggcagccatatcgatacccagcccagcggtggtcatctggacggctgctacggcgtgatggccggtctggagtgcctgctggcgctgcacgatcagggcttgcgcacgcgccgccccatcgaattggtggtgtggacgaacgaagagggaagtcgtttcagccccggagccatgggctccagcgccttcgtcgaaccgacccgcatggctgcctatcgagacagcctggatgcttcgggcgtcagtgtcggtgaggctctggacgagcatgcccgacgtttcgccgggctaccgctgcgcgacaggatcgccgcgcatgctttcatcgaactgcatatcgaacaggggccggtgctggaacgcgcgggtgtgccgcttggcgtggtatccggcattcagggtgtgcgctggtaccaggtccgctgccatggggcctccgcccatgccggcaccacgccgatggacatgcgtcaggatgcgatgctgctggctaccggctgcctgccagccatcgacgccctggccgagcgcctggcgggcaccgacaagcgcctgaccttcggacgctggcacgtgctgcccaactcgatcaacacaatagccggagaggtgactttcagcatcgacttccggcacgccgacagtgccgtgctggacgccttcgacgcggcgctggccgattgcctgcccgcgcaggccgaactgcagatgctctttagtcatccgccagtggcgttcgatgcagctgtcgtcgacgtgcttcagcaggccgccgacgccactggcgaagcatccctgagcctgcgctcgggcgcctttcacgatgccatgtacctggcgacgcattgcccgaccggcatgctattcgtgccgagccgcgacggcatcagccacaaccccaaggaatacaccgaaccttcccagctcgaagtcggcgcccgtgcgctggcctggagcctcgtccaactggctgaacaagcctga

SEQ ID NO: 348245 - DNA, 807 bp, Pseudomonas aeruginosa
atgagcaacctgccccttcttgaactgcgcggcgtgggcaagtcctacggcgccaataccgtactgcagcgcttcgacctcagtgtccgggctggtgagatcgtctcgctcatcggcccctccggctccggcaagaccactgccctgcgctgcatgaatttcctcgaagcctatgaccagggcgaggtatggatcgatggccagctgcttggttacagcggccccggacggcgcccaaccgaccaagacagcgccgccatcatcgccgaggtacgtcgaccgctggccatggtgtttcagcaattcaatctctggccgcacatgacggtgctcgaaaacgtcatggcgccgttgctgctgggcaagcgtctgaaccgaaccgacgcgcgctcgctggccgaggccgctctgcaaagggttggcctggcagccaagattggcgcctatccggcacgactgtccggtgggcagcaacagcgcgtcggtatcgcccgggcgctggcgatcaagcctcgcctaatgctgctcgacgagccgacgtcggcgcttgatccggaattggtagaagaggtactgcaggtaattcgcggcctggccagcgacggcatgaccatggtcatggtaacccacgagatgagtttcgccgcacagatatccagccaggtggtgttcatggaagctgggcagatcgtcgaaaccggtgcgccggcgacgatgttccaggcacccgccaccgaccgcctgaggcagttcctcaaaccctggttcaaccgcagcctgacgccacgccaggagatgtgccaatga

SEQ ID NO: 348246 - DNA, 636 bp, Pseudomonas aeruginosa
atgaatcaccttcccgatttcggccatgcgctgctggtcacccttggcatcagtttttccggtgcggcgctgggcctgctgctgggctttaccctcaacgcgttgcgcctggcggtacctggcttcattgctgtgtatcggttgtatgtctggctggtgcgcggcacaccgttcctcgcgcaactgttgctgatctacttcggtctgccagtgcttggtgtgaccctggacgccatcgaggccagcattcttgcactgtgcctctacagcgcggcctatttcgccgagttgcttcgttcggcctgggccagcgtgccgattggtcagctagaggccgcgcaggtgcatggtctgagcggcatccagaccttctggcacattcagacgccccaggcgctggcgttcgcgctgccgcttttgggcaatcaggtgatcctgaccatcaaggaaagcgcggtggcgtcgatcattaccgtgccggagctgaccatgaccgccggacagatcgtgtccaacaccttttcctatgtcgtgccctacgtgctgctggtgctttcgtactggctgctgacgctgctggtgggtttcgccgccgctgcgctcggccgtcgcgcaacgcgctacctgcgaggatga

SEQ ID NO: 348247 - DNA, 657 bp, Pseudomonas aeruginosa
atggatgacttcggcgttcgcttcgcactctactggcccgctctgctcgacggtgcgctcaccacactgtggctgtgcctggccgggatgctgctgggcttcgttctcggcgtgctgatctatctgctgggcagcagtcgcagccgaggttgcgtagcgttcgccggggtttatgtgagtttcttccgtggcacgccgatgttggcgcagttgctgctgctcttctatttgcctgccgggctgggcatggacgtgccggcgctggtcgccgccggtctggcattggccctgaatactggggcctaccaatcgcaaatcctgcgtagcggtttcgctgctatcccggcagggcagctggaggccgctgcggtgttcagcatcggtcgctggcgcacgctgctgcacatccagttgccgcaagtggtacgtctgaccctgccggcgctgatttccgagctgatcgatgtgatcaaggtgtcggcagtggtctcggtgatctccatcaccgacctgatgcgggtcagccagcaactggtttcgcagacttaccgcccgctggaggtatatctcgtcgccgcactgttctacctggcgctgaccagcctgctggctctgctcgggcgccagctggagcgtcgctggcaggcgcgcagctga

SEQ ID NO: 348248 - DNA, 846 bp, Pseudomonas aeruginosa
atgcaacgccgtgccgtgaaaaacctgacatttgccctggccactctgctcgccagctccctggcccacgccgacgacctgctgcaacgcgtccagcagaagaagcaaattaccatcgccaccgaagcccgcttcgcaccgttcgaatcggtggagaacggcaagatcgtcggctatggcgctgatctgatgacctacgtgctcaaggatctgccggaggtcaaggtcaagcaactcgacctacccttccaaggcattttgccgggtctggatacaggcaagttcgatttcgtggtgacctctgtgaccgtcaacaaggcgcgcttcgaacaattcgccttcaccgtgccgatcgccgagtccaccgttgcactgctcaagcgtggcaatgacgactcgatcagcagcctgaacgatctcaacggcaaggtggtcggttcgcagagcggctccggccaattgcaggttctgcaggcctatgaccagaaactcaaggacgccggccagcctggcctcaaggccattcgtgagtacgtcagcttcgacgaggcgtacgccgatctagcgctgggccgcctggatggcgttgcccagtcgctgtccaacctcggcccgctgatcaagtcgcgtcctggcgtgttcagcacgctcagcgacatgctcggcccgcagacctattacggttgggtcggccgcaaggatgccgacagcgccagcctggtcaaactgttcagcgacggtatcgcccgtgctaaccgtgacggcaccatgaaggccctgcaggaaaaatggttcggcttcaccatggatgtgccggccgacgccatgcccgagccgagcatctga

SEQ ID NO: 348249 - DNA, 498 bp, Pseudomonas aeruginosa
atggcctccccaaataaacagcaaaaacgcgcccagcgggccaaagccaaggccaagcagaaccgttcgggcaagaccaaagccaatgtcgtccatccgctgctggccaatccactggtcaacgagccgttcgacgatgtcgaaatcgacctgagcaccttcgacttcaaagacattgaggaaaatggtttcgaccccgcggacttcgacgacctgttccaggcgatgaacgtcggtgaaggcatcagcctgctagcgatgtgcctggtattcctgcaatacccagtgctggagctggtggtcgctgaggaagctgaagacgctgccatcgactttatgatgggtctgctggttacctatcgtgggatcttccactatgaagacgaagacgcggcagtggcctggatcggcggcgacaccttccagcatgcctacaacgaagcgtcggtgattctgcagaagaacaacgcccgcagcattcctgacgcccgcatctag

SEQ ID NO: 348250 - DNA, 660 bp, Pseudomonas aeruginosa
atggctatgggcaattatctgttgaagctacggaagctaagccaagctgcgagtgaacgtgctcagcggaaggatatagctgagattcagccctcagtttcgtccgaggagcagcgagccgaagtcgagaagctgcgtcatgccttaaataagctgaaagggcgagaccgtgtgggcgtggccggtgaaagtgccgcagtggcgggcagcgctgccgcaggcgcagctttggcagggagtgttgccggcgcagcaggtgcaagcacgttgctcggctccactactttggctggaatgcttggtggcgtatttgtcacggcaaccccagtcggctgggtcctggggtcggctgttgttgccggcgtcctaggttacggagcggtcaaggtggtgcgctcaggcggtaaacaggatcacctgcgagccgaaatgagtgatcggctgaacaataggctagagactcttgaacagcaatgctccatagatagtgatctcgaacttggccgcttgatcagtgagcggcttgaggctggtgttatcagccctgaggctgcacaacgagtggttgccttggttgagaaaggtcacttgagcccggaactcgccgcccaacgtctccgagctatcgacttggagaacagtgcatcctatggaagatga

SEQ ID NO: 348251 - DNA, 639 bp, Pseudomonas aeruginosa
  misc_feature (307)..(307): n is a, c, g, or t
atgggaaagcggattgggtacgcccgagtttcgactgatgatcagaatctcgacctgcagcgagatgcacttgccctggctgggtgctccgtggtttacgaagagaccatgagcgggaagtcagcggataggccggagctggggcattgcctcaaagctctacgtagtggtgacactctggttgtctggcgactggaccgcctcggtcgttctttgcctgacttggttgggattgtcagtagcttggagcgggaaggggtggccttcgagtccataaccgaacgaattgaaaccaccagcgctgccngcaagctgatatttcatgtattcgctgccctggctgagttcgagcgcaacctcattcgagagcgaacccgtgcaggactggctgcggctcgtgcccgggggagaaaaggtgggcgcaagcctgtgctggatgatcgtcaggtacgtgagatacgagctcttctccgagatcctgagatacaggtaaccgatgtagctcgacggtatggcgtttctcgaacaacgctttaccgttacgtcggttcgtcgaaatcatcttgtagtggccaacccatcccggacagtggggtaagttcttcgactgccgcaggtggcagcccgtcattgtattga

SEQ ID NO: 348252 - DNA, 150 bp, Pseudomonas aeruginosa
atggaagaccgctatcacatgctcctgatagccatcggctcgagcctattggtactgggaacaacagcactgattggcttggtggtggcgtggcgtttggataaaaagaatgagcgtagcggctcggatgacccaccgaagccaccgtaa

SEQ ID NO: 348253 - DNA, 447 bp, Pseudomonas aeruginosa
atgaaactgttctgcgaacttttcaatcttttttctattttccagcgggctagacccgactacacgaccatcatttatcccagccaaggaaagccaatagtggtgcatgacggcctcagccttcggcatgagcgccgatggcagatggccgactcgctgttggaggaagaagtcccaagctcctccttcagctctctgcacaacgatcctacgagccaggccgagccgattgagctgtttcaagcagaaagtttctcctcggatttgctcgccagcagcttcgagcccatagagaccatggtcaacccagccaacggcatgcccatgatggacggttgcttcgatgttacggggaacgcatatggcaccgacatgatgagcgacagcatgtcgttcgatcatgccatcgaccttggcagcagtttttcagccttcggctttgactga

SEQ ID NO: 348254 - DNA, 1062 bp, Pseudomonas aeruginosa
gtgagcgacaagccagcaagcctgactacgcctccagatggctacagtgactggctcgcagaccttaaaggccgcatccacaacgctcagcaacgcgccactctggcggtaaatcgagaactcatgctgctctattggcagatcggcaacgatattctgatccggcaggcacaacagggctggggggccaaggtaattgagcggttggctcaggatttgcgtagcgcctttcctgacatgaaaggtttttcgccacgcaacctcaaatatatgcgcgccttcgccgaggcatggccagatgctgaattggtgcagcaggctgctgcacaattgccttggggtcacaatctggtgctgctggacaaactgcctggccccgaaacccgccactggtatgccgccaaggccatcgaacacaactggtcgcgcaacattctggtgatgcagatcgagacccggctgctggagcgcagtggcaaggcagtcagcaacttcgaaaaccacctgcccaaaccgcagtccgacctggcccgcgagtcgctgaaagatccttaccgattcgacttcctcggcctgaccgatgaagcacaggagcgtgagatcgaaaacgccttagtgaggcatgtcaccgagttcctgctggagttgggcgccggctttgccttcgtcggccaacaggtgctgttggatgtgggcggtgacgagtttttcatcgacctgctgttctatcacctcaagctgcgctgctacgtggtgatcgagctcaaggccggaaagttcaagcccgagcatctgggccagttgagcttttacctcacggcggtggatgcccagcttaaacatccacacgacggcaccaccatcggtctgctgctgtgcaagagcaagaacaaggtcgtggccgaatacgcactacgcgacaacgctcgccccataggcgtagccgaatatcaactggtggaatctcttccacccgagctgcagaccagcctacccagcattgaacagattgagcgtgagctggcaggcgacggcgcatccatggaagaagactcacaatga

SEQ ID NO: 348255 - DNA, 2799 bp, Pseudomonas aeruginosa
atgaatgcagtagaaattgagtccgccatttccgacctggccctagagccctttgacgctgcggagtttccgttcgcttttcttgccgcatttggcaacaaggaaaccgcgctcaagcgcctacgtgccggcaataacaacgcctcggacgtaccgggtggcgtgctactgcgcagcaatattcatatcgccacatgcgagcctggcaccgtgggcgaaaagctcaaggccttacgcgccagcccctccaccacaaaagccaaagccaagttcatcctggccaccgacgggcaaacgctggaggccgaagagctgatcacaggtgaaaccatcgcctgcgactatccagacttgcccaaccacttcgggttcctgctgccgctggccggcatctccaccatcaaggagatcaaggacaaccctatcgacgtgcgcgccaccagccgcctgaacaagctgtacgtcgaactgctgaacgagaaccctgactgggccaaggccgagcgccgcgccgacatgaaccacttcatggcgcggctggtgttctgcttctttgccgaagataccgatatctttcatggcgatggcctgtttactaagacagttgagcaggtcagcgagcgcgatggctcgaacactgactatgtgctgtcggaaatcttccgcgccatgaacatcaaggatgtcgatcgcgccagtgccgagccgcgcctacccgtctgggccaataatttcccctatgtgaatggcggcctgttctcaggcaataccgaagtgccgcgtttcacgcgcatggcacgcacctacctgttgcacgccggcagcctgaattggaagaaaatcaacccggacatcttcggcagcatgatccaggccgtggccgacgatgaagagcgcggcgccttgggcatgcattacaccagcgtgcccaacatcctcaagttgttgaacccactgtttctggatgacctgcgcgcccaactggaggcggcgggcgacaacaggaccaagcttctcaacctgcgcaaacgcatggcgcgtatccgcgtatttgatccagcctgtggcagcggaaattttctggtcatcgcctacaagcagatgcgcgagatcgaggcggaaatcaatcgccgccggggcgaggccaacaataaatcggaaatcccactgaccaactttcgcggcattgagctacgcgactttccggcagagattgcccgcctcgcgctgatcattgccgagttccagtgtgatgtgctgtatcgtggccaacaggatgcgctggctgaatttctgccactggactcgcagaactggattgtttgcggcaacgcgctgcggcttgactggctagctcttatggatgccgaaagcaccggagtgaaactaatagcggatgatttatttggaacaccgctgaagcaagcagagattgactttgcgaatgaaggcggtgagacatatatctgcggcaatcccccttacttaggaagtacatggcagtctgacgagcaaaaagacgatctacgcgcgcttttcaaccaccgctgctctagctggaaatctctcgactacgtcgcaggatggttcatcaaagctgctgactatggtcaacatgcagccagcgcagcagcatttgtgtccactaattctatttgccaagggcaacaagtaggcattttgtggccccttattttcgccaccggaaacgaaatcatctttgcgcacaccagtttcaaatggaccaacttagccagcaacaacgcaggggtaactgttgcgattgtagctatttccaactccgatcaaaaatcacgacgcctgttttccatatttgacgatggctcaactgcggccaaagacgtagatcacatcaacgcctatttggttcctggcccgaatgtggtggtggaaaaagcgacgcgccccttgagcgggcaaaccgaaatgagttttggcaataagccggtggatggcggccacctgctgttagcccgagaagaagtcgaagctctgggactgaatcccgcgcagcgtgagcaattcatccgtcgcatatacggttctgccgagtttattcgtggattagagcgttattgcctttggattgaagacgcagacttgattgaggcgcaggggcttaacacggtcgcacagtgcattgagggtgttcgcaagatgcgactgtcaagcacaaaggcagcgactgttgccacagcggctacgccccacaggttcggagaggtacgccaaaatggcaccgaaaccgtaattattgtgcccagcgtttcgtctgaatccagagactacctaccagtcggttatgctctgcccggaacaatcgtcagtaatctcgccttcgccctctacgacgccccgctatggaacatggcactgatcgcttcccgcttgcatttggtctggattggcaccgtgtgcgggaaaatgaaaacggactttcgttactcgaacactctcggctggaacaccttcccagtgccgaggctcacagagcaaaataaagccgacctgaccgcctgcgccgaagccattttgctggcccgcgaagcccattttcccgccactatcgccgacctgtacgacccggacagcatgccggacaacctgcgccacgcccacgagcgcaacgatgaggtgctggaacgtatctacatcggtcggcgctttaaaaacgataccgagcgactagaaaagctgtttgacctctacaccaagatgacagcagacacagcgaaggccaaaccggcaaccgagtccgcacggaggacgaaagcgtga

SEQ ID NO: 348256 - DNA, 798 bp, Pseudomonas aeruginosa
atgggcgcactcgttgaacataaattcgaaaaaggcttcatactggacgagcagcgcctcagaaaaataaaagaactaatagaaataagattacaaaaccactccaacccaacagaaataaaatacagagtctctagaggcgacgcatttacctacgaaactccatctattgagacagtaataaacgaagacaacgatgattggcgcgcaatatccaggcttgaaataatttttgaagaaacagaaaaactaaaattcgaattgaaattcagttcaaacggcgcatacattgaaataataggcgaagatagagatgctgtatttctgctattttccgacataaaacagtacataacaaacgaagtgcttagcaagtttcatatcccaccaaaatttacaaaatttattccaattgctatatttacaataatcgcctccattataatatacaaccttaatggccttggatcatatacagaactagccgacaaagccatttcatccaacagcatcgaagaaaaattaaactttttaattcaggataagaaattagcctcctccagtagcgctgcaatgcgatggtcactagcattaatactcattccattcatcagccttctaggagttggtgactgggtgaccaaacagatagccccaaccaatctttttttgttcggctcaagaaaagaaaaatatgaaagacaaaagggacttagggaaaaagtaatctggggaattctagttggcttagcagttagcttaatagcaagctacatttttcaatacgccccgaaatga

SEQ ID NO: 348257 - DNA, 231 bp, Pseudomonas aeruginosa
atgctgatggggccgtcggaagccaagggcgtgcagatccagatcttcaacaattcggcggccaacaccacgaagatcccgctgggctcggtcgaggccgccccgcagaaggcaaccgtcctgaagaacacggcgaccctgaagtacaaggcctcctatgtgtccaccgagaagaccgtgaccgcgggtaccggcctgtcccatatccgctacctcctggcgtacgagtaa

SEQ ID NO: 348258 - DNA, 348 bp, Pseudomonas aeruginosa
atgctggcggagcgcttcgagcgaccggcggatttcgataccctccgccacctgcgggagagcttcgcccggatgccgcgcgcctacccggtggaaatcctgatgcgggcggcgagggagcaggtggtcgcggtgctcggcgagcccctcggtctgctcgccgaggtcgatggcggtacgctgttgcgcgccagcaccgacgacctggactggttcgcccggcgcctgtgcggcctgccgttcgacttcgaggtcaggcagccgctggagttgcgcgagccgttgaggcgccaggccgagcgtgtcctgcgtaacctgggccaggaggaagcttcggatcacaggtag

SEQ ID NO: 348259 - DNA, 303 bp, Pseudomonas aeruginosa
atgatcatcactctttctccgtacttgccgctccccggcagcgatgaacacctgatgctgagcagggctggcgatgtgctcaccgtgaacggccaggcgttcgatttcacaccgctcccggagggtggtgaactgccggctgaggctatcgggtcggagtggttcgctggccccgccgttcgccgtgaggggcgtcttgagttcagcctgcggctgccgctggctgacggcgctagtgcagccgctcgctttcctgaaccaatgctgatcgaggccgacggccctgtggagttgccgcaatga

SEQ ID NO: 348260 - DNA, 603 bp, Pseudomonas aeruginosa
atgaatttcccccgcttcttcatcaaccggccgatcttcgccatcgtcctgtcggtgctgatgctgatcgcgggcgcgatcagctatttccagctccccctgagcgagtacccccaggtcacgccgccgacggtgcaggtcaccgccagctatcccggcgccaacccgcaggtgatcgccgacaccgtggcatcgccgctggagcaggcggtcaacggcgtggaaggcatgatgtacatgcagtcccagatgtccacggacgggcggatggtgctgaccatctcgttcgagcagcacatcgaccccgacgtcgcgcagatccaggtgcagaaccgcgtctcacgcgcgctgccccggttgccgtccgaggtccagcgcatcggcgtggtcaccgacaagaccgcgcccgatattctcatggtggtgcatatgctctcgccgggggaccgctacgacccgctgtacgtgtccaactacgcgatgctcaacgtgcgcgacgaactggcgcgcctgccgggcatcgccaacgtgatcatcggcggtgaaggcgagtacgcaatgcgcgtctggctcgacccgagaaggtcgcatcgcggggcatga

SEQ ID NO: 348261 - DNA, 1161 bp, Pseudomonas aeruginosa
atgcttcgcaaagacatacgcaagggatggatatgggcggtatccacgctttgggccggcaccgtgctagcccagccagtagccgcccctcacgtcccatccagaccagacagccacatggtcgcccaattgtgggagtcagcttggcagcggcagccagaagccgctggagaaggcgcctggcagcaggccgcccaagcacgccaagagacggccggtagttgggtggcaggtccgatggcgctggaagcctccaccaaaactgatcggttcaacaaccgcaacggaaagcgcgaatatgaagtcggggtggctattcccctttggatgcctggtgagcgcgcctcgtcggcacgctgggcggacgcggaaagcctcgctctatccagccggatgctggccgccaagctacgcacggccggacaggttcgccaggcatggtgggcatggcagcgtgcccaggccgaattgatggcggcgcaggatcgcacccgcagcgcggacgagttggcgcaagatgtggctcgccgggttcgcgcgggcgacctggcgcaagccgacagaaaccaggccgatggcgccttggcgtcggctcgtagtgccctggccattgctcaggccgaagaagtcacgcagcgcgaggcgttgttggcactgaccggcatcgagagtatcccgtcgcaggccgattccgcgcagccggagcagtcaggtgtccgagttcaaccggcatcggcacagccgtccggcgcgttgttgggtaaccaccctgcgctgctggaactgcagcacaaggcgctggcggcccgccgctctgcggaactggtgtcccatcagaagtacgccaaccccgaactgaccctggcgaccacgcgggatcggggcggctacggcgaacgctacaaccagacgatcacggtgggtgtgcgcattcccttcggtacgggtagccgtcataccgagcaattgtccagcgccaatgcgcaggcactggaggctgagtcggcactcgcggcccagcgcacccggctactctcggaaattcgaactgcccaatcgcgcgaactggcaaccagcacccagatgcaggccgcttcggagcgccagcgactagggcctgttaacacatccgaagtccatcagcgacaaggacgaagctga

SEQ ID NO: 348262 - DNA, 261 bp, Pseudomonas aeruginosa
atggaccgtgcctacgaaggcaacgagacgcggcagctggcacttgatctgggcttcattccggttgtgccacccatgaggactcggatcgaaccttgggagtacgaccgcgagatgtacaagcgtcgcaacgaggtcgagcgcttgttccgtcggctcaagggctatcgccgcatcttctcgcggttcgagaaactcgacctcatgttcctgggcttcatcagcttcgtccttgtcgctgatggacttcggatgtgttaa

SEQ ID NO: 348263 - DNA, 408 bp, Pseudomonas aeruginosa
atggagatcacgcccgcacaattcgccactattgagcactgcctgcccaagcagcgtggcaacgtcagcctgagtaacctgcaggtggtcaatgcgatcctctatgtggccgagcatggctgcaagtggcgcggactgcccaagcgcttcggcaactggcacacgatttacacgcgtatgaaccgctggaccaaagcaggcgtcctggatcgcatgttcgaggagttacagcgcgcgcaggtcgtgcgcatcaagatcgaggcggtctcgctggactccacaagcatcaaggtccatcccgacggcacgggggcactaaaaaaaacggcccacaagccatcggaaagtcccgaggcggatggaacaccaagattcatatggttgccgcggatgctcgaacggccgtga

SEQ ID NO: 348264 - DNA, 264 bp, Pseudomonas aeruginosa
atgacccttccacatgagagaacgaggagtgtcgtcaagaccgaagcttttctccgagagctttctcgtaacgccgagctacccgatgatatccgtaactatgcgaaaagcctgctcaggcactacccgtccaccgatcagattttctcgctggggcgcctcgaagagtgtctggtgagcgatgctcaagatgatgagtatcggcgaagggtgattgcgttccatcggccgcttttcagctcctcactagacttcacactgtag

SEQ ID NO: 348265 - DNA, 1230 bp, Pseudomonas aeruginosa
atgccaaaaggcgatgcaatcatcattggggtcaatccccgggaagcgaacctcaagagaaagctgcgcgaacatctgcactccttaggcttcaccaaaacggatgagggggctctacgagccccaggtaataccaaagacgcgatccgcacccttcacagcgcccagcgtgaagagcgacttctcgcgagcgagaaatttgtgtcgcgggctgggggaaagctgatgcagttttttgcatcgggcaaagatgtgaatcctgagaagatttctccggttttggaacgggtttcctcagatacttggcagggcgatttattcaggcttgctgccttgtcctggtcggtgccggtttcaaacggtttcggtaggcgtctgcgttacctggtttgggatgaaagcaacggcaagctcatggggcttatcgcgatcggtgatcctgtcttcaatctgggagttagagacaaattcattggctgggatatccatgacaggggggctcgactagtcaatctgatggatgcctacgttctgggggcgatcccaccttacaactcgcttcttggaggcaagttggtcgcatgcctgcttcgtagccgtgatatttacgacgattttgcgaaggcctatggcacctcgacggggatcatctcgcaggcagaaaagaaggctcgcctactgtccatcgtcacgacatcatcgatgggtcgatcctcggtctataaccgactgaagctggatggcactcaatatctcaagccaattggttataccggcggctgggggcattttcacatccccgattggttgttcatggagatgcgtgactacctgcgtcacatcgaccatacatacgccgaccagcatggttatgggcaggggcccaactggcgcttgaggacaacacgtgctgcgcttacggcattaggtttcaaggatgatttgatgcgccacggcattcagcgtgaggtcttcatctgtcagcttgcatccaatgcaactaaaatcttgcagtctgggaagggtaagcctgatgtcagcgcgcttctgtctgtaagtgaaattgccggcctggcgttggatcgatggatgatcccgcgctccaggaatgtaccggaataccgaggctggacgccgactgacctgattgatttgttcggtagtcaagctcaaattctccgcaccgaggctaagcgagaagtgatgctaggcaacagttgcgggtgctag

SEQ ID NO: 348266 - DNA, 1437 bp, Pseudomonas aeruginosa
atggatctgcgcctgatgattaccagaggtcagcgtgctgcctggtggctagagttggcagtacctgcatgtcgtgtgtgtgacgccaccgtcacaatcgacgtgggaggaaggcttcagcacttagatatgcgcggtatggccaagggctttcgcgtgacggccgaattgtccgtcgaaaattatcgcatcgtgtcctatagcgaccatgccgacccttttttcatggccagtgtggatcgcgagtgcccgggactttcaccctcgggagctgctgtcttttcagcgtcggggcgcgaaggagcaactggatttccccgagcaaaggagctcagaggttcggaaacatacgcttttttatggagtgaaaatgccgctcccgtttttcctgatgagctcgtactcgataagtttcagagcaggcagggctggggcctagctcttgccaccataccggaaaagccctctgaagaatgcatggaatggcttcaaatttttacggggctgctcataaatccatccgccccctccattaccccgatatggccgtttcttacgagaaattcgagcgttaacgctattgagtgtcttgagtcgcctacggtactgctgtcgacacagatgatgcccgtcggacagcaggacagggggccgacaatgcaagtgtacgggggaggagagcgcctttctgccactgggatcgaaaagtcaccagcgttctttgttttggcaaccgagaaaacccaagacttccgagtcggaaaggtggactacccggacatcgataaatttgtctcttgcacgctttcaccacgccgaaatcaaaagttgccggctgtagagtttgcatttagggaccgggagtcgaagcgacacgtagtccctttgcatcaaaaaaaatgcaggacctttgtcatggctgccagagctcagacaatgatgcttgagtatctctccatgccacacggctgtaatgggcgacttattgctgacaagtcctctcagcgcagtgagatcttacttttttccggcgacacagtgtctgaacacagccagcatcagcgccttcttccaccagaagtgcagacccttctcattgcgcacttggtcgacccgacatgctacgtcgacatcaacttcggtggattcgggcggttgcacattgccggcgatctttccagcagacctatcagcgagaccttcgttaccctgggtcgctcgcttcgatccaggctgctcagctttatggttcagttgcaaccaggtggcccaatcgccgcggtttccgatgactatgcgttggttagaaccttcgctagcttgagaccccatccacaacttattccgaattaccgtacgctggtgaaggacgtcctcgcccgcggctttgagctcaaacagctaggggaaggagtttcatatgagctaccaatatag

SEQ ID NO: 348267 - DNA, 1878 bp, Pseudomonas aeruginosa
atgagctaccaatatagccaggaggcaagggatcgtatctctgcgttcggacaaattgcgattactgaattcattgaggagattcctcatggtattcgtaaaattttttatgatcgccagccggcaatccagggtttccggcggggatcgccccccgagttcaaggaaaaacaaaagcgtttggtcgggcacctcattcacactcagcctgggcagaaaggggttgccgactggagcacatttgccagtctgtgggaggcttgggcaaggaaccgattgggtacaacttttcccccaagtgacatttcatcagctacaccggacgctgggcccgtttttttaaccggcctggcggagcttttccctgacgcagccagggagagtctggaacgtctgttggacttcagtggctttgcagatagtcccgaagccaaagtcgcactcggacgctttcgtccagcatcgacgctagctcgtgaccttatgatcgacgcacttccggggcggttgcataagattgaaggttacttcgaaattgctgaagccgcggcggaagaggtggcggagcgaattgatcaacttgagtccgagacggacattctggctaaaggcattcgagaagtcgtcttgagtgtcgacaaaagtcagggtgacgttaaggagcttcgggttgcactcgagcgcgtggctgagcgtgccagtggactggaagaggcggtcgatacacttggcgtcgcaaggcaggagatcacaaaagtaatcgccgccgccgacgcacgagccgaacagttccaccacagtatggaggcgcttacagaacagggccgctcgtgggacaaaactcaggcggaggtttcagcgctcaagcaatcaatcgatgcgctctgtgcgcaggaggtcgagtggaatcacgccgtcacggcagtcggtcacttggctgaacggatcgatattttagaagcagccgttgcaaagggaggcaatggcacggcgaccaaaccacaggttcgactttttgaagttgagtcaccggggcctattgtagagatccactctgtcaaaggcgcctgtgagctgattgcatgcaaccttctggcttgcggagttatgaaaggagcagcaattgccacagcccgccagatattagcagcattgtctgcggggcagatggtccagttctcgggctcgatttctgatttagtggcagatgccgtggcagcagccattggcggtcaaacatttcatgaatggcgtgtaccggtcggattagtatccgatgaggcggcgactgattgtctagaagtggtctcggaaacctctggttgtttgctgatgaagggagcaaaccgttcagcttttgaggtgtacggtaccgcgatccgagatgtcgttacgcgccgccaattctcactgccaagctaccaacgtctctcgttgatagccgcgtggacacagggccctgccacgttccctgatggcggcacgctcgcggagatcggtccggtttttgatacggataatttttctatgcgtggggtatccgccaaattaccggagctcaagtttggccacctggtgcgcaactcttgggatcagattgacggctttgacgatgattcgccgcgggcacttgtctctgagctgaaggaactcatagaagagagctcgtttgtccccggcaatctttggacaaggatggccgaccgtgcttactcacgtctgcggactatccccggcgggtcatcagaagaggatctgcactccgtgttgacgttgtgggctctcccgtgggcgaaggcaacggccggccccgttgaggatatcgctcgtatcgcgggccggatgttggccgaattgcaagccgaggcagagacctga

SEQ ID NO: 348268 - DNA, 1041 bp, Pseudomonas aeruginosa
atgaagtggcaggcgatttcccgcgaaggagcgcaaaaaattctcgcggcaagtattcgttgcagagtaggaggggaagggcttcgtatcgctgcgatagccgagtgtctgcgagcggcgtcgtacctcgcttctgcaccagtcgctggcaatggcacttgggagcccgctgcctcccttaacttgaccagtatggtccgaaggcgattatcaccactttggccagatcttgcagaggataaggatgctcgccctggtgtgttgtcggtcttgaatagtttgggcgagttgggtgacctggtcagacttcgaggcggaagctggctgacgccaccagcacatgccatcaaagcggccaatgacagcgcagtgataataggcggcggtcccttagagactctccctcacagcatccaaacacaagccgcaggcagggtgcgacttgtcgatctagtcgcctgcaatgattggatcgacgtctgggatgctcgcgagtgggttggtgcgcccgtcgaagggctcgaggcttggtctgtccgactgatagcaacgatgaagtcgcggttcaccgacgtgcccagcgatttgggtgagattgcgatttacgataaaggtcgatggggtgccttggcggaactgcccaacgcgggaggggtttttctttcaaaatgtcagacaggtccggtggctttacatttcattggggattatttccgtgggcgcattcgcaaaatggcgtctctcgactttcaggatgctagacgcctccgctttcatttagatgctcaagctggtcggcccatgagagtcaaagcgatgacctctcagggctttgtaaaacttcgattagaacgtcggttacccccccaggaagccagggtgcttttactgggctggcaaatacctacgcctgaaggcgagcacccaggcgtgacgtatcacgttttacctatagaaatgctatccatcgtgcgcgctgcgctcgacgggttaggcgtgattttggatgagcgctgcggcgcagaaggagggaaccaatga

SEQ ID NO: 348269 - DNA, 5526 bp, Pseudomonas aeruginosa
atgagtgtgaagtctacgttgactgaagcggcaggcgtccatgagaccgcgagtagcttggctgatagcctaaggcaatatatcgaggctcagtatcatattctcgatgaaggtctcgtcagggagcgacgcgcgcttctccaagcgaatgaaactattgcccaaaccccctatgtagagtcaacgccagtctacaaactgggaactccctacgaggacttgccaataccgcaggctgcctctgacgcattgaccaaattgtcggtaatgggacttggcctttaccctctgccgtatgagcaccaatctcaggcgctcatctcattcctcggcgatgaggctgctgacctggtggtggcaaccggtacgggttcgggtaaaacagaaagctttttgatgccggtcattgggaaactggcagtagaaggcgccgaaagacctgagtctgctgctttgccgggttgtagggcgatgttgctgtaccccatgaacgccttggtgaatgatcaactcgcgcgtatccgtcgaatactcggtaaccctgaggcagcgaaactgcttttgaacagcaggaaaacaccgatccgcttcggcagctataccggtaggacaccatacccggggcagcgctcttccacacgagacgagcagttcatcaagccacttttcgaggagttttataagaaagtggccaagatcccggccatccaaaaagacctggctcgtattggccgctggccgagcaaagatcttgatgctttttacgcggatgatgcggtagagaccaaaacctactcctccgggaagaaaatcggcaaccaattcgtttcaaaaaattggaaggggcggctgctaactcagcctggtgaccgtgagctcatgacacggcacgagatgcaggtacgctgtcctgaactgctagtgacaaactattccatgctcgaatacatgctcatgagaccgattgagcgtgggatcttcgagcagacgagagactggctcaaagaagacatccggaacgagttcatactcgttctggatgaggcgcatatgtataggggggctggaggtgctgaagtcgcgcttctcattcgccgtctatgtgcccgcttggaaattccacgagaacgcatgcgttgcattctcaccagtgcgagtcttggcgccggtgaaactgccgtcgcggacggtgaacgatttgcacgcgacttgaccgggttgctggaaagctcctcccgcaaggttagagttcttcaggggacgaacgagcagcgttcctcggtgcacactgttacccgtgaacagattgatgccttggcgggctttgatctcgacgccttccaagaggcagcaaatgatctcccttctgcccaaaaagccgcggcggcgcttgctggacagcttggttgggaagctccgaatgcaagcgatcactcagcatttcgcgactggctgtttcgaagcctaactgacttcggaccgttagaaaaacttattacattagtgtcaggtaaagcggtcaagctagggacgttgagccaaactctttttgaggggtgtcctctagaaacagccgaaaaagctactgacgcactactcgccttggggagtcatgcacagagaagctcagatggtcgcgtgttgcttccgacccgtctgcacttatttcatcgcggattgccaggactctatgcttgcgtggacccaaactgttcgaagcgcttgggtgagcatggcggacctaccattcttggccgcttccacactaaaccattgagtcattgcggttgtgagtccaatggtcgggtctatgagctgttaacccaccgtgattgtggcgccgcctttatccgagggtatgtcagcgctgaaatggatttcgtatggcatcagccaaacgggccattgtccgaaggtggaaccttggacctcatgccggttgaaattttcgtagaggaaactgctcacccgcgcagtcgacacaaggacatgtggctgcacatttccaccggcatcctttctgcgacatgtccagcggagggaaccggttttcgcaaagtccgtgtagcagataaagtcgccattggtcctgatgtaactttcgataattgcccagtctgtatccgtaggaccagaaattccaaagacgaaccgtcgaagatcatggaccatgttacgaagggcgaagcaccgtttaccacgttggttcggactcaaatggcccgtcaggcggcgagtcgtgctaacgatgcaagacatcccaacggtggtcgaaaagttctcattttttccgacggtcgccagaaggctgctcgcctggcgcgagatattcctcgagatattgaactcgacgtttttcgtcaggctatagccctggcatgtgggcaattggatgagcaaaggttagagcctcgaccaacaccgacgctctatctcgccttcctttccattttaaccggtcacgatctcgccatatttgacggcatagatgcaaagaaaattgaggatgcgcgcagcgtctttgagcgtgactacgactctgatttgggtcaagcgttggaggatagattcaacccacaggaggcaccttcacgttatcgaattgctttgctcaagctcttgtgtggcagctattactcgctttcaggcacgaccgtaggctttgtagcgcctgcgcgagcaaagcttaaaaagctgaaggaggtcctgagtaacgaaggggtttcagttggggaggaggatctacttgcgcttgcggttggctggattgattccatgcttcaggatttcgccttcgacgcgacaatcgatcaggtttaccgctacaaggccgctggatactacaagcccgcgtggggtagtaagggacagttcgacaaagctttgagagaggcactcactagccgttggggctgggatacgtccacctatgaagtcgtggaagacgctttccgcgggcagctagccgatgaagtcgatggtgcgtggttccttgctcctaattctttgcgcctcgtgattgatctttctcacgtctggactcagtgtccagattgcactgcgctgatgccatttgcgctaggcggaaatatttgtctgtcctgtgggagtgaaggcgccgtaccgatcgacccctcgacgagcgactatgtcacggcacgcaaaggtttttggcgtcttccagtaaaagaggcgctcgaaccgggagcacgcctctcaaacttgagcgtggaggaacataccgcgcaactgtcgaatcgggacagaagcaaagtccatgcaaccactgagttgtacgaattgaggttccaggacgttcttgtcggcgccaaggataggcccatcgatgttctaagttgcaccaccactatggaggtgggcgtcgacattggctcactggtggcggtcgcacttagaaacgtgccccctcaacgcgaaaactatcagcaacgcgccgggcgtgcagggcggcgaggttcttctgtctccaccgtggtgacatattcgcaaaatggaccacacgacagccattacttcttaaacccggagcacatcgtcgccggtccaccacgcactcctgaggtcaaggtcgataacgcgaagattgcccgccggcacgtgcatgcttatttggttcagactttctttcatgaagtgatggctgagggcaccaatcctccggcagaaaaaacctcattgcttttaaaggcgctcggattaacccaggactttttttacggtgccgatgatacagggctcaatctagcgagcttcgagaactgggtatcacgtcgagttctcgcatcagatgcggatctaaaagcctcggttttggcttggttgccgcctaacttggacactcgcggttctactcttggtgagtggttagtggaaacggttgagggcttgctgtcgactctgcacgagctcgcttcagatgtcgcgcaacccatcgcggctgatgagattagtgaggaagaagccgaggtagatgaaaatcccggagccggtgttgagcagaaggagttgttggagttcctgtttttccatggacttttgccgagctatgcctttcctacgagtctctccagcttcctggtcgaagagctgaagaaaaacccgaatggcaattgggagatccgtacgcttcagcgtccccagcaggcaatttctaaagcccttagcgaatacgcaccaggtcggcttatcgtaatcgacaaaaagacctaccgatcgggaggggtttttgcagatatgcccgccggcgaggtcaatcgtgctcgtcctcttttcaaaaactcaaaaaaacatgtccactgcgaagcatgttcatttgtacgagaccccaacaaacctggaggtgatggtgaaatctgtccggtatgtggtggagaactcaaagaggaaaccatgattttgccggaagtattcggtccagaaaatgcgcaagatctaccagaggatgatcgtgagcaggacattactttcgccaccatggctcaatttccccaacccgttgacccagaggtgtttaccttcaccgagtgtggacctaacgcaagcttcacccacgcgaccgaccgaacattggtgacagttaaccggggtaaggaaggttcgcagcttggagggttttcggtttgtgtcgactgtgggtatgccatcgtattcgatcaatatgcaccgcaggcgggagtgcatgaccgtccataccgacaactgggtccaaaagggacaccgccgcgctgctctggcgcattccggcgagtcctgttgggccatgacttcagcaccgacctactcttgctgaggctgaagattgccgagccattggtaacaaatacggttgaggtagtcgtgttgcagatgctcgaagatgcattgcactcgatagcggaagcgcttcgacttgctgcaagtcggcacccgcagttggacctagatcctgctgaattcggttctggtttccgcattgagcccgcgcttaaggacaacgctcgaatgctcgacatttttttgtatgacacgctttctggaggagcagggtatgccgaagtcgcagctaggaatttgcctgaaattctagagtcgacccttgcgcttctggaaggctgcacgtgcgaaacctcctgcactgaatgcctaaaccattttcacaatcagcaccttcagaaaagactcgaccgaaaacttggcgcactgctactccgctacgcagtgttgggcgagaagcctagctgctcctctcctgacgagcaggtagccacactgtcccaacttcgctcaagcctcgaattggatggtttccgttgtacgccagtcggaacaccagagattcccctgctggtagaacgggatggccggcgtgttgccattggctgttatccaggcctcattggaacgtcagagtttgtgcatcctgtcagacacgccgcagatgtcagcgacagtcttgagttgaacgagtacttgctcaggtccaacctacctgacgcacatcagagggtacgagcaatatttcaatag

SEQ ID NO: 348270 - DNA, 1440 bp, Pseudomonas aeruginosa
atgtatgacgtagagctcggtctgtatatcgacggtcaatggcgcgctggcgagggtcgtcgcaccctcccggtggtcaaccccgctactgaagaagtactggcccatcttccgctggcgaacgagcaagatattctagacgcgctggcgtcgtcgcaggaagggttcgacatctggcgcactgtctcggcctgggatcgtcaggtggtgatgaaccgtgccgccgacttgatccaggtgcgccgcgaaaacctggctcacgtactcaccctggaaaacggcaagccgttggctgacgcccgcggcgagatcgaccgggtggtagagaccatcaaatggtgtgcggaggagggcaagcgtgcctacggccgtctgctgccgccgcgtcagcccgaactggtgcagaccaccgtgaagcgcccgatcggtccggtcgcagcctttgccccctggaacttcccggccgtactggtggcgcgcaaggtggctgcagccctggctgccggctgctcggtggtggtcaagcccgccgaagaaacccccggtgtctgcgtcggtgtcatccgcgccttcatcgatgccgggttgcccaagggggtgatcaacatgctgttcggcgaaccgagccaggtgtccgatcggctgattgcttcgccggttacccgcaaggtttcgttcaccggttcggtgcctgtcgggcgtctgctcagcaccctggcagcgaaacagctcaagcccgtgaccatggagctgggcggacattcgccagtcatcgtgttcgacgatgtggacgtgcaggccgtggctcgtgcctgtgccggcttcaagttccgcaatgccggccaggtctgcgtgtcggccagccgcttcttcgtgcacgagcgggtttatgaagaattcacccatcactttgtcgagttcgccaatgcagtgaaggttggcaatggcctcgaagccggcatcagcatgggcccgctggccaacgctcgccgcctggagtcgacgatggacctggttgccgatgccaaagcgcgaggcgccacggtcgccgccggtggcagtcgaatgtttgatcgcggttatttctttcagccaacggtgctgaccgatctggatccgaagtcgcgcattctgcatgaagaaccgttctgcccggtcgcgccgatcatgccgttcagcgacttcgatgaagtcatgcagcgcgccaacggtgtggatttcggcctggcggcctacgccttcactcactcgatcaagcgtgcggctgcggtgagcgaaggcttcgatgccggctggatcggcatcaactgctttacccccgctttggcagatgcgcccatcagcggcaccaaacaaagcggtatcggtcacgaaggtggccctgaaggactggatgcttacttgcagacacgcttcgtcagccaggcaagttccgtttag

SEQ ID NO: 348271 - DNA, 1404 bp, Pseudomonas aeruginosa
atgagccgtgcagatggtaaagcgcagaacatccctttcggtggctaccactacaacatcatcccgactgaagatgccgagctgactcgtgtcggcccaggcactgaaatgggcgagtacatgcgccgtttctggcatccggtctgcttgtccgaggagctgggccaactgccaaaggccatccgcattctcggtgaagacctggtggcctttcgtgaccgtagcggtcagatcggtgtgctgcatcgccactgcgcccaccgtggggcttcgctggaattcggcattatccaggaacacggcattcgttgctgttaccacggctggaagtggggcgtagacggtaccctgatggaaaccccttgcgagccggaaggcagcaagctcaaagagagcatctgccagcccgcttacccggcgttcgaacgcaacggcctggtgttcgcctacatgggcccaccggatcagaagccgaagttccctgagtacgaatccttcactcagccggccggtaccgaactggtggcgttctccaacgtctacccctgcaactggctgcaggtgttcgagaacatcatggaccacatgcacacggccgtgctgcataacaacatgacggtagaaggcgtggacgccgcgacgtccgccggcgtttccctggaaggtttcggtgatatgccggtcatgcattgggagccgacccgtgatggcaacggcgttgcattcgtcgccgggcgtcgcgtaggcgaagacaaggtgtggacccgtatcaccgagatgacgttcccgcacctgtgccagatcggctcgctggtgccgtcggcggccgaagagcgtcactccactgtcgccatgagccgctggcatgtgccagtggacgacacccacaccatcctgttcggctggcgccatttcaacgatgaagtggacccgcgtcatctgggctgcaaggaagattgtggcgtcgacaagatcgacttcctcgaagggcagaccggcagccgcacctatgaagagggtcagcgtgcaccaggcgactgggaagcactggtcagccagcgccccatcgcgattcacggcatggagcacccgggtcgttcggacataggtgtctacctgtgccgcaagctgctgcgtgatgctgcgcgcaagctggccgaaggcaagccggtggggcgggccgacctgaacagcaatgatccgctagccatgtactcccaggactcggtgctgaaaatcccccgtgacccggcccgtgacgatcgcgaattgctgatggaaattaaccgtaaggtcatcggtgtgatgaaggacgctgaccgtttcccggcgagcgagcgcgacgcctatgtgcgcaagcgtctcgatgagctcgacgatcagcagctctcccgcaagagttga

SEQ ID NO: 348272 - DNA, 951 bp, Pseudomonas aeruginosa
atgcaaacagtcaaagtacggtgcatcgagaaccaggcggctggtatcaacaccttcgagttcgtcgatccggcaggcaaaccgctgcctccttttaccgcgggtgcgcatatcgacgtgcacctgcccggcggtttcattcgtcagtactctctgtgcaacagcccgcaagagcgggaccggtatgtggtcggcgtattgaacgtggtcgatggccgcggcggttcgcgcagcctgcacagcaacgtgaaggcaggcgatctgctgcagatttccgaaccacgcaaccatttcccagtcgtcgaccaagcgcagcggcacctgttgatcggcggcggcattggcgtgacgccgatgatggcgatgctcgagcattttgaagcgagcggcgcggaatacattctttactactgtggcgagacgcctgagcgcaccgcattcaaggagcgcctggcgtccctgctcggcaagcacgttgtcatccactatgacggcggtgatccggcccgccgcctggacatccgcgaactgctgatgcatcacgagcccggtacgcacctgtattgctgtggccctggcgggctgatggccggcgtcaaggcggcggccgagcattggccggcaggcacggtgcacttcgagcactttgctgcaccggtagcgccgccaagcgccagcaccgccagtgaaggtgaattccggatcaccctggctcgcagcggccagacccttgaagtaccgagcagcaagagcattgcgcaagtcctgcgtgacgccggcctgccgtgcgagacctcgtgcgaggccggtatctgcggtacctgcaagacccgttttatcgacggcgaggtcgaccaccgcgatttcatcctcagtgacgacgagaaacaggagcacctgctgatctgctgctcccgttccaagagctcgacgctggtgctggacctgtaa

SEQ ID NO: 348273 - DNA, 1461 bp, Pseudomonas aeruginosa
atgactaaagccaagaacctcatcgtgttcatgtccgatgaacataaccctaaagccctcggttgctacggcaatgatttcgtcaagaccccgaacctggacgccatcgccgccggcggtacccgcttcacctcggcctattgcaactctccggtgtgcattccggcccgtgcaaccttcgccactggccgttacatccaccagatgggcttctgggacaacgccgacccctacgatggttccgtgaccagttggcaccaccgggttcgtaacgaagggcagcactgcgtttcgatcggcaagctgcacttccgctccattgatgacgacaacggtttcagccaggaaatcgtgccgatgcatgtcatcgaaggcaaaggcgacctgatgggtctggttcgcgaagacctgccgcgtcgcggcggtgcctggaaaatggccgggcaggccgggccaggtgaatcgtcctacaccatgtacgaccgcaacatcgctgcgttggcgcagacctggttgcgtgaagaagcgccaaaacaccaggacaagccatgggtgctgttcgtgtctttcgtcgccccgcatttcccgctgacggcgccgccggagcatttctatcgctactacctggatgacaacctgccgtggccaaagctgtacgacaaggccgagcgcccgaaccatccgttcatcaaggactacgcctcaagctttgcctatgacgacttcttcgacaccgaagacaaggtacgtcgcgccctggcgggctactacggcctggtcagcttcctcgacgagaacattggcaaggtgatgagcgcccttgaaggcagcggcctgcgcgacgacacccggatcatctacaccagcgaccacggcgacaacctgggcagccggggtttgtggggcaagtcgacgatgttcgaagaagccgttggcgtaccgctgatcatctccggtgacggcatcccggcgggcgccttgaagaagaccccgattacccacatcgacgtctacccgaccattctcgaagcggtcggcattgcgcccaccgaagaggagaaaaccctgtcgggcgagtccctgttcaagctggccaatcagcccgatggcgaccgtctggcctttgccgaataccacggcatgggctcggctaccggtgccttcatgatccgcgacgaccgcttcaagtacgttcactacgtcgattacccgccgcatctgttcgatttgctggaagacccggaagagttgctcaacctggcggagatcccgggtaacgaggtgctggtcgccgagtaccgcgcgaagatggaaaccgtctgcattccgaaagaggtggatgcccgcgccaggaaacgtcaggccgagctgctggcgctcaacggtggccgcgaagcggtggtggcccgtggtgacctgggttactcgccccctccaggggttgcggtggattttaactga

SEQ ID NO: 348274 - DNA, 1659 bp, Pseudomonas aeruginosa
gtgaacggacctgaatacgattacatcgtggtgggcgcaggctcagccggatgcgccctggccaaccgcctcagcgaaggcggaaaacacactgtcctgctgctcgaagcgggccccaacgaccggcacttctggattcacctgccgattggctatggcaagaccatgttcaacccgacctataactggtccttccataccgagccggtgcccgcgctggacaatcgtccgatctactggccacggggcaagaccctgggcggctgcagctcgatcaatggcctggtctacatccgtgggcaatcgcaggactatgaccactggcaagcgcagggcaaccagggttggggctggagccacgtgttgccgtacttcaagaaaatggaatgcaacgaacgcggcgaaagcgcctatcacggcggcagcggcccgttgcatgtatcggatctgcgcgagcccaacgagttggtcgaagccttcatccgcggcgccaaccagatcggggtgccgcgcaacgatgacttcaatggcgcgcagcaggaaggggtgggttatttccagctcaccacgcgcaacggttggcgttgttcggcggccaaggcttacctgaagccgatccgcgaccgcaagaacctgaccgtcgaaaccgacgcccaggccagcaaggtgttgatgagtggcaagcgcgcggtcggcgttgcttacgagcgggcggggcaaccggtaacggccagggcgcgcaaggaagtcctgctgtgcgcgggtgctttgcaatcgccgcaattgctgcagctgtccggaatcggcccacgtgaagtgctggagcaacatggcatcgacgtcgtccacgagctgcctggcgttggccgcaacctgcaggatcacctgcagatccgaatcatgttcaagtgcaccaagccgatcaccaccaacgatcaattgcgcaccctgtggggtcaggcactgatcggcatgaaatgggccttcttgcgcaaggggccgctgtcggtgggtatccagcagggctgcatgttcgccaggagccgtgagcaggaaaagacgcccgatatccagttccactttggcaccctgagtgcggacatgacggccggcaagccacacaagtggcccggcttcaccatgtcggtctgccagttgcgcccgagcagtcgcggtgaattgcggattcgttcgaagaacccgaaggacgctccctggatcgagcctaattacctggccaccgaagaagatcggcagaccatggttcgcggtttcaaaatggcccgcaagctcgcggcgagccaggccatggccggttatatcgccgaagagtacaaccctggcgtgtcggtgcagacagaggaggacatgctcaactttgtgcgccgcaacggttcctcgatttttcacccggtaggcacctgcaaaatgggcagcggtccggacgcggtggttgacgagcggctgcgggttcacggtattgaagggctgcgggtggtcgatgcgtcgatcatgccgacgctgatctcgggcaacaccaacgccccggcgatgatgatcgccgaaaaagccgcggacatgatcaaggaagatgagcgttatcccactgcccgcgcttcatccgctgcgccggtcggtaatcccgcgatgacggcatag

SEQ ID NO: 348275 - DNA, 414 bp, Pseudomonas aeruginosa
atgacggcacaacaggaagacttgaacaaaattgagcgcgtcgatcgcggcccgctgtcctcacggctgctggcgggcggcagtgagcccgatccacgcttcaccctggccaacgaacgaaccttcctggcctggatccgcaccgcgctggcactgctggccggcggcatcgccgtggaagcttttaccctggatgtgtttagccctgcggtgcgcacgacgctctcggtggctctgctgctgatggcgctgctcatcagcggctcggcctgcctgcgctggctgaacgttgaacgggcactgcgcaacaaggcgccgttgccactgccgttgctggtgccgctgctgtcgattggtggtgcgctggtgacgctgacgttgatcggcgtcttcctgttgcgccaggtgcactga

SEQ ID NO: 348276 - DNA, 354 bp, Pseudomonas aeruginosa
atgacccgctgtcgccctgacaggcgcccgcttcaggcgccgcacgatgacgccgggctgcagccggaacgtacttccctggcctgggggcggaccttgctgttgttatgggtcgtggcctgtattttcctgcgctggatgcaaacccgggggtggctgggcacactgttggcggtgctcagcgtgttggccgcgctgtacatctgggtgacgcagcggcgtcgctaccggtgcagcgcccacgccatccataccggtcgcttgcgggccgatgtcgcgtcggtggtgtttacgggcgtgatggtagcctgcctggcggcagtgtctctttgggccgtactcgatacagcatga

SEQ ID NO: 348277 - DNA, 1245 bp, Pseudomonas aeruginosa
atgaaacatctacggttaagcgcactacctactcccttgctcggcctgtccagcctcgccttgtgctgcaatgcctcggcggccttcattgccgacagcacggccaacctggacattcgcagcttctacatgaaccgcgattaccggcaaccgggtagcccagagacgcaggatgaatggacgcaaggattcgtcatgcatgctgaatccggcttcaccgacacgacggttggcgtggggctggatgcccatgccgcgctcggcctcaagctggattcggcccgcggtcgcagcggcgacaatggcatcctcccgcagagtgccgacggcacccccgcgaatgaattcagcgaactgggcttcactggaaaactcaaggtgtccaagagtgtcctgcgcctgggtacgctttacccgaccctgccggtgctgaattataacttcggacgtctgctgccttcgagctacagcggcggcatgttgacctcgaacgaaatcgacggcctgaccgtcaacgccggtcgcatcacccaggccaacctgcgcaactccagcagcaatgaccgcatcacttattaccgcggcggcgtggaaagcgatcatttcgactttgctggcggcagctacaagctcaccccgcatctgaccaccagctattactacggcgaactcaaagacatctatcgccagcatttcgtcggcctcgtccacaccttgccgctgagcaaaagcgcgagcctgcgcaccgaccttcggtactttcgcagcaacgacgacggcattgccaaaatgggccgcttcgccaataacaacctcaacggcatggtcagcctgacgctggggggccacaagttcagcggcgcctaccagcgcatctccggtgccggcgaatttccgttcattggcaacgatccctatgtcgtcaacttgtccttctacaacaccttcgcccgggaagaagaggattcctggcaagcgcgctacgactatgatttcgctgcgctggggatgcccggcctgaccttcatgacccgttacgtcagcggcgaccacgcgctggtccagggccgcgagcagggcaccgagcgcgagcgcaacattgacctgacctacacggtgcacagcggcccgctgaagaacgtctacgtgcagatgcgtaatatcagcttccgctccggcagcgggctgacccgcgatgtcgacgagaaccgcgtgctggtcggctacaaactggcggtctggtag

SEQ ID NO: 348278 - DNA, 810 bp, Pseudomonas aeruginosa
gtggccgtcggcagctacctgcaagcgttcaccgggttcgcactgggcattgtcgtcctggcgattgccgtactcacccacgccgcccccatcgccatcgtcgccaccaccatcaccatcgtcgccctgcccggcatcgccatcgccctcgctcgccactggcggcacatcgaccgggcatcgttctgccagaccctcatcggcctggtacccggcacgctgctgggcctgtggttgctgggcaaaatgggcgaagagcataccgcgctgctgcaactgttgctgggcgggctgatcgtggccggcggtgtcgccctgttcatcaaaccacggcctcatccctcccgttccagccccctgagcttcgtcctgatgggcctgctcggcggcctgatgggcggcctgttcagcataccggggccaccgctgatctatcactattatcgtcaaccggtgtccattcaggccatccgtaccagcttgctggcgctgtccggcgtcatgtccttgatccgcctgatcatgcagggcctgcaaggggagttgaacgccgaggtcatgtcgctgggcctgctgtcgatcccggtcgccatgctggccagttggctgtatgtgcgttttccgccgcaactgtccgacctgagcatgcgtcgcggcgccttcgccctgtttgtcgcgatgggcggtttcatcctgcttaccgcggtgctaccgagcaccctggccgcccctgtgaagccggccatgaccgcgcgcccgggcaaaaccttttccgttgtgtcaccgcagttctcaaagcctatgccttga

SEQ ID NO: 348279 - DNA, 636 bp, Pseudomonas aeruginosa
atggccttggttgacggttttcttgagctggaacgctcaagtggaaaattggagtggagcgccatcctgcagaagatggcgagcgaccttggattctcgaagatcctgttcggcctgttgcctaaggacagccaggactacgagaacgccttcatcgtcggcaactacccggccgcctggcgcgagcattacgaccgggctggctacgcgcgggtcgacccgacggtcagtcactgtacccagagcgtactgccgattttctgggaaccgtccatctaccagacgcgaaagcagcacgagttcttcgaggaagcctcggccgccggcctggtgtatgggctgaccatgccgctgcatggtgctcgcggcgaactcggcgcgctgagcctcagcgtggaagcggaaaaccgggccgaggccaaccgtttcatggagtcggtcctgccgaccctgtggatgctcaaggactacgcactgcagagcggtgccggactggccttcgaacatccggtcagcaaaccggtggttctgaccagccgggagaaggaagtgttgcagtggtgcgccatcggcaagaccagttgggagatatcggttatctggctcttcgcatttaagggtgtagaaaaaatctga

SEQ ID NO: 348280 - DNA, 1266 bp, Pseudomonas aeruginosa
gtgggtcatcaaatcgtagagataagggtcaatggtgctagaggaaaggtgttggtgcaagagcacgtacctgcttactacccgaacctttatgtgaccttggagcagtcaggccgggcattaaacacacagcacaagtatttagagcacattggggtggttgaggactttctggagttcgagtcgattgatctgatcgctcgcctcgaggagcggccgaagtcgcgttatttaactgatagtgagatttcatgctttgtcgcggacgcggcattacacaaatcaattctggacaaaaagtataccggtgtacgcctacctccaacggcctacaaaacagtgggtagagttcatgcgcagcagcgactcgaaaccgtgcgcgactatctcaaattcctgtacgaaaagctgggtgacgaggcgacacgagatgcagccgctgacgacgtcgaacggcgcctcaatcaaaagataaaggcagccaagcctgcctggaagaagatcagaaatgatgacatgaaagggctgactaatcaggagcgagatcgcttgttagagatcacgcaccctgaaagtgctgagaacccctttgcaaatgaagcattgaagctacgcaattacattattttgcttttgggccttgatatgggactacgtcgctccgaaatgcttctgatcaagctcggagatattcgctggcacaacagggagctctcagttgtcaatcttgtgaatgaggaaatcgacccgcgtaccttggctccgcaattcaaaacccacgagcgcatactggaaatgggtgacgatcttatcttcgcactcaagaaatatgtggacacctaccgcatctctgagacgggaccatctgcggcaaaaaaacatccgtttctgttggtatctcatcgacgcaacgaaggtaggccgctgagcatcaaagcccttgatggcatcctacctcgggctggtaaagtagcgcctgaactagaacatattcacccccacgtcttgcgtcatgatgcagtctacacactactcgagagcatgcgagaggagttggaaatgctaaccccagaggatcgcactacaaaggttcaaaaagtcctcacctatgcttttggatggagttctgaatctaatatgcccagcctctatggggcgaaattctggaaggaagaggcaaataaggcgatgaaaaaacgctcggataaattcaaggctatcagagagagtgttgagattaaagttcgcatgagacacacaaagtga

SEQ ID NO: 348281 - DNA, 627 bp, Pseudomonas aeruginosa
atgcccaatgccattgaattcattgccgatcgcctgccgcgcgtcacggtggaggatgtgcgccgcttcgcggataccgtcgaaatccgggatgcgccggctttcgcggccgagttgcaggctttcattcacgagcgcgtggaggcggtgaagctgcccgccaacttggacggagagacggtggggcaggccctggcacgcaaggcggccgcgctgcgcaccgaaacgcgctgggcaccgactgaaaccgacgtccagcgaggccgcgccgtgttgctggaagccttcaaccagccgcataacctgccgatccccgagtacgccaagctggcggacaagtcgcgccagcagatctacaaggacatcctcgcccgtcggctgttggcgctgaacgtggggccgcgcggtcagaagctgcccgactggcagctcgacccggtaaagcagcagttgacccaaaccgtgcttcaggaggtcgagggcatcgacccctggacgatctaccgcgcgctgtccgaaccgctcgaaggcttgggcggccgctcgccggtggatgcggtgacgcacagcacgatcgatgacgtggccgatgccgtgttcaacgtactgggcgttcaggtgcattga

SEQ ID NO: 348282 - DNA, 1893 bp, Pseudomonas aeruginosa; identical to SEQ ID NO: 345993

SEQ ID NO: 348283 - DNA, 1107 bp, Pseudomonas aeruginosa
atgaccaatcagcaagtaccccagacagcaggggtctggatcttcaaagagcaagacgctgaaggcgtgcccacgggccgaacggcctcatttgacggcgtggatctacagccgctgcggtactcggaccttgacgggatgaagctcaatggccctgtcaacattccactgaactggtcccatgcacgcatcgtcgagagcagcattccggaactgtcggtagaggcagccgcaaatcttcgcacaacgctggagagccaatactcgaacaaggccatcggcctcgttcgcggcggctggctgccatccggcctggctttgcggtcgaacatgcttgtcatgcccgatcgctgcaccatcagcgagcttgcgtcacgctacaaagatggacggaaggtccgcggcggggacgattttctcgacctcttccaagacaagcccgtgcggatcaatcccggcctgttcgctctggaaggcaacaagcggcagattcccacgccgcaagaggtcgaggaccaatgggctgaagcctgcagaaaaatccgctcggcgcttccgcaagcccaactcacccccgactcggcagtcgctggcttgaccggactcctggaggaaatgcgcgagagcatggagcgcaaagtccaattcttgtgtcaggtggcccctgcactgcagtcgcccatcagcgcagcccgacgccccgagatgtggaaccaggttcttgaagctgcccagcgctgcggcttgcagcgaaatacgctggcggtgcttgctgccctgagcattgtctgcgttgaaaacggcgcaggccccgccaagcgtctggtcaagccttccgcacagtattccgaacaggacgcctacaacgcgctggccgatctgagggcgctggagctgctgatcaatttctttgctctatttccgcaagagcagatcatgctgtgtacaggggacaagaacctcgctttgttctgggcaggaatgcgtgcttcagggttcgctctgcatggcccagctcccgtctcctatacctacaaactttctcccgtcgaagcgctcctgcctcacgtcactgccgatctgctagacgcctacttgcaggcatag

SEQ ID NO: 348284 - DNA, 747 bp, Pseudomonas aeruginosa
atgcacaaggaacctccattatcaaaggtgttctatcgccccatcgaagctgccatacggtgggccgggctgttgcggttcaagacgatgatcctcgcatcgatcacatcgccgctgcgcctgccacagacactggactgcccgcgatggaatgagtgtcggctgtattcggaacgcatctacgacggcatcctccacgctgagcttccttacggcaagaacgggatcacgctcaacgacccagcgctggtgagttcgccggacctgaccatccgccatgtcgatctcaagcgctggatgcgcgcccactatcctgagcatcgccccgcctttctcttcagccgtggcgagcgcatggcccacccgttcatctccatacaaacaggagaggcgctcctcttggagcgaatggctctcaaagcagcgttggaccatacccagcatcagatgcacgaactgcgagagcagcacgaaaccctgctgaagcaatcaaccgtgctgctggcttccaatcagcgcgcaatcagccaccgggcagagaccacgtacctgaacatcatcggcgcgatgctggcgctgatgctcggccagtctcctgcgggtgtgccttactccagattcagaacgcaggaggccatcgtctctgcaatgcttgccaactgcggtggcgccgtgggcatcacggagcgaaccttgaatggcaagttcgccaacgctaggaagaacgtccgtagcgcatccgagtga

SEQ ID NO: 348285 - DNA, 213 bp, Pseudomonas aeruginosa
atgtcgcaatcccccgtactgccgccgagcgagcgtcgcattctgcgcctggatgaagtcgaagcgaagtccggcttcaagcgcgcccacatctacaacctgatgaaaaagcgccagttcccgcaggcgcttcgcctgggcgtgcgcgccgtgggctgggactctatcgagatcgaccagtggatcgccgagcgcgtcaacagccggacctga

SEQ ID NO: 348286 - DNA, 1623 bp, Pseudomonas aeruginosa
atggctgacatgacctcccaggacatggccggcaagctgctcgctgccgggttcgagcgcagcggccccactgccactgccttgagcgatccaatcgccgacacaccgatggtcgtgacgctggaccagctgcgcccctacgaccacgacccacgcaagaagcgcaacccggcttacgacgagatcaaggcatccatccgcgaacgtggcctggatgcggcaccggccatcacccgccgtcccggcgaggactactacatcatccgcaacggcggcaacacgcggctagcgatcctgcgcgaactgtggtcggagaccaaggacgagcagttctttcgcatagcgtgcctgttccggccgtggccccgccgcggtgaagtggtcatgctgaccggccacctggccgagaacgaactgcgcggcggcctcaccttcatcgagcgcgccctcggcgtcgagaaggcgcgcgagttctacgagcaggaaagcagcaccgccttgagccagtccgaactggcccgccgcctcgcggccgatggcttccccgttcagcagtcgcacatcagccgcatgaatgacgcggtgcgctacctactgcccgcgatccccaccttgctctatgggggcctcggccgccaccaggtggagcgcctgtcggtcacgcgcaaagcctgcatgttcgcctgggagcgctacgccaagggccgcaccctggtacaggacttcgacgacttctttcaggaggtgctgtcgcagttcgacacgcaggccgacgagttcgctccgcagcgcgtgcaggatgagctgatcggccagatgtccgaactgctgagcatcgactatgacgtactggccctcgatctcaccgaatcggagagtcgccatcgcgccctggtcagcgatcccaccccgccatcggcgccgcctgcactgcccgagcctgaaaccattgcacgtcccccaaccgcaccgacgccatccaccgcggcgccagcgactgccgtccagccacgcgaggacgattcggattcgggcgagtcgtctgcaggaagcccggcatttggtgatcgactgcaagggcacgtcgtgtcgccggcgccaacgaccgagcggctccagtccattcagcggatggtcgccgatgagctgggggatgcgctgcctgatttctcggcgaatgtcttgcagtccatccccgtccaggcgggcgggctctatccgatttccgacatctggcatatcgaccctggcctcgacacgcccgaccgtctgcgcatccacatcgcccagttcgcgcgcgagatcgcgggcgaggccggtgtgggcgactgcatcgaggaccgcaccgacggcgtgggcttcgtatgccatgcccaagaccggacgccatcgccgcagggccgcgcggtgtttgcgctgctggcgtgtctggccggcgaggtcttccccgaggcaggtgtggacggcgggcagttggccgccgagctgccggcgctgctccatggccagggcaatccggctcagcgcctgagcgataccgcactggtcaagctgttccgattgctccgcctggcgcggcgcctgctggatctggaatccggcgccgcagccccagggacgtga

SEQ ID NO: 348287 - DNA, 1257 bp, Pseudomonas aeruginosa
atggacgacaccgcaccacgccgtggccccgtcgcactcgcggacctgttcgacgcggcgctgaaagaccttgcgcccaggcccagcccgcccacgcccacccccacgcgcatgcctatacctgcgccgtcacctgcaacgccagcagcgtccggcgatgcgttcctcttcagtggcaaccggcatgagaccgtgccgcggcgactgttcctcgatcgccggctgacgccgctggagcgcaacgcctggcaggtgttccggctaatgctcaacgacgacggcgtgacggcattcccgacctatgagcagttacggccctggctagcctcgatgccctgcgccggccaagcctcgcatgaaaccgtggcccgggcgctgacgctactgcgcctgacccgctggctgagcctggtacggcgccgccgcgacgccaagaccggccgcatcctcgacaacctctatgtcttgcacgacgagccgctgacgccctttgaagcgatgcagctcgacccggactacctgcagctcgtcagccaggcgctgggccattccgccaaggccgtgcaggtcgtgggcttgcacaccctccgggaaattggtgaagaccccttgctggccgggcgcaccctgccgtccaggctgcaagtcctggccgaacgccttgccagccggggcatcggggcgcccgaaagttattcacaggagggtgccactcacgattccgaagatggtgattcaagctttcttcggaatcgtgatgaccccacttcggattccgaagcagggtcgaaacccgcgccagacggctctcttcggaatccgaaacaggcccgtacagtacgtagtagtcgtatgaatgaagtacgtactaccgcgcaggcgcgcgcgctgggcgatctgcaatggcccaagcggttcacggatctgaagtcagagcaacagacaggtgccaaggtggcgttgcagcaggtcgatgcttcgctgaggcaggccgtgttggacgaatgggccgcacggtgcgccaaccacggcattcgcaatccagcgggatacctgttcggcatcatccagcgggccattcgtggcgaattcaatgcatgggccaagtccgaccctgcgtcggcgctgaagcccgcaaccagtgcggggccatcaaggccgccggccccacccacgccaccaccgggtaaaccagtgccgcccgaggttgcccgccagcacattgccagactgcgcgagttgtttcgcaagccatag

SEQ ID NO: 348288 - DNA, 978 bp, Pseudomonas aeruginosa
gtggtggatttgctgccggtattcatcaaggcgtccaagacgatccagcaactgatgaagcagtggttctctggctatcccgccgggatgccgtggaccatcgtttcggactattgcatcggagatgaaggcaagaagaacgacgtcttctccttcgtggtcatcgccaatcacgacactacggacaacatctctgcatacctctcggctgcagcccccaatgacatcaagaatgtcaggcagattccactaggactgaagcagtatctgacctgcccgaagccgatcacgttcagcgtgtccttcgtcattgaccgagatgcagctcttttgcgcgactacctaaaggtagagcacatggccagctttattccggacgcctgcgagttgatcgagaccttccggagaaactcgcctcccagcgcatccttggacccggcttacttcgatgaagtcctgcagcggctccgaacctttgagaaggatctggcccgcaagcaggtgaatgccaagctgtctcgacagattcatctggcatctggattcgcggcaacgatgttctatctcgtgacgcaggccacgggtgctggctaccttcgctggatctccgacagggataaattgatagagcacaacgagaccgtggtctacgacctggcttacctctacttcatgctcatgtcgtcgagcctgcccgacctggagcacacggccgagggactcctgatactcgatttgcccaaaaccatgttcgagcttccgaatccaacgggaaagcacaggtttgatccgttgatccgcttgccggactacctggccggggctttggccgatatcggttcggacatgtcctactcgaaggaaaaattcggcgagatgcttcacgacgttttcatcaactcgtcgaacaactgggtcatacagctcagctccgacggcgaaaagatcacggctcgttctgtgcggttccgcgcttga

SEQ ID NO: 348289 - DNA, 528 bp, Pseudomonas aeruginosa
atgagcgatctgaatcaggacacccgctacttccgcgctctggaacaggcagccttcatgcggctggaacacgcggcctctctaaaaggccttttaaagccttttaaaggtaaggggcctctggaggattgggccagccagtgcttcgccatgcgcgacgaattcatcgccttgtcgcagcggcaggtgttgtcccaggcgaacgggcaccccttccacctgttgcccatcgagctggcccagcagaccactggcgcaggcaccgcctttcttcgctggcgcagacacgaccgctcggccatgggcgtggcgctgtggcaggagctgatggcgagcaccagcatgccggtcaacctgctggccgacctgcacgcgatcgagctgcagcgcatcacgctgaacatgcagatcagcctgttgcacaccttgggcaggcaggcacaggaatgcgccagcaaggctgcggaggcggaagaggtctacctacgcaggctcaagtccatcccaaccgcaatgcgcgatcggtga

SEQ ID NO: 348290 - DNA, 780 bp, Pseudomonas aeruginosa
atgatcagtatcaggacccggtattcccttgctcagtttctggcgcaacaggaagtcgccgtatcaatcacgctgttggccaagtacggcgtccagcatctgtccttgtcgcatgccaacttgcagatgagtctgaaccacaccatcggcgaccaggacgacaggactttattgctcgtactacaggagatcgttgcaacgatcggaagtcttcgcaagaatgtttcgcctaagcacgtattcgatgagcgcttgcatgacctctcgcagtgcctgttgctggatgggtatatggtccacgacaagaaactgctgcaagccgatccatccatcgccgatgcggcccccatggaggatgatctcgtgcgagccctccgtcaatcggctccgccgcagtatgaggccatcatcgacaagatcaatgattcggctgaagctttccgtgccagtcctccggactacaacgcagctttaacgaatgcgcgggtcgctctcgaaaccctggctgtggatgtcgccgctggcgtggcacagcagcatccaggtgtcgccacatacaacccgacaagctggggctcggtgattgcatttctacgccagtgtggcgaaatcacggtcgaagaggagaaaggcttggccggggtctttggattcctcagccctggcgctcaccgccccatcggcattccgcaagagcaaatggctcggctgggacgctccttcgccttgaacatgtgctggttccttttgcacaaccggcttgctcgcagtggcaactga

SEQ ID NO: 348291 - DNA, 246 bp, Pseudomonas aeruginosa
atgcaacaaccggagcaagtacgagccgcgttcgagcgcgacattgacaacaaggtgctgttcatcaagaacggcaaactgctgttcattgatggcatcaggctcaaggccatcgccgaccgcgaagcgtacttcgcttctctacgcgccaggcaaccccagcccatcgtcatcctcgccgagctggcacacgatgaggcattcgccgtatggaagcggcatgtactgggcaataggcccgactga

SEQ ID NO: 348292 - DNA, 279 bp, Pseudomonas aeruginosa
atgttccccgacctcatctcgcccgccaccgacttcgagcaccaactgggagcctgcgtcagcgccatgtgccaggaggatgccatcggccagaccctggtattcgagcgcgacaagggaacgctgaacatgcgccacatcgccatgcaggagctggttgagaccgacatcgaccgctacgaaatggtggtattcgatggcggaaccatcagcggcgactcttggaagcatgtcttctttccacggcaacgcacgcattgcttcgtgtacgacgcctga

SEQ ID NO: 348293 - DNA, 693 bp, Pseudomonas aeruginosa
atggcaaccacatcggctcccgagaaatcggtatcgcccatcgtcgtcccgggccagctcacgctgcgcaccatccatggccgcaacggcaagttcaacgtcggcaagctcgactgccaactcggcaagttcacgatcaaggacgctgaattggagcagtaccccgagggcaagtaccaaggggaattcgtccttcgctacatcttcctcaaaagctatccgatcagcgacggcagcatgcgttccgagatgcgcgccaacctggacggcatgacgcttctcggcatcgacaaactgagccgtgacgaggcacgcagcttcggcacccaggaagtcgatccacttgatgaagagcaaggagcgcagcctgtggcaacgccggccaagcccgccaaagcatccagacccgccaagcctgcccccgagcaggcgtccgcggaccctctcgtcgataccacgcccttcggcgtggatgcgccgatggccgctgcggctgctgcctccggcagcaccgaagacggcgacgccggtctgttcggtctgctctggccgctgggagagtccgtaaaactggattcgaccatcgaccgccgcaccctgcgcacgcaaattgcccgcctgggcgaactgggctacgcgctggacttcaagacgcaggagtggagccgccaggccggactgcaacctgcgtga

SEQ ID NO: 348294 - DNA, 618 bp, Pseudomonas aeruginosa
atgacaaacgttatcctgacccgtcatggtcatgtggactggatcgcgcctgagcgctttcgcgggcgtgccgaactgccactttcggagctgggaaagcggcaggctgaagcgctcggcaggcgcgtcgcagagggctggaagcccgatgccatctacgccagcccgctctcgcggtgtgttcacacgggggaggccatcggccgcgccacggcctcgaaggtgcacgtgctcgaagaccttgccgataccgactacggtcagtggcagggactcacgcacgaagaggtgcgttcacgctggcccgacgagtcgcgtctgtggtttgaggcacccgatcttgccgtgattccgggtggcgagacgatggccggtgtgctggggcgcgccatcaacgtactgcggatcgtgctgcgcaagcatcgggaccagacggtcgtcctggtgggccacgacagcatcaatcgcgtcctgctgctgcatagcctgggtctgccactgtcgcgctactggcgcatcaagcaggacccgtgctgcctcaatgagatcgagctgcaggacacggtgttcaccatccatcgtgtcaatgaaagccaccacaccgcgagcctcgcctga

SEQ ID NO: 348295 - DNA, 1284 bp, Pseudomonas aeruginosa
atggtttccaagataaagatgattcacgcgcgtgaaatcctcgattcgcgcggcaatccgaccatcgaggtcgatgtgcacctgagcagcggcgtgatgggacgcgccgcggttccggccggagcttcgaccggcatccacgaggccgtcgaactgcgcgacggcgacatccggtgtttcgacggcaaaggggtccgtgccgctgtggcccatgtaaacaaaggcattgccgcggtgctgctcgatgccgacgccttcgatcaggagacgatcgaccggcggctgcgggactacgacggcacggcgaacaagagccgcatcggcgccaacgcgatcctcggcgcgagcctggccgtggcgcgggcggcatcgcaggccgcccaacagccactgttccgacatttgggcggacccgaggtccaccgcatgcccgtgcccatgttcaacgtcctcaacggcggggtacatgcgaactggcagggagtggatttccaagagttcatgatcgctccggtgggcgcttcgagctttgccgaagcgatgcgctgcggtgccgagatctaccaccgtctgcgcgaagtccttaaggacaagggccactccaccactgtgggcgacgaaggcgggttcgcgccgccgctcaaacgcaacagcgacgcggtggagttgatcctggcggccatctcgcgggctggttacgaagcgggaaaggatgtcgtcctggcgctggaccctgcatcgagtgggttctatcacgacgggatgtaccacttgcgcagcgaagggcgcacggtcacggccgaggaactggtcgcactctacgtcgagtgggtggcgcgctaccccatcaaggtcctggaagacggcctggcggaagacgactggagcggctgggcgctgctgaaccagaccctgggcaagaagatcgaactggtcggcgacgacctcttcgtgaccaacgtcgagcgcattgagcgcggtatccgcgaggacgtggccaacgcggtgctgatcaagcccaatcagatcggcacgctgacagaaaccttgtctgccgtcgccttggcctacaacgccaactggggtgcgatggtgtcgcaccgcagcggcgagaccgtggacagcttcatcgcggacctggcagtcgcgctggacaccgggcacctcaagaccggcgcgccttgtcgcggcgagcgcgtcgagaaatacaaccagctcctgcgcatcgaggaagcgctgggaagcgcggccacctatgcggggacccacgccttcgtccgttga

SEQ ID NO: 348296 - DNA, 288 bp, Pseudomonas aeruginosa
atgttgagggtttacaacctgccgcccgagccgggcatgcgcgattggctgcgggaaaacggtcggctgatcgctgcgctcatcgcctggtccgtcgtcatggtgtgcagtgccagcgttgtcgctcccctgagcgacacggagtggtacgcagtgcgcaccgtggaaaacggcttgatctacgaacgcgcgaacggcgagcacggctgtctggcgcgcgtggctgctggcgacgcgatcacctgtgggcagggcaaagacctgaccggcaagctgcgggctgattga

SEQ ID NO: 348297 - DNA, 324 bp, Pseudomonas aeruginosa
atgaaaggctaccaactgacattcttcacggcgcaggaccgccgccacgggcacaagcccatcggtgactggctcctggagttcgccaaggaccatggcgctgtcggcggcacgctggtgggcggtgcggaaggattcgatcacgtcggccgcttccactccgcgcacttcttcgaactggccgaccaaccgctggcggtgaccgtctccgtagacgaagcggcctgccggcgtttgatggacgcgctggcgcaggaagcgatcgacctgacctacgtgaaggtgcccgtcgagtacggacgcatcggtctgggcgcgaagtaa

SEQ ID NO: 348298 - DNA, 390 bp, Pseudomonas aeruginosa
atgagcggcgcatacgcagtcctggccatcagcctcggctccatcatcggcgcgctcctgcgctacggcctgagcgtggcgatgaacgccctggtgccgccgatcccgatgggcaccctggcatcgaacctgattgcggcctacatcgtgggttttgcgatcgcctacttcgggatggcaccgggcttgtcgcccgtgtggcgcctgttcgtgatcaccgggctcgctggtggtctgtccaccttttccacgttctcggccgaactgctcacgctgctgcgcgacggccgcctgggctggtcggccggcatgctggcgctgcacgtgggcggctcgctcacgatgacggcgctgggcatggcgtccgcatccgctactcgccaatcgtaa

SEQ ID NO: 348299 - DNA, 396 bp, Pseudomonas aeruginosa
atgaaaacagacacgtcccagaccatcgcggcgctgcggctgtacttcccgaccgcaacccgggccaaggtcacccgtttctggcaccacctgagcgcgcctgcactggcgcatcacctgcttaccgtggccaagaaggccaacatcctgcaggccatgctgcaccgggtcagttcgggctacctgccaggagaacgcttgtcgcaccagcaccccgaactgacgggcatgcggcacccggaatgcctggaattgctggacaccgagcagcggctgcgggcgttcatgcacgagcacggggacgagttgaagaaggtccacgccgtgctgttcctgtgtgagctgccgctgtcgcacctgaggaccgcctccggcaatgcgacccggggcgtttga

SEQ ID NO: 348300 - DNA, 1383 bp, Pseudomonas aeruginosa
atggatttcgagcgaaccgaccccatgcctaatcgccgtctagaacagcttgagctgctgccctacgtgggcaagtggcttctcatcgccagcgttgttgccgtcctggccggcagcgcctccgccttcttcctcgtctccctcgatcatgccacggcctggcgcgagtcccacccttgggtgatttggctgctgccgctggccggcctgggcgtgggcctcgtgtatcacctgctcggcaagacggtggacggaggcaacaacctcatcatcgacgagatccacgaccccaagaaggtggttccgctacgcatggtgccgctggtgctgggcggcacggtggtgtcacacctcttcggtgcttccgtgggccgcgaaggcactgcggtgcagatgggcggcgcgctggccgaccaactcacccacgtgttccgcctggaacatgaagaccgacgcatcctgctgatgtgcggcatcgccgcaggcttctcgtcggtgttcggcacgcccatggcgggcgccgtgttcgggctggaaatcctggccatcgggcgcatgcgttatgacgccctgttcccctgcatggtggcgggcatcgtggccgatcaggtatgtctggcctggggcgtgcaccacgcccattacgcgatcgggcagatcgtgccggtcggcgcttggagcgtggtggcggtcgtgctcgccggggtcgtgttcggcatcgtcggcatgctgttcgcccgcgtcactcacgcgctcggggcgcgggtcaagcggctcatccattacgcaccccttcggccgttcgccggcggcatcgtcatcgccctcgcggtctgggcgctcgatggctaccagtatatcggtctgggcatcccggagatcgagcgcgccttccaggagccgatgcagccgtgggatttccttggcaagttcggcttcacggtcgcgtcgctgggcacgggcttcaagggcggtgaggtcaccccgctgttctacatcggcgctaccctgggcaacgcactggcgccgatcctgcagatgccgttcgctttcatggccggcatcggcttcgtcgcggtgttctccggcgcggccaacaccccgattgccacgaccctgatggcgatggaactgttcggtgccgagatcggtccgctggcggccatcggctgcgtcacggcttacctgttctcggggcacaccggcatttaccacgcgcagcgcgtaggccacagcaagcaccgccggcatcgggccgctgtccctgaagacctgcgcatcgccgatcttgccgccttcctcaagaagcgccgcgaaacctcgaagtcttccgccgcagatcctgtggcactgccccctgtctccaaggaaagcgttgaatga

SEQ ID NO: 348301 - DNA, 693 bp, Pseudomonas aeruginosa
gtggtgctcgggctgtccgtgatccctggcctgctggccgtgctggttttcctgacgctcgtgaacgccccccagcaatcgcccaatcccggcctgcgcttcttcggcgcgctgcacgagctgccaacacggttcaaacgctacctctgcgcggtcgggttgtctggcctggggaacttctcgcacagcctgctgatcctggccgccacgcacttgctggcgccctcgatcgacatcatgcatgcgacacaggtcgccgggctgctctacgtgggacgcaacgccgtgcaggtgctggcttcctatccggttagcgcctgggcggatcgcatcggcccgctgccgctatgggtggcgggctacgcgctgggcgcggccactgctgtgctggcggcactcgccttctgcctgggcataggcagcctgccgctgctcgccaccagttttgtggccgcggggctctacgtggcgatgcaggaggcgctggaatccacggtcgccgcgggcatgatcgaaccgcaagcgctgactatgagctacggagcgctgggcaccgtcgatggcagcgccaagttcctgtcgagtgcggtcgtaggcaccgtatggacgatgacctcgccggtactgggcttagggttggctgtcgtcctgatgctgaccggaacggttgcactgggccgcctcaaccgatga

SEQ ID NO: 348302 - DNA, 726 bp, Pseudomonas aeruginosa
atgaagccatcgatcgtcctttccgcgctcctgctggcatccacccagtttcccgcgtgggctcagcagccggccacggctccggcccgcaatgcgcagagccaggagcgcccgctggccgcacgcgctctggacggccgggtgtcaagcgactggggcctgcaaccgcaggagtgggcgcgctaccgcgaactgatggacgggccgctgggcatctactcgcccaacctggacccgctgtcggccctaggcatcgaggcccgcaccgacgaggagcggcgccgctacgcagaactgcaggtgcaggtcgaggcgcgccgcgtcgagaagctgcttgcctatcagcgcgcctacgacgaggcctggcagcgcctgaaccccggaatgcagcgggtgaacctgccggacgacaagccggtcgccggcgccacgcgcggctccggccgcacagcagtgttcgtcaaggacggctgcgtggcctgcagccagctcgtccagcgcctgcaatctacgggcgccgaattcgacctgtacatggtcggcagccgccaggatgacgcgcgcatccgcgactgggccaagcgcgcgaacgtcgatccggcacgcgtgcgcagcggaagcatcacgctcaaccacgacggcggtcgctggctaacattgggggtgcccggcgatctgccggcggtcgtgcgcgaggtgaacggccaatggcagcgccagccgtag

SEQ ID NO: 348303 - DNA, 297 bp, Pseudomonas aeruginosa
atggccgcatcattgatcaaagcactctgggcaaggctctccggcaagaagccagcgcagggcacccgctacttcgggggccaattcaaggatggccaatcggttgtcctgtatgaccgcgagggcgaacaggtgattgctagcatcggcttcgacgttagtggaagaggcaagcctcacccaggcttgattgagtacgtaatgactgcgaccggctcggccgtgccggtgctcgatcttccaggtcagcaggaagaaattccatcagtcaggtcacgtcgggacgaatcgaggtga

SEQ ID NO: 348304 - DNA, 714 bp, Pseudomonas aeruginosa
  misc_feature (165)..(173): n is a, c, g, or t
atgaaatactcactgtcgagcaaggtgattttcccttggggcggcgcaggcggtgagctgggtggtgcggcccgcaacactctgccaaggatcgacctcggcgccgccggcgagctgagtggtgcggcccgcaccactctgccaggtcctggcctcggcgccgannnnnnnnngtggtgcggcccgcaacactctgccaggtcctggcctcggcgccgatggcgaactgggtggtgcggcccgcatcactctgccaaggatcgacctcggtgccggcggcgaactgggtggtgcggcccgcaccactctgctaggaccaggccacggcgccggcggcgagctgagtggtgcggcccgcaccactctgccaggtcctggcctcggcgccgacggcgaactgggtggtgcggcccgcatcactctgccaaggatcgacctcggtgccggcggcgaactgggtggtgcggcccgcaccactctgctaggaccaggccacggcgccggcggcgagctaggtgtttccactggaatcactccaccaggaatcaacctcggcaccgacggagcgtttggtgtttcggcccgaaacactctgccaaggatcgacctcggcgccgagggctaccaacttctcccactcaagaggaaccgaaaagatgtgtgactcgatcttgtatgcccccatggacgagctcgaattcgagcggctgctag

SEQ ID NO: 348305 - DNA, 939 bp, Pseudomonas aeruginosa
atgaccagcctcaacctccgccgcctggcagcggcggccgccaccttcagcctctcgttcacggccgcggccgcgatcaacagcgccgccatcgtctcctccaccctttcccctcagtgcctcgaatacaaggtcgtcgggatctgctactggctgctctgcggcccacatggctgcaaagtgaagacgtcggtcaaggtccgccactacgtgcctgacgcagtcgtctccagctatgcgaataccgggagcaacccctggacggaagtgtcggcgctgggcacaccgaatcccctcgcccaggccggcaatgacgcgaccaccaactacaaggccgagaacagcatcggccgcttcaaggaagcggatgtgatcggccatcctggcggggccacgttcagccggttcgccagcgcctctgggtacgtttgccctggcgccaccttcccgcttgtgccgtacttcctcagcacactggacgccattggctggcggcatggaattcccgagcaggtgtaccccgaggcgttggtcccaggactgcgcgaggtggggggaatcttctccggcgacatgtgggggaacctctatccgcgcagcggattcctgcaccagaccgacgactacaagactgcggccgtcatcgcccagcgcgccggcgacatcaccacgcgaatcggccaactccacgtctaccttcccatgcgcgcagcccccaaggacggctactggccggcgggcgagctgaaagagggcgatgcctcgactgggaaatggcaggagctgaccccgtccctgagcctcaactgcgcggtgtttcccaactcagggccgaagacgcaagccgtcgacggcgattacgcctgggcgctctggcgtccctactcctgctgccagcgcaaggggcagatcttcctcggcagtaccgacttccaataa

SEQ ID NO: 348306 - DNA, 1368 bp, Pseudomonas aeruginosa
atggggcagttaccgggaggacaggcgcgcctgttctactcgttcaatctagaagagcacatcccgccgcaacaccccctgcgcagcatcgaccagtgcctggatctcagtgacctgcgcgcccacctagcggatttctacagccccatagggcgcccctcgattgacccggaattgatggtgcgcatgctggtcgtcggctactgctacggcatccgttccgagcggcggttgtgcgaagaggtgcacctgaacctggcctatcgctggttctgccggctgggcctggaggacgaagtccctaatcactcgaccttctcgaagaatcgccacggccgcttccgtgacagcggccttttccgctggttgttcaatgaggtgctacgccgctgcatggtggccggcctggtcaaaggcgaaggcttcgctgtcgacaccagcatcatcaaggcggatgccagccggcaacgtggggtggcgggcgatgaggtcgattggagcgacccaaagctcagcagccgcgccgtgcgggagtacctcgaagcccttgatgaagaggctctggctgaagctcttcccaagaaaatttcgctcactgatcctctgtctcgttggacagccgcgccaggtggcccggcctactttgcctatgccaccaactacctgatcgacactgagcacggcgtgatcatggatgtagaagcgaccccagcgcaccgtaccgccgaagttgattcgaccaagacgatggtcgatcgcgttgaaacgcagttcaacctcacgccagagcgcctcatcggtgataccgcctatggcactgccccgatgctggcctggatggtcgaagaaaagaacatcgagccgcatgtcccagtctgggacaagaccgagcgcaaggacgacagcttctccagtaacgacttccactggaatccggaggccaatgaataccactgcccaaccggcaaaccgctacgcagtgaatggcgcgccttcacccagaaaagatcgcgggtgaccaaggccaataccatcatctaccgctccagccaaaccgactgtgcctcctgtccgctgaaagcgaagtgctgcctcaacacaccgaatcggaagatcgtccgcagcatccatgaggctgcccgcgatgtagcccgacgcatcgccaagacaccggagtacctcatctctcgctgcgaacggaagaaggtggaaatgcttttcgcccacctcaaacggatcatgaaactcgaccgtttacgactgcgtggcctgacaggtgccactgacgaattcaccttggccgcgaccgtgcaaaatctgcgacgcatggccaagctcttgcctcatggaccaccgatcacgggatag

SEQ ID NO: 348307 - DNA, 309 bp, Pseudomonas aeruginosa
atgaacctcgcaaacctgatcaataagcagtgttcccgcgacccctctgaggtgctcacggaagagcaggcgatgtctctttggggggagcgtgaagtagcccggcaggctgctcagaatatggcgctcggcgttgccgcggtcggaaagctgctggcgcttaccagcgctgaaggcgaggccgggcaggaaaccatggaacgtctcgggtggttcctggaggaggttggcggtgccatcttccagttggcggagttcgaacaggtctgttctgctcgaatcgatcggcagaaggaggctcagcaatga

SEQ ID NO: 348308 - DNA, 1872 bp, Pseudomonas aeruginosa
atgctctccctgttccagcgaaaacggcccccggtcgctgccgcgccgtcgccagcacccgccaccgacctcccgaaagggttgatgcggccggagtcggccgcatcgttgctcgccaccccgcgccggcagaagctgctggaacacatctggcagcgcacctcgctttcgcgcaagcagttcgcctccctgtaccgcgcgccgctggagcgctacgccgagctggtccaggccttcccggcttccgaagcgcatcaccatgcctacccgggcggcatgctcgaccatggcctcgaaatcgtcgcctacagcctaaagctgcggcagtcccatctgctgcccatcggggccagccccgaagaccaggcggcgcaggccgaagcctggactgcggccgtcgcctatgccgcactgctccatgacatcggcaaggtggccgtcgatctgcacgtcgagctggccgacggcagcacctggcacccatggcacggcccgctgcgccaaccgtaccgcttccgctaccgcgacgaccgcgagtaccggcttcatagcgccgcgacaggcttgctgtaccagcaattgctcaatcgcgatctgctggactggctcagtggctatccatccttgtgggcgccgctgctctacgtcttggctgggcagtacgagcacgccggggttctgggcgagcttgtcgtgcaggccgaccgcgcctccgtcgcccaggagctgggcggcgatcccgcgcgcgccatggccgcgcccaagcactcgctccaacgcaagctggtcaacgggctgcgctacctgctcaaggaagagctgaaactgaaccagccggaggcctccgatggctggctcaccgaggacgcgctgtggctggtgagcaagacagtctcggacaagctgcgcgcgcacctgctgtcccagggggtcgatggcatccccgcgaacaacacggccgtgttcaacgtgctacaggatcatgccatgttgcagcccaccgcctccggcaaggccatctggcgcgcaactattaccagtgagagtggctggtcccatgccttcacgctcctgcgcctggccccggcgctgatctgggagccctcggagcgacccagcccatttgcgggaaccgtgaccgtggacaacgccggcgaggccgaggacgggccgcgcccgtccgcacccgacgctgcattgctacctggagcagcggtggcaacggagaaggagcccgcagcaagcagccgtccagatcagtcgggcggaagtcgcgccatacctcccagcacgcagcgcaatccggccgacccactggaaagcatgctggcgatgttcgagacaacgcctgagccggagcagtccgtcgaagccccgccagagggtgccgacgatgcagcggtgccgctcgaccctcccgcatcggccccaggtccttcggcgccgaccgccgcgcctgcgccgcacgatttcgcctcatttaccgggcggccatcgggcgagcatttcatggcctggctgaaacaggccgtccagacccgcaagctcatcatcaatgacgccaaggccctggtacataccgtgtccgacacggtttacctgatcagccctggtgttttccagcgctacgcacaagagcatccaaccattgggccgcttgcgaaggacgcggccctgcaggactggcagtgggtgcagaagcgctttgaaaaactcggactccacaggaaacagccatcgggtctgaacatcaggacgtgcgaggtcatgggaccgcgcaaaacgcgccaggtgcatggctatttgctcgaagacccatcgcacatattcgatgccgttccaccgaacaatccttatctgtcgctcaaatag

SEQ ID NO: 348309 - DNA, 504 bp, Pseudomonas aeruginosa
atgaagctaccgactacaaaacaagaactcctagataaggttcgcaccagccaccgaaagctggaggaggtaaccgccacggtccccgcggaccactacaggcgcatcgccatgatctggcaagaacagcgccatcacaccagcgctgcaatgattctggtggacgtgatcctctggaatacgatgattctgcagctcgcacacgatcagacacctggaccttcggcttcgttcttctcagcggacacaatgattaagcgcgccgaaggtctttcagggatgttccaacgccgtttcgcaaacagggacctttgcgagctggaaaccatgcttgcagagggccagaaccgggtgctcgacatcgtggcgcaccattcggacgttaggcttttcgatcccacgacgagcccgatgcaaaccctcggacgcaggattcagttcttcaccgctacggcctacgacgacgcactgtcgaagatgcggcagtggaagcaggtgatgtaa

SEQ ID NO: 348310 - DNA, 1077 bp, Pseudomonas aeruginosa
atgtgtaagacggatggcttgaggtgtgtttctattgtcttaacgcttttggggattgctgttccaataacaataactgcggcctacttttgggctttttccaatagcggtgcgggactctcaagtagaccagaagattggtcggcgtttggtgctgttttggcaggggcttttacttttctcagtgctatttctacaacgcttgccttggtctttgtgagtgctcaaacaggcttggctagggcgacagcggctcgccagattgagtcgttgactctggagcagtatattagtcatagaagtgttttcagcgaaaggctagagactttagagaggcactttaaaggtggcatttcgtttttagctcttgatgaattgtatggtcgagtgtttagcaagaatagcccggtgcatttcgaagcgagagtgaatatttcgaatactgagagtggtcagcttgctcatttagttaatctttatgaagcgctacatgatagtgtaatgggtattcaacgcggagagatagggctggtttataagtttgtgcagagatttctaagatttcaagactcgctggggattattgttaaagatgcagaaggtattgggcaagttcagcataggaagtatgataaagcactcaatgttttttctctcatggattcgttgaagcgggctgaatatgttttaaactcttatctgttttattctgcaaataaaacggttgggagatttcgcaagttaaatgtagatgagttgcctttctgggttatgtatgggctggcacatgcaagggggatggtaataactgtacatcttggcagtaacgaaagttctacgagatttaagcaatttctgagtttgtataaaatgtgtatcgagggaggcagggaaacatctgtggggactgtgggagtcagggaagtttatacgtatagggaggccttggcttacttaaaatacatgttgtctaatcggagtcgtgttaacagtgaagttctagatgactgggatgggttccgtaggaatcttaaagaaaagtggctcttcgcatttaagggtgtagctgatttctaa

SEQ ID NO: 348311 - DNA, 210 bp, Pseudomonas aeruginosa
atggccttcactcccgagctgatcgacgaactggaactgctggcgctcttcaacctgaacaacacccaggaaggacttaaggtccatcacaccgcccgacgcctgcacgacaaggggctgatcgaccagcccgacggcggctacctgaccagtctggggctggacgccgcggagcaggcacagggcctgctgaccatcctcaagggttga

SEQ ID NO: 348312 - DNA, 408 bp, Pseudomonas aeruginosa; identical to SEQ ID NO: 328918

SEQ ID NO: 348313 - DNA, 774 bp, Pseudomonas aeruginosa
atgtcggaagtagagacggtcgatttttacgatcgttaccagtcacaggaagtgctcggcttgcccaaatacgcacagctgcgggaaaccttgctggcggcgatcaatgatggctactggggcccgggttcgcagttgcccaatgaatccacgctggcggccattaccccgttcagcctgggcacagtgcagaaggcgttgcgtgagctggttcaggccaaagtgatcgtgcgccgtcacgggcatggcacgttcgtggccgagcgagcgatgccgatgatgtcgccgatgcacttgcgtttcgaggacagcgacgggcaggtcctgccgatctatgccgaagtggtcggtcaggaaaccgggttggacggcaaggagtgggccgaaaagctgggctcgaacgtgcgtaacgtggtcaaggtcgaccgggtgttcgccgtggacgagctgttccactgcttcacccatttctacatcgacagcgatcgtttcccggcatttgccgagaccgagttgctcgattttgccggggcgaacttcaaggcgctgctgttcaaccggtaccacatcagcatcgccagcctggaccagaagctgcgatgtgaacgttttccggacgaggtctgccagcagttggcgcttgaagagggcacggtcggcgcggtgctcgaatttctcgccatgggcaacaatggccggccgctgtattaccaggaagcgttcattccgcccaatggctaccggctgcgcctggatgccaatctggagccttga

SEQ ID NO: 348314 - DNA, 1317 bp, Pseudomonas aeruginosa
atggctcgctttaaaagtaccaaaacgcatgcctgggtcatcacgatcctgctggcggtgttcatggtgatcaacttcatggacaaggcgattctcggcatcgtcgcaggtcccctgatggccgacctggggctttctcccgctgagttcgggatgatcgccagtagtttcttccttctattctcgttgtcggccatcgggttcggcttcgtggccgagcgggtgtcgtcaaagaaattattgctgctttgtgccggcatctggggcgtggcgcagtttccgctggccttcgtggcctcggtcccgcttctgtacttctcacgcatcctgctcggcatgggggaggggccggcttatccgttggcgctgcacgcctgctacaagtggttccccaacgacaagcgcaacttgccgtccgcagtgatctttcagggcgttaccgcaggtctgctgatctcaggtccgctactgactttcgttgtggtgaagtggagctggcatgcggcgttcatggccctcggagtggccagcctcgtgtggatggcgctgtgggcttacttcggtgccgaaggcaaggtcactgagcaaggctcggtgcaggccgacgccgacgctccccgcctgccttattgggagctgattaccgacagaaccttcctggccaacatgctgatgtattggaccacctattggatcttctcggtgatgttcacgtgggttccgtcctatatgagcaaggtgatgcactacgacgcgactgacgccggctggatgttcatggtgttcactgcgttcaacatcccgatcgtccttggcggttcctgggtgtcccagcgcttgctgaaaacagggctcgcctcgaagtatgcgcgaggttggttgacctccttgctggtgctgattggcggtgcgctgattctgctcgcggtctttgctgtgcagaatccattgctcaaggtcatcctgttggcgattggttgcaatttgccgcagatcaccttcgtgctgagttcggcgatcgttgccgagatcatgccggccgggcaacgctcctcgatgatgtccatcaacagcgccctggccaccaccggcggcctggtcgctcctgcactgatgggggcttttatccagggcgccacaacaccagcgctgggctatgacaagggcttcgtggtcgcaggcgcgctgtgcatcgtcaccagtgtcatcggattgttgctcatcaatcccgaagcaagcaagcgccggttcgcccggcttatcgaaacccgccgggcccgttcagagactcgttcccggagcatcttggccaagtga

SEQ ID NO: 348315 - DNA, 2874 bp, Pseudomonas aeruginosa
atgttaccggcgacttttaccaccgctgtcgagcggctgatcccccgtgaccggcgtttcgatgacccgctttcgaccctcgcgttcggcaccgatgccagcttttaccggcttatcccccaactggtgctgcgggtcgaatccgagcacgaagtggtcgcgctgctcaagctggccaatgccgagcgcgtgccggtgaccttccgcgccgccggcaccagcctctccgggcaggcaatttccgattcggtactgatcgtgcttggcgaccattggaaccaccgtgatatccgtggcaatggccggcagatccgtctgcaacccggcgtcatcggcgcccaggccaatgctgcactggccccgttcaaacgcaagatcggtcctgatcctgcgtcgatcaacgccgccaagatcggcggtattgtcgccaataattccagtggcatgtgctgcggcactgcccagaacacctatcacaccctcgcaggcttgcgcctggtattggccgatggcaccgtgctggacagcgaaagcccatccagtattgccgccttccgcgcgagccatggcgggctgttgcagcagcttgccgagctgggacggcagacccgggccaatctccccttggccgacaagattcgccacaagtaccgactgaaaaacaccacgggcttctcgatcaacgccctgatcgatttcgagaatccgctggatattctcaatcacctgatggtgggttccgaagggaccctggggttcatcagtgcggtgacctatgacactgtgcccgaccacccgtacaaagccagcgcgctggtcgtctttcccaacgtcggcacctgttgcaaggctgtagcggtactcaaacaacagcctgtcgcggctgtggagctgcttgatcggcgcagcctgcgctcggtgcagaacatggccggtatgcctgagtgggtgcgtgaactgtctgccggcgcctgtgccctgttgattgagtcgcgtgccgcatccggtgcactgctgcatgagcaactggcgcaagtcatggccgccatcgcgcatttcccggtggagaaacaggtcgacttcagtgacgattcggtggtctacaaccagctttggcggatccgcaaggacacctttccggcagtcggcgcggtgcgccagacgggaaccacggtgatcatcgaggacgtgacctttcccgtcgaacagcttgccgagggcgtgaatcgactgatccagctattcgacaaacatggttacgacgaagcgatcatttttggtcatgcccttgaagggaacctgcatttcgtcttcacccaaggcttcgatgatccgctccaggtggctcgttacgaggccttcatgggcgacgtaacccaattggtggcggtggaatacggtggtgcgctcaaggccgagcacggcaccgggcgcaacatggcgcctttcgtcgagctggaatggggcactgaagcctaccggctgatgtggcaaatcaagcgcctgctcgaccctcgcggcatcctcaaccccaatgtggtgttgtccgaggacccacacattcacctgaagaatttcaagccgatgccggctgccgatgacatcgtggacaaatgcatcgagtgtggtttctgcgaaccggtgtgcccctccaacggcctgacgctgaccccgcgtcagcgcatcgtcatctggcgcgacatccaggcgcgcaagcgtgccggcatagatattgctgaactggagcgcgcctaccagcgccacggactggatacctgcgcggccaccggcctgtgcgcccagcgctgcccggtgggcatcaataccggtgatctggtccgaaaactgcgcggcacccaggcccacagctcccgtgcggccaactggctggccgagcatttcgcctcggcgatgcagggcgcccgtttaaccttgtacgcagctaataaggcgcaccggatgctaggcactccgttgttcgccaggaccacggcgaccctgaccaagctcagccagggcagattgccccattggacaccggcgatgcctcagcctgtgcagcgtctgcagctccccagacctgccactgcggacgaacgcccacgggtggtgtatctggcggcctgtgtgtctcgcgtaatgggcccggcagccagcgatcaggagcagcaaccgctgttcgacaagacctgtgccctcctggaaaaggcgggctaccaggtggttttcccggacaacctggacgcgctctgctgcggccagccttttgcctccaagggctatgcggaacaggccgagtacaaacgccaggaaactcttgatgccttgctcaaggccagccgcggcgggctcgatccgatctactgcgacaccagcccttgcaccctgcggctgatgcaggacctggccgatgaacgactcgagatccatgacccggtgcgctttatccgtacctatctgctcgaccgtctggagttcgagccccaggacgcaccgatcgccgtgcatgtcacctgcagcacccagcacctcggcgaggcgcaagccctgatcgacatcgcccggcgctgttccaggcaggtggtcatacccgagggtattcattgctgcggcttcgccggcgacaagggcttcaccaccccggaactgaacagccacgctttgcgtagcctcaaggaggcggtgcaatattgcgacgaaggcatctccaccagccgtacgtgtgagatcggcttgtcgcgacacagtgccatcgactaccacgggctggtttacctggtggacagagtcagtcggcgcaagcctgcctttcaatcggcatcatcacaggcggctcaagcgcccatcctcgaccctgttgctgaatggccttga

SEQ ID NO: 348316 - DNA, 783 bp, Pseudomonas aeruginosa
atggaaggaattgacgacctaagcggggacgtccgccttggctcgttcatcgaaaagcttgcatgcttgaaggctgcgcttagcgaaaccgagcacctgctagctcacggtaagcgaagcaagcttgattttgttgtgagcgaactcagccataacagccctgccatgataggcctgcgcggggttggcgaagtagatagcgccataaacgcagagagcgtcattgatgagctaacacgcttcattgacggagtcaggtctggaacagaaatagtaacttctgaaaaggccaagctaattgcacacttgaagaagcttgcaagcggtatcggtgagcgcttcacaaggatatggcttgatggcatcggcattaagactatacatctggatgcgaacaccgcccaagcattcgaagatgccatgccaaataccaggcgcgagactggaagcctaaaaggcatagtaaaacaatattccgccataaataatagatactacttcaagatagtcccgcctattggcggtatcgaaattaagtgcatatttacgcaagagcttctagaaaaagcggcagcagcagttgagcataatgctaccgttgaaggcgagcttaagtattataacgacgacttctggccttttgaaataaaagtcaaggacatcaagatccatccaaaagactgcgacctgccatcgctcgcggaaatgaagggatccgcgcctgatgctacaggtgatcagagcgccgaagactatgtaagggagctgcgtagtggctggtaa

SEQ ID NO: 348317 - DNA, 1479 bp, Pseudomonas aeruginosa
atgtggtggccagacaggtcatcccgttgtgcgatcaattggcaagccgcaatcctttgcgttccattcaatttgcgatgctggttacacgcggctttggcctatcgcatggcagaggtttcacaggggactatcgggctagttgcttcgattctgtcgcgcgctgcgcaggtggggctagaccccctcaatgaggatcacctgatcgatttgcgcgagcgttttaatatgggagagttttccacgctagtcggctttatgggattttggcaagcgtgcggatcgcttgaacagcgaccttctcaagccctgattgaagcttacaacacactacccagaaagaagcggccccgaaacgatgttattttgcgcttagatcctgaacaggggccgctcacgcaggcggaacaagacgccctgcatcagtgggcgcatgaacagttctgtcacggcaatttagatcctgagcgttacctctatttgcgcctggcgatgatctatgggcagcgtggttcacaactgcgcatgatggtctttgatgattttatcaaaaccgagcgaagctaccttatacgaatattctgggcaaagcagaaaggcgatgatacgggatggcgagccaaatccgagacattcaacttagatgaagacctttacaacaccgtgcaggcctataagtcgattgttcaagctcaacttgagcaggaatatccaggccgagccgattggcataaagcgattaaaaatattcctctttttcgtcgcaaattggatcacaaaataagggataacaaaccagtccccgtaatagttgaccaacctgatcaaaaggcgctggagcaggacccgcaggcaaaatttcatattgccggtggggttgtaagatcttggttatggcaattggagggtatgcctggatttcccatttcatcgcgtacacatcagcctttgaaaatctctaaaggccatcgtttcaggcatacgctcggcaccgatctctcgaacgcggggctggatgagtggtcaatcgctagcgcactgatgcattccgatacacgcaccgtccgtaaataccgagcggtatcggctgagttaatgaaactgattgatgagaaaatgagtgatcacctcgcgctggtcgtgagagcttttacgggcaccatcgtgacggatcgtgcttctgccaaaaatggggatcgtgtggaccgccagattgaggatcttgccgtctgcggtgccgataaagcctgctatctggatgccccatttacgtgttacggatgcattaaatttcagccactccttgaggctgatcacagcgccgcacttgcacgactggagcgccgccgcgcgcaaaccattgccaacgataaaactacgggagtgctatgggaccgtgccattttggcatgtcgcaaggtaattattgattgcaacgcgatgcgtggatcaagcaccgcagatggaagtgatgtatga

SEQ ID NO: 348318 - DNA, 2211 bp, Pseudomonas aeruginosa
atgagcaatatcatcgactttaaaccccttagccaccttaaagccaccgagcagttagatgcctttatcgcatgggcgcaagccactttgcccaagggtgtttacaatcaaagggtccattcggggattcgatgggatatggactcatggcataattcaggagttagcagttgcgcatttactgcgcatggatcgccgagaaattcaaattcgaaaaacaaaaaatatatgcaaacgccgttcatgaatttcgccaaggcgctaattgtatattacagggtatttcgaggaaagaaatcggctaaagacatgctcttcggtgcaaggattcttgaggtagcgctggtcgaggtgactggaacaagcgatgtgacaagagtttcggctgctatctgcaacagagcttgcgaacacctcaaggccgagtaccctgatgggaatagtgcataccttaggagcaagtatctcgaacagatagtcgtgctgatgagggataaagggttactcgcgaagccctttcgatggacttcgccgctgcgatataaaggctcaggtacgctgaaggatcagcaggaaagtaccgagaaaaaactaccgagccgcgagtcagttcgagccctgggtgagctttttaagaacgatctgaccagtccgctagatattataaccgtctccgcatgtgcccttttgctcagtcagcctagtcgcatcggtgaattagccgatgttgagcgtgactgcttggtgttcaaagacgatgctgatggcggtcatcgcatgttcctgcgctggtacgcggagaagggttttggagcaacgactaagcccgttgtgacaggcatggagcctgcagtggaacgtgtcatcaagcttctgacgcccatcactgatgaggcgcgcacgtatgcagcatggctcgaagataaccccgatgcgtttccgcctcatgagggtgtgcccctgaaaggtcaagatgatccgctctcgtatgatgaggcttgtgccgcactcaaaagcaagttcactgggccacattcagcacgaagtatttttgaaactaaatggctcaaatccctggcaaaacggacagcattaagtcctgacgctcaggcagtattggatgagatacgacaaggatgggataccggcaacggaaagcgaatctatgtgaacggtagactcaatcactatcactttaacgacagagcgataattacattacgtaaactcaatatccttgtacgcgaaaagtacctgcctaaagactttccgtataccacacctgcggaagacagtaaaaaacgcgtgaagtttcgtgatgcgttgtttacggtgcgaacaggtagcctacctgatgagacaaaaaaaaatttcgcaatgcaacgtgattttggagtggagatcgctgccaactacacacgaatgacagcacaattagggggagtttcgcagtcgcaaagtattttcctgcgacatgggtacggggaccttaaggtgaacacgcacgcctttcgtcacgaactcaatacggagatgcatcgagcgggcctttcacaactgctgattgatgcgttttcagggcgtacaactcatggctctgtatataaccatgtaactattgaagaactcacccaagcggttgcggcagtgcaccctaaaaccaagcagaacaatgctgcgaagttcttggagaacattgcaaccaataaacctttgaaactaagtgatttgattagtcttggagagggtgaccaggatcgaattatccatagaacttacctcggcctttgcattcactcgtttgagagtgaaccctgccccaaaatgggtgcatgcttaacctgtggaaacctgggctgcgtgaaaggtgatgatgtaaaactagccaatctcaaagaagagagggtttacctgaaacagcgctatgaaagagcggtgattgccgaagccagggaagtctatggtgcctctgagtggcgcaaaaaaacaggtctggatctgctcaaatgcgatgcattaatcaaattattagagagtccggagctcgagaacggcgacattgtgtggaaccttgataacggctggaacttgacaaagaatgctgccgcaatggcgggacttatcgatgcaaaagcaatcgaagctccgagacaagcagcgttgccgtccttagacgagctgtcggctatgctagacaagattgaggtatag

SEQ ID NO: 348319 - DNA, 393 bp, Pseudomonas aeruginosa
atgggacatttaacaaagaaagacgaagcgcgcatcatcaagctaattgaagaatggtctgaacccaagctgacatggcctcttctagtcgaggcctgcaaaaccaagctaagcatcagtcgtgctcgccagtccttgatgaagctgccagcggtggacatagcaatgaaggatcgcaaggctgcgctcaaagcgccaactgagaagccagggtgggtcaaagatatccaccaagccaatgagcgcatcgaaaagctgactgaagcaaatcagcagttgaaggctgttaatcggcaacttcttgcccgcttcatcacatggcaggccaacgcggatatgcatggcgtatctcaagcgatgttggatcgaccgctggttcagttcaggaaataa

SEQ ID NO: 348320 - DNA, 231 bp, Pseudomonas aeruginosa
atgaaacgagcaaccgttgtaaccgaactgccggccagcaccagccgggacatggacaagttcgttgtccgactgccggacggcctgagggccgaggtggaagccgaggccaggcgcgatgaacgcagcatgaacagcgtggtcatcatcgccctgcgcgagtacctgcacggtcagcgccggaagcaagcgctcctcgatgctctgaccgctgccaccggagggcactga

SEQ ID NO: 348321 - DNA, 1290 bp, Pseudomonas aeruginosa
atgaacacgacaacagcggcttccgcacaacagccctccgtcatctatgatctagtcacgataggttccggttcggcggctagagccgcagcgaacgaagcacgtaggctcgacaaaacagtcgccatgatcgaacaggggttggcaggagggacctgtctcaatgtaggatgcgttccttcaaagacgttgcttgcggcggcttctgctcgcatgtctgctgcgcatgggaagttcccaggtatagcgacctcggccgggcctgtcgacttgtctttgcttgtcagagataaagatcaaatgatcgggcacttccggcagtctttccatgtacaagcacccaaggatgcaggtattgcggtatttcgcggcaaggcgacctttgtagcgtcagatgagccagatatcgtagcgctcgtcgtcgcggactcagacggaaacacaaacctggtgtacgccaagcaggtactgatcgccagtggggcagcgccattcattccttccattcctggcctcagtgaggtggactttctcacttccggctcggccatgtcccttgagcaggtgcctgagtccatgctggtcgtcggcggcaatgcgatcggtctggagcaaggtcaattgttcgctcgactgggcagcaaggttgaagtggtcgagatagctcctcgaattgcaccgttcgaggatcccgcgatttctgcggcactggagcaggcgctgtcagcggagggcatcatgttccatactggcgccaatctgacaaacgtcgtaccacacgagagcggggtgcttgcaactgtcgtcgccgaaggacgtactcagcaaattttcgcccataagattctcatagcgacggggcgccgtccggcaactgaaggactcaacttggatgctgtcaatgtgtccaggggcgatcgaggcgaaataattgtggacgaacatctgcgaacctcaaatcctcgcatctgggcagcgggcgatgtcactggtatggctcaattagtgtatgtcgctagtgcacaggggaccgtggccgcgagcaatgctctgggcaacgagcctcggtccctagactacaccgccttgccccgcgtcattttcacgtcgcccgagatggctgctgtcggcatgactcctatgcaggctgaggcggcccaaattgcctatgatgttcgtgaaattccggtttcctttgttctacgtgctattgtaagtcgtcacgacaaagggataatcaagatgatatccgagcgtgagacaggaaggattctggctcttcgcatttaa

SEQ ID NO: 348322 - DNA, 912 bp, Pseudomonas aeruginosa; identical to SEQ ID NO: 346002

SEQ ID NO: 348323 - DNA, 753 bp, Pseudomonas aeruginosa
atgaccaccccgaaaaccacccaactggccaatggcatggccgacatcgccaacatcgccctttgcgatatcgccctggagaaagcgctgtcgcgtacctccacgttgcccggcctggtctgcttctacggcccgtccggcttcggcaaatccgtttcggccgcctgggtcgccaatcgccgccgcgcctactacgtccaggccaaaagcgtctggacccgcaagcacacgctgaagtcgatcctgggtgaaatgggcatcaagccggctggcacgatcccggaaatggccgaccagatcgccgaggaactggccgccagcggccgcccgctgatcatcgacgaaatggaccacctggtcgccgctggccaggtcgagctgattcgtgatctgtacgagtccagccaagcctccatcttgctgatcggcgaggaaatgctgccgaccaagctgaagaagttcgaacgcttccatggccgcgtgctgagctgggttccggcccagccagtctccctggaggacgcccgcaacctggcgccggtctacagccccggagtggctatcgctgacgacctgctcgcgcacttggtgaagaagtcactgggctctgtccgtcgcgtcgcggtgaacctggagcagttggccgaggccgccaccgttcagggccggcgcgagctggaactggccgacctccagcgcctgaacctggagctgtataccggcgcggccccgaacccgaggacgtcgaaatga

SEQ ID NO: 348324 - DNA, 288 bp, Pseudomonas aeruginosa
ttgaccgcttgccagcccgagctgtgcaggatcgaccccgcgaggaacgacacggccgccgtggcggcgaagacgaagaagtcgttcatgccctgcgccttgccccgctcggccggggtgtggcagtcggtgaccatcgccgtggcgccgatgaaactcaaattccagccgatgcccagcagcgccagcgagccccagaagtgggacaggccgagcccgcccagggccaccaccccggaggcggcgagcagcaccatgccgacggcggtcacgcgctccttgccgtag

SEQ ID NO: 348325 - DNA, 303 bp, Pseudomonas aeruginosa
atgcgctcggccttctttttccccttcctcacctcgacgccccttccgcatcgcctccctcgcctgaagggccgacagcttcactgcgcactgatcggcatcgcctgcaagacgggcaagatctgccgcaatcgctgggtgaagttcggcgtactcggctccatcatccacgccggcgccgacggttccggctggcatgccggtagcggaacaactggcgcgggtgatacggacccgcagccgctgccgagcagcagccaagtcagcagtaagctgatcattgatagcttgcgcatgtcgtaa

SEQ ID NO: 348326 - DNA, 687 bp, Pseudomonas aeruginosa
atgtgtggacgactcagccaatattccggcctgcatgagttcgtgtcggttctgaacctaccgaacttgctaaccaacctagtaggagaacagccacagcgctacaatgtcgcgccatcgacggccgtgacgacgctacgactcgaatgcgatgcgcttgtagctcagccgattcgatggggctggcggcctttctgggctaaggaccgcgcggcgccgatcaacgcgcgggcggaaaaggtcgcccacggcaggttcttcagcgcggcctggaaacaccgagcgctgacgccgatctcgggctggttcgagtggatcgatggaggcgaggcgcggaaacaaccgttccacatccaacaccgggacgggagtccgatcctatgcgcggccatcggccagtttcctggcctcgatgacgaaccggcagatcaccatgggttcgtgatcattaccgcggacgccgagggcggtctggtcgatatccatgatcggcgtcctgttgtgctgtcacccgaactggcacgcgagtggattgacccggcgacaacaccggagcgcgcggagcagatcgtgctccaccagggcgagccgagcgagtcgttccggtggtacgcggtcgacccagcagttgggaacgtccgaaaccagggaccgcagttgatcgagcctcagcgctcggcctcatag

SEQ ID NO: 348327 - DNA, 1284 bp, Pseudomonas aeruginosa
atgtctgtcgtgaaacgtcactggcgccgttttctggtcgccgccctggtgctgatcgtcggtgccgccctgctgctctggagccgaccggcggcccaggcgaaactggaagccctggacctcgacgacggcggccacgccacccttgccgaacccggcgagaagccgcgctcgcgggtggtggtgatcgccgcccccgaacagcaactgaacgacgcccagatgctgaacctggctcacgacagcgccgcccgggtgatccagtacttccccccggaaaacggcgattgcagggcgcagcagtcccggctcgaagcggtcattgcccgcctcggcggcaagccgaaccttgtcgccggcatcggcccaggctcgaccaccgcctggcgctggctcgccagccaggacgacgacaaggccaaggcgctctcggtcggcttcgacattgccctggccgagcgcgactgcgacgccccgctgccgcaccaggcgtcgcacggccagtggctgctggcctggaacgacaacccggacgacgacaccgcggtcttcgtccgcaagcagtcgagcgcggaaaccagcatcagcgactacgacaccccgctgtccgacgtgctcgcccatcagttgcgcctgcaactgcaaggcaacgccgaggccctgccggtactcgaggtccccgcggcgcaaccctcggacatcgtcaccctgttctattccggcgacggcggctggcgcgacctggacaaggactctgccgagcatatggcgagcatgggctacccggtggtcggcatcgacaccctgcgctactactggcaacacaagagcccggaacagagcgccgccgacctctccaagctgatgcaacactaccgcgagaagtggggcgcgaaacgtttcgtcctggccggctactcgttcggcgccgacatcctgccggcgatctacaaccgcctgcccggaaaggaccagcaacaagtgaaagccatgctgctgctggcgctggcgcggaccggcagcttcgagatcgaagtggaaggctggctgggcaaggccggcgaggaagccgccaccggcccggaaatggccaggttgccggcggccaaggtgttctgcatctatggcgccgaagaaaaggacgaaagcggctgtacccaaccccaggccgtcggcgagaagctcgaactgccgggcggccaccacttcgacgaggactacctgtccctggcgaagaagatgctccaggccatccgcgaccgcgagaacgctcccgacgcctga

SEQ ID NO: 348328 - DNA, 705 bp, Pseudomonas aeruginosa
atgacctgcattatcgttgctcacttaggtagagaagtgctgattgccgctgataagcgcgtaacctacatctcagaagatggagctagaacacctattggcgatagtgaggaaaaaattgtcaggacagcagtaggtgtggtaaccggttgtggagctatcgcgatgcttcaacctgttaaagacctgctcagcagattaggctttggccacactgacgaagtgctagagctgatccagaaagtacgaaaagaatactctgaagtaaacgctagctgcccccaccttcaagcagatttggcggaaacgtcttggatatttacttaccccactgcgacgaaagaaacattcctaaccagagtcgctttcttccatcaatcaattaattcggaaaaattatctgtagtgcacgagggaaaagtcatgtgtttcccgagtggcgttactctcgaacaagctcaagagcttcaagcacaactacaggagttcacaacatattgtcttggtacacttcctcatgatcaggcaaggcaggaagtaataagcctgatgctgcggcaaatgaacgaagtggcgcagattagcacgtcggtgtcaagcgcatgtgatgtggcaatagtaactggtagagatgcttacatctcaatgtccgctaaccaagacgaacagatgcttcaattctctttgatgccccatagcctatag

SEQ ID NO: 348329 - DNA, 1452 bp, Pseudomonas aeruginosa
atgaacgaagaaaacatacactcgatacaaattactgcttcaaatccaaaactatctgagttgcagctcagctgggcaactatggagttttccgcagtcgatggtatcggcccaatggaatcgctatatcaagctggagactctattgttgcagttgccacttttggcaagaatggaatgtccgtacttggtagcggtgttatggttgctccgggcctgttaatgacagcaacccatgtacttcatgagatacgagactctggagcggtttttgcgacatttctacctcaattgatgagagtgtggctgccgattgaaacttcaacctctagcggcgaaagtaaatataggccagacgagcggaattactctgacatttcgttagtaagttgcactctaaactccgacgcacacgagcagtatcctttgatgctgacaccaatgcgagcctgtctccctctagttggagaaagagtgtgggcgtttggttttcgtgaccagaaaattgaaggcgacattacatcactcacatctttggtttcctctggggtggtctgcgctgtgtacccacagggtcgcggcgaatggctaccggccccttgtattgaggtagcaatggatacccccggcggcatgagcggtggtccagtagttaatgggaacggggagttgattggcatcgtttcgacctcctacgagggaggcgggccgacgtttgttacgatgatatgggacgctctgcgcctaaaaattggtgtgcagatccccccattcaaggacctaggcgatgtaactttgttccatgtaaagcacgaaggtctagctcgccttgaaggtagtgttaggtatcgaccatggcaagaagtagtcatgactatgacggatgaagagcacaagctcttcatcgagtcaatcgaccctgacaccttggaatcatctagagcagatgcaagttttattctaacagacgatcaggtcgaattgcttatagaagagcatggctcagatatggaggatgcggcgcagtccgcagcgatagaattcttagaaaaactaacacacgaacaagtcattgagtctctgaaggtttccgggattgacatcagccagattaaagaaatcaaagatttttcagtggacgtctgggagggggttgaggactttgaggtactccgtgctaagcacctagatgacggcattgaaatagactgctacttcgacttaagaattaccgactggcaaataagcctacaagactcgcaatgcactagcggcagtgacttaattggtatcgaggtcgatgataatgatgctattcacgtttcacggaggtgctacttccgcgcactgctaacttttaatgtttcaaactgtgaattcaccggctccaacgttagttggtggggtataaaacccccacgagcaagtaaagtcttacgaccaaagagctag

SEQ ID NO: 348330 - DNA, 879 bp, Pseudomonas aeruginosa
atgcggctctcaaagtctttgtgctcggtagttggtgatgttctctcctccaccggctctcatccgtcgttagaagcgctctttctttctgctggagcaccaggcgagccgcccgcacttgcgcaccattccaagtggaaggagtggctatttcgcgccggacaagactcaaatacagatagccttgccgtacttggtgcggtactagaagaattcatggacttggcgcctactccgaacactgaggcttatgacacatggcaggaacggcgacagagggttgtcagcgttttagaagagaacggacttcgttattaccgcttcggccgcatcttgccacaaggcacgcctgaaccagagcccagcagcgccgctcaccacactcgcccccaatcggaaactcctagcaaaccacgaacggtcgaggaactactagaggttgtagttaagggcctccgtcgtgccatgcacccactgactcatcgaagaaaagggattcaaccactttcttttggcaacgagtacgacgtccaagacctactccatgcgctactacgcccgtggatacaagacatcagacccgaagaattcacgccaagctatgcgggatcaagcacacgcatggacttcttattgcccagccatgagctggtcgtcgaaacaaaaatagtccgcgatcgaacacatgcaagaaaaattggcgatgagctaatcatcgacattgagcactatcgaaaacatcctgattgcaagagcctttggtgtgtggtctacgatccagatcatctagtaacaaatgcgcctggcttaaaatctgacctcgaaggcactaggacatcaaaagatggagaagttcatgtccgcgtctttgttctttag

SEQ ID NO: 348331 - DNA, 351 bp, Pseudomonas aeruginosa
atgcttcgctcgatcaagatcatatcgacctaccctgatctgcctgcgcggatcattgagcttcgctcactgccccttgtcgatgagctggacgcaacaatcaccctgaccaccgcacacaaggccaaggggctggaatgggatttcgtttgcctgtacgacgacttcaacgcggacccgctggcccccgacaccgacccaggcaagcgcgacgatgagttgaacctgatctacgtcgcagtgacccgcgcgatgaagatcctcgccatcaacagcctggttctgtcgatcatgcagcggtacgtggacgagagaaagctgaaggaactggtggtcagtaatagggagtaa

SEQ ID NO: 348332 - DNA, 897 bp, Pseudomonas aeruginosa
atgccggagtcgaatgagcttccagcctcaggatgcagcagcgtgcccgttttgactcattcttcggccgtgccctcatcgagggctcccgactttttatcttgtctttcaaagtgcccgggctttctcaggtctgccgatggggctcctatcgatgtctgggagctctgtgctcctccttcggaggagcttctgagtgcctgggcatcacgttttcgagagcattattgttccgaagcagaaatcgacatgctcagagagggaacggggctttctcgcgcagaatatcttcttcagcttgtttttccagataagagtgcagctcctgggccgggtattcgtgcgggagactttgccgagatattggtatccgattacgttgagtttgtgcttgggtactgggtgcctcggggtaagtatgcggaaaaagctagtcgtgatgagtcggtcaagggcgtcgatattctcgggtttcgtgtttgtgacccacaggctgcgcattcttctgacacgcttatcgcgtttgaggtcaaagcacaggcctcgggaggtaaatacaccgggcgcctgcagaccgctattgatgattcgtcaaaggactatctcagacgggcaatgacgctcaatgcgacgaagcggcggcttcatcgtggagggcaacaggccgaagctctccttgttcagcgttttcagaaccagtccgaccacccgtacatatatcgctctggggctgctgcaatgctatcggacgactcgttcgatgaggctctgctcaaaagctccactacggttgctaagcaccagaatgccgagaatctcgagcttgttgtcatacgcggcacggaattgatggcgctggtacatgccttatatgagagggctgctaatgaggcctga

SEQ ID NO: 348333 - DNA, 3144 bp, Pseudomonas aeruginosa
atgaggcctgagatcaacagccgtcgcttgttcggcatcacccggtctaaaggaaagatgtacgagctaggagtgccagaggcgtctcatatcgctgtaccaccgaatgttgaacctcaggagttgttcctactgacggtggggactttgggggatgttgctgcgattattggtagcgcggagaacgtagacgtaccacttcctccaggcatgatggaggaacttgggttctcagcaagcttcttcgacgccttccttgagtcgcaattttcccaagccattgcgcgtgacacggctctcctcgctgcatccgcgtactacctggctcgtcggccggggagcagcctagtacttgcgcggcaacttggggacgctcatgaagatgatcctgtagataggttgctgcattgggtgttaacggctcgctgggagcgctatccgctcagcaatcacccattcttcggtaagtccctagagaatgtagccaggctgctcgcaaatcacttttacgatggctctggattgaccgaattggcgttggagcttggtgcgttaaggagtcgagcctatcaaagcggcaccccacgagacttgctgttcatcgacatcatcgtagctactgtccgtctgcgtgttgcggtgtcagcgtggaccacgctcccagggtttactggtatccctgctccacagtgggcgatggctattcgaaggccggagtttcctaaagaactttggccttctcaggttctcctgggtcgtgccgggatcttctctggatcttcaggtgtggttcagatgccgaccagcgcgggcaagactcgttctgtggagattgtgcttcggagtagctttctcgctggtcgaaccaagttggccgtagtggtcgcaccatttcgtgcgctttgtcatgagattggtacttctttgcgccatgcgttcagggacgacgatgtcaaagtcaacgagctttccgatgcactacaactcgactttttgcagcaagtttcagagttgcttggtacccaagcacctacctctcagtacattttggttttgacacctgaaaagcttctttatgtattgcgacaggctcctaccctagtgactgacatcggcgtagtggtctatgacgaagggcatcagttcgattctggcagtcgtggcatcacttacgagctgttgctaacagagattaaggcgctgctttctcctttcgcacaaacgatcctagtttctgcagtcattcaaaatgcacaagaaattgggaactggcttattggtgatggcgcacgcgtagtcaacggcagcagtctgctgacgacagcgcgggcagtagcatttgctagctggatagagcgtctcggtcaacttatgttctacgagtcgagtcagtacgatcaggctgactactttgtgccacgggtcattgagcagcaattactgcagcggcttggacgggagcgttcagatcgctatttcccagctaaggagagctcaaatgatgtggctttatatctcggtatccgattagccccgcagggggccgtagccattttttgtggacggaaggatacggcttctaacatggcagcacgcgctgttgatgtgtatgagcgtggttttgggattgcaccgcctgcggcatcggcagatgccgatgaactgcgacgaatgaagcgtcttgtcgatgcgcattttgggagcctatcagtttctagtcgagcggcatcacttggagtctttgtacatcatggtacaaccccacacggtttgcgtctgtccattgagtatgcgatgcaaaaaggacgtataaatttcgtcgcttgtacctcgaccctcgcgcaaggagtcaatcttcctattcggtatctgattgtttcgggtattcaccaaggcggagagaagataaagactcgagattttcagaaccttgttggtcgtgcaggaagatctggaatgcatacggagggtcttgtcatattttccgaccctgacgtctacgacaagcgtatgcgacgaggcgagtcttggagatttcagtcgtctgttgagttgctgtcgccagaactttcaggtagtacgacaagctctcttctggggctgcttgctccagtgcagagcagcgatgggaaggccgaatttagatattcagcagaggttatgtgtggcctcttgttgtcagatgaaagcgcgtgggtagcatgggccaatgaagttgtacgacaaaatcctcaatataagtttgacgcgaaagcattggttgcggagattagttatagacgccgcttagtgtttgccattgagagttatttgatggcaaatcgtggcgcctcttcattcgatgagtttctatcttcggttgaggatctggctgcttcaacccttgcatatcacttggcttctgacgaacaaaaaactgccgttaagactctgtttattgctgtggctgagtacgtgcaacagcaggagcccgcgccagagaagcaggctatttactcgaaaacattgcttggcgtgaaaagtgccaaagtggtggaaaattgggttgctgcaaatagcgagtctttgcttgcgttaagctcaaatgccgattggttggtgaaattatgggggctgctcgttacccaatccgatagtaagtttttccatacggttgaaccaaaaaccttaccgcttctcttggctaaacattggcttgcaggtgctccgtatagcgctctatttgagtcttcgcatgctcagaatggaaccaaaccatggggcccgactaagcgacggtctttgacagatgacgacataatagatttctgcgaaagcacacttggatttgagtgctcgctgctgttggcggctgttgcgcagtttctttcaggagaaaactcctttcaagatgagaatgcagaggctttgcagctctttcagaaatcgttgaaatatggccttcccgatatgctgtctataagttgctacgagtgcggtttttctgatcgtgctgtagcccaggaacttagagacgtagtgcgcgctgctggttttactgagggcacattctctcttgcactcgagtctcacggtgagcaggtcaaagtagcgctcgaaaattaccctagttatttcgagtctgtcctaactgcttggcggtga

SEQ ID NO: 348334 - DNA, 219 bp, Pseudomonas aeruginosa
atgcgccaacgaagctcttatccgaaatcgttcaaagcccaggtcgttcagaaatgcctgcaagctggcgcatccatttccagtgtcgccatcagccatggcatcaatgccaacgttatccgcaaatggatgccgctctatcgaaatcaacccgcagcagcttaccggcattcgtcccgcttaaagccgcacctaaacggccagccgaagcgccagtga

SEQ ID NO: 348335 - DNA, 426 bp, Pseudomonas aeruginosa
atgagcgatgaagatcggtggcgaatacgtcaggagttggcggtaccgatcagcaaaacactgcatgagtggatgctggcccagcgcgatttggtacccaacggatcggccacggccaaagccctcgattacagcctgaaacgctgggtagcgctgacgcgctacctggacgatggggctgtgcccatcgacaacaaccaggtcgagaaccagatacggccatgggcactcgggcgctcgatctggttgtttgccgggtcgctgtgcagtggcaaacgggccgctgcgatcatgagcctgatccaatcggcgcgcatgaatgggcatgatccgtatgcttatctcaaagatgtgctgacgcggctgccgacgcagcgggcgagtgagatcgccaagttgttgccgcataattggttgcccgtatga

SEQ ID NO: 348336 - DNA, 207 bp, Pseudomonas aeruginosa
atgaagtggagcgtactcaacgactatctgatggttagcgatacccagccgccctacaaagtctgcaagcttcttgtggccggcgaggctcactaccgggccagtgtgcagggtgaattcatttgcaccccggttgcgactgcgaaggaggcgtgcggtgtttgcgaacgccatcaccagatcatgtatccgctggaggtcgcgtga

SEQ ID NO: 348337 - DNA, 174 bp, Pseudomonas aeruginosa
atgattcacacagtaaacggcaagcagtacatgcacggcagcttttctggcatcaactccaagctgtaccgcctggagcagcgcgcaggcttcaccatgccggtgcaggtcgaagtccgcaagaacagcgccgaatacaagcgcgtttccctggccatcaccactggcgcctaa

SEQ ID NO: 348338 - DNA, 294 bp, Pseudomonas aeruginosa
atgagctatcgcctggccgccgatgccctggcctggctgcacctgccggcggtggcctggggctgcgcggtggagtttctcggcctgccctgtccgctgaccccgctggagaatcgtctgcgccgggccgccggggacgccggctacagcggcggcttcgtcgagcactacctgttgccgctgatctatcccgccggcctgaccccggcggtgcagtggatccttggcgccatcgttctgctgctcaacctgatcgtctacctgtatctgttgcatcgccgcggtagccgctga

SEQ ID NO: 348339 - DNA, 1122 bp, Pseudomonas aeruginosa
atggatgagatggcgggtacagggaaagcgcagcgagccaaggatggttcaggaatcgagggcgatactgaagcaaaggaaggtgttggcgcgaagaatgcttttaaaggtcaaagtgttgcccgggtcccgaagctgaattatgtaaaaattttcatctatcttattgcgttcgtgtgggcggcatatggggtcatttcgtttattgccccagaacttaatatgaagatttggaaggctgtcactactaataccgttggggctcttgggttttttccgttggttttcattttgtttgcttgggtgaggtggttaggggaaaaagctgctgaagaatcttttgttgaaatagatagaaaagctcgctttgatttaacgaaaaaatcaaatattggctctgcaagattgctgcgcagtatgctgttcgagtcaattcctgttcttggaagtatagctgccagtgggtatcagcaactgaatgactcggaacgtctagatgaagtgcctcaaggaaaagatgaagaactatttcgtttaaatagcgcctttgaaatgcatgtcgttggagtgatcggctccttggagcgtcatatatccgttactgaggagaagggttcaaagcttttggatcgtggtttgctattcttgtttggtggtatattgttttatgttggttctattgctgtttggcagtattggggtaatcagcctgaaattaattatacgcttctttatgttggcatggcttctgggtctgttgtttttttgatttgtgaatttctagcagcttggttcctaaagcaatatcgtcactatgttgatgcctcgatttcttgtcttcgtgtgaagtccgtttatgataggtatcttttgaactattatgcggttaaagagttgggtggtacaggtggggatggtttttcggagtctcaaggtgctcgagagttgtctttgattttagatgtcttaaaagaggatgttaattggcctggtcacaaggagaatgtgaagaacgattttaattatatgttgcagtcgatggatgcagtgtattcatcggtagataaggtcaggtctgtatttcaaagtgctaagtcatactcggacaatgcaaagtcctaa

SEQ ID NO: 348340 - DNA, 1029 bp, Pseudomonas aeruginosa
ttgcggatcgatatcgacgaccagacgaaagtctatggcgacatcgatccatcgctcagctatcgcgtctccggtctggccaacggcgacactgcgagaaacgtgctgagcggtacggtatcgcggacctccggtgagaacgtcggcgactatgcgatcgggaaaggctcgctcggagcgaacgccaactacatcctcaccgtcaacgacggcaccttggccattacacccgctgagctgacggtcagcgccgacgacaagaccaaggtgtatggcgacctcgatcctgtcctgacctacagcgtcaccggcctgcgcaacggtgacaacgccgccgaagtggtccatgggcagctcgtcaggacggcgggcgaggacgtcacgcccgacggctacgcaatctcccgcggcaacgtggtgctgaccagcggcaactaccgcatggttttcaaggacggcagcctgcaggtcaccccggcgccgttgaaggtgaaggcggacgacaagacaaaggcacagggtgagagcgatccgtcgctgacctacagcgtttccggactcaagcgcggtgactcctcctccgtcgtccaggggcagctttcgcggcaacctggcgaggaaccggggcaataccggatcgaggcgcgggaagggttcagcgctggcaacaattacacggtgagcttcgaagaggggagcatgaccatcactggtccactggctcctgcgccgttgccaccgctgccgatcacggcgcaatccccggggaacacccgctgcacggccatcgagtcgccctcctcggtctccgccaactactcggtgtcgccagcggtcatccgtacctatgccgtccagctcgtctgcaaaccgcgttcctatggcgagaccaaaagcaccgtcccgacgcttctggacgtactcagttatgcgaacagccgtttctctgacggcaagttcatcgttccggactggaaccgaagcgtcattccccatcagcccagcaccactgccaagggagggaaatag

SEQ ID NO: 348341 - DNA, 3150 bp, Pseudomonas aeruginosa
atgttgagcgaacagcaactcgaagagctgagtctgggctggttccagcaggttggctggcgttttgcccatgggcctgatatcgcgccggatagcagcgcccctgagcgtaccgattaccgtcaggtggttttgcgagagcgcctgctggccgcactggctcggattaatccgcagattccagccaccgcgctcgagcaggccgtgcatgctctgcaaacggtaagcgagccgcagatggtagtgcgtaaccgcagcgtgcaccgcttgttgctcggtggtgtggcggtggagtttgaaatcggtgaacagaagaagcaggactgggtgtatttcatcgactttgcccagcccagcaacaacgattttctggtggtgaaccaattccccatcaccggcactcggcaaccacgccgacctgacttgatcgccttcgtcaatggtttgccattggccgtggtggagttgaagaacccggccaacgaacaaacggacatctgggacgccttcaaccagctacaaacctacaaggaagagatcagcgacctgttcgacagcaatgccgctctggtggtcagtgatggctggacggcgcgagtgggttcgctcaccgctaacgccgaacgcatgttgccctggcgcaccatcatgaacgaagacgatcggccccgcctgcagatggagctggaaaccttgattcgtggcttcttcaaacccgagctgtttctggactacatacgctacttcgtgctgttcgagcaggatggcgacagcatcgtcaagaagattgccggttatcaccagttccacgcggtgcgcgaggctgtgcgggccacggtgattgcctcacaaaatacggataagggcgtgttggccgtccacgaagagcgtgcgacctatgccaaggaagtgcagcctggctcacgaaaagcaggcgtggtgtggcacacgcagggctcgggcaagagcatcaccatggtgtgctacgcgggcaagctgttgcagcagcccgagatgaagaaccctacattggtcgtcgtgaccgaccgcaatgacctggacggccagttattcgcaaccttcagcgctgccagtgacttgctcaagaccacgccacagcaagccggtgaccgcgatgaactgcgtgagatgctggcttcacgtgaggcgggtggcatcatctttaccacggtgcagaaattcgcgcttcaagagggcgaagaggagcatccattgctctctgatcgcaccaatatcgtggtgatatccgatgaggctcaccgcagccagtacggcaccaaaggccggctggacaccaaaacaggcaagtatgtgtttggttatgccaaacatctgcacgacgcattgaaaaacgccaccttcctgggttttaccggcacacctattgccgaggaagaccgtgacacccgcgaggtgtttggcgagtacgtcagcatctatgacattcaggatgcggtggacgatggtgcaacagtgcccattttctacgaaagtcggttggccaaactggatgtgaaccaagccgagatcgacgcgctcaacgagcaggtcgaagaggtcgtcgaggatgaagaggacattgctagccgagagaaaaccaaaggcgagtgggccacgctggaaaaactcgtaggctcagcaccgcgcatcgagcaggtggcgcgcgacctgatcgagcacttcgaggcgcgtgtttctgtggtagacggcaaggccatgatcgtatgcatgagtcgcgatatatgcgcccatctctacaacgccatcgtaagcattcgaccggactggcatagcaatgaccccgagcgaggggctatcaagatcgtgatgacaggttcggccgcagacaaggccttgctgcagccccacctctacagcaagcaggtgaaaaagcggctggaaacacgcttcaaagacgcgaaagacccgttgaagctggtgatcgtgcgtgacatgtggctgacaggctttgacgcgccatgttgccacaccatgtacatcgataagcccatgaaagggcacaacctgatgcaggccattgcccgcgtcaaccgggtgtttaagaacaagcctggtggcctggtggttgattacattggcatcgccaacgagctgaaagcagcgctgaagacttataccgatgccaaaggtaagggtgaccccacacacaactctgctgaagcattggctgtgctgttagagaagatggatatcgtgcgaggaatgatgcacggcttcgactacagcgcctttgagatccgtccactcgaactgctggtgcccgtggctaaccatatcctgggcctgcaggacggcaagacacgcttcctcgacaccatgttggcggtgactaaagcctattcgttgtgcggcaccttggatgaagtcgcgccactgcgtaaagaaattgccttcttctctgccatcaagaccgctatcaacaagttcacctccgtggacaagaaacgcagcgatgcggagaagaacagcgcgcttaaacagatactggacaacgccatcatttctgacggtgtggccgatatttttgctctggccggtttggacaagccgaacatcgggctgctgtcggacgagttcctcgaggatgtgcggcagatggagagccgcaacctagctgtggagctgctggaaaaactgttacgtgacgaagttaaggcgcgcgcgcgcaacaacgtggtccaggagaagaagtacggcgaccgcttactggaaacgttgcgcaaatatcacaaccgcgcgatcgagacagcgcaggtcattgaagaactgatccagatggccaaggagttcaaggccgcgcttgagcgggaagccgcgctgggtctgagtcacgatgaaattgccttctacgatgcattggccaacaacgaaagcgcggtgcgcgagttgggtgacgagacgctcaagaaaatcgcagtggagctaaccgggaagctgcgcgccagtacgactatcgattggcaggttcgcgagagcgtacgagcgaagctacgcattctggtgcgtcgctgtttgcagcggtggaagtacccgccagaccagcaagcagatgcagtggagctagtgctgaagcaagctgagtcgctatcgaatgagtggtcgatgtga

SEQ ID NO: 348342 - DNA, 1410 bp, Pseudomonas aeruginosa
atgactatctccgttgaacaggtcgacttatggcgcagccttgcctgcgaaacccagaacctcgaatttaaagaggcaggcaaccagtacgacacgcgcaagctttgccgctattgcgtagccattgccaatgagggcggcggacatctggtgcttggtattgcagacaaaccaccgcgcgccgtggtgggtagccaggcgtttcccgacacccaagatattgccgagaagttgttccattgggtgggctttcgtgtcgatgtagaggctgttgctcacccggagggacgggttttggtgttcagtattccggcacggcccaaaggcacggcgtatcaccatgacggcgcttacctgatgcgttccggcgaagagttggtgccgatgagcgaggatcagttgcgcaagatcttcgcggaaggccagcccagctggctggagaatccttcgctcaaggatgtgtctgcgcaagatgtggtgcagttgctcgacacccagaccttcttcgatttgatgcgtttgccttaccccaccgaccaggagggcgtgctggctcgcttgctggatgagcgcttgatcgagcgcacctcggcaggcttcaacatcctgcatattggtgctgtgctgctggccaagaatatgcgtcagttccccggcatcagccgtaaggcggcgcgggtgatcctctatgccggcgaatccaagatgcagaccgtctcggatgtgaccggcgaaaagggctatgccgtaggttttgccgggttggtgcagtatgtgatgggcaagctgccgcagaacgaggtgatcgaaggggcgattcgcagggaggtcaaattgctgcccgaagtggtggtgcgagagctgctcgccaatgcgctgatccaccaggatttcgatatgggtggcacctctcctgtggtggaggttttcagcaaccgcgtggaaatctccaacccaggagagcccgtcgtgccggttgagcgctttatcgacggttaccaatcgcgcaatgagcggttggccgacttgatgcgccgtttcgggatttgcgaagaaaagagcagcggcattgatcgggtaattgaagcggctgagttgatgcaactgccggcgccagagtttctaaccagccaccgccgcacgattgtggtgattcacggcccgcgctcgttccgcgcgatgaatggcagtgaccgcgttcgtgcctgcttccagcactgtgttttgcagtacgtgctgcgcaagcagatgaccaatcagtctctgcgtgagcgctttggcttgtctgagagcagcagcaacacgatttcgcagatcattaccgcgaccatggagcaggggttggtcaagagtgacccgaacgcgccggactcaaggcgctatgcgcggtatatcccggcatgggcatag

SEQ ID NO: 348343 - DNA, 1020 bp, Pseudomonas aeruginosa
atggagttttggcgcccgaagtatcacgaatatctaaacctcgagggtgatattcagataatcggctcgacttttcaacgaagtcgcatattaaaggagctagagcctgaaacatatcagttgtctttcgaggactgggtggcggaacgaaagggcagtctgctcgatgtagcgcatcaggtacttggtgctcatgacaacgctcatcgctttgaagccttgaaaaaagcgtgggcttcgcaaaatgttgttccgtttcttggtgcggggctatcaatgccgagcggctaccctggctggaccaacttcctctggagcttacaagaagagtcgcacgtcaatgcggccgatcttgaatctcttttggaaacgggagattacgagggcgcggcccagctaattcatgatgatcttggctcggcgctgtttaataaacagcttcaggagtgctttgatagaggctgcccagcggctggtgcgattaacttactccctattgtgtttcctgattcgaatgtagtgacaaccaacttcgataagttgcttgagtcagccttctcggggcaatcgcagggatttgatcaagtaatccttggtagcaatctgggagaggcattgcgtatcctgagcgccggcggacgatatttacttaagcttcatggttcatgtgaaacggtcgcgaatcgtgttctgctccgcaatgaatataaccaagcctatggcgatgccggcacggttgggcgattcttttctcgttttttgtttggtaagtccttgttgttcgttgggtgcagtctgatgacagatcgtacgctccgaacgatggaacaggtggttgagttagagggcgcacacaccctcccacagcactatgccttccttgagctgaaagatggtgttgatcgcgtcgagagaaaaaaggctttggcaaaggccaatatattcccgatctggtatccagaaggcgagcatgatgattctatcgaggcgctcttgttggcattgatggaggacatatga

SEQ ID NO: 348344 - DNA, 1404 bp, Pseudomonas aeruginosa
atgttatctaagccaacaacgttgccacttgctgagcttttggagctgatcatcgatcatcgcggcaagacccccaacaagctgggttttgacgattttttctcgaccggcgtccccgtcttatctgctaagcacgtcaagacggacgttttggttgatgtaggttcaatgcggtatgcatctcctgagatgtacaaaaagtggatgaccgtggaggtgcaagaaggagacatcattctcacctctgaagccccaatgggcgaagttttctacatcaatgatgaccagaagtatgtgctcggtcagcgagtatttgggttacgtccgaatccaagccgggtcaacccaaggtacttggccgcctggttggcgtcttcggaagggcaaaaccagattgcggcaagggcatcagggtcaactgtgcaaggcattcgccaatctgaacttctgaagcttgaagttgatctgccctcagaggaggagcaagaacgaatcgccaatgtccggttctcagttgccgacaaggtcaatctcaatctccgcatcaaccaaaccctcgaagccattgcgcaagtcctcttcaagtcgtggtttgttgatttcgacccggtcaaagccaagatcgccgccaaggccgaaggccgcgacccgctgcgtgccgcgattagcgtcatcagcggaaaacctgatgccgaactcgatacgctgccgcccgagcaatatgaacaatttgctgccactgccgccctattccctgcggacatggatgagtcggagttcggtgagattccgaggtcgtgggcttttggtgtgctaggtgatatttgtagctttacggcgggcagtgcgtttaagccggaataccaaggaagctctgatggggattacccgttcataaaagttagtgacatgaatcttgctggcaacgaggtatttattcagtcggccaacaactatgtcagcaaatatcagcagtctgaaatgaaagccaagctgcacccgccaggtgcgacagtttttgccaagatcggggtggcgctcacttcaaatcgcagaagattgctaactacgccgacgattattgataacaacttgatgtcagcaaatcctgtagatgaaaaatcagggcagtactttttatacttgatgctcaatgcgattgatttcaatacgttggtctcaggcactgccttgccatatataaacgtgtccgatctaaaaaaaatatctattgtatgtccgctgcatgaagtcgttcttgcttttgaggctaaggtgtcttccatatttgcgatgatgcagaccctggcagcgcaaagctcaacacttgcggcaactcggaatattttgctgccaaagttgctctcaggtgaggtcgaagtctctggaatactggggagctga

SEQ ID NO: 348345 - DNA, 1773 bp, Pseudomonas aeruginosa
atgacccccatcgaacaacagttcttcaacgaacttgaaaggaagctctggacggccgctgacaagctgcgttccgctctggatgcatcggtctacaagcacgtagtgctcggtctgatctttctcaagtacgtttccgatgccttcgaggagcgacagcgcgagctacgcgcgcaactcaccaatcctgccgacgattacttcatggacccggcggactacggcgaccttggcagcgaagagtacgaagagaatgtcgccgccgagctggaagtgcgcgactactacaccgagaagaatgtcttctgggtgccctatgaagcacgctggcaaaccctgcgtgagttggcgcaactgccgcccggtagtgaattgccgtggctcgtgcccaaacgcgacagtgacggtcgctacgtgcgtaacgctgcgggtgagctggagatggtgccagacaagatgcgcaccgttggttggctgatcgacaacgccatggaggcagtcgaacgcgagaacgcgaaaaaactcaagaacgtgctcaacaagtctttcgcacgcacggagatcgatagccacaagctggctgatttgatcgcccacttctccgacactaatttcagccagccgagttacaacgggcaagcgctgaacctgaagagcaaagacatcctcggccacgtctacgaatactttctcggccagttcgccctggccgaaggcaagaggggcggccagtactacacccccaaaagcatcgttacgctgattgtggaaatgttgcagcccttcaaggggcgggtttacgacccggccatgggctcgggtggttttttcgtgcagagcgaagaatttatcgccgagcatggcggcaaagtggctaacggcaagactggccagatcagcgtctacggccaggaaaacaaccccaccacctggaaactagcggccatgaacatggccatccgtggcctcgattttgattttggcggcggcccagccgacaccctgcagaatccgttgcacattaatctgactcacagattcgattacgtgatggccaaccctcccttcaatatgaaggagtggtggaacgccaagctggaaaaagacccccgctggctgcccggctgcactccaccccagggcaacgccaacttcgcctggctgcagcatatgctctaccacctggcccccaccggcagcatggcgctgctgctggccaacggttccatgagcagtaacaccaacaacgaaggggaaatccgtaagcaactgattgagcgtgactatgtggaatgcatggtggcgctgcccggccagctcttcagcaacacgcagattccggcgtgcatctggttcctgaccaaagacaaggccaacggctttaacctcgataagaaaaagcgcgaccggcgcggcgagttcctgtttatcgacgcccgccagctcggctatatgaaagaccgagtgctgcgtgacttcaccctggatgacattaaaaaggtggccgccaccttccatgcctggcagcacgacgagggctatgaagacatccccggcttctgctattccgcctcgctggacgatatccgcaagcacgagcatgtgctcacgccggggcgctatgtgggtgctgaggaacaggaggatgacggcgaagcctttgccgacaagatggcacggctgacggcgcaactgtcggagcagttcgaggaaagtgccaagctggaggatgagatcaagaagaatttggcggggttgggttatgttatctaa

SEQ ID NO: 348346 - DNA, 1182 bp, Pseudomonas aeruginosa
atgttcgtattgcgtaccggcctccagggcaatagcaaaacacttaatacgatcaaggaagtggatacgaaggcggcaaaggaggggaggactgtttattaccacaatatccgcgagttcaaggcggatcatccggcgatcaaggcgcaatggattgaatttgatcatccgcatgaatggttcaagttgccgaagaacagcattatcgtgatcgatgaggcgcagacgttctttcgaactcggccgcaggggtcgaaagtgccggagtacgccagcgccctggagacgatgcgccattctggtcatgaggttcatgcgattacgcagagtccaacgctgatcgatcaccatatgcgtgatctgtgtaactgtcatatccattattttcgaggcggcggcgggcctgttgtaaagcgtttcgagtttcagaaagttcagatggatgtgaataagaagtacgtgtttcctgatggtgaaaccacccggattaccatcgataagacgtatttcggctgctacaagtctgtggccgatggtgctgagcatcatttcaagttcaagccgccgaaggcgctgttcgtgctggtcatcgtcgtcggcgttgtgggttatctcggctacggggtttatgagcgtcgtatcgcggcgcatgaggcgtctatcgagccgcccgcaggggttgaggcggtcatgccgcaaacggctccgcaggccgttccctcggctgatgtagcgccggtgctgaccgctcaggagtatcttgatctgcgcacgcctcgggtgcctgacgtgccaagctccgcgccgatctacgacgagttgacgaagccggtgacgtatcccaagccgttttgcctgtcgtccagggacgaagagcttgtgcggcgcaatgctctgaaaatggagctgggttatcgttcggggcgcttgtacggttgccgctgcaacagccaacaaggcacgcggatgttgatcagtttcgaggcgtgcatgaactacgtggagaacggtgcgtttgatccggcgattcctgatcgcgttgtaggcgcaggcgggttcgggccaggcgagggacgagccggtacgatcccgcaggcgccgaccgctcgaccggttgagtcggtcagtcaggctcgtgtcactgtggtgcctgatacgagccgcttacctcgcacgttgtga

SEQ ID NO: 348347 - DNA, 312 bp, Pseudomonas aeruginosa
atgccaatgtttgttgcgctgttttcgttcttgagttcgattgctggtccattggtggccaaggtgctgatatcgctgggtattggcgcggtcacgtatacgggtattagtctgatgattagtcaggtcaagacgtatgcggtttccatgtttggaagcgtcggtgcggactatgcggcgatcctggggcttgccaaagttgatgtggctttgaatatcgtctttgcggcggttgttgcgcgcgctgtgatttctggcatggataaggcgagcggtagtattaccaagctcggtagcgtcaagggtaattaa

SEQ ID NO: 348348 - DNA, 1344 bp, Pseudomonas aeruginosa
atgaagcttgcaccggcatttattcttttgacactgttcccgctctctgcgatggctcagaattattattggattctgaatgggccgacggctccggggtcgttctcaagtcctgatgcggcttgtcaggcgggattggaaatttataaaaagcaatatccggctgttacgtttgaaatcaaagaccgttttccagtttcggctgagggttttcgttgtaatgtttggcgttattacaatgggaatcgcattgatcctgattggactatctccgttcagcgcaagggtgatagttgcccttcgggttttatctataacagtcaaacggggcgttgtgatgaaccgccaccgcctgatccttgccgcgataaagcagggcagcccgcttcattcactttgatgcgtcccgacctcggcggtcttggctcggttgaaaacgtttgtatgaatggttgtcaggtggctatcggttcggccacttgcggcccgctgaattctgacccgacaaagggtttctgctccggtactggtacgtatacggggtctcaatgttcgccgactgatgagatgggcggcggcaataacccggacccggacccggacccgaatccggatccgccggatcagcctgatccgccggacaagcctgatgagaatgggtgcatccctccggcccagtggtcgggaacgacctgtgtcatgccgcctaaagagcctggggacggtgatggcggggatggcggcagtgatggcggtagtggtggtggaaacaacaatggcggcggtgacggctccggtggtggagacggcagcggtggtgatgggtcaggcaatggcgatggctccgggaatggtgatggctcgggtgatggtggcggcaccggtggcggtgataagccgggcgaggaggaggggaagtgcgacccggccaaggaccccagttgtaagccgtcgagcgtaacgggtgagagttgcgatgcggacctctcttgtgaaggcgacgcgattcagtgcgcgattctcaaacagcagaagaaacaaacttgtgcgtgggattacgacaaggccaaggccactattcaggctgaaatcttgaaagatgaatacaagctaaagagttcatcgatcgatacgggcaagttgttcagtgatggtacaagtgccagtcgatggcttccggctgcgtgtccagcgccgaaagtaatttctctgcgtcttgctccgagtcagacgtttagttgggagccggagtgtcaaatggcaacgtcgttagcgccgattattgttgggctggcttcggtgtttttcgcggtttatgtcggtcgatccctgggagggtcttga

SEQ ID NO: 348349 - DNA, 294 bp, Pseudomonas aeruginosa
atgctgctgaccattcgcgacgttcccgaagacttggtgcgccaggccaagcttgcgaccggcaagggcaccggcagtcaggcgttcattgccggcatcgagcttatgatccgtcagcgtgatcggatcgaggcgatggaggaggagattcggtcgctgcgcgagaccctcggtgtgttccagggcgtgcttgcagatgcccatgccgccgctgtgcaactggcggagattgccgggcagcgcgatatgctggtgtccgacaacccgttgcggcccgggtatcgtcgccgctag

SEQ ID NO: 348350 - DNA, 876 bp, Pseudomonas aeruginosa
atgaaacgtaagcagtcggtggaaagtgttcgctgggatctggctcaacgttatcgcctgatcgaaactgtggcttggtgggagggacgcctgactacgggtcacctgatgcaaagttttggcatcagccgccagcaggcgtcgaaagacatcaacagctacctgaacgactacggcccgaaaaacctcgactatgacaagcgtctgaaaggatacgtaccgagcaatagctttcagcccctgttcatcgatgacagcgcgagcgcgtacctacacctgctcaaccagaaccacgaacgtgcaccgcatatcgcaggactggcattggcttacgcgcatactgaagtgttgaacgtcccagatcgatctgtacgccctgaagtattacggccactgctgcgcgcctgccgtgaaggattgcgcttggagtgtgagtatgtatcgttcaaaacacctgaagcggaaactcgcctgatcgctccgcactctctcgtgtacacaggcatgcggtggcatgctcgcgcctactgcgaaaaaaaccgcgcacaccgtgacttcgtactcagtcgctttcggggcactccagatgtactggagggaaaatcggaattcggacgcgatcaggatgaaggctggaacaccgctgtagacgtcattattgagccggacccacggctctcacccgagcagaaagcgttccttgagtacgagtacggtatgcaagatgggcaattgcgggtgcccagtcgaggggcattggtgcaatacgtgttgcagcgttaccagatcgacccgcacaagatccagcctaaggccagcgcccaacagattgtcgtggtgaacctggaggagctgcgtccctggctgtatagctaa

SEQ ID NO: 348351 - DNA, 3729 bp, Pseudomonas aeruginosa
atgcgccagctgacaaagattgtgcttgttgactctctctgcgatgggctcatcgcagagttgcgaatggatggcaacacaagccttaatggcaccaacgctattggcaaaacatcattcctcaagctgatccccatttttttcggggcatcgccaggctcggtggtgagggctggaggcaaccgagtttcgtttgccgattggtacctccctaggaggtcaagttatgtcattttcgagtatcaggttggggccagcgactttcgctgcgcacttctccaccgtagctccagcggctacgcctatcgttttgtgcgtgcaacctggagtcaggatctgatccttcgaaacgccgaatctggggatgtggttccaggggctgagatccaggagcatctgcgccgttgttcgattgagtgcacgcctgagctttcgagcctgcactacaagaaaattattcagaacaacaccaatgccggacttgaggatattcacgacagcatggtcgtgaagctgatacgtaacctgcgaccaacgttttcacttgctcagccgcacactagtctccatgcgatcgaccacgtcatctttgccatgttggaaagcaagggcgatttcaactccatgcgcgggaccatggcaggcatcctgtcccaagaaaacgagctgcgcagcgacgggctaactgcactgaccaagcggaccctggatgatctgattgaaggctacaaaagctatctcaaagtcgaagaattgcgcccaaaatttgagctattggcagagcaagcatatcgatatgcggctgccacccgacagttaggtattcaaaagcatcgcgctggcagtctagttcacgaacttacagagcagttcaagctgcttgatgagcagctcttgaaggtcaacgaggatttgactgcccatgagcaaacctacagtgcagcgcgtcaaaagcattccaaggtgtcttcggaagtagaagggaagctgattcaggcaaatgaggacgtcgagcgacttgagcgtcagcaggccgaacactctaggcgtggggcaagcgaactctgcgacttggtaaacaaggttcccatgctgaaagcccaggtgagcgagcgagggcaacacctagaaaatctcactagcaaagtgaaaagcatcgatgggatttactcggaccgtatcgctcagcttgagcgagatgccgcccaagccatcaatcatcagaacaagcgtaaggatgtcgctaacggtgcgtatcaccaccgaatcggcgagcttctgcatcgacaaagcaatgaaaagaaaagcctgaccaagaaacaagagttggagcgagaggctcttgccctgcgcataaatgatgcgaaggagattgcgggtaagcagcaggggatctatgcgtcgctgaacagttttagcgttctccctgcggcacaggctgatctgaatttggcacaggctcgtgttgatgagcagcgtgacgtgtgtaaggcggccagtgaggtgatggataaggcccgtatatctcttgaggcaagatcagatgatcgcgatgatgctgccaggcgctaccaggcattacaagatcgtaaagctcaggcggaaacttgtaagcgtgagctggcctctctcagcaaggcgcaccctgacagccttcttacatttctgagaacgcatcatcccgaatggacttcccatatcgccaagttggttccagccgatattttgatgcgtaccgacctcgccccggtgatggtgcaggccgcttctgatttgtatggggtagggctagagctgggaagcatcgattctcctctggttgctgatgaagaacgaatcctcgcagcgatcattgaggcagagaaatccattcaagatatcgctttggatatggaagctctgacagcggaggcgcgggagttagaaaacgcgcaccgatctgctgttatcttgcatggagagtctgcaaagaaatccactgaagcaatatcggagcttgaggctagaatttcggcttttgacgggctttttgaccgtgctgtcgcagattgtaaggcgcatttagcgagcctgaaagtcgcagagaatgaggcgctagagaccgtagctaggcttgtccaaagcgaatccgatctaaaagcagcacatggtcgagacttgctagcgctgaccacctctgccgaaattgaactggatgatttgaaggtttccttacagcaggaaatcgctcaaatcgaggggataattgaagaggtggtgagtgccttgcaagtaaatcgtgagacggttgagcgagatcgtcttcgggcttatgaaaaagagggtctgaataccgccgaaatcgggcgtatccagcgtgagatcggagagttaaacctccagctcagaaaagctaacgatgtggagggctacgttcgcgagtaccaagcctggctgagctatgagtggccgaagctcggcgaatggcaagcgcgattgcaacgccttgaaatcgaacgcgagagcttagtgcgcgaatggtcagtggcagatgcacagttaaaggctagacagggcgatatcagtaaattgcggtcgaggctcatcggcgaaatgagcgagaactccgatgccaagcagtccatggaaggggctattaagttgcttgcccggctctcggctattgatgatggccaatctataccgggcctcaaagtgagtgatgtccaagacgagattcataagcaaacccgccgtcgcacggatcttcagcgcatagggtctgatgcgtgtcgtgagattcgccgcatcttcgcgggcgagggagcacggcaaggtacccacagcatgttcatcgatgagatctggcgggaagctacgtcccaggccggaaacgacgtcgacgaggcttggctttatgccgcagatctgttcatggactacttgggcagaggacatagtgcgagcaaggggcgcctcatcatagaggctcaaggcattgccagtgagttagcagatggcagggctagactgagcacccttgataccgcaatcaaaaaattaggcaccaacgccacacagaaagccaagcaggtgctgagtggatttccacagattcagaactttgaatttctagttacttcacgggtgcaaaagctgggcttctggcacgacctaaccgatttcgataagcaggcgaaaatttggagtctgatggagtcgggtacgctcccaactgaggacctcatcaatgccatagcccgaatcgccaagcacatagctgaaggtgtgtttgcggccaaccttgaggagtgttttgacgtagcggtttcggtgaacgatcaggggcatcagaaggtggcgcggaccgacaaggagctagccgatatcagcagcaatggtctcacaaccgtcattgttacgatgatttacatctcattgtttgagctgcttcgtggagatgcggatgtgcagatcattgcgccaatggacgaggccctgaagttcgatgcaccggtctacatcgcgattgttaaatacctgaataaccgcaaggttcatatgatggctgccttcccaggcggcgctcctgagctgctcaggcaatttccaaatcgctacatgttccagaaggcaaaaggttatggaagcaagggcgagaccattttagtcaagtcattcagtgcttccgtagacaaagagttggcggcacttgaagctgcgctggaagcagatatgggggttgtatga

SEQ ID NO: 348352 - DNA, 663 bp, Pseudomonas aeruginosa
atgagtcagcttaggacctgccttgaggctttgctaaatggtgatttcatctgcgttcatcgctcgcgggatttgtttcgctgtcttctggaaccggtatttagggcagaagttgaagctggtcttcggcctttaggtagagccttgggtgccttaggtgatgagaactccccggacgtcttctttgctcgctacaccaggctggatagcagtgttgatgtggagtcggctagaggaatgctggtgaatatccgggaccaggtcaggccctgtgtcgaatttatccagctcggtattcatgcgggacgctcggattcacatttggaaccgggtgatgaaatctccttttcagcgttgcttgaggctattgaggaacaatcggtttataaggatcgattgagggatctggctagctttgacatgttcaaccgtgccaaaagtgccaaggacaataaagatagattgtcgatagtcctcaaagctatggctgatgcgggttatgtagttaagcgtgatggggaatcggctaattatattgccactggaaagatggcttatctgcatcaggttattggctggatttctgactactacatcgagggcagccaagacgagcaagatagcctaggtgatgggcaagttcagcaaggaatggtgctgtga

SEQ ID NO: 348353 - DNA, 1248 bp, Pseudomonas aeruginosa
gtgaaagccgagctatgggagggcctaggaaaggctctgatagataacgcggagttgcttgagcaactgatgctcgccgacgccggcgttccggttgcaggaaaaccaaaaaaatggcttacgtggcttttggggcaacaactcatcacagaagaagagggcgttctccatctgtctggtgaactcctcaacctgggtatacagctcaccaagcctggtgctgagcgttttgcaccggatatggaggagaactacatccagatcagggaggcctgtgagggataccttgatgccaagcgggaaggacgcatggacgttgctgctgagcagcatattcgggtcaggcattcagctcgacagattgtcgtccatctccggcgagagagccttggactgcgaagctttattgagtcagggtatgggtactcaatccgtatcgcggacagaattcgggatatcgaatcggttattggtcgggttcagcggcttcacgagaagcttggcctctttagttatgactctttgcacacgctgactcagggagaccgtgcgctcaatcgtgtcctcatcaatgacttactgggtgcggtcagtattaaccgcgcagagcttcttgcactgctcgcgcgcttagacaccctgacaattaaaattcgtaagcaagatataagactcaagaaacttcataaggtggccctgtacctacagaatggtggctcttttgatctagagccgctcctcgaccagcccaatgctgcggcttgggttgcggccagtaagcaaccgattggagggtaccttttcacaggtaactcaccttcagaaggactggagctaattgaagaactcgtttccaatctgcctaaagccaaaattaagcttgcagcccctgcggaggcagagtctcgtgctgctcagcctgtgaccagagcagaggatacgtccgaggaagctgtagagcctttcgctgcttaccacttcaaagcgatgctcagagaattggtcgctacgaacaagccgcagtctgcaaaagcctattggctggagcaagggcaagcgggtgtcgaaacgggcatttggctctatgccctggatggctttttcgtagcgctgcaagcatatgctcagaatgaagaggggcgctcactgagctatgtgttggtgcccgaggaggctccttttgatcggataagcgccaaccggcaggtgactgatctctggctaaaaaggagcaaaacgcatgcttga

SEQ ID NO: 348354 - DNA, 846 bp, Pseudomonas aeruginosa
atgcttgagttcacaagccaaatgattgagatggcagccaaggtgattcgggaagggagggacagtattcacctcaacaaagcctggttgcgaattcatgagtttgggcgcgtcggaacccgtaatggtgctcgacttacgttcagtcagccagacagacgtaatctgcaccagttgttgctcgatcagactgggttcgatgcttggaaggacgacttagcggtattgaatcaggggcgaacaaacgttgcactgacctttcggaatgaaaaattagcgaagaaaaaggttcgtgaagaccttgtcacagtctcgtctcgatccggaacggtgcggcttgctagtggcgactataggcacccaaagggtggttgtatccaggtacctttcagtgagattcatcaggtcgcaaatgtggttctggtcgagaatctctctgtaatgctgattccagaggaatacctatggccagatacggttttggaggagacggtgctgctatttcgtggtgggccgcaggatagtcctgccgcagttacacaggcgctttcagggggggcagagatcgtagcgtttcctgattttgatccccagggcctgctcaactcgctgacactaaagcggtgtgttgggatcattcatccaagtgttactgctattcaggctgcaaaggcttgccagcgcgataaaccatctagttttgcccgacagcatgacgctaggcgctggcttgaggcaaagcggtcaattaaatccgtcgactacatgcttcgggaagggatagcgattacgcaggagtcgatgcaaggtgttgagttggtgcactctaagttgtttgcagagtaa

SEQ ID NO: 348355 - DNA, 1050 bp, Pseudomonas aeruginosa
ttgggcgcgagactgcaggttaaggtcacacagaaatcgcggctcctgcccccccttcccgtccggcaccagttggtcgcagtactgggcgatcttgtacatctcccacttatctaccatccagggcttgatccgctttcccaggccgaaacgcgcgttggtactgatgtcgtaggtgatccatgccgggttgttggtccaggcactcttaaagccaccatcccacacgccgctatagctccgtgtctcgggatcgtaggttgtcggcacctggaccttccgcccgcggcagtcgactgtgacggccgggatgttgctgaactgctctgcgctgaactcgacgtacagcagcgccgtgttcgggtagcgcagcttcgcgtcgatcacctcggtgtagccggcgatcagcatggtgtcggcgatgcggttgttgttctggttcggcgtcaggcggcggacgcgcacctgccagccattggtggccgccggcaggtcgatccggcgggaacgctcgtagcgggtggtggtcttgccatcgacggcctcgcgcagcacctcatgataggcgccgccgtcggtggccagatctacggcatattcgatccggtacccgccgatgttgccgttggtgtcctgctgctggagcgctggccaggcgaagcgcagacgcactgcggaaagctgggtattgctcagcgagcgcacccagggcgtatcgctgcgcaactcgacgttgacgctggtttcgttctcaacggcagggatgccagggatgtagtcctggtccaccgcccccgcgcgccactcccacttaacgttggggaagttcaggttaccgctcgggtccatcagtggggtgttgtcgaggtagatatcgcgctcgctcggaacgccgacgaactcgccctcgcccacggcgagcaggatcttggccatcgcgaccgagcgcaggctgtcgggtgcctcgaccggctgtttcggcttgctactgccgcccttgcgaccggccaggtgctggttttctgtgcccatgctttcctccgagcatga

SEQ ID NO: 348356 - DNA, 5952 bp, Pseudomonas aeruginosa
atgctgaaccccatcacctataccgaagacgtggtcagcgactttctgcgctaccagctcagcacctatgcctttgctgatgaaaatctctaccagcagatgcgcgacctgctcaacctggagcacacccgcaatacgccgctgatgaaggggccgtttatttcgctgtcgcgcacctttatgaaaggcgccagcctggagcaactggtcaaggaaggcgtgctgcatccgcatatttgccagctatccccttatcccggcgcttatttgcaccaggaaaaggccttccgctccatcaaagctggtcggaccacgctggtggcgaccggtaccggttcgggcaagactgagtccttcttgttgcctatcatcagtcgttgcctgcaattgcgtgatgacggcgccgaggcgggggtaacagcggtgatcgtttaccccatgaacgccctggccgaagaccagctgcaacggatgcgcgagctgctggtcggtacgggtgtcacctttggcatgtatgtgggtaaaacaccacgcacagaggccgacattaacggtgtgcgcctggctcctggcagcacggttgccgattaccgcagtaagttgcagcagatgcagcaacagaaaatggatgtagccctgcatccggccgaagagcgtgtgagccgtgaagccatgcgcacgcccggccagcaacctcgtatcttgctgaccaacgtcaagcagctggagctgctgctgacccgccagcaggatctggaactgttcgataacgctcgtctggagttcatggtcttcgacgaagcacacacctttaccggcgccggaggcgcggaaaccgcttgcctgatccgccgtctgcgcgcctattgcggtaaagacgaaaacagcaccacttgtatcgccacctcggccaccatcgctgatccactccgcggtatcgaagccgggcgtgagtttgccagccgtttctttggcgtcgatggccagcatgttgaactgatcggggaggcttacgaagaggatatttggggcgagcctcgcagcgtcagcgcgcccttcaatggcgatcaggccatgcagctgaaaaccgttctggaaatgcttggcacgttggaccgacccgaggtagagcctgctaccctgcaggccttccggatctggttccagaccaccagcggcatgcgtatggccggtgataattggcgtgaagcactgaatcagtggctaagccacaacgaggtggtgttccagatcgccgaagtgctgcgccgtcctcgagccgtggctaccttgctggaagacctgaatgaaaaactcgggcgtccgattaccgaagaggaaattctgatctggctggcactgggtgcggcagcgcgcaatggtgatcgccccctgctgcggccggtggtacacggttttgtgcgtggcgtcagtggtgctgtggtgacctttgaggaggggcaggggcaaccggcgcgactctggctgtcagccgaggatgcgctggcggcagccgatgggcgtgatcctgagctgaaagcctttccgctttcgagctgcacaacctgcggtcagcattacttcgagcatggccttgaagatttcgattacaccggcgacgcgcctggcggaggttctgctgaagggaagagtcgtgtgtggcgctcgcaagatgttccgttaggcggcgtgcgagcggtttcattggatcatcaggttggatctgatggcgaggaagagcccgctcgaacggaggtgctctttgtttgccgatattgcggtaccacccacgacaggcaagccgctgagtgtgtgggctgcggtcgcaacaagaccctcaaagcactgcactttgtacagcagaaagaagaacacattggccgtttgacccgctgtgtatcttgcggtgcacacggccgccgggtgactggcagctatcgagaacccgctcgaccagttcgtgccactggcgtggctgatgtgcatgtactggcgcagagcatgatccaccgtgccgaacgcaagcgcctgctggtgtttgcagataatcgccaggacgcagcatttcaagcaggctggatgcaggatcgctcacgtcgataccgcttgcgggagctgatctacaaaaaactgcgcgagggcgccatctcggtcagcgacctagtgttgtggctggacaggtttcttgatgccgacgatgagttgtcgcgggccttgatccctgaagtctggcgagtcgaacccaagtcggaagccagcctggcccatgccgaagagcgtaagtggttcttgcgcgctcaggtgctgcgtgagttgacgttgggggcacggcagagcacaggtcttgagccgctggggcgtttgaagattcagtatcttggactggatgaagcacagcccactatacagaaatgggcacgagcgttgggttgctcgcctgatgagttgcgtgaaggtatcgcctcgcttctggatgcggctcgctcccggcgcatgctgtttgatcctgtgacccgtatgttctccaagttctggctggacggtgagaaggaagtgctgcgcggttatctaccgatcatgcgcggtgtgccggaaggtttggtgtttgagcgcgatggtcagcacgacaaagggcgcatcaagcagtggtacagcgcctacgacagctccgccaaacaggcggctgtgagctggggagtcgatccagctcaagtccagtcatttttgaatgatgtgtggcggctgtgcaccgatgaactggaactactgacgcaggtgcagttcaagggcgcgcgcggtagtaacttgccaggctgccacggtgccagccaagttcatgtggatcacatgaagctggtgccagcgtcagggatgtatcgctgcaagacttgccgtcgcctccatgctcgggtcaaccctggtatgacctgtatggcctggcgttgcagtggcaagctggagtttgaggctgagaatccagacaactacgatctgctgctgctcgatcaggaattttccatgctccgagcccgcgagcattctgcacagattccagggccggagcgtgagcgcatcgaaaacgccttcaagggtgagagcgagcgcatcaataccctggtgtgtacgcccacgcttgagatgggcgtgaacatcggttcgctggacgcggtgctgatgcgcaacgtaccaccactgccggccaattactggcagcgagctggtcgtgccggacgccagttccgtatggcgctggatctgacctatgcacgcaccaccagtcacgatagagcctatttcaatgagccactgaagatgttggaagggctggtggagccccccagcttcaacctgcgcaacccagtgatggtggccaagcatgtgaatgccactgtgctgactacgctactgcagatgctgcgtagtaactatctgccagggcagcaggcagctgcgctgcaggacgcattgtctgtctgcttgccgcctcagatccgaccgtatcttttcagctctgatggcatggtgcgggctgagccgctatcggttgaagcactgagccagcagataacgcagcatcaaagcgctctcttgaatgcggtgatcaaagccttccatcaagggtggccgattagtgaccgcgaggtcgtgagccgcgaccagttgaaagtgctcatcggtagttttgctgagcagctccagggagtaatcaatcgtctattccagcgcctacagtgggctctggggcagttggagcggttgcgtaaggtggctgctggcaagggcgcgctagatgccgatgaggaggccttacgcgcccgctgcgaaaggttggtgaaaaagctaaaaggcgaggccaagcgcaatcgtagccaggcggaaggttttgacgacaccaatacctatggcgtattggcggctgagggttttttaccgggttatgggctggataccggtgcggtaaccctgacccatgtagcccctcgtcacagcagtgatatcagtgattgggagctacgccgcaacacggctctggctgttcgcgaatatgtcccaggtaatctcatttacgccaatgcacataaatttgtgccccgtcacttccacttggtccctgaagaacctctggtgtttgcggtagatgtggctagtgagtcaatccaggaaactggcccgagtactaaggccggtaatgaagccagctccatgtcggtcacgcaaattccaggtgtagccatttgcgatgtggatgcgccccatcattcctatatttcggacgatgaggactatcgcttccagatgtcggtggcggtttttgctcaagaccaggggcggcattccggcggtaaagtctacgagtggggcagagcagagttgcaactgaagcatggtctgcacatgcgtctagtgaacgtcggtgccgcctcgcaagtacgctcgggagccttgctgggttaccccttgtgtttggtctgcggcgccagccgttcggccatgagcagccagaccgaactggataagttcaacgaacaccataccgagcgttgtggccgtcctgttcagaccatagctttctatgccgaagtagtagccgacgcgctggttctgcaggactgcgcctcacaggaaacggcctacagcgtcatggagtcgctgcgtcagggggctgccgatgtgctggatatggaaatatccgatctccaggtccaggtgattggaaaaccggggagtgaatcggtcgatgcgctgttgtatgaccctatgccaggtggctcgggtctgctggaacagctcttggagcactggcctgatgttgtcgctgcggcgaaacgtttggctgaagagtgcccgtcagcctgtgaatcttcctgtgtggattgcctgcagcatttccgcaactcgttctatcacgacaagctgaatcgtcataccgcgcttgaagtgttcaatgattggggaaataccctgagctttgcccatgatttggcgcctgtgctgccagatgaaaccctgactcagcaaccgggcaatccccctgagcaacagctggtggcgctgctaaaagccgccggcatggctgcatttgagactgaacggccgattcggctgtccggtggcatcacgacccgtccggatgtgtatttccatgagcccaatgatcagtacgaaggcgtctgcatctacctggatggcatgggtgagcacctgcacggcaacgctcagacagcagctaaggaccgtcagatccgccaggagttgctgaatactgattacgaggtgatcgagatccagttccaggagctgtacgacaaaacggtgatgcgtgagcacatgcgccgcattgcacgagccgtaatcggtaaggcgaaggctaaggagcttgctgctagtgattactggtttgattctgcaagcagctcaatggttggggtggctgcatccagtgccaagatattgccgttcaaaaccgtgaccccgaatgacacgggctttgagccctatcagggctgcgttccattggttggcctacaggtcgctgctggtgcttggagcaaagagcagggcggtctacttgagttggccgagcatgcagaagactgggtcgtgttggtagacggaaagtcggagcccggcatgtttgtggcccaggtgatcggtcgttccatggagcccttggtgccagacggtagttactgtctgttccggcccgtgccggcgggtagtcggcaggggcggaagttgcttgtctggcatgcaggcgttgccgataccgagacgggcggggagtacaccttgaaagtctattccagccaaaaaactgcgagtgatgatggtgagtggcaacacgagcagataacgcttacgccgcttaatccggaatatgagcccttggtgctggagcctaaagaagagggtatggttgttgccgtcgccgagtttttaaaagtgctgtaa

SEQ ID NO: 348357 - DNA, 5082 bp, Pseudomonas aeruginosa
atgagcctgcacgcagaaggttgggcgcagctcaagcacggtggcttgttgattgcaccatccaagctggatgaatttttccctcgtgcagcggcggagatgtccgattaccaggctgagaagctgcgtcgagcactcacagcctttgacggcagcaatgaaagcctgagcagcctgttggattacatactgcaggatctttcaggcctgcccgcagatgaatggcaaaaggcccagggtgtcgacagccgttgggccgtaaggagctttaccggcgcccagattaagccgcgtcgcctgtggcttgggcctaacggcgagactctggccgtgttcgtgcctgatgatggtggctcccgccagttcgccagccgattgggggtagggcggtcacggcagttgttgggccgtgtggtggaatggctgcgccgtaccgggcaggcgctggctctggtcaccaatggtcgccaatggcgattggtgcacgccggtgctgattatgacgcttggtgtgaatgggatatcgatctttggttcaacgaaggtcagccatctgcccagaccatcgtctggcgcaccttgctcaatcgcaacgccctgctggccgagcagggtcaaagccaattcctgcaggccataagtgcctcccgtaagggacaggctgagctctccagcgtactgggtgagcgcgttcgccagggtgtagaggagctgatcaccgcttcccatctcgccatcgagcaggctcaacagcaagggcaggctcacgattacaaagatctgtatgttgcaggctcgcgcatcatcatgcgctgcatcatcaccctgtttgccgaagcccgggggctgatgcctgtcgacaacccgatttaccagcaggcttacagcctggaggggcttcgtcatcagttggatcgccgtgctggtggccggggcaacgaacgactgagccagggccgcagcgcctggccgcgcctgattggcctgttcaacctgatccacgaaggttcggctcatgagcgccttaccgtgcctcagtacggtggtgccctgtttgagccaggcaatccctccagcgaagatggtatttcccgcgcgctcgcgttgctggaaagccaccagaacctggtcagcgaccttcaggtgcacaaactgcttcgcctgctgacccgcaccaagatgaaggtgcgtcagggccgcagcagtcgctgggttgatgcgccggtagacttttccaccctgtcttcagaatacatcggcatcctctatgaaggcctgctcgacttcgagctgaaacaggctgctgaaaatgacccggtgatcttcctcgccgtgggtgaccagccagctctgaccttatcgcagctggagaccatggaggataaggacatcaagcagctgttcgaggccctgaagaaaaaagacaaggccggtgacgacagcgacgaagaaggcgaagacgactcagaggaagctgccgacatcgatgaaggcgatgacagcaccgacgaagaagtcgaatccagcgaagacgaaatcgaagaaaacgcaaacactagcgatgatagcggtgaagagctgaccatcagtgaagatcacctggcccgcgccaatgcttggctgcagcgtgctgcccagatcgccggactggtgaaaaagcgccgtggacgcaaagccaacaccacaggcgatgaagggcagcaagcactggagaaggccggcaagcagttgtgcgctcgaatggtcgcgcccggtcaattcttcctggtgcgttggggcggcacccgtaaaggtgcgggtaccttctatacccgcccgcaactggccgcacccactgtgcgtcgtaccctgcaaccgttggcctatgaagccgttcgtagtgagatcgatccgcgaactggcctggacgcagtagtggagtgggtaccgaaaaagcccgagcagattctggccctgaaggtgtgcgacccggccatgggctccggctctttcctggcgggtgccctgcgttacctcaccgaagcactgacccagtcgctgttccatcacaagctgatcgagcgcagcgaagacggcggtgtgccgcgcttggccgacggcaaactgaccgagctgctgagtgatgagctgaccaagctcaaccccaaggacgatggttttgaagaagcgctgcgctcccaactcaagcgccacatcgttgaaaactgtctgtacggcgtagatctggatcccctggcggtggaactgggccgcatggcgctgtgggtggaaaccatggatcgtgatctgccctttggcttcctcgatcacaagcttaaggtcggcaacgcgctggtcggtacctggttcgacacgtaccgcgattacccagctatggcgtgggagcgggaggggggggacaaggactaccagaagaacaaaccggacaacttgattaaccactggtatgaagatgccaagggcaagcgcaagggcgatgtctttaccgatgcgatcaaggtgcgagccaaagccgtgcctgaacaattgcaggcgctgctcagcggtcagctgacactggacggcgggctggacgctagcaatgtgcacgacgaactgctcaaggtcttccgcaaactgcaccgcctgccggtacacgaaagcgaaaaacgcgccgaagtttatcgcagcgaggtgctgaacaacccccactaccatgccctgaaagcgcgtatggatctgtggtgcgcgctatggttctggcccggtgagctgattgagcaggcaccgctaccgcgtgattttgctaacccaaacgagcaggttctggcccttgcggccgacttggcacgccgtcagcgtttcttccactgggaactagagttcccggatgtattcactgccacccaggacggctttgatgtgttgctgggtaacccaccatgggaaatccagaagcccaactccaaggaatttttctccaacttcgatccgctttaccgagcctatggcaagcaagatgcacttgccaaacagctggactacttccgtgcccgaccggatctggagcacgactggatcgcctataacgccaacctgaagggtatgtccaactgggcgaagtacgtgggcaagccctttggcgaccgggtcactgaagacaaaaacggcaagaagaaacatgacctgaatctgggcagtggccgtaacagcttcgagtcctcggcggccgtacacaaaaaatggctacagcagcgcaagaagcacaagggctttgctgataccgcgcaccccttcctgcatcagggctcggccgacctcaacacctacaagctgttccttgagcagagccatgctttgctgcgggggcaggggcggctgggcatgatcgtgccgagtggtatctacaccgacaagggcaccaccgacctgcgcgagctgttccttggccagtgcgactggcagtggctgtttggtttcgagaaccgcgaaggtattttcgatattcaccgctccttcaaattttgcccattgattgtgcagaagggtggtcaaacagaggccatccgcgccgcctttatgcaccgcaatgtggatgactgggagcaggccgagcgccatgtactggcctatccgcgggcgcgggtggaggagttttcgccttactccaaggccattctggaaatccgcagtgagcaggatctgcgcgtgctgcaaaagatctacgccaatggtgtgttgctgggcgaccagagtgaaaacggctggggcattaagtatgcccgcgagttcgatatgaccaacgactccaagcttttcccgccgcgccccaagtgggaggagaagggctaccgtcctgacgagtacggtcactggctgaaaggcccctggcacgattacaacggcccgcagcacattctggagcgtgagccggggctggtgctgtctcgtgatgggcagcaggcgctgcgggtagaggagattgaaggtgtggcgttgccaatatacaacgctaagatctttgacctttgggattactgtgtttccggttggctgtccggaaaggggcgcggcgcgaagtgggaaagcattgacttcccgaaggtgatgaggcctgaatacttaatgggcttgtctgactggattgacgcaggtgcagtccataaagcgagtcggctgctgtttaaggatatcagtactgccgttcacaagcgcacaatgatgtctgctgttacaccaaactttccggcggttaatgcttcgccggcgctatcgtgtaacaggttcgatggtgagctagagcttcagtcggtgcttggttctttcgagtttgactatgttgccaagtttaaaattggctatctccatctgaattacttcatcatcgaagagtgttcgctggtgaggccagatgccatcagctctttgtggcaggttattaaaagaataagtgcgcagctatcttgttgtgacgagagcttttcgctcgcatggcttgatgcagtgcattttgatcccaagacttcatggagaaggctgtgggctgtaacagatgctgagaggttgagacttagggttatcctagatgcgcttatggcgcatttgtatggcttggataaaagtgacttttcttggatattgaaagatacggatcatcctcttgcatttttgagagtaaaagctaatacaaagtctctcgaccaaaagcggttttggcgcatcgataaggataaagaccctgagctgcgccactccgtcttgtcactgatcgccttcaacgacttgcagcaaaaaggcctcgacgcctttctcgcccagaatgacggcgagggctggatgatccccgaacagctgcgcctggctgacttcggactggggcacgatgagcgtgcccaggaatatcagccggtggcctcgcgcctcggcccgcgcttctacgactggcaactcaatgaagatgtcgagcgctcctggcaggagtgcgcggctcatgcccagctgattcgccgaatcgtgccgctgccacagccgcaacaagccgacggtgttgccgaagcgcaggcgacttataaaacagaatcaccgcagggagcactgttctaa

SEQ ID NO: 348358 - DNA, 3222 bp, Pseudomonas aeruginosa
atgcttgccaccgtccgtaaccgccgcggtgtgatctcctccgtagagcccttcagtgatagcaagacgtctgctttgctacacttagttacaatcgagttcagtgatgccgatggtgatgcggaagagtccctgttgtgggagcgtgagcgcgatccggtggtattggagccgaatgcgctgcccaaaattgatcgcgaagcgcctatgcagcagggcgagttcctggctttgcagcgtgccgctcgctggagcgccctcactccgttcttgtcggcaagtgaccctcatgatcgctccgagccagtgccgactgcgccggtatatggggcggtcagcgtcgatgacttccagctcgtacctctggcgcgagcgatgcgcatgccccgcgtttctctactgctggccgatgatgtgggtttgggtaaaaccgtcgaggccggtctgattctggctgagctgatccggaagcgtcgtatccgtcgggtgctaatcatcactcctgcggcattgcgcacccagtggcagcaggagatggaagagaagttctctttgggcttcgatatcgtcgacaaagccgccactcacaagctgcaaaaagagatggggcttgatgccaacccctggcgagcgcttccgcgcatcatcacctcgtatcactatctacgtcagcctgatgtgctggagcagttcgtcgccaattgcgaatccattaagcaacgtggtggggcgcagctaccgtgggatctgctgattgtcgatgaggcccacaacctgatgccgtccaattttggtgaggacagcgatctggccaagatgctgcggctactcacgccgtattttgagcaccgactgttcctgactgccacgcctcacaatggccatacccgctgtttctcgggcctgctgcagcagcttgatccggtccgtttcactcaaacgccggactttaccgacaaagagcgcaagatgatcggcgatgtgttgatccgccgactgaaaagcgagatcaacgatcaggatcgtcaggccgggcgagtgccgcgttttgccaagcgttatctggagccgctgccgctttatatgttcaaaccggaacaggagctggcggcagccgttcgcaagttttgcacgcagttgaaaggaatcatccgcaccgctccagaagcacgcatggtgctcaacttcgctatcgaaattctgcgcaaacgcctcttgtcctgcccagtggcttttgccgacagctggttgcgcttcaaggagggcttggccgccaaagaggcgcttcaggctgctgaggtcgctgcggcccgccgcgccagtgaagaagacattgatgatgaccaggagcgtgagagccgcagccggcatgccgctcaggttgttggcgcctggatgcacccctatgtggatgtgctgcagcctgagattgatgcaattgatgctgcgctgaagtctttgggtctcgacaagcagcccgttgttcaagccaagcctaaatctgatgcccgctttgatcgcttgcgtgagctgatcggcaaggaactgcgcaacgcagaacagtggaaggtcgatgagcgtctgatcattttcaccgagtacaagaccacactcgattacttggtcaaccggttggccgcagaatatggtgctgagcccggtagtatctgtcagctctatggcggcatgcatgacgaggagcgcgaggcggtaaaacgcgccttcaacgatccggatgcgccggtacgcattcttgttgcgaccgatgctgcttctgaaggtcttaacctgcagcacaccgcccgcttgttgatgcattacgaaatcccgtggaacccatcgcgtcttgagcagcgtaacggccgtatcgaccgtcacggccaatctcgggatgtcaccatatttcacttcaccagcgaagatgacagcgacctgcagttcgttgcccgtgtactcagtaaggtcaacgacatccgtgaggatctgggctcggtaggagaactgttcgatgccgcgttccagcgtcggatgatggagatgaatgaagatcgtgatgtgctaggtgatctcgatcatcagataaccagtcgtagaagtgccaccgaagacgctcaggtacacacccaggagcgaggtgaggacgaaaagcagcgccttcaagagcttttggccgatcttgatctgacccctgaaacgctcaaagacactctcggcgttgccatgagcctaggcgcttcgcgcgaagtgctcgatggtccggatgccaaggggcgcatgcgcttgcgtacaccgctacctatgcgttggcaggcagtggtagatgacaccctgcgcttacccgcgcagagaggggtcagcggcgccatgccttggctggtgttcaacaaccacttctttatccacaacatcaatggacgcccagtcttccgcccatccccagatactgtgctgttgcacctgggacatccgttgctacgtcagtcgctcaatgcctttgcgcgtctgcgttttccaggaggccaaaccgactttcagccgcctagccgttggcttgttacgcgcggccaggtgccggctggcgtcgaggcgttggtgttgttcaccgtagaagaaatggcggtcaacaacttgcgtgaaacctttcaccattggacccgaaccctggctttgccattgagcaacaacaccttgggtgagcctttgccttatcaggggccacaccatggttcgctggcaaagccaagcgttgccgacgtagctgctgcacgcgagctatgggacgaggttgaagaggatatcagggcgctgttgagcaaataccgagctgagctgactctgagcctgcgtggtcaactcaaggtcgcgtacgagcaagcgaaggagcatgaaaaggatgcgttcgagcaacgcattcgtgaagtcgccgcgctgcaaaaagcacagagtatcgagaagttgaagcgagagattgaagagcagcgcgttgccagcatccagcaccaactgtttgacgatgccgatgcgctggcggaaaagcgtctgcgtgatctggaggatgagctcaagcgtcgtcagacccagttcggtgatctgcaggaccgcttgaccgaagagaagcgtcgcattttggagcaggtgctacctcgtcgctttgatttacgcggtgaagcccaggtatttccggtcaccattgaaattcgttttccggaggtaggggcatga

SEQ ID NO: 348359 - DNA, 1488 bp, Pseudomonas aeruginosa
atgagtaagaaggagccgctgaccgagcatgcacaagcgatgctggtgcagaagcaccagacggatactgctcaacggcatttggggttgcttgatggtgccttggaggacatgcaggcggcccaagctgagagtcatcaacatctagaactgatgttattccaggcgagagggctcatcgaggaaagtcaggtggtactcgacgtggacgaggaggatgcactgctcgtcgagaccagcctcttcgtacaggaggaaatcgtcagcagcagcgcgccgctccctagcctcgacttcatcgaagtgggcagtggtggcgattggcgcggctacctggatcaggtggcgtcctacgcgcatcgttaccaggttgagattgggcaagatcctttccgggatctgatgagcgccagtcaacgcattgccctggaaaagcgcatacgtgacgacttctcgttcaagggcgcacagtgcgacaagttcgactacatgatcgcaggcacctgcggcttgataggcggattggtcgatgtactgttcgtcggccttcccgggcagggggcgctcacccacttcactgatgacatgaccgacaaggcggtgcagacattcgcctcctggaatggttggaaagggccgcgtgagggtaaggatccgacagctagcgctattggcttcctcgagcgtatgtacaaggtcaactacgaccatcgacacggtggcgatgtcggtggcctgttcgatatgagcacgcgcaatcatcacatcaagagtcttgctcactcaccggacctggttggcttgtttttctcgatactggatcagttcactagtacggcccactttgtcgatggtggccggctcatcagcgtcgatacagataccttcgagctccaagggtcgaaccttgttgccaaactgttctgcggcttcatgaattggctggggcatctgttctccgacatggccggctcgtctggcgcgcagcagcgtggatcgggaatccccattccattcttcgcactgttgcagttcatcaatgtcggcgagttcggaaagcacagacaaaccttcgcaaagattgcggtccaggtattcgagcagggctacgaccttcgtcatggattggcgatggcgattccggtgctgctcagtgagctactggcccgagtaacctgggttgttaaacagcgcttttatcaccaaaaagactggtcggagtgtatcccttcggcatctaaccccgagcttcggcggatgctgctggtcgcacacggaacgttatgccttgttgatgggattgatgctgcagttcgctcgggcggcgacatgattcagttcatgctgcgctccaacatcatcgcctgggtgcgtttcggaacgctggcgctcaaggagctgaatgcctggtacaaggaagggaagctcgactcctcggcagttgatgcatatctggacgccgagtacgagcggattttggcccgctga

SEQ ID NO: 348360 - DNA, 1680 bp, Pseudomonas aeruginosa
atgagcgcaagcgcttaccttcgcgaaaatctgggatcgatctctagcaagaacatttccattgccccagggatagacgaaaaaaaactgaataacgcaatcaaggcctttgggtatagcggtttgcctgggagcgtcgtggccttgttcgacaacacgttgtttggctccggaaaggacggtttgatgttcgtgggtgaacatctgatctaccgctctgccttcgccgatcctatcccggtgccctatgaggcgatcgctgccgttaaatactcccaactgcatgtcgggaagaacctggacaagcttgaggacactctggtcatctccaagaaggacgatagccagcttgtgattaaggatctgactgattgtaactatgcggctcttacatcagtgctgcagggattgattgataatttcagcgatttccaagacgaaaagcagctgatacccatcgatgagatggatgatgtggtcaaggtggcctacctcaaggtcatcgtgaacatggcctatgacaacgactccgtcatcgacgaaaaggagttcgcagagatattgctgctgatgactcgtctcaatctcagctccgagtctcgattcagcatccgaacttacatgacggctttcgagcgtgcagtgccgatcgaggcgctgcttgaggaaatcgacacccattgcccgcatgggcaaatcaggtcgctacacatctcgttgacgaaggacttgatcaatctctatttctccactggtggcagctctctgtctgaattcggtttcctgcagaagaaccgcgcactcctgcaggttacagagggggaggttgatctcgcagtggcagcaatccgaaacgaccacagcatgctcaaggaggacgtcacggatgaccagattgtgagtgccctgaagttgctttccgcaaaagcagcggctatcggtacaccccttgctgcggtgtatctctctggttcggtgattggcatgtctgccgctgggctgacgtcaggtttggcagctctgggtatgggggggctgctgggcttgtcgggcatgacgaccggaatcggcgtcgcagtgttgattggcgttggggcgtatgcgggagtacgcaagctgactggcgctgacgagttgactcggtcaaagcggcgcgagttgatgttggttgaggtcatcaagcaaacccaggccactatctctttgttgatgcaggacattaaccacatcaccgcgcggctcaaccaagcactcatggagcacggggatcagagccaaaaaatccagcgcctcatggcaatgatggggcagttgaccggcgctggggctgtgctcaccagcaagtccgaggcggcgcagaatagtgctaccaagctgcgctgtgcccggttcctggacgaggccaaactcaagacgctcaccaaggagccgaccaaggcggagttgtacgacttcatcagagggttttacgaagagcgctcattcagtcaggagaagaacggtcagcaggtcgacgttatcaagttgggggtcaagccaggcgtttcgactaaagatctggaaaacctcgcccgggcctttgaagccattggctatttcaatgtcggtgatgttttagcaggtagcgccgcagatatggccagtaaggccaaggacaagctgaccgggctcttctcatga

SEQ ID NO: 348361 - DNA, 1890 bp, Pseudomonas aeruginosa
atgatcaaaagtctgaagttcagccacaagatcctcctcgcggcctccctcgtggtgttcgccgctttcgcactgttcaccctctacaacgattacctgcagcgcaacgcgatccgcgaggacctcgaaagctacctgcgggaaatgggtgacgtgacttccagcaacattcagaactggctcggcggccgtctgctgctggtcgagcagaccgcccagaccctggcccccgaccacagcccggaaaccgtcagcgccctgctcgaacagccggccctgacctcgaccttcagcttcacctacctcggccagcaggacggcgtcttcaccatgcgtccggacagcccgatgccggccggctacgatccgcgcagccggccctggtacaaggacgccgtggcggccggcggcctgaccctgaccgaaccctacgtcgacgccgccacccaggaattgatcatcaccgcggcgacaccggtgaaggccgctggcaacaccctcggcgtggtaggcggcgacctcagcctgaagaccctggtgcagatcatcaattcgctggacttcagcggcatgggctacgccttcctggtcagcggcgacggcaagatcctggtgcacccggacaaagagcaggtgatgaagaccctgagcgaggtctacccgcagaacacgccgaagatcgccaccggtttcagcgaggccgaattgcacgggcatacccgcatcctcgcctttacccctatcaagggcctgccttcggtgacctggtacctggcgctgtccatcgacaaggacaaggcctacgccatgctcagcaagttccgcgtctcggccatcgccgccgcgctgatctccatcgtcgccatcctggtcctgctcggcctgctgatccgcctgctgatgcagccgctgcacctgatgggccgtgccatgcaggacatcgcccagggcgagggcgacctgaccaagcgcctcgccgtgaccagccgcgatgaattcggagtgctcggcgatgccttcaaccagttcgtcgagcgtatccatcgctcgatccgggaagtcgccgggaccgcgcacaaactgcacgacgtctcgcaactggtggtgaacgcctcgaactcttcgatggccaactccgacgagcagtccaaccgcaccaacagcgtcgccgcggcgatcaacgaactcggcgccgccgcccaggaaatcgcccgcaacgccgccgatgcctcgcaccacgcctccgacgccaaccaccaggccgaagacggcaagcaggtggtcgagcagaccatccgcgcgatgaacgagctttccgagaagatcagcgcctcctgcgccaacatcgaggccctcaacagccgtacggtgaacatcggccagatcctcgaagtgatcaagggcatctccgagcagaccaacctgcttgccctcaacgccgccatcgaagccgcgcgcgccggcgaggccggacgcggcttcgcagtggtcgccgacgaggtgcgcaacctggcccatcgcgcccaggagtcggcccagcagatccagaagatgatcgaagagctgcaagtcggcgcccgcgaggcggtggccaccatgaccgagagccagcgctacagcctggagagcgtggagatcgccaaccgtgccggcgaaagcctgagcagcgtgacccggcggatcggcgagatcgacgggatgaaccagtcggtggccaccgccaccgaggagcagaccgcggtggtcgactcgctgaacatggacatcaccgagatcaacaccctcaaccaggaaggcgtggagaacctccaggccaccctgcgcgcctgcggcgagctggaaacccaggccgggcgcctgcgccaactggtggacagcttcaagatctga

SEQ ID NO: 348362 - DNA, 711 bp, Pseudomonas aeruginosa
gtgaaggtcacccgtgaaggggaggagacctcggcgcgcaagatcgccacgctgtatcgcggggcggttgtcaccgcgactgcaatgacggcgtctttccaggtctacgagggcgagacggtgcagcgcttcgaggcatcgggcctgcgcggacagttcgtaatacaggtcaccgacgaaggtgacccgcgcctggggatcattcgctggccggtcctcgatgccgatacgcgcctgctgtcctatgacctgaccgaaggctcgggcggtcgagatccgaccgacccggcgacggtgcgagcggtcgtcacggtcgacggcggtgcggcctcgcgccaggttgtggtcatcgagcgcaagctcgatggcgaatggcgggtggccggcgtggggcagacggccgagtccgggcgcgccgagatcgccctggaggtgacggccggcgggaccacttacgcgatggggctggatgactggggcgcggtgttcgagccgcgtctcgccgtcagcctgggccagcgcgtgcgtccgacgatcttctctggctggctctacgaggtgaccgaggccggggtgctgccggtggctgagccggagtggtggccgatcgagggcgacaaccccagccgccaggtcggcacggcccgtctgcaggcgacgcgttactaccgcccgctcagccacgggccctttcctgtcgaggctctatga

SEQ ID NO: 348363 - DNA, 2217 bp, Pseudomonas aeruginosa
gtggctacctacaagcatctgaacattgcacgggaagttctggataactcacgccggaccaagaatccccctcccttcaccaaacgtgaagatcgtcgagggcatggccagaaactcaatgcttactttcttacggctgaagggcaagccaaaaagcagatcggctcgacagctaactctccctacgtcctcaaactgaaatacgacggcactctcaacttctcaaaccttgatgtccatggcttggagttcgtcagccaggaggataaacagctttgcgttgttttcgcgacagaagaaggtttggccaagttcgctgaccatctgacgaagctgggtgttatggacgacgccttgacctatggccagattctggaggctatcgcaggggtggagacatggtctgcggaggatcggaagagctgggcgatcacccatatcgggattccggacacccccaccttcaagcttgatgtcgaactatggcctgtctatgtagcgagccacccgaagcgaatcctactcacaaatgctttcgaggcctggctctcaggggagcgcattaaaaggctcgacaagctgaatctggacagcttgctcatgtaccgggttgaggtgacgcccgaacaagcacagctactgctgaaccaccgcgatgtccggcttgttgatctcattcccgccaccggaatcagcattcagcagctgaatcgggatatcaacgagctacctcgaaacatacctgcaccggccgcagatgcggcacgggtctgcattctggacagtggtatcaacgggaaccaccccctcttgaaacctgcgatggctgaaagcgcctcctttgtggatgaggaaggagacgatgaccaggcgggacatggtactgctgtagccggtgtggccctgtatggcgacgtagaggcctgcaacaactcaaatttctggcgcccggagctctggattttcaatgggaaggtgatgaagaagtgtccgcatactggcgatgcgatctatgacgagctctcgcttgaggcatcactgacgaaagcggttgagtacttcgtcgagcttggatgtcggatcttcaatctctccctgggtaacaataatgctccgtacgatggagctcatgtcagggggctcgcctacatcctggacgtcctctcaaggcggcataacattttgtttgtggtctctacgggtaacttccgcggctctgaagaacctccagttccggtaaacagctggcgtgacgagtaccccgaatatcttgtcgcagaacaaagcgcaatcatcgatccggcacccgcaatgatggtgctgacggtgggaagcatctcccggcacaacgccacttttgacagccagaaatatccagatatcagtcagctctcgcctgcctcggaaaaccaaccatcacctttcactcggcatggcccctcggttaagggtgcgctcaagcccgagcttgttgcggcgggtggtaaccttgccagccccatgaggcaggccaatgctcagtggtcgccgcacatgcgggggctgggtgtacttacgcttaaccatcagtgggcaggcaacaccatcttcaaagaagttagcggaacgagcttcgcggcaccatacatcactcatttggccgggcgcttgctgaatgaatatccaactgcgtcagcgaatatgcttcgcgcgatgctggtcaatcaggcctaccttccaggtgaggttatttccacgttttctaatgagttcagaaagggctacaaggaggctaaagccactcggaagcgtgatgtggcgagagatgtcgctggctatggcgtagtgagtgaggccgacctcttcagatcttccgataacgtcgtagttctgatgtcggaggagactattgaaaacgacggatgccagttctttgagctgcctttgccggacgactacctgcgttccgctcgtgggacacgtgagctctcgataacattggcttactcgccagtagtccgaactaccagaattgattacttggccactcagatcaactatcgcttggctgtaggcacttcgctagacgaagttcagaagcactttagcaaggaactcaaggctgagacggaggtgctcaaggaggccaagtccagcaatcgcgacatctcggcccagctgagaaaccgcggtacggtccagtcttcacgctggatgttggcgctgatggaaaattga

SEQ ID NO: 348364 - DNA, 543 bp, Pseudomonas aeruginosa
atggaagagcttcttatatcgattattgcatgcggtgcagcgtttgctgccaactggatttccacgattctcttgtccaaaaaagagaatattcgcgaaagcgttattgaattccataaaaagaacggcaagaaacaaaaaatccgagtttcttcacttagccctgaaaacatccagcacaccattgaaactgaaatctttcttgagaacatagtgcgagccgcactcaatgatctaattcgcagcaatgggaagataaaaataaaggaagatgggacagccgatttcattgcccaactcggcgaagaaaccgttctaattgaagcgaaggcctcaatcaacaaccttacgaaagacttttttgcaaaggctgacaaagagcttaaaagctatcacccgatcttagtagttaacagcttaacaaaggaaatcccagactcctttaaagagagaggagtgaaaattataaatatcaccggggacaatggaaaagcgaaagagtctctaatacgagaaatcagcaacaccctgaaaccagcttga

SEQ ID NO: 348365 - DNA, 1281 bp, Pseudomonas aeruginosa
gtgagcttcgacaccatcgagttcgaccaggcccgcgcccagcagtgccaatacaatctgccggcaccggcggacaccggctggtcgagctccttcagcagcctggctggcaagagtgcgcagatgccgctctggtgggcgatgatgcatgccctgtccaagggcttcaccagcggcgccatcgcggccattccgtgcggcacggatctgcggcagatgcgaatggaagtggacaacacgcgcgtgaacaacccgctgctagcacaggaaatcgctgatttctccagggactgctacgggccctcccgtgcgcggctgttcatgcggcaacccgacctgggctccgtcgccgaggacaacaaggcgttgcaagacctgaactggatcggctcccgattcctgttgaacaccccggggtactacgacaccgactactcgaagagtccccgtcagtcgtggccctacaacgccacccgcgatgccggcctgcctcaggtgggcggtggtggcggctacccaacctgcaagcagtggtgggctgactcagggatcggcttgcgtgatcggatcaaggaccaggtggatccggacctgatgaccagcttcctcaagtgggcgaaatggctgaaccaggacgaggtgaccgaggctgtcattcgccaggtgatctcaccctccagccaggtcaagggcaacgtctacaccgattacggcgggcaggtgggcggtaccgtctggaatggactggctcgtgccggaggcaccctgggagtggcaatgggtagcctggcttacttcccggcgatggacatggtccgccaggcactgccgatggtgatgtcgtttctgaagatggccatggtcatctgcattccgatggtcctggtcatcggcacctatcaactgaaagttgccatgacgatgacggtcgtcttctttgcgatgatgttcgtcgacttctggtttcagttagccagatatatcgacagcacgatacttgatgccttctatggttcgggatcaccacatctttcattcaacccagtcatgggcctcaatacggcgactcaagatgcaatattgaacttcgttatgggttctatgtttattgcactacctgtgttttggatagcggcgcttagttgggcaggcatcagtgctggcaaggtgctggaggggctaactagtggcacaagggcgatcgaaaaggcaggcgaaaaaggaggtcaatttactgaaggagggattaagagcataggcaacagcactataaagccataa

SEQ ID NO: 348366 - DNA, 684 bp, Pseudomonas aeruginosa
  misc_feature (627)..(636): n is a, c, g, or t
atgcctaatgcttacatatatgtggttgatcgcgacttcggctttgcccctaatccattccataacatgtgcacacttgcgacatgcaagccggacataagacgagttgccaaagtcggtgactggatcataggaatgggtggacgccggctaaaggcgaccgggagatgtatatttgcaatggagatatctaaatcaattacatttgatgagtactgggaggatccggcatatcgcgacaagaagccgctacgtaacggcagcatgaaaacgattgttggggacaacatctatcacagagccggagaaaaatggcagcaatcaaactctcaccacagtcatccagacggctcccccaacctacacaacatattaaatgacacaaaaaccaacgccgtacttatatctgataatttcttttactttggcgctgcagccattgcaatccctaccctgctacttgaaaggttaggctaccgcaactcaagaggccacagaaagtttacccttgcacaagcgcagcctcttttatcctatctgactagcaactttcatcccaacatcttatacggcgacccatttgattttgagtcagcaaaatcaagatactcggtagagaataacaannnnnnnnnnctcctcatacctagcccaccaaaacgcaatctcaccatggttcgctaa

SEQ ID NO: 348367 - DNA, 663 bp, Pseudomonas aeruginosa
atggacgataaaccagaaaatttgtctctagtaaaaatattaattgactctgatttccgacttactttggaggcgtctccttgggtgttcgttcttgccttggcagttttggttgctgttctagttttaaggtggatgctttcccaaagtgggatagctgattatgaaattgatgaggcagagcttgggattggggagcaaaaaattaagctgcggccgaatattgttgacaagcaaattgcttataaggtttgggttgagttgagtactaggaaaatagggctgccgattgatctcgataatgatgtcatttccgaagtctatgattcctggtttagtttcttttctgtcaccagggagttgataaaggacgttccagtttcgaagtttcaaaggaaggaaactgaaatgattattagattatctatcgatgttttaaaccagggtttgcgccctcaccttacacattggcaggcgcgctatcgtagatggtatgaacgcgagctaagcgtatcagataaccatgatattgagcctcaggcgcttcagaaaaagtatcctcgatatgaagagctttctgctgatttattggcggttaacaagaggcttatcgggtatagaaataggatgtattgtattatatcgaatgtggaaaaaagatga

SEQ ID NO: 348368 - DNA, 1119 bp, Pseudomonas aeruginosa
gtgaaggctataaacccgaaaaaccaaccagctttaaaggcaggcgaaaggagtccgccacacacatctcatgcgccatcatatattcacccaattcgggtaaccccagttttcgacagctactggaggttcgccgccgaacggcaaagcgtgttccgtcaaagactagagggacaacctgccccatggaccagcgacccagtgattggcactcacaagttcacaaacgcatatcgtgcctcggatcgcgtcagccaattcctaataaaaaatgttatctatcgccaagatctccctgactctccgcccgaggtaattttccgcattttactcttcaagcttttcaataagattgaaacatggaaattacttgagcacacacttggcgaaataacctataaaaactacaattttgatcactacgatacaattctaagccaagtaatgagtgccggaggcagaatttattctgcagcatatataatgccatctagcggctcggtctttggtcatcctgccaagcatcaaaatcaccttcgtttgctagaatacatgatgaaagacggcattgccgggaagctgtcaaagcaaaaaaaaatgcagggcgcatttgagcttctaaaaagctacccatcaattggtaattttcttgcataccaatttgtgactgacatcaactatagcgaagttaccgatttctcagaaatggacttcgtcgtacctggaccgggagcactcgacggaatacgaaaatgtttcactgataaggcgaacctcaacgaagctcaattaatacgcctgatggcggataatcaggaacaggaatttgaacgcctcggtattaaatttcaatccttatgggggcgtaggcttcaactaatcgactgccaaaatttattttgtgaagtcgacaagtacgcacgagtcgcacaccctgacgtagctggcatttctggtcgcactcgaattaaacagaaattcgccccaactggagctctggagataccttggtacccgcctaaatggggtataaactccaagattgcagcggacctgctagttacgcctgcagcacagaatacatcaccttcacaggcaaagcttaacttaggaaactga

SEQ ID NO: 348369 - DNA, 786 bp, Pseudomonas aeruginosa
atgtccgccgacccttcgcccgtggtcctgctcgaatttcccgcagccgatatcgccctgcttcgcctcaatcgtccgcaagccaggaacgcgctgaacgacgaagtgcgccagcgcctcgccagccacttccagacgctcggcgcggatccggcgatccgcgtcatcgtgctcaccggcgactcgcgctgctttgcagctggcgccgatctccgcgatctctcgacgagcacggcgatcggcctgtacggccgccacagcgagcgctactgggaagccatcgcgcgctgcccgaagccggtgatcgccgcggtcaacggcttcgccctgggcggcggctgcgaactggcgatgcactgcgacctgatcgtcgccggcgagtcggcacagttcgcccagccggagatcaaggtcggggtgatgccgggtgccggcggcacccagcgcctggtacgggcggtgggcaagttccaggcgctgcgcatgctgttcaccggctgcctggtgaaggctccgcaagcgctggccatgggcctggtcagcgaagtggtggcggacgagtcgacgctggcgcgcgccctggaactggccacggagatcgcccgcctgccccctctggcgctggcgcagatcaaggaggtggtcctggccggtgccgacctgccgctggacagtgccctggccctggaacgcaaggcgttccagttgctgttcgactcgcaggaccagaaggaaggcatgcacgccttcctggagaaacgcccgccgaactaccaggggaaatag

SEQ ID NO: 348370 - DNA, 1530 bp, Pseudomonas aeruginosa
atgcccgatattcgttgtatcgccgtggtcggtaccggtgcgatgggcaccgggatcgcccagatcgccgcccaggccggcctgactgtgtggctgttcgacagccgcgccgaggccgccgccgaggcacgccagcgcctgcggcaaaccttcgagagtctatgcggcaaaggcaagctgagcgccgccgacgccgaggccgcgcaaaaccggctgcgggtggcggaacgcctggaacaactgggcgactgcgaactggtggtggaggccatcgtcgagcgcctggaggccaagcaggaattgctgcgccggctggaagccatagtcgcgccggagaccatcctcgccagcaatacctcgtcgttgtcgatcaccgccatcgccgccgcctgcgagcggccgcagcgggtcgccggctttcacttcttcaacccggtgccgctgatgcgcgtggtcgaggtggtcgacggcctggccagcgctccggaagtcggcgacgccctgctcgccctcgccgcgcgcctgggccaccgcggtgtacggaccaaggacagccccggcttcatcgtcaaccatgccggccgcgcctatggcaccgaggccctgcgcatcctcggcgaaggcgtcgccgaatgcgccgagattgaccgtgtgctgcgcgagtgcgccggcttccgcatggggccgtttgaactgctcgatctcaccggcctcgacgtgtcgcacccggtaatggaatcgatctaccagcagtactaccaggaaccgcgctaccgcccgcacccgctgacccgccagttgctcgccgccggccgtctcgggcgcaagagcggccagggcttctatcgctacgtcgacggccagccgcaggacaagcccggtccgcaaccggtgccgcaggccgccatccggcccccggtgtggctgggctgcgaaaacgaggatgaccgccgcacgctcgccgaactgctgcatcgcctcggcgtcgagccggaaaccggcgaacgcccttccgccgcagcactctgcctgctggccgcctggggcgaggacctgagcagcgccgtgcagcgcttcgcctgtcccgccgagcgcagcgtcggcatcgacctgctctgcgacctcgagcgccggcgctgcctgatgctctcgccgctgactaccccggccatgcgcgacgccgcccacgcgctactggctggcgacggcgccggggtcacgatgctgcgcgacagtcccggcttcgtcgtccagcgggtactggcgatgatcgtcaacctcgcctgcgacatcgcccagcagggcattgccagcgtcgaggatatcgaccaggcggtgcacctcggcctcggctatccccacggcccgctggaatggggcgaccgcctcggcccgcggcgcctgctgagcattctccagcgcctgcaggcgcttaccggtgacccgcgctaccggcccagtccctggctgcgccgacgagcgcaactgggcatgtccctgcgcgccggcgaaaccgccgccgtaggctga

SEQ ID NO: 348371 - DNA, 1977 bp, Pseudomonas aeruginosa
atgactacgtatgccactggcaatccgcttggctccaaagacccgcgcgatctgtacgacaacgccgagaacttcgacgcggcgatgaacgaccgggtgaataccacgtggaatgatcgtttcggcgttcttcgcccaacgatgaaggggtatgaagagcagttcaatgactggctggacgcccaaggcttcgaaccggtcgttctggagtacaccgacggctcgccgctgatcgtagatcgcccgacccaactcatcgagcgtgatggcaacctctacagcgtcaagcgcccggcatcgttccccgttgagctgaccgggaactgggcgaccgatcaggatctactggtcacccaggtcgaccgctcgctgcgtcagcaactggctgacccgctggacccgaccgctggcgctgctctggttgcgcgggcatcccggcacctcagcgacctgacaggcctgatcggcctgatcggtcgatatgccggtgacatggttcagaccgcagcatactggggtggatggtctgtctatgccgatggtccggtaggcgggggaacgtacgtatgggacccggcgcgcccgcggtccgagcacaacgcgggaaacgtcatcagcccgaccgtgccctgggatgggctggaatctacgttcgcagcgtacatcgcaaagaccggagaaaccgaaccatcagccctagggtgctgggttcttgttccggagcacggtcgcgagttcaacgttttgcagtggggccttagaaataaccacaccactaacggcgctaacgatgcggcaattcagccgcttcttgattatgttgaaggggtgcgccttggtggttttggtggtgtcgtttactttcctcgcggtaattatcgattcctttcctacttcaatgttcgtgatagaacgactctgcgcggagaagggactggagcaacaatccttcaattccaagggtcggcagttggggattgcattaccctggggccaactggccctaatcacccgctaaacccaaatgggcattgggttttcggggttaggctggagaaccttactgtttctggcggtaatgtgtataaaggccttgacagagccatggttcgcacggatggggcgcatgagcacagtggcctgtttaatgtcgttgtgagggattttgtttctcttggagtgaactattcaacaggaaatggtgggcctgcactttttgagatctctgatgtagagatatatggatcagattcagcccctgtttctggagaaaagcgaggggtcttgtgtaatgccggaggtgccctgattcttgtcaggcatgcaactattactggtggggctagctttaagttggcccaaggcattttgatgtcgaaggaccatttggttgcccagggggttcattttgaaaatgtttcatccggcatcagtttatctcagaacgattccgtaaatacaagaactaacgttctggcaggtataaccggaaacttgacggtaggaacaggagggcttgttgacatatctacatcgttccaagggagtgttagcgctcacggtatctttaataaaagcgcgacagccaccggccttataagccttattaacagaaaaactggagagacattcagggatcaggctctaggtgcctatatgtatccttctgctatttctcctggtgaggcgcttgcgcactctcgaatctcggtatctggcggcgtagcctcgattacgaaggcaacggggagaacgtttaccgtcacccggacgtcggctggtgtattcaggtttgttcttgcagccgcgatgctggatggtaactataccgttctgcctacggccaggcctagcggtggagggccgatgttctgcgagttctcaccaatcagcgccactgatttcgacctgaaaacgtacaatcaggcgggtacattggccgatccggcgtcgatttggttctctctgtaccagtaa

SEQ ID NO: 348372 - DNA, 783 bp, Pseudomonas aeruginosa
atgagtgaggcaaggaacgtgctagcccgagactggcaaagcgccggactgcgggctggcgatactgttctggttcacagcagcgtatcgcgaactctgcgtcggatcgcatccatgggggagcgtccagaccctagcattatcgtgcaaagcctgctggatgctgtcggggatagcggaactgtggttttccctctttttaattttgagtttactcagggggttccattcgatattcgagagtccaagagtgcgatgggcgcaattactgagtcagctagagtttggccaggagcggttaggaccgggcaccctatctactcatttgctgcaataggtaataattcatccttgttttctggagttgagaattttagcggatatggctctgattcgccttttgctattcttcacgaactgaaagcaaaaatagctgtaattgatcttcctgatcagaacagtatgactttctatcactatgtggaagagtctaaaagcgttccgtatcgctatcataaaaaatttacagggaaatacattgataaggaaggtgtttcgagtgaaaagacattcgggcttttcgttagagacatagaacgaggtgtgaggacggcggtggatcctatgggcgaaattctttgggagaaaggcttgtattctggccttaggcctaaagagggccatgggatgcgagtcatacggtgcgatgctatgtatgacgcggtttcggatattatcgatcaaggacgagcagagggggttctctttgaaattcaacactga

SEQ ID NO: 348373 - DNA, 1002 bp, Pseudomonas aeruginosa
atggtcgtggattttgatgagctacagtctcatttgtactcgcttcccgatcagccagatgccataccttatattacgtcatactataagaggcgatggggattttgcatcacgcagaatcaaagagactccctgcgcaactgtaaatatcgtgttgtaattgatagcgatctgtcgccaggcgttctaaattatggtgagttgataattcccggcgagctagaaaaggaaatttttatttctacatatgtttgccacccctctatggcaaacaatgagctttccggtcctgttgtaactactgctcttgcaaagtggctgcttggtcgcgatgatttgaagtatacttataggatagtatttataccagaaaccataggctctatagtttatcttagcaagcatcttgaccttcttaagtctcgcgtgttcgctggattcaatgttacatgtataggtgatgacaggtgttactcgtatcttccctctagaaatggggatactgtttcagatagggcggctatccattcattaaagcatatttatccgtcatttaagaaatatacatggatggaccgtggaagtgatgaaagacagtactgctcccctggtgtcgatcttcccatagctactattatgcgtagcaagtatggtgaatatcccgaatatcacacatctctggatgacttgagtcttgttacgccagctggtctacagggaggttttaatgcactacatgacgcgctagagataattgatggtgatgttaggctaaaagtgactgttccatgtgagcctcaacttggtaagaggggtttgtatccgacaataagcacaaaggatacagcgtcaaaggttcgggcgatgatggggcttatatcgtattgcgatggtgatcatacgctgctggaaattgctgacaagattggagagccttttaagaagctcaaggagatatctaggccgttgattgagaacggacttgtcgaggtgattggctga

SEQ ID NO: 348374 - DNA, 639 bp, Pseudomonas aeruginosa
atggatctgaggaagcagcatgaatccaagacgcacagccatttggctaggcagcctcttcggcggtctgctgtacctcttcatcctggcagccggcccgatctggggcggcatcatcaccgcagaagctacgcacctgtccgcagcaggccggtaagcgccttccctttctacctggagaacatcatgcctcatgaacatatcacgcaagttcctgattatctgttcactttcatacttggtctcgttcttgcttttctatgggcctttgccgtctttcttgcttgggcttggggtagggcttgggcttggattgatgattcgaagccgccgcgacacaactttctgacccattgggttatgggtctacttgggtttcatctggaagatgatcgctggtccgtttatgtctaccggcattcaaagaacaagcttgggagcgatggtgcaagtggtttcttctacccagttctgatagctgtcacagcccctagccttctcctgctttcctttgacctctacccgatcacggtatgcggcctgacgctttttgccgtagctcatcttgctcgcttcgcgcgccggcacaaaaagctgttcgacaagcacatcgtcgatccgaacgcacacaagcaataa

SEQ ID NO: 348375 - DNA, 300 bp, Pseudomonas aeruginosa
atgagcaagcatacgccggggccttggttcgtcaatggccgtgagagctacaccaaatacatcgaggcgcgcatcggtggcggtttgcttcaggaagtcgcagcctgcggacctaccgagcagcaagagcaacaggaagcaaacgcccgcctgatcgctgcggcgccggacctgctggaggccctgatagccatggagcgcgagaagtccgactacatgacccggaacaatcttggcgaccctgcgatagagacaacgaacaagttagcgcgcgccgcaatcgccaaggccaccgcctaa

SEQ ID NO: 348376 - DNA, 1119 bp, Pseudomonas aeruginosa
atgactgcaggccagaggcccccacagaggaaaacctttcctccagatagcaaaaaccccgcattcggcggggttcttactcagggtacagaggcacgaccatttctggaaaacccctgtttcgtgatcaaatttaaggcaccgcaccaaggaaggcaagcctcatttatgcaaaatcacctatcttctgcccggctcgccacggtcgaggctttctttcagacccgcaccaaggccgacttgatcggctgctactcctggtgccaagcagtcggggctagcctcctgccaatccttggggactacgaggtttcccttcgaaacgcacttcaccgagggctgtcgcagtattacggcaccatcgatagcttcgagtggatgttcaagaccaagccgaatccagcaaaggtatctaacccgaacgcgcccgatttggcctggcacagtatgacaccgagaatgcagggtgacatcgaggatgttgccgataaggttcgtcgaaggagtcgcggccgcgcacccaccccagacgatattgtctctcagctttcattcgggttctgggagcatctgattgcaggcttggtgcacaaggcgcatccagctgacatgcagaggcgcgttctgagcctcgctttcccccagggtcctgctatgggtaccaccgcccatggtgacagggcattcgtggatcaattgaaggggctcctctaccagttgcgcgacatccgcaaccgcattggccaccacgaccaattgtggaaaaccgctgagttcgatctccacggcaacagagggtttattcctcgtcggccacggcacacactgataagcctgcataagttcttagatcgcatttcctggatggcgagctggattgatcaagaaatctcagaccacatgcgaaactcagatcactggtggactctacaggcactgctaagccagcaagccctggccgtttacaggaagaacgagggaaaggccggctctttcgaagcagttctccgattagctccgtgtcatgatgtgccagcctggccggacatgagttcaggcatcccggagagggctctccaactgcagcatcgcgtgatcgttaggcagttccacttctga

SEQ ID NO: 348377 - DNA, 390 bp, Pseudomonas aeruginosa
gtgaattttccccttatctcggcatggccccaacagaccctgatcgtcaaacaggacgagttgacccagctgaaccgcgacaatgcgcgcctgctcgccgaggcgcgccagttgcaaaaagagcagcatgcgcagcaacagttactggcgcagaaggctcagtccttggaggacgcccagagtgcgttaatcggcgctgagcgcgcgaatgaagccctggaacagcgctgcggcacattgcaggaggaggtgttccgactgagcgaaacctcagcgatccaggcgcagcaagtgcagagcctacaggagcgcttggccgaagccatcacacacctgaagctactcgggcatacgccgctcactaacagcggtaatgaaataggtacatga

SEQ ID NO: 348378 - DNA, 162 bp, Pseudomonas aeruginosa
atgactcaactcaatccgtttatccgcggctatagcaacttcaggatcgaacgcaccctgcagataacctacgaagatgattgcgccccctgctgggggcatgccgagataaggcaaaaattaggacattcgttctgtaacctgctgtatctaaaggattaa

SEQ ID NO: 348379 - DNA, 642 bp, Pseudomonas aeruginosa
atggtggatctcctgtgttgcgggcacgatggagaacaccgattccttgatgggagggtgttcccatcaagagggggaggaggcgctccagcagaagctgctgtttccgcgctgccgagcgctgtgcggacttgggggaggatcgacacgctggacggtgctgcagcctttcggatccaagctgcatgggggcatgtcgctgacaacgtcagcagatcacgcgttcatcatcgaagcggggggcgaaagtgtcaaggtcaagcaggagggggagcggatgcagcgggcggagagcgagggcggaagagcgcggctggtagaaaccctgtcaaaggtttccccagccgtgtctggaaggggagtcaagtgagccacctgtggttgaatcgtcgatccctgggcattgatcgtctcgatcccatcacccggccattatcgtggcttggccagcaaacagtaggcacgcatccgcgtacaaagggagccctgcgtatcaccggcgggccaccggcagggagaaggatcccgatgggtagcctgatagtcctggagcaggagcatcaggctacccatggagaggggaaaaggaggggccgtaacaccagtacgacccttaaatcgagggtacaccgaacctcttga

SEQ ID NO: 348380 - DNA, 819 bp, Pseudomonas aeruginosa
atggatctgcctgcaatcgctaggctttacggaataataaacaaatattgcaatctaaatgaattgtttagaagtgatcgcaagataattattgaagatcaaaagctaatagatcttcttggtggtaaatttattttagatgacgagaatgagaaatacaaccatagcttctttgaagtctctatggccggcaggtttagcaaggttttttcacacaatgcaaaaatcgacctgtcgactgagtgtgatgtagtcataagcgctcaagggcttgcgatcgaatgtaaatatttacacagcgaaaagaaatttcggaatgaattttcagatggcgcttctcaattaaataaacgcattcaggcgggacaagcagaaaccggaataatagctatagatatttcaaatcttgtcgacagacaaagagtcttcgatttcagtcaatatctattttctctatttatcaggaactacgagttgcttgtagagagtagatgctcgctctcacatggaattgctgcggatggagtatcaaaatcaattcttaaagatcagaatttcataggccttataaaaacatatatcggccatgaactggaaatggttttccatagaaactttaagaaatctgagcgcgacaaattaagcgaggcgatagttggtgtcttttaccaagccaacttagatctatgctttgaatataaagaatccatccatcctgtcccactaagaagcgcatgttattttgttaacatggaactcgaggattccgcctacaacagcactcaagatcttttcaggtccatggctgtcggaatctag

SEQ ID NO: 348381 - DNA, 882 bp, Pseudomonas aeruginosa
atgtcgagtgccaacctgatcggtagccatctggcgattggcgtggtggcggtcctgtcctgtggcggcctgctccaggcgaaggagttcgagaccgccaacccggacctgagcctgcgctgggacaacacgctgcgttacaacctgggtttccgcgccgagggccgggagcgcgcgctggccaacaacgccacctatgacgagtccgactccaggttcgaccgtggtgacgtggtgaccaaccgcctcgacctgatgagcgagttcgagctggcctaccagcagtaccacggcttccgtgtcagcgccgctgcctggtacgaccaggcctacacggatggcgaggtgaagaccgcccagggcaatgtctactatcccggggcttttccggggccgagcacgccgagctaccggggtggtgactactccggcttcaccaagcgctaccaccggggacccagcggagaactgctggacgccttcgccttcacccgtctcaatctcggcgatgtgccggtcagcctgcgcgccggccgacataccgtctactgggggagcggcttgctgattgccggccacgccgtttcctactcgcaggccccgctcgatgggcgcaaggcggtgagcaaccccggtaccgaaacccgcgagatattcctgccgctgacccagctttcggcccaggcccaggttaccgacaggttgtctctcgccgcccagtatttcttcgagtgggacaccacccgtgcgccggaaggcggcacctacctggcctcggccgacgtggccctggaagggccgaaccaactgccgatcgcgcccggtttcacacgccccctgatcgacccgctgaccccgggcgaccgtggcaactgggggtga

SEQ ID NO: 348382 - DNA, 1302 bp, Pseudomonas aeruginosa
atggatcgccaattaaacgtctggatcaaccacacactgataggcaccttatccgaacagaatgggctttggagcttcgcctacacccagcaatggctacgccaaccgggtgcctaccctctttgccctaacctgcccttgcagaatgaaccgcacatggatggcgcctcggtgcgtccagtacagtggtacttcgacaacctgctgcctgaggaaggccagcgacagttgatcgctcgagctgcgcatacatctgtagccgacgcctttggcttgcttacccaattcggagctgaatcagcgggctctatcaccctccttccaccagagcagcaacctacaccaggtgaacttcgggcactacctgatgaagtactttcgcaacgcattcgtgatatgccccgcgtatctttagccgagcaagctgccaagcgcatgtcgctggcaggcgctcagcacaagatggccatcatcttagacggagagcgactgctagagcccaccggtaacatgccctcgacccatatccttaagcctgaccacccagacttgacctacgcacattcggtgattaacgagtggtttgtcatgactctggcaaaaagaatgggccttcaagttccagaagtcactcgcaggtatgttccacaaccggtctacctcatctcccgtttcgataggcggcaaacaccaagaggctgggagcgtctacattgcattgatgcctgccaattgcttggactcgaccgagcctacaagtacgatcaaggcagcgtgcaacgcctgctggatatcagcaagatgtgcaacattccggcaaaagctcgcctcgagctattccgctggctagtgttcaacatcttggtgggcaacggcgacgcccatctgaaaaacctcagcttcttggtcacggccaagggagtaaacctttcccccttttacgacctgctgagtaccgcggtgtataccactcgtgcgtttgaccagaatggctggccagaacaggtcagaatggcctggccagtaggagaagaggatcggattacgcacctcaatcgcaaaaatctcgttgccgctgccgaggccatgggtataaaagccagcgcagcactagcatcaatcgacaaaatgacatcggggatccaggccactgcgaatcagttgcttgaacaagtcgtccgcgacaatcaggaactggcgcaaaagaagccaaatctccaagcaactcttgcaggtgaaacgcgttgcctgagaactatcgtcagcatcgtgattgccgaaatgtgcaaacagctttcctga

SEQ ID NO: 348383 - DNA, 255 bp, Pseudomonas aeruginosa
atgagcacgaccaaactgcgtctcggcccactgccgaaaaccgagaacgtgaagctgaccttcacctgcccggccagcctgaaggctggcctcgagcgctacgcggcgctgcactcaaagacctacggtgaagaggtcgacgccctgacgctcatcccgcatatgctggaggccttcatggcgagggatcgggtgttcaaaagaactaacaagcctgcactatctgctgcgccacaaaccaccgatccacgctga

SEQ ID NO: 348384 - DNA, 279 bp, Pseudomonas aeruginosa
atgatcgtaagcttccggcacaaaggtctacgcattttctttgaatcgggctcaaccaaaggcatccgggccgaccacgcaaagcgcctgggccgaatgctgagttttatggatagagccaatgaacccgccgacctcgacatccccggttggcggctacatcccctcaaaggggaactggaagagttctggtcactcaccgtcaatggaaactggcgagtgatctttcgattcgtgggtagcgacatcgagctcgtcgactaccttgactaccactaa

SEQ ID NO: 348385 - DNA, 1167 bp, Pseudomonas aeruginosa
atggccttctctgaacgcatctcccgcctgaaaagctccttgatccgcgaaatccttgccgcggcgcagcgtccggaggtgatgtcgttcgccggcgggctgccggccgagccgatgctgccgaaggtgcagtgggagcagatgccggcctccatgggccagtacggcatgagcgaaggcgagcctgccctgcgcgaagccatcgccgccgaagcgcgcgccctcggcgtcccctgcgaggcgagccaggtgctgatcgtcagcggttcgcagcagaccctcgacctggccagcaagctgttcatcgatccgggcaccgaggtgctgctcgaggcgccgacctacctcgccgcgctacaggccttccaattgttcggcgccgattgcgtgaccgtgccgctgggtgccgagggccccgacctggttgccctgcggcagcgcctggagcgacacaagccggccttcgcctacctgatcccgactttccagaatccgtccggcgtgcgctacagcgaggaacgccgcgacgcggtggcggcgctgctagacgaattcggcgtgaccctgatcgaagacgaaccctatcgcgaactggtgttcgacgagggccgcgcaaccccgctggtcagccgcctgcgcaagtccagctggatctataccggcacggtgtcgaagaccctgctgccgggcctgcgcgtcggtttcctgatcgccaccccggacctgttcccccacctgctgcggctgaaacagtcggccgacctgcataccaaccgggtagggcagtggcaggcgctgcaatggttcggcagcgaggcctaccgccagcacctggccgaactgcgcgagttctaccgggtccgccgcgacgccatgcaggaggcgctgctggagcacttcggtgagctggccgaatggaatatcccggagggcgggctgttcttctggctgaccctcaggcagccgctggatacccgcaccctgctccagccggcgctggccgccgatgtcgcattcatgcccggcgaacctttcttcgccgagccggagcagaacctcgggcgtctgcggctgaacttcagccacgtcgccccggagcgcctgcacgaaggcctgcggcgcctggccaaggtcgtccgcgacgcccaggccgccgaagcggcctga

SEQ ID NO: 348386 - DNA, 1542 bp, Pseudomonas aeruginosa
atggctcagcaggcgtctcagatcaggctgctacagctagaaatatccctgctcaccgaagcccgtgatgccctgaaaaagcgggtcgaagcgctcagtaaatacacccacatcgaagatgtcgaagccgcagctaacgccatcatgattgatgcgcagcacctgctggaacgagccaagtcagacgctactagtttgcgcctagaagccgagcaggcggccaggagcacagtcgaacaggcgaatctcaagtccagaaatacgctggaacaggcagagcgtcggatcgaagcggccggacaagaggcagagcggattatcacaaccgctcacctgagagcggaggaaatcgccggtgatgcttatgccgctatgaaccgcgccaaagagttcgccaataccgcccaagcgatgaaaaacatcatcgagggctatggtgatgcctacatcgtacccacctacaacctgctcgatgacctggctgacgagttcagttttaccgaggcagggcagaagctcaaagacgcccgcgacacctgccgcatgatggtcaagaatggactggcggccacctgtgactatgtagaggctactcgcaaggaaacagccattcgctttgtcgtagacgcgttcaacggcaaggtcgattccattctctctcggagcaagagcgataaccacggcaagctagagcaggaaatccgcgacgccttctcgctggtcaactataacggcgcagccttccgcagtgctcgtattaccgacagctacttagcagcacgtttggaagagttgaagtgggcggtaaccgctaaagctctgaaagacgaggagagggaagagcaacgccggctacgtgagcagattcgagaggaagagaaagctcgccgggaatacgagcgtgccatcaaggatgccgccaaggaagaagatacgctgcgcaaagccatggagaaggtgcagaagcaggttgaggctgccaatgaggtccagcgtgccgagttcgaggccaagttgatagagcttgaagcgaaactgcgccaggccgaggaaaagaacaagcgagcgctctccatggcgcagcagacccgctccgggcatgtgtatgtaatttccaatatcggctcgttcggcgaggaagtattcaagatcggcatgacgcgtcgcctcgagcctcaggatcgcatccgcgagctgggtgacgccagtgtgccgtttgagttcgacgtacatgccatgatcttcagtgacgatgcccccggtctagagaaaagcctgcaccggcatttcctgcggcagcaggttaacaaggtcaacccgcgcaaggagtttttccgtctggggcttgaggatattcggcaggaattggataccttgggggttgaaacacattggacaatgactgccagggctcacgaataccgggaaagcctgcgtattgagcagcagatcttggaaaagccggaagttgagcgcgagtggacaaggtaccaactggaagtcgaggcggcggatgaagaagaatcagaggccatcagctaa

SEQ ID NO: 348387 - DNA, 357 bp, Pseudomonas aeruginosa
atgaacatcaacatcacagctatcgagcgttatctcaaactctttgggttgccgatgtttctcgcgctcatggggctgctgggaatggggttgttctccggtgccgcccctgccggcagtattgcagctgctgtgctggccaacgtgggggtggtgctgtttccggctagtgctgcgttgaccattgccgcttccctctggctggcttggaactgctggctgctctatcgctgggaaaacggcgacctacagggtggttgtgatcgctgcggtggggttatgtcccataaagacgggcgctacggcgcttatagtgtttgcaaaatgtgcggcgggaagcgtgagggatggcattaa

SEQ ID NO: 348388 - DNA, 297 bp, Pseudomonas aeruginosa
atgagcaagggcgtcataacctgccttccgccgcacgatggccatccaggcatggagataatctgggcggcggactgcaggcaggcattcaaccaaggcgtgaagctggcccagacctggctcgacaacgcccggagcggctggctctgggcgatcatgatcgccgaacgtgacttgctgccctgcgctatcgaaagacgagctttcgaggtgggattcctgagccgcatccaccagcgaatctattcgtacaagtgcagcgatcagcagtgtagaactctatccctgacgctgtag

SEQ ID NO: 348389 - DNA, 270 bp, Pseudomonas aeruginosa
atggctgagttcgaaacctgcgttgtaccctttccgcggcggccaagcccgctgcacgaatctgagcgttctacactaccctccgaagccgccgctgaactacgcgcgaccatgctcggcaatctgctggatcaaatggccgagccggatggcctgcaaccggagagcctgcgtctgcggattgcggcctactcggccctagacctgcttgatgagatggttgtgctctaccgccgtgcgctgtccgaagcgcgaggaggtatcagatga

SEQ ID NO: 348390 - DNA, 648 bp, Pseudomonas aeruginosa
atgatgagcaagcgaccttgcgtgattttggtggccgacaacatgatggtcggtgcggtcaaaggcttcttcagcaacccgcattggcacatgaaactgggctgctcgccgtttgacttcgatccaagaaccgacttgatttgtgactctctcgggaatgaccaaggtgtctacacccgagcgcatgaactgcttcgcccgtacatcgcgtcgcatgacaaggccatcgtgatcttggattgcgattggaacggtgagtaccggaagcagcgggctgagattaccgcgcacattgcaggcaatctcgcggtgaacggctgggagcacggcaagcacaaagtgatcgccatcgatcctgaactggagaactggctctggcagggtgacaaccctaacgttgcaaacgcccttgggtacaaaggcaatggatccctgcgcgaattgctgaaacaacatggtttctggcctgatggggccgccaaaccgacggacccgaaagcggcagcgatctggctgctccggcagactcgacagccattgtcttcgtcagtctacgagcggctctgcgccagggttggccttggcggttgtgttgatccggcgtttctggacctcaggaacgcattgcttgagtggttccccgtatga

SEQ ID NO: 348391 - DNA, 1419 bp, Pseudomonas aeruginosa
atgagcttcgcaagctttaagaatgcacgaattgttcggtctgggtggcttgacgaaggtggtcgtcggctggactgcaacccatatatgtcaggcgcactggaggcgcgcgacacactgaagcagctcaaggtacgcaaggatgtgctgagcgcattgactaaagggcatgcgggcggcatctacaacggcccagtgttcgcacgcatttgggttgatgacccgcgtcacggtgttccattcctcagcaacagcgacatgctcaatgcggatctcgctaatttgccactgctgcagcggcgttatgcggagtccaagaagctggctcatctggagctaagccccagtaccaccttgatcacttgctcggggacgattgggcggatgacctatgtacgccctgacatggcaggtatgtggtcttcacagcacatcatgaaggtcgtaccagacccagagcgtgttcctgcgggctacctgtacgcctacttgtcgagccgctatggcgtgcctctggtggtctcgggaacctatggcgcgatcatccagcacattgagccggagcatattgccgatttgcctgtcccccggtttgatgcgcgaacagaagccgccattgctgaaaaagttgatactgctgctcatgcgcgttctcgtgccgtggaattgctgcaagaggcccgcaatcgcctgcatatgaggctaggcctgagggcgccgacaccggtttccgcgcttaccaagccagacgttacagcagtatccagcgataccttcagggatcgcggagatgggtactactacagtgctagaaacgcagagtctcgtgctgcatttgatgcagctggcgggaaccgcaggctgggcgatgtggcagaggtatttatccccggtatcttcaagcggctttatgcatccgatccccagttcggaagcccatacatcaccggtggcgatgtgtttgagttggctcccgtttcagacaagttcttgatgaagcgcgtcgcagcggaataccgcctgctgcttaagaagggaatgatcgttgtgcaggaggccggtcagctgggaggcctcattgggcgctcggtgatggtcggcagctatctcgatgggttctcctgcagcaacaacatgattcggatcgtccctgaagacgacatcgacggtggctacctgttcacgctgctggctagcgagcatggagttcgattgctctcgcgagaagcagctgggtccagcattcctcacacagatgagcaacgcgtcaagcgagttcaggtgccctggccctcaaggaaagacagggaagacattggtgcgccagccattcgagcccgtgagttgagggatcaagcgtgtgtctgggagcaagaggccagagacatgctcgaagcgaaaattcagggaggggagtga

SEQ ID NO: 348392 - DNA, 4176 bp, Pseudomonas aeruginosa
atggcgaaagtgatcccagtaggccagccggtcaacgatgcagagcgcagcgccatcgcttacctgcgggatcgcttgccagacagtttcgttttgcttcacaacttcgagatcgagcggcagggtgagcgcttcgagatcgacatcgcgttgctgacgccgcacgccctgtacctgatcgacgtgaagggcacgcgcggcaccatcgatgtgtacggcaacaagtggtaccccgaggggcgcgcgccctatccgtcgccgctgggcaagctgcgcggccacgcccgcaccgtgaagggcttggtgacccaggccaatccggggcgacatgagttggacgacatctatgtggatgccgccatcctgctcaccgcgcccgatgcacatctgaacgaccgcgagcagcttgatgcggatcgggtggtgaagctgaaggacgcggagcgctacttcaaagatgccacacgcattccggcgcgcttctccaagaatatcctgcagcagcaagggttgatcctgcatgccttgaaggtggtgaagccagcctccgccgtgcagcgcttcgggcactggcaagtgaaagaaaagctcggggcggcggaggcctacacggagttccgtgccgagaacgctttcgcgggtggcacggcccgcctgcgggtgtaccaggctgacccctaccagcctgaagacgtgcgccaggcgcaggtcaaccgcattgccaatgcctaccgggcgctgtccaagctgccgttgcatcccaacatcgtggcggcgcgggattttttcccaaccgatgacgacaaatccttcatcctgatcctggacgatgcaccgggccaggcgttgacggtgcacatggcccggccccagttggcactgacgctggaccagaagtggcgcgtggccaaagacctgctggcggccttggcccatgcccaccatcacggtgtggtgcaccgcaacctgacgccgggcgcgattttgatcggccaggacggcaccacccgcatcaccgacttcgatttcgccaagcctggtgtggaccgcagcctgacgattgccacggacattgttgatctggtggaaaaagcatacgtggcccccgaggcgttccgggagccgggtgctgcatcgagcgcatcggacatcttctccgcaggggtcatcctctacgaactcttcaccggagagcgcccatttgcgggtgagccaaccacggtgtgggatcgggccggcgagttcctcaacaagccctcggcactgcggccggagctgaacgaggcttttgatgcttggctgcagaccctgtgcgcttttgacgagcaccagcggctaaccgcatctgccgcgctggccgctttgaatgctttgctgcaacctgtggcgcaagcagccagccaagctgcagaggcaccgaagcccgaggtcgttgaagtcgatgatgcccagaccgactacctgaacttggcggcaggccatcgcctgacccacaagttcatcgtggaaaagaagctcgggcgcggcagcttcggtgtggtctacaaggtgatcgacaccttgggtgatgttgctcgcacggtgaagctcatcgtcagtgaccggcactcgaccctggagcgcctgaagaaggagtaccgccacctggtgcacatccccgagcacccacacgtggtgcgtgtgctggatgcggacgtgattccggggcgcgacattcccttcctggtgtttgagtacgcggagggggccgatgtcggcgacatgatctatgaccgcctgctgtctcccgaggacgcgctggaactaggcaagcaagtgattgagggcctggtgcatttgcatgcgcagggcttccatcattgcgacatcaagccgcgcaatctgctgtggacgcagaagggcgccaagatcatcgacttcaacgtgtcggtgcgggccgatgacaaggagtcgcgcggcgggggctcgcggcgctatctgccgccggactttgacccggaggtcattccgcacaacggcgagcgcgcggatcgcgatctgtatgcactgggcctgactttgtacgaggcattgacggcacgctacccgtgggacacgacggagccgcccatcaacaagcctgcgcccgatccgcgcgagctgtcaggctttgccgacttggcgccagagctggtgagcgtggtgctcaaggccattgcgccgcgcagggctgagcgcttccacgcggctgtggatttccgcgatgcgttggcagaagttcgccatgcacgtcgagtgcagacggtcagcctggctgccatggtgacggctgtgagcagcgggcagcctgcctcggctgaatcggcacccaactccaacgcgttcgtatcacacctgctgacgctctacagccaaagccgccgcagcaatgccggtacgcggggcatggacgcgcttgggttctctgcctatgtggacaccgcgctggaccgagccttgttgcccgctgtgttgcagggggagttccggctcgtgctgatttcgggcaacgccggtgacggcaagaccgccttcttgcaacggcttgagaaagaggttgaagcccgaggcggggccgtcaatcgtgatttggcaaacggcagcgagctgagcctggagggcaagcgctacctgatcaactacgacggcagccaagacgagggcaacaaggacaacaaccaggtgttgctggactttttggccccgttcaagggcaacaacgcagcgtcctggaggccccaagaaacgcgactgattgcgatcaacgagggccgtttggtggacttcctggccgcacatgaacgagatttcccggcaatcacggccctggttcggcgcgcctttgccaccggggaagcggagtctggcgtggccgtggtgaacctaaacctgcgcagtgttgtggccgatgacgccagcaatactgagggcggatcgattctggagcgcacgctgcgaagcattgtccgccctgagaactgggccgcttgtgagcagtgtgacttgaaagacagttgctacgccttgcacaacgcgcgcagcttccaggatcaaatcgccgggccgcgcttgctggaacgcctcaagacgctctacacgatggcgcacttgcgcgggcgcttgcacatcacgatgcgcgacctgcgttcagcgctgtcgttcatgctgattggtaaccgcgactgcagcgagattcatgcgctgtacgcatcgggcaagcacgatgacgtggcacggagcttctacttcaacagctggatgggtggcgggcaagccacctcagaccgactgttgacgctgctgagcgacctggatgtaggcaagcaggaagacccccgcttcgaccgagggctggactttgttcagccggatgaccgggccctgttccgcttcgagcgccgagggcagtttgacttcgaggtgttgaagcgcctgttcggcgacctgccgcgtggcgtttctgactcgtcagtccgccaacgggcacgcaagcatcgcgagtatgtggccatggcacgtcgcaagcatttctttgagcggcgtgacgccagctgggaaaagatgctgccctatcgctctgccaagcgcatggtggagattgtccgcggcgaaatgcccatcgacgaactcacgagcgaaatcctgcatgccatcaaccgaggggaggggttgcagcgcccggagcggctgggagccagcctggccttgcagttgcggcaggttgaacacggcacggtccgcagctatcggcttttccccgtggagggcttcgggctggaggtacaggactttgcggccaaggcacgtttcgtcgagcacctgccgaccggtctgctgctgaagtaccaaggccagggcgcaggggccatcagcagcgagctgatcatcaacctcgacgtgttcgagatgctggtgcgcctgaatgaaggctatcggcctagcgttgaagagatgcagggtttttatctctgcctcggcgtgttcaagaacagcctcaacgcgcagccttaccgtgaaattctgctgaccaccacggggcacgacttctaccgtttggcccgccatgacgatggccgcgtggagatgcgtttgctgcatgggccggtgaggagcgcacgccaagaagaagccgcagagagcggcgccagggggaactga

SEQ ID NO: 348393 - DNA, 5586 bp, Pseudomonas aeruginosa
atgagtcagggactgcgtgaactcaccaatcaagaactgaacgccgcactggaatcagtcctgctcccaaagctatctcagctgcttgcagcccgcgagctggggcattgtatgcgggtcacggacttggatcgggagctgatgattcgcttggcaggtggcctgcgggctgccgtgccgtcagcgaacgtcgtggtgctggcggacgaaagcttgcgagcaatggcaccggacatggctgtcagcagtaccaagctggttgagttgcggaacccgctgccaaacgatgagcttcggcccccgttgctggtgttcgtgccgaatgacctgcgcgcctcagcggaagattcttttggggtcgcgacgttcgaggaggtctcgatcgatggcgcctatgcggagctgaacgggctgttgctcgctcaagttcctgccaacttgcgtgtggccgtagaggcctgcttgagcgaattgcggcggcgtgacgcccggtggcggtatgccgatgacgctgccgtggcacgttacctgctcacttgtcaggtcaatgagtttgatccggacgcgatgggggccgcgctgtttgagcttgctctggtaccggactttgagctgttccagcaggctgagcgcgcgcctgcgcgggtggcgcgcaacctagagtgcgttgagcgcgtgacatggtcgaccaagacggagcgcgttcgcgcacttgagctgggcttgctggaccccgtgttctgcaagcagcttggcgagttcttctcccgtatcggcgtctccaatcccaaggagtggacgcaagccatcgttcgtgaccgtgtgaattggccatttgcgttcaacaaatggttgttcgaggacggtggagtcaacccggacgccatctacatcggcgatgtcgcgctgcccgacttgcccgtggtgaaggatgacaacgaagacccccggttggccgagttgattgggcacaaggtgctgcccatctcaaaaaccgggctcaagaagttcagtgtctctttccgtgttgacccggtgccttccaaggtcgaggggctgtcacggtttgtggctgaggttgtgtcgcgtgacaacgggccgactggcttgcgtaggcgtaaagccgcttggaccaagggaaccgactccggtgcgattgctttctcttcgattggcaagatcgactgggaggaaggctggcactacgtgcgggtgtatgcagagaccgaggacggtgatcgcattcctctcgcggacggagagggcaatcccatccggttcaacactgatgcagcggagacgcacgccagccccaacgaaagtgacctcttttacgttgtcactgacgacgaggtcgaggtcgaaccaccacagcgtgccgtcccgcgcgaggcgagcttgatgcatgcgttgctgcgtgcacgttttgcggctgtgactcaggatcgtgatcctggaaccgttactgtgaccggctgcggctgggtggaacgcagtagcaaggccacagccagcggcgagaccttggagattcgactgggcaaggagggtaaggcgaacgtcttggtgtccagccttttggcgaacctggagcgggcgtttcttgaagaccccgaaggccttaaccgcttgagactttcgatcagcgcttcgggtgttgccacgcgatccactacgacgttcaagtggccagtctcggacgaggttactcggttccgagaggcgcgggagcagttctttgccgccgtactgaagggagaacaacggctgatcatgcaggccagcgatcttctgtcccttcaggaaccggcacagaactatgcctctgcctacctggcttggatcgacgcagcgcttgcacgtgccagctctaccgagacgaccgttgcgcggcaagccatggatgagcttcgctacgcgctcaccattgattcagtggccctcgtgttggaagactaccaaggcaggcgacgagatgctgttctgctggggccaacgcatccgttgcgtgccaactggcatgtcgcgtggagccatctcggacaggcctggatggagcagagccggtctagcaacaaggagtttgtggttcctacacgtgacgcggtgatcaagcagctggcgccagcggcatttcctccggtcgttcctttcggtgaggagctggggcggacagcgctggctgtggacaacatcaacccgttctggtccttgtacgcagcgaccgatgagaaggaccctcgtggcctgattggggaggtttgtgctgccttgggcttgccagagccagccatcggtggtgcaaccatcgatagtgcttatcttgccgcgcgcgtgcagcgttatctggtccagcacccgtatgtggagacgctgacgatcaacgccttcaacgcggggcgcgcaggcgcaatggccgaggtgctgatggcactccagcgacatcctgatttcgccgatctgcgttacgacatccggctcttcgtgcttgaccctgcagcaccttcgaccggggaagcgttgctggaactcttgtcgccagattcgggaaccagcgccaaggaggcagacgccttttcgacgccgaccaacagtcatttgcaccccaagctgcgactggccattcgtgcgatcaaggaattccgtgaggatccggatttgcatgcggcgcacctgtccttcttgtttgacttgttccctgcagaggaaatccgagcagttgatgttcaggacagtgatgactcttcgtttgtccatggactggttcagcccttcgaagtggactatctggaagacgagcagtccatcacctggctgcgttgtccgcttcatggcgccgcacagccgctggagggtgcggaggcgttatccgacctcatgggtggcgtttcccgtgctgtctcggtcgcagtggcgacggttgctcgcagtcaatatctgccgcacgcgcgtcctgttgttgcgttgagcctgtccgcagatgagcgcgccatgctccatcaggttcacgaggtcagcgattgggtgctcacgattgatcggaacttggggatcgagttcttcgaccatcgccggcatgccacacggccagactacctgatcgaccactcgcccgacatggcgaacgcgatgagccatcgtttggcgatcacgtcgcgatccgttgctgagcttgagtctttgctgatccccatcttggatgagtacggactgcccaataccggccgacatgccttggtgatgctggatcagcttcgatcgttgtccggccggttggccttgaagctactgtcctcttcatcccagcgggccgaggcgatgggcttggcgctctcgcgtttgttcctcgaacaccaaggcgttttccagaaccaagtcgtcgtgccgttggacgcgcacttggagttgtacaaggcgttgaagcaaagcgcggaggaaatgggtgatgaagtcagcttccgacggactgaccttgccctgttcgacctcgacccagcaagccgcgtggtgacgtgtcggctggtcgaagtgaagtgctacagccaagtgggcgatgtggctgcctacgcgcagttgaaggcgtccatcgctgatcagatcgctcagtccgagcacgtcttggcctatcacttcgaccccaggatggctgacgtagatcggcctgaccgccccattaagaatcgcgatttggctgcactgctgggcttctacctggatcgatcagagcgctatggcgtggtcttgccagaagctgccgaagaggcgcactacttcctgcgacgccttgatgaacgcccctatacgctgaagttcacgcgaagcgccgtggtgtttgacttcagcaagcccggtactgaaccagccgagcatgaaaacggcatcgagttctatcgaattggtagcgatctgatccggcagttggtggagtctgccgtgatggacaccgagacgattgccagcgtccagttcgctcggtccggcgacgcggcacgagaggtgacccaggaactgctccgtcgcagggaattagcacctgccgttcccacattcgagactgcagctttcctcagccctccgcgtgatcgaacgctcgcatgggacgacagcccgcgagttacctacaggcagcccgaactggttcccagtgtgcagacacgagagcttgaactcccttccgcactgcaggctgctctccagccgattgcaaccgttcagcctccaattgatgccgttgaaccagcaccatctccggcggatgagccggctctgacttcgatcaaggcacaaacatctgtgtcagtccagactcgagaaatggtctcttctgagggcaactctgctgcgcgatcccagtcgcaagaaagcgcgagtcctgatggccgcgttgccttcgacattatgcttggggctaccggagcaacaccacagtacggcctgcttggcgaggtgtcggggcgcaaggtggcgctagacctcaatcagacccacaccatcagcctgttcggtgtacagggcggcggaaagagctataccttgggctgcgttgcagagatggcctcgttggcgatcccaggtatcaattgcttgcccgaaccgctgtccacagtgatcttccactacagcccgaccatggactataagcccgagttcacgtcgatggtgggggcaaacagcgtggaagaccaggttcgcgcgttgaaagaggtctatggcgcagagccgaaggcgctcgcagatgtcttgctcctcgtgccagcagacaagatcgaagagcggcaggccgagtacccggatatcgaggtgcagcctttgcagttctctgcatcggagttgaaggcgtcgcactggaaattcttgatgggtgctgtgggcaatcaggccacctatatccgccagatcatgcgcatcatgaaggcgatgcgcgatgacattacccttgagggcttgcgcgcgggaattgatgcgtcgtcggttcccgatcacctcaaggaactggctcggatgcgcctcgacttggccgccgagtacatcaacgacgctacctcactcaccgatgtagtgaagcctggccggctaatcatcgtagacctgcgggacgagttcatcgagaaggacgaggctctcgggctgttcgttgtgctcctgcagttgtttgccgacgcgcggatcgatgggcgcagcttcaacaagctggtggtcttcgacgaagctcacaagtacatcgaaagccctgaccttgtggctgggctgatcgaggtggtccgagaaatgcgccacaagggcgtcagcattttggtagcgagccaagacccgccgtctgtcccagtgagtctgattgagttatccagccagatcatcatgcataagttcaactcgccagcttggctgaagcatatacagaaagccaatgctgcattgggcaacctcacaccagaacgcatggcccagctcaaggcaggggaggcctatgtctggtcgagtaaggctactgatgattcgttttccaggggggcagtgaagctcaggtgtcgtccacgcattacccaacatggtggggcaacaagagtcgcagttgttgattcttaa

SEQ ID NO: 348394 - DNA, 2664 bp, Pseudomonas aeruginosa; identical to SEQ ID NO: 343602

SEQ ID NO: 348395 - DNA, 855 bp, Pseudomonas aeruginosa
atgagagtatcagaatactttgggcttaacagatcgcaagcttatttggattttgttgatgtccctcttgatacagatttggctgtttttttagagcccggggctattaaagctttacaatcgccttgggggaatgagctttcttctctcctacagactttttttgaaacagtcctgcggctaatacgatctggcgatcacgtaagagcccaggctttgctgtcttcactaaatgaaagaaatgagtttcacctggggtattcgacaggtgaatcaagagggcatgggtttggtagtggttcggctaaaagtgtatggaacgaactaaccaaaagtcaggcagctattacggggctcttaagagacttggaagatactgcgctgcttattcccggtattggcgctgatatgatctccgatgctgtatgcaacatacttcgtggaccacttattcgttatacacaggaaatgtgcgtttactatggaattcccttgactgctgatattccatcagggccgatgtggaatcctcaacaggaacggtgggaacaagcttttcttcctttgcctatgactgattttggtaaagtaatattgattcctaaagttctagttaggtttaggttgagctataattttgatgagtattataggcattatatgctgccgcagatgcagcaggagcatctaaatgcgcgatcacccctagtagaagtcctaaagagtggggaaatgcgagtaacgaaaaaggtcttaatggaaaagtatggaagcgataagcttgccgtagtggaacaaactaaaattaggccagatgtgttgcaggggtatagacagggcggttgcaggagctga

SEQ ID NO: 348396 - DNA, 432 bp, Pseudomonas aeruginosa
atgctgatcaaatgcccaagctgttcgaaatcaaattcactaaatctggacacccaagttaattgtgggcattgcaaagaacctctgactggccacacctacggaaagatcaaaaaaacgctgggtgctgtagttttagcgtttggagttggcgcgatcggcaccaaagaactgctcgactataaaggccatatggatcgctattccatttcgaatgagtatgcaattatcgagatgtgtcttaattcgtcgcagcagcctttggccagctacgcatactcaggcaaaagagatgactgcatatgtgcgctgggcaaggtgcagaagtcttttaaagtcgtggacttcaacaaaaatacggataaatacctagctgcctttgagtcggcagccaggcagtgcaaactgaccaggacgtccttgtcctactaa

SEQ ID NO: 348397 - DNA, 246 bp, Pseudomonas aeruginosa
gtgcggcagccgtcgcgttcgatcatgccgggttgggtctgggcgaatgcgcaggcaggaggggcgaggattgataccggtgaggtctggacgctgaccgggtacgcccatctacgcgtgtcaccggccaaggtgctcaagcacgccaagctccgtacgcgtaaccccgcggatataaggatctacggctttccacaaagcctgaaatccgcatcggcgtacttccgtaaatccgtaaaagcgtaa

SEQ ID NO: 348398 - DNA, 528 bp, Pseudomonas aeruginosa
atgacgtttggtgcttgcggcgtgcggtggccactggcgctgctcgctggcagcctggctgccctgggttgggcggcgctcacaacgtcgccaccgcggctggtctacaacgcgtccgacagcgtgcccgttggctggtaccgcatttcgccagccaactcgttggcgcctggcgacctagtgctggttcatctgccgccggaggttagatcgctggcagcgcaacgcggctacctgccggcgaacgtgccgttgctgaagaccttggcggcagtggcgccgcagcgggtgtgcatgcaaggcagccaggtgcgcatcgatggcgtccttgtggccagacgtttgaggtgggatcgacagggtcgcgcgctgccagcctggcaggcctgtcggcgcctggttggcgatgagctgttcctgctcagcaacagcaacccggcgtcgttcgatagccgttacttcggcccgatatccgccgacgcggtgatcggtcgggcgcagcccctgtggctggaggcgcgtcgatga

SEQ ID NO: 348399 - DNA, 564 bp, Pseudomonas aeruginosa
atgtcggaacaactgtctacccgcagatgcgataccccgctcctccaggcattcgtcgataaccgtacgatcctggtgaagatcgccgcccgcattaccggttgccgctcgcgagccgaagatgtggtccaggatgcgttcttcaggctccagtcggcgccgcagatcacttcgtcgttcaaggcacagctcagctacctgttccagatcgtccgcaacctggccatcgaccactaccgcaagcaggcgctcgaacagaaatactcggggccggaggaagaaggcctgaacgtggtgatccagggcgcctcgccggaaacctcgcacatcaactacgcgaccctcgaacacatcgcggatgccctcaccgagctgcccaagcgcacccgctacgccttcgagatgtaccgcctgcacggcgtgccgcagaaggacatcgccaaggaactgggcgtctcgccgaccctggtcaacttcatgatccgcgacgccctggtgcactgccgcaaggtcaccgccgagcgccagggcgacaatctgacgaacctgagcgcgcgtcgctga

SEQ ID NO: 348400 - DNA, 780 bp, Pseudomonas aeruginosa
gtgtctaggaaagccggggcgattcaggaagaggcgctgtacgagaccaccatcctgcgccagttcgcggggctgagcttggagcgtatccccgatgaaaccaccatcctcaacttccgtcgtttgctggagaagcacgaactagccgccggcatcttggctgtcctcaatggctatctgggcgaccgagggctgtcgctgcgccaaggcacgatcgtcgatgccacgctgatcaatgcgccgagttcgaccaagaacaaggacggtaagcgcgacccggaaatgcatcagaccaagaagggtaaccagtactacttcggcatgaaggcgcacatcggtgtcgatgatgagtcgggcttggtgcacagcgtggtgggcacggcggccaacgtggccgatgtcacccaggtcgataagctgctgcacggcgatgagaacatggtcggtgccgacgcgggttacaccggcgtcgagaaacgccctgaacatgaaggccgggaggccatctggcagatcgccgcccgccgtagtacttacaagaagcttgataagcgcagtgctttgtacaaagccaagcgcaagattgagaaggccaaggctcaggtacgagccaaggtcgagcatccgttccgggtgatcaagcgccagttcggttatgtgaaggtgcgcttccgtggtctggcgaagaacacggcgcaactgatgacgctgttcgcgctgtcgaacctgtggatggcgcgccgacatttactggcgaatgcaggagaggtgcgcctgtaa

SEQ ID NO: 348401 - DNA, 627 bp, Pseudomonas aeruginosa
atgtccgtcgcagaagcaatctcgaaccgaattaagcgaatgcagaaggggaagccctttcctcgctcgctattcgcagaggctggctctcgtgctgccgtcgataaggcattctccaggctagtgcaatcaggtcatcttgagcgcgtcgctcgcggcatttacatgcgaccaaaatttagccgctacaccggtcgccggctcatacctagcccgctagccatcatgagcattctcactaaagcaaatggcgagacgattcagatacatggtgcggaagctgtgcgcaggctgggacttagtactcagatgcaggtagtaccgactttctacacaagcggagcaacccgcaaaatcaaggttggtaatgcggtggttcgcctacagcatgtgtccagtcatcgcttgcagcacgctggcactatggtgggcatggcactgaccgcactttattacctcggcaaagatgggctgtcttcgcagacgctttccaaaattacctgcgccctcagccctgtcgaactggcaacccttagagcatgcatgatgccgaaatggatgcaggaggtattatctaatgccacctatgaacctgcctcactgaacaaggctcctgagcgagcttag

SEQ ID NO: 348402 - DNA, 297 bp, Pseudomonas aeruginosa
atggaagtccggaattcgtttagtaaagcgttgaggttggtgcgtcacagccaggggcttacccaggaagacttctcaatggttagcagccgcacctacgtcagcatgctggagcgggcggctaccagtcctacgctcgaaaagcttgatgatctctgcaaggtgctcgatgtccacccggtcaccctcctggccatcacctatttgctcggagcagaggcccccgctgaccgtgagttactgctaaagagagttggagatgagttacagagcctgctcgctgagcctgcatcatag

SEQ ID NO: 348403 - DNA, 1704 bp, Pseudomonas aeruginosa
atgtctgaagacatcaagaataccgcgatcaccgccgcaggttacatttatcagaaccgtcaaggcctcagggttctttgcgattggcttgacgcaccggctcgctatacccgggtgaggtttgagtgtgacgacgaggctgtcgcgccgacagggctggatgacatcgttgtcgagcgtgcagatagcctgcttgatctccagcaggtcaagttcacccctgatccaaacgcgcatccgctctgctgggattggatgctggaaaagactggcaagacagcgcgatcgaggtcgatgttgcgcaagtggttcgatgctttcaaggcgttggaaccggcgcgtacgggcttattttcgttgacgaccaatcgccggccggatgccgatatcgaagcttgcctcagcggcggcaagatctcctttgccaggatccccgagcccaggcgctctgaggtcatcgcggaacttggtggcgagcaagactgcgaggcgttttttagccagctgcacatttttcacagtgacaaggggttcgacacgctggagcaagaggtcgatgcgcgacttcgcaaacacggcactcctgagggtattgctaacctcaagtacgtagctttgaactgggcgacgcggaaaaacttcccaccccttgacggttggatcacgctggagcaggttcgcaccatcctgcgctcgacaccagcggcgcctttgccagaggacttcgttgtcccactgggctacgaggtgcctgatgagacgttccattcggagtttgcccgtgacaccgtcaatgctactggtggggcgatcgtgctcactgggccgccgggtcgtggaaaaagtacctatctgagcgcgttgtgcgacacgctcgctgagcggggcatccctaccgtccggcatcattacttcctctcgacgacggagcgagggcgagaccgggtgaacagctatgtagtcgagcagtccatcgaggcgcaagtcaaacggtttcatccggatgttcaggtgccggtgggcgacctgcgctcgctacttgaagcgtgtgcttctcactacaagcaactggccaagccgttcgttcttgtcttggacgggctggaccacgtctggcgcattaacgccgaggacaagcggccgctggacgatgtgtttgcccaggtgatcccatgcccggacaacatggtgctgctcgtcggcacccagccagtggacgacgtccagttaccgacggacctgcttgctgtcgcgcctaaagcggagtggcgtacgctgccagcgatgtctgaaaacgcagtcctgtcctatttgcgcaaggcatttcaggaaggcagatttacgactggattcgagggcgaggatggagttgaaaggcaactgcaggagactgcgaccgcgcttcgtacgcagaccaatggtcatcctctgcatgtcatctatgccgttgcggagcttgaacataccagtcgcagtttgtcgaggtgggacgtcgagcagctgaagggggacttaagtagggaggcacagttctactacgcatcgctttggcaaagcctccctccaagcctcaaggacacattgcggctcgtatgcgccttctcgttcttctggcctagatctgcattcggggagatcgccacaaaagtcggcacggcggagccggaggtcgcaaaagttgagcatctgctttgttgccgctga

SEQ ID NO: 348404 - DNA, 1209 bp, Pseudomonas aeruginosa
atgacaacccgcgcactcgataccgccaacgaaaaccctgaacaatcgggctcctggagtggcgtcctggccattgcggtttgcgccttcgcactggtcgcgtcggagttcctgccggtcagcctgctgactcccatcgccaacgacctgggaactaccgagggcatggcaggccagggcatcgccatctccggcgccttcgccgttttaaccagcctgttcatttcatccgttgccggcagcctgaaccgcaagacgctgttgctgggactgacggcggcaatgggcatgtccggcgcaatcgtcgcgctcgcgccaaactatttcgtctacatgctgggccgggcgctgatcggcatagtgatcggcggcttctggtcgatgtcggcagccacggccatgcgcctggtgcctgccaacgacgtgccgcgagccctggccctcgtcaatggcggcaacgctctggcgacagtggtggccgcgccgctgggcgcctggctaggcaccctcatcggctggcgaggggcttttctctgccttgtgccggtagccctggtggcactggcctggcaatggaccaccctgccctccatgcgggccggcgcgcgtgctcccggcccgggcaatgtgttcacggtgttcgctctgctcaagcgtccctgtgtcatgctcggcatgctcgccagcagcctgttcttcatgggccagttttccctgttcacctatgtgcgaccattcctggagacggtcaccggcgtacatggcgcgcatatttcgctggtactgctggtgatcggtgcagcgggctttatcggcaccctgctgatcgaccgggttctgcaacggcgcttcttccagacactggtcgccatcccgttgctgatggccctgatcgccctggtactgacggtccttggcggctggcccgccatcgttgtcgtcctgctcggattgtggggactgaccggtacctcggcccccgtcggttggtgggcctggatcgccagggtgttcccagaggacgccgaagccggtggcggcctgttcgtcgccgtggtgcaactctccattgccctgggctccacattgggtggtctgctgttcgatcgcactggctatcaggcgaccttcttcgccagcgccgcgatgctgctgatcgcagccttcctgaccatcctcaccgcacgctcgaaagccccggccggctag

SEQ ID NO: 348405 - DNA, 780 bp, Pseudomonas aeruginosa
atgacgcaagaaaaatcggcccttgaccgggcgtgtgaggatttcgaacacttcatcaagtacatccttgaacctgcaaagaacgatttagaggcaaaggtccggaacaacgagatctcactccacctagcgttcggtgcaaacctgattttggctcacagcgttgattacttacaggcagtgcgagcggccgacgggataacagaaacacgcaaagaattggtcgcaacgtttgatgcaaaattctcggttcctggagcgtatcttgcaaatcggaaaatggaactggtcgacgggatcaacaacgcactcaagcacattcgaattgacccagcgcggtacaaagggctgggcgaacgctatgggcagatctcgttccagagtttgatggaggaggacgggcgcattttctgccaccttgatgagtatcgattcgattactgtcgtgttgttctcttgcctgcccttaaggccctgtcgagctgggactttgaagggactgatgacgttgttagattcgcgagaggcgagtacatcgttgcggatagttcctggtatcccgatatctacgatcccgatgacccttcaacggcaatcgatcaaatgatcgagatctgcaatcctccctgcataaactgtgatcagttacatgacgaatgcctctgttcaaagtacgttttcgccggtgaaagcggtcgatttgaacctgcttacactcccacttctggcgagatcgatgaactgatgagccatatatcgccctcataccgacgatcatag

SEQ ID NO: 348406 - DNA, 882 bp, Pseudomonas aeruginosa
atgatccggaagtcgacaggctcgctattgctaatgcttgccctacccacactggcccacgcggtggagattctgcgctgggagcgcattccgttggccattccattgacggtcggccaggaacgcattgtctttgtcgacagaaacgtgcgagttggcgttcctcgggatctgcagggcaagctgcgcgtccagagtaccggcggcgcactctacctgctcgccaacgagccgattcctccagcgcgcctgcgcctgcaggacgcgaccaatggcgagcagatgctcatcgatatcgccgccaccgaggcagcggccgatcaacagccgcgcgagccggtcaggatcgtcgccggcgagcccgtggctccgcactatggccagccccgggaagcccagccatcggcagcagcgaaacagaccgagcaggcagaagcaccggccgtgccgcgcgaaacgcccatccccgtggttctgacgcgctatgcggcgcagatgctctatgccccgcttcgcacggtggaaccggtggatggcgtcggtcaggtgcgcgtcaagcgacagctcgacctgaccaccctgctccccagcctacccatcacggctaccgccttgggcgcctggcggctggacgactactacgtcacggcggtgaagctgcagaacgccagcgcccagcacctggccctggatcccagggacctgatgggcaatttcgtcgccgcgaccttccagcacccgtacttgggggcccggggcgacgcttccgacactactactgtgtatctggtgacgcgcggccgcggccttgccgacgcgctcctgccctcctccatcagccagatcgatcccaaaggaggccgtcgtggcgctgaccggtaa

SEQ ID NO: 348407 - DNA, 822 bp, Pseudomonas aeruginosa
atgttcaacccggccaaccagacccacttcagcctcagcctcgacggcctccgtcacgacctgcaggttctcgaattcagcggccacgaaggcatcagccggccctaccgcttcgaactcgaactggtcagcgagcgcgccggcctcgacctcgaagcgctcatgcaccgacccgccttcctcgccttcaccccgcagggccagggcgtccacgggctggtctacggcgccgcccaggccgacgcgggcaagcgcctgacccgctatcgcctcaccctcgtgccgcaactggcctacctcgcgcagcgcagcaaccagcggatcttccagcacctcacggtgccgcagatcgtcgccctgatcctcgaggagcacggcatcctcgccgacgcctaccgcttccagctcggcacccggtatcccgagcgcgaatactgcgtgcagtacgacgaaagcgacctgcatttcgtccagcgcctctgtgccgaaaagggcatccatttccatttccggcacagcgccgaggcgcacctgctggtgttcggcgacgaccagacggtgttcccccgcctgggccgtcccaccgcctacgtgcacgacagcgggctggtcgccgacgaaccggtgatcaagcgcttcagcctgcgcctggccagccgcaccacgcgcaccacccgccgcgactacgacttcgagaagccgcggctgctgctggaggccggcaaccgccccgctgccgacgccccggccgagccggacctggaggactacgactaccccggtcgcttcgtcgatcgccagcgcggcaagctgctcagctag

SEQ ID NO: 348408 - DNA, 1353 bp, Pseudomonas aeruginosa
atggccagtctgcgcgacgttggcagcctgcgacgcgacttcgtcgtccggatacgcttggaggaagccctggagcagcgcgacctctggctgctggactgggccgaagtggagaagatcgcccaggagcctggcaccgaggcccgccagttcctcaagtcgatgctcgccatgtggggcgtgaacgcccagggctggctcacccacaagctcggcgaggcccagcacggcctgctcaacgagatcggcgaagccctggcgcggcgcatcgaacgggccatccagcgcgagcacccgttccacgtctacctggtcctgccggtgcacccggagggcgcgctgaacgtgccgaacatcatgcaccaggtgcacctgacccagcagagcctggtgttcggcgaacagagcctggtcaagcgcattcagcggcagatggcgctcaaggccctggaaggcaagtccgacccggcccaggcccgggaaatcatcgagcgcaaggacgctcgcggtcgcccggtctacgaacagcaggactggagccgctacctgaccctgctcaacctgcgcacctgggcggtgctcggcgggcgggtggtcaccgaacagatctacgtgcacagcaagctgctgatcgccgacgaccgggtggccatcctcggcagcgccaatatcaacgaccgcagcctgcaaggcgagcgcgactccgagctggcggtgatggtgcgcgacagcgagccgctgacggtcaggctggacggcaagaacgacgccatcgtcggcaaggccatccaccagttgcgggtgaatttgtggaagaagcattttggcttgagccaggggccaggcggtttcgtcaagccggccagcgagttgagtgcttatctgtccatcccggcggctcaagaggcctgggaagctatacaaacattagccaaggagaatactcgtgcctatgaacggactttcaattttattccccaaaatatcagccagactcaactgcaactgactccagagccgcctaaaggatttgaggacggatttcccgcctccatatggcccacctgggcatacagaaaacctggcgagttaagggcgggcggacaactgatggagccgatgccatatcaggaaatcttctggcgctcatctaatctcacttcggtgaaaaccttcccaccacccaacggggtttccggtttcatcacggctctaccaaccagttggacccgtggtgagcgcaatgattctggcttgaatctaagcatcctggcacatcaggacagcagatcgctttccacccaggtcgccatgaatggagatagctcggcacaaggaaagcatcgcacatga

SEQ ID NO: 348409 - DNA, 444 bp, Pseudomonas aeruginosa
atgcaacagcagacctggactaacccccttcttcgtctctgcgccggcctggcctgcgcgctaaccctggcagcgtgctccaccagcaaggaggagatgctgccccacggcgaggccaacatgctcgacgtctgggagcgaggtgcgaccagctcgataggcaacagccgtggccggctgctcctcgatgccaggcaaacgctgcggcgcccaatcgatccgcagcaggctgcctccgcgaatgaccaggccgactacacccgcacggccagcaacgagatccacagccagttcaaacgactgcccaatcccgacctggtgatgtatgtgttcccgcacttggccggcagcgatcccgccccggtaccgggctacaccaccgtgttccccttctaccagcgagtccagtacgccatgccgggcgagcgcacggaggactattaa

SEQ ID NO: 348410 - DNA, 444 bp, Pseudomonas aeruginosa
atgcaacagcagacttggactaacccccttcttcgtctctgcgccggcctggcctgcgcgctgaccctggcagcgtgctccaccagcaaggaggagatgctgccccacggcgaggccaacatgctcgacgtctgggagcgaggtgcgaccagctcgataggcaacagccgtggccggctgctcctcgatgccaggcaaacgctgcggcgcccaatcgatccgcagcaggttgcctccgcgaacgaccaggccgactacacccgcacggccagcaacgagatccacagccagttcaaacgactgcccaatcccgacctggtcatgtatgtgttcccgcacctagccggcagcgatcccgccccggtaccgggctataccaccgtgttccccttctaccagcgagtccagtacgccatgccgggcgagcgcacggaggactactga

SEQ ID NO: 348411 - DNA, 201 bp, Pseudomonas aeruginosa
atgcgcaggtcggggaacttcttccacatcggcgcccagatccagtcggccgccgagttggcgatggagatcggcatggaggtgatccaggcgtcgatcggcgacaggtcggaggcgtgctcggccttcaccccggtaccgatatggcagcagatcaccacgttgttgtcggagcaggctttccacagcggatcccagtag

SEQ ID NO: 348412 - DNA, 126 bp, Pseudomonas aeruginosa; identical to SEQ ID NO: 326417

SEQ ID NO: 348413 - DNA, 219 bp, Pseudomonas aeruginosa
atggtgcgcttgctcgagagcatttacatcaatgcccggccggcaatggagttgaggcttagcctcaccagctccggccgcaagagaatggtaaagattgtggatggggaggaggtcgaggttctgccaggtgaagtgcagggcatcctggaggcccaaaaaatggatgttggaatcctcgccgatttcttagccaagagtctcttggcgcgacgctag

SEQ ID NO: 348414 - DNA, 222 bp, Pseudomonas aeruginosa; identical to SEQ ID NO: 346438

SEQ ID NO: 348415 - DNA, 213 bp, Pseudomonas aeruginosa
atgccgcaagggctccgcgatcaactcaagcaaaaagccgcggataaccaccgctcggccaacagcgagatcgtctaccggctggagcgcagcaacgcgctcgaagaagaactcgctcgagcgaaccgaatggtcgacgagctcttcgccaagaaccagcgtctgcaggcagagctggctgcggcgaacacgcctcaggtggcggaggcatga

SEQ ID NO: 348416 - DNA, 297 bp, Pseudomonas aeruginosa
atgagccgactgaccgctgagcaagcgcgtgatatagctcgcgaacaagaccctgcgttcgccgtagataccatccttgcaggcatcgcaaaagcagccgccgaaggcaagtacgtgtacaccacccgtgactatgggttcggcaccagcacctactgcaacgaatgcgattacccgaagctctgcatcgcgatcctgaaggaactgcgcggactcggttacgtctgcgctgtgcgagccgaagaacgccagttcgttgacctgtggctcgaagtgaaatggggagaaaagacatga

SEQ ID NO: 348417 - DNA, 285 bp, Pseudomonas aeruginosa
atgcatgacatgagagaagagtttgaagcgtgggcttccagtcatttcgtagacgtaggaagcggcaatccgctcaagaaaggacctaacggtcactatggcttctatgtcgtggcaacggcatggaaagcctggcaagccagccgcgcggctctgaaggtggagttgccggagcgtgctgttctacctgaatacaccgagcacaggcttctctactgcgagcgcacaggcttcaacgactgccttgagcgcgtgaaagaagccctccagcaagccggaatctag

SEQ ID NO: 348418 - DNA, 273 bp, Pseudomonas aeruginosa; identical to SEQ ID NO: 335216

SEQ ID NO: 348419 - DNA, 195 bp, Pseudomonas aeruginosa
atgaataatcaatcgatgagccaagctttcaacgcctggatggacgatttcatcaacaaccctgagcagttccagagcactgagcattcggctatgcagcacctcaatgagcgcctggaaggcagggcgccgagttatggcgaggcatgcagcgcgatcctcgccgagtacatgaagcgttttgaatcggcatga

SEQ ID NO: 348420 - DNA, 261 bp, Pseudomonas aeruginosa
atgagcaagttcaaggttggcgacatggctatgaccatggtttacgactctgcgctcccggcgggttctgtggttgagctggagcgcgaactcaaaaaaggcgacgagatcgcccgtgggttcgtcgccccatccgccggatggatagtgcgacatcccgaagtcagcagagaagtactggcatacggggatcacgaactgatgccactcaagtgggacttccagcccgagcagcagaaggcgaaggaggagatcgcatga

SEQ ID NO: 348421 - DNA, 147 bp, Pseudomonas aeruginosa
atgagcctcgaagaactgtttaaaactgcacagcaagccggaaacgccccggagcgtgtttcttccgataagcgcgatgcgttcgtctacatggacgttacctcttctgagtatcgcaagcaggcggccaaagagagccaccggtaa

SEQ ID NO: 348422 - DNA, 156 bp, Pseudomonas aeruginosa
atgatgtggacataccgcgagcgccgcaaccgcgcagcgttcaactgcgcccagcacgcctgggacttcgccagagacccgctctgggaccagccggaaccggaaccggagcccgaagacgaagagcaggaggacgacgatggccttcagcaatga

SEQ ID NO: 348423 - DNA, 204 bp, Pseudomonas aeruginosa
atgcgttgcctggagaagaagggcctgctgaccatgagttcgcagttgatcggcatgctggcggcttcgacgcagggcgatgcggacgccaagagcttgcagacgggagcctgggtggcggggaatgccacccaacacaactacctcagtcattggcaggaggagaagaagcggcaggaggtcgatggctgcaaggacaaatag

SEQ ID NO: 348424 - DNA, 705 bp, Pseudomonas aeruginosa
atgaagtttcctgacgatgttggaaagggcatttgcatcttcctttgcgacatcactgggaagatggctaagccatggttcgatgatgggtacacctgcatcttggttgatccgaagcatccacgcggggttacggtcagccagtgcggacggtggattaccattggagaaatcattgatcacccgactacatggtcggttatctccgctgcaatcagaaccaaccgcgtcgtcttcgtagcagggttccccccctgcaccgatcttgctgtaagcggcgcgcgctggtttgaagagaagcgcaaggctgatcctctttacgaaatgaaggccatgcacgtcgtttggcagtgccaggtgattggagagctttccggcggaaaatggttcgcagagaacccagtaagccgtatcagctcattctggcgccgtcctgaccacgccttccatccattccaatacaccggcttctgcgccgaagacaactacaagaagaagacctgcctatgggtcggaggaggcttcgtcatgcctgatccctgccgcgactactcgctcggcgcaccggacaacaggattcacacctgcgcacccggcgatgagcgcgccaacattcgcagcgagacgccaacaggattcgccatagccgtgcatctcgccaatcgcggtccaagaaaaggacagctagatgtgaagctccaatag

SEQ ID NO: 348425 - DNA, 1317 bp, Pseudomonas aeruginosa; identical to SEQ ID NO: 342032

SEQ ID NO: 348426 - DNA, 693 bp, Pseudomonas aeruginosa
  misc_feature (678)..(687): n is a, c, g, or t
atgcatgattatgaagcgcatctcgattctttgttccttgggtggggagggcatgcacataaactccaagtttttgctgcacaaaccattagggcaagattaaagcggtttatgctggctcataatattgactgggaggtcgcaccacaccaatttagaaggacgttcgctcgatatgtggctcgcagtcaactcggtgatgttcgttatcttcgtgatcatttcaaacattggacgctggatatgactgcgatatatgcagaggatcaagttagagataaagagctgtttgatgaaatctatgttgcaatgcgtcacgaaaagatgctggtgcttgcattggtttctggtggtttggcagagaccattcgtatttttcgatcctctgatgaggcgattcggacgtacaaaagccgccgtgaaatggttcagtttgtatcggaggttgtgcatctgagaagtactggtattgcatggtgtactgcagatagtacgggctgctccggtggcagtgtattggataaaactcgatgcggtgattgctcgaaaagtcttatcgatgaatcgcggctgccacattgggtaggcatatatgctcaaatgttggagcttaaagctatcgctaatgactgtggtccaggtgcgggtgcacgaattgacagcgatattcgacggtgnnnnnnnnnnagctga

SEQ ID NO: 348427 - DNA, 291 bp, Pseudomonas aeruginosa; identical to SEQ ID NO: 328687

SEQ ID NO: 348428 - DNA, 819 bp, Pseudomonas aeruginosa
atgcgaaagctgctgccagggagtgagcgctttgaactggtgatccatatgctgcgccagcgtttgtctcccgagcagattgccggcaagctgcgcagtatgaacatacccagccttagagatgcctacgtctgtcgcgagacgatctacaacgcgatctatgccctgcccgtcggtgagctgcgcaaggagttgatcctttgtttgcgccaaggcaagacgacacgtagaccacgccttggcggtgtggatcggcgcgggcagattccagagatggtcagcattcacttgcgcccgccggaagttgaagaccggctgatgccggggcattgggaaggcgaccttattaagggtaaggctaacgcctcgtctgtaggtacgctggtggagcgcactagtggttacctgatgctggtgaagatgaacgacgcgacggcgacctcggcgatggagggcttcagcgccgccctcaataacatgccgctggcgatgcgcaagagcatgacctacgaccagggccgggaaatggcacagcacgccgagatcacccagagaaccggtgtggcgatctacttctgcgacccgcacagcccttggcagcgcggcagcaacgaaaacattaatggcctgatccgccagtacctgcccaagggcactgacttgtcggtacatagccaagaagaactggatgccattgcgtttcaactgaacatgcgtccacgtaagcgcttcgatttcaaatgtcctatcgaagtcatgagcgaagtgatgcagaaagccttggctatgcaatatgatgctcctgcgtcaattcaataa

SEQ ID NO: 348429 - DNA, 255 bp, Pseudomonas aeruginosa
gtgaccggattcgcacagcagcgtatcaacgaagccctggaggcgggggagtatgtgaccctgatcctgcggatatatctggaaagcgatctcacagcacctgctgagcggccataccgcatgagggtcaagacgccgggtttcgagggtctcactgttcaggtcaaggccggttactacgacctcatcaacaccgccgcgctgcgccacatctacaacgtcagcgagttccctggcctcaaatactggccctga

SEQ ID NO: 348430 - DNA, 435 bp, Pseudomonas aeruginosa
ttgctggggccggcgctgcgtcggcaactgcatgaactgccggccctgcgcgacggcctgtcgctgagcgaacggctgaccctggagatcgtccgcgacagcgagcggccgagcgccggccaggtcttcgccgagctgaccgcacggcgcgagccgctgccctatctcggcgacctgatgttccgcgtcctgctccgcgcgctgctggaagagcccggcgcgctgctgcgcacgccggcaccggaactgccctgggaacgccagccgctggccctgaccgctgcgggccgcgaggtcctggccgggcggcgctaccgcctcgacctcggcgcccccgaacgctgggtcggcggcgtatgcctgcgcgccggcaccgcgcactgggcgctggacgagcaggaccggccggtatggcgggaggaccctcggcactga

SEQ ID NO: 348431 - DNA, 537 bp, Pseudomonas aeruginosa
atgaccaagccaaagcatcaagtccgtgtcacggttaagtccgctggcgagatttatgagtcgcccgaggggcgcctgttcttcgacgacaagctggccaagttcactgatctgtccggcgtgcgcctgctgcgctgcggcgtggatacggtccgtcagttgtacaacggcatgatccgcctagaggtaatggcgctgttcgatgagccggaagacatcgtcgagttcgctggctaccagtgggtcaagggcagagtagggcgcgactccggctaccagtaccgtctgcagaacgccgacacgggcctgatcctgctgatcaagaatcacaacgtgaagctcgagaacatcgggccgcacctcaagatcgaggtgtctccacacgccctggacggagccgatcctgcgatcctgcgatcctgcaagggatgctcgatgacctggctagtgccgtgctcgctcactgcgaaacgaaccagtgtgctgtgcatctcgcactggacgtacagggctggacgccgtccgcggacatcgtag

SEQ ID NO: 348432 - DNA, 288 bp, Pseudomonas aeruginosa
atgaacacagcctcagacaccaagcagaaacggatcaacctccgcctgcagaagagcgctaagaaaaccctggaacgcgccgcaagcttcgagaggaagaccgtcagccagttcatcctgaacagcgcactggcacatgccgagaagaccatccgtgagcatgaggtcatgagtccgaaggcgagcgatgcagaagcgttcttcgatgcgctgagcaagccggtcacgttcaacaagaagttggccgacgtccttgagagtcacgaacagcgtgtcaccggccgatga

SEQ ID NO: 348433 - DNA, 846 bp, Pseudomonas aeruginosa
atgcctcataactcagatgcccccaatggggttctttccgacagcgactatgatgatgcacttagcaagttagacatagccacgtgtgaggcgatggcattgagccaggccattaatagtgatgatgctgcaaggcatattgcttattcggtggagatatacaagcggctttgcaggcatgccgtggcgttggtcagtgcggttcctcgatcacgctgggtggcagccgactttgagaactgggattttgcctgcgtcgctggccaaagcagggctgtgatggaggggtatttgctgtttcgctatctcgttagagccccttcgtgtaatcacgaatgggtgacaaagctcctggttttgtatctcaacgaccgggtgcgacgagccaaaatgatgactgacctcggagccactgaggcctcagagcactggtctagtgaggctcaagagctacgggagagactcaatgaaaatccttggtttctcgctctggatagaaatgtgaagaaggggtgtctctcaggaaagttcttgatggttcagagtcgtgaccaagtattggaaatggcgggtttagaaatagatcagttcaatgctgtctgggatctgctgtcgcaatatgctcatatgttaccgatgtcatttactagctctgagccagatgggagagggtcgggcgacgagaatcaagaggataaggactatattggaacaacgatagcttgctgcgccgacatccttaacactgcaactgacatcctggccagggagttccctgcggtggcggaggttcgtagaggtatcgagtccagatttcttcaaggaccgagatctaataggccgtga

SEQ ID NO: 348434 - DNA, 924 bp, Pseudomonas aeruginosa
atgaccatgcacctgaacaccttcgcccagcccgatgcatccaccccggcccaggaactggtgccttcgcgctatgccctgcgtgttggcgagattgatgtgctggtggtcagcgacggtgtgctgccgctgccgaccgaaaccatgtcgaccaacgccaccccggaagaacgcgcagcctggttcaaggagatgtacctgggcccggacatgttcgactgggcgctgaacgtactggtggtgcgcagcggcgagcagaccatcctggtcgacgccggcctgggcaaccagttccccggcttcccccgcgccgggcagttccccaagcgcctgaaggatgccggcatcgagctgtcatcgatcaccgatatcgtaatcacccacatgcacatggaccacatcggcgggctgctgaccgactccgtgaagaacggtctgagccctgaggtgcgcatccacgtcacggccaccgaagtcgacttctggaagatcccggacttcagcctgaccgaaatgccgcagccagtcccggatgtcctgcgtcgcactgccaacgaattcatggcgcattacgaaagccggctgcacatcttcgaggacgaacaccaggttgcgccgggcgtggtggcgaagcttaccggcggtcacacccccggccattgcatcgtctacgtcgattccgccggcgagcgcctgaccttcgccggcgacgcgctgttcccggtggctttcgaccatccggaatggcacaacggcttcgagcacgacccggaagaatcggtccacgtgcgcgtgcgcctgcttcgcgaagcggcggccagtggcgagctgttcgtcgccacccacctgcccttcccttcggttggccgcgtagccattgatggtgacgccttccggtggattgcaggcttctgggactactga

SEQ ID NO: 348435 - DNA, 1203 bp, Pseudomonas aeruginosa
atgaaacagcaacttctggttattggcgcgggcttcggtggactgtggagcgcactgagcgccgcccgcctgctggacatgcacagccgcaacgatgtggaaatcaccctgctggcgccgcaggccgaactgcgcatccgcccgcgcttctacgaacccgacgtgcacagcatgttcgctccactgaccgaactgttcgaagccgtgggcgtgcgcttcgtcaagggcaccgccgagagcatcgacgagcagtcccgcaaggtcggctaccgcgacgaaaccggccgcgccggcgagctgagctacgaccgcctggtactggccagcggcagccagctgtcccgcccgccggtgccaggcctgaaggaatatgccttcgacgttgaccagatcgaatcggcggcgcacctggaaagccacctgatgtcgctgcgcaaccagccgaccagccgcgcacgtaacaccgtggtgatcgctggcggcggtttcaccggcatcgagaccgccaccgaaatgccggcccgcctgcgtgcggtactgggtgagggccaggacgtccgcgtggtcatcgtcgatcgcggcgagcgcatcggcgcggtgatgggcgaaggcatccgcccgtcgatcatcgaggcctccgacagcctgggcatcgaatggatcaccggcgccacggtctccgccgtggacgccaacggcgtcaccctcgccgacggccgccacatcgagagccacacggtgatctggaccgtgggcttccgcgccagcgcgctgaccgaacagctgactgcccagcgtgatggccagggccgcctgcacgtggacggcaacctcaaggtgcgcggactgcagaatgtcttcgccgccggcgatgtcgcctacgccgccaccgatgacatcggcaacttcgccgcgatgtcctgccagcacgccatcagcctcggccgccacgccggcaataacgccgccgccgacctgctcggcgtcgctccgacccagtaccgccagcccaagtacgtcacctgcctcgacctgggcgcctggggcgccgtgtacaccgaaggctgggaccgccagctgaagctggtcaaggccgaggccaaggaactcaagacgcagatcaacaccgtgtggatctacccgccggccgccgaccgccgcgccgccctggcggccgccgacccactgatcccggtggcctga

SEQ ID NO: 348436 - DNA, 390 bp, Pseudomonas aeruginosa
atgcaaaagacgcaaatgcgcaataaggctgtcattgcagttgtcgacgacgatgaatccctgcgcaccgcgctggaaggcctgctgcgcgctaccgggtaccgggcgcgcacctatggcggtgcccgcgagttcctcgactccgacggcccggaactggccggctgcctgatctccgacatccagatgccaggcatgtgcggcgtcgaactctacgaggcgctgcgcagccgtggcctggaactcccagtgatcttcatgaccgcctaccccggcgaaaagccgcgcatcaacaccgcaatgcccggtgtcattgcctgcctgcccaagccgttcgaagccgaccagttgctggactgcatcgagaccgccctgctgccaaagccctga

SEQ ID NO: 348437 - DNA, 936 bp, Pseudomonas aeruginosa
atgaacagaaatgacctgcgacatgctgatatcaacttgctggtggtcttcgaaaccatgatgcgtgagcgcaacgtgacccgggcgggcgaacgcctgttcctctgtcagaccaccgtgagcagtgcgctgaaccgcctgcggacgatgttcgacgacccgctgttcatccgcagcgggagagcgatggagcccaccgcacgggccgaggaaatccacgtgtgcttggggccagccctggaaggcatcgccctggccttgagctgcgcgcgggagctcgacccgcgcaccagcgaagaaaccttccacgtcgggctttgcgacgaagtcgaatacgcgctgctgccacggctgatgcagcaactgcgtgccgaagcgccgaacatcaccctggtggtgcgccgggtcgatgcctggcaaatgccgcaacggctggtcgccggggacatttccctggggatcggccaggcgcaggagctgccggcccgcgcccattgccgcagcctgcgcccggtgcagccgatgctgctgcgcgcggattcggcggcggggccagtgagcctagatgagttctgccggcggccccatgtggcggtgtccgcgctgggcaaggtgaccgacgatgtcgaccgcgcgctggcccgtcatgaccggcagcgccgggtggtgctggcggtgccgcagttcagcgccttgccggcactgctggccggcagcgacatgctcgccatcgtgcccgactatgtggcgcaggcgatggcgcgggtggaaggcctgcgcgccgaatacgcaccgctgccgctgtcgagcccggacctgtccatggcctggcgcggcaccagccatgccgacccgcgcgagcgctggctgcgcggctgtttcgcccgtcacctggagctgcagctggagcgttcgctggcgctggctgtggcctga

SEQ ID NO: 348438 - DNA, 1014 bp, Pseudomonas aeruginosa
atggcaagcgcctttactcctcctttcccgctcccggcgacgatgccgatcaccgtcgcctttgtcgcttacccgcagatgggcctgctcgacctgagcggtgcccagactgtgttctgggccgccagcaaggccctggcacaacgtggcctgccaggctaccgactgctgacggcaagcctgggcggcgggctggtgagcaccgtcgaaggactgtcggtgaacacctgcaccctggatgagctcgacctcgccgaagtcgatacactggttgtccccggcgccccggatatctgcgaaaccctcgacagtcacggtgaactggcggcatggctgaaccacgcggcgcccagggtgcgccgggttgcatcggtgtgcagtggcgccttcctgctggccaaggctggcctgctcgacggctgccgcgccgcgacccactgggccatgtgcgacaccctgcaacagcgcttcccggccctggaggtggatgccgacgcgatcttcatccagcagggcgcagtctggacctcggcgggtgtcaccgccggcatcgacctggcactggcgctggtggaagccgactgcggccgtgaagtcagcatgcaggcggcgcgggaactggtggtctacctcaagcgccctggcgggcaggcgcagtacagcaccctgctgcaattgcagacccaggacagcccagccttcgacgagctgcacctgtggctggcggagaatctgggcgatgcggagctcaccgtggaacgcctggccgagcaggcgaagatgagcctgcgcaacttctcccgcgtgtacaaggaacggaccgggcgcacgccggccaaggccatcgaactgttccggctggaagcggccaaacgcctgctggaaaactcctcacgcaacatcgagcagattgcccgcgcctgcggttttgccgacgaggaacggctgcgcagcaccttccagcgccacctgtcgatctcgccgcgcgactaccgcagccgcttcacccgctga

SEQ ID NO: 348439 - DNA, 663 bp, Pseudomonas aeruginosa
atgagctcgtcgtcgcattccaatccgccgcaaggcccgaaggagccggtggtctatgtggtcgatgacgacgagtccatgcgcctcgccctcgatggcctgttgcgctccatcggcctgcaggtgcagaccttcgattccacccaggcctttctgtcctttgcccggcgtgacgtgcccagttgcctgattctcgacgtgcgcctgcgcggtgagagcggcctggcgttccaggagcagatggagaagagcggggtgcgcatgcccatcgtgttcatgactggccacggcgatatcgctatgacggtcaaggccatgaaggctggcgccgtggacttcctggccaagccgttccgcgaccaggacatgctcgacgcggtggccagcgccctggcccgcgatggcgaacggctgcaggccgagcagtccggcgcggcgcggcgccaggcgttcgaggcgctgaccctgcgcgagcgcgaagtgctgcgcttcgtcgtggccgggttgatgaacaagcagatcgctgccgagctcaacctcagcgaagtgaccgtgaaggttcaccgcggccaggtgatgaagaagctggctgcgcgttcggtcgccgacctggtgcgtatggccgaggccctaggcgtcgagccgttgcagcggacgacctga

SEQ ID NO: 348440 - DNA, 5496 bp, Pseudomonas aeruginosa
atggccagcaaacagaagatcctgtgggacgacggcgagcgggtgttctgccgcgcccgcccatccggtgatggcggcgccagcgtgttgctggtgcgcccggccgccgaacatccattgcctgccacgctggaacggctggcccacgagtacagcctgcgtgacgaactgcacagctcctgggcgttgcgcccgcaggcgctgcatcgcgaaggcggcaagacccgcctgctgctcgacgaccccggcggcgagccgctgtcacgcttgctgcgccaggccctggacactcgaacctgtctgcgtctggccgtggacatcgccgtggcactgcgccacctgcaccagcgtggcctggtgcacaaggacctcaagcccaaccacatccaggtcaactgcaccgatggccaggcacgcctgaccggcttcggtctggcctcgcgattgccgcgcgagcgccaggcgcccgaaccgccggagaccattgccggcacgctggcctatatggcgccggaacagaccgggcggatgaaccgctccatcgactcgcgcagcgacctctatgcctttggcgtggtcctctaccagatgcttacgggcacgctgccgttcacagccagcgacccgatggagtgggtgcactgccacatcgcacgcaagccgctgccgcccggcgaacgggttgccggcgtgccgctgatgctctcgcagatcgttctcaagctgctcgccaagaccgccgaggagcgttaccagagtgcggccggcgtcgagcacgacctgcgtcgctgcctggacgactggcaacgggaagggcgcatcgagcccttcagcctggacgaacagggtacgccggatcgcctgctggtccctgagaaactctacggccgcgaacgtgaggtcgaggtgctggtcgaggccttcgcgcgtatcgtcgccagcagcacgccggagctggtgctggtgtcgggctattccggaatcggcaagtcgtcggtggtcaacgagctgcacaaggtgctggtgccgccgcgcgggttgttcgcttccggcaagttcgaccagtacaagcgcgacattccctactcgacgctggtacaggccttccaggggctggtgcgcacgctgctgggcaagagcggcgacgtgctggagggctggcgcagagcgctgctggaggcgttggagcctaacgcccggttgattaccgatctgattcccgagctgcggctgattatcggcgatcagccaccggtgccggagcttgagccgcagcaggctcagcgtcgcttcctgctggtgttccgccgcttcattggggtgttcgcccgcgctgatcacccgctggcgctgttcctcgacgacctgcaatggctggatgcggcgaccctcgacctgctggaagatctactcacccattcggagctgcgccacctgatgctggtgggcgcctaccgcgacaacgaggtggacgccagtcatccgctgacgcgcaagctgcaaaccatccgccaggccggcgtgcgcatcgaggagatccgcctggcaccgctggcccgtgcgcacatcgaacagttgatcgccgaggccctgcgctgtccgccgccgagcatcgtggcgctggcccggctggtgcaggacaagaccgccggcaacccgttcttcgtcatccagttcctccaggcgctagccgaggaagaattgctgtcctacgaccacgaggcccggcgctggcgctgggagcccgagcgcatccacgccaagggcttcaccgacaatgttgtcgacctcatggtcggcaagcttgcgcgcctgccgcttgaaacccgcgaggccctgcagcagttggcctgcctgggcaacatggcgcagatcgataccctggcgactgtgctcgacctgccgtcggccaaggtccactcgatactctggtcggcggtgcgccaggaactggtggagcgcgtggagggagcctgcgcgtttgcccacgaccgcattcacgaggcagcgtattcactgatcgccgaaacctcccgtgccgaggcgcacctgcgcatcggtcgtctgctggccgagcagacgccggtggagcggcgcgaagaggccatcttcgagatcgtcggccagctcaatcgcggcgctgggctgatcgaagcccgcgccgagcgtgaacaactggccgagtacaacctgttggccgggcagcgcgccaaggcctccagcgcctacagctcggcgctggcctacctgggcgccggtgcggaactgctcgatggcgattgctgggagcgccgccacgacctgtgctttgccctggaactcaatcgcgccgagtgtgaattccttactggccagctggcgctggctgacgagcgcctgaccgcgctgacgccacgcgccgccaccacggtggagcaggcggcggtggcctgcttgcagatggacgtgtgcctgttgcaggaccacagtgacagggccgtcgccgtgtgcctggcgtacctgcatgcggtcggcatccactggtcggcacacccggacgacgatcaggtgcgcgaggaataccagcagatctggacgcaactgggcgagcgcagcatcgaacagctgatcgacctgcctctgatggaggatgccgcctccctggcgaccctcgatgccctcggcaaactgttcgctccagccctgcagagcgacgccaacctggccagcctgaccatctgcaaggccgtcagcctgagcctggaacggggcaactgcgacgcctcctgcatgctctatgcgaatgtcgggcgcgtcgctggccgtcgcttcggtgacttcgaggccggctaccgctttggtcgcctgggctgcgagctggtcgatcggcgcggcctgaatcgccatgaagcgcgaacctacctgtgcttctcgatgttcgtggcgcgctggatgcgcccggtacgcgagtgccgggaactgctgcgccgggctttcgttgcggccaaccgcgtcggtgacctggcttatgccgcctatgccggcaacggtcacaactccgatgtgctgttcctcggcgagccgctggcgcaggtgcacgaagaggccgagcagggcctggcctatgcgcagaaggtgcgcttcggcctggtggtggatttcatcagcacgcagctggcgctaatccgtacgcttcgcgggcagacctcgaccttcggctgtttcgacgatccgcagttcgacgaggcgcgtttcgaagcgcacctggagagcacgccgggccttgcgctggcagcggccaagtactggacgcgcaagctgcaggcgcgctacatggcgggagactacgccgcggccatggactgtgtgaggcgggcgaaggcgctgttgtggatggtggagtccttcaccgaggaggccgagtatcacttccacgcggcgctgaccctggccgccagcttcgatgccatcgaggccggcgagcggcccggccttttgcaggagctgaccggccatcacatgcagttgcaggtgtgggcgcagcagtgcgctgaatccttcgcctgccgcgtggcactggtgggcgcggaaatcgcccgcgtcgaagggcggctggttgacgccgagctgctctacgaagaggccatccgccaagcgcaggacaacggtttcgtgcagatcgaggcgctggccaacgagctggcggggcgtttctacggcgcgcgcggactggccaagatcgcccgcgtctacctgcaggatgcgcgttacggctacctgcgctggggcgccgacggcaaggtacgtcaacttgagggacgctatcgctatctgcgcaacgaggagcccgcgcctggcccgaccgcgaccattgccaccccggtggaacacctggatctggtcaccgtgctcaaggtgtctcaggccgcctccggggaaatcgttctggagaagctgatcgacatggtgatgcgcaccgccatcgagcaggccggcgccgaacgcggcgtgctggtcctcgccgaaacgggggagccgcgcatcgcggcgctggcgactgtcggtgataaggcgatgctgttgtgcaacgaaccgatcagcgcggccgcgctggctgaaacggtgctctaccaggtgctacgcaccggcgagagtctatgcctggaagacgccatggtcgatccgggattcaccactgacccctatgtccgccagcacggcgcgcgttcgatcctctgcatgccactgatgaaccaagccaagctcaccggtgcgctttacctggagaacaacctctcggccggcgtgttcagcgcggcgcggatcgccgtgctgcgattgctggcctcacaggcggcaatctccctggagaacgcgcgtctgtaccgcgatgcggcggagcgcgaggcgaagattcgtcgactggtggacgccaacatcatcggcatcatcgtctggagtgcaggcggcgagatagccgaagccaacgacgccttcctgcgcatggtcggctacgagcgcgacgacctgctgtccggccgcgtgcgctggcacgacatgaccccgcccgaatccctggcactgagtcaggcgcatcttgctacggctattcggaccgggcatgcgcagcccttcgagaaggaatacatccgcaaggatggcagccgcgtgccggtgatcgtcggcctggcagccttcgaggccagcctgcaggagggggtggccttcgtgctcgatctcactgagcgcaagcgggccgaggagcgcgtgcgcgagggcgagcgccgctatcgcgaggtgcagacggaactggcccacgccaaccgcgtggcgaccatggggcaactggcggcgtccatcgcccacgaggtgaaccagccgattgccgccaccgtgaccaatgccaatgccgccttgcgctggctgggtgcgcagccgccggggctgggcgaagtcagccaggtgctagggcgcatcatcaaggacgccaatcgagcagccgaggtgctggggcgcatccgccaactgatccgcaagaccccgccgcagaggcagcccgtggacgtcagcgcggcgctgcgcgagatggtcgagttcacccgcggcgaggcggccaaatgcggcgccttggtgcgcgtcgaacttgccgacggcctgccggaagtggagggcgatcgggtcgagttgcagcaggtgatgctcaatctgatcgtcaatgctctggaagccatgggcggtgtgcctgccagcgagcgccacctgctggtcagctccgagtacgacgaggatggcgtgcgggtgagagtgtgcgacagcgggccaggcttcgccgagagcaatgcggacctgctcttcgcgccgttctacaccaccaaggccaccggcatgggcatgggcctgtcgatctgccgctcgatcatcgacagccatggcggccgtctctgggccagcgccaaccagccacgcggagcggtggtgcagttcaccctgccggcgcatcccgcgaaggacacctga

SEQ ID NO: 348441 - DNA, 423 bp, Pseudomonas aeruginosa
atgcaaatcggagagctggccttgcgcgccggcgtcagtacgagggcgcttcgccattacgagtcgcggcagctgatcgagtcgtcgcggctggacaatggttatcgcgactatccctcgtccatggtgcagcgcgtgctttgggttcgcgagctgctcgagtgcggcttcagcacccggcagatccacggcctgctgcagtatctggaggaggaggaagatagcgagggcttcctcgcctgcctgcagcagcacctggaaaagctggtagcgctggatgcactccaggcgcaactggccgagcgccgcgagcgcctggcggaaaagatcgagcgttatctgcccctgcacgagagcctggtgcgcgcccccgatctgcgacctcccgaacgagctcatgcacaagccacgttggagagatga

SEQ ID NO: 348442 - DNA, 750 bp, Pseudomonas aeruginosa
atgggaaagctaagcaacaaggtcgccctggtcacgggcggcaacagcggtatcggactggccaccgcacaacgattcgccctggaaggcgccgaagtggtcatcaccggacgccgccgggatgcgctggaggaggcggtcggcctcatcggtaaaagcgccgttggtatccgcgcggacgccagccggctggcggatctggacgcgctatatcaggaggtgggcgagcgcttcggtcgcctcgacgtgttggtcgccaatgccggcatcattcgcccggctccgggggatcaggttgacgaacagcagttcgacgagcagttcgacatcaacgtcaagggcgtcttctacaccatccagaaagcgctgccgctgctgcgcgacggcggctccatcgtactggtgtcgtccatcgcccacctgaaggcactggaagcccatgtggtctatgcggcgaccaaggcggcggtgcgctccttcgcccgcagctgggcggcggaactcaagggtcgcaacatccgcgtcaactgcctgagccccggtccggtgctgaccccaatcatcggcaagatggggatcggcgaggcgcagttcagcgctttcgaaaagcagctagcggggctgataccgctgggccgtctcggccgtcccgaagagttggcgaacgcggcgctgttcctcgcatccgacgacagcagtttcgtcactggcgtcgacctgtgtgtcgatggcggtttgtcgcagctctga

SEQ ID NO: 348443 - DNA, 978 bp, Pseudomonas aeruginosa
atgaccgacgagaccaaaggaaccacccgccgcgccctgatgagcgcaggcgtagccgccgcgaccctggcggttgccgtccccatgctggcgagccaggcgagcgctgcccaggcaccggccgccacgggcgcacgccgcaaggagcaagggtcgggatacctcacactgcgtgacggcacccaactgttctacaaggattggggcagcgggcagcccatcgtgttccaccacggctggccgctctcgggggacgactgggacaatcagatgctgttcttcctcgccaaggggtaccgcgtgattgcccatgaccgccgtggccatggccgctccacgcagacggcgcaaggtaatgacatggatacctacgccgccgacctggcggaactggcggcgcacctggacctcaagaatgccgtgcacatcggccactccacaggcggtggcgaggtcgcccgctacgtcgcgcgccatggtgcaggccgcgttgccaaggcagtgctgatcggcgctgtgccgccgatcatgctgcaatccgagaagaaccccggcgggctgccgctgaaggtcttcgacggcttccgcgaggcactcgccgccagccgttcgaacttctaccgcgacgtggcggcaggccccttctacggcttcaatcggccaggtgcgaaggtctccgaagcggtgatcgacaattggtggcgccagggcatgagcggcggcgccaaggctcattacgactgcattgcagccttctcggaaaccgacttcacggaggatctgaagcagatcgcggtgccgactctggtgctgcacggggaagacgaccagatcgtccccatcgacgactccgcgcggctctcgatcaagctgctgcggcacggcaccctgaagacctaccccggcctgccccacggcatgtgcaccacccacgccgacaccatcaacgcagacctgctggccttcatcaaaggctga

SEQ ID NO: 348444 - DNA, 234 bp, Pseudomonas aeruginosa
atgagtaccatgaacatctccctgccggacgccctcaagacctttgttgatgaccaagtcagccagcgaggctacagcaccagcagcgaatatgtgcgggagctgattcgcaaggatcaggatcggcagcacctacgtggtctgccgctggctggggctgaatcggcccccactgctcctgtggatggcgactacttcgaatccttgcgcgtcagggttcgaaagtctctatga

SEQ ID NO: 348445 - DNA, 246 bp, Pseudomonas aeruginosa
gtgcaaaatgtcttagccaacgttatggtcagcatttctgagttgaagaaggatccgtcagcagtcatcgctgaagcagatggtatgccggtggccgttctcaaccataaccgtgtgatgggctacttagcgcctgccaagctatacgagcaggtgacggagcgcctggaagacttggagttgatcgaagtgatcaaggcacgctctggcgagcagggcattccagtgagtctggatgacttataa

SEQ ID NO: 348446 - DNA, 630 bp, Pseudomonas aeruginosa
atgcaacgtcacaggaaacttatggcaaagaaactatctcgcagcgaatggtacaatgccgacgttcgccgaaaaaaatggatcgacacagttgccactcaaaattattcctatggagcacaatatattgagagcctatcggaaccagactttctaaaattaaaacagcgctggagctcctataaacacagaagcagtaaaaggtccattagttttgaagcaactcctaggacttttcaattgctcaaaaagctccaaaaaaacaggacactcaccgagaccctggagagcttaataaatcaaagttttaatcagcacgatccacatagatcaatcgcacaaaaaacaaattgccaaatcgagattgaaagaaagaaatgtcatgagcaacaaaagcctgacgaaccaccgacaatggaaagtaaacttaaagacatagcagatgtactaaaggacttgaaaggagaaatcaaagaattacgaaatcttttatcgtgcgcagcgatcaagcccaacaatgtcttgaacagcaaaacaaaaaacaacaatagtgaaccgcacaaaataaaaactccaaccccaaactcagacctggatccgatccaggtgggtgggcgagaaaagtggtag

SEQ ID NO: 348447 - DNA, 1086 bp, Pseudomonas aeruginosa
atgagtaaaaggttgaggcttctgattgagcagggtgtactgctgaaaagcaagcagcagactgggggacgccccaggttttcctatcggatcgccccgaagtttgaggtagcgctatcctcattgaggcagcgacgtatagatgaaaagtggcttggccgtttattggtgtcagaccaacgcccttttgaaaatctctctatacctgaacgcgcatttctagccctattgtggagccaagtaaaagtcgctcgagcctgtgtccttggtggagtggggggctcacggttagcgaagctggcaggagtcgatcgatctacggtccatgcgctactttcccagttgcaggctaagggactactgatccagtcgcgggcggattttacggcggacggcagagcaaataagacgaaagtgtactttctcttggggccagagctattggcttgttggcctatggcttttacctggtatatcgatgcaaatgacatgctgggttggctgctgggacgttctgatgactttggcattgaggaactcgcatctattactcctcctggatttgatcggcggataatacaggcatggttgcgggagtttctgcattcgtatgaggagcgttattatcttctcattcagttatgtgccgctctttcaatcgccttttctgctaaaggctgtaatctgtggatggataactctctctacattgaaacggaaagggctttgctaaatatccttcggctccctgtaaccggtcctggtgagcatcacgcagcgatcgaaaaccttgatttccgtaagctggatacggacgtgcaggctaaggttgccttcgtcgaacaatttgtcattcggctgattgcagcgctcaggaaagattttccgtttgaactatttcctggtggcccgcttcctttgttgcttagctgctaccccgaggcaaatgaggtggcaaaaagctgtttccgactgcgtatggatgttgtttttgagagtgaggttgcgggaatgaagttcaaagagttcttagaggcttctgaggtggcggttctgcctgagcagttaaaaatgaagtcagaatag

SEQ ID NO: 348448 - DNA, 657 bp, Pseudomonas aeruginosa
atgctgcgccatccccagaataccaatcatcatattcatgctgatgacctctttgaaggtcttccggtcatgatcgagaaagggccattcgtcactgagtacctagtggctctgaaacgcaccatcgatttgacgcttaatcagtaccctagagtctttgccttcaggattgacctaaggcctcccaccaatggcagtgctcctagctatacatgcacaaatgccattcttaataggttccttgagtcatttaaggctaagataaaacacaatcgttatatggcgagacaaaaaaataagtacgcacacggatgcaatgttagatacgtttgggcaagggaggttggtcgcagtgatcgtcctcactatcacttgctgtttcttttgaatcatgatgccttctatacgctaggcaggatcaattccgttagtgacaacatgtacagtcgtctaaatgaggcatgggccagtgcgcttggtctgtcgttagaggctatagctggtttggttcacgtgccagagaatccagtctatcgtttacaccgcgatgaccttgaagctcagagggcacttttctatagagcaagctacctctgtaagagcgctacgaagaggtttggtgatggcaaccatggctttgggcatagtcgtgggtga

SEQ ID NO: 348449 - DNA, 462 bp, Pseudomonas aeruginosa
atgataatgatcagagcgctcgcgctgctatccggctttgccatgagcaccacagccatctgcaccgctcacgctggcacttacgaatggacctcgggatacgcccaaggcgtcgccgagtacttggtcgacgatggcaacggcaatgagctgaacatctcttgccctgatgatgatgagagtcccgtcgcggcctacgccaccatcgctaacaagcagtattcgtcggacgatggagttggtttcgatgtgatcgtcgatggcacgtcctatagcaaccctttcttcactgactgccgtgcctgtagcgctaacttccccggattctggtctgcactacgtagagccaataacctgcagatcagtgctaatggtaagactctgacattaccaaccaaaaacctgaaaagccttctccttcctttcgacaacaaacaaaatatttgccgctccgcgtggtag

SEQ ID NO: 348450 - DNA, 570 bp, Pseudomonas aeruginosa
atgaaggaaatgccctcgaccacagcagacaagtggttctatgaagagaagggccaacgcctcggaggcatcgatgagccggcgatgatcaccctgatccagtccggcaagctggggcatggcagcagcgtctggaagcaaggcttcgcagattgggtcaagttggaggaaacgcctctgcgcatccacctcgaccagctctccccgcctccgctggcgggaccgcatgtgaacaacaccctggtttgggtgctggcctttgcgccgatcattggctacctgctggagtcgttcgttgcaggcctgttcaacaccaacgagacgcaatgggagcgcgccatggcggagagccgctactggtacgtcaccctgctgctgaacatcaccctatcggtgttcgactccaagcggctcaagcaagcaggccatgacatcggccgcttcaaaggctgggtattcgtggtgccggtctatctgtatctacgcgccaagctgctgaatcagaacctcgcctacttcatcacctggatcgcgtgcttcgtcatcagtctcggtgcccaccaagcctaa

SEQ ID NO: 348451 - DNA, 189 bp, Pseudomonas aeruginosa
atgacgctactccggatcttggttgcggttttcatgttcgccggcctcctcgccggctgtctggcgattctgctgctggtgatgctgatggtgcgcttcccacctctgctgattgccatgctgctggcgttgctgcgtttcattggtcaggccggcaacagcatctccgtagcacctgagacggcataa

SEQ ID NO: 348452 - DNA, 4929 bp, Pseudomonas aeruginosa
atgagttttgccattgccggcctgaccaacgccaacgagttctacagccagcattacctggacgagatcctcgaaaaagacctcaagtccctgttcgaccagtggaaggagcagggcgccgaaagccccgtcgcacgtctgcgcgcttcctccggtgccaacggttacttccgcgcccgccagcgtttcttgagcgagcgcaaggccagcgagcgtgccagcctatttatcgatctggtgcagccgctgctgcaggccatcggctatcaactggcgccggaaaacctaaccctggccgatggcgaactgccggtgctggccacctatcgagatgccaagcaccagccgctgctggtgatcgccgcagccatcgccggagtagatgacgaagagctggggccgctgcagctcaagccgcaggcggccgacagccacggcaaaagccgccaggtcgacagcgattgggaagaaaccctcagtcgccgtctgttcgccgacgaccacccgccacgctgggtgctgctggtgcaccacgaagaatggctgctgatcgagcgcagcaagtgggggcgcaaggcgctgctcagcttcaagctgcccgacctgttcggtccgcgtgacgacaaattgctgcgtaccctggcggcactggcgggcagccagtcggtgctgcccaccgaaggaggtgtggcgctgctcgacagcctggacgacaactcccataaacatgccttcgaggtctccaccgacctcaaatatgccctgcgcgaatgtatcgagctgatcgccaacgaggccatctggtacaagcgcactgtggccaaggagaaggtctacgagcgcaacgacaccgacctggccgagcagctcagccgcgaaagcctgcgctacatgtaccgcctgctgttcctcttctacatcgaggcgcgccccgagctgggctatgcgcccattgatgccgaggcctacctcaagggctacagcgtcgagcatctgcgcgagctggaacagaccccgctgaccaccgtcgaggcgcaggagggctattacttccatgaaagcctcaagcagttgtttggtctgatctggcagggcttcccgcgtcgcgcggacaacagcgggcagatggacttcaccgcagggcacgacctgctgctcgacaccggctttaccatcgccccgctgcagggccatctgttcgatccggcgcgcacgccgctgctgggcagcgtcaagctgcgcaaccgcgtgctgcaacaggtgatcgagctgatgtcgctgtcccgcggcggtggcaagcgccgccgtggccgcatcagctacggcaccctgggcatcaaccagctcggcgctgtgtatgaatccctgctgtccttccgaggcttctttgccgaggaagacctctacgaagtccgccccgaccccaaaggcaaaaaagccagcacgggcgaggagggggacgacgccgacagcgatgacgacctcgacagcagcgaagatccggaaagctccgacgcggacaagaagaaggatgccgagctcgacccgctggatgccgcctatttcgtcccggtcagtgccatcggccagtacaccgacgccgagcgcctgtttggtggcaaaacacgcatatcccccaggggcacctttatctatcgtctggccggtcgtgcgcgggaaaagtccgcttcttactacaccccggaagtgctgacccagtgcctggtggagcatgcgctgaaggagattctccccggcaaaaccgctgacgaaattctccagctcaccatctgcgaaccagccatgggcagcgcggcgttccttaacgaagccgtcaaccagctggccgaagcctacctgcaggctaagcagaaggagctgggccagagcatcccccacgagcagtacaccgaagaaaagcagcgggtgaagatgtacatcgccgacagcaatgtcttcggtgtggacttgaaccccattgctgtggaactggccgaggtctcgctctggctcaacgccatcttcaagggcagccacgtgccctggttcggcctgcagctgtacaacggcaactccctggtaggagcccgccgtgaggtattcagcaccgcccagctcagccccggcaaaggcgagagcggcctgcccgagcgcgactggcgcgccgctgcaccgaaggcgctgccgctgacgcaggcacccaaggccaccgagatttaccacttcctgctgcccgccgaaggcatgggcatggtcagcgacaaggtggtcaaggcgctggagccagcggccttcgagcagttcaagcaatggcgcaaggcctttaccgcacctcttaccagggatgaagtgcaccgcgtgcaggcgctgagccaggcggcggagaagctctggcagcaacacgccgaagaactggcgcgggtgcgcaaggccacctgtgacgagttgcacgtctggcccgacccggcggctaaccgcgcgcccaccagcaccgcgcagaaagacgccatctaccagcgcgagatgctcagcgaggcgcagaaaaacgccagcccctaccgtcgcctcaagctggtgatggatgcctggtgcgccctgtggttctggccgctggaaaaggctggcgagctgcccagccgcgagcactggtggtttgtgctggagaccgtgctgctgggtaatgccagcctgaccagcgccccggccgatgacctgttcccggaaacccaaccgcaacaggggctggacttcacccccgagcgtgaccgttacggtcatgtggatatcgctgcactgatcgaggccctaccgcagctgcaggtggcgcagcgggtggccggtcagcagcactttatgcactgggcgctggagtttgccgatgtgttcaagacgcgtggcggcttcgatgtgatcctcggtaacccgccgtggatcaaggtggagtggaacgagcagtcgctgctgtcggactttgatccgcgttttgccattcgcaagctcagcgccaagcagacggcggatcagcgtgaagtggtgtttgctgctctgccgcaggccaaggcggattatctaagtgaatgcgtggccaccgagggtatggggcagttccttaacgctacccagaactatccgctgctcaaggggcagcagagcaacctgtacaaatgctttctaccgttggtgtggcagttggggagtggggtgcaggcactgttgcatccggaggggctgtacgacgatcccaatggaggggggctgcgggaggccatgtactcgcggctccgagcgcactatcagttccagaatgagttgaagctttttgccgaaatcggcaatcgggtgaagttcagcatcaacatctacggcgcagcgcagacaccggctttcaagaccatagcgaacgtcatgcatccgcagaccacttttgcagcgttggagcatgcaggcggtggtgtaacgcctggcatcaagacggaggcagggaactgggatctggcaggtcaccgcaaccgtatcgttgaagtgacggaaagcacgctggcgacgtttgctctactttatgacgcacccggtactcctgcgctgagggcgcgtttgccagcggtgcatagccgcgaactggtatctgtgctggagaaatttgcccgagtgccgcggcgcctcggtgacttggagggtgattatttcaccttggaaatgtggcacgaaactggtgcgcaaaaggacggcaccatccgccgtcgcagccgaggcgagcagggttttgtgcgtgatcctgcggattttgtgctgtccggcccgcatttctatgtaggcaacccgcttagcaaaaccccaaagccgatctgtgagacgcacaaagcctacgataccctcgacctcgaaaccctgcccgacgactacctgccgcgcagcaactacctgcccgcctgcgacgccattgaatatgcccgccgcgtgccacgggtgagttgggagcgtgtgggagtagaggcaaagccacaaccagtcacgaactaccaccgtctatttttcaggaatatgctttcgcaaagtggagagcgaactcttatctcagcgatttaccccaagggaatatccaacatacatccggttcagtgcgcagtttttaggaacgaaactgacctgttggcagctgctggtgttacctgcagtatcgttgctgacttttatataaaggcaacgggtaaggcgatgctttacgacgcttggactcaacttccctgcttaagtgagtccaatcctgtcagggttagggcgctgttgctaaatagcctaaccacgcactacgctgatctgtggcgcaagtgctggcaacctttcttccagcaggaccgttgggccagcaaggacccacgtttgccgcaggacttcttcgcccagctcacccccgaatggcagcgaaactgcgctttgcgcagcgactacgcccgccgtcaggccctggtggaaatcgatgtgctcgccgcccaggtcctgggcctgactttggacgagctgctgaccatctaccgcgtgcagttcccggtgatgcgccaatacgagcgcgacacctggtacgacgccaacggccgcatcgtcttcaccaccagcaagggcctggccggcgtcggcttgccacgcaaacccggcaagaaagacgagccctgcaccctgatccatcccgacggcaaccgcgaaaccaaacgcctcggctgggacgatgtgatgccgcgctctaccgaaaacggcatcggcaagccccagctcgccgacggcaccgtcatcgagcgcatggtgctggatgacacccaacccggcggcccgatcaaccgcatcatccgctacaccgctcccttcaccctcgccgaccgcgaagccgactaccgcgtggcctgggcgcattttgaaagaagggatgaggaatga

SEQ ID NO: 348453 - DNA, 1902 bp, Pseudomonas aeruginosa
atgactcagcaacgatatccagcagatttgccggtgacgttggaggacgttcaaggctgtggctggaaagaagttctacaggggatagctgaggaagatttcggctattcagcgttgtggagcgccttctccaaagctgcgggctcggcaatggaggcgggtcgtcagaagcatgccaaagtgctttggctgctggcggatgcctgttcgatgatgctgcatccaaatagtctgaccgagcccttcaagccctttgcggtgttccaagatcgtcgctcagcgctgccagaggatttcactgctgaggacttgtcgctttttcgctcagtgatggaatttgttgacgatcccctgcttaaagcacgcttggctgatttgctttggctggtgggcagtccccgggacattaagcacgcgcttgcagctattgatgcctatcgcgttctgccgctcagtcctaacacttggagcagaggtagccaagagtgctgggagcgtggggtggtgctggcccaaatggtgggcaaggggggcggagaccgtctcgcaacactacaacagcgagtcgttgatgcgcttaaagcgagtactgagggggacggattctttggggttaagctggccaggatgctgcgcaatcaccggttggcccgcgttgatgggggcggcattgcgcagaaactggaggcgatagcgcgtgcgcttgatgatcagggggatgtatttggagccagggctttctacgaagagtccgcccattggttccgctggctggggcagcaggaaaaacatgcggaaatgaccgtcgcccaggccgaaacctatgttagggaagctgcttttcagtcggtcaatgccctgccatccaacatgatcgccaatagcttgtatgagaaagcgatacagatttatcgggacatccctggtaaatggcggccgacttatcgagtggatgagcgtatcgcagagttacgacggcagcagagccaggcaggcgagcaggtactcgatgaaatgggggtgattcgtagccccagcatggacattaccgagttcgtcgagcagtcacgtaagttggtcagcggtaagccagctctcgatgccctcaatatgctcgccaatattcatccgggggagcgagttgctgctttacgagaaactgtgatcgagcggatgaggcagtttccgttgcaatggatatttgagagcacgaccttcagtcgcgatgggcgtgtgattgccaagcgtcctgcactgaatcttctggctaccgagttatcgacaaacgacgaacgaaccattcaggccgcgatggttcgggattacgcaatgtttcttggtatcacggtgcaaggtgccatcctgcctgcactggaggctttgcggttggagcatcgcatacgcaaggctgatttcatcgaacttgcgcagcactcacccatcgtgccgagtggcaggggcgtgctattcggcaaagcgcttttcgccggctatgacggcgatttcgaggcggcactgcatctgctcatcccccaggtcgaacatatggttcgcactcatttgaaacaggccggagcctctacaacgacgctcgacaaggaagggatagaaaacgaaaacggcttaagcacccttatggcgctgcccgaagctgaggaggttttcggggatgatatggcgtttgagttgaaggcgctgttttgcgatccatttggccccaacctgcgcaacgaactggcgcacgggctgttggatgatgccgcttgcagatcggctgcgtccgtttatgcctggtggctgggtttgaggttggtgttcaatacgtggtggaacgctcgggcagccactgttgagggcgaagagcaggctggtcagaaaagtgagagtacaaccgatgcatag

SEQ ID NO: 348454 - DNA, 291 bp, Pseudomonas aeruginosa
atgcatagcgctgctgatctttttgaagaactcagctcggtcgatgagcccaccggcatcgagtccaaccgcgccagcgagctgggcaagtcgctgatgcaaacagtagttgccttctccaacgagccagagctggatggcggttatctgctgctgggcgcgaacggcttcgtcaatgacagagggtacaccgtattacccgtactatccgctattgcccccttcaccctggctgatcgtgtgtcgaactaccgggtagcctgggcgaattttgaatcggcagttgcatga

SEQ ID NO: 348455 - DNA, 771 bp, Pseudomonas aeruginosa
atgtcggttctttcttatttagaaaggcgcgctagtgaagcggttctctctgatgctgagaagcgttctatcaatacatcgattacaacgctgcgcgcaagattgattagttattttgggaagaatgtgtctgaacaatttcagtttggttcatccacgcgtggcactatcttgccaagaaaaatggatgaaggctcagatatcgactacatgatcgtcttttcggagtctggttatacgccgcagacctatcttgatcgagttaagcggtttgccgaaacttactactctcggtcagaaatcaagcagtcatcgcccactatcgttctggaacttaaccatatcaagttcgatctggttccagcgcttaagtcctactatgcctaccaaatcgtaggccgtaatggcgagtggcttgataccaatcctaatgatttcaacgagactctgacggcgaagaacaatcaggagctgttcaagatcaaaccgaccatccggctggtcaagttttggaatgctaggagcggttacgtgtttgactcatacagtcttgagaaatggattgttgggttgtcgtattgggggtgtatcaaccaagcacagtaccttttcaatgtttttgacaacctgagtccatactcgatagatacacagtggcgtcgtgagaaagtggagcgggctaaaagaatcattgcaacggttcgccagtatgagcaagacggcatgccgtacagtgctgaagaagaagtgaaaaaattgatccctgagtaa

SEQ ID NO: 348456 - DNA, 1674 bp, Pseudomonas aeruginosa
  misc_feature (1292)..(1292): n is a, c, g, or t
atgtcgtacgctggaatatctgttcgtgaagcactggaaaaactgaatgcacccaataacggctggtacctgcctcaggtacagcgccagtatgtgtggggggctcggcatgagtcggaggactatgtatgtcttttgctggactcgctgcttcagcgctatccaattggtggcgtggtgctgtgggagacggatcagaaggtgccgtaccgctattttgtccaggactacgtaccaggtcactatgcccggcaggtagacgaggggcggcggggggctgccaaggccttggtgtatgacggtcagcaacgcttgcagactctgtactcggtgttacggcatcgcttcaacggacgtattttgcacttcgatctgttgttcgatcctgcgatagctgagtcggatgagaccggttttttgttccgtgatgctggtgcggaagcggatccgcgctatctgcgcatgaccgaggtgtcctgtttacgttgcaacgaggatgagaaggtcgacctggaggatcgtgctctagttgcagcggcagatgacaaaggcttgaagctgcgtgtgcgaagaaacctgagcgccttgtgggacatcttcgtagataccaatcacaaatcgattgcttacttttcggttaaagctgacacagagaaagaagttaacgaggtctttcgccggctgaatactggtggtattgcgctgactcagttggagctggtactgggcaagatcaaggcagttcagtctgattacgaagaaaagctctgggcgctatcggaaacgatcaccaagaaaagtggcggaattgtattctcctccgcgtcgatccttcagtttttttacctacttattaagaatactattcgtatctcggaagatcggttggatacggctgacatcccggcatttctggatattttggagaatgattccgaaccgctggttgaggttttcagtagctatttgaacggtcttttcagcatcaatcatgcttcgattgtgcctcgctggctggcggtcttgcccattgctgcttacctgaccgagctaaagcgccatggccacgagtggcgtattcgtacttgggatgagtcagaagtaaggcttgttcatcagtatttcctgctctcccagttatgcgactggaatactcaaaccatggtcaatgcctttgcccgcgaagcgatggaggcgggccgaaacaattggtcgttccctctagatacgatccggcagattgcggttgagaagaaccgtaccggtgaacttaatgagtaccagttgctganccaaccctggctctccaccaaggtgctcatgcctggtcgaagctacgtgtttcacgacagcaagccacaggtcgatcatatttttccgctcaagcttgatgggcaagatgaggcataccaagaagctgtcgatgtgctttggaacttccagcctgtttcagcggaggtcaacaactacaagcgggcacgtcacccaagggagtttttcaaagctgcagacggtagtaagtacttcggagcttacgatttcgttcctgccacagacagtgagctctgggacgcgcctttggcgtttgtggctgagagaaggaagcacatgcttgcagctcttgagggtctctatggcctgaaggtggtaaagactggcgatgagggtatttag

SEQ ID NO: 348457 - DNA, 2091 bp, Pseudomonas aeruginosa
atgacgctggccccgaaaatcgcgatgtctgacgactttctcaagtcctttgctgccgtgcctcgtgctcagcagttggccgtactgaattttgtggccaagtttcggcagaaccccatggcgacagggataaattacgagcgcattcgtgatgctgccgatgcaaacatgcgttcggtgcgtatcaacgacaatatgcgcggcattgtgctcaagcctgatgttggcaatgtgtattgcttgctctgggtcgatcagcacgatgcggcataccaatgggccagccgccatcgcgtagctattcacccagatgtgggcagcattcaggtgtatgcggtgcatgaggtctccgatgctcagcctgcgcagtccgagcggagctgtgagattgcaggccttttccatgccctcaaggatcgcgaggttcgtcgcttgggggttccggatgatcggttggcggcggtaagggcggtgtgcaccgaggagcagctggaggctcttcagaatgagcttcccgatgaggccttcgaggcgctttatctttttgctgctggtgattcgtacgagaagatcatcagcgagcgaggcgcgccagatgaagtggatcagagcgactttgctgcggcacttgagcgcgatggcagccgtcgacattttgtcgtgctgacggatgacagcgatctggaggctttgttggcagcgcctctggagcggtggcgagtgtttttgcatcctagccagcgcaagctggtggagcgcgactggaatggtccggtcaaggtaacaggcggtgccggaaccgggaaaacggtggtggcgatgcaccgggcagcgaggcttgcgcgccaatacgcggcactgcccggtaagcctgttctgtttaccaccttcaccaaaacgttggctgaagacattcgccaacatttgcagatgctttgtacaccgcaggagctggaaaagattcaggtggtcaaccttgatcaatgggccttgggtctgttgcgccgctttggttatccccatgagttactctataaagaggcggatcgtcggcgtttctggcaggcagcgatgtctgccatgcctgccggggctgatttatctctgccctttatgcgtgccgaattcgagcgtgttgtgctgccccagggctgcgaaacggcagatcaatatatgcgtgccagccgtattggccgcgggggtcagcttgggcgcgcccagcgcaagtcaatctggccggtttttgccgagtaccgtgcgcaacttcaagcggccaaccttcgggagccggaagaggcatttcgcgaggcatgtcagctgttggagcgggagaagccggtactgggcatacgcgccatggtgatagacgaagggcaagacattagcgctgcagcctttgccttgatccgcgcagctgtgccccccgctgacaatgacctgtttatcgttggagatgcgcatcagcgcatctatcggcacaaagtcgttctgagtcgagtaggcattgaggtgcgtggccgtagtcgcagtctccgtattaattaccgtacaacggatgagattcgtcagtgggcctgtgcgcagttggagggctgcagcgttgatgacctggatggtaacgccgacagtttgcgtggctatcgctcactaacgcacggcgacatgccagacttgattctctcctcatccgcgcaggacgatctggcacatatccagtcgttgctggggcagctccaggcagatgatatcgagttgcgccaagtctgcattacggcgcgaaccaatgatgatctgagcaccattggtgatgggttgcagcgtgcaggaattgccgtgctccgtctggataacacgacttccgatgatgcgaaggctgagggggtacgtctggcaaccatgcaccgcatcaaggggcttgagtttagtgtggtgatcgtggctgcctacaaagggtcggtcgcttatgctgaacagttcagccgagatgaggacgccggcgtagctgaggataccgagcttgcagagcgctgcctgctacatgtggcggcaacgcgggccaagaggaatctctttgtgctaagtcggggttaa

SEQ ID NO: 348458 - DNA, 318 bp, Pseudomonas aeruginosa
atgcctgccatccacgaagtcgccacattgacctcaaagggccaggtcacactgcccaaatccgttcgccagctactgggtattgataccggcggtaaaatcgcattcgacctacgcggaggtgaaatcgtggtcagccgcgtagaaaccacccacgaagaccctgccatcggtgcattcctgggtttgctggaggctgatatccgaggcggccgcaacctcaccaccctgccggaagacttggcgcaaaccatgctcgccaacgtaaaccactccgtaaacctggacgaagatattgacggtgaggtcgcgctctga

SEQ ID NO: 348459 - DNA, 3315 bp, Pseudomonas aeruginosa
atgaccgatgctctcgacacactgtcctccgatttccggcttcatgagctttttggtgacgaccaactcgctaccgccacccagatctggattcttgaaatcgaacgcgcagcgtccgcagaactgcggttcctctacggccgatcactgcctggtacccaccagtctcacaagtggagcggcacctccagtagcaaaacgtccgtgtatgatggctgctccgccaagacccatgccctgacgctgtacacatcaacgcagcaacttaagatcttcctgacgcacttcctttctggtgcgacactggatgctgccagccagctggccgatatccagctcgatgacaagctaagcagcaaggtgggcgccaccctcttcgggggcaaccctgtggcccgcccggtcatgcacttaccgacacgagacttctttcagtttcgtaccagccgcctcagcccgaccagctatgccagcgtggacagcgcagccatttcgtccgacagcaaggcagagaccttcaatatggcggagggcttggatcgaaaggtcgcggaagccgcatgccagagcctcaacgcagataccggacttgacttcgccgcactggatgcgtggcggataggggattttgagttcatctgcatccccggccaaaatcgcgcagaaaagagcaagtacgacatcacgctgaagggggatgacgcctctctcaaacttttcgagccactgacccgagacgcatccgacctcttggtcgtggtgaatgcctacagtgctgacagcgtactggccacccatacagatcggttggacaaacacgaaaagtaccccctgaagcatggcttcaggcttgaagccttcgagaagcagctcagtacatcattcaccctggaaatttacgccctcaatgacctcggcgaatccttcctggtgctacagaccggtaactacttcgtccgcagcatgaacctcaacatgcagatggtcgagcctatccgctcgaatgaaaagctgagctggttgtcgaaacgcgtcccgccgaaagaacaagcgaagcttcaggccaccgcacgggtcggccgggcattacgggattcgcgctcacaactgggaggccacacagctgacccttgggtagctctcaacagtgccaccgaaacaaccctgaagcagctctgccccaaaccctccaacgggcgattcttccttacgctcaccgacagcggtggcacgagccgaatacaactgacggaatggctccgtaaaatcttcgagaaccaccatgacgctcagattgcctggttcgatccattcatggaggacgtaggcatcgatcttcttcatcgaatgggcaccgcggcgggtgactatctcatcatcacgaccgaaaaagagtcgaaggaagatagcaaagcaggcgctgatcaaccgaatcgtgttcagaaccttctcaaccagtgcactgggtggggcaatggctacttcggcaacgtccgcctcaaagtgctggccgtacctgagagcaagatccatgatcgaatgatcctgattcgatcatccagcggtcgcccgctggccggctaccagctttccaactcgatacaacgcgccaatgataactacccactggtggcaacacccatccctctggatgtgatgccacacgtcttcgagtactgcgaccagatcattcaaagcacgctgcacggtgagggcaagaaggtgcctaacgccaagctgatcttcgactcaacctcattcaccaagtccgagaaagaagacgaggaaccagagggcttgaaccatcgttcctgtttcagtgacgctcctcgcgcgggcgatgtgctggcttggtggcttgatgacctggaactcgcggggttgtctggtgctgaactgatgactcagttgaagaccaagggcaaggtcaaagatggaaagctcaatccagaaatgtttgagagtatacctgccaagttctggaccgaaggtctgcctctcgaagatttccactcagcctgggacgcccttggctatgtgctggcacactgccaaggggggcaactgttcactgatgagcacaaaccctttccgcaggtgctgcagagcgcattgctcgaacatctcaatcctgcacgcaaaggtgctttacagccaagggcccgaaaggcgctgctggaccttgagcactatcgctcgcaagagctcaccgagctgctgctttcctctgatgatcccgacgcggctttccgctactcaccacccgatacctcatggagtgactactatgccctcaagctactctggtcacatgcacctcaagcgcttgtcaactggctgaacgatgtatgtgcgcaacctgtgaagggcttgcgtcctaacgtgctggtcattgaggtcttcaagcgcatctgtctgtcactcggcttcgataagcacccggcacaaatagaagccctcctgcgcagtgagacaagcctcgtcacctgggtaggtctgcatgcgttcaaggatgcaatcaacaaaggtgcgtggggcgtcgaaacacttggccttgtcgaccaggtaacaccagccagcgcccatcgaaccattctttgctggctgatcaacgaagcaaactatgatgagtcggaggtcaagcaccagctgattgcaaagctgacgcaatcacttgaaggaccactgtctgatcaggaacttcaggacatcctgcaacctgtacgcgggcgtcttggaaggctacatcacttcacaccttggattctcgagtcattgcttcttcccatgctcgaacagaagacagtagacacggctcaggtctccagagaatggctcagtgagttgacgagccaatggcgcggctcactgaaagacaacaacagcctgtatttcaagctggaggcagacggtgctttcactgatgaacttgccacattgactcgctatctggctccagaagatcagaaagcgatcgtcgctgaactgtggaagatcttcaatgcgctggctcgaacgattcgtcaccctttcagcgctcaggtgagctggcaatcgcacattcgagcgcatgaagtgaacctctggctctatgcattggctcgccgtatcgacgcactggttgatgttgatataaccccatcactggctgaacttctgcttgagagcgaggagattattgatcggcttcccgattcataccgggactatgccaccagcaccgaactgctcacgtacatgaagggtgatcctgaccaactcaaatctcatagcctgggccatactattcacaaggctatcactagcggccagtaa

SEQ ID NO: 348460 - DNA, 1203 bp, Pseudomonas aeruginosa
atgccgacaaaaactgccgaagattttctggccgcgctagcggatgagcttgcaattagtgagtcacggtacgaccaggcccgccgcagctatgcgtcattgggtgactggctgcaccgtccagaatccaccgtccttgcatacgatcctcaggtctatgtgcaaggatcatttcggctggggacggcaattcgtcctttaaatgatgaggaagagtacgacgtcgactcggtgtgtttgctccggttccttggaacgagagatctgacccaggcgcaactgaaggagcttgtggggaacgagataaaggcataccacagagcccagaacatggtgaagcctgttcgagagggacggcgttgctgggtgcttgactatgcagatggtgcccagtttcacatggatatcatcccggctgtcccaaacgctgagcggcagcggttgttgctcgaagctcgaaatcttgacctgaaatggtccgagacggcgatggtcattacagatcttgagtcgcctgtctaccatgtggtttccgatgactggcagcgctccaacccgaagggttatgccgaatggttcaagggcaggatgggggaagtgttcgagcgccgcaagcgcgcattggcggagtcgatcaaagccagcgtcgaagatattccagattacaaggtaagaacacctcttcagtccgccatcatgatcttgaagcgtcatcgtgacggcatgttcgaagggcggtatgacgaacgcccgatttcgatcatcatcacgacacttgccgcccatgcttacaatggcgaggaaaagattgctgatgccttgtacgcagtcctctcgcggatgcatgacttcatcgagcatgatggatcacactgcattattcgcaacccgtccgatcccctcgaaaactttgcagacaagtggcctgtacatccggaacgggaggtcgctttttttgagtggttgcatcaggcacggcgagattttgagaagctagcgggccaggttgaacgtcgccgtctgatcgagagtgttcaaccccgcatgggggctgccgtcgagagggctgccacacgcctgggccctctacctggcagcatgctgagtcctgcttcagccgccgctgcgatcgcttcagcagccagtgttccagcttttccgaatactcgacgggagcctacttcgccaagggggtttgcttga

SEQ ID NO: 348461 - DNA, 1401 bp, Pseudomonas aeruginosa
atgatgatcgaaagtgctcatcgcctgctttcatccgaacaggaaactggtgagcccgcgccgtcagatcatagagtcctacctgcgcagcgagcaagaaactccaaattccgcttcctctattcccgggctgtatgggcaggcctgttgtcggttgaagagggacatgcagtggatgctgagctgcaggagcaccacctcgccggtgtatacgccgctcagcttgcacgaataggccctacagaggagcccatttggcaagagcccaacagacgtggctatggtgctatctcattgaaagcaaaggtagtccgcttgccagagggggcggcagttaagtgtcgagcagtcgatgagcttgtcgcactactagagcagtttggtcttggagggttggcatctgacttggtacaagagccgagcgagattgaagtcatcctcttcgacggacagagtattcaagcgctgatgatgttgggccaggctggagcaaaaacgttcatcaactacgacctggtatttgctgagcgtgatggcgctcgtcttgatcccgcatacgtcaacctcgggtctgccaaggttgcgattgttggctgcggatctctaggttctaaggtggccgtgcagcttgccagagttggtgtgggcaagtttgtgctggtggatggcgacattctggctgtgggtaatttggttcgtaatgaactcgattggcgggcggtggggatgcacaagtcgcaagcactggctgctcgcgtgaatgaagtaaatgccgattgcgaagtcctcactcgcactactgtgctcggtggccaagagagcggagggtcaaccgctaccacgatggagtacatcgcagactgtgatttgatcattgatgcaaccgccgatcctgcggtcttcaacctttgttcggccattgcacgaagagccaagaaatcgttgtgctgggctcaggtgtttggtggtggggctggcggaatagttgttcggttacgtccagatatagatcccacacctttggagacccgtaggcgcattgaggcgtggtacgccactcagggcgtcgaatggcctgatgaaccggccgcccagccttatgctgggggcgccgaattgggagtgccgctgatagccgacgatgcagacgtcactgtgattgctgcgcacctgtctcgctttgccactgacctacttgctcgtcccgaagcgacgatcttcccatactccgcttatttgattggcctgtctggaagatggctctttacggcgccattcgatgttaggccgatcgatcttggcccaaccgatggttggagcatggaggtacaagatggcgacgctgaggccttcaaggaattcttcgcagaccttctaccaaaggccaacgatgcaagttga

SEQ ID NO: 348462 - DNA, 1071 bp, Pseudomonas aeruginosa
ttggtaaattacttcattaaatcgcttatcgattgggtcttcaggcgacgttcgccgggcgtcacactgattcgagtaggcgtgcccctctttggtctggtgctcataggactgacagtcggcattacgattccaacttcccaggggccgtttaactttagctgggatacctctggaggctccggtgcgttgagctggggtgtgttcgcgatagcttgtgtgattgtattgctaggtggatggctggtcgttcgtgatatccgccgagagagccgtaagaaggtcatcgtgatcgaggtcagagggttgagagattggcaaggtcaacctctggcttcagcagttccctcatcaatactcggtcgccgtgagcagatgatcatcgacttgaggcaaggaattgtagacggacagatcgtgagcccagaggctgcagtacgtcgaatttcaagcctgcctgatgacattgcacgacgttgcgatgggttggatcgatccgatatatcgtttgtgctcggtgggcttgcaccggtgccattgctttttctcctcggagtgatcgtcgacgacgagtcaaacgcggtcatcatggactgggatcggcaactacgtgcctggcgtgggttgacggttgatgatgacggtaagcgctttgtggtggcaggcttggataccttgcaagtaggggtgacccgcgtggcgctctgtgtgtccgcttcgtacgatgttttggatgttgatgtgcagatcgctgaagcaggaacgcccattatccggatggatctggaggggcgtggtaccgacacgcattggtccgagttgaaacaacaacaactcgctcagcagtttctcgatacagtgatgtccttggttcgaaaaggcgttacagaaataactttgtttctggctgcccctgcaagcctggcattgcggctaggcatgctgtatgacaagcggaatctccctcgcctggaggtcaatcagtacgaacaggccgatcctaaacgattcccttgggtagtgcgcatgcctgtagctggggtgctccagccggaaatcgtccaccgatga

SEQ ID NO: 348463 - DNA, 2262 bp, Pseudomonas aeruginosa
atgaacgcacgtaccgcccccgaacatccctggtgggagcgactcgccccgctgctgaacgacctcaggtgcgacgcgcacggccacctgcacgtcgatggcaggatcttcgccccgcatctccgggcccaggccgcggactcgccggcgacccacgacgacccgcgcgtggcgcagctccagcagcatctctaccagcgctactacgcgggtctcgaagagacgcccgacgcctctcctccactctggcggccggcccccggcacgccattggtttccggcccctggcaggtgctggagcaactggccgacggcgcgctggtggccacccgaggccccctgacacgccggctcgagccgggcgagtatctattcgagggcgctcccgcgcgggcccgccggcatgacctggtgtcccgccagcggtcacgctggagcgaacgcctggacccggcgtttctctatctgttcggggcggccgagtccgacgcttgcagcgacgatgccatgctgcgctactacttcgccgtgcggcccgaacgcctgggcgacctggtcgtgcttatacgacaggcgctggaccgcgcgcagctgccattcagcctgaaatatccgctccaaccggcggccctgctgcgcctggacgccgtggtgctctacggttgcgcgcgccacgcacggcaactgcacgccaccctggccagcctccgctcgcggctggccgagctgttgcggccggtccaggccctatggacccaggcgttgatgcccggactcggtttcgcccaggacccggacgacggtctcagcttcggcgagagccgctgccgcgccctggctcgcgggatgctcgacgccgccctggctgcaagcggcacccctctcacggcgatccgcgagcgtttcgtcgcggcgggaatcgactggcacgcgccccatctcgaggaagacgaggacgatcgcttcggcttgcgccagctgcgcttcgcgccgccacagcagcgcgtggcggcgatcacccccgctctggcggatacgcggctgtggcgggaaaccctggcgatcggcaaccagttgtgcgccgaggcgctgtggtacggcccggcctgtacctggatcggcgacgacgccgacgacgaaaacggtcgcctggacgcgttcacccgcagcatgaacggcaacctgtatgacggaaccctcggtgtggcggcctatcttgcccgcctggccggctgcagcggcgaccacctgcaccgcgaaaccgccgtcggcgcgctctggcatgcactgcgacaaccggcagcggtttccctcggtttctacgaaggtcggctcggcatcgtcgcccaaggcctgggcattgcccgtgagctggacgaggcgcccttgctcgcggcctgtctggacgccgccgggcagttgctggagcgactgccggaggacaccgccgacagcgacctgatgcacggcctcgccggcgccgtgctcggcctgctggagctggcgcgccaggcgccggcgctggcggagcacgcccggcaacgcgcctgccggtacggccggcgactgatcgccctggccagcaagacgccccacggctggcattggccggcggacgaccagcccctgggcctgtgcggactgtcgcacggcaactccggcatcgccctcgccttcgccgcgctgcaacgtgaggcgccgacgccggactggcgggaggcgttgcggggcgcgctggattacgaaggtttctggtacctgccacgccagcgcaactggccctacctgttcgccgaggacgccagcagcttcgatgaccgcccgcagaactgcggcatggcctggtgccatggcgctccgggcatcgccttggcgcgcctggcgctctggcgtctcggcggcgaccgcgcgatgcgggagcaggccctggccactttcgccacggtcgccgaggacctgcaggccggccacggccgatccggcgatagctacaacctgtgccacggtccggcaggcaacgccgacatgctgctggatgccgctcactatctggcgcagccgcactgggaacggctcgccagggacgtcgccaggcgcggcgtagcgcaacaggcggagcgctggcggagcggcctgggagtcgccgacggacatgcccaggggttgatgctagggctcgccgggaccggctacttcctgttgcgttgcgcgctcggcgagccgtcacccagcctgctgctgccacccggcctgctatcgtga

SEQ ID NO: 348464 - DNA, 1065 bp, Pseudomonas aeruginosa
gtgatactgacccgtcacaacaccctgctgttcctgctcaatcatcgactgctgtccatcgaggacctggtcgaacactgtatttccgtacgtaaccgtagccagcgcaatcgcggcttcagtgtgacctggcggaatggccagggctactacgtcaagcagcaccagcccgacgccggcccgtgggaagcgtgctccagcgtggtcaacgaagctcgtgtgctggacctcctggacgggattccaggtactcccgccttgcgcctgttcgatccgcagcggcaggcactggtgctcgactggcaaatccacccggcttcctgcgccgaacgcgcgctgcgcgatggcctgccttgcgtcgacaccgccgcgctgctcggcggcgcgctggcgaagctgcatggacggttggccaccctgggtcgcatggatggcaatggacggccgttctcggcagagccaccctgggtcctgagtttccgccgcctacatccgctcgccggggaagatcagagctgggcgcaggcgcgcctggtcgcgctgatcggcgaacagggcgacatcctgcccgagctgaccgcgctcgctggcgcctggccgaccggccaactgatccatggcgacatgaagtggcagaactgccttttgcgcgctaccgagacggaaggaccgccgtgcgtcttcatcgactgggaaatggccgccctgggcgaccccctgtgggatctcgccggtctggcgcagtcctggctgaaggcctggctggacgccctggaggtactgcccggcgacgaccagcaggcgctcaccgcccgcggcgcggaggcgttcgctgtctatcggccggccctggccgcgctatggaacgcctacctgagcggccactccgacagctcttcggtgcgtttcgccgccttgtgcggggcgcgcctgatgcagacgctctatgaagactgcgccgacgaggaacatctttcgagtgtccacctgctgctcctgcaactggccagcaatctgctgcaacggcccgcggaggccgccacctacctgctggagaccccatga

SEQ ID NO: 348465 - DNA, 840 bp, Pseudomonas aeruginosa
atgacacagcaatcatcccaatcggccagcgccaccctcggggtcgccggcctcctctcggggcagctcctcgggaacaatctcgacatgactctccaggccgcggccggtggcgacaaggacggcggcaaggggggcggtggcaagggcagcggtggcaaaggcggtggcgatcagcccagcaccaaggccaagacctgcaaaccgacccgcaatccctgttgcaaaccgaccaagccgccacagtgcaagagccagccgcaggttcccggcacccagaccaagacctgcaagccaacccgcaacccctgctgccgggccagcgaagaactggtcggcgacaccgaggcggtgctggcgacccaggccaagacctgcaagccaacccgtaatccgtgctgcacgggtgacgacgaggtcgaccaggtccgcggcacccagaccaaaacctgcaagccgacgcgcaacccttgctgcaagggcgccgacgaaggtccgggcgagcttcctagcacccaggccaagacttgcaagccgacccgcaacccatgctgcacggacgacgaccagaccgatcaggtccgcggcacccagaccaagacctgcaagccaacccgcaacccttgctgcaagggcgccgacgaaggtccgggcgagcttcctggcacccaggccaagacttgcaagccgacccgcaacccgtgctgcaggttggggaccgacggtccgctgacggcgaccggcacccaggcgaaaacctgcaagccgacgcgcaatccgtgctgcaagccgacccgcaagccccgttgctcgatcgaatcggaggtcgatgacgagtag

SEQ ID NO: 348466 - DNA, 531 bp, Pseudomonas aeruginosa
atgaacgctcaacccatggaaagcgaagccacacaggagcgactctgtagcgagttcggcgagttgctcggcctcgacagcccggtgtcggtggatgtcctgaacgcagcgctggccagcgaaagttatgcgcgcagcctgctgagcagccggcgaacgccgcaaatgctgaagatgctgctggcctctccgccgcaacgggcggtccgcaaggccgagttcggcacgctggagctgttgcagcgaggcagccgggcgctgctcgcctggtcgaagaccgggttctccactaccgacccggtggagcgccagcaacgaaccgacgcctgcctggcctgccccgaccgccgcgccgcggccggccatccgttgcacgccagccgttcggacctgggcgtctgcggtctgtgcggttgccccttgtcacgcaaggtggcgatgacgtcggaaacctgtccgggacaattggccggcgagccctcgcgcaatcgctggggccagaccatcgccgtatcgcccctgcaggcatag

SEQ ID NO: 348467 - DNA, 1836 bp, Pseudomonas aeruginosa
atggcttatgacgcatgtcaggtaaacattccgcccggcaccacgctgtgtaccgagaaccactgcagcagcttccgggaaacctccaccatggccaagtactgcaagtgcatcggctgggacggccaacccataaaggactgcacgccgcagggcggttcgttcccggtcgaggccggcgagtgctacaacagcgccaccggacagcggctcaacatcaccatgaacgcttgccaggacatgcgcgaccaggaccgtaactggagctggcgcgcctgctactgctgctgctcgtgtttcgcctggggcacccggatcaccgtcgccgccgatacctaccgctcggtcgagacgatcggcctggacgatccggtgctgaccacccgggtccgggtagtcggcggcaaaccggtgctggactgggtttcccgaccggtgaccttctccgacggcatggcgccggcggagaaccagaccgccgtgctgctgcagtacggcgtggacggagaactggtggtgacgccggaccagccgctgctgatggccgacggtagcctgaagaccgctgaccgcgtgaccaccgacgatcacctggtcgatctccacggcgaaccggtggcggtcaccgcagtggtgctcggcaagcgcacggtcggtttccattcgctgtccgcccagcagttcgagagcgaggaagagcccggctggttcctcgaaaccaacggggtggtcgccggcgaccacatggtcctggccatgcaggactccgacggcatcgccgcgatgttcgccaagggtcacgacgccctgccgaagatcggcaccgacggctatgccgagaacgcccgcgacgccgtgtccgcctcggcggcgctgggacgtggcgcgcacgagatcgtctcgctcaacttcaccccgctcgacgaattgctggcggtgcagtcgccggtaccctacggtgcgacgccctacgtcacacagaagcaggcgcgcgatatcgctatcaacggcacctaccgcggcctgacggaaaccttcctgaccaacgagttcagctatttctcctcgctgttcaaggcgttctatccgcacgtcaacttcttcctcaactgggaagatctcaaccccaacatgttcgccttcaatgcctacgggcagcagacggtctacctgtccggccagctactacgcctggaaggcatgttcaagcaggggctggcgatgctgatggcccagggcgtcgcgcgcttcctgcccagcggcaacagcaacgactccggcctgctgtgcaccggacccgccgactacagcggcgccaaccaggtcctgcagaccctgttctacggcgaatacatgacctgggcgacggaaggctaccgtcaggtccgctacctgttcagcctgatcgacccggaaaaccaggtgggccaggaagtctgctcgacgccgtcgatcccctgccgtctggaaaccatcgatgcggccatatccggcttcccgctgccggcctgcgccggcggtccggttccaggcgcgctcaagctggaaagtgcggtctggaccagttacgaggacgcgttggcgatcagggtcgacttcaacctgcgcctgcgcgaatccagcgcgctcaaccctcgccactacaccttcagcggcgagccgcacatggacgtgatcatcggcctggtgcaactggacagccgcgatccgtcgctggtctggctgctgatcgacggcgaccagccggtggccgggctgacgctgacggtgaaggacgtcatcgccgacaacggctcgacgctcgatcccgccgcgaccagtgtgccggtgctctga

SEQ ID NO: 348468 - DNA, 8751 bp, Pseudomonas aeruginosa
atgataatcgccgactcctcattatccgattttttcctgaaaaaccccgacttcgatataagaaagtttgatttcatcgcgaataagagtgaagcgccgttcaagtctctctctgtcgattcggaaacattggcgaagctggaaagttaccagcgcctgttcgaactcagcgatagccagcatgtcgtccatacgctccgggaaaatggtttccacagtgcgcaccggatcgccgcgctgccggccagccaattcgtctcgcgcatggagggcctgctgggcgagaagcaggccgggcagatccacgcccgggcgttggacatcaagcaacgggtcgtccatctatgggcgaacctgctggcgtcgcaacccggttccgccttcgccggttctcgcgggcgaacggtcgacgaacagaccctgggcgagatccaggcgctgcccagctaccaggacatgttcggcaaccagaactattgccagtgcgaggcatgcaagtcgatcttcggaccggcggcctattacgtcgacatcatgcggatcaccgaccgctatgtcagcacggtcaacgccgcggccattcccgccggctacgcgctggcgcaacgtcggccaggactgttctcgctgccgctgagctgcgccaccaccaacgacctgctgccgtacctggaaatcgtcgatgaaatcctcgccgagcgggtttgccgggaatccggggaaagcgacgtggatttctacctggcgaccaccggctatcccttcatggtcccggacaaccaaccgctgcggcggatacggctgatcctggagaacctcgacctgagcctggcggcgctctacgccacgaccagcggaatgcccagcgaagatccgcaggccctggcccgcgagctgctgtggttgtcgctggaacagaccgcgttcgtcaccaccccgctcaccgacagcggcgaactacaagctgcctggggcctgcgcgaggccgggctggacagcctcgcgtggctgagcgcgttctcccggcagtccgggctttcccgcgccgaggtgaccgcgctgacccagcaggagctgacccccgccgaactcgcggccggactcgcccaccgcttctggttcaatctaagcctggccagcgggcagtcggtgcagatccttctcggcagcagcgagcccgatacgctggacaacctcgacccgcagaccctcgatgcgctcaaccgctacatccgtctcagccgctggagcggcatcggtttcgccgaccttggctacgcgctggacggcctggggatcgtcacgctggacgacgcggccttaggacgcctggccacggcccgtggcgtggtccagacgctggcctggagctgggcgcgggcgagcgcgctgtgggccgccatgccgaccagcgggcgctacgacgccgacagcacggagtcggtattcgaccgtgtctggaacgccccggcgatccgcggcgatggccggatctaccaccccagggacgacaccaacccgctgtaccaggatccggtggtcgactggctgatcgcggactcgaccaccagcgacgccgcgttcaacgtttcgcgcctgcgcgccggcctgcaactggattcggacgacctggccacgctggccggcctgaccttccctgaccaggacagcgtggcgctcgacgtcgccaacctctcgacgctctatcgcgtcgccgcgctggcccgtgcctgcgagctggagattgcggcgttcggccaggtcgccagttggctggaagtagacctcggccagccactggaggcggatgccgtctcgctgatcctgttgttttccgcctggctacaacaaaccgccctggatatcgagcagatcgccttcttcgtcgctgccgacggctcgccggacagcgccgggggcgtcgccttggcttatgccgacatgcaggtcatctgggcgcaagccaccggcgtactgttcggcccggccgtgctgctcggcgacagcgtcgacgccgagcgcgccgcggaaatctatacggcgctcctggcgttgtcgccatcgccattgctggaggtcggcgaagactaccggcagcatgtcgccaacgcaccgccgccgcccctggcgctggttcccgtgccggtcacggcagcggccctgcagggcttgcgcgagccgccgctggggctgagcgaagcggaactgcaacaggtgctcgctgcgttgaacgcagccaacgcggcgcaagccgaagtcctcgacaatggcctggccggcccgctcgacagcgccccctcgaacgtcgcggcgctcggcgcgctgatcgcggcgcagcccggggcagccgcctggatcgccagcctgctgcgtccgagcgccgccgaaggggagcaatgggacgccatcgccgccaggctcatggagttgctacgcctgcagatggcctgcggcacgctggggctggccgacgccgtgatcgtcagcgtccgcgaacggccagcggtgttcggcgtcgacctcgccgggctgttcgccctgggtaccctacacgcgctgcaacgctacctcgacacccgccagcgcctcgggttgaacgacgagctttacctcgcctacctggccatgcccgccgacgccgcttgccaactgggcggcaaggcggcggcgttgtgcctgctcgccggctggtcgcgggccgacctttgcggcgtgatcgcctgcctcggcgcgacgccggcgctgtactcggacaccgagggcctggcacggctatgcgtgaccttcaaccaactcggcaaaggcggcttcggcagcgcggcctaccggagcttcctcgagagccgccagtgggcactcgacagcgccaacggtgtcgcccactggcaggcttggggcacgctcgccgactcgaccgaaggcgccgcagcggccttcttcggcaaagcctgggcagagcggcgggcggtgatcctcgccacactactggaagcccgccgcgatgccctggcaccgaccctgctctggtacttccagctcagccatcccgagatcgacacgccggaccggctctcgggctacctgctgatcgatgtgcagatggggggcaccaaccagacctcgcgcgtggtggaagccaccgcggcggtgcagatgtacctgaaccgcgcgcgcgccaacctggagcccggcatcgagcagttgccgatccccgaggtctggtgggaatggttgaccacctatcgcatgtgggaagccaaccgcaaggtgttcctgtacccggagaactacctggtgccgaccctgcgctcttccagcacccgcctgttccgtgcgctggagtccgacctgatgcaggtcgacatcacccccgagcgagtcaccgacgcctaccgcaactacgtgcagggactcgacctgctggcctcgctgcagttcgtcgatgccttccgctgtaccgtagtcgaccattaccgcggcgacatcgacaccctgttccagttcgctcgcaccagcaccgaaccctacgaatactactgggccaagcaggaactggacgccagttggtcgcagtggtcgagcatcgacgtcaccatcaagtcgccctacgtcaccccggtgttcgccttcggccgcctgttcgtgttctgggtggagaccagcgtggtgtcgagcaccgccatcgaaacccagggcagcgacacccgctcgcagaacagcgtggtgtacaaggccgcgattcgctacagcttcatggacgccaacggcaactgggtcggcgaccagaccctcgagccggaacgggtggtctatgccgagccgaataacgtcaagctctcgccgcagtcgggctatggcctgttcgagatgaacaaccttttctggcagaagtgcaacgtgcaggtctactcgcagcgggcgccgatcggcccggccagcgacgtgcgcatcgacgagaagatcgtcgtgctctacggcccgttcctggagaacagctccaacggcacgccgctcgatatccccatgccgacgctcgacgcccaacgcaacccggcggttttgcagttcgaactcgatgcctaccgtcgcgggcggatcgtcaaccaggccatcgcttcgggaattcgcggcgaggtctgcctgcgcgagccgaaggtgctcaaccgggaactgcagcgcgactacctgttcacccgcaccgagttcctcaacttcaccgacaactactccaccggtgtccctcccacgctgcgcccgctgtacgactacgcgatgaaccggctgcatgcccagccgaccctgaacctgttccgcaccaactattacggcgactggaacaacagtatcgacaccgcgttgctgaaaagccgggtcgacgccgggcgcctgaagttcaagggcgtcgaggacgccggcgcgcaacagatcgtcgccgacctactcggcgccggttacctggcggcggcgagcggcggaagctacacggtgctacccgggttcaccggcaacgcggattttcgcttcctgcttggcggcgccgacagccgcgacgaccagatcatccgccagtggaccaagcagcgcctgctggtggccagcatcgagcaaagcacggtgcggtccgccaccttcctgatgaccgccttgaacgactacgccgccagccaggcgctgaccgatctcaaggccgccgccttcctggatgcgcaaggctacgtggcgcccggtttcagctcgcgctccgacctgtcgcagatactcgacggagcgcccgaccatgcctcgatcgagttcacgctgcgcagcatcctcttcgtcgcgatgggcgatccgctgctgctgggcaccctggccaaccgtggctgcagtacctacgtggtgaagaaccagccttcgctgttcgtcggcaatatcggtacggaaagttacctggtcaccccgctcaccgagcgcggcccgtgcctgaacagcgtggcgcgggcggtcggcatgcagaccgtgcagtcggtgacgcgggactcgttcatcagcaacgacatcagcccggcggaatcgtcgacagtcttcgaccagttgctcggcaacggcatcatcgactcgctgggccgcttgctggaaccgttccgcggcgacgaggacctgtccttcctgttcgccgcggagccggcgcagagccgtcagatcaagaccgcccaggtccgggtggtgctcatcgacctgccgaccatgactagcgtttcctactacgcggaaaacgacgaagtgatcatcaccgacgccagcttcgtacgcatgggcatctcgcccgcccagtccaagcaggtgttcgataccctgacgcagcgcaacgtgatcgggccgcagggctacatctcgccgaactacgacccacgcaacgacctcgccgacctgttccccgaagagccgccgcagaaggccgcgctgctcaccgcggatgtcgccgtgatcctcgacggctacttcgacaacacctggcagcgcggcatccaggatctctactaccgcttcacccgcctcagcaccggcgccgtgccacggctgtccaccgcgttgcaggtcggtggagtggacgccctcctcaacctcgagcaacagcaggcacccgtcgtcccgcaggtgccgttcagcagctacggcccgggcgagcgggtccagccaccgccctacggcgacgcgacccaggtcgacttcaacggcgtctacggggtgtatttctgggagctgttcttcttcaccccgcggctgatcgccgacgccctgttccaggccggcgacttcaagtcggcgctctactggctgcagtacatcttcaatccgacgcaacggctgagcgaactctcgccggccgacttcgtcacccccgacatcgatcagcgccaggccacggaagccttcactgcgctcaagaacaacggcgtgatcaccgaggacaaccaggtggcgcgcgactacagcagtcgcaccggcctcgactacctgttcccgacggtcaacgacccgttgctgcggacgcgaatgatcgaggaggtacgcaacgtcctcttcaatcaccagacggcgggactggccggacagttctggcgcttccagccgttccgcaaccatacccagcaggcgttgctggagaccctcaccagcccggtgcagatcgcggtctacaacagcgacccgtacgatccctacgctatcgcgcaactgcgcataggcgccttcgagaaggcgaccttctgcaactacatcgacgtgctggtcggctggggcgacagcttcttccagcgcaagacccgcgagtacctcaacgccgcctatctgctctacgtgatggccagcgacttgctcggcccgcgtccggagccggtcggtccctgtagcgaccagttgccggtgacgttccaggagatcctcgaccgctaccagaacgatccggacggcatcccgcagttcctcatcgacatggaaaacctgttcgccgcccgcgggcggaacgccgaaacgcttccgccgatggccggcggcgcggtcaacgaggtcgatgcgctgttctgcgtgccgcagaacgagatgctcctggcgcgctgggacacagtcgaggaccgcctgttcaagatccgcaacaacctggacctggacggcaaccccttgttgctgccgctgttcgccgcgcctatagacccgatggcgctggtgcgcgcggcggcggcttccggctcgaacggcggcttcgcgccgctggcgagcaaaccgccgaccgcccaggtgttccgtttcccgaccctgatcggcaatgcgcgggcggtggtcggcgacctgcagatgctcggcgcggaactcgaacaggcgctggtttcgcagaacggcgaagcgttccagatcctgcagtcgacccatgagcagcgcctcgaccaggctcaactgctggcctaccagcagcgcagcaacggcgcgcagtcttcgctggaagcgctgcaggccggccgcgcggttaccgagcagaggcgcaagtactacgccgacctggtctccgacggcatgatcgctgccgagatcctttccatcaccttcggcctggcgtcgcgcatcgccagcttcgccgccatcggcttcgagaccggcgcggcgatcttcgccatcgcgccccaggtgggttctccgttcgccatgacctatggcggccagcaactggagctgggcctgcatcgtaccgccggctcgctgaaccaggccgccctggtcttcgatacggccaaggacctgaccgacagcgccggccagtaccaacgcctcaaggccgagtgggagcagcaacgcaacgaagcggaaaaggaactgctgcagatcgacaagcagatagccgccgccgaggcggaactcgcctcggccaaggccgactacgctgcgcaccaggtcgcgatggacaacgccaaggcccagcaggccttcctgcagggcaagttcgacaaccaggactactatgcctggcgcgtcagccgtgcctcggccctctactaccaggcctaccagctcgcgctgaactcggtggacgcggtgcagagcagcctgcaatggaccctggcgagcaccgagaactaccttaccgccgatccctgggaccccggccatcgcggactgatggccgcgaacagcctgaacctggccctggaccgcatggagttcgcctattcgcagaaagatatcctgcgccaggagatcaccaaggagatccgcctctcgcagatcgacccggcgcaactgatccaactgcgtgccaccggcgtggccgatatccaactgagcgaggcgctgttcgacttcgacttccccagccactactgccggcgggtcaagaccctggagatcagcctgctgccgctggacgagagcggcgaggtcgaggaagtccacgcgatcctcacccagaccggcaacaagatcctgcgcctgccgacctccgccggcctgcagtacatgctcgacggcagcggcgatccgggcgacgcggtctggcaggactggcgcgccaaccagacggtctccctgagccggcgcgcgctggccgacggcgccttcatcgaatacttcggcgacggcgagaagctgcagcgcttcgaagggaccggcgcagtatcccactggcgctaccagttgccgaagaacaccaacccgctcgacttctcggcgatcgaggacctggtactgaccttgcgctacaccgcgctcgacggtggcgccacgtaccagcgcagcgtcgagaaggcgctttccggaccgcgctacagcgcagcgctgatgctcaacctggcgacaggctacgagagcgagtggacggaattcctcgaggacaccagctcggcggacagccagacccttgcgttcgacctggccgccggcctgtttccgtccaacgccagcgacctggtggtggacgaggcgatcgtcgcactggtggtcgccgacggtatccgcctgcccgcctcggcccgcttcatggcgctcaccgccggcgtccagccggcgaagagcatcgccagtagcggcctggccggccaggtcgagtacgcccagataccccaggcagagatcatcgggacatggcgcctgaccttcgacctgaaggctatgaaggccagtcccgaactggcccgtctgctggactcgacgggtcacatcgacggagacgcgctgttgaacgtcttcctatccgtgcaattcaccgctgccgttttcaagtga

SEQ ID NO: 348469 - DNA, 264 bp, Pseudomonas aeruginosa
atgttcgattgccgatattcagcgaaaaagaatacgttgcgtgacaacttttcaactgcatgcgccgccgcagcgtcctgcggccgacctgacccaaaggagcccctgtatgtcccgccccccatcgaagtgctcgacatctccgccgcggacgagcgcgtcgcggcgttcggccgttccacctatcgctcccgggtggtcggcaagaccatgacctcgccgttctcgatcctggccaaagtccgcgacggccagatcgtctaa

SEQ ID NO: 348470 - DNA, 1146 bp, Pseudomonas aeruginosa
atggactcggcacatacgaagccacttatattggacttattttgtggatgtggaggtttttctttaggagcagagctggctggatttcattcaatagccgctatagatatagatccaactttgcaatctgcatataaaagaaatttcccgaataccaaagctgtggagggaaatgtttctgagattcaaactagtgattggcgccagctaatcggagccataaggccagcaggtatcattggcggcccaccatgccaaggatttagtcgtataggcaaaaggcaaaaagatgatccaagaaataatcttgttcatcatttttaccggcatgtaagagaactgcgtccaaaattctttgtcatggagaacgtgcaaggtctattggatgaagaaaatatcgaaacattaatgacaggcattgatcaggtttctgatcgctacacgatactcgggccatttgtaattaatgcagcaagctatggcgcagctaccaacagactgcgcgttattgttgttggctatgataaagaggatgtcaacaagataacagttgacaacctcattggtaaaaaaaagccatctagcattgcagatgctatttccgatcttccctctcctattcccgactttaaagacccatcaagttttggatgggcgcagtatccgaatttgcaaacctctctcagttcatatgctagtgcaatgcgtaagcttcctcctaaaggtcttggcagtcgggaggctattgactatttaaagcaaggctacgtgtcaggtttactagagacgaagcacacagaagctgtcgctaagaggtataagaataccgcgaatggaaaagtcgatctcgtaagtaaatcgtacaagctgagctggactggagtaagccccacattaagggcaggaacgggatctgataagggttcatttcaagctgttcgccccttacatcctgaagaggggcgagtaataacagttagagaagccgcacggatacaaggctttccagattggtttacttttcaccccacaaagtggcatagctttcgaatgattggaaatagtgtatctccaattgtttcccgtgcgattttaagtgcaataaaaaaatctttaatggaagacgtagctaagtcagctgcatag

SEQ ID NO: 348471 - DNA, 1746 bp, Pseudomonas aeruginosa
atggctaccaagacagagaagctttctgtagataccagcccaagtaaagaggttgtggtaaatagccttactcgtgacattgctatcgacgcttgtatatttgacctgattgataactccattgatgctgcaagggacacaatatttaagctagaccagcgcctagacaaagactctccacctgaaagctatgaaaaatataaaattaaaatagatatggatggagtgggaataagcatatcggataattgcggcggtatctcttccaaactcttggaagcatcagctcttcgtttcggtgaaaggtcatcacataatttgggtatcggtgtttttggtgtcggcctcaatagagcaatttttaggataggaaaatttactgacattgaaactgacaccggaactgaaagatgtcagttagaaattaaaacagatgactacctgaagtctaagaattggtctctgcccgcgcttaagatgccatctcaaggacgggtcgggacaatcattagaactaccgggctgtccagtgaaacttcgtcattatttgctgacgccgaatgggtgagaaatctgcgaagggaaacaggtattcggtacggcaagctcattgagaaagggcttgaaatcataataaacaatgagccgattgaagctcatgttgtagagttgcgtaaagacaatccgtatgggaatgactctaaattttttagagtcgctaacaccactgtatatattgaggccggccaacataaaagacatcgcttttcagcagagcctgattacaataaagatgaaaacgcaggactgaccagtgaatatggctggaccatatattgtaatgaaagggcgatagtaatttcggataaatcgtggaagaccgggtgggtaaagaagtttcacagtgagttttacggctttgtaggcaacgtatactttacaaaccccaatccttcagagttgccatggaataccacaaagacagatgtcgatctaaataactcagcgtaccagtatgcactggaggacatgaggaaatttgtagataagtggcgagctaacgctggggatgcgaagagacgaaagaacaaagacgagcccttggttgttccgcatcccaatccgacttccggagagggaaagggtcccgctcaagggccgacgcaaggagctaaccccagtaaacctaaaggcggtaagcctgccagctctccggttaaaaaaccaccaactacaaagattgatcataacaacttttctacggtgttacctccagatattgatgagcttcattgtgacgacaagcatttagctttggttcacgaaggaaagagactagaccttaatacaatgacatacattggacttgttcttattcgcatgctattcgaagcaagcactattaagtttctggtcagaaaagagaagtacgatgaacttttgaataaagttataacagaacgaaactctgctagagcgaagaaaaacctagcgcaacttaataaaaaagagataagcaatctggaacccgacctagatgaacttattaatttcctagttgcacatgacgatgtatgggatgcagcgcgaaagaataagatccagcatagccttagaaggtttttgactcacaagaagcttcttaatagtgcggctcacaatacatttcaaaccatcaataagttagtagcctttgagattagagatgatattctcccagccctgagatatctcatagaggaatag

SEQ ID NO: 348472 - DNA, 1419 bp, Pseudomonas aeruginosa
gtgcaggcactgccttcggccgttagggctcagggcagcctgcctcgcctcgaagagcggagcgccgttcttgccgagcctccggttgggcagccggcgttgcaaaccctgccgtcggttgcgcgcgttgagggcgtgcccagcaatgccacaccgagcaacagccacaagtatctgatcgagaccaacccggcgctcaccgagctgaagcagttcctcaactcggactacctgctcggtggcctgggtatcaatccggacgatagcaagaagcgcctgggcgacggtctatacgagcagcgcctggtacgcgaagcgatcgtccagcgtacggggcagcgcttcatcgccggattgaacagcgacgaagcgatgttccgctatctgatggacaacgccatcgccagcaaggacgtattgggactgacccctggcgtcaccctcagcgccgcccaggtggcggcgctgacccacgacatcgtttggctggaagaagtcgaggtgaatggcgagaaggtcctcgcccccgtggtctacctggcccaggccgaggggcggttgggcccgaacggcgcgctgatccaggggcgcgacgtgaacctgatcaccggcggggacctgaggaacgccggtaccctgcgcgcgcagaacgacctcagcgcgacagccggcaacatcgacaacagcggcctgatcgaggccggcaaccgcctcgacctgctggccagcggctccatccgcaatgaccagggcggcatcattgccgggcgcgaggtaagcctctccgcccttaccggagacgtcatcaatgaacggacggtgacccagcaccagtcctcctacaggggaaccggtaccactgaggcatttgccgatagcgccgcgcgtatcgaggctgcgcagaagctgaccgtttcggcaggacgcgatgtagccaatattggcggtgtcatcgacagcaagggcgacctcgccttgcaaggcggcagggatgtcctggtttcggctgcggtagcggagcggggctggacggcaggaagccaggcataccagacccagacgacccagatgggcgccgaggtcgtggcggggcgcgatatcagcgtcagcgccggacgcgatatcagcgtcgtgggcagccgcatcgacgctcgtcgcgacgtgacattcgaggcgggtcgcgatgtgggcctggtcgcggctgccaacgaagagcatgcctatggcaagaccaagaaggtcactttccaggacgacaagatcacccagcaggcacgctggcggcgacctggcgatcaatgccggacaggacctgcgcctgatcgcgagccaggccagcgccggcgacgaagcctacctggtggccggcgacaagctggagctgctggccgccaacgacagcagttactacctctatga

SEQ ID NO: 348473 - DNA, 156 bp, Pseudomonas aeruginosa
atgggtggccatcaggcaaaatgcgtagaccttgataccgaaggcatcctcgaggtcttgagggtcggagaggtagcgttggtagtcctcgtcctcggcgaataccacttgccgattgtgtccccgctggaccacgtgaagcggataattcggtaa

SEQ ID NO: 348474 - DNA, 165 bp, Pseudomonas aeruginosa
gtgctgtactccccgcggcactacctggacgccaagatccgtacctcggtggacttcctcagggaacgcccgcccctggcgttcgagcgtgaccgggcgatcctcgacgatcgacgctactgggcggaaagcccaaccggcgtagcgcgcgagaccgctacctaa

SEQ ID NO: 348475 - DNA, 168 bp, Pseudomonas aeruginosa
atgtctaccgctcccgttaccctgctggtggcccgccgcgtcgccgccggccgttaccgcgacttcctcgcctggcagcgcgaaggcgaagccctcgccgccgacttccccggctacctcggctccgggcgctggcgccgcccgccggcggagacgaattccagatga

SEQ ID NO: 348476 - DNA, 918 bp, Pseudomonas aeruginosa
gtgcagcagccaaagagaaggattccttacgcttttcatttagaaggttggagccgcgagagcgggagccaagagaatctaaaaaaagcagcgaacagaatcatcccatcggattacgaaccgcttatggacggcagcattttctgtccagcgtgttttacaaacctgaatcgaatcccgaaagaaaaagatatattttcaaaccaaagagaaccgttcttctcccatcaaaagaaatggcggcatattccatgtgatctcagaattaataagccgcagggaaaaaggtatgactcttgggaggatgcaagaaaggccatcgaaaacaaggagttggtaatcgtaagtggattcatccaagatgagccggaaatcaaagatgatataactccgggcgactatacagaaacacccgttgaagatatcgatggcccgccagctaagaccccactagcacggcatactggtgaggaacttgagctgccgagtgtaatcacatccgtaatgggggtatgcagaaatttcgatacgcacctatttaaatactatcagttccctgggagagattttcccatgagattgatggatttgctccgagacattcgaggcgttacggatgtagacgatgacccaaaactctactatgcaaaaatagagagctcaaagaacatggggagaaccagttcaaatattcgcatgacatgggtcacctgtaactcctcggtaaaagatttctgcatcaagacgatagatcgagttgcatctcgaaagggaataaaagaaggcattgagtccaaaggcaagatcatgctgatctatggaaaaattgtccatagcggaattggactggcaatagatcaacctgcctggggggaatacgccttgttgcccgacaagtaccaaagcctacttgagtag

SEQ ID NO: 348477 - DNA, 1440 bp, Pseudomonas aeruginosa
atgaaaataactgaaatcttcaaactagggaaaagccagttcgagatagactttgttgacattgatccggatctggacactcggctttttgttgacccatacctattgggattccggattgatcgatggtctgttgaagcagcaagcctagtaaggtcatatttttctcacttcttgaaattaatagcggaggggaagaacgatgcagcattcgagctgttttcccatttgcacgagcctaatgaaacttgtcttggactatcatctggaaagcccagaggcaacggtgtagggtccgaagatgcaaagcgtctgtttgacagtatcattcaaagcaaagcaataagatcaggaaatgttgccgatctagaggatttcaggttatttatccccggaataggcaaggacaagatatcggacgtcactactaatatcatcagaggaaagcttctggagtatacccaggagcagtgcaagctccatgggatccccttaagtcaggggattgcagtgggaccaatctgggatcctattaggcttaactggatatccgaccattgcgactctttggtaattaatggaaaaaagatacttcttacccctaagagcattgtttcattttgcaaaatatatacaccagaggtctattacaacaagcacgtcttagagtatctgcagcatgagcacatccggatgggcagcatctgggtcgaacatagaaaggacggttctccatttgtaagtaaaaaaactctcaaagagagtgtcgtagactacagcaaagaatggctgttcgactttacagaaaaacatcctgaggtttttaaaagcttcaaagaaactcaagctctagctgtaaaaccattagacaatgagtctattgatcctgatctggacataggcaaggtcattgatcacttgatagtgcatttacaatctataactccgggcagcaatgacgcttcgagctatcatcgagcgatagtaggcattatcgagatccttctttatccaaatgtttgcaatcctgtattagagcaggagataaaccaagggagaaaaaggattgatatttattactccaacgcagccagagaaggattcttttattctttgcatatgattcataagattccttgcgcatatgtaatagccgaatgcaagaattactcgaaggatattagaaatcccgagcttgaccagatgattgggagattaacagttaatagaggaaaacttggaatcatagcctgccgaaatattgataacaaaaagctattcttggagcgctgcagggattcatttagagatgatcacgggctgattctgccactgaccgatgaagactttatcgaatcactcaaagagctgaagaaaggtaacgctcgtcatcttgaaactttactctcaaatctcaaggacgcaataattatgtcctag

SEQ ID NO: 348478 - DNA, 999 bp, Pseudomonas aeruginosa
atgagcatcaccaagctcgatgatggccggtggttcgtcgacgtcgaaccgatcaaggggaagctcttccgtaagcgattcaagaccaagggtgaggctcaacgctacgaagccacagttcggcagaagtgcattgagaacccagtttggtcggccaaacccaaggataggcggaggctttcggagctggttgatcgctgggggatactgcacggccataccctcgcggacggcgagaatcgaaagcgactcctacacatggtcgcgaaggacttgggcgatcccgttgctagtcagctaacggctcaccattacgccgagtacagaactcgactgctggcagctggtgccaatgggaagacactcaataaccgactgggctatctgcgcgcggtgttcaacgagctgctgcaactgggcgacatcgacttcgccaatccgctccagcgcgtcaaaccgctcaagcttcaggagcgcgaattgacctggctgaatgaaggccagatcagaacactattcgaagccatcaggaaccgctgcaagactccccacgtcgagatggtggcccgggtatgcctgtccactggggcccgctggggtgaggcggaatcgctggtgcctgcccgtgtacgcgccggatgcgtcaccttcgtgaacacgaagtcaaagcggacgcgctctgtgcccatcgatggtgagctggaaaccgcattgctgcgacacttccaggatcacgggctgttctccaactgccggaacagcttcgaccagaccataaagacctgcatcgccctccccgctggccaagcgtcccacgtactgcgacacaccttcgccagccacttcatgatgaatggcggaaacatcctcaccctgcagaagatcctgggccacggctcgctgacaatgacgatgcgctatgcacatctgtcgccggatcatttgcaggatgcggtgaggctcaatccgatgcgtgcgctatcgggcctctgggcttga

SEQ ID NO: 348479 - DNA, 333 bp, Pseudomonas aeruginosa
atgagattcgcaaaggtattcctctctttcggcgtcattgtcttctgtgtgctcctcatcggcggcaccggcgaagccattcgaaaacacgtcacaaagtccatctacgactcttcgcctgaagtcagggctgcaatcacgcgcgcgtccacgctcttgaaaagtagcgaccctgccgagcagaagcaggctatcgaagagtaccggccgtatcgcgagcagagcgatcaggcatacagggtgatcttctgggggcaagtgggggcttatctggtccttatgctcgccgcgaccttcctttaccttcgcttcaaccccaaacgagccgagtga

SEQ ID NO: 348480 - DNA, 1191 bp, Pseudomonas aeruginosa
atgaattttgattttccaacgaatttatctatagagagttgtgaagggtttctttcccagcttgaaagcgccgactctgtggaagatattttgatgccggagggtacgaaaaatattgcttttggtagttatgctgctgccatacaggcgataaatacttgggctcgacggagcagtagtcgaaatgtctatgtaaaggctactggggcgaagacttcggatagagttgatgagttgctgagtaggccgcataaattttgcctttctatgcttgctaagaatatatacgtagatggcgatttggaagatattcgtccattagttaatggctctgctcgtgagattattgaacagcaaggaagaacaaagtttggtcagcggcgaggagggttgtgctggtttgcattggtagatcatagtactaaaggatttgatcgaaatttttatcttcatagtcatgataaaaagccaatagtcagagggcagcttcaattcaagtctgtaatgtctgcaatggttggtaaatcgactgatcttgtagggggggcagaaccccttagtgaagaagaaagtgattatctgggtagaatcttttacgaattatttttgaatacccatgagcacggaagtcgcagtttcgagagggatacatggctaaagccgggtattcgagttatatacacaaatggtataaatcttagcgcctcaagcgtggatgctagggcgtctgcaaataaggcaatggaaaagtatttttcggctattgatgagcttccattgcagcgaagaagatttattgagataagcgttgttgactcagggcttggatatgaaggcagatggcgtgcggatcaaccgcagatagagtcggactcaggaatatcgcgtctagacgctgaatacgaaatattcaagaagtgttttacgttccgtcagacatcatctggaaaaagctctaagggacatggtttgccagtagtaatggagcggcttaccaggctaaaggctttcatgagggtacgtagcggaaggctctcactgtttcgggatttcattaataacccatttaaaaacgatgatccatgtgattttgaagattgggaaacccaagagaggggagcgagaactgagatggctccggtgtcaggtgtcgcagtgacctttctaattcccttggagttaagcgaatga

SEQ ID NO: 348481 - DNA, 2154 bp, Pseudomonas aeruginosa
atgaatggatgcttttcttttagatttaaagaggctgtgaatgcccggaaaagccttcttctgtttttctctggggaggtatcaggtgatgttgttgctaaggtagtaaaggctgatgtagaacaaaatttagtgccggcatatgtctatgtattagcctcggagagccatcgaaattcgcttcgtgatttaattgctgatgtcgcactgaaggaagaggtcgagtcattcgtaggagatgttgatagtaagctgatatatttatatttttcttgcgatggtaatgttttttttgattctaattccagtctagtgccgagtagtctttggggtgggatgcttcagtctggtgtagttgatattttccagcgtagatgtggattaatcgcatcgcagtctaattatcattttctaaaaccatcaggtgatcactgtaatgcgtttatacgagcctcaaatctcttaatttcaagtgttgaggtgtcatttattgctataggcttgttgccttttattagtgctagtctaaagcggatttatgtggacacttcatcagtgtcttatttggtaagtcaggcgttgagtatgtcgggtaaatttggtgcgacgcctccgctaattgagagttttgagtcttatgcggtttttaataaggattatgattttatagttggggcggaaagccttgtatttatttccgctactacaagtggggggttggcggagaagctgattagcaatagtggcttcgtggtaggtgctgtaattaatattttctacagctcgcttccgtctggtgtggttggtcttttcaatataactgatgcattaaatggcgatgagaattcttatcgtgctaatgattgtcctttgtgtaaaagagggtctcgcttaattaggattgtgggtgatcagtttttgcctgagacaccaacaaatgagcagctaattatcagaagggcagacttcaataaagagcgttctcttttctttagtgagtttgctacaaaaaacattctttgctggtctcagtcttctggaccagcttcaggatttaaagagctttactatattgatattgagcgtgttttgagtgagccatctcctggttttcgtgagatttttgagcgaaaagttaggaagagctttgcggtagacgttgagcttgttgtgtcattagacgactctggctcgaaggctttttctgatgctatacggtctcaagtaggcgctgcagcggaaaaagttaagtggtgttccgtatctgagctgctccctggtcagttggtaaatgtgggttctgtcgtcgtagtggctggcgcaataacgtctggcggtaagctgctggatatgtcaaggcggcttagaaaaatgcagcctactgcatcgattttatatttcgtgggtttttctaagctttcggactccgcttcacttgaacaggttcggaaggaccttcaacaaggcgggcacgagttggtagttctccagcaagttccaatgcctagagtgacggaaaatagcaaaacctcatgggatatcgaatatgattatctaatggagattggtggggatgacccacttggaaaatctgaggctttgccgaagttgcttgcagaaagactaagctcttttggtgttggacaggacaatctattccttcccgctactaacgggaagtcgctaaagctgcgtccaacattcgcattttggagtgggctaggattagatacggataaagcaactcaggctgatgtctactggactatgcaggcattgatacacgacttgagatgtaaagtgggaaaggatggtctaaacaatttttatcacgcaacggttataagtccggcttgttttgatcgctataatgatggtgttattcaatccgctctgattcgttcggctaacccaactgagcttgattactctataagtgatgattttagtcgaaagatgttgggtgtgattatttctattgtggagaatcatgctgaggagcagggtgaagctgccttggagttcttgctggcgatgtgggttggctctttgcgcctcacagagggtgacacaagaaggctgtgtgagagatttgcaggtggatcagggtcggaagatgtggactttcttctgcataaaatctcgaagtcttaa

SEQ ID NO: 348482 - DNA, 993 bp, Pseudomonas aeruginosa
atgcttgccaatgcaagcgttaaaggtgtattaaaatacaaggattttttccagattattccggctccagatgactttccaagagccccctgtttagaggctcatcatccatgtttgttagagttgaaatataaatttgaattcgatcctgacttaaagatgccagatgggaagtctgttcctgaatggatacagcaaaaagaccaagaaggaaaaattattcacgagatttcctctctcttcggtatgtactcattgtcatattttgttttttcgtcgggagggcatagctggagcatcaatacggaggctgggtctgattttgatttgcagtggcgtcagctttcgtattttgttgcggatggaaaacatcaacataaaataagcaaatttacagatgctggatgtcttcctatgggaagggttgagacatccaaggtttataactttggcgctcgatttattggggacgatttctccattcctgaccttctgccagagattttggattcctattacattcttgagcaggatgatagggatgctatttcaagagtggcaagtatctttaatagtgctctaaaaattaaggcaatatcgtcttctatatcatttgctatattcgtatcttcaatcgaatcccttgttgactaccagtatagaggggttaaggttgaaagctgtaaagagtgcaatgcgccaagatattctgtgactaggaagtttaccgactttcttaaacgttatagctcggactcggatgagctagtaaggttttacaaaagtgcatacggtcgtcgctcaaagattcttcatgctggagccctttttctaggtgagcacattcctttgaattgggcagaggacgattggagtgcatatcacatgcgctccggaattgaacgtatatgcagaatagctttcgctaactggttgcttgagcgtgctcagatgagaaagcgcacagaattttgtgtgtctgggacggaataa

SEQ ID NO: 348483 - DNA, 819 bp, Pseudomonas aeruginosa
atgtcacgacgcatttccccggtcatacccggcttcgggctgaccctgggatacaccctggtgtacctcagcctgctggtcctgatcccgctgggggccatgttcctcaagaccacccagctcagctgggagcaattctgggccatcatcagcgcgccgcgggtgctcgccgcgctcaagctgagcttcggcaccgcgctcgccgccgccgtgctcaacggcttgatcggcacgctgctggcctgggtcctggtgcgctacgaattccccggacggaagatcatcgatgccatgatcgacctgcccttcgccctacccaccgccgtcgccggtatcgccctcaccgcgctctatgcgccggccggcctggtcggccagttcgccagcgacctcggcttcaagatcgcctatacccccctggggatcaccctggcgctgaccttcgtgaccctgccgttcgtggtccgcacggtgcagccggtgctcgccgacattcccaaggaagtcgaggaagccgccgcctgcctcggcgccaggccgctgcaggtgttccgccatatcctcgtgccggcgctgctgccggcctggctgaccggtttcgccctggccttcgcccggggcgtcggcgaatacggctcggtgatcttcatcgccggcaacatgccgatgaagaccgagatcctgccgctgctgatcatggtcaagctggaccagtacgactacaccggcgccaccgccatcggcgtgctgatgctggtggtgtccttcatcctgctgctgctgatcaacctgctgcagcgtcgcatcgaaaccccgtaa

SEQ ID NO: 348484 - DNA, 699 bp, Pseudomonas aeruginosa
atgcaattcaatcccggcttcagttcgctggcggcgctgctcgccgatcccggccgcgcgcagatgatctgggcactgatggatggcagcgcccgcccggccagcgagctggcgctgctggcgggcgtctcgccgtcctccgccagcggccacctgggacggctggtcgagggtggcgtgctgagcctggaggcgcgcgggcgcaatcgcttctatcgcctggccgggcccgaagtgggacaggcggtggaagcgctggccagcgcctccctggccctgcagccgcagcggcgcagcctgccgccgagccacggcacgccgtcggcgttgcgcgaggcgcggacctgctacgaccacctggccggcgaactcgcggtcggtgtgttcgcacggatgctggatgccggctggatcgagcaggagggcaggacgctgcgcctgagcgcgaccggcgaggccgggctggccgggttggggatcgacctggcggaggtccgccgccgccgtcggcagttcgcctgcgcctgccccgactggagcgaacgcaagccgcacctcggcggcgcgctgggggcggcgttgctggaggcctgtctgcgccagggctggttgcggccgcaggatggctcgcgggcgttgcaggtgtcgtcgaagggccgcgcgggactgcgcggcctggcggagcgcacggcgggctga

SEQ ID NO: 348485 - DNA, 702 bp, Pseudomonas aeruginosa
ttgaatattcaatgcaggacggcgcttgccgcagcagcgccgtcatcgtcaatggaacatacctacaatttcatcttcatgtcatgttccggtttcgactcaagacagcggacgtcgtcccaatgcattcaacgtcgatctatccattcgactgttgattgccaatccattgtccagacggagtgccagagcagccggcaggctgcgagtacgtggcacagggtgaaaatggggccaatgagccgcggtacagatgcagcttcatggctgcgcgatattcagcgtgcagacgggcatttgctcatgtcgggtccgtgtcgggcgataccgcattgttgcttatggggttcgccgtgcacgcaggaaggtgtccgaattaggtgcaaaaaccctggaggctttggatttactggctcacaggggttgttttggaaaacccgcagattgctagagtgtccagatagcgcagaaaaccggagcaatggttcaaacgagcgtttattgacgagacccaatggaatcaagggtttgcgggaagcggtcagaggcataagtgtccgcatttctgcggtttgctggcgcttggaagcaaccccgagacgctggaggcccggcgggctgggagctgcgggcggttcaggggaagatgtgtccgtgtttcgcgacggctacacccggaacagacagcttcagtgcccatga

SEQ ID NO: 348486 - DNA, 1155 bp, Pseudomonas aeruginosa
atgaaacttcatgaagttaaagctcgcgagttgaacggtagagataccattcaccgatttaaggcccaattcaaagccgcaagcctagaatgcttagcactcctcgaagacggcgccattgagcgtgtcttttgcgactaccacgaggattacgtggtcaagttcgtggatgacggggagatttactaccgcttcgtacaggtcaaaacaaagacaaagcagaaccatctttacaatatcttagagatatttggaatcaagaaaaccaaaaaaaacggccacgatttacccaacagctttgccggcaagatgttgttacacgtggataatttcggtgacacctgccactctctcgtcatcttaacgaacatcaacttcgacgatgatgtcgaaggattggtcagcgacgcacaatccggaaaaattgtatcaaaacatacgacaacgctaatagctgaaacaaaaaagcttgtaccaagcctggcagcaaagactgacaaagaagttctcgacttcctgtcccacctaaagcttgcgcctcgtcagcaaatcttgaacgatgaagacgataacttcgtttcaagcgcacatggtcagatttacaaatacagcgaaataaatttaacccctaaggaagttcggcttctgattattcagcttctatcactaatagaaagcaaatcatcagaaaaaataaagggcagcatgaccgaggatatacttaatgataaagcgagcatagccctcgatgacatgctcgacatccttgccatttctcgcccggcctattatctcctcaaaaatggcggcgacccgaacgctattaaaagtgtttcgattcttcagcgcgtattaaagcgaaataactataaagaagaaacgcttaactcatttgcgaacttcaagtcgcagtgggaaacctggtatcgagttaacaggcacacaatccaagagctcaaacttcttgagttgatggatgaaataaaaattctgacagacaacctagctgtcggaaaaatagacatgaaaacaattacaggcgcggtcgtcaagctcgcaactgatcttcgcatgctattaggccgcaatgacctaactgaagaattagtttttggagccgtgctgtctgaaatcgtgaaaggagagtcttcatga

SEQ ID NO: 348487 - DNA, 1782 bp, Pseudomonas aeruginosa
atgaaatttgaatccctacagttctttgcaagccataatggtggatgggcttctcaagagctgaagtttggtaaatctattactcagttgtttgcccttaacggaagcggaaaaacaccgctaatccaatccataatgttttgtctcggattagacgtccaattccgtgaagatatcattcggaatactggaaaggtcgtcctacgagcaaatataaacactaacttactttcctttgagcggaagataggagagaaatacgacataaccgttagcagcgacggcagaactatcaatcgcttctataacgatgaagacttttctaggttcatgctaggcatcttgaacctaagatctgagcgtctgactaccaacagtgacaccgctacaattccgtttttctcggcgatactgccactattctatctagaccaggacaccggttattcggactattacgttccgccgcgacatggttttatcaaagctcagtattccgaaatgattcgcctagccgtgggcctccctgccagaagctcattcgacgcggccaaaaagacgatcaatctcaaaaaagagctcgactacctggataagacaatcacagatagccgtaagcttatggagaggctacgacaagacctcccagccgctccacgatttgaagcagatactgagcgtgacattacctcactcaaagctcgtcttgatgagttgaagacgcccaaggatattaaaagcgagacattaaatagcttcgacttcttgattaccgatcttcgtcgccagcaccgagagatagcctcacagcatataaccctagagtctaggattcgcagttcctctcaaatacgaaatgagatcgaaagcgaaatcgagacccttgatttgaatgaagaagctcgccgtgcattcatttcttttagcgagatatgcacaaccccctcgtgtggtatgtttctcgtcagctctgactcgtatggcaaaagcctgctttatctcaaagatcaactgaaagacctagaagccgtgaccatcgcgaacatacagcaggctgaagctctgctgaccaagatgacttggatagaaggacaaatcgctgatctttccgcaaagcgagggattgcagagcgcgaagcagggattgagatgttcattgaggcgatcagcaaaattgcctccgaaatcttcgagttagagctcgaaaaaggtcaacaacagaaacacaagagccaggaaggtaagcacctcgaactgctgaatcggcgagaggcggttcaaaacgagctagagtctctcggaaaaaccagagagcaatctccggatgtaatgcgattcaagctcgcgttagccgagaaaatggcccgttggctcgacatcctaaactctaagaacatctccagagagatccagatcgacagtgatctgaagccaattcttggctctgagaagcttgggattatcaaaggaagctctaaggcccgtacggtgctggcattccacgctgcgctatttgaaatctgcaccggcaatccaacctcgccgttcagaacactgatattcgatacccctcggcagcaggagattcactcagaggatctggatgcgtacatcaaagagctcaaggtagtggctctaaaaaataatgcccaggttatcttctcgactaccagctaccgcttcgagatcgacccggcgacggatgaagaatggcttccaaagttcggtggttttgaacagccaatgtacctcggacacttcaataacattctggactcatag

SEQ ID NO: 348488 - DNA, 978 bp, Pseudomonas aeruginosa
atgcatctagaagaaaaagtcaggcaacactatgtgagccgagtgtatcttgataactggacaacagaggattcccctgagtcgtcatccatatggacgcttaataaacttacgggaaaaacctttaaaaccactaacctttccaatatcgctcagaaaaaccgattttataaggtcatcgttgacgacctcgtctgggacatgttgagatacgtgctcgacccgctacggcacgagcctttcgtagcgcggactttgcgcacgctcaatccactattattgatcaaccattaccgagagaataagcaagaaaaccacgagaagttgatcgtaatagaaacaaatttcctagaagaccgctatgcagacctggaaggttggttcgctcacaccataaagaaaatttcagcggctggcagcgagatttcgagtatactcgaagaggataaagaaaagcactacgacagccttatgcttttttttgcaacccagtacctcaggactcgacgggcgcgagaaataataaataaaataacaaaggacatgtaccttcagcgtggccacgatgaaaagcataagctttcacctcagcaagttgataccgtaacaaaaatcctcctatacgtggaatctattaggttttccgaaaacctatcccgatcaaacttcaaaatctcactcgactacaacgtcagcaacatagatctagtcaccagcagttcaccgacattaggacgtgttgagccacgggcgcatcgcgatgacatatcatccttcaaggggcaaatacctcttaccccaaaaataaacatgcgcttataccagtcacctggcggcggcaagcgaatcgagctcggtactctgggaaagcaaaaggctctcgaattgaatagactccaagtgaaaaactcagacatggatgtttatgcaactagcgagcgacaactgcaatttttcttaaagcttttaccctcatga

SEQ ID NO: 348489 - DNA, 2415 bp, Pseudomonas aeruginosa
atgagcaactttgagttgcgcctagcggcgctttcgaagctcgtaggcatcaagtcagcagccgtcgatcaacgtctacacgacgaattcaaccgtatagaggtggcgctccagacgagcacggattatgacgagctgtcggagtccctgaagacacttgctgtattggttcccaggtatcacatggcgacgctgccgttgctagagacttttgtgcgctcggtgtcgaatcgcacattgacgcaggatggttcgccgatctctggcagctggattcgctaccgttctgctgggagcttgatccgtgatgcagtagatgtcgttgagaaagttcgctacttgcacacggaacaggtggtggatttcttgttggagctgtcgcacgtcgaggacaaggaagttaaaactaaggtcgagcgggcgcttgggtcgctcgcaacaattgacctggacatcttctatggagatccaccgctgggcgcgtccccacaggcaagaatggtgaagcaccttagcggaatgcaggacgaggctttactggccagcgcaggcatcattctgcgggtgcttagcatagttctctcgccaaccatggaagggacttcgtggtcgtaccaaagcatcacaatccgacgaggctcgattacaagcgatggtggcattgccgacatgcgccttgcagccatctacctgacccagcggatctataagctcgatacatccgtcgaacaccgaaagcaggttctgctaacactggattccgcgacgcggcgtgaagaggcccttggagacgataagacctctgccatgttcgaacgagacgcaatcatggtgcttgagttcatgcttggcttggtggggaccgaggcactgccccttgtgcagaaaattgagcacctagcttactgggactactaccacggggcttctcaagcaatcaaagatgaggcactaaagatacgtgacgcgctagatgcgcacaccgagtaccaagtctacaaacagctcattggcttcgagggtattttcgggaactgggaagaactaagacgttctgagagagcctgggactatagcgacaacaagcgacgtgatgccgcccgcaagtatcttgatgagatcaatgaggacagctacctcatgtggcgtgatcggctcctagagttctcgaagacccggtcgaacgatctggcaatgtttccggtttactacgacttcttggagtccatcgggaaagagagacctgctcttgcgctggaacttctcaccactcacgaagaagtcatggcgcccttcctcatcgcgctggtacgtggtctttggactagtgcgacaccggaagatattgagacggtcgtgaagtgttggattgaggctggacagcatctgacaaccatcgccaagtctctgtataaggtgggagcttcacgactaaaagtgctagaggaggttgcagaccgtgcagccgcgcttgatgaccgggaagctatgatccaagtgatgggtgtcgcagcgagccttcatgtcgagggtgcgatgggcgccaaggctattttcatgctctccttacgagaattggctaagcgtaatgacacgagttgggctggcgtgatctggttcagccgggacttcaggactctggtgagcgcaatggaccagggtgagcgctccgagttacttgcttcgttgacctcgctaccagaacttggttatcaagctgaggacgttctctacgagattgggaagcacgacctccatgccgtcatcgaccttctggttggccgcttgaagcattctcgaatgctagccaagcaaaagcgcgaaagcgatgaaagtagccaagacaggtttgaggccattccgttccaacttaccaagctgaacgagttgctcgcgcaggcgccagatgcgctgttgacggctctgcgagccgacttcgactcggaggaccatcacatgtttagctatcgcggcgcgcgcattgttaagtcggctctcccggagtttgagacgctgctggaagagtcgctgctgaagtacgttaagacgggcaatgatgacgacattgggttcgtcattggtattctgcgcgcatacgaaggctcgtccgcaatcctgggggtgtgcaaggagatcattaaggcagcgcctgaatactctaagacttggaacgaagttgcggccgcgatcgagtccacgggcgtagtaggcggcgagtacggcatggtcgaagcgtatagccgcaagctacaacaggtttccagctgggagagcgatgagaacgagcgcgttcggagttttgctgggtggcttaaagaggctctccatagcttgatcgaacaggagaggcaacgcgcagatcagcgcatcgctcttcgcaaataccaatacggcggtgaacaagaagaggactga

SEQ ID NO: 348490 - DNA, 930 bp, Pseudomonas aeruginosa
atggatgtctttcacctcatcatcgacaccagcatgctacgcaggcttcccttccagcatgcagacttcgagcgccttctgcggcagtcccagatgggcaaactgaaaatctacatcccgcacattgttctagaggaggagcggaccgctcagctcgaaaagcatgtgcagatagttgaggaaataaggacgaggtacgcaaagttgcagcgtggtatgcagggcttgctggtgcagggcctatcagatccccttatagagctatggaatgctgaagacgtcgagctcaactcaagaacgactttcagccgattcgtggaactcaacaaaatcgaagtgattgggatctcgaaggagcacgcagccaatgcgtgggataggtatttcaaagtagccccgccatttaatccgcgagaggaacgcgaagaccggcgcaaggacatccctgattcgtggattcttgaagcaggagtcgaaatcaaggccagaaatggcctgcattgcgcactggtcggcgacaacaagctcaccaatgcgtttgagaaggaaggctttaaggtttaccaaagcgtccaggcgctacttgatgacatcgagcaagcgactgctgtcgctcccatgcaacagcctgctggtgaggaatcacctgtcccccttgatcagctccgcagcatagacttcaaggatatggatgtaatcgtactggggttgatcgaggcactcggcatcccctccaaggaagcacttttttccgcgctcgaggcggccggctttaatcgcgatattgctgagcatgaagcacgtacgctagtgctgtcaggcaggctccaagacgccgacgcacacttcatacccacaagccgggctctagccgagcaggcggcggcgacggagatagtaaccaacgcgctactgaggattacggcatga

SEQ ID NO: 348491 - DNA, 1638 bp, Pseudomonas aeruginosa
atggctgctcctaaagcaaaatttcagtcacgcgcagttatagaagcttggaagtatatttgccaacttagagtccaacttcaaaaaaataaggcaagtctggtgctaggggctggcatcagctgggatttaagactacctctttggggcgcccttatagaaaaaataaagtccgctatggaaccacatgctcccgaggccaagctggtcaatgacgccccagggaaagcggcattaattctgtttgaaatattttgccgttataaaaaatccgagatcgaagccagtagaacctataacaacaagaatttaattgagcgaaagattctttctgactggcgcgaaataattcatgaagcgctatacagccaaacaaaggaagatgaacgccgagacacaatcgacaaacatccgtatttcaaagaaatgctgtgcttcatcaaaaattctgagctaacggtaaattacaattttgatgattatattgagtatggcttatcatgccaggacctcaacccaacaaggcatgagcggccttatcagaccgtttggtcccaccatgctcagttcacaaaagacaggtgcgttatatatcacccaaatggcttcctgccttttgacaagaaaaaatttcaaagtgaaaatctaatattctcagatggtgcatttgccgaccagttgctagatggaataggcggaggcctatcaacattacttcatgttttaacaaaaaaaaccagcttactaataggtcactctctaacagattcaactctactgcatttgctccgcaaagcatctaccatcagcccaggaaattacaactacttcattcgatatatgggcgacgaggagacactagactcccactctcggaatgcgatatttgaggcaaacttcaacaactacaatttgatcactcttttctttaaaaactctgacatccgtgagtttttacaagcaataacaattcctgaggatgacttcatagaggcatccgacattctaggcatacccactaaatactgctattatatggtaggctctattggcatcggaaaatccacagtattaagtcagttcgggaacctgataacgctcgacgagtggtttgatgagcgaccgccagaaatggcaaactcacctgaaaatatatccactactaaaacgataactatcgacacttggaccaatgaacaatttgggaagaagaataactacctagttggaaagaacgtaggactgtttattatcgacagatcgccaatggacccgcttacctttgtggtagatgtatctgaaaaagaaagagcccgctcaatgctatgcgaaggaattaggcccggaaaatcagagaaaaaggtggagagaggagagattattcacttggttggcgagcctgctgaaatctggtcacgattgattaccaaaagaaaggagacaagctggcctactgaaaaaattagtaaacttcaagaaaagagcataagcctctacaaaccattatcaccaaaaatgattaactcgactggcagaaaagaagtagacgtcatacgagatgtagccagaatcattttctcacaagaatacgccccagccgatcttgatacagaactgaggaagatcgcaaatgtctag

SEQ ID NO: 348492 - DNA, 1158 bp, Pseudomonas aeruginosa
ttggttgatgccgtacacgccgacattctcgccagccacgcggctcaggctgccgccgttgagcaccgcgccagcggtatcaccgttcttcaggccgctgacctgataggtcaggctcgggtcagcgtcgccatagaccttggtcttggcatcggcgatcacattgagcagtgccttggtgatggtcaggttattgccttggtagctcaggtcgtagttaccactgttcaatgccaggtcgccctggttgatgccatacacacccacgttctcgcctgcggcacggttcaacccaccggtcaggatcgaaccggcgctatcgccgttcttcaggccgctgacctggtaggtcaggctcggatcggcatcgccgtagaccttggtcttggcgtcggcgatcacattcagcaatgccttggtgatggtgaggttgttgccctggtaagccaggtcatagttaccgctgaccagacccaggccaccctgctgaatcgcatagttgcctacgttttcgccggagacacgaaccaggccgccgccattgagcaccgcgccagcggtatcgccattcttcaggccgctgacctggtaggtcaggctcgggtcggcatcgccatagaccttggtcttggcgtcggcgatcacattcagcagcgccttggtgatggtcaggttgttgccctggtaagccaggtcatagttaccgctgaccagacccaggccaccctgctgaatcgcatagttgcctacgttttcgccggagacacgaaccaggccgccgccattgagcaccgcgccagcggtatcgccattcttcaggccgctgacctggtaggtcaggctcgggtcggcatcgccatagaccttggtcttggcatcggcgatcacattcagcagagccttggtgatggtcaggttattgccctggtagttcaggtcgtagttcgcgctgaccaggcccaggccgccctggttgatgccatacacgccgacattctcgccagccacgcggctcaggctgccaccgttgagcaccgcgccagcggtatcaccgttcttcaggccgctgacctgataggtcaggctcgggtcagcgtcgccatagaccttggtcttggcatcggcgatcacattgagcagtgccttggtgatggttag

SEQ ID NO: 348493 - DNA, 1869 bp, Pseudomonas aeruginosa
atggcaatttttgattacaaggggcaggacgcacgcaaactgatttctgatgcatggaccatctctgcctatacgaacggtatcgccgctgcgggagagctttataaaattccttctcttgtagtggacaacgctacgaataattttcttccacctgccggatggcgagagttgacgccatctgagcttgggctgagtgaagataggttggacattaccggaagtttcaaaggtgagagtcttttgggatctcaagcaaagattctgggggagtttaatgacagcggcgcgctggtaaaggtcgcattctctgtcgctgggacaagctccgttttggatctggttcctggatatgtggaaatggcgaacgggacttacattaactcttttgaatatcttctgagtgccgtaaaggactatgcggtaggcaatggtctgggtggctctgatgttgtggtgaccgggtatagcttgggagcggctgctgtaaataatttttatacgcagcgagagagcctgtctgatggtttttacaaagatgcatcatttgtcagtgcagagtctcctgtaatcagtgatggtgagggggttttcaattttggttttgaaaatgatgtggtctatcgagccgttggagatgatgcgcaaggacccgttcctgcactgcttaatgctcttactggtaacgatacgtcgtatgtttctacgactgacaatatcgtactatttgatacgttgtactctttgccggtatggccttatggcgtattttcggtagccaacctgaccggatggtctgctcatgttggaggggtatttaccaatcccattcagcgcataggtgagtcttctttctatgattatattgaaagagacagtgtcgtagtgcttagtaacctagatgccgtgagtcgtttgacctcctgggtaagcgataaagatacttcaacttctaatcactatggaaagccggcgtttttacttggaaccgaaaatggggacaagctgcaggatggagccggtgatgactttcttgatggtttccaaggtagtgatcagttccgcttgtccactggcactgatttagttgcaggaggagtgggggaggataaagtctatttgtcgggagatgcagcaaactatgaggcggtacgtctgaatgatggcacgctcttcttgtatgacagtagtggaaaatatggcctcaaggaactctctggtgtcgagactgtagagttcgagacagaaactgtcacgaccctttcgacgcttccaattattggaaatattatcaagcaggtctctacagtgctgacgccgtcatatgatgtgtcgggctcgaagctggaatctaatgcattgtttggtcgagacaaggaataccagtcttccattcaaggcgtagagggcaatgacaccttggctggtagttctcagcgcgacctgatctttgggctggatggagatgatagtatctctgggttggccggtaatgatctgttgcatggcggattgggaaatgatctgttatttggtggtgcaggtagcgaccagctcttcggtggggcgggcgatgaccgtctagtaggcggagtgggtgacgattatctgagtggcggggtcgggagtgatattttctcctttggttcgcgtgggtttggaaacgatgtaattaccgatttcaatattcacggaaatggtgtcgatattgttgagttttcttcgagcgtattcgcaacggaagaagaggttcttggttccattgtacagggtgaagaaggagcgttcctatctgttggggacggttcaatcactttcatcggagttgcggtcgaacagatctctgcacaatcctttgtgatttcgtaa

SEQ ID NO: 348494 - DNA, 1356 bp, Pseudomonas aeruginosa
atgaagatattaaagttgaaattacgccatgctatggttgttggggttctaggtgtagggccttatttggcaggcgttgtttatgctgcaccgacggaggttgttatctatggtgagtctggcttggcatatgcctttctgggaaataaagagatagctccgacgcaaactagcgagccgattccgacggtaacggaggggagttctactggttcgcagtcagttctgaatgcttatgctgccacggcggaggctgagcgcaaatttggggctgatgccagtaatgtaccctttaaactgagctttaaatatacgccaaatggcaaggatagtagtattggagctattcaaaaggatgaccaaggtgtcgatctcattgcgatagacttcccactgactctagctgaatacaaagcgtttattgacaatggtcctgtaaagacccgtcgggagtctatagtacaaactcctgtcatggctcatagtattgccattgtctttagtaattccgacttggatggacaggatagcgtaaatattgccactggagatttggcaaaagtgttcgcaggtgaaattaccgattggaaaaacctgccgttgagaaatgggtctggtgcgctaatcagtttgcccagtcgccccattaaattgtctgctccacaagggcggaatggcgatacttttggcctatttaactacttgaatagacgaaagccgatactgcagggggatcgttactttactgttcatacagtttttagtgtttccactgctacagctcaagattcaagtaaaagacccaccgtcatagagggacggaatgccaacgatgtagtgatcaagactaaccagaataacggtgctatcggatacgtagtagctgctgcagcggtatcatccaggtacttcttggttgatgggcaggatccgttcaaaggcatgcttacacctctgctcctaccttcttctgcatatattaccgatcaagcgtcgaatgatacaaatcaaccgtcgacatcggctacacgcggcgctataaatttttcctctattcccaatattcctgaaggttcaaatgggcttatgacaattgttaagcctgaaagttacccgaccgatagatatccgataaagaatatttcatacttggttagtcatagggctggccatataaccgatgataaggttcaagcaataaaggggctgtttggagttttcaactcgggatcgggttatcgagatcagaatattaatagtttgaagtatatttctacggtgaaagatcaagggtatgcttggcttgatggtatcaatccaaggctgacgacagcagagaatgccttgaaaaaataa

SEQ ID NO: 348495 - DNA, 1395 bp, Pseudomonas aeruginosa
atgtcaaaagcatcaactctaaaaagtagcttactagcagcaattcttagctatgcaagtttaagcgaagcaagcccacgccaagaatcaggaaaagctctacaagatctagccgacacactagtctggacatcacttgaacaatgtgccgttacctataaccttattagtaatcaactgagcaaaactcaggccgctattggtcaagcgcgtaccagcgccccctgggacaattacctaatcctcttcatagacaagcacttaaacagcaaattttcatctctttctgaggaaattcaatatctccgcaaccgctgtattgccacagactatgacggttcatctagtagcctagagcgccccagtcgcctccagcaaatgcttcaagaatggaggtcaacaatcctttgggctcgcgaagcaattttgaataattaccaacccagaacagagcaagtgctaatgagtgaaacactggttccaccacgcactccagaacctttgcaaaaattccgggactgtgcagatgtgtattgccaggagatggtcatagtgccaaaaggtagtttcattatggggggcaccaatgaagaagctattagtgaaggagtaaacgctaccgtagcatcatgggaaaggcctcaacatatggttactatccagaaaccattcgcgatagcaacgacagaagtcactctaggagcttttaaagagttcattcgtgagacgaactacgcactccctcaaggctgtacatcactgaatgcgccttctgacccagcaacaggattagctactctagcttttattgaggattataactatgaaaatcccgggttctcacaggacaatgaccatcccgtagtttgcgttcgccgcgaagatgctagagcctacgcaaactggatatctagaaaaacaggaaaaaactatcgactaccaacggaggcggaatgggagtacacaaccagagcaggaacacaaactatatacttctggggagacgataagaatgaggcctgcctctatgcaaacgtctatgatcatagcagcgatgcagaaaatctctatggataccagcgtttcgaatgtagcgattctttcccatatacagctccagtagcatcattcctaccaaacaattttggagtatatgaccttctagccaatgctcgtgaatgggttgatgattgctggcattatagctatcagtccgcccccacagatggatctcgctggggatctgaaaataatggtctctgtcgattcggtgttttacgaggcggagcctgggcttacaacacattcaatgtaagggtggcttatcgaaatgcttacttctcatctcaggcccgtgcatccatgtggggtttccgtctagcccgcgaaatctaa

SEQ ID NO: 348496 - DNA, 348 bp, Pseudomonas aeruginosa
atggacatgaacactgcctttgacctggaagtccgccagcactgcctcaagatccgggtagtgtacgacctcttccatgtggtggcgaaatacggccgggaagtcatcgactgcgtgtgcctggatgaggccaatcggctgcgccacgataaaccggcgcgctgggtgatcaagcaggcgcgctggcttctgctgcgcaacccggaaaacctgtgccactccgagcagcaaattcatctgcaggatctgctcaacgccaaccgcatgctgatggccatctacctgatgaagacccagctcaagacgctatggacggcaggcgacgcctggcagtggcgagcggcctga

SEQ ID NO: 348497 - DNA, 1479 bp, Pseudomonas aeruginosa
atggcaaaggtatatgattctgttggccagggtttggtgtctggtggtaaaagtaatgattacaacctgattagtacatttctcaatcagttctctcgcactggagatagtctactgaatggtaagccttcttataccgttgctcaggcggctgagcaggttgcgcgggctggaaatgctgctggagtggcaggtgatgatggtgttgttcggcttacctattctttccgcacggaagcttcaagcttgtttgaagatcctcaggtcaatatgggggactttgtcggatttacggagcagcaaaaggctcaggctcgactgtctatgcagtcatgggctgacattgctaatgttgagcttagcgaggccgctgaaggcgtgacaggtgacctaacattgggtgggttcactaactctggtatggggactgcgtttgcttttctgccagtaacaggagggatttatgaagggcaagcctggttcttaaatagtgatataaatctcgatcctgggttgaataattatgggcgtactacattgacccatgagatcggtcaccagttagggctgagtcatccaggggattataatgcaggcgcaggtaatcctacctatgcagatgcttcatatgctcaagacacgagggccaactcagtcatgagttactggagcgaatcagaaacagggcagaactatactagtttacaagaaattcagattcttttctggactgtgggtatacaggttcaaaattatgggtctgcccctcagatggatgatattgcagctattcaattgctatatggagccaatatgacgactcgaattggagacacggtctatggattcaactccaatacgactcgggacttttatagtgtttcttctgatgatagtagtccgattttttcggtatgggatgctggtggagttgatacttttgatttttcagggtttagcgaagatcagaaaatcaacctgaacgaggcttccttttccaatgttggagggttgctaggaaatgtgtctatagcacagggagtgacgctggagaatgcaatcggcggtagaggtgatgatatcttggttggcaatgatgtagctaataacttggtgggtggcgctggtaatgatgtactttggggaggcttgggggctgatctacttgtaggtggcgaaggcgacgacacatttatttttactagtattattgagtcgacggcctctcagcttgataaagttctagattttaccagcggacaggacaaaattgatctgtcaggtatgcttgggtttggtgaaggtggagtaaatttagcatttgtcgactcattcaccaatgcagtaggtcagattatcctgagctttgatgaaatgattaatacgagcgatctgacagtcgatttcaccggcgatagtcaggcagattttgctttgcagataatcggtcaagcatttgcgtccgacttggtggtttga

SEQ ID NO: 348498 - DNA, 411 bp, Pseudomonas aeruginosa
atgctcaaatacctgcttgacaccaacatctgcatcttcactatcaaaaaccgaccgcaggaggtgcgggaggccttcaaccggcaccacggccagatgtgcatcagcaccgtgaccttgatggagctgatttacggtgcggagaagtcctctaaccccgagcgtaacttggcggatgtggaagggtttgcagcccgcctggaggtgctcaaatatgatcaggatgccgccgctcacactgggcagcttcgggccgagttggcccgccttggcaagcagattggtccctacgatcagatgatcgctggtcatgcacgctctcagggactgattgtcgtcaccaacaatcgccgcgagttcgatcgcgtgcctggcttgagagttgaggactggatcgccccagtcgtgtaa

SEQ ID NO: 348499 - DNA, 915 bp, Pseudomonas aeruginosa
atgcataatagcgtttctgatatgagttgctttgtaattgtcgctgagtcaataacgttcactgaggcggcaaagaagttgggggtggcaaagtcgtcaattagttaccgcatggcggtgctggaaaaacgtcttggtataaaattattggacagaggtaaaagaacgacgttaacgagagaaggagcagtctactatgagagggcggttaaggttttagaggagataaagagtatcgaggagtctataagaaatagttattccaatctgagaggggtaataaaggtatctattccagtgactttttcggagtatatttctccaattctttctagttttgccgttcagcatccacatgtttttttggacgtggatagcacagataaacatgtctcattccgggaagaggattatgatgttgctgttagggtaggggtaaatactgatcattctcttgttgtgaggaaagttgcaaggaatagtatttatatgtgtgcatctcctgcttatataaagcttcacggaacccctgtgacaccttatgatttgaaagatcatgatggcgttttatataaaaataggctcatgcaaggtgggtggaggattggtttcaatggtcgggatgagctttttaaagtaagatcgcgtttagtctctgacaatgcacttgttatgctttctgcgactcttgatgggattggtattagtttgttacctcagtttcttgttcgtaacttcataaaagacggccgcttggttagggtgctgagtgactgtactatagatgctggggatgtttccgttgcttatagggcggtgcatagagataatgcccgtgtaaaagctttagtaaatttcttagttaaggagattgagcgtattattgtgagtggagggcaggtggagtataattaa

SEQ ID NO: 348500 - DNA, 705 bp, Pseudomonas aeruginosa
atgcgccaggcggttggcccggcggttcagctcggcgtagtccaggcgctcctcgccgaaggccagcgccggcgccgtcggcgtgcgctcgacctgctcctcgaacaaccggtgcacgccgcgttgcagcggatactcggccgcagtggcgttccagccttccagcaactgatagcgctcctcggcatcgagcatcggcagcgagtcgacgctggcctgcgggttttccagcatgccgcgcagcaggttctgccaatgccgcgccatgcgctcgacggtccgcgcctcgaacaggtcggtcgcgtaggtcagcgcggcgtacaggcggccgcccttctcgtaggtatccaggctcaggtcgaactgggtggtacggctcttccagtcgagctggccgaagctcaggccggccacgctgtccagcgcctcgatgtcggccaccagcggctggtggttgtacatcacctggaacagcgggctgtggctcaggctgcgctcgaccttgaacgcctcgaccaggcgttcgaacggcagatcctgatgggcctgggcgccaagcacggtgtccttgagcccggccagcagggtcgccaccgacgtgcggccgtcgaataccgagcgcagcacctgggtgttgacgaacaggccgatcagcccttccacctcggcgcggttgcggttggcgatggggacgccgacccgtag

SEQ ID NO: 348501 - DNA, 2202 bp, Pseudomonas aeruginosa
atggctgaaaggaacctgcttctaggaaaaggggaagcgctggcatcctccaaagagatcaagcgtaattctgggccaaaaaaatacccatacactcttgaagagatccgtaccgagatttcctcatccctagagcaagttcaactctctctttcagctcttccgaaagcagccaaaccacgcggggaaggtgtctttgagctgacactacaccccgcttttctggccaaatcctatttccccaagcgcattctcaaaaaagcgggactgcgcgatgtagggagcaaagagacctcgatcgtcccgaggcacgtgacggacatccgcgatgcaggaaagctccaagccacagcgaccctgtttatcgctggcaccgagagcgccgtcgccaacctacgtggcctgctcaaatcgagcgacatccccgcagcactggaaaaagagctcaaggagatcgagtcgatccgctggatccaaaacgagaacaagattcggggccagcttccacagggagacggcccgcatgccttcgaagttgccctgcatgccgggtccgatgaagaagacatcgttgcctctttctctgactttgtgaaagcacattcgggcaaagctgacctgaagcggcggatcaaggttggaggcctaactttcatcccggtctacgcgtcgtcagaagctatggtggcaatcgccagtcatacattcctgcgtgtagctcggcctatgcctgagctgcgcatcgcacatccaacccttgctcgctcaacgctagccaactacagcacgacgctgcccagccaagccgctattgccccagacaaagctgcagcaatctttgacggtggcctgggaacaacggacctcgctggctgggcgaccgagtactactacgaggacacaggagataccaacggccagttgcttatgcatggcaacgaagtcacgtcgacctttctgttcggcaggctcgcctcagaagttgacgagctcaaacgcccctacatgaatgtgcaccactatcgtgtcctctcgcctatctctggccgagatccagacctcttcgacgtactgatcaagattcgggatgcactcgactctggggaatacaagttcgccaacctgagtcttggcccgcggatgccgatcaatgacgaagaggtgcacgcctggactgcaacgcttgaccaggtttgctcgcgccacggcatcctggccaccgtcgcagtcggcaatgatggcgacctagaaggagcgaacaggattcagccccctggggacatggtcaacgcgctggcgattggtgctgcagataccagcggtaccaagtggaagcgtgccgaatacagctgtgtaggccccggaagaagcccaggctatgtaaagcccgacggcgttgcttttggcggctccaacgctgaactctttaaggtgttcaaccctattcttggaagcaccgtcggagtccaagggaccagttactcagcgccgctgacgctaagaacggcggctggcgttgcttgctctacgtcctatgagatgacggcaatcgccctgaaagccctgctcgtccaccatgccgagtacaaacgctcaatcagtcgaaacgaggtgggctgggggcgcttcaaagaggacgcgatgactcttcttgaatgcccgggcggtagtgccaccatcatcttccaaggccagttggaaaaggggcaatacctgcgctgcccgattcccttcccagacatccccatcaccggcaaagcgcagatcaaagccacgttctgcatccaggcgcacaccgaccctgagcacgccatcaactacacccgctcagggatgggcgtggttttccgccccaaggcgggcgcaggcatcgagacaagcaaagacttctttggtcgtggctcccagtacaagatgactgagagacagttccgagatgacgcccataaatgggaaacctgcctgcaccgtgaccggagctttgacggcgacgactctctggtgggcccggttttcgacattgaataccacgcacgcgagagcagccggggcgtctcgccgagctcagcaccagacgtcaattacgcgttgattgtgaccgtgcaagctgacgagatcccggacatctacaacttgatcagacagaagtatcagatccttcaacctgtcgacgtaaccgtagaaaccacaattacgatgtaa

SEQ ID NO: 348502 - DNA, 1374 bp, Pseudomonas aeruginosa
atgaaacagcgcgtggcgatgaaggaacacatcctccaacggctcaagtacgacccgcaaaaaggccgtcaggactacctcgatccgcccatgcccgggcagggtaccttcggggtgcgggtcaacaaaacatgcataagtttcatcttgctctacagctttcatggccatccccggcgcctgacactgggcaaataccctgagctatcgcttgctgaggcgcgtgccaaggccgcgcaggccggtgagctgctgaagcagggtatcgatcccgggcagaagaaaatcgtcgagttggtcgagtaccgcaccagtccgacgttcgaagaggcggttgtcagctacctagagtgggccgagaagaacaagaaatcgtggcgtgaagatgagcgcatgctgcgcactgagtttgttccgcacctcgggtgcaccaagatcggtgatgtcacgcgcaagcaggtcgtggcgctgcttgatcataaggccaagaccgcgccggtgcaggccaaccgtctgctggccgtgatccgaaagatgttcaacttctgcgtcgagcgcgagatccttgctgcgacacccttggtgcagatcaatagggtggccaaggaaacgccacgggagcgcagcctcaatcgtcacgaattggtgtggtttctgcaccagttggccggtgcctcgctgacgaccaatacgcggttttccctgttgctgagtctgatgttggcgcagcgctcggggcgtatcgtggctatgcgatgggtcgatatcgacttggacgagcagatctgggatcgcagtggcaagttcgagaagaacaacaacccgattgccattccgctttcggacgatgtgctgagcattctgaattacctgcgtgagcggcagattcagaaagtgatttcgaatgaccttgaacactgggctaatagtaaaactcaacctaagcctgggcagtatgtgtttccagggcgttggcctgctaaaccgcagacgcagccctcgctcaaccgcgcgatgcgccgcttctacgatgactacgtgaaggattcggagcgggtcgaagaagagagtctgctgcgcgttgccgatggctatccgcgtccgaccgtgcatgacttgcgtcgcactgcgaccacgcacatgtccaagcatggcttgggcaaggaagtgcgtagtcgcatccttaaccacaaggatctttcggtggatgcgatttatgaccgctatgcctactttgaggaaaaggctgaggctctccaggggtggcatgcctatctgaagggattgctgcagaaggagtttggcgacgttgattgggtagggttctacggggggcgcatggaggcctctgcaccagatgatgagggggaataa

SEQ ID NO: 348503 - DNA, 1206 bp, Pseudomonas aeruginosa
atgcaagaagtcgctatcgtcgccgctacccgtaccgccatcggcagcttccagggcagcttggccgatatccccgcgtccgaactgggcgccatcgtgatcaagcgtctgttgcagcagaccggtctcgacggcgctcaggtcgatgaagtgatcctcggccaggtgctcaccgccggttccgggcagaatccggcgcgccaggctgcgatccacgccggcctgccacacgcagtacccgccatgacccttaacaaggtctgcggctcgggcctcaaggccctgcacctggctgctcaggcgattcgttgcggcgacgcccaggtagtaatcgccggcggcatggagaacatgagcctgtcaccctacgtgctgcccaaggcccgtaccggtctgcgcatgggccatgcgcagatgctcgacagcatgatcgtcgacggtctgtgggatgccttcaacgactaccacatgggcatcaccgccgagaatctggtggaaaagtacggcatcagccgtgaagcccaggacgcctttgccgccgcctcgcagcagagggccatggccgccatcgaagccggccgcttcgataccgagattactccggtactgattccgcagcgtaagggcgatccgatggccttcgcccgtgacgagcagccacgcgccggtaccacagccgagtcgctggctaagctcaagccggcatttaagaaggacggcagcgtcaccgctggcaacgcctccggcctcaacgacggtgccgccgcggtgctgctgatgagcaccgagaaggcccagtctctcggcctaccgatactggcaaagatcaaagcttacgccaatgccggcgtcgatccggcgatcatgggcatcgccccggtctcggccacccgccgctgcctggacaaagccggctggagactggacgaggtcgacctgatcgaagccaacgaggccttcgccgcccaggccctggcggtcggccaggaacttggctgggatgcggagaaggtcaatgtcaacggtggcgccatcgctcttggtcacccagtcggcgcgtctggctgtcgcgtactggtcagtctgctgcacgagatgatccgccgcgacgcgaagaaaggcctggctaccctctgtattggcggtggtcagggcgtggcactggccattgaaaggacttcttccgcaggaagcgtaaactcctag

SEQ ID NO: 348504 - DNA, 177 bp, Pseudomonas aeruginosa
atgagtttcgcctcgtttgccgagttcatcgccatgggcagccatggcccctatgtctggtcatcctatgccatcggcatcgccgtactggccctcaacgtagccttgccgatcgtggcacggcggcgttacctgcaagacgaggcgcgccgtttgcgccgggagagacaacagtga

SEQ ID NO: 348505 - DNA, 801 bp, Pseudomonas aeruginosa
atgcctatgaattcaacaaaagaaggcgttctgcttagagcgaacagtgatggcgcggtctttctttctctcaatcggccgagtaagttaaatacgctgtctgaagcgatgttggcagccttgcaagatcaattggatgatattgcagaggatcctagtgttcgatgtgtggttattggcgctgaaggtcgcggtttctgtgcgggccatgatctgcaggaaatgcgctcaaatcctgaacgggactattatcaggaattgttcaagcgttgcggaaaagtgatgcagagtatcgtagaattgcccgttccggttatcgcaaaagttggcggtatagcagctgccgccggctgtcagctagtagccagctgtgatctggttatcgcggccaaatcagctcgcttcgccgtgccgggaatcaacgttggattgttctgttcaacgcctgctgttgctctttcaagaagtatctcggccaagcgagcctttgatatgctggtgactggtgatgttattgatgcagaaacggcgctggattgggggctgatcagtagtgtagtggccgacgcggaactggacgatgctgttgctgcgaaagtggagagaattttgagcaaaagtccttcagctgttcgatatggaaagtctatgtttaatccgcaaaggcaaatgtcattatctgacgcctatgcttttgcaggcaatgtgatggcagagaacatgatgagccacgatgcgggagagggtattgatgctttcttgggaaggcggaaaccgacctggaagcagccttcccgttaa

SEQ ID NO: 348506 - DNA, 2523 bp, Pseudomonas aeruginosa
gtggatcgcctttccgacgtagctggccccctgcgccccaaggagcaattcgccccctatctaacggcatatccgctgccgagcggggcctactatgttattgccaggacatggcaggatctcacagttcctcgagccggctgcgtcagaaccaagagcgtgattgtcgatgctcggatctggtccctcagaccgccgcttctctctatcattcgccagctcggcccagacgaactcccgactgagatgtgtgcagtgcgcattgaactcgaggataggcttgaggagtggctgcccccaacccctacgttcagcgcgagcgaattgcttgaggcgctttttctagaggatacgaagccggtggtggtgtttgatgcacctgatcccgagctgatcgccttgcgcctactcaccgcgttgtggcctgacattcgacggcggttttcactttcgacattcgcactgtcgccccggaagattggaggtcgggatctcgatctggttttcgcaccgttgaatgcgaaagctaagttctccgattggcccgggcgtcgtgtagacggccgctcgccgcaaattgatcggcacaagtggactggggcgatcgtacgtcgtgttttcaaggagccatttccgaagctgttatctgatcgagaaatcgacctgctaggtgaccgtgacacagatggcactgcagccctgcgtatagcactgttatgggacgagctgctcgacaagctgaaccaaacacccaccgccgccttggggctgtttgatattgccaactcagggatggtcagcaatacagcagccataaaattgctggaacctcgagtggccgaagccacccgccgtgtagcaagcactctgccccccaatgatgcatgggacttcgtcagcgcgatcgcgagaaagatgcaaggacacaacatgccggccggcaaggtcgcagtcgagcagctcgcggagcagctggcagagcacgcacccggcggtgcgatcaaccttatgcagcagcccgaccccaaaggtgccatcggtagcttgatccctaacatcgcgattggtcttggcagcggagcggcaccgcaggttgaacaggtgcttgtagaggctacggcagacgttgttgcacgcctagtttcgcaaggtggcgtactcgccaatcgagtcgcggtggacgatggtctcatcaaaaggatgggagtcgttctaaacgaggtcgaccaagagctcgcggataaggcgggcaggatgctgctcccctttctgaccgaggataggcagctttctgctgccgcccccatcttcaaaagattggactctcagggggttgccgcagagcttcattggctcggagaggcaaatggtctccaggccaagcagctaagcgccatgctcattgagcgcgcgcgtgaggttggggggatgccagctgttcgagatgtactgctctcctggaaaacatcgacgcaaagggacgcgctgctcgcgctgaccgtcgatcccactggggcggacgtactgtggctattggacgatccgcgtctgtccaaagcgtcgtccatttcactgctgataggggtactggaacgtgctgacgataagcagttcgcagcgctgctgtccgacgaagagatcggtgagcgcatggttgcgcgccttccggacaaagctgtcgacatacttgtgagagtggcattgcaggacagcctttccatgggcgcttacatcagcgtgatcaagtccgtgattccaaaagtcggcgacagccaaaagttcgatgtcgcggaacgagcactggacaggtgcttgcgcaacaaattcgagggagacgaaaccgggtttctgtccacactactcggtattctcggcgctcaaattgacggcagatgggttgccaggtctggactggggcgcggtgtcaatgctgagcttgcgagccggaatctgattgtcttcgagaaggccccctcggcggcccgtcaacgtatcgttcaggccgtcgacgaaatcgcgcgtgttctgcaagagcgctactcctgcgatcttgcagaggaagccaatgacgcctgcgctaggctcatatttgatgcggagaaaacatcatacgtctcactcatcgagccagcaggccggctcatgccattgctgcttagctctcgtcacaagcctgtctcgctgatgatagcggctctatttcccataatttatcgggagtttgcaaaagccgacgacgtacccgacatcctgaagttcatccccttctttgattgggatcgctgcaagaatgcacggcatggcctggtcgaggcgttcatgtcgtcaaactggagagctggtgacctagctctgaccgcgtatagatgtggtgacgttggcaagatcctcgagcgggttgctaagtcgcccggaggagaggaatacctctcgcgagtcgagaatgatctgggccgactaagcgccgatggccaacgatttgtcggtcgcacgattgacgagcttcgatcacatagattctaa

SEQ ID NO: 348507 - DNA, 843 bp, Pseudomonas aeruginosa
atgagtcgatcaatcatactgctcggcggtccagattcgggtaagaccaactacattggccgcctatggcgagcattagatgatggaaccggtgcactgcatgctgcggagcagccggaagacatcaatttcgtacttgaggttacagaccacctttttgaaggaggcttcgcgccccgctccgaacatagtgacgcccggcgcgactttgaggttgtcgtcgcctcgataaaagatgggccgcgtgctcgagttgtagtacccgatatctcaggcgagctttggcgccaagctgtcatcgacagcgaaattgccgtggactggatggacgaactgagacgagcggacgccgcactgctcttcgtgcgggttgaatctgaccagaatgtcaggccactcgactgggtgacatcacgcaaaatgctggaaaagcttggcggcgttgaggatcagggactcccaacacaggtaatgctgtgtgagctaatacgatttctcgaggactcgcttgccaaccgcgaggacggcgggcgtccacgtctctcagtcgtcgtaacagcatgggacttagtcgacccgggcaagttcgaacaaggccccgctacttatcttgagcgtgaataccccctcgtcgcaggcaggttagccgaccttgaaagtctcgatgtccagatattcggactcagcgtcgtcgggggcgatctgaagcacgatccagattaccggcaagcatttctagaggcaggactagacggccagggatgggtcgctgtaagtgacggagctggttggcggaaggatgccgacgtcaccctgccgatagcctgggcagtgggcctttga

SEQ ID NO: 348508 - DNA, 1032 bp, Pseudomonas aeruginosa
atgagcggatcgtgcggattcgatggatgcaccgtagacgagacgggaatctgcgcactcgagcgtgacccgtcaacctgtagcaatcgcgttagcaaagaagcaagcagtgtcacggcgacaaatttccaaggaaatgacgaggtagcctctccgtctggtgatcggctaggtgcacctgtgctcgatcagcccgagagcgctatcgcgcttccttccagccgaacgctcggactggaagatctcaatgccatgatgtgtaccagatacgtcaatgtggtgggcatcctcggcgatccagagtcaggcaaaacggcctgtctagccagcctgtacctgcttgtttcacatgcgatgctggaaggctggtccttcgcggacagtagaagcctagcggctttcgaagatatcgctcgtggggctcgtgattggaataacggcgaagtgccagagcagatgactgtccacactgagttagcggacgatcatagccctggcttcctacacctccggctcatgaggctttcggatgggcgacgtgtcgatctggcgcttcccgatatacctggcgaatggacacaggcgctagtgagctctgcccgagcagatcgactggactttatgaggtcggctgaggtcatctggatggtgctcgatggtcgcacgctagcagacatcgagaaacgtcagggactcattgcccgggtagggcagctcgttgggcgtctgaacaccatgctggatggccatgcacccagattgatcatcgtggttactcaccgggacttgcatgtccttacagacaacgtggtagggcgtttgcaaacggagttgatccggcgcaacacgcacgccgagatagtaaacgtcgcacctttctccgacgaccctgacaacgtgccggcaggattcggaatagccgatctcatcgaccataccgtagggaaaccggccaagcgtccgaccttctggcagtcgaccgagcccaccaagggtgatcgctcatatctaagctataggagagaccgatga

SEQ ID NO: 348509 - DNA, 1029 bp, Pseudomonas aeruginosa
atggaaaatattgcagttcacatgcgggtctccggcgtttccgtaggtgatgaggatgtcaattccagacgcgcagcggcaaccagtctcgctaccagctggaagaaggacaaaaacgcaggggcgatcgtctccagagccgcagagattgccaaagctcttggtggcgacggcaatccgccgcccactttgggcatggaggtccaggccgcgatccagaagaaatcatcttcattcctgtacgaggagcgcccactcgacattagcgtctgtgccggtatggccatggtttccctcctaaccggtaaccccggcaccattggatggacggtctacgacgtctatgccactgcactgtggtctgccctcgcgtatcaaccagtactagaggctgagcgacgagaaaatctccgtcgcgaggttctcgaagcggcttcgggctggagcacaatgtctgctgagaaagcgagggctcgagcggaaatccccgaaccgaacgccctaaagatcaccactgacgcaaacggtgcggtgaccagcgatctcaagggcgccatgaccgacacaatagaagcgttgtgccgcaacgccgccctagatcgcgaagaactcgatttcctgtggtgggcgcagctgggccgaagccggctacttaataaacagctatctgcaatcactgaaccgacacgtatcgtcgccgccggcatcgagggagcaaggatgcttcgccgccttccttgcgaagtgcatcgcgagatcgtcatacgaacgctggaccaggatccagaactggatctggagggactgcttgcggcccttggcgacgacagagcggtacttggcgcgcctttcatcgaaggcagtgtcgccgcccatcccaccgtcttccctctccttcatgcgttggccactggtgaactcgacgatgcgggtgcgaccgtgaaacggcatgtttcagagtggggagagcgtgcactgctggaaaccggactcgcccagatgatgtcgaaaggcttgagcatgttatga

SEQ ID NO: 348510 - DNA, 1365 bp, Pseudomonas aeruginosa
atgccagcagtctttgttcacgtctccgacatccatttcggccaagaaaaggatgatcgggttcatatccacagcgacgtcaaacaacaactgatcgccgatgctagggaagtcatctcgaaaatagcaggcggtagcgcacatggcatattagtcacaggtgacattacccagtcgggaaaatgggaagaatatgagattgcgggccagtggctagacgaactggcagcaagcattggtgtagagatccaccgtgttcagatggttccaggcaaccatgatctcgaccgctcaaagctgtcgttctcaggacagcagattctcgaccatatacgtgctgggggccctgcagaatacgaggagattctgaaaaatccgacagatcgggcagctctcttcgcacggttcgaggactacgggcgcttcagctttggctacaactgcccactcaataacgagggtgggtttgcaaccgagatggaagtaagcctctcgcccggacgagcaatccgcttcataaggttcaactcctccctactttgccatggtggagagcgtgatgagcacccggagctgatgatcggagctcgccaattcactatccctcgcacacctggcgtggagaatattatcctcgttcaccacccgttgaactggtacaaagatcaagagcaagtacggaactacatccgtagccgggctcgggttttcatatcgggccatgaacatgacccaaaggtgtcggtcgacaatgtcgagacaggctgtgacgtgatgatgcttgctgccggcgccaccgtcccctacaagtccaacgacacctataccttcacctacaacataatagaattcgactgggacgaagacattgacggcttgtcggtgacgatgcatcccagagcgtggaatgcgacgcgcacctgcttcgaggctgacgaccaacgattgggcggtaaagctccaaattttcgcttggaatgcccgttctttcggatggcggacaggccaagtgtgcccacaacagccggaccggcagatacaccagttgccgaagtggaatcgtatcccatggagcagactaccggtacgatgcctgtagagcctttggaaggggagccgaagcccatgccaccgatggcagaaggttacgagaccgcccgactgcgattcttccgcgacctattcgaaggggagcgcctacgtatcctcatcgagctggacgcacttccagaaaaattcaacgagcggatgtcgcaggggctcgaacgcagattgctagacatgcttgtgcgtaatggcaagctggatgaggttgagaagatgatcgaccagttgattggcgagcggaaggacgggccacagtaa

SEQ ID NO: 348511 - DNA, 222 bp, Pseudomonas aeruginosa
atgagcagcgagctgctgacaccctatgatcctgccaagtacctgacagatgatgaagatatagaggtgtttctggccgaagcggaaggaaccggcgataccaactatatcgcgcgcgcacggcaagtggccgagcgagccaaggcgctgaatcaggcgagaaacgaagcctgcagggacagtggctatgccgacctcagcaaaaatcaatgcggctcctga

SEQ ID NO: 348512 - DNA, 261 bp, Pseudomonas aeruginosa
atgacctctctccatgatgtttccgagatgctgaaagaggctcgcagagacgcgaagcttagccagcaagcgctggccagccgtgctggtgtcgcgcgtaccacggtgacacgcatggaaacactagccaaaggtgatatgagcgtgtcggtactggttcggctgctcgaagcagctggctatgaactgaagctggtcaaggcaggacaccaacgtacgattgaaggcatcctcaacgagcagcggtcagggaatgcttga

SEQ ID NO: 348513 - DNA, 930 bp, Pseudomonas aeruginosa
atgcaaaccaataccctgcagaaataccaaacccgagcccgcaatttctatcgggagcactgcaaatcagaggcaccggattcagcgcaaatctgcgcggctttgctggcccaagccgaccagtacaggccaaacagcttcggcacgctgaaaagcgcccttgcgaacgatcaaaaggctcgcggtaatcaccaagcggccaaagccatcaagcagcttgtcaacccagtgacagcgcaaggttcaacacttcccaagaaacccaaactcaagcaaatccgctcgatcactgaagaagactacagagcgcttcaggagcatctgttagcgcgtgaattcatggacgaggcctggtcgctagtacttgcctattacttgggggtacgcccctgtgagatgcgctcgatcacggtgacaggcaatcacgttcatatcattggcggcaaaaaaaatgctccgcaggataggggcgccgacagaacactggtcattgacgaccctgccgtgctccaggttgtggctggcgccgcgaaatggatgcgtatctgccctcgcactaatacagctattcgggatcgcctgcgcaaggagtgccgcgctctgtggccacggcgcaaacggcagccgaccctgaaaagcttcaggcaccagattggttcgaacctgaaagcgtcaggtgaaagcgatgaagctctcgcctacatgatggggcaccaatccattgaatccatcagcgtctatgggaaccgtcgatctggggctggtcacaaattgcatatcagacctgcacaggacgctgacttgtcaaaagttcgccaccccaaacagcctgctgtttttggtcgagaacgagtggtgggccgtatcgaggcgccacagcgcctgacaaaccgacgaacaactgcacaccctgtcgcaaatgaacgttag

SEQ ID NO: 348514 - DNA, 345 bp, Pseudomonas aeruginosa
atgtatacacacccagtcttgcagaagctgctggagcaggtcgacgaccttcctttcagcagacccgtcaccggatacctgaccgatgcctatattcgcggatcaagcggctacgggatcacttaccggcatgtgagagctgatcgtttcagtgacggtgcctacattcatacatcagccatcgttcaggctgagcgagaggggccgttttgggtgctgcacacgctaagtggcagcttctacgtaatcctcagcttcaacattttaaaaggtgcgcaatcgctggatgactatctgcatcgaatgctaactatggagtatccagagccatggcagctgcactag

SEQ ID NO: 348515 - DNA, 615 bp, Pseudomonas aeruginosa
atgctgataaatgatcgtgctgagcgaagcgacggctccacgcaactggtgctcctgcgcttcagcaatttcaaaaccgtttttcgcactgaattggtcggagagctctttgagcacggctttgcggtttcctggctcagcctgttgcgctcgccagttcagaatccgcttcagcaccgcaggtgctgccgttgcagttggcggtgtcggccctgccagcggtgtgggctcaccaaagaaatgtgcgcgcaactgatcgagtcgcatgcgggcgccgggggaaaccttgcgcgagctaaggcttttcagccagaactcgaattccgactgcggcaggcacagcattcgtttcagcagtggttccccaggcagggcaacgtcatgctcggtcgggctgtagcgagggggctgcagtttggcggcttgagcatgccagttaagacccatagcttcgcaaatggggcgtatcggccagtaacgctcattgtcgctgctgatcagacttggaatcgacagaccctggattttgattttggttgcgcgcatcggattactggcctcccggagctgcatggttgggggaggtggccggtgggcgttgatgctgtctgctga

SEQ ID NO: 348516 - DNA, 255 bp, Pseudomonas aeruginosa
ttggaaaagtcggtgtatcgagatgagaacctagtgctgctccggctgctaaagcagtgtcgagtggaggcaggtctgactcaggcgcaattcgcccaggcgctggaccgcccgcaatcttttgctagcgatattgagcgcggtttgcgccgaatcgatctcgttcagctccgagacatctgccatgcgctaaacatcggcctcgtcgaattcgtacagcgcttcgaggccgagttggtacgcaaagacgattaa

SEQ ID NO: 348517 - DNA, 306 bp, Pseudomonas aeruginosa
atgcagcagaccaacatcctttcggactccgccagcaacactccgctagccctagacgcgttcaatggcctgctcactgttcgcaatgatgtcacctccgaccaattgcatgacgaagcccagcttcgccaaaacgccgcggtcggcatgctccacgcgctctccagtggaagtgatttgaacaccctggaaaaccatttgcttctggactgcatcatggcactgcgtctgctgtgctccgatgcggctgcactgtactcggcagcatgcgaacgcggcaaagcagaaaacctgccccagtcttaa

SEQ ID NO: 348518 - DNA, 1665 bp, Pseudomonas aeruginosa
atgaccgaccaaaccacccgcctgcccatccgccgcgcgctgatcagcgtttccgacaagaccggcgtcgtcgacttcgcccgtgagctggtcgccctcggcgtggaaatcctttccaccggcggcacctacaagctgctccgggacaacggcatcgccgccgtggaagtggccgactacaccggcttcccggaaatgatggacggtcgggtgaagaccctgcacccgaaggtgcatggcggtatcctcggtcgccgcgacctcgacggcgcggtcatggagcagcacggcatcaagccgatcgacctggtggcggtcaacctgtatcccttcgaggccacggtggcccggcccgactgcgacctgcctaccgccatcgagaacatcgatatcggcgggccgaccatggtccgttcggcggcgaagaaccacaaggatgtcgccatcgtggtcaatgccggcgactacgccgccgtgatcgaatccctcaaggccggcggcctgacctacgcccagcgtttcgacctagccctcaaggcgttcgagcacacctccgcctacgacggcatgatcgccaactacctgggtaccatcgaccagacccgcgacaccctcggcaccgccgaccgcggcgccttcccgcgcaccttcaacagccagttcgtcaaggcccaggaaatgcgctacggcgagaacccgcatcagagcgcggcgttctacgtcgaggcgaagaagggcgaggccagcgtctccaccgccatccagttgcagggcaaggagttgtcgttcaacaacgtcgccgacaccgacgccgccctggaatgcgtgaagagcttcctcaagccggcctgcgtgatcgtcaagcatgccaacccctgcggcgtcgccgtggtgccggaagacgaaggcggcatccgcaaggcctacgacctggcctacgccaccgatagcgaatcggcgttcggcggcatcatcgccttcaaccgcgagctggacggcgaaaccgccaaggccatcgtcgagcgccagttcgtcgaggtgatcatcgcgccgaagatttccgccgccgcccgcgaggtggtcgccgccaaggccaacgtacgcctgctcgaatgcggcgaatggccagccgagcgcgccccgggctgggacttcaagcgggtcaacggcggcctgctggtacagagccgcgacatcggcatgatcaaggccgaggacctgaagatcgtcactcgccgcgcgcccaccgagcaggagatccacgacctgatcttcgcctggaaggtggccaagttcgtcaagtccaacgccatcgtctacgccaggaaccgccagaccgtcggcgtcggcgccggccagatgagccgggtcaactccgctcgcatcgccgcgatcaaggccgagcacgccggcctggaagtgaaaggcgcggtgatggcttccgacgccttcttcccgttccgcgacggcatcgacaacgcggccaaggccggcatcaccgcggtgatccagccgggcggctcaatgcgcgacagcgaagtgatcgcggcggccgacgaggcggatatcgcgatggagacaggcgttatccgccctacccacgaatttcacgcagggcggataacgcggcgcgttacccgccgttgcgtcaggagaaccccatga

SEQ ID NO: 348519 - DNA, 960 bp, Pseudomonas aeruginosa
atggcagagcagtttcactatcctcccgaggtgttcaatctgctggtggatacgattccgctgttgtgccggagcaagaaggacgtcgttcttttcttccaaggcgctggcgttgcgcaggacgactacgccgaagtcgcgcgcatcgtccgtacgaatcccgattcaatcaacaagtacgacattgctcgcaacgtgctcacgaaggtgaacgcacgcggcgacagcggacttggcgcgcgcagagagatcatcaagcgcatcgtcgagttcgaggagttttcgacgtgctggccaaatgaccagctaaaggcgaaggggctggtcgccgatctgcgcaagatcgtcaacgtcaaagactccttcacgcgcatgaagcaagagcgagacaccgagcgggagcaggtacttgcccgtcagcgtgccgagcaagcagccgcggcagagaagcgcgccatgatcgaagatgtcagcaagaggctgtttgccctgttcagcatggacgacaagccgcaggagcggggcaaactgctcgaagccgttctgaatgacttgttcaaagcctacggcatccacgtccgcgaggacttccgccgcaagtctcccgacaccggcaccgtccttgagcagattgatggcgtgattgaacttggtggggcaatccatctggttgaaatgaagtggctcaatgttcccgtgggcatgggcgaattttccccacatctcagccgattgttcttgcgggcaaacgcgcacggcatcttcattgcgacgaacggctacaccgaacccgtactgaccgagtgcaagaacgcgctgaatctcaagacgatcttcctgtgctcgttgcaggaattcgtgatgctgctccaacggcaaggtgatctgattgccctgctcaagcgaaaatcacaggcagcaatcgtcgataagaacccgtatctcgaaatccttgcctag

SEQ ID NO: 348520 - DNA, 228 bp, Pseudomonas aeruginosa
atgggcatcggcaacgccaagggactgcttgaccgtgtgcgtaagctggagcgctcgcacggtgccaccgacgaaatgcgcggctgggtcagtgacacgctcggcgctgccattgctgacggtcgcatgtgcccggtcgatggtcctgtggtgctgcactgcctgatgaactggatcagcgacggcaccgcgcgcggcgggtctgctggctgggggttgctgcgatga

SEQ ID NO: 348521 - DNA, 711 bp, Pseudomonas aeruginosa
atgcctacccccatagacgcaagggtcaccccgtcgcttcactcggagaatgttcgccagcttgacggctacagcgacgacagcgcgccgtatctcggccccgtgatggaaacgctggacgacgcttatctgactctcggaaagatccatgatgcccgcgaccacgcaagccgcaatcaggcatggacgccggagcaggctgtaatcgccgtatccgatgccgcatacaagcaacagcagcgccttctgtcgaagttcgacaagttgtccaaggccctcgatcagcagatcaagtcgatggacgagatgctgactggccccctgcaacagaaggcaggcatgggcacgctgaacaccgagattcggaatcacgtccgcgcaatgccgaccgaggaacgccagaagttcttggaggacgcgctggctcgcaaagacctgaccacgctgacggcgattctgggcggcccgggttatctgtccgggttgatggatgccgaggttacgcactacacgcgcaagctccacgagattcagcatcccgaggttgttggccgtcttaccgcccttcgcagtgccaaggctcacgttgaaaaagtcggtccgctggtgatggggcaggttgagaaggcgatgggcgcagattgggggcgcgtcaccgcacttcgtgaagccaacagcaaagcgctggctgctctcaagttcggcgagtaa

SEQ ID NO: 348522 - DNA, 480 bp, Pseudomonas aeruginosa
atggaagccaagacctacacgaaacgcgagaacgcccgccgcgctggtgttgccgcaggggtgcccgctgaactggtagagatcaccgtgcataagaacggcgacgaggtgcgcttcggctggaaggcgaagcagccgcccgcaagcgctgcgcagggtgcggccaataccccagcggcgaccgctaccgaaagcgagcctgtagcgcccgctgtcgccgtgcagggggtgaccacaagcaagccgaagaaggcagcagccccaaaggtggagcgtgtcgagcagaacggcgtgaagcgtcccggcccgggcaagtgcttggaggtgtgggaatacctcgaccagcacggcaacctgacgccgaaggacttgaagccggtagccgctgagaagggctggaacgaaaacaacgccttgatagaactctatggatggcgtcgcttcaacggcatcagcggacgggtcaaagctgctgcctga

SEQ ID NO: 348523 - DNA, 1542 bp, Pseudomonas aeruginosa
atgaatcaacgcgaagacatggtagggcagcgcccgcgagccatacaagatgacgtgcagccgccgctacagcacgagcagccagcgagccaagggggtagcactggcgcggtgccgatctcggccccagcgcccgcgcagccggcacccgccgcaccgcaagcgccacaccctgagcgcgactgggaacgcttccccgaataccccgactatgccgacgggcaccagcgcacaccgtggccgccgggatttgtcggcaaggtcgcgcagtacctctactgtcattccccgtccccggtgccggagtacgccattgcagccgcagtcggcttcttcgcgggcatctgcggacgtggctggatctacagcggcacgggcttgaatcacgacatcatcgttctaggtgagtctggcaccggcaagaacattgtccatcagggcatcgccaacataggcaggcagttgaacggcacacccattgccactttcatcatcaacgcaaagatggcatcggcacccgcgctgctcaagaacgtggcggcgaatccttgcttcctccagctcatcggcgaggtgggcaagatgtaccgcgcctattccaagtcgaaacacggcgacacgcttgacgagcttttcaccgtgaagctcgatctgtgggagcgctccgggccagacggcagcgcagtgggcatcatgtactcgaacccggacaagaacgtccagccggatggcattacgggcattgcgcatagcacccttggcgaatcaacgcccagcgtgttctacggcgcgctgacaaccgacatgatgaatgacgggctgctgtcgcgcctgtggatcgtcgagtacgagggcgcagacccggagtttaacgaacaccgcctgcatgagatgccgcaggaatgggtcacctacctttcggccctcgtgcgtgctgcatgtggcaggctgagtcagcaacccgttgaccacagtgaagcggcagcggcgctcatccgcgagttcgcgcaggagtgcagagacgaaaagctcaacgcgggcagagaccccgcgcagcgccagctatgggtgcgcgcttacgagaaggtcattcggcttgccgcgctgctggcggtggccgacaactacctgttccctgtcgtccaggttgagcatgtggaatgggctatcggcatgctccgccacgccaacctgaccgtgcagcgccgcgtctgcgacggcgatatttcggacgacgccgaccatgcacgcgagcagatgattcttcaacggtgccgccgctggctcgcggttcagcgtaaagacccgaaggaagaaaagctgcgccagcacggcgtcgtctcgcgccgcttcctgcaacaagaggtctgctcacgagacctgttcaagaagcaccgccttggcgctacgacggtctttaaccacacgatgaagagtctggtcgagaatggctttctcgtgaaaatccacgagaccaaggcttgggaggacttcaacgcgcgtgcggaatgctggcgcgtggtggagctgggccagcgttag

SEQ ID NO: 348524 - DNA, 309 bp, Pseudomonas aeruginosa
atgcaagccgacgccttgtccttcgagcagctttgcgagctgttcaactacaccccgaagaaccgcccgctgagcagccgcgaagcagcggagatactgcacttccagcccaacacgcttgaacagaagcgtctcgcgggcactggtccccgctacttccagcccgagggctgccgccgcgtctattactccgagcgcgacgttctctactggctcgcaagcggtgcgcgcaccagcaccagccagcgccctgaccacattgcactgacccgcgcaccgtggctctcagccgacagccaaaccgcataa

SEQ ID NO: 348525 - DNA, 1284 bp, Pseudomonas aeruginosa
atggcgaagctgacgaagacatttatcgacaaggttcaagcgcccgccgagggctatcagattcactgggacgaagaagttaaggggtacgggctgcgcgtcaccgctgcgggaaaacgggtgttcgtcgctcaaggccgagtgctgggcaaagccgtctgcttcacgattggcccctatggggagtggactgagcacgaggcacgtggcaaggctcggaaggtgctgcaaggtatgcgcgagggcatcgacccgcgcgacgtgaagaaggccgacgaggcagccaaggtgacgctgcggaaggtcgctgacgcttacatggcgcgtccgggcaagctgaaggacagcagcaagagcgagattgagcggcatgtgaccacaaccttcaaggcgtgggagcacaagcccatcgccggtatcactgaggacgactgccgcaagcgctaccgtgaagttctgacgaaggggctgcgcggcgaccgcgacggcggctcaccgggtcaagccaaccaggcgttcagcgtccttcgcgccctcatcaactacgccagtcgccagtacaagaagcacgacgggacgccgctggtgctgcacaacccggtcgcggcgctgaaagacgattgggtcgaactgaaaccgcgtaccagccgcatccccgataacaaggtcggcgcggtgtggcacatgctcacgcaggcacgcgccaacgcctacaaccgtgatacgtggtcaagcatcgaccttgtgatgttcctactgctgaccggcgctcgcataggcgaagcgtccgcgctgacgtgggatagggtcaacatcgacgacaacgacccggcgaactgctggtggcacatccctgatccgaagaaccggaacccggtgtggctacccctatcgtcgcaagctgtcgaactgctcaagacgcgccagcgcatcgaggacaacccgcacgtctttccatcatggggcgacactgggcacatcaaagacccgcgcgacaccatgaagaaggtcagcgaggtagcgggcaccaagatcacaccgcacgacctgcgccgcacgatgaccacaatcggcatcgccatttgcgggatcgacttctataaggtggaactgctcacgaaccatatcccgaacggcaacgtgaccgcgcggcactatctcgaaacgtcacgtctgcaatatctccagcccgaagcgcagcgcatcgcggactggatagagaagcaatccgagattgccaaggctgttgcgtccagtgagaacgtggtggcgctgcgtgcttga

SEQ ID NO: 348526 - DNA, 231 bp, Pseudomonas aeruginosa
gtgaccacaaagaagccgaccatgctggagcgctgcggcgtaacctgcggtgatgacgcggcgcagtgggatgagctggtgcagatgctgctggggccgaagttactcagcgattcaccagagcggcggcgacgccacgccctggccatagcggccgctgcgctgcgtgctgctggccagaaggagctggcggcgaacgtggagcaggacaagctggcagcggcgacctga

SEQ ID NO: 348527 - DNA, 198 bp, Pseudomonas aeruginosa
atgaacatgcagaagcagttagccgataccgtcgccctcgcgcgccgtatcgaagacgattggcgcttgccagcagaggaccgccaacgcggcgaggccatccgcaagctgtgcgagtcgctgaagccggccgccttcgcactgcgcgactacgacctggagccttccgaccctatcccaccgaggccttccgagtga

SEQ ID NO: 348528 - DNA, 207 bp, Pseudomonas aeruginosa
atgaatagcaaactgaagcaagtcatcaataacgcccaagtcttcctgctgccgccctacgcctcacaaactgagcgtgaagacgccctttgcggtggcgttgaactcctgcgccaatctatcgaacacttggtgcgtgccgggcgtggcgatattggtctggaagtcctggaccttatccacaaggcggataaacctgccgaatga

SEQ ID NO: 348529 - DNA, 486 bp, Pseudomonas aeruginosa
gtgagtgctaaagacctcaccacacttgaggtaaccgacgcccagttggcggccctggctggcgtcagcacacgccgcattcgccaactggtcgaggcgggccgattgacccgcgtcagtcgtaaccgctacgcattgggcgatgccttcgccgccctggtggaggatatggccgggggcgataaggcgagcgaattgaccgccgaacgtgtgcgaaaactccgagcagaagcaaccctggcggaactccagctagccaaggaaaagggagaagtagctccgctgtcggagtgccagaaagcgtgggagcaattctgcgtcgtattgcgaaccaacctcctgctgatccccacccgcgtagcgcaaaccatcgttggcgaaacagacgaacgccgactaaaggcagtgctgcgcgaggaaatcatcctggctctgcatgcagcagccgattacaaccccgagaaggaactatccgaaaatgaatag

SEQ ID NO: 348530 - DNA, 366 bp, Pseudomonas aeruginosa
atgaagtcacccgacgacaccctgaccgcccttttcgatctgcaggcccaaatcgaggccgacgcctccaagctactgcgcgacgcccaggctgtgaaaaccgtactgaaacgccagcccctggacgccgccctgcctgagctgctgaccgagttgcgccgcacttccgataacctcaagaccctggccactcgctgccgcgccgccttggtggatcacgccgacgccgaacacgcgaaggaaatggccagccgcccgaagtggcgcgcaaacaagcacgctagcgcgggccagcgcgtgcgccgtggcatgctgaagcgcggctgcctggtgggcgacttcgacgcgccggggttcggcctgtga

SEQ ID NO: 348531 - DNA, 327 bp, Pseudomonas aeruginosa
atgctgcgccgcgagcgcaaggaagtcgaggcggtggcatccaccgccctgccagctgaggtcctggccgccttggaaggcgcgagcttccaccagcgccctgccagcgaggacggcaccccgcgcatcgttgttcagcctgccggcctgagcggctggattcacggcgacgatgacgccgagcgtctggccaaggctttccccgaattgaccgaagctcagttgcaacgcgcctgccgctacctggccagcctggtgggaaatcatttgcgcatggtcgagaacggcggcgagtcgaagcgccgcagctgggtaaatgattggtga

SEQ ID NO: 348532 - DNA, 924 bp, Pseudomonas aeruginosa
atgaacgaactgaaacgcctgcttgaagacgctaagcgccaatctgccgccagcgccacctatgaccaaaccggcgccgtccgccacatcatcccgaaagcaccggccagcgtcatgagccgcagcctgcgcgaactgagcctgccgccgttcctggctaaccagggcctgcaccaggtgcgcgtcccactgggcaccgaggccggcaagaaatccaccttcagcagcgtgctgttgcaagccagccgcgtatcccaggccggcgcccgcatcatcctggtggaagatgccgacgacgcgcaacaggttccgggcggtggcatcgccctgcagaagcgcaacgccggctatacgctggtcgaggccgccaacttcgccctggtggcggacggcgcccaggtggccgacagcacgctgccggtttaccgcgatctggtcgacctggacaccatgccggcctacggcttccgcgtcgcactgtctcgcgctgaacagcgccaatatgaagacggcgagctggcagacaacgccttggtgagcatcgcgcttggcatcgcccgcaccgctgatgccgttctgctgtccgccatcgctaccagcaccccggcaaacttcagccttggcgcagccgctgcgctgggcgtcgagttcgccgagctgcgcgccctggtgggcaccgccggtaacggcgccgctgtaggccaggacggcaccctgcgcgccgctggcactctggccgagctgacccctgtaatcgccgaaaccatcgtgggcagcttcagccgtgcagccgtcgcagtgcatgaagatatccgcctggtggccgagcgcaccaacaagcaaggtgagctgatccttacctgctggatgaacgcccaggcgctgctgccgctgccaggtgccttctggaaggtggccgcgtaa

SEQ ID NO: 348533 - DNA, 2307 bp, Pseudomonas aeruginosa
atgagcgcattcgctgactatgtggtccagcactactccgatcccgccgaggtcctggccgctcactttgccgacgcggcagccgcagcggcgagcgtcggggcactgctggacgccctgcccgccctggacggcagccggaactaccttcccgacctgaaaggccataacgacaagcgccactactaccgggcgaacctggaaaccgacaaggacggcaccgtctggccgtgcatcaccttcgggacgtttaaacaaggtagcgccacgacctactggaagccacgcgacctggtgtggcagcagttccaggctgccaacgacaaccatgcgccgagtgatgaccgccgcgcagagtaccgccgccgcgccgcagagctgcaggccaaggccgacgccgcccgcgccgaacgagaagcccaggccgaacaggggcgccaagctgccgccgatgctgccgccgttgtgtggaatgctgccaccgcctgcaccggccatgcctacctggacggcaagggcgtgcagtcttacggcctgcgcatggcgacaagcgaccaccgcgccaccctgtggaacgaccaggacggcgagtggcaggacgtgttcactgcccgcgctggtgaactgttggtgccgatgaccgatgccagcggcaagctgtgcaacctgcagcgcatcgacgccaccggccgcaagcgcttcctcatgggtggccgtaagcgcggcaccttccaccgcatcgagggcaccggcagcgcctggctggctgaaggctacgccaccgccgccaccgtccacgcggcgaccggcgctgctgttgtcgtggcgttcgacgccggcaacctggccgaagtggcacgccagttggctgaccaggtgggggcagtcgcggccgacaacgacgacaacgacaccggccgcaaggctgccgaggccaccggcctgccgtatgccatgccgcctgctgtgggtgacgactggaacgaccacgccgcccgcgccggcctgcaggacgtggcacagcttctgctgaaagccaccttacctgcgcccgcagagcaagccaacgacgccacgccagcacggttcgaccaggtgcgcgacgttcatgatatgcagcccgttgcattcatgagctggcctcacatgagcgacaaaggccagccgctgaacacgatcccgaacctggaacacctgctgggcaactacggtttcaccgtccgctatgacgtgatccgcaaagacctggtaatccgctaccccggccaaatcggcaccgtggacaaccagaatcagaccgccatcaacgtagtggtgagcctgtgcgccctgaatcgcttgccgaaagccgaggcaccagcgttcctgctgaacgtgggcgaccgtgacccggtgaaccctgtgatggacttcatcacctccaagccgtgggacggccgcagccgctttgccgacttgctggccaccgtggaaacccgcgagggattcgaccgcgacctgttcgccttgctgctgcgtcgctggctgatttcggccgtggcagctgccgccaaaccgtccggcttctggtccaaaggtgtcctggtgttccaaggaccgcagtcactggggaaaaccgcctggattcgctccctgctgcctgaagaactgcgcaacctggtgaagatcgacgccaccatcaaccccgacaacaaggacacgatcatttccgccgtgtcgcattggctggtggaactgggcgagctggacggaacgctgcgcaaggcagacattgcccgcctcaagggtttcatcagccaggacgtggaccagttccgccgcccctacgggcgtgcagaggagaaattccagcgtcgtacagtgttcttcgccagtgtgaacccggaactgtttctggccgacgataccggcacggtcagatggtggacggtgcccgtggtgggcgtgaactactcgcacggcatcgatatgcagcagctgtgggcagaggtgttcggctggttccaagctggcgaacgctggtggctggaacccggcgaagaagcacgcctggaggccgtgaacgccgaccaccagaaggccgacccggtggaggagctgctgctgagccgatacgaccgcgccatgccggcatcgcgccgcttgactgcaactgaaatcctgatcgaactgggatacgagaagccgacccgcgccatgctgaacgatgcatccaaggtcatcgaaaagcatctcggtgcctggtcgaagtccaacgggcgcaaggtgtaccgcgttcccatgttggctggtagccgtccgttctga

SEQ ID NO: 348534 - DNA, 363 bp, Pseudomonas aeruginosa
atgaatgcatttccgacccggcaagaggccgggaacgcccgaggtgcgcctgcacacctgcgcttgcacaccctcaaacccagcagccgccgaatccgccccatcctccagaagttcgcggacgcagtaatctgcccacgtatcgagcgctacgggtccttagaacaactgaacgcccagcgcctggtcgctgccgtgcaagtcatcaatgcctgtcctgacatagcactggacctggcgcagatgtccaagagcgcaccgcgtgaactgcctttcaacttcacggcgttggacgccttccgcatcctgctggaccagttgcacaccctggagcgcgccccacgcatgaaggtggcagcatga

SEQ ID NO: 348535 - DNA, 1233 bp, Pseudomonas aeruginosa
atgggaagtcttacggtaaagaccgtagaaaagctcataaaggcgggaacccctggcacaaccggggacggagatgggctgtatctgcaggtggcacgaaatggctcacccagctggctctaccgcttccagctgaatggcaagcgccgaaacatggggcttggctcgtgcgatctggtgacacttgccgaggccagggaaaaggcagctgaggcgcgcaagctggcagctgcaggtatcgacccaattgaagatcgaaaggagaaggaaggcgccgcgaaagccgcctccgtgacctttgataactgcgcatccgactacatcgctgcccaccgccccggatggaaaaatgcgaagcacgctcagcagtgggaaaacacacttgcgacctacgccacaccgatcattggaaagcttgcgccgcaggacataaccactgcgcacattctggaagtcttgaaaccgatttggtcggcaaagccagaaactgccagccgcctgcgaaatcgaatcgagctgatcctagatgcagcgaaggcacgcaatctcaggcacggggagaaccctgcccgctggcgcggacacctggacaagctgctgcctaaacgcacaaaggtgcgcgcagtggtgcaccatcccgccctcccttgggcggagattccgaagttcatggcaggacttgccgaacatcgcgacctcacctacgccgccatgcggcttacgattctgaccgcctgccgcacatctgaggtgctggccgcaacgtgggacgaaatcgacgatggagcacgcacctggacaattcccggcgctcgcatgaaatccgggaaagagcatcgcgtaccgctttcagacccagctttcgggattctgaccaaccttccacgcatcgatggaagcccctacctcttccccagcacccgtaagggtaagcacctttcgaacatggcaatgctgatgggactccgccgcatggaacgcgacgacctgacgatgcatggcttccgctcatcatttcgagactgggccgccgagtgcactcctcaccccaactttgtagtggagatggcacttgctcacgtcgtaggcaatgccgtggaggcggcctataggcgcggcgacttgttcgagaagcgcaggcaactcatggaggattgggcccactactgcgataagccgactggcaatgaccgttcgtcggaaaacaaggaagcactcagtgatattgagtga

SEQ ID NO: 348536 - DNA, 315 bp, Pseudomonas aeruginosa
atggtcggtgacggccttgagcagcgcattgagctggccgacgcccaggcagcgcccctggtagggcgccagcaactggcgacgcgcgctttcgtcgaggtgcccggcgccttccagctcgatgcggcggatctcgaagcagcgctcgtcgtcgccggaggcatccgcagcggcgggggctcccttgccgggcagttgctggagttcctccaggcgcttgcgctgttcgtccagcaggcgctgctggcggtcgcggatcaggtcgcggtcgccgggggaggtgaagggggcggcgctggcaagcagcggcagtaa

SEQ ID NO: 348537 - DNA, 474 bp, Pseudomonas aeruginosa
atgagcgacatgcgggaggccttcgagaaacgcatggccggcgtattcgacctgtctagctacgtcgatgcccagggcgacattcgatattcggacagccacacacaggctgcctgggatggatgcaaactggcggtggatttgtttgagtcggggccatcagcaaggcaaggcacgaacctccgcgctatgttcgaagaaacgaacaagggaaagtttcctcgccgctctttcgagagggacaagttcggagactatgtggatcgcagcgcagagttcgcatggaagtcgctactgtcgacgctcggccacgccgaacggcttcaggccctggagcgtctgaggctacgcatcgacgcccacatgttcatcagagaggacggggaactgctcggatacggcgtatccgtccctgagatgcgcgaattccgggaactccttatcccgttcaacggcgaaatcaagatcaagtag

SEQ ID NO: 348538 - DNA, 270 bp, Pseudomonas aeruginosa
gtgcctgacatgagagaagagtttgaagcgtgggctaccaagcaccggatgccgattcatcgcgacggtgttgtaaccgactatgcagccagatgcacagatgaatgctggcaagcctggaaagccagccgcgcggctctgagggtggagttgccggagaagatggagcccacaagaaacatctacggaaacctgatcatcggcagctacaacgcagtgcttgatgccgtgaaagaagccctccagcaagccggaatcgaggtgaagtga

SEQ ID NO: 348539 - DNA, 822 bp, Pseudomonas aeruginosa
atgagctggctttgttctcgggcgctggtggaggaattctcggcggccacctcctcggatggcgcacggtctgtgctgtcgagttcgaaccctatgccgcaagcgttcttgccgcaagacaaaatgacggcattctcccgcccttcccgatctgggatgacgttcggacatttgacggaagaccttggcgcggccttgttgacgtggtttctggcggattcccgtgtcaggacatatcagctgccgggaatggcgccggaatcgacggtgagcgctcagggctctggcgagaaatggcacgaatcgtcggtgaggtacgaccgcgattcgtcttcgtggagaactcacctctccttgttcgaagaggacttgccgtggtcctcggtgaccttaccgagctggggtatgacgctcgatggtgtgttatgggagccgccgacgtcggggcgccccatcagcgtgatcgcatatggattgtggcaaacgccagtagcggacgacgcagcgaaccgagcagatggcaagtggaacagccgcggcgaaccgaagctgagtgcacaggtgaagctatggtctacgcccactgtgtgtgggaattacaacaaaccaggggtatcaccaaccagcgggatggggctgtcaagtgccgtgaacctagagggcagagaaagtggccagctgaacccgacgtgggtcgagtggctcatggggtggcctctagagtggaccgcattaaagcccttgggaatggccaggttccacgagtggcagcggcagcattcacttatctcgcatctgaatggatctgaggaggcagcatga

SEQ ID NO: 348540 - DNA, 315 bp, Pseudomonas aeruginosa
atgagcaagcacacgccggggccttggttcatcaacggtcacgaacgctacaccaagcacgtcgaggcgcgcatcggtggaggttgggttcaggaggtagccgcttgtggacctaccgagaatccggaacagcaggaagccaatgcccgcttatgcgccgccgcgcccgaactgctcgaggctctgcgcatcatggtgaatgcctgctacccggtatctacggcgataagcgataaaggccatgaatggtgcaccgcttacctagatcaagcgcttcccctggcccgagccgcaatcgcaaaggccaccgcctaa

SEQ ID NO: 348541 - DNA, 219 bp, Pseudomonas aeruginosa
atgggccagtggattagctgttctgagcgccttccgaaagaaccaggcacgtaccttgtgttcaaggctctctctgcttatcgcttagggctttacgactggctagtagatgaacagagcttggagcaggaatggattcgcaagaaacgaagtgagttcaaaccaaagacttgggtaacccactggatgcccctacccgaaccaccgcaagacgcctga

SEQ ID NO: 348542 - DNA, 267 bp, Pseudomonas aeruginosa; identical to SEQ ID NO: 340376

SEQ ID NO: 348543 - DNA, 201 bp, Pseudomonas aeruginosa
atgtacgcagatcagtcccacaagcgggacattccccgaaaggtccgttttaaccgtgtcctcgacaggattcttgagcgcgccgctaacaaggcacgtcgtcagcacgccacctacctctacgaggtcatcgaatgggctgttgagaatggcgtgatcgagtcactgagcaaggaaggcgaagagtctagcgcggcctaa

SEQ ID NO: 348544 - DNA, 204 bp, Pseudomonas aeruginosa
atgggcgagttggattaccagcgattgccggaatgggtacgggtgcggatagaagggctctcgagagagcgcggctggagcatcgagcggtgcctggaagagatcgtgattgaagcgattgcaatgggcggacttacgtctgccgggcgaccgaaagcatcggtcgttcaactgaggccgaaagagggcctcaagagtgactga

SEQ ID NO: 348545 - DNA, 372 bp, Pseudomonas aeruginosa
atgataccccttggcaacccgctgcccccttgccgccgtgtgccggccttggccttggcgctgatcatcgcgctggccggcgcatcgcccgcatcggccggcgatgctgccgctgaacacgagcaactggccgcgctcgcccgccaactcgacctgatcgaccgcctggccgagcacgccgccagtaccacgccgcaggcgcgcgcccgctaccacttcgactacgcccggctgcgtgccgacctgacgcgcgtgcgtaccggcgtgcaggactacctcgtgccccagcgcgcccagccgcgcgatcccgtcccgctggccggcgattacgttcgccgtgaccgcgccgacgacgaggagccgtcgccatga

SEQ ID NO: 348546 - DNA, 126 bp, Pseudomonas aeruginosa
atggcccgcaacgaggtgagcctgctgctcagcctctacgccggagctgtggcgcccaccaagagcgctgcagaaaagtttaagttgtgtatgccatcgagacggcaggaggggtctggcgaataa

SEQ ID NO: 348547 - DNA, 411 bp, Pseudomonas aeruginosa
gtgaaaccctcgaacagcggcgtgatcgaggcgctggaggacaatctgatcgacctccgcaacccgctgcgcatccgtcattcgctggccagccagcttcgcactctggtgctgcagcgcgcgatgggctggatcgatctcagcgataccggcacgctgcgccgtgacccgctctggcagttggcctgcagcggtgcgcgtggcatgaagcccctagctcagggtcggctgtctcaagccacgctgtcgcggctgctgacctgcatggggcgaaatgacaacatcgatgctgtgcatgaagacctgctgctgttggtggtctggcgtctgacctcgctgaagcatggccaacgccccgagcagctgacgctggacatcgacggcgtgccgatcgatgtccacggccactag

SEQ ID NO: 348548 - DNA, 354 bp, Pseudomonas aeruginosa
atggaacttgtgaagtggatattctggtggatggtagcggctgcttcgggcgggttacttttagccctgctgacggctataaaggtgcgttacccttcgtggttgaggttggcgcacggtgggctcgccttcgcgggactcgtgacgctggtctatgcgttgtttagcggcgggcccgatgcttcgattccgcaggccgctttctgggcgctgggcctgctggtagcagcctttctgggaggggtgttgttttttggggtgctgttccgtaacgccaagccttggtgggcgatcatcgggcacggcggcttggcgttggcgggcgttgtcgtgctatttatggccgcctattaa

SEQ ID NO: 348549 - DNA, 1398 bp, Pseudomonas aeruginosa
atgaaaataaaaaatttacccaataaagtaattagtggtgcgatcttgggtatcgcatcaagccatgcgatagcgacggatggtttgttcttggagggctttggagcaatttctaggagcatgggtggaacggctgttgcgcattatgtcgggcccgcgtcaatgatggtcaacccagcgaccatggatttatctgattctgccggcgaactgttgctcggattcgatcttatcactacagacattggcgccactaacccggagaccggggaacatgtgtcgtcgagtgaccattcgaacaacagaggaccctatgttgccccccagtttgcttatatccacaaggtttccaactggaccttcggtgcgggcgtgtttgcacaagccggtgtaggggtggaatatggggatgacagttttttgtcgcgcggtgatgttggtggaaagggttatgctgccggggcggataccggtcttgaaaatgcgagccgtttggttttccttgatataccttttgctgcgagctttaaagttaacgatcgcctgaccattggcggttcacttgatgccaagtggactgtcttgaatcttgattatttacttggaatgaaccagctaggtagtctagcgggggatgggcgagcgtccggctccttaatgggggtgattggaaccttgcccgacccacggggtgtccatttgagcgttagcaaaaacaaagagatttcgagtggcgttgatgggtgggggtattcgggcagattagggttattgtacaaggtggcccccacaacgaatgtgggtgtctcctacatgttcaaaagtcacatgaacgacttgaaagggaaggggactgttacagcggtggacggtattgccggtaatgtgcctatcgaaggcgaggttcggtttttggacttcaatacgccagccaagcttgatgtgggtatcagccatcaggtcactgataaatggttgatcgcttttgatgtttctcgcgttttctggaaggatgctttgaaggacattaaattggggttcgccagtgggatgggcgatgttgacttaaagctgccgcaggatgccaaggatcaaacgatcatggcgattggcacgtcgtatgcggcaaccccgcgtttaaccctgcgagcaggataccgtcatgccacgcagccattcaatgacgaagggctgctggcgctgattccagcagtgctacaggatcatgcctctttaggatttagttatcagttatccaaatcaggcagattcgatgctgcctactcgcacgccttcaaggaaagtatgaccaaccggtcggcttacaacacctcatcgcccgtgaaatcgtccatagcgcaagataatttcgtcctggcctataattattcattctga

SEQ ID NO: 348550 - DNA, 1101 bp, Pseudomonas aeruginosa
atggaaatcaaagcggcaatagttcgccaaaaaaatggccctttcttacttgagcatgtagctcttaatgagccagctgaagatcaggttctcgttagattggttgcaaccgggctgtgtcatacggatctggtttgtcgcgatcagcactatccggttccactaccgatggtatttgggcatgaaggggctggtgtggttgagcgggttgggtccgcggtcaaaaaggttcagccgggcgatcatgttgttttgacattttatacctgcgggagctgtgatgcttgtctttccggagaccctaccagttgtgcaaactcatttggccctaactttatggggcgctcggtaaccggggagtgcaccatccacgatcaccaaggggcagaggtgggagcaagcttttttgggcagtcctcctttgcgacatatgcgctatcttatgaacgcaacactgtgaaggtcacgaaagacgtaccgcttgagctgcttgggcctcttggttgtggcattcaaactggcgcagggtctgttctgaatgcgcttaatccgccagcgggttctgctatcgcaatttttggtgctggggcagttggtctttcggccgtgatggcttccgttgtagcaggttgtaccaccatcatcgctgtcgacgttaaggaaaaccggctggaactagccaatgaacttggggcgacgcacattattaacgcggccgctaacgatcccattgaggcgatcaaagagatatttgctggcggtgttccgtatgtattggagactagtggtttgcccgccgtgcttacgcaggcgatcctcagctctgctataggcggtgagatcggtattgtaggggcgccacctatgggggccacggtgcccgttgacattaacttcctgctattcaatcgtaagcttcgtggaatcgttgagggtcagtcgatctcggatattttcattcccaggctggtggagctttatcgccaggggaagtttccgtttgacaagctgattaagttttatccttttgatgaaatcaatcgagccgccgaagattcggaaaaaggcgtgacgcttaagccggtactccggattggttga

SEQ ID NO: 348551 - DNA, 1053 bp, Pseudomonas aeruginosa
atgaatgagttttttaagaaaatctctggtttatttgtgccgcctcgggaatctaccgtttcagttagagggcaggggtttcagtttaaggtgccacgcgggcaaaccattctggaaagcgctctgcatcaaggaattgcctttccgcatgattgcaaagtcggatcttgtgggacatgtaaatataaactgatatctggcagggtgaatgagttgacttcttctgctatgggtctgagtggcgatctgtatcagtccggctatcgcttgggttgtcaatgcataccgaaagaagatctcgagatagagctagatacagtgcttgggcaggcgttggttccaatagaaacgagtgcattgattagaaagcagaaaaggctggcgcacgatatagtcgagctggaattagtatccgataagcagatagccttctaccccggccagtatgcagacgtggaatgtgcagagtgctctgctgtaaggagctattcttttgccactccgccccaacctgatggctccctgagcttccatgttcgccttgtcccaggtggaattttcagtggttggctatttggtggcgatcgtacgggggcaacactaaccctgcgagcgccttatgggcagttcggactccatgagagcaatgcgacaatggtctgcgtagccggcggaacggggcttgctccaattaaatgtgttttgcagagcatgacccaggcccagcgaaagcgtgatgtgttgttgttctttggagctcgtcaacaacgtgacctatattgcctcgacgaaatagaagcgctgcagttcgattggggtgggcgcttcgagttaattccagttttgtccgaagagtcttctacgtcgtcatggaaagggaagcggggcatggtgaccgagtattttaaggaatacctcacggggcaggcttatgaaggatacctttgcgggccgccgcctatggtggacgctgccgagaccgagctcgttcgacttggtgttgcgcgggaattagtgtttgcggaccgtttttataatagacctcttagctag

SEQ ID NO: 348552 - DNA, 1116 bp, Pseudomonas aeruginosa
atggacacgcttcgttattacctgattcctgttgttactgcttgcgggctgatcggattttactatggtggctattgggtttggcttggggcggcaacattccctgtactgatggtgcttgatgtcattttaccgaaggatttttcggccagaaaggtaagtccctttttcgcagaccttacccagtatttgcagttaccattaatgatcggtctatatgggctccttgtctttggagttgaaaacgggcgtatcgaacttagtgagccgttacaagtggcagggtgcattctttctttggcttggcttagtggtgtgccaactcttccggtttcgcatgagttgatgcatcgtcgccactggttgcctcggaaaatggcgcagctattggctatgttttatggtgatccgaaccgagacattgcccatgtcaacacgcatcacctttacttagatacgcctctcgatagcgatactccgtaccgtggtcagacaatttacagtttcgtgatcagtgcgacagttggttccgtcaaagatgcgataaagattgaggctgaaactttacgtagaaaaggacagtcaccgtggaatttgtccaacaaaacatatcaatatgtcgcactcctgctcgctctgcctggcctggttgcttatctgggcgggccagcattagggttggttacgattgcttcgatgattattgcgaaagggatagtcgagggttttaattactttcaacactatggtttagtacgcgatctagataagcctatcctcctgcaccacgcgtggaatcatatgggaacaattgtgcgcccgctgggttgcgaaattactaaccatatcaatcatcatattgacggctatacacggttctatgagttgcgtccggaaaaagaagccccgcagatgccttcgctctttgtgtgtttccttctagggcttattccgcctctttggttcgctctcattgcaaaaccaaagttgaaagattgggaccagcggtacgcaactccaggtgagcgcgaactggctatggctgctaataaaaaagcgggatggccactgtggtgtgaaagtgaactggggcggggcgggctagctagcatttga

SEQ ID NO: 348553 - DNA, 1464 bp, Pseudomonas aeruginosa
atgcgggaaacaaaagagcagcctatctggtacgggaaggtgtttagttctaattgggtggaggcgcggggaggtgttgccaatgttgtcgacccgtccaatggagatattcttggcattacgggcgttgctaacggcgaagatgtcgatgctgctgtgaacgcagctaagagagcgcaaaaggaatgggccgcaataccatttagtgaaagagccgccattgtccgcaaggctgccgaaaaactaaaggagcgcgaacatgagttcgccgattggaacgtgcgggaatgcggcgcaattcgtccgaagggcttatgggaggccggaattgcgtatgagcaaatgcatcaagctgcgggtttagcttatttgtctaacggtacgttgtttccatcggcagttccagggcgcatgaatctttgtcagcgcgttccagttggcgtggtcggtgtaattgcaccttggaatttcccgttgtttttagcaatgcgttcggtagcaccagccttagcgttgggtaatgcggtgatcttaaagcccgaccttcagactgctgtcaccgggggggcgctcattgccgagatcttttccgacgctggcatgccggacggtgttcttcacgttcttcctggtggagcggacgtaggagagtcaatggttgcgaactccggaattaacatgatttcttttaccgggtccacacaggtgggccggttgatcggagagaaatgcgggagaatgctgaaaaaggttgcgcttgaactgggtggtaacaatgtccacatcgtgttgcctgacgccgatttagatggggctgtcagctgcgctgcttggggtacgttcttgcatcagggccaagtgtgcatggccgccggacgtcatttagtacatagggacgttgcccagcaatatgcagagaaactggcgctacgtgcgaagaacttagtggtgggggatccaaactcggatcgagtgcatctcggcccacttatcaatgataaacaggtagttcgcgtccacgcgctcgtcgaatctgcacaaagcgccggtgctaaggttttggcgggaggtacatatcaagatcgctactaccaagctaccgtaatcatggacgtgaagccggagatggaggttttcaaatctgaaattttcggcccggtggctccgatcactgtatttgacagtattgaagaggcgattgaattagcaaactgttcggagtatggcttggccgcatctatccatactagggcgttggcgactggtctagacatcgcaaagcgtctaaataccggtatggtccatattaatgaccagccaattaactgtgagccgcatgttcccttcggaggaatgggtgcctcgggtagcggaggccggtttggcggacctgcaagtattgaagaatttactcaatctcaatggattagtatggttgagaagccagctaattacccattctga

SEQ ID NO: 348554 - DNA, 1047 bp, Pseudomonas aeruginosa
atgctcgcgataaggaaaactaaagcagggccaggagggctatctgtcgatgatgtggccgcccctaaagaggcccacagtactgacgtgctggtgaaagttgaagcggccggtatctgtggtactgacttgttgatctataaatggggcgagttcgccaaaagaatgaaactccccactatcttgggtcatgaagttagcggggtgattgaacaggtcggatctgacgttaaaggtctaaggcctgggatgcgcgtcagtctggagagtcatctcccttgtggaacgtgctacacgtgtcgacgcggttgggcgcatgtttgtcctaatacgcggtatccgggggtcgactttgatggaggcttcgcgtctttcgtcgtggttccggagagcgtgtgttggccggtgccgtgcggaattcctccgctccaggcggcaatgatggagccgttcgggcttgcggtgcatgcaagtctggaaggttctggggtttcgggattgaatgttcttgtttctggttgcggtccgatcggacttatgaacattgcagccgccaaagcactgggagcaagcaaggtcattgcaactgacattcatcctctgcgcctcactgcagcagccaaaatgggggcggatgaatgcattaatgcaactgaagagagcgtttataagactgtgcgttcgctgctcggtgagaggggagtagatgttgcaattgactattccgggcaagcagcggcgttaaaggagcttattcaatccatcacccatggtggtgagttgcgactgatgggcgtcccgtcacatgatattttgctcaacctagaggagtggctttttaaaggccttattgtacgtggcctgcatggcaggcgtctgtttgaaacatgggagcgttcaactagcttactggttacagggcgtgttgatttgtcttcgctcgtatcgcatcgattgccactatcggcggcagaggatgcgttcgaaatggccttaaatggtcagtccttgaaaatcctgtttgagcccaatggcacatgtatctaa

SEQ ID NO: 348555 - DNA, 1701 bp, Pseudomonas aeruginosa
atgtcgcttatatacaaacccaagatgcagcatgaggatatgcaagaccttatcagccagatccgtttcgttgccgccgaaggcaagatctggctgggagagcagcgcatgctgctaatgcagctatctacgctggccagcttccgccgcgaaattatcagcttgatcggcatcgagcgggccaagggtttcttcctgcggttgggctatcagtccggcctgatggatgccgagctggcacgcaagctgcggccggccatgcgcgaggaggaggtgttcctggctgggcctcaattgtacgcgctcaaggggatggtcaaagtacgcttgctgacgatggatatcgccatccgggacggacgtttcaacgtggaggccgagtggattgattcctttgaagtggatatctgccgaactgagctgggcctgatgaatgagcccgtctgctggacggtgctaggctatgctagcggctatggttcggcattcatgggccgcagaatcattttccaggaaactagctgtcgcgggtgcggtgacgataaatgccttatcgtaggcaagaccgcagaagagtggggcgatgtcagcagtttcgaagcctacttcaaaagcgacccgatcgtagacgagcgctacgagctgcagacccaggttgccaacctgcgcaaccgcctgaagcagtacgatgggcagtattacggcattggccattcgccagcctacaagcgcatctgtgagaccatcgacaaggctgcacgcggcaaggtttcggttctgctactgggtgagactggggtgggcaaggaggtaatcgcgcgcagcgtgcatttgcgcagtgagcgcgcagagcaacccttcgtcgcggtgaactgtgcggcaattccgccggatctgatcgagtcggaactgtttggtgtcgataagggcgcctatacgggcgcggtcaatgcacgcgctggacgttttgaacgggccaacggcggcaccatctttcttgatgaggtgatcgaattgacgccgagggctcaggccaccctgctacgggtattgcaggaaggagagctagagcgggtcggcggcgaccgcacgcgaaaggtcgacgtgaggttaatcaccgcaacaaacgagaacctggaagaggcggtcaagatggggcgctttcgcgcagacctgttctttcggctgaatgtttttcccgtgcagatcccgccgttgcgcgagcgcgtggaagacatcccgctgctggtcgagcattttctcagaaggcaccataaggaatacggcaagaagactcttggcctgtctgatcgagcgatggaggcctgcctccactaccaatggccaggcaatatccgcgagctggagaacgcccttgagcgcggggtgattctcaccgagagcaacgaaagcatcaatgtcgagtcgctgttccccgggttggcgatggctaccgaaggcgacaggctatcaagcgagggccggttggaggaggagtccggtgacagttggtttaggcaaattatcgaccagggcgtcagtctcgaggatctcgaggcgggtttaatgcgcacggccatggaccgttgtgggcagaatatctcacaggcggcgcggttgctgggattgacccgcccggcaatggcctatcgacttaagaagcttgaccccagcctatctgtgaaagcaacgggccgatag

SEQ ID NO: 348556 - DNA, 966 bp, Pseudomonas aeruginosa
atggattttcgcttattgaacgagaaaagtcagatcttcgtccatgccgagccctatgcagtctccgactatgttaaccagtatgtcggtacgcactctattcgcctgcccaagggcgggcgcccggcaggcaggctgcaccacagaatcttcggaggcctcgacctgtgtcgaatcagctacggcggtagcgtgagggtgatctcgcctggattggagacctgttatcatctgcaaataatactcaaaggccattgcctgtggcgtgaccatggccaggagcactattttgcgccgggcgaactattgctgctcaatccggatgaccaagccgacctgacctattcagaagattgcgagaaatttatcgttaaattgccctcagtggtccttgatcgggcatgcagtgagaacaattggcacaagccgagggagggtatccgtttcgccgcgcgacacaatctccagcaactcgatggctttatcaatctactcgggttagtttgtgacgaagcggaacatacaaagtcgatgcctcgggtccaagagcactatgcggggatcatcgcttccaagctgctcgaaatgctgggcagcaatgtcagccgcgaaattttcagcaaaggtaacccgtctttcgagcgagtcgttcaattcattgaggagaatctcaaacggaatatcagccttgagcggttagcggagctggcgatgatgagtccacgctcgctctacaatttgttcgagaagcatgccggcaccacgccgaagaactacatccgcaaccgcaagctcgaaagcatccgcgcctgcttgaacgatcccagtgccaatgtgcgtagtataactgagatagccctagactacggcttcttacatttgggacgcttcgctgaaaactataggagcgcgttcggcgagttgccttccgacaccctgcgtcaatgcaaaaaggaagtggcttga

SEQ ID NO: 348557 - DNA, 342 bp, Pseudomonas aeruginosa
atgtttagtgtatctgggatgaatatgaacagtgccggctacgaggtgttcgaagtgctaagcggccagtcattccgctgtgcggagggccagtcggtattgcgcgccatggaagcccagcgcaaacgctgcattccggtgggctgtcgcggcggcggttgcgggctgtgcaaggtccatgtgctgcatggcaattaccgtcgcggtcgcatgagctgccatcacgtgccgcccgagttggagagccagggcttggcgctggcatgccaggtatttccgcagtccgatctgagcatcgaatgccttcgccctaatagcgaaggcgacaaaaacaacagatga

SEQ ID NO: 348558 - DNA, 777 bp, Pseudomonas aeruginosa
atgaacaaacgtttccaggacaagactgccgttatcaccggcgctgcccagggcatcggtcgccgcgtggccgaacggatggcggccgaaggcggtcggctgctgctggtcgaccgttccgagctaatacatgagctggccgacgaactggtcggagtcgctgaggtgctgaccctgaccgccgaccttgagcagttcgccgagtgccaacgggtgatggcagcggcgctcgagcgcttcggtcgtctggacattctgatcaacaacgttggcggcaccatttgggctaagccattcgagcattaccaggaacacgagatcgaggccgaagtgcggcgttcactgttccctaccctatggtgctgccacgccgcgctgccgctaatgctcgagcagggcagtggcgccatcgtaaatgtttcctccgttgccacgcgcgggatccatcgcgtgccttacggcgcggcgaagggtggcgtcaacgccctgaccgcctgtctggcctttgaaaccgccgagcgcggcatccgcgtcaacgccaccgcaccgggtggcaccgaggcgccgccacggcggattccgcgcaatagcgccgagccgagtgagcaggagaaggtctggtaccagcagatcgtcgaccagtccctcgacagcagccttatgaaacgctacggaagcattgacgagcaggtcgaggcaattctgttccttgcttctgacgccgcctcctacatcaccggtataactcttccggtggcagggggagacctcggttga

SEQ ID NO: 348559 - DNA, 1011 bp, Pseudomonas aeruginosa
atgacacacaaggttgcactgaacttcgaagacggcgtcactcgtttcatcgatgctaatactggcgagactgttgctgatgctgcctaccgccaaggcatcaatttacccctggactgccgagacggtgcatgcggcgcctgcaaatgcttcgccgagagcggccgctacggcctcggcgaggagtacatcgaggatgcacttagcgaagccgaagccgagcagggctacgtgctgacctgccagatgcgcgccgaaagcgactgcgtgattcgcgttccggccgcatcggacgtctgcaagaccctgcaggccagctatcaggcagcgatcagcaacgtgcgtcagctgtccgagagcaccatctcgctgtcgatcaaaagcgcatcgctgaaccagttggcgttcctgccgggccagtacgtcaatctgcaagtgccgggcagcgaccagacccgcgcctattccttcagctcgctgcaaaaggatggtgaggtcagcttcctgatccgcaacgtgccgggcgggctgatgagcagcttcctgaccagcctcgccaaggtcggcgatagcgtcagtctggctggtccgctgggcgcgttctatctgcgcgagatcaagcggccgctgctgttgctggcgggcggtaccggcctagcaccgttcaccgcgatgctggagaagatcgccgagcagggcagcgagcacccgctccatctgatctacggcgtcacccatgactacgatctggttgaaatggacaagctagaggcattcgccgcgcgcattcccaacttcagctacaccgcctgcgtcgccagcccagacagcgcctatccgcaaaagggctatgtgacccagtacatcgagcccaaacacctcaacgacggtgaggtagatatctacctttgtggtccgccaccgatggtcgaggcggtcagtcagtacatccgggcacagggcatccagccggccaatttctattatgagaagttcgccgccagcgcctag

SEQ ID NO: 348560 - DNA, 489 bp, Pseudomonas aeruginosa
atgacaatctcctacgaagctgtgcgcgatttcctttaccgcgaagcacgctacctcgacgacaagcagtgggatagttggctggaaatgtacgcgccggacgccactttctggatgccggcctgggacgaccgcgaccaattgaccgaagacccgcagagccagatctcgctgatttggtacggcaatcgcggtggcctagaggatcgggtgttccgcatcaagaccgagcgctccagtgccaccattccggacacccgaaccagccacaacatcagcaatgtggagctgctcgaacagtccggcggcttctgtaagctgcgctacaactggcacaccatgagttatcggtacaagacggtggaccacttctttggcaccagcttctgcaccctcgacacatgtggcgagaccccgctgattaaggccaagaaggtcgtgctgaagaacgactacatccgccaagttatcgatgtataccacgtctga

SEQ ID NO: 348561 - DNA, 1362 bp, Pseudomonas aeruginosa
atgacaatgcacctggggctcgactatatagatagtctcgttgaagaagatgagaacgagggcatctaccgctgcaagcgcgagatgttcaccgaccctcggctgttcgatttagagatgaaacacatctttgagggcaactggatttatctcgcccacgagagccagattccagagaagaacgactattacaccacgcagatgggccggcagccgatattcatcacacgcaacaaagatggtgagctcaatgccttcatcaatgcctgcagtcaccgcggcgccacgctctgtcgctttaggagtggaaacaaggccacccatacctgctcgttccacggctggaccttcagcaattcgggcaagctgctcaaggtcaaagaccccaagggcgccggctatccggacagcttcgactgtgacggctcgcacgacctgaagaaagttgcgcgctttgcttcctaccgcggatttctattcggcagcctgcgcgaggacgtcgccccgttggaagagttcctcggcgagtcgaggaaggtcatcgacatggtcgtcgaccagtcgcccgaaggtctggaagtgctgcgcggttccagtacctatgtttacgaaggcaactggaaagtgcaggtcgagaacggtgccgacggctaccatgtcagtactgttcactggaactacgccgccacccagcagcagcgcaagctgagagaagcgggcgatgatattcgcgccatgagcgccagtagctggggcggggatggcggcggtttctactcctttgaaaatggccaccagatggtctgggcacgctggggcgacccgaaaaaccgcccgctgttcgccgagcgagatcgcttagccagcgagtttggtgaagcccgtgccgactggatgatcggcgtctcccgcaacctctgcctctacccgaacctctacctgatggaccagttcggctcgcagttgcgtatcacccgtccgctgtcggtggatagaaccgaaatcaccatctactgcatcgcgccgaaaggcgaaagcgccgaggcacgtgcccgccgtgtccgtcagtacgaggacttcttcaatgtcagcggcatggccaccccggacgacctggaggaattccgcgcctgccaggagggcttcgccggcggggggatgaacgacatgtcccgtggcgccaaacactggatcgaggggccggacgagggcgcgaaggagatcgatctgtatccgaagctgagcggtgtccgctcggaagacgaaggcctgttcgtcatgcagcacaagtactggcaacagcagatgatcaaggccgtcaaggcagaacaggatcggctgatccacgcggagggcgcgtaa

SEQ ID NO: 348562 - DNA, 555 bp, Pseudomonas aeruginosa
atgctgccgtctccgtctcgtttcctctgcatcttcggcgtgctcagcggcctgctgtccggttgcacgacgacaccggccacccctgaccatatagaagcgccgcccgacgagatagcttcggtgctggaccaggggctgattccggtggcccgctacggccgctacaccttggtcgagctggtgccggaccctgcccagcgtgatctcttgcagcaggcggtggaggtctcgatcccgcccgtgcccgataccagcgtgggcgacgccatgcgccatgtgctcctgcgatcgggctaccggctctgcgatgcgaccgaggccgccaccctctacgcgctgccgctgcctgccgcgcatctgcgcctgggcccgctgacgctgcgcgatgccttgctgacccttgccggccccgcctgggagctgtcggtcgatgacttgacccgccaggtctgcttcagccggcacggtgcccccaccttcctttccgccgacccgcccggcaccgccacgcccgtgccggtcgacgaccggcacgaggagatgctgccatga

SEQ ID NO: 348563 - DNA, 744 bp, Pseudomonas aeruginosa
ttggtgaaagacgatacagataaagcgggtagcactgccgctgttgcaaaaggtcttggagcgctggagagcgcctgggacgcccactgggcgttgcggctgatttgcctcgtcctgttcctcgacatggccatgatgcttcgtaccggtcgaggattatggcagtggtcggccggcgacaaggcgctactgagtgacgtgggatgggtcgcagtcctcatcgtcgctttcagcttcgcggtagccatcgtgatccccgtcgtcctcattgcgctgcgtcagatcagcgcaatcgttctcagttggctgcctgactttctcactacttcggctgagccggcctatcagaggccattgggatatgcacccacacgcgacttccgaaacctggctctgcgcgagaaggacgatttcctgttccgcatgtatgaggcacatgaacagaagaagcaggccgagagattggctcgggagcgagctggcgagctgacggcggcggcacttctggcggcactggcggattggttgctcgtgcagtggatctccggtagcgtcagcttgatcggcgcgatcgtcgaggcgctggccggctgggcgtccatcgtcgcggcgattaccctgctgtgcgctggtgtcatcctgaagtgggcctggttctcggacacccctcccgacgtgatctactacccaccgctggatcaagagctgcgggacaaggaacggaaggcccgcgggctatgctga

SEQ ID NO: 348564 - DNA, 297 bp, Pseudomonas aeruginosa
atggcactcgccgttctgtctcaaccacgcttccgggccggccaactggtcatgaccgcgggcgtgaacgacctggttcaacggggtgcactcaatcccgtgccctatctccggcgccatctcgatggcgattggggcgatctttgcaatgacgacaagcggcagaacgatgctgcattgaagtcaggcgaggatcggctgttctcgtcctatcaggtcgctcccgacctgaagctctggatcatcaccgaatgggatcgcagcgtgaccacgctgctgttgcccagcgagtattga

SEQ ID NO: 348565 - DNA, 531 bp, Pseudomonas aeruginosa
atgaccacttccaccgaaaagccctacttcgatctgcacatcaccggcctcgggtacctcaatcgcatccgcgaggtgaagcccaagaaaggcgatgcgttcctggcctgcgacatcgcagcgctcaacggtcccagcgaaaaaccggagtaccgccgtttcgacgtgcgcgtatccggcagcgaggcgcagcacctgatccgtcgttgcgaggaggccgtcaaggccgaacgcaaggtgctgatcgggttccgcctgggcgacctgtggaccgacatcttcacctacaccaaggggaagaatgaaggaaagccgggcgtcagcctgaaggcccgcctgctcttcgtgagctggatcaaggtcgatagtcagctcgtctacaaggccgaacccaaggcctccgaggaaacgcctcgcgacgaaacacccgccgtttcgagcgagcccgcggcccaggatgcacccgcatccgaggcagcggcttccgagaccgagaccgccgacaccccggcgctggccgagtcgttctga

SEQ ID NO: 348566 - DNA, 294 bp, Pseudomonas aeruginosa
atgccgacacgcaacgtggtgcttaccgagcatcaacatgaattcgtcgattcgctggtggagacggggcgctaccagaacgccagcgaagtcctgcgtgaaggattgcgcctggtcgagcaacgcgaacgcctcgaatcggcccaacttgcggcgctgcgcgaagccgcaaccaaaggctgggccgacattgatgctggccgctatgtggacatcgccgacgagcaactcgaagacaccattggccaactgggacgcaaggccgccgagcgcgttaccgcccggaaccgatga

SEQ ID NO: 348567 - DNA, 1194 bp, Pseudomonas aeruginosa
atgaccacgggcggcgcaccacggcgcgaaggcccggttgcgctgtcggcgttgttcgacgaggcgctgcggcacctcgagccgaaggaaccggcgcagggcacggcgccgagccaggacggctttctctacagcggcaaccggcacgagagcgtcccgcgcgcgctgttcctcgaccgacgcctgacgccgctggagcgcaatgcctggcaggtgttccgcctgcagcttaacgacgacggcgtgaccgcctttcccacctacgaccagctccgcccctatctggcgtccatgccctgtgcggcgcaagcctcacacgagaccgtggcgcgcgccctgacgctgctgcggctgacacgctggctgagcctggtgcggcggcggcgcgatcccaggaccggccgtatccaaggcaacctctacgtgctgcacgacgaaccgctgtcgcccttcgaggcgatgcagctcgaccccgactacctgggcctggtcagccaggcgctcacgcacgcggcgaaggcggtgcaggtcgtgggcatgaacacgctgcgagagatcgtcgaagacccgctgctcagcgggcgcacgctgccgacccgcctgcaggtgctggcgcagcgcatgacacgccacggcctggcgacggaaagttatccacaggaggccgccgactacgattccgaagaaggccgggatgcccttcttcggaatgctgcgcgcccgttttcggaatccgcagcagggccggaacccgcgccggacggctctgttcggattccgaaggaggaccgtacagtacgtaatgatcgtatgaatgaagtacgtacagtaccgcgcgcgagggccttgcaggacctgcggctgcccgaccgtttcctgcgcctgaaggacgagcagcaggccggcgcgctggtggcgctgcagcaggtggacgaggggcagaggcaggccgttctcgacgagtgggcggcacgctgccacaacagcgcggtacgcaacccggccggctacctgtttggcatcatccagaaggccattcacggggatttccggatctgggctgggcaggccaaccgggaagatgcgcaaccgccgccatcgacgctaacaccggcacccgtgcgtcgcccggccagtccggaaaccgtgcaggcgcatctagcacagcttcggtcgatcctgcgcgggccatga

SEQ ID NO: 348568 - DNA, 603 bp, Pseudomonas aeruginosa
atggaaagttactcgagagtcggtatgcaggaacttgaccagcgcctatcgaagatcgtcgaagccgcacgcaagaaaccggtatcggtttatcgatatggggcgccatgggtctggatagtgtcccaggaagattggcagggtgcgctcaaggaagtgtccagctatataccgccgggacattccctggcattgctgaaaccgcaaatagaaagtctccttggcgaagaggcgaaagtcctcttggcgctcgcccgcgaacatggcatgcagttggccccggagccgctgatccatgcgctgctgctgcaactgctgtacgcgattcccagcgagcagcagttgtacgagcaattgaactacaacctgctgtatcgctggttcgttggcctggaaatgaagcagaagatctggagttttccggttttcgtcggcgatataaccgtcctgctgaacagcgcggaggcggtaaggataataggcaggattatcggggaagtgatttccggggatctcatgcagatgccggaattctccctgaacttcgccttgttgcatacatggcaagcgcgccatggcggagcgcgacggctgaatatctag

SEQ ID NO: 348569 - DNA, 213 bp, Pseudomonas aeruginosa
atgtcacctagcccctcccccgacgagcgtcggcttgtattcgaagcgcgccgactgaccattgaagcactggtgaaaatctatcttgagcaggtttcttcctcaaggaacctggtgacggtctaccttcgcctcatgttcacgttgtcactcggtgccctcgccggcgtgataactctatatgggaccatgcttggggtcatgccgagataa

SEQ ID NO: 348570 - DNA, 1347 bp, Pseudomonas aeruginosa
atgaagattgcaccggcacttattcttttgacactgttcccgctttctgcgatggctcagaattattactggattttgaatgggccgacggctccggggtcgttctcaagtcctgatgcggcttgtcaggcgggattggaaatttataaaaagcaatatccggctgttacgtttgaaatcaaagaccgttttccggtttcggctgagggttttcgttgtaatgtttggcgttattacaatgggaatcgcattgatcctgattggactatctctgttcagcgcaagggtgatagttgcccttcgggttttatctataacagtcaaacggggcgttgtgatgaaccgccaccgcctgatccttgccgcgataaagcagggcagcccgcttcattcactttgatgcgtcccgacctcggcggtcttggctcggttgaaaacgtttgtatgaatggttgtcaggtggctatcggttcggccacttgcggcccgctgaattctgacccgacaaagggtttctgctccggtactggtacgtatacggggtctcaatgttcgccgactgatgagatgggcggcggcaataacccggacccgaatccggatccgccggatcagcctgatccgccggacaagcctgacgagaatgggtgcatccctccggcccagtggtcgggaacgacctgcgttatgccgcctaaagagcctggggacggtgatggcggcgatggcggaagtgatggcggtaacgggggtggaaacaacaatggcggcggtgacggctccggaggtggcgacggtggcgggggtggtgatgggtcaggtaatggcgatggctccggcaatggtgatggctcgggtgatggtggcggcaccggtggcggcgataagccgggcgaggaggagggtaagtgcgacccggccaaggaccccagttgtaagcccagttcagtgactggcgaggcttgtgaaacctcgttgcaatgtgatggcgacgcgattcaatgcgcgattctgcggcaacagaaacaggcccgttgtgacgcccaggaaatgaatgatttcgagaagaacaaagagaagatttcgaagttattccagggtgaagagtttaaggcgcagcctgaccaggaagttgagattccatcgtttatctcgcagtctggccggtttttaccgtcgggttgcccgcctgataaacagttcagtctgtccactggtggcggccactcctttacattctcttataagccgctgtgtgcgtttgcttctgacctgggcgtgcttattgttgtggcggcaagtatttttgcgacgctctatgttggtcgcggttttgggggtgagtga

SEQ ID NO: 348571 - DNA, 213 bp, Pseudomonas aeruginosa; identical to SEQ ID NO: 346539

SEQ ID NO: 348572 - DNA, 1347 bp, Pseudomonas aeruginosa; identical to SEQ ID NO: 348570

SEQ ID NO: 348573 - DNA, 363 bp, Pseudomonas aeruginosa
atgctcgctctcatcggcctgtgccagggctattactgcgaaacccgcaccgtcaacggccagaacggccagcagcaaatcaccgagcactcagtgcttgtccaggtcgagcagccgaacaagttcggtctgatcgaacagaaaattatcgccgtgcggatctccaagcggcacatggatggcggcttgaacaacgcctggaatcagcagaagggcaagacggtttcagtgccggtgtttgtccaggcctgggcgagcagggcgggtaacgccggtttcgacttctggttgtcgggtgatggcttgccgctccagctccaggccgtccagccggccgcgccgaaggcagcagcttcggcatga

SEQ ID NO: 348574 - DNA, 258 bp, Pseudomonas aeruginosa
atggataaggtggcccatcagtcgctccgctgggaccttgagcaagacctttcccaccttgtccaggacgagcacctggtgcgccaggtcctggacctggtcatgcgcagagtcgtccgggaacaggccgccgaggcagttcgccggcagcgcatcaaccgagatttcaagacgttccggcgtggccggagcgtgacgccgcccgcctgggcatttcgtgaaccgggcacaagcccacaagttgaacccctgaggtaa

SEQ ID NO: 348575 - DNA, 228 bp, Pseudomonas aeruginosa
atgaaagcgcctctgcggtttctgctgggctgggtggtcttcatcgccctgttcgcgatgttgacgcccattgtcgccgccattttcgagttctgcgcggcgttcccggtgctggcaatggtggttgccgtctgcgccctggtggcgttcctggcgttgttcttcgcgttcttccggcgcttcgtgcgctggctcgacgagccgaggagggcgcgcagcgatggataa

SEQ ID NO: 348576 - DNA, 1233 bp, Pseudomonas aeruginosa
atgctcgacaagttgcacctcttcgttccgttccgcctcgagcacatcgaactgctcggggtggaagggcgtgcggatccggtgcacgtcgtggatctggaaagcctgggcgtgccgctccaagggcagatcagccgaggggagggcggagagctacaggcggattacttgcggcacacctgggagtcactgagtacgggcttcacgcctttggcgttcaaggtgtttcaccagtccttgggtaagcgcctgatgcccggtgtagagctgaaggccagcccggcgaagttgctccaggggcacaacgtgtttggcccaacctgcatccagaagggggccgaggtgatgttcaagtggctagccggaagctacccggacctcttcgcgaagctcgatgtgtcagcgacgcaggtctacaccctggactgcacgtattccagccggctgccggacgaacgcacggcgctccaggtcatccaggcgctgaccaacgtcagcaacggccacaccaagagtcgcggcgacaactaccagacgtccgcgtactggggcgcgaaagaatcccgcctaaagcgcctgaaggcgtatctcaaacacaccgagtttcaggcccagttggacgaattgaagcgggcagggcgggccgatctgtcggctgctcggtctgctcgggtcatgtctgacccacggttgcaggagtgggtgcgctacctgctccgcatggaggccacggtaatgcaccggtggctggaacgccggggcatcccgtctcggcttgttgatctgatcgcctaccagcagcggctccaagaagaggggcgctgcctgattcaggagtgctggcaagcggttacagcggaccttttcgcggcctttgagggtatccagatgcgtgtgattgatgatgaaaaagtgctggccgcactgactgagcgacacctgaagtacgaccgtaagggcaagcccaacgatagccacgctcgaaacctgtttcggacgtaccgcagcctcaaggactacgggtggcaggaaacgatggactccatgtctcgcccgacgttctaccggcatatcaaggaaatctgcgaggccggcctgtcgaaagccgccctgcagaagctccacgaagcggaccgggcgaacaacgtcgtaccgctgctgcggttcgtccaggtcgatttcagcgcccagcgccccgactggtacgtcgagccgaccgtggaggctgcgtga

SEQ ID NO: 348577 - DNA, 357 bp, Pseudomonas aeruginosa
atgagcaccaccaaccaggaacgagccatgaccattgccctcaacctgaagcgtttcagggaagcgaagaagctcacccagcgggaagtgtgggaagccgcaggtatcagcaagtccagctacacctcatacgaagccggccgctcagaccctacaggcgagatcatcgtgcgccttgcaaaagcgcttggggtgagcacggacgagttgctgcttaccgagcaagaaaggacggtatccgaagacctggcgcctatcctgcgccgctttgacgccttaccgccggatatcaggaaccaggcacgcattgcattgaaaggcgttctcttcggttacgagcaggaagcacttcgataa

SEQ ID NO: 348578 - DNA, 213 bp, Pseudomonas aeruginosa
  misc_feature (120)..(120): n is a, c, g, or t
atgcaactgagcgacatcaagcaagtgatcgaggtctccggcgaaatcgaagcgcaagaacggctcaacgatggatgggttcttctcgccgcagccggcggaactaaccaggacaaaganggctacatcatctactccctgggttccacagaagagcccaagccgatcaaggccggagcggtattcagcccccgcatggaacctcaaaagtaa

SEQ ID NO: 348579 - DNA, 261 bp, Pseudomonas aeruginosa; identical to SEQ ID NO: 324728

SEQ ID NO: 348580 - DNA, 1248 bp, Pseudomonas aeruginosa
atgccacagatccgtttgcgacatgcatccgttccacgctccctgatgggatggacattggtcgacctcgccggacggcctcgatattgggctactgtttggtctgcgcttgagggtgcggcgcttgctgagtccacgctctccgtacgactagcgtccattgatgagctctacgaagctacgcaaagaaaatttgggcgggattgcctggatgagctgatcgccaagctggacgttgaggcaatcgagtgcagtctcgaatgcttgttcgtggagttgcgcaatcgagctgctcagcgccgcacagatacccgcgcaacctggcggacagcttttggcttcgtttactcctgcttgactcgactggccaagagtctcaagtcaatacgaactctagataagctccaagctcggcttgagcgtctggagcgtttgtacaaatcactaagtccgggaaaacccaggaatccaacatttccgcgagcacttccacctactgttctgctggagctatatgccctcattgatccgctctcgaataccaatccatttcgaacggagccattgcggtggagaaactatctgctcgtgttgttgttgctccacgaggggttgcgacgaagcgagacgcttgtcttacccttagacgcgctgaaacctacccgaggcagtaaaaactcaaccggcaagcgttggctcgatattattgaaaatagttatgagcatgattgccggtctcagaggccaacactaaaaaatatctttgcagtgcgacagatcccaataacggacacgattgcaaggatttacgaacgttacgtcaatgattttcgcccccgaaaatccccccatagctatctttttctttctcaagagtgcgccccgttatccaagcgtgccgtgaatgaagtattaagggtggtatcgagtcatctttctcgtggctcggctcaggcattgcgagaagttatgcataaggctgcgattaccccccatgatcttcgacatacctgcgcctgcgttcgacttaaacaattcatcgactcaggtgatgatatggagatggcaatgcagaaactgcgctccttctttgggtggtcacgcgactctgaaatgccaagactctatgcccgagcgtactttgaacatcagctttctacgacgtggaacgattcgttcgatgtgcatgtggactcaatgcgagccctgatgcctagtggggaggcctggtatgaaaagaaagcataa

SEQ ID NO: 348581 - DNA, 1545 bp, Pseudomonas aeruginosa
atgaaaagaaagcataacgacgccgagtttgcgcatcccgatgagttaatagtcctcagcatcgacttgcctcccctaccctcatcgattcgatattgggacgattttgctgatctgtggaaaaccattccggatcccgcatctgatgattggccattccattcagatggggaaagccgatttctacactttcaatttttccctaaagagttaaggacgctgattaagcattgggctgtatacgtaatcggcaaaaatgcctgcgcaactgttagtatgtattttactgttatgacggctgatcgcggcgagttatttaataaagctttgcgccttaccacctgtgatcagttgtcgatcaggaaggagtggatgaagcatttcttcacattgaatcaatctatacattatttgatggcaattaaatcattgctaaagtacttgtgccatatctcttatgaaagcctcactccagaatgcagcgacgtcatagccggacttccccttccgaaagtggataaatatgcatctgttcgagaaggtggcgtattcctgtccttgcgcgaagacaaactaataatcgatcatctagatagtatgagttcgcgcgtgatcgataactctataaatgtgtcaactcgtgacctgagggcgacgtgcatcctctgcatatcataccaatatgcaatgcgccccattcagattgcaagggtgagcctggaagatgtcacgacatatgtactgcaggatagtgttgccatacatgttcgttttcttagagcaaaacagcgaaaaggaacgcctagatatgccatggtgcgaaaggtaaagcgagagtggtcatgtgtctttaaagagtttatagccaggcgagataaagagattggtagcataaagcagataaactcacgatcagattccctttttggacttacacccgcaggtgtaagtcagcttctgatcaagaccttggccgaccttggtattgagcaccataacgctacggatcttcgacactcggccgctcaacgaatggtggacgcaggcgcatcgcatgtcgagttggcagaatatatgggacatgcttgggcagatacttcgctagtctactatgacgtatcagccactcaagcggagcggatcaatcaggctctagcgctttcgccgatttacagcgttctgaccgaagtcgctaccaagaaaaccatagaacttggctcattaagtgcatggccacctgaaaaacaaatagctgcagttccacatggaataccaatatatggaattggcgcatgtgaattagggcagcatctgtgcacaaaaaatccggttacttcctgctatggctgcgacaactttctgcctgtaagtgacagggcaatacataaaggtgttcttgagtctttgcggccggttgttatcgatttctatgaaagctcgcgcggagaaggttactctccagcctacatgcaattgcgaagcacgttagagtccgttgcgaacatcattgaccaactagagggggacgaagatgagcaaggatag

SEQ ID NO: 348582 - DNA, 2277 bp, Pseudomonas aeruginosa
  misc_feature (1727)..(1727): n is a, c, g, or t
atgagcaaggatagctttgatcgtttcattgtctgtaatcgtgatatcgcaacgactaaaggagttaattgggatatacgcccaaatccagaaggggtagttcctcaggggcaagcatggcccatacatgagctatgtggggttattcgacagaaatactggctgaacaattttggctccgacaagaactgcctgaaaacatggaatgatcaacgactaaaaaagggtgccgggcaggtttccctcagcgtcttgtctgcgaactggcaagatttgataaaagccgcagtgatagatcaaatatttattcgagcgaataaggcagttcatatcgcgcttcacgtgattcgacctttgaaagtgctagggatgtgtgctcagggaactgagccttggcagcttacaagggaaactattgagcttgcccattcgttggctaaagagtctcaaccttcagggcaactagcgaaccaggtcatagcggtagttaagaatattctggattttcatgcgctatccgagcgctaccctcttctgcaggcgaatgacaatgctccgttgagaccccgcggtacaggctcttatttgcgtgagagattaagcgaaagaagaaaacctgaaaagcttccggagcaaaaggcattctgggagctgagcaggatactattcactgaaaaaccctcctcgtttaacgacgagctaagatttgcccagttaaaactgctcgttctttgtggctttagaatcggtgagccaccgctgatcccattcaactggaattatagcaaaaatcatcttgatagattgggattgccagcgggggagtctggcggagtatctacttctatcgcaattcgttacttcgtagaaaagcgagatataagtctaccaggaggatcattgctttacattgataggcaggaggtcccgcagatttttatagagattgtgcgtgaaatttttgaaagggttgagcgactaactgcgcagctacggaggcggcttgctgagcaggtgcgcacggggcgtgttttagctggatttaatgtggatgaactagtccgagtgacagagctttatacaagcttcaccggaaacccgtttgtctacgcagacccgaaacagagcgaactcattgctaggtatcgggaagattatgacactacagtactagaggaaattcatcagcggcaagaaatgctgagcaaattcaataatccaagtccggacttgctgagatatttcttcgaattgcgtaagggctacgaatccatactaccctttagagataaggacggaaatattctaaagcgtcaaagcaccaaaggatttttcctgattgcggatgtggaggctttattggaagttaaaataccacggaagcaagcgaatctacgagccattaagacaagcatcggagaattggcgcttaatgattttctttttattggccccaagagggcgttagctgaagctcgtaatggcagcatttgcgatattactaaatatatcttcatagatcggatcgagactgccgaactaaaggcatgtctttataacggaccttatgagaaagacactatattcaagcgctacggtcgaaacgaggtagatcgagcgctcactattaagtcacactcgcttcgtcaccttcagaatactgaactgtttagaatgggaattgctgataccgcgattaccaaaagatatggtagggcgagcattgnacaaagtcatgaatatgatcatagaaatttgttcgaagaattagattttatgacgcctaaaggcggtgagggtgaggcgctagacaacgcttcttctgtgttggcgctgattagatcaggtcacataggtggtcgtattgttgatgagttcaaatcgattcaggcagcttatggggatgagatagcatttcagtttttatctgctgaagcagatggagttcatgcgacgccttatggattttgtatcaatagctttatagtttctccgtgccctaatcacctatcttgcttcaatggatgcaagcatctagctcttgatgactcaaatgaacacaagggaaatctcataaaaattcgggataagatgattaatgctatagagcttatagaggaaaggccgtcggaaagcattggtagggccaatcaactttctcatgcaagagcgcagctagaaaatattgagaaggcacttaactgttcgcctggtgcgcgcccattccctgatggcgaagatctctctgatattgacaaagtggatatcctttcatga

SEQ ID NO: 348583 - DNA, 147 bp, Pseudomonas aeruginosa
atgctaagcaaaaagcgcctcaccgaacgggagattcggaatcttgaaagcgagattccggcaatcgctgcaggtgtgactcgcgcggcctatctgcgagcgctcgcagccgggcataccgtcatcaaggtgcagggacctcgttga

SEQ ID NO: 348584 - DNA, 666 bp, Pseudomonas aeruginosa
atgggaattccatttgatttttctagaatcaacaacgtctatgtgtcagcccttcgagaggatcgccaaaccattgttttcgaagttaggaatggcatcggaattttcgtttttatgatgtttttctcggaagaggatgagtccaaagatcagctttttttgtatctagcaagaaccaggtgcatgctgacattcttaatgtacggtaggcatgcagtcgtcaatccagaaagcaatagatttctggtttacataaaaccatcagatattgaaaagattcgcctagagctaggcttgcaaggcagaggagggggattcaatcttgaggaattcttacgtgctttaaataatgaaatccctcagcatttgaattttaccgagcttcaggagagctgtcggcggcatagagaggcttttactgatccacaactacgaaaagtggttgatcaaagtgataaaatctatctcattggcccgaggcgattagatgcagatagaaaacccagagaaaaaaccctgagaaaactatatctacatgtcgatggcgaaccagcaattctagagcaattcattcaagaattgaagcgcagaaatatgacgcttgcctggactgacgatcctgaacgtgccaatggggatgttcgttggatgttaaataacatataa

SEQ ID NO: 348585 - DNA, 1395 bp, Pseudomonas aeruginosa
atgacacgcacgtcaaccaatttggtcgcccttcgggaccggtttgccgagatcctgggcaatcggaaaaccagctttaccagcagccagatcccccccttgctggagcgccttggactcagtgattgccccgatgcaccctccaagcgggatcaactgcgtggggcggtgcacgcctcaacggacgaccaaatcgtcatggcggcgtatcgcgccctggaaatgctaccgcttcctgtgcatgaacgtgacgagttgcaagagctagtttgggatgacggtaacgcaccgatagttcctagtcggtaccgacgtgaactggcccagcaactggcgcaggtggagcttttcctggatgccgaaggatttcatgaaatgctcagtgagctttggcgggtagatgacggagatcttcttctgacgtttcaacgctcgccaacgttgcgcgatgacatccaaaaacactacgtcgagaataacgactgggatgctgtgactgttttcgacaaacttggtgccttcagatgctctgatgcacggttcgctcgtttcatggaggcattggcatcatctcggattaggcccgatgaaacgctgcagcgctcgtttatggctgtcgtcgatcaggctctactgccatgcggagtccgcttcgatacgatgccgggttccgatgggtatttggttggtacgttagtctacgtcgatggcgggataaggctggcgccgaagaacttgatttttgcgtcttcggtcaaacccgatctgcgcttgggcaacgccctggataacgacgtagaggttgtgaccagcgcggacaaagtgttgatttatgaccggccgatcggcccagcagggctactgtggcaagacctccagtcctggttcgagcaaacgcagggactggtggcaggggcaggcaagcagttgctgtatcggcgcctcctagcctgcctgcccgactcgtcgcccgtacagcgactggcgtttacctgcttctacacggccttccctaaaaccgagatccccaggctgccagcactactaccagaggtttggtttcattgggatccgcagacggtagttcagagggggaaagccgcgttgcttcgctctcgtatggattttctcctactgctccctggcggtagacgagtagtgatcgaggttgatgggcagcatcactatgcgactggcgacggtcgggctagtccaaagcggtactccgacatgatggccgcagaccgatctctccgattggcaggttatgaagtgtaccgcttcggtggctatgaactaagcgaggcaggcgccgagcatacaatgatgcgattttatcaatccctttttacaaaacataagattattgactcacctggcctagggttagtttag

SEQ ID NO: 348586 - DNA, 750 bp, Pseudomonas aeruginosa
atggactttcactgtcacctcgacctgtaccccaatgcacgggaggtgtatgtccaagcaatagaaaagaacgagttcacgtggttggttaccaccagtccgcgtgccttcgcggccaccagcaaagtgcttggaaggaacgataaggtgctgatcacgccggggttgcatccagagattgtgcaatctcgtcgcggggaactggacatgctgcttgagcagatcatgcatgtaggtgcagtgggggagattggcctggatggctccaagcgttatcactccagctatcagagccagcgcgaggtcttcgttgccgccatcgagcgctgcgccactgtcggtggccgcgtgctaagcattcactctcggcaggccgtccgagaagtgcttaccgtgctggccgagcatcccggatatggaacggcagtgctccattggtttacaggtactgtgggtgaattgaaggcggccgcagagcaaggctgctggtttagcctggggccggcggccttcacatcggcggctggtaaagcgctggccaaaaagcttcctcgggatcgcgtggtccctgaaagtgacggaccttttgcccaagtgaatggtactagcgtcatgccttggtgcattgacgaaacagcacagttgcttgcgcgagcctgggagacctccgcagatgaagtgatggtaaccttggaagcgaatgcgcgccgattgatcgacctaatccgcgccagcagcccccatctatga

SEQ ID NO: 348587 - DNA, 1266 bp, Pseudomonas aeruginosa
atgatcaaggtcatttgtaccagcgttgatcgtctgcctgcgcaactgaatgagggagagcgtgctttcacctatttcaaaggcgctaggcgtgatggtgtcggaaccattgcgaaaggttggcatggctccctaaaacgcaagggattccgcccaagccctgccacgtgggattttgtacagttttgtctggcagtctgcgcgacagacttgtgtgggatgagaaacaccagcgccgatggttggacgcggacaatcgacctcagtgtggggctgcatgagccgctgcgatggcagccatacaagtatgaactggagcagctgttgaaggttttgaccggtgactactggtcattgaccttcactgatgcgggcctgccaccgccacaggggaattttatcgccaaacagcaggactgcgtctcgctgttgtcggggggactcgatagctttattggtgggcttgacctagtcgcccagggcaagcgccccttgtttgtttcacaactggcacatgaagattccgaacgccagcgacattacgcgtcattactgggtggtgccgatgctcattatcagtggagccatggcatcagcttcaaaggtccccgtgagccctcgacacggggacgttcactcgccttctatgcctttgctgttttggccgcatcgagactggtaattccgcggccggcgatctacatcccagagaacgggttcatttgtatcaacccaccgcttgtgccgggacgcgtatccagcttgagtactcgcaccacgcaccccttgttcatcagtaagctgcagcaggtactggatggcgtcggcgtgtctgtccagttcgagttaccttatcggttcaagaccaaaggggagatgatgaacgagtgccgagatcaggcacgtcttcgacaactggcgtcggacacgacaagttgtgggcgctttcgtacctacaatcgccagcactgcggccgttgtgttccctgcatgattcgtcgagctgcattcaaggcttggagaggcggcactgatagtacgcgttacgtcttcccgcagttaataggcagcgacaagtccagtggacccgatgacccgatggcggtggcgttggcggtattgacggcgaaggagaagggcatcgaccgattccttagggcttcgctggcatttgctgcaccctcggaacgttcccggtatcgctcggtgctcaccaatggaatccatgagttagaggcactgttggtaggagatggagtgctttga

SEQ ID NO: 348588 - DNA, 636 bp, Pseudomonas aeruginosa
atgccggcacgcgccaaactcggcaagtatctctcgggtggtggcagagagtccttgcgtggcgctgccagcagcatgatcaataaaggcatgggcggagcagggcgcgccaatcgaacaatgcgcagtgttgcccagggcgccggacgactgggcgagttcctggaggccgtccgcgagggctccaacccacagattattgaatggatgcaacgggttcgaagccagaatctgtccgccacagacctggccctggagatcatcaaggaggtgatgccggacacggggagcatcgataacgaatcgctccgtgacgcggcctcagatgcgctggcccatctctacgaacgagaccccgacgtagacatttttcagctaactgactcgcagatcatgtcggtaatcggcttcacgattggccatgagatctgcaaccggttggatttgcaactcgggcaaacctacgaaaagctgaagtactcgccggtgcagatacaagagctgcgtaatgacatcaaggaatgggttcacggagaggtagagaggatcatggaagaccttggcggacagcagctcaattgccagtccctggcgcacaccgtccttcagactgcactggaggtgttcgcagaatga

SEQ ID NO: 348589 - DNA, 1956 bp, Pseudomonas aeruginosa
atgtggcatgataatgaaactacaacggactacctgaacttcggggtagttgcagatgcttgcgcaagcctgttgaaacagagcgggggagagccgatttcaatcggtgtttccggcggctggggagctggtaagtcctccctagtaaaaatgattgccgcccgtcttgctgaccctggcgattctgatatccccgcaaacagctcagatcttcagcccgtggcaactgcagatagcggtctcgatccctcgaaacagcaccgctacgtagtcatcacattcaatccatggctctaccaagacttcgaaagcgctcgaagtgccttgctacaaatcgtcggcgatgaggtactgagacttgccaaagagaatgagcctctcaggcagaaggctttagatctcttgcggcggatcaatctattgaagctcgctcagattggcggtgaggctgcaatcactattacaaccggtgttcctgtaggggcgatcggaaaggcgattggcaaggcaatgggttggtgggagttactcagcaacggtgatgaccaagacacgaaatcggataagggcgacagttcgaaggataccgacggagacagcccgttcgacttcaaggctgatggtctgctgcatccagctaagtcgatgtcgttgcccaatgagatccaagcatttcggaatgcactagagaagctactgggcgagcttggcataaccttggtggtttttgtcgacgacttggacagatgcttgccggaaactgctatttcgacacttgagtctatccgcctcttgttattcctcaagcgtacggcattcgtgatcgcggcggacaatgaattcattcgtggcgccgtgaaaaagcatttcgaaggcacggggatcaccagtgacatcgccactaactacttcgacaagctgatccaggtaccgctgcatgtaccccggctcggtgtcaacgaggcaaaggcatatttggtcctacttctgcttgagcgagaagcacatgccggcgggtactcgcaagagcagtttgagcatgccaaacaggtgattccgaagcgtctaagcaggagttggttgggagagacgatcacctccgcgtttctgcaggaactggtcgatggcgacgcgagacttcaagccctgatgacacttgcggaaggactggcgccattaatgttccattcgacagctatcagcgccaacccccgactgatgaaacgcttcctgaatacggtatttctacgcgatgcgctggccgcacctcaaggcattgcactggatatcccagcgctggccaagtggcatttgcttgaacgttgcaacgaggacttggccaatgccctgtcctcactggtcagttcggagaacgatggagaagtcagtgttttactggaggcagaagcctgcgcacatgctggtcaggcgctgcctccgccgttcacggacgatgccttcgttaaagaatggttgcaattggcaccggcattaggggctaaagacctgcggccgctgctgcacctgagccgggacacggctacccgcgatttcggtgatgacaacatgacgcctgaatcacgtgagctacgtgacatgttgaaaatagccgccagcggcaatgcactgctgactaaagccattgaggccctagctgctaaccaagttgaattggcgatggtgaaagcttggcagggaacggcgtcctcgcgtacctggaaaggtaaagccgaggttgtcatgttgatagagccctgcaaggtgcatccaaccattggcaagcgcgccgctacgctgctagagcaagcgccagtcaagcaaattgggccggggatcatcccgccgctgaccagtcagccgtgggccactgaagtattgaaatcctggtgggaaaattctgagctcagcaagtctgccagaaatgcaattggttcagctttagggaagggagtctga

SEQ ID NO: 348590 - DNA, 2223 bp, Pseudomonas aeruginosa
atgttcgatctcatggattttgaagtcgagttgcgtcagtcaggtaagccggttcatgtggtggttttcttcactggccctgatctcctcacagacacgcaagcggctcacgctctacagcaccaattgtcgggttacgtcatgcctgacctagtggtgtttctgatgcctggttacaccttggatgaattccgagcacaccaggcaaatgctacatcgcccctgatggcggagctaagccgtaaaggcccaggctcgcctcgcacctacgcgagtgcgttctatgacgtgaatggtgccattaccgagtacgtcaatatctctggccctgaggagcagttcgaggaactcatcaagcacaactctaacgctatcgcgaggactggcctgacccacctcgtcgaacgctccaacgtgctgaagaaggcgcctgcaggcttcttctactcaaagccctcttctcgggcttcgaactatttcattcgggcggaagacctgctctctgagaccttgcatgcccactacctggcgtttgcatgcctatctctcatcagtaaggcaacggaagatgggatggggacgcccgataccctgtatctggacacaatcgcattgctgcctctggcgctgtccatgcaggtgtacctcatgcgatttgagcagccgggctttgcgaatatccggtcattccattcgcacgaaggcctaatcaagggtgggcctttgcccaaggcagtttccgccctgtgtctcatttccgcatcgacccagtgcggcctcgcgcagcaatgggtgaaggtaaacagtgctccgccgacgcgcgtggccaccattctttcatttgagcgctcatcggactcctgctccgtcttgcacacactgaagcagcccgaagactttgaaatgttgggggagggtgaagcgagcgggattcgtctaattcggatccatggcgagcggttcgttgctgagcacagtgaaaccaagctgctgaacatcggcactgatcatgcgccgcccctgctgcaatccaagttctactcgttcatgggggccaacctgttcagctgcttcacccatgaccggccaggactgaggcctcggacagtgcatgtcgataaagataacctggtggctgccagcgatttcggtgaatggttcgacagggtactgcttgaggaagctgtcgcgtcgacccgttggatcatccacgatgacgacgctgccagtgcggccctggccgatcgagcgatcgcttacttagggatgtgtggcgtcaaggtcggtaacaaggtctccttcgatgacttcgatgccaacacgaattttgacgggtctgtcatcgtcattgccgctgctgccgaacgtggctcacgcctgcagagtgtgagccgacgcctgcgtaccgctcagcaatcgggtaccaggctttacattacgggggcactcttcgggcgcagctatcaactgatgaaggatctgcagagcaacctgacgcaacctgccaaggatcacagccggtatgttttcaagacgtacatggagatcccggcagcggagcttgcctgcacgagtcattgggccgaagagcagcggctgctcatctccttgcattcatttgcggaaactttctcgccagcgattacgcagcgcatggaagtatttgatcgcgcctctactggggggcttggtctgaacccattttggccgagcagtcacaccgggcagccgatgacacttagccgaggctttgcgtttgtcgacggtacgaaggatgtgaggggcgcgacgtcaacggatatttacctaaccatcttgtggattctgcagaatgcccggtacagcggtaaggtgcagaacgccaagcggcttgagtccggtgagcttcagcaggtgctcctatcgccggatgtgttctcgcgcttcgacgatggcgttatccaggccgcattcttgcgcgcagcggtgccggcggagcttgactacagggctcatgaaacccacagcctggccatatcggacatcattcagcgcatcgccgcagggtacggacatgaacgtggtgaagccgccatggagtttgtcatggccttggctatcgggaagatacgactgcacaaggatgtcgataaccggctgcggagtaacttgatcaatatcttgacgccgcacgttcaggagatccgttatctgctggatccgaattacgaatcaccgttgtga

SEQ ID NO: 348591 - DNA, 1161 bp, Pseudomonas aeruginosa
atgcaaatcagccgtaagctcaacctttatgagatcgaggatctctaccagtcgcttggtacggattccaatctcaggcttcctatcagcatgagccacggcggggggttgggcgtggatgcttcgctggcccagttcatcgtcacctgggcacgtgcttgcgaaaaaaccgtccttcacctatatgcccccgctggcgacgacgccatgacgcaaatcacgcagttggcgcagagtgcttctgggttcttcgcgctgatcatgtgcagtgaagtccacgctcagaatcatcaactgatcgatcggcgggaagcgcttctggcgatcaggccccttgtcgatgcgatgttcgcaggcgaccttcgtaacacctccaacatccgaggcgcccgtccaacggccatcaatctgttctgcgtgaacaacgcaaagcgtgagttcatcaagccgttttacttcgatcacgccgtgccgaaagtccagccgagatcttggttctcgactctcttggagacgtcatcgaagctgatgaatgctcgcagtggacaaggggcactgcttaggtcaggtctcccggcattgggcagcgtgctttgggagttgatctccaacgctgaccagcacgctgtcactgatgtaggcgggaacaagtacaagaaggcgctgcgtggcacctccatcaaactcaaccgaatgagtcgtcaggatgcgctgatgtattcagaccaagagccggagttggcgcgctttatcctgaagcatttcctgagagctgaggtactggacttcctggaagtctcggtcatcgacagcggtcctggactggcacggcggtggctgacggcgaaggaggggcggccagtagaaagcctggaggagctgagtcttgaggctgagcttgaggccacgctcgattgcttcaaaaagcacattacatccaagccgcagtctccgaactcgggtatggggctgcataacgctgttcaagcactcaacaagctcaaggcgttcgtacgcgttcggacgggtcggctttcactgcatcaggcttttcagggaagtgatgagattatggagttcgatccgtcgattcgatacggtggccgtgtgttggccgctgtggaaggcactgtcttcaccatctgcattccggtgagctga

SEQ ID NO: 348592 - DNA, 297 bp, Pseudomonas aeruginosa
atggaactgaatacggccttcgggcttgccctcaagcagctacgcaagcaacgggagatgactcaggaggacttttcagcggtcagtagccgcacctacttaagtacgttggaaagaggacagaaaggcccgacgatccaaaagctcgagcagttggcgggcgtattggaggttcatcccgccaccttgctgattgcggcctacctttttaaagagccgcattgggatagccaagcgcttatcgctcgcctggaaggcgagttgcaagcctttggatttactaaccgaagcgagtga

SEQ ID NO: 348593 - DNA, 447 bp, Pseudomonas aeruginosa
atgttcatcacctatcgtcatcttgagatgcgcctggatccgcggttagagcactccccagctcagttgtggacagctgtcgaacaggacattcaatggccgtggttctacctgcaagtcgctcggcgggataggcgtgaggtgatcgccagcacactgctgctccagcacgcgcatgatttggcaagtattatcgaaagccagtcgaaacacgcgtgggtcgaacaggtgcaaatcgtcaccccagcccatctcaacggacactccagatggctgatggagccattgaaggaagtgtgcgtagtaaaagacaaggctggcgtaacaggcctactgttcaaagtggaaaacgacgtccgctattcgctgcatccgacgcgcgacctagataacctgctcgtgatcaaggtactgttctccgcagagacggatctggagcgacgctga

SEQ ID NO: 348594 - DNA, 192 bp, Pseudomonas aeruginosa
atggttgagcccaaaatctggcgagtggcctgtcaagatcctggagacggcagcggtgacgccatcatcgagctgccttccgcgttgctcgatgggctgggatgggtcgtgggggatgagttgatccttgagcatatcgagggtgtgctctccttgaagcgcaagctctcgcccagtgagtcaaccgactag

SEQ ID NO: 348595 - DNA, 282 bp, Pseudomonas aeruginosa
atgagtcgcgatacccaacggcaggtcgatccgcaatcgacctaccacgcctgctatcagatcgtcctgcgcgccgtggatgcacgttatgacgttcgcggctatgtgctggcggagatggtaaaggcttgccttgcacaccgtgccaccctgtctgcggcgcagcgggtgtatttcgcgcagtacgcgccgacggaagcggcggcctacctggaaaggcttacggcgatgttgctgtttggtcccaaggggcgcttttcgccgcaagagtaccgctactga

SEQ ID NO: 348596 - DNA, 402 bp, Pseudomonas aeruginosa
atgaatctgggagaactccagccagcggcgctatcagccgccgagttgatcgactgcctgcgtcccgcgaacggcgcaccctactcggttgagcgctacgccgagatctttggtctcagccctgccgtgtttgccgatcaggtctcagcctatcgtcgccgccaaccagatgcggtcagcgcatccgatgccgaagtgacgcaacgttttatcgcggacgtcctgcgggtggtcttggcggtggccgagaacgggattgccgtcgagcgggcgatcacttggtttcgcctcggtccattaccaaccttcgaacagcagaccgcggagcaactggtcagtcagggccaggtcgagcaggtactgcagtttctggcctcctggcaggccgggagtcagggatga

SEQ ID NO: 348597 - DNA, 1512 bp, Pseudomonas aeruginosa; identical to SEQ ID NO: 153900

SEQ ID NO: 348598 - DNA, 567 bp, Pseudomonas aeruginosa; identical to SEQ ID NO: 153901

SEQ ID NO: 348599 - DNA, 759 bp, Pseudomonas aeruginosa; identical to SEQ ID NO: 153902

SEQ ID NO: 348600 - DNA, 369 bp, Pseudomonas aeruginosa
atgaccgagctttccggccgggagcgtgtcgcgcaggttatcgacgggatgaagcgcgaaaacgcggcgctgcaagacccgaatatcagggccgagcggttcgttgaacgctggcaggagctacagggccagcgccgggagcttcgcggctggcagcacgacgatgcccgcgccaaggtcgaaagccagatgaacggcatgaccaagagccttgagcgtgacccgcaggtagattccatcctgcgcaatcgccgtcaggaactcggaatcgggcagcagcagcgccgggggcagagcatcgcccacgagctgcaagaggaaatgtcacgcagccggcaacttagccggggcatcggtttgggaaggtag

SEQ ID NO: 348601 - DNA, 267 bp, Pseudomonas aeruginosa
atgacagggaaaatcatcatgcacaaaaccaaaatgctgctgctctgcagcctgcttacctgcaccagcgcccaggccggcacctatgaatggacgcccggctggggtatgggcgtcagtgaacatctggtggacgacggtaacggcaacgagttgatcatctcctgcccggactacgaggaagatggctatgtccgcgcctacgccagcatcggtggccggcagtacagctccgaagagggcagcggcttcgacggagaagggtga

SEQ ID NO: 348602 - DNA, 1224 bp, Pseudomonas aeruginosa
atgtaccggcttgagctgaactacatcagccgcgacggcggcagcaaaggaaagaagcgggacgccgccaagcaggggcacggtttttcggcgactgccgccatcgcctaccgcagtggttccatcgtgacggactaccgcaccggcgaagttcacgattacacccgcaagtgccggatcggtcatacggaaatcgtcctgccacccggtgcgccgtcatgggccagccaccgcgaggcgctgtggaatgcggtggaggtagcagaggtacggaaggatgcgcggcttgctcacgagttcatcgttgccctgccgcatcacctcaccccggagcaggaaatcgccctagtgcgcgaccttgcccaaagcgttgccgaccggcacgggctgcctgtggactttgccattcacggcgacgatccgaaaacgtgggatggctccgcgaaaggcgtcgtaggaagtcacgcgcacctgctgatgccgacgcgggaactgacgtcagatggcttctccaagatcaaagggagagagttcatcgaccgcaagctagggccgaaaacgctccgctactggcgcgaacaatgggcgctgattggcaacaagcacatggagctggctggtctggatgaacggtgggaccaccgcacgctatcagtgcagcgggaggatgcgctggaacgcggcgacacggccgccgccgaagagcttgatcgccagcccggtgtgcacatcggcgccgctgctactgcgttggagcgccaggggatcgacacttattggggaaacctgaaccgcgccatccttgcccggaacgccgagcacaggctcgggcgtgagcgcaagcgtgttgaggaatcgctggccgacctggagcgccgcttggctgagttgcgcgctgcacaggaggctgatgcggcccagccggaatgcagcaatgatgacccacgctgggctgtgttcgagcgtgcattcatgcaagccgcccagtttgactacggcctcagcttgaccgaactggctgcccctctggctggactcaaggcgcagttcgtggcgtacatggataccgccgaagatcaggggatgacgccggacatgttcgcccaagcctgcgcgaacggtatggccgcgcaagatcggcggaacatgcaagaacaggccgcgaaagatgctgacccgaaatcgcagcaggaagacgatcctgatgctgcgccgccgctctga

SEQ ID NO: 348603 - DNA, 396 bp, Pseudomonas aeruginosa
atgggaatctggaagttcgacgagaaccggactgacttcgcgttggcctcgctagccgatatggaagccgactccgaggggtgctacatcatccaacgcggcaacatgctgatggtgcgcgagggcgggcatgaatggcccatgcccgaacggctggatattgccggggtgatgttcgaccgggagcagttcgagggctctcatcccttatctctgcgggaagagatggaacgggacgggcgatgggctcgtgagcagttgcaggctcgcgaccggggcgaagtcagcctgccgctggaactaccgatctgggtgacgaagcgcctgctggatgagcctgccgatccaacagcgccgagcctgatcgagcggctgaaacgatggatacggcgatga

SEQ ID NO: 348604 - DNA, 1053 bp, Pseudomonas aeruginosa
atgatcgacctacagcgagcagcagccagagcacgcccggcccttgccgtgctggctgccgagtttggggagccgtcgccgaatacggcgcgggcggtggcgattatcgagcagatgctggacgacatcgaggcagggcggcatccactcgaccgccccgacgactggccccagcgtgaccactggccgggtcgacctcattgggacaggtggctgtgggcgatcaaagcgattgccgcagcctgcggagcgacggctcactgtagccccaagtaccactatatgcgggtcgatgtccggcaagcacggtctgacgcactgaccgtggcactagacgacatcggatgcctgatcgagctggcgagcgacagggaatgcaacgccatcacggtttccgacctcatcgagcagctacgcaagctgccacctgacctgcccgtgatgctgccctgcgaggctggtggcgttgaccatgcccgcgctatgcgcgtggcagatgtagcccggcaccgccgcgactggacgggaacacctgtggggcagtaccgcgaaattcccaacgaggacaccgtggggccgccgatccgggcggcgatcattgacgtagagggtgcagagaacagggcgcacgaaactgcgatgaaacacaaacagatccctgccgacggggagcctaccggcaccatcgacgatttcttccacgtcctcgacggcaaagtgaaagcggaagaaccggtgacgatagaaggtatgaatgaagtggcggcggccggttgggctggcgagttgggctcagaaatagaatcagtcaggctgaccggcgactcgctgcaatctcaggcgggcgttgacgggatcataactcgtggcgaccgcaaggcgtttgtcgagctactgcacgccatcatcgcgcagccggatggccccgtcgcggatcgtgtgcgcacactctatgagcgcgtccagcatcgtacagacgatccagagtttgcagcgtggccccagtatcaggcggcttactggctggctgcggcaatgcgtgaattccggtga

SEQ ID NO: 348605 - DNA, 2775 bp, Pseudomonas aeruginosa
atgaacgcagtagaaattgaatcagccgtctcggacttggcgctccagcccttcgatgggacggagttcccgtttgcattcctacaagccttcggaaacaaggagacgacgatcaagcgcctgcgttcgggcgcatcgaacaagtccgacttgggcggcgtgcttcaaacgaacaacattcacatcgcggttgcacagccgggagaggtgacgaagacgctggctgcactgaaggccagctcggcaacgaccagggcgaaagcacgcttcattctagctaccgatggcgaggggttcgaagccgaggacatggagaccggggagacggtcgcatgtacctaccagcaatttccggatcacttcggctttttcctgccgctcgccggaatcacgacagtcaagcaggtccgcgatagctctttcgacatccgggcaacaagtcgcttgaaccgactgtacgtcgagttgctgaaagacaatccggactggggagccgctgcacagcgccatgagatgaaccacttcatggcgcggttgatcttctgcttcttcgcggaggacaccgacatcttcaatggtgaaggtctgttcactgcgaccatcgagcagatgagcgcgcgggactcctcgaacacgcacgaggtgatcagcgaaatcttccgcgccatgaacacgaagatcgcggaccgggcgaacgcgaagctgccccgctgggccgatgggtttccctatgtgaacggcggactgttctcgggcagcgtggatgtgccgagattcagcaagatcgcgcgctcctaccttctccatatcggcagtctggactggacaaagatcaatccagatatcttcggctcgatgatccaagcggttgcggatgacgaagagcgtggggagctcggcatgcactacaccagcgtgccgaacatcttgaaggtactcaatccgctgttccttgacgacctacggatgaagcttgaagaggccggtgacaaccctcgcacgttactcaacctccgcaaacgtctcgcgcggatcagagttttcgacccggcatgcgggtcaggtaattttttggtcatcgcctacaagcagatgcgggagatcgaaaacacgatcaacgaacggcgtggcgaacgtgggcgcaagagtgacattccgctgaccaacttcaggggcattgagctacgggatttctcggctgagattgcacgtctcgcgctcatcattgctgagtaccagtgtgatgtgctgtatcgggggcagaaggaagccttgctggaatttttgcctctcagcaatcagaactggatcacctgcggcaacgctctgcagttggattggcttagtgtctgtccccccaccggcactggtgtaaaactgcatgccgatgacttgtttgaaaccccgctgaatcaggctcaaattgattttgagaatgagggcggtgaaacctatatctgcggcaacccgccgtatcttggctcacgtgatcagaaggacgagcataaggctgaattacaggctattttcgagaaacgagttcagaactggaaatctctcgattatgttgccgcctggttcatgaaggcggctgactacggcattaacacccagtctaccgccgctttcgtgtccaccaactctatctgccaaggcttgcaagtcccgattctgtggccagaaatctttgccagcggttgccagattgagtttgctcacacatcctttcgatgggccaaccttgccagtaacaacgcaggtgtgaccgtagtcatcattggcatcacaaggcagccgcgcaacccgaggcgcttgttctctctggatgattcggggcaaaccatcgagcgccaatgctcgcatatcaacgcttatctggcagcaggcgagagcgccattgtagacaaggctagccaacctctaggcgtgcagagcgtaatgacctttggaaacacgccaatagatggcggtcatctgctgctctcacgagacgagcgtgacgctttgcaactcacgcctgcgcagaataacctcttcgttcgtagaatttatggttcggccgaacttatccgcggcctagagcgttactgcctgtggatcgaagacaaaaatttggctgaagcactggctatccgtcctatagctcaacgcattcataatgtgcgcagtttgcggctcaatggcggaaaaacggcaagagacatcgctgaaaaatcacaccaattccaaagaatgttttttggcaagcattcaacgattattgtacccagcgtttcctccgaatcccgcaaatatctgccctgtagttatgagcctgccggaactatcgtttccaacctcgcttttgctctctacgatgccccgctctggaatctggcgctgattgcctcccgcttgcaccttgtctggattgcaactgtttgcggcaagctgaagactgattttcgttattccaataccttgggttggaatacatttcccattcctaccctcaccgaaaaaaacaaaggcgacctaactcgttgcgctgaagaaattcttcttgcccgagaggcgcattttccagccactattgccgaactctacgatccggaaaaaatgccggacaacctgcgtgcggctcacgagcgcaacgatgaggttctggagcgcatctacattggccgtcgcttcaagaatgacaccgagaggctagaaaagctgtttgagctttacacaaagatgatcgccgtttctggcaaaactccgaaggcgaagaaggcggcaacggcatga

SEQ ID NO: 348606 - DNA, 783 bp, Pseudomonas aeruginosa
atgagtgattatgtgttgttccaaatgtgggggccgtttcggcagtctctgatcgatggccacctcttctacgttgaacaggcgcgcaagcgcctgctctcccagtttgacgacattgaatcggaggctgacaaggcagccgaagagtggctggaaagaagccgccacaactttgatcctgaccgacatgaccccgcgtccttctatgaggctgccaatgacgtgggaattgagttctatagtctcctgagcgacatgcgggatcaaactcgtctaagcgttgtggccgggatgttccatgaatgggataagcagttgcgcgactggctcgtgcgggaaatagggcactggcatcgtggagacaatacgaccttgaaggtctggtctgcggatttcggccagatcgtcgacttgttggactgcctcggctggaaaattcgcggcgctcgctatttccccacgcttgatgcgtgccgtctggtggtgaatgtctacaagcatggcgaggggaagtctctcgtcgatttgaaacaagattaccccgaatatcttgatgacccattccaaggtgctggtggcgtcatatctggcgttgaatatcgtgatcacacacacctgaaggtgagtgatgcgcaatttcaggcattctcggacgctattgtggcgttctggcaggacgttccagaaaacgtatttgcttcccaaaccaccgacgtgcccggctggcttgagaaagccattttgaatgacaacgccaaacgaaaacaggcgagccagaaatga

SEQ ID NO: 348607 - DNA, 2064 bp, Pseudomonas aeruginosa
atgactgaaattttcaagaatgccgttccatccgtctcggtttcttatgcccgcaacggaagttcatcaaaagcaaacgcgctcggtatgcgcccgatgcaggagcgcgcatatgagcgacgcggtgagcagtatttgctcatcaagtcgccgccagcctctggcaagagccgggcgttgatgttcattgctctcgataagctccacaaccaagggttgaggcaggcgatcatcgttgtgccggaaaagtccattggttccagtttttgcgatgaacctctgagtaagttcggcttctggaccgattggtgcgtggagccgaaatggaacctgtgcaatgcgcccggctcggacaacggcggcaaggtcaagtcacttggcgcattccttgagagcaatgaccaagtattggtctgcacccatgccacattccgcttcgcggtcgatcagtttggggtggaggcgttcgacgggcggctaattgcggtggatgagttccatcatgtttcggccaacccggacaacaagcttggcttgcatcttgggcaatttatcgctcgcgaccgggtgcacatcatcgcgatgaccggttcgtactttcggggtgacgccgaggccgtgctggcaccacaggacgagtcgaagttcgataccgtcacctatacctactatgagcaactcaatggctacgagtacctgaagcagctcgacatcggctacttcttctactcgggctcctacgccgatgacatcctcaaggtgctcgacccagccgagaaaaccatcatccacatcccgaacgtcaactctcgcgaaagcacgaaggacaagatcagggaggtcgagcacatcatcgaggaactgggtgaatggcaagggaccgatccagcgactggcttccaattggtcatgacccctaatgggcggcttcttcggatcgctgacctggtggatgacgactcagccaagcgcgacgtggtggccgctgcgttgaaagacccggcacagaagaacaaccgcgatcacgtagacatcatcgtcgccctcggcatggcgaaagaaggcttcgactggatttggtgcgaacacgcgctgacagttggctatcggtccagcctcactgaaatcgtgcagatcatcggtcgcgcgacccgcgatgcgccgggtaagactcgcgcccgctttaccaatctgatcgccgagcccgacgcttcggagcaggccgtaaccgaagcggtgaacgatacgcttaaggccatcgccgctagcttactcatggagcaggtgcttgcgcctcgcttcgagttcaagccgaaacatccgaccaacgagcccgcaccggggttcgactatggcgacgggggatatgacccggacaagtgtaatgtgggcttcaatcacgacaccgggcagttccagatcgagatcaagggactgtccgagcccaagagcgacgaagctgcccgcatctgtcgggaagacctgaacgaagttattgcaaccttcgttcaagacaagaccaccattgagcgcggcctgtttgatgaagagctggtcccggaggagctgactcaggttcggatgggcaagatcatcaaggagaggtatccggaccttgatgaagaggatcaggaagcagtgcgtcaacatgctatcgccgccctcaacctgacgcagcaggccaagcaacttgcacttggtggccaaggcaatggcgagcctgccgtcaacacagccctcattgatggggtgcgcaagtttgcgatggacgtgcgggagttggacatcgaccttatcgaccgcattaatccgttcagcgaagcctacgcgattctcgccaaaacgatgagcgaggagagcctgaaacaggtcgcagcagcgattgcggccaaacgcaccggattgacgcccgacgaggcaaaggaactcgctgtccgggcagtcaagttcaaaaaagagcgtggccgtttgccgtcgatcagttcaactgacgcctgggagaagcgaatggctgaaggggccgccgccttcgttcgattcaaagacgaggggcgctatgattga

SEQ ID NO: 348608 - DNA, 1170 bp, Pseudomonas aeruginosa
atgattgatctgaacgagctgcgagaagaactggccgagtacgcagtacccaaaagggaaggcgggcgctcggtgcgcgaggagcgcatcatcgcgggattcgaggaaattcagcggtttgttgaggggcacgggcgcactccgcagcacggcgaagacaaggacatattcgaacggttgtacgctgttcgcttggatcgtctgcgtgcgatggatgagtgccgagccctccttgctccactcgatcatcaagggctcctaagcggggctgaaatcgctcaggcagattcagtggaatcgatggatgatgaagagctgctcgccgaactcgaaggcgcggcaggcccatccgatatcaccgaactgcgccatgttcgctccagggccgagatacgggcggcagaggaaatcgcaaaccgcgagagatgcgaggatttcgaccgcttccagcctctgtttcagcaggcggagagcgaactcaagtcgggcatcaggcagacgcgccccttcggcagagatgcaagcgtcacgacaggtaacttcttcattctcggcggacagcttgtctacgtcgctgaaatgggggatgtgttccgaacaccgaatggtgagccggacgcgcggctcagggtcatctactcgaatggcactgaaagcaatctcctgctcaggtctctgcaacgcgccttatacaaagatcaggccgggcgcagattaacagacccgaacgctgggccactgttcagcgagacctgggaagaggatgacattgcgagcggcaccatctacgtgctgcgcagcttgtccagtcatcccttcgttgcggaacaccgggagctgattcataagattggagtcacgggcggcaaggtcgaaagccgcatagccaacgcggcgcacgatgctacctacctgctggcggaggtggaggttgtcgccagctacaagctggcgggtgtcaaccgcacaaagctggaaggcatcttccaccgcatcttcgcgccggcgcagctcgacctcaccattcaagaccgtttcggccaccccgtcaggccgagggaatggttccttgtaccgctccatgtgatcgacgaagcggtgcggcgcattctggatggctcaatcagcgatgtggtctatgacccgaagactgcccggttggtaggttag

SEQ ID NO: 348609 - DNA, 447 bp, Pseudomonas aeruginosa
atggcactcccatccttcgataactcgtggcgagacagccagagcgtgaaaccgcgcattctggtgttggaggtcaaggacaaggagcgcccggaggccgaggcactgggctgggtgttggtcgagcgggaggaaacctatcggcgcgatcctcgtgacgggacgatctacgaggcgtcgatccgcctctcgtatcagcgcatcaccgccaagttttcgcaccgggacggcggaaaagggcggtttgatggcagctactcgtgcaacttcaactctgtctcgctgacatcgccctcgatgtcgaagggggcggtgtttcttgatctgccggggctggatggccagcggatcggcacctacctgatgaatgagattgtccagtgggtgcaacagtgtaagcggccggccatcccaccttggctaggcatcggtgtgggatgccgctag

SEQ ID NO: 348610 - DNA, 288 bp, Pseudomonas aeruginosa
atgcaggccggtgcattggccacagtcgaaacgtggaagcagaacatcgtcgagcaccggatgctcgattatctggcggctgtcctctatgccgaggagcgtgccacatcggagttacaggcgcgcgaacgagcgtgtacccagttgatcgctgaacagaagaaggcagaggcccggcccttgcgctgggcgttgagacaactgtactaccgctatgccaacacggtgttcgccgggctcgtcctgaccatcgcggtcggcatagtgtgggtcaagatgaaggcgtaa

SEQ ID NO: 348611 - DNA, 2490 bp, Pseudomonas aeruginosa
atgccagaccagaagcggcaccttctgatcgaaggttttctgtccaacgaagattttagatcgcgcagaactggtagaaacccagccattcctcttcaagatcggattccacacggccagcagttgtcagccagatacgccgatctaatgcagcagtacgatgggaaacggcagaatgccgagccaccaatcacagaagatgtggggatatttgtagagatcgtcggggtccccggcatcaagttgcctctagacagcctagatacgcgggacttcaggttgcacgcttgccgcaaggttggcgatcgcgaggttgctctggtatttattcctgagactcgtcgagaaacgtttcaaaggaaggtcacgcaatatcttgacccggataaagatgggaaaggtggtcctcgcaatcataatttgatcgacagtatcgccgaaatgcgcttggcggacctgcgtgcattttggactgatgaccccagcctattcccccaggactccaatcaacagatttggtgggagctttggctcaaacgacgtaacggcgaagacccgcaaatcattgcggcacagctatcagagaggatcggcgggcgactcggaaatacctcgctaagtttcttcgatagcatggtatttctgatcagagcttcctctcaacagttggaacgtgcccccgagttaatctcttcgcttgaggaactgcggcgcgccaaggaaactccgaacgtcttggtggagtcttcgccaaaagaacagcgtgaatgggcggacgatttggccgcacggttgaaaatttcggacgaggcatccgtttctgtagccattctcgataccggcgtaaactacaatcatccattgctatcttctgtctgcaatcagccgcaatcggaaacatggcagccgcagtggccgcgttacgatgaggtcaatgaccatggctccagacaagccggtttggcgacattcggggatttgcatgacgcgctggtgagtcggtctgaaatacctctacagcatcgcattgaatcagggcgtattttaccgccacgaggtgcgaatgacccggaactgtacggcgcaattactgtaggtaccgcatacaaactggaagcaacgagacccgaatggcggcgcgtctattccttggcagtaacggccgactcggaaaaggaaggcggaatccctacctcatggtcagcggaaattgatcaattctcgtcgggcgcagaggacgggcgacaacgacttttcgtgatctcagccggtaacaatcgctccctcctgccaaacgtggaccactgggagcagctacatcttgcggagatagaagacccggcgcaggcatggaatgccctgacggttggggcatacaccgagaagacaaccaatgatgacccgagctttgatgggtggtcgccctttgcccgagctggagatgcagctcctgcctctaggtcgtctgtcaattggagttggaagaagcaggcaccctataaacctgatgttgtagcggagggcggcaatcgtttgttgtctcccgatgggacgactgtatccgatgctgactcagtttctcttctgacaacatccggaaagacggccggtcaactctttgaggtatccgccgatacaagcgccgcctgtgcattggtttcacgccaagcggctattctcatggatgaatacccggactattggccggagacagttcgtggcctcctggcacactcggcagagtggactgagcgcatgtgggaacgtttcggagttctcagtggccaccacagccccaaggtcgccaaagagacgatgcttaggagcgttggatacggcgttaccaaccttgagcgtgcgcgctatagcgccggtcatgaattgacgctggtcgcacaagatcatcttcagccattcaccaagaacgcagatgcctctggctctaccgatcccaagcttaacgagatgcagctgtatgagctgccgtggccggcggatattttgcgccagctcgccccagagctagaggtgaagctgagggtaacgctctcgtacttcattgagcccaatcctggccggagaggctataggcaacgatatagttaccagtctcatggcctgcgtttcgaggtcatccggccgggccagtcgcttgagaatttccgagcgtttatcaatgcgcttgcagatgcagaagactacatcggtccggaaggtgatgcagatggttggcaatttggccctcagcttcggacgcgaggctcgctgcactccgatgtctggactggttctgccgccgccttggcggacatgcaaacaatcgccgtttaccctgtgggaggctggtggaaataccgcgcagcacaagatcgctggcagaacagtgttcgctatagcctgatcgtcagcatcgaggtgccagatgagacggtcgatatctattccgtggttgagaatatcgttcaggctcaagttgaaatcgctgtctga

SEQ ID NO: 348612 - DNA, 984 bp, Pseudomonas aeruginosa
atggccacagccgagcaaattaaagcacttttaagaagccatgctgatcgggacgatcagcgcttctacgctacggctttgcaggtcgcagctcaagaggctcgccaaggccatcgtaaactggccagcgatatcaaggagatggttgaaaaatcccaagttaatagcaacttggggctcgcgccggtaaaaccaacgccacttgttcagcaacccaaaggcgatttaaggggattgcttgagcttacgcactcgacagtaagaattggcgaactggtcctcggtgccgaggttctggagcgcctccatcgcgtactgcttgaacaacgacaaaaagatcgcctttcccaatttggattgctcccgagacgcaagctcctgttcaccggaccgccaggaacgggaaagacaatgtctgcctctgtgcttgcgacagagctgaagctaccgctctatacgattgttcttgatagtttgattactaggttcatgggggaaaccgcagcaaagctgcgacttgtctttgatcacatcaagcaaactcgggcggtctatctcttcgacgagttcgatgccatcggtacccagcgcggagcgcaaaacgatgtaggagaaattcggcgcgttttgaactcgtttcttcttttcgtggagcaggacgactccgaaagcattatcgtcgccgcgaccaaccatcccgagcttctagacaaggcgctttatcgcagatttgacgacatcattcggtttgagaagccgtgcgatgaccaaattcagaagattatcgagaaccgactggccatgttcgagacccgatctcttgcttggaatgaggttactgcggcagctcacggcctgagcgctgcggaagtgacacgagcctgcgaagatgcggcgaaagaggcggttcttcatcatgacaagaaactctctaccacgcttgtattgaaggcgattgagcaacgtcaagctggcaaagaataa

SEQ ID NO: 348613 - DNA, 678 bp, Pseudomonas aeruginosa
atggaacggcatcaggctggagacatgaggcagggctttccacggcatcgtattggccttatcatcttgaaaattagcggatatggaaaagcggtcttcatgcaaatacgggtgcagacctacaaaggcaaagatgggcggattaggcagggcaagaccgtctccctgctgcggtatgcctatgatcctgagaaacggcgctcaaagcaggtcgtcattggtacgctggatcgttgggcaacagagttaccgccagaactcgacagcctgctcactgatgcggagcatcacgagttcagggagtggattgctgagcgggatcagcagcgtcaggaactcgcgcagcgccatcatttgctgcatgccgcagagcacatgggatgggccgcaaaggcgcttctggccggggcggacccagtgcggcccgagcggatttgggaggctctggacgtgctggcaaaggcgcttgagaaagcaggttacccaaggccaagcagagggcgtgggcgtccatcgaaagacgaaaccccaaccccggatgatctggttgtaagtctttacgatgatccgatgctggcggcagagatagaagatgcgcaagagcgggtggcggcgttgccaaacttcatcccgctccccccggcagcacgaaaggggaaagggtcagatggcccgtaa

SEQ ID NO: 348614 - DNA, 729 bp, Pseudomonas aeruginosa
atggcaagaactaagggtcagcaagccgtcgaccagagagagcggcgacagctccgcttcagcctgctgaaggaaatcttgcgctgcgagtcagtgcgcgccctgtccagcgatcacaaaaagctgcttttccggcttctgtcgaacggctggagcatcaccgatacgccgcccgatacttcgcgcatccgagcgcttgaaaaggtagcgtccgacgctcgtcggctacgcggcgcactcaacagtcttgaggcaaaggacgccgccagcctggacagcaactaccggcaaaccattccgctctctacgcgactgctcgcactggaagagttggagcatgatgccgccgcgctggctaaggttatcaagggcgaacaggcagacatctcccgattgcggcaaaagcgcacagcggcgcagttggtgaaaacgctttgcatgtttggaatcccatgcagcacccgcaacgatcatgatgtagacgctcgcaacgtgacaaccgcgatgcgctgcgtgatgttctccatgctggaagcaggttcgaagaacctgagctggagcactaccgcgtccatcatcaagctgggtatccgggtccagacagacccaagcgagaacagagtgctgccacttgaaggactccaggcagttacgcaggcgggtgaggatgcacttcgcctgttcatgcttgaggaaccgctatggaacggcatcaggctggagacatga

SEQ ID NO: 348615 - DNA, 2232 bp, Pseudomonas aeruginosa
atggatgcacaacaatttttggcggagtttgggcatattgcgaacgcgccagcgggtgttggtaagctacgtgagctggtcattcaattagctatctcaggcaggttagtcgagcgcattgaatctgaagctgccgctccgcaggcaattgaagctgccgcagcgctacgccgtgcgtatgaaggagagcttgacctgcgtgtcacaagaatgcatccgccattggactcaaggccatttccggttcccgatcactggcagtgggtgcgcctggaacagctctgcctatatattcaaaggggcaaaggtcctaagtatgttgagaacagctcgacgcacgttatttcacaaaagtgcatccaatggacaggttttgatatttcacccgcccgttttgtggcagatgattcattagctacgtacggtaaagagcgctttctgtgcgagggtgacctgctttggaattcgactggaactggcacggctggacgtgtggcaatttatcatgcagacgcgggtgttaaagccgttgcggactctcatgtaacagttcttcggctcgccaattgcgccccgcgctatctttggtgtgtgattgcatcaccgtgggtccaatcgcgcattgagccttcccaccctgattcgttggtttctggcaccacgcagcaagtagaattgaataccagcacggtacgagcactacctattccgctgccaccacttggggaacaatcccgcattgtcgccaaagtcgatgaattgatggccttatgtgacaagctggaagcgcaacagcaagcctgccgaaaactgcaaaacaacctgcgccattctgccttgcaagctgtcaccagcgccgtcagtccgcatgaactgcaaattacctgggcgcgccttgctgataactttggacggctgtttcaggcgtcggaggatgtagcgactttcaagggcttagttcttgatttggctgtgcgtggcgagttgctcaatattgagcatcgccatgcttctacaggcgctaaattgcttgaatcaatttcagccaagcgcattgaatggtcaaaagagtcaagcggtcaagagcaaaaagaagccttggcaatgttgaaaaagttacgtgcccagcagatcgctgtacccgagtctgccttgccggaacattgggagtgggcttcgttactgcaggtatcgcaagcagtagttgattgtcacaacaagaccgcgccatatgtcagcgatggcattcacctcattcgcacaaccgacattcgcaatggccgaatggatctgaccaaaaccaggaagatttctgaggaaacctatgcctactgggcaaggcggatgccgcccaagggtggcgacattttctttacccgtgaagcacctatgggcgaagctgcgatcgttccagaaggggaaaaggtatgcctcgggcagcggtcaatgctgatccggctcttttcggatttgttcagcaaccgttttcttctgtacgtaattcagagtccgagctttcaatcgcgaatgaacgaagctgcgattggcatgacggtcaagcatctgcgagttggaggcgttgaggacctcgttgttccagtgcctcccaaggcagagcaagatcaaatagttgccatcgtcgatgcgcttttcggcatgtgcgaccgttacgcggatcagctttcccgaaagcagcgcatagcgagcaatcttgctactagcgcggttgccagcctgaccggcatcgccgtcgcaacagaagaggaccccatgaaagcgccgcaaaccgacctgatcgctccactgcgtttgggctcagcgcccgacatcaaagcgcaagcgccactagctactatcttggcccgtcacaacggtgagatgagagccaaggatttatggcagtactggggcttggacaaacccgtagatgagttctactcgcaactaaaaattgaagtggcccatggctgggttgttgagcccgttgtgttacgcctacgctctgacttggatattgacagaatacccgctgaagcgaagcccaaggccaaactggtaaagcttattaaaagctcaggcggagcagtttatgaaaaagacctgtgtgaacgttttggctgtgggttagatacttttagagagcagctaaaaattgaaatcggttacaactggattttcaggtcgtccgccgcagagataagagttattgccgaagaaaaggaaaaggcctga

SEQ ID NO: 348616 - DNA, 1875 bp, Pseudomonas aeruginosa
atgcatccgaccttttcgcgggtcctgctggccgccgcgctggccagcgccggcagccctgccgtcgccaccgaaatccagctcgagcaaggctggaacgccgagcaacgcgcctcctggtacgacgcctcgctcggttcgcggctgctgccgctggcctgggcccaggcgctggagcgtccggacagcgaggagcgcctgttctccgaaggcaacacccggcgcctcggctttcccctgcgcaactggcaaggcggcgaactgcgcctgccgcgcggcttcgccctcgaccagcaggacgacagccagttctccgacacccgcctgcgctggaaagcccgccagtcgtccagcgaaccctgggtcgggctgaattgcgccggctgccactccaccgacatcagttaccgcggcagcgaactgaccgtcgacgccggcgccaccctggccaacgtccaggcgatcttcgacgaagtgctcgccgcgctgcgccgcaccagcgacgacggcgacaagttcgcgcgcttcgccggcaacgtcctcggcagcgaggacagcccggccaaccgcgacctgctgaaggccgccctggccaagcgcgcggcgctgatcgataccctgctgagcatgtccgccaccgacctgcaacccggcccggggcgcctcgacgccaccggccagtcgctcaaccgcgcggcgatcaactccgacgcccgtcacctgcaagcgaacccgaccgacgcgccgaccagcttcccggcactgtggcacacgttgcagatggacaagctgcaatccagcggattcgtgcccaacgtcaaggtcctcgatctcaacggccaggtcttcgacctcggctacctggccggcgacatcggcgtggtccagggcgactacggcgacgtggtcagccatccgctgtccggcctggagggctatatatcgagcatccgcgtggacaacctgacccgtgtcgagggcctgatccacaagctcaaggcgccggcctggccgagccagctgttcggcgccccggacagcgccaggctggcccagggcaagcgcctctacgaggagaactgcgcggcctgccatgcgagcatcggccgcgacgacctgcaaaccccgatcaaggtccgccaggtgcgcctgaaggcccatggcgacgacgcgccgatcggcaccgacccgtggatggcctgcaacaccttcaccttcagcagccccagcggcaactacttcggcctgttccgaccgtccctcggcacccccagcggcgtcggcatcgtcgggcggacttcgaagatcgccgacatgcaggtccccgaggtgttccagatcatgctcggcaagaaaggccagctggccgacggcatcgccgagatcatccacgccatcgtcaccgggcagcagaccctgcccggctccgacagcctgcaagcggtgcccgccggacaactgctgctggccggcggcgaccctgccgacagccaggcgcagagcctcgccgccggcgaagtccccgccgacaagagtgcgcgcaaggactactgcctgaacaccgagcatccgttcctcggctacatcgctcgcccgctgaacggcatctgggccactgcgccctacctgcacaacggttcggtgccgtcgctgtacgacctgctgctgccccaggagcaacggccgaccaccttctacacgggcagccacgagttcgatccgagccgggtcggctacctcaccgggcccggcccggacaacgccttcctcttcgacacccacctggaaggcaactccaacgccggccacgacttcgcccgcgagtacgacgaaagccagcgcctggcgctgctcgaatacctcaagaccctgtga

SEQ ID NO: 348617 - DNA, 591 bp, Pseudomonas aeruginosa
atggccgacctgaccagcctgagcatcgagcatctgcgctcgccacggctgtatacccaccgtctgatcctgcggccctggctggtgcaggaccgagccaggttcgccgagctgaatgccgacccgcgggtgatggagttctttccgtcctgcctggatcgcgcccagagcgacgcgttgctgcgccgcatcgacgcgcacttcgccgagcacggttttggctggtgggcgctgcaggtcaagggcggcgatcctttcatcggctacgtggggctggaggtcgtggacttcgatgcgcccttcgtacccgcggtggccatcggctggcgtctcgccgccgagcattgggcggagggcttcgcccacgaggcggccgaggcggcgctgagctacgccttcgatacccttggcctggaccaggtggtggctttcaccgtaccggccaacgagaactccctgggactgatggagcgcctggggatgcatcgcgatcccaccgacgacttcgagcatcccgacctgccccccggccaccgcttgcggcatcatgtgctgtaccggttgacgcgcgaggactggcttcgcagatga

SEQ ID NO: 348618 - DNA, 357 bp, Pseudomonas aeruginosa
atggctgccaagcaggtcgatctttccggcagcgagcgccgccacggcatccgcatgggtatcgaagctcacgaccttgatgcgcatgccgagcaactgtccgaccagggtggcgacgtccgccgttatgccttcgtagttctcgtcgtcgagccggacgttgaagggcgaggtctcgtccagcgccgcgccgagcctcaggtgacccttgtggcgcagccaggcccagtcgtcctcggcgatcgccatgtcctcgtgctcgatgcgcaactggctgaacagcgtcagggacggatgcgcttcgacggcgaacaggcgtccgcccgacagcagcaggcagaagaacagcaggaatag

SEQ ID NO: 348619 - DNA, 1431 bp, Pseudomonas aeruginosa
atggatacgctggcattacaaattcaggagctagggggggtatgggttgctacctgcttaggcaggcatagtgagatatgctttgacgcaccaaaatcggcagaaatgagcgctctctgtatgttgatggaattcttcatgccataccttcggtttctatatggtgcagcatataatctgcaccaaactttagatggactaggcatttcctctacagcattcgttgagcgcgctgccgatgggagcatagtcggaggattctccccagaccaagctgtacttccagtcttcgcaaccgttactttgattgcgtgctgtatactccctgtgattttaattgcgggttatatccttggcagaagaaaaggtctcacattagtagctacggtactgctaattcccggcctactaagcatattaggagccctgccaaatttcagcctcacccctagcaagtacaacataggtggaaccggatcattaggcagtgccttcggcttcataccaattactgtgcttggcgtaatgataggctggagtattacgataataatatatgacaccctcaagctaaatgatcgctttcgccacctctatgaccacttttggtttcttgcggcagttttaacaggcatcttctttgtggctgactctggctcgcatgaagatgcgcaagacttggcggagtccagctacatcactcgcaacgcaagcctgtatctattaagccaagctcatgaatatgaagcatactgcgctcaagcggggctgaaaaacttagtctcttgccgctgggcatcacgtgtacaacagcagctaagcgactactcagactaccaccataagctctacaaagaattcggaccacataccagtcgagatatatatgctccaagctggacaagcatcacagacaaggaaatcctccagattcggaaggaaatacaagattataacaattatagatgccctgttactaagctaagcaaggatgtgtccaagagcactccgccgtcgggagtttgccagcgaattcctgccaactattgcattgcatttccagatccatctgaagggcttgtggataagtacatcatatcaaaaactgtagctcttgcttccgaatgtatagtgcccacattggtagcatttcgatcacagcaagaggaattgatttccgtcgttgggcgcaatgagattgccaaacactacaggtggttgttctttataattttttcaatcatgataggtggtaaaattgcaaactccacaactcgaatcgtggatatggataatagagcaagcagcgaaaggcaaaggctgcttggtatagcgcaccggctgagcaacctagtttatttatgcaccttgtgtatgtggaagctacttgcctggatttactactctatacgccgcaatagtcaacaataa

SEQ ID NO: 348620 - DNA, 1332 bp, Pseudomonas aeruginosa
atggctgagataattttttcgattgattggttatctgctgagagtagctctccgctcttccgtgatacatcggggcagttggcaatccacttggatagtacctgcctaacacgtaatgaagatgtctggtctagtactgtgcgtgattcggtacttgtctctgcctatccgttggctttgtggttggcctcatcctggtggcgattaaactttgagcccctaccgcagtttaacgtcaggccatcgttggactggcgtatggctcatgagttaggcgctgccaatcatggttatgtatggccccgaatcatatttgcggcggatggggagtcggtaaatgtttgggccgaacagataccggcggcaggacaatccgtccagtacctctatggcctagatgtcccacatgcagtaccacttgcgagctttcagcggcgggtcgatggctttgtcgagagggttattaccaggttgcaggcattagggcatcgtgaaaccgaccttgccgagctgtgggcactgattcgggaagatcgaggtaaccctgaggcctggcgctatcgagtccttgaggcgcaaatgggctacgacccagatgagtgttcggagcaaataattgccgaggcattgaagctgcaggatagaacgggggtcgctgccatgtcggagctggctccggtattcgggcgtcgaaacggggataaatctggattcaatgagattgtcgaacttgcggcgcagagtggaatccaggggcggccttcaataagctctgaagactttgagagtagtccgcattcgtttaagccgtggcagcgaggagtcgattcggcaaggcaacttcgcgaagcgcttggtaacagggaaaagcccatcaagaactccgaaatatacgacctcctaggtattaccgagaggcaagtggatggctggagttcatccgaaaaaaatagggtcgcaattgccgagccggtgagtggagatggatttaggtatgtgccccgtaaaaggcacccagtggccaagcgcttcgagtttgctcgactggtaggagaaatactggatcgtcctcagggcgatagtggttggttggtttcaacagatatcgcgacggccacgcagaagcgccagcgatccttcgcggccgagttcttatgcccgattgactctttggtcgactatctaggtggtgagttctcggagtcttcttttgaggacgcggcagagtatttcaatgtgagcgaaaagactattgagtctttgcttgccaataacggttatttgggtgtgttgtccagtgagccgaaggtgccgtaccaggcagcggcctag

SEQ ID NO: 348621 - DNA, 267 bp, Pseudomonas aeruginosa
atggtactggccggtttccggattttccaactgcgcctccattggaatacccgcatcagtaacagaccaaatattctttggccagccaccattttcgcggtcactgacaagtcccttctctatacctgcctgaagcaattcaagagcctctgtacgagtaaaaatccgcgcgacatcacacaaagattttccttggcgtgggtctgccggcggctccagtccaaaatctccaggattcatcttatgctcggggttgccaccgtatga

SEQ ID NO: 348622 - DNA, 123 bp, Pseudomonas aeruginosa
atgacgctcgctctggtcgcgcctggtggcccggagttttatgtcgaattgatcaacggatgggaagagggcagttgctccgatttcgtccgggagattgtgctgccagacgaggaggagtag

SEQ ID NO: 348623 - DNA, 627 bp, Pseudomonas aeruginosa
atgcggctactcgccccgttcactgtatcgctggtttgcagtgaggttcttgatgcgctggagatccgggatgacacgttacatttgctgcaggtcgtgctcgaacgaacgctagagagcgatgacctgcgccgctcgcggtataacgatgggcgcatcggtgggttcgacctgccggatctgatcaagtcactactcttcgtgattgtggaacacgcctctggggctgctcgctttgccaacggcaattgggacgacgtttcccgtgtcatgccattgatcgaccgcatggtgcgtgccgctggctggaacccctacgtcatgcgccagttcattacgttatgtgagcgttctggtgctacctacccggtcgacacattcgctgaccaagtgctggagcagatcgttgatggccgcttgcccacgggctggaagggtagctcgataccagccgcgattgctgctcttgtacaggcgcatgctgatcgcttgcatccgctgcctatccctctggcccgtaagctgcttcaagtgcttgatgcgctggtcgaccttggcgatcgccgcagcgcagctttgcagcaaagcgagtcatttcgcggtgtgtgtctcgctgaggcagtttga

SEQ ID NO: 348624 - DNA, 1266 bp, Pseudomonas aeruginosa
gtgagccgtgaaccgcagacctacctcgcccaacgcttcgatcccgacgcgctcggccagccggccctggccctgcagctggaggcccggcacaacgacaccgaagtgccggtgcaccggcatcgcaagggccagctggtggtggcctgccgcggcggcatcacctgcacggtgcccgatggcctgtggatggtgccggccgggttcggtgtgtggattcccggcggcatcgcccatagcaaccgggtcaccgccaacggcaaggtctgcttcctcttcgtcgagccgggggcggcacgcctgccgagcgactgctgcaccctggccctgtcgccgctggtcctcgaactgatcctgcacctgagcgcgcaaccgcaggactatccgcacgacggcccgctcgcacgtctcgccggggtgctgctggaactcctggaacaggcgccgaccgaacagctctacctgccgctgccggacaaccgcggcctgcgccgcatcgccgacgaactgacccgcgcccccggcgaccgcgccagcatggccgaatgggccaggcgagtggcgatgagcgagcggtccctggcgcggatggtgcgccgggagaccggcatgaccttcggccagtggcgccagcaattgcagatcatcatcgccctgcagcaactgtccgccggcgtttcggtgcaacgcaccgccgagatcctcggctacgagtcggtcagctcgttcatcggcatgttccgcaaggcgctcggcagcccccggcccgctacgtgcgcgacagcatgcggcggccagccgactgaacgaaggtcgacggaaaggtcttgcagttcgtcagctgttctcccccgaggctggcactcgaaggcacttctgggaataatgccgcccttttttctccaggaggatcagatggttacgcacttcttgagcgaatccggccaggcagcctgcgggcgcggcgacagcaacgtgaacggctcgagcgacgtcggccaggtcagttgcaagacctgccggcgcaccaacgccttcgcccaggcccaggaaaacgccgctccggccagtgcccctgtcacccccaccgccgctgcgccagtgatcgacaaggccgcgccgcggccgaaagccgaggccaggctcgccgccgcgcagcgccaggaccgcgatgccgcccgcaaggcctggcaggcgcgtctcaacgaattgtccgggaagaaccgcatgccgcgctcgcggcgccgcgcgcaagcctatctctga

SEQ ID NO: 348625 - DNA, 837 bp, Pseudomonas aeruginosa
atggcgctctctgatctgaccgtccggcaggcgaagaccaccggaaaacgctacaccctctccgacaacgactgcctgggcctgatggtctcagccgcaggcggcaagtcatggcaattccgctactactggctgggcaagcaaaagcgcctgtgcctaggcggctatcctgccctcagcctgcgtgaagcccggaccgagcgagacaaggcccaggccctgcttgccagggggatcgatccccaggtcgagcgcgaccagaaacggcacgcggccaagctggcaggcgaatacaccttcaagaccgtcttcgatgcttgggtcgagcatcgccgtaaggaactcaaggaaggccgtcagagcacgctttcccagatcctacgcatctttaacaaagacgtgctgcccactctggggaagatgtcgatctatgacattcgccgccctcagcttctgggcgtcctggcggcgatcgagaagcgcaaggcgttcactactgcggaaaaggtccgcacctggttcaaccagatgttccgttatgccctggtcatcgccgaggggctggaggtcaacccggccgcagacctggacgtggtagccgaacccaagcccccggtagcccacaatccctacttgcacctgcccgagatgcccgagttcctccagaagctccggctctacaaccccccgtggctggcagacccagcttggcgtccggctgctgttcctgaccggggtgcgcaccggcgaactgcggttggccgaacccgaacagttcgacctcgaccgcggcttgtggatcatcccaccgcagatcgtcaagcagctccaggatga

SEQ ID NO: 348626 - DNA, 831 bp, Pseudomonas aeruginosa
atgacgaaaacaaatcaagctcctagaaagaataggaaaagcatcttcagtcaagagctgcctggccagacatacgactacggctacccttccgatgaacactatctgaaaattcacgagcacattgaaaaagccgtagaagacatctgcgcaatattaaaccatcaggaaaacacacccccaataaaaagcataagaaaaagcgacacttcatcaccaacagaaggatgcgatacgcatcaacacaaaaacatcaggcctgcacacaccaacaaactgatctttaaaaagcttaaaaatctagccagccagatcaacgacaacaagataaataccgaggaaatccttcagctaaacaccgagattcgtttagagacatgcaaatccacaagaacaaataactcacttactctttggcagttctatatcgccctagcaattgcccagaataacaaaaacaaagaagaccacgcatggaaagccatagccaaagccaacttctatcaagggctacacgagggattggttgacatgaatagacatggattagggcaacgtgcagccgctggcggtcgtgcaaaggccgccaaaaatcctgcacaaaccccagccagaataagggccgaaggtgtgatcgctggattcatgctaagtcgcatgcccacattgggatggaagagttatttagaagcagcgcagcaaaacatcaacgcagtaagaaccctctcaaacagtttgaaacttaatacccctaaagacgaaggagctcttgaagagctccttataaccttagccgaaaaatacaaaatgacatctaaacgcaagcattag

SEQ ID NO: 348627 - DNA, 1491 bp, Pseudomonas aeruginosa
atgaaaatgttcaaccagactaattattcgctccctaaggctggacaaagctttcctgagcttcttatggggttgccattgattcagtcagttatgaatgatgtagagagatcaacccaagcccctaggtcgttgatatttacagcagttgccgcatcgatttcgctctgtgttcaggggctagtagatgtcaagaagcccagcggaggattatctccttgctccttaatgacgttgactattgcgctatcagggcttaggaaaagtactgtagaaaaaataatatctaaatctatccgcgatgtgcaggcctctcaagatgtcgaatatgaggcgcgcctgattcggtggagagtgaaacataatctgtggagtatccgtaaaaggggagtggaaaagaagttagagagactcgcctccgaaggagatgtagattctgatcttgaggggaggtatggtgaaattttattagaggagccgaaacgtccgcgtcgttttaaaatgttgtatgaagactctagctctgaggctttgtttaggggtatgtatattgactacccttctgcaggcataattagcagtgagggtggtggggctttgaagggggcggcgcttaaagatttttcaaagcaaaacgcattgtggagcggtgatggtgtttttgtcgataggatatcaagagatggttttacacttaacaatgcacggctaactgtttctttgatggtgcagccgggggtgtttgaagactatatgaaggcgcgcggcgaattgtctttgtcatcaggtttctttgctaggtttctggtttgtagcccaaatagtaatcaaggcagccgtcgcattgagatagatgaaagttttgcgtcaagccatgcgttagaggagtttcataagcgattgagttattttgttgatcttaatgtttctagattagttgcagaagattcgtcgagagctgccctgaggtttgaagagagcgcaaagatggagtgggttttgttctcgagatttgtcgaggcaaatagtgcagcgggaggttattgggagagtatgagggatcatgcgtcaaagttggctgataacgttgcacgcttagctgcaatattttattgcctggaggaggggcgctgtgatggagagatatccagagtttatttggatgccgcaattcaggtagggctttggtattccggagagtacgcgaagatattcagtcgcagtggacgacttgaaagagatgcaaaaattctggctgggtggatgtttgaaaaagcttatgcgaatgggacaaccttcaccaaaggccagcttcagcgatgtgggccaaacaagttgcgccagaaggccgatttggatgaggttctgtcgtaccttgaggcatcaggcttagtgcgaattgagtatcatggtcgctctgagctaatagtgctatcgccgcatggcagaattcgtgatattgggattttagatatgtctgggcgtgaatag

SEQ ID NO: 348628 - DNA, 660 bp, Pseudomonas aeruginosa
atgaaaagacataagataaacaccaacttatcactccactacaacgatacttaccaaggcctaccagtcatggtaggcaaaggtcccttcgtagttaatcatctctttcaactacaacacctcatggtaagtgctctcacccgtcaccacagaatttacgctatacgatttgatctacgcctacccaaagataagtcagcacgcgccatcgatgcgttgacgaataacgtaattcagcggttctacgcctcttacaaaaataaaatacagattgatcgtaaacgagccaaatccgctaacagtagagctcatgacagcaacgttctatatgcctgggcaagagaaattgcaagccaagaacagcaacactatcacggaatagttttcctcaaccatgacgcttacaatagccttggaaccttcgaactaggtagaagaaacaactacaaccgtcttgtggaatcttgggccagcgcactcaagatacccgttgaaaaagctgctggtttggtgcacatacctaaaaacgcaacctatcggatagacattgatgacagggaaagccagaagagcttctttaggagagccagttatatttgcaaagcagcgaccaagcagtacggtaatgggcagcatgggtttggttgcagtcgatgttga

SEQ ID NO: 348629 - DNA, 675 bp, Pseudomonas aeruginosa
atgacccagcccaagccggtcttattcgcgtttcccggtcaggccagagttggccgtccggtgccgaaatccaagatttatgagcacggccagatcggcagcgcgatgcgtgacaagtttgtcgctcagatcgagcaaataacctgggcctacaaactggcgccggagacccttaacctgtcggcgcggccggaggtgccggagattcaggttttcgacatcgagctcaaaggaacggagctggacgacgacgtcttgcgtgcgattgatcgagccattccgctgccgatcatttttcagctgcatcgaggccagcagacgtgcatggttgctgctttcaagcgacccagccaggccgaggcgggcaagtgggtactcgataattatctcgctggtccctggctggcggatacagttgaacgacagtctttgcccgtggcgctggatctacaagggctttacgaacagctgctgcgcagcctgctacctcaagccgcccgagtcggcgagagcttgctcgagcagttggagcgtctaactcggctgcgtggccggcagagcgagtacaacaagctggaagctcgcttgaagaaggaaaagcagttcaaccgcaaggtggcacttaatgcccagttgcgggagctgaaaaatgaaattgatcaactgagtgtataa

SEQ ID NO: 348630 - DNA, 378 bp, Pseudomonas aeruginosa
atgagccgcctgcagacccgcttcgcccagctcaagcaggaaaaccgcgccgccctggtgaccttcgtcaccgccggcgacccggactacgcgtcttccctggaaatcctcaaaggcctgccggcggccggagccgacgtgatcgaactgggcatgccgttcaccgatccgatggcggacggcccggccatccagttggccaacatccgcgccctcgacggcggccagaccctggccaggacgttgcagatggtccgcgaattccgcagcggcgacagcgagacgcccctggtgctgatgggctacttcaacccgatccaccactacggcgtcgaacgcttcatcgccgaggcgaaggaggtggggtggacggcctga

SEQ ID NO: 348631 - DNA, 303 bp, Pseudomonas aeruginosa
atgatcatcaagttgtcaccgtacgctccactgccggggagcactgaacgcctgtcgctgagcagggctggcgatgtgctcaccgtgaacggtcaggcgttcgacttcgcgcctctcccggagggcggcgagttgccgaccgaggccattggatcggagttgttcgctggtcctgtggcgcgacgggatggccggctggaactaatcctgcggttcccgctggccgctgatgccagtgccgccgctcgcttcccggagccgttgctgatagagaccgatggcccggtggagttaccgcgatga

SEQ ID NO: 348632 - DNA, 810 bp, Pseudomonas aeruginosa
atggcgtggtactcaaccggaaccgtggcggtgaccgcaaatagcccgaccgttaccggtaccggcacacagttctcgtccaatgcccgagtcggcgacgcatttcgcggacccgatggacgttggtacgaggtcacaaacgtcgccagttcgacggtcatctcgatcaagcccaactaccagggcagcacggccagcggccaggcctatgcggtggcgccgatcctgggctacgacaaggacctgtcggatcgattcaacctgatcgccaaccagtggggggcaaccctggcggggatcaagccctgggcgctttctgcaaatgcggcggcagcgcggggggatctcggcctcggcagtgcggcggtacgggaggcgctcggtagttcgggcgcgctgtactctcgagacagcattctgggcgccgtttcgcagtcgagcggcgtaccgaccggtgcggtgattgatcgcgggagtaacgcgaacggggagtatgtgcggttcgcggatgggacgcagatttgttggacgaacactctcacattcaccgctggggtctcatcagtcggtgcgaactggtcgtatccggcgagctttagttcctcgtaccccatcgctggggctgtctccgcttctggtgctggtggagactatgactctggcgtgtcggcgagaaaccagggagcgacctacttcaatccatccgcgggtacggctggggtggggttcttctgcatatcgtcggcatcattcacgtcaggcgctcagactaggaataacagggtcgtcgccatcgggaggtggttctga

SEQ ID NO: 348633 - DNA, 336 bp, Pseudomonas aeruginosa
atgactgagctcgatatcaagaagtctttgcgctcgaggagagggctggtcccggacactccgtcaaggctgtgcgggacgtttagctacggcttgcactaccacggcccgcagcaggttctggacgattttcttgggcgggtagagcgcgagcaagatcacgccaagcgattaatgcaggcacagcgcacgatcggcgcgctgatggcgttgtcggcggcgaaggtcagtccggcttgcgcctggtacacacaccgcgacgtgttccgacgcctcgctgagcttaccggcgaaacggaaaacgcactggtgcagatggcgggagtagagcaatga

SEQ ID NO: 348634 - DNA, 408 bp, Pseudomonas aeruginosa
atgaagcgaatcgacgatgacaaagtgctggccgcactgatcgagaagtacacgaaagtagggaagggcaggtggaccaaggcccgcgccgacaaggcaacgggagcgatcatccctgctgtgttcgtgccgggcaagcccagcgatgcctacgcccggaacctgttccgtacatatcgcagcctcaaggactacgggtgggaagagaccatggcgtcgatgaatcgcgccagtttctacaaccacgtgcgtgacctacaggcggccggcatttccaaggcgatgctccagaacctgagtgagtacgacaacacccgcaacgtggtgccgatcctgcggttgctggaggtggatttctcggcgcagtaccccgactggtacgtcgagccgaccgtggaggccgcgtga

SEQ ID NO: 348635 - DNA, 303 bp, Pseudomonas aeruginosa
gtgcctgacatgagagaagagtttgaagcgtgggctaccaagcaccggatgccgattcatcgcgacggtgttgtaaccgactatgcagccagatgcacagatgaatgctggcaagcctggcaagccagccgcgcggctctgagggtggtgttgcctccgacgatcaccgtcgaggaagctgccgatcacttcaacatcgatgaggaaggcatcgacatggctgtggaagttgcgcacatggtcaacggcgccattgccgcctgctccgccttcatcaagcaagccggaatcgaggtgaagtga

SEQ ID NO: 348636 - DNA, 234 bp, Pseudomonas aeruginosa
atgaaagacaacggtggacaagcgtttccctcggaatcgatgtacacgtccgaagcgggaatgaccctgcgcgactacttcgcggcaaaggccatgcaggcctttcttcatccgaagtatgtggagatgaacgcgacaaagccgcacagccgacctctctttgacgtaacagaggctgcctatcgatacgccgacgccatgctaaaagccaggaaggcgggaggtggggagtga

SEQ ID NO: 348637 - DNA, 1716 bp, Pseudomonas aeruginosa
atgaccgcgttgctcacggataacctgccactgctggcgggcgcgcccaatggcatcaaaaagctgcgcgagctgattctggaactggcggtgcgcggcaagttggtgccgcaagacccaaatgatgagccggctagtgggttgctgaagcggattgctgaggaaaaggcgcggttggtggcggaagggaagattaagaagcagaagccgccggctgagtctaccgaagtggaaaagccgtttggcttacctgaggggtggagttggacttccctaaacgaaatcgcagctatgcgaggtggcagtacaccatcaatgtcaaagccagagttttgggatggtgacattccttgggtatctcctaaggacatgcatgatggtgacatcacagatagcgagctaaagatcacacaattagcactagataagacaagtctggagttggtgccaattggctctattttgttggtgggacgaagcggcatcttaaagcggaagctgcctgctcaaataaccgcagtgccctgcactattaaccaagacctgaaagcgatttcaccattccaacctcagccatcaaattatgtgcagcttatgctgcgtggcactgagcgcgttatcttgagggaggatgtgaagcaggggactacggttcagagccttgtttacgagaagctcttcgtcagaccatttggcttgcctcccctcgccgaacaacaccgcatcgtcgccaaagttgatgaactgatggccctgtgcgaccggctggaagcccggcaggccgatgccgaaagcgcccacgctcaactggtgcaggcgctgctggacagcctcgcccaggcccgcgatgccagggactttgcgcaaagctggcagcgcctggccgaacacttccacaccctgttcaccaccgagtccagcatcgacgccctcaagcaaaccctgctgcaactggcggtgatgggcaaactggtaccgcaagatcccggcgatgagccggccaatgagttgctaacgcgtattgctgaggaaagggcacgtttggtagtcgagggtaagctcaagaagcagaagccgctcgctgaaatcaatgagtccgaaatgtcatttgagcttcctttgggctggaagtggcagcgctttgccgactttgcattggatgtttctactggcccatttggatcgttgatccatcaatcagactatgtaaatggaggggttcccttggtgaacccatctcacatgatcgatgggcgcatagtcgctgacagttctgtttctctctcgattgagatggctgcgagccttgattcgtatcgattatcggcgggagatatcgttatggcccgacgcggtgaagttgggcgcgcagcactggtcaccgaagcggaagatggttggctctgtggcaccggaagctttgtgctccgattcacgtcggaaatttcaagagcctatgtctggactttgttcaggtgtcattcggttcgaacttatctggccggcgcggccgtgggcacgaccatggtgaatctaaatcacggcattcttctaaaaatgccaattgcggttccgcccacagccgaacaacaccgaatcgtcgccaaagtcgatcaactaatgaccctctgcgaccaactcaaagcccgccttaaccaggcccgtcaggtgcatgagcaactggccaatgctctggtcgagcaggccgtggcctaa

SEQ ID NO: 348638 - DNA, 1416 bp, Pseudomonas aeruginosa
atgagccgggtgatttgcatcagcgcggggcagctacaagttaaaaaggccgataccccaatcaaccgtcgccaccaatacttgaactacggcctgctctcgctggccacggtgctgcagcgccacgggtttgatcctgtagtgctccacggtcacttcgagcgtccggaatcactgttactgaaagcagaaaatctggggctggataagtccttacctgtccttatttccctgcccagcttctatgccgtggagtgggcggatctgttcatgtgccaggcaaaagcgctgtacccttcgctgcgctttattgtcggtggtcgctgggtagtgggggataacccggagcgcctcaaggctctgctgcccttggcagatcgggtgatcgccggtctggcggagtggcaaattgtcgagttgctgggggggacgcgaaatgccaccgggttattgctgggcagcccggcatcacagagttcgatactggattaccggctgctacatcagcgtgagctctaccagcccagcattgaagtttcacgcggctgcggcatgggctgcagcttctgtcaggagcgcagtgagcgcctgcaaccgctaaagcctgccagtcaggttgtcgaggagctgggggcgacattgctgcgagacaacctgattgaaatgacaccgtattttgaggcctcgatgtttgtgccgaccaagggctgggtcgccgattttgccgaagccttgtcagaggccgagctggagctgcgctggcgcagtgaaggccgcgtcgacaacattcgcccggaactgatggccgaccttgccgcaaccggcctcacagtacttgatctggggctggagagcgccagcctacagcagttacagaggatgcagaaaagcaagaaaccacaaggttacctggacagagcctcccgcctgctggaggcctgtgccgtcaatggcatcaaggtcaaagtgaacctgctgatgtttgccggcgaaactgacgatagcctggctgaaacgctcaattggctggatgcacgcaaggatcagttccacggcgtatcggtcgggccggttatcgtctatggctggccgcaagagagcgaaagttatttgaatgagctttcagcctttggtgcatccctcagccactcgccttgtttcggcgtaaaccacctgaatctcagcccacagatgagtcatgcgcgggcgctggcagtttcccgtgaaatcagccagcgctacatggatgccgagcactattaccagctgaagtctttttcctacttcgcacgtgactaccgttacccggactttctcgaagatgtagccaataccagcgtgccgctgagcttcgatacgtcccgcctcacattgccggcccgtgaaggtcgccattcacctgaattaactgtgtaa

SEQ ID NO: 348639 - DNA, 759 bp, Pseudomonas aeruginosa
ttggcctgccaggcttttgtggtcagcatcgcctgctatcgctaccagcctcgcttgtcctcagaaaacgttgaaatagcggatcacttgatccggctaacgcataaccagcgcaactggggctttggcttatgttttttgtatcttcgcaatgtgaaaggctttggctggaatcacaaacgtgtgtaccgcatctactgcgagctagagctgaacctgagaatcaagccgcgtaaacgcattgtgcgtgagaagcctgtaccgttggcggttcctgaggcgatcaaccactgttggtcgatggacttcatgcatgatcagttagccgatggccgcagcttccgcttatttaacctgatcgatgacttcaaccgtgaagccttagcgatggacatagatttgtctttaccggcagagcgagtggtacgcgccctagatcaagtgatcgagtggcgcggtaaaccacgcgtcatacgtagcgacaatggccccgagtacatcagcagtaagcttgtagtttgggctgaaaagcatggtatccggttggaacatatccagcctggtaatccccaacaaaacgcctacgtcgagcgctacaaccgaacagtacgatatgactggctaggacattacttgtttgattccatcgcagaggtgcaagagcacgccacacgatggatctggacatacaatcacgaaaggccaaatatggcacttggaggcatcaccccaaaacagaagttggcactcgtggcctga

SEQ ID NO: 348640 - DNA, 849 bp, Pseudomonas aeruginosa
atgggaattgaagagttcaagtctgaccattcatggctgagccctgtggattacgaaaaccttctggaacaggtcctccaactagtcgaggacgctggcctgctgctcattactgaatggcagcgcccagaggggcctcgcggctcaggcgataaagcagatgtcgatgttgaaattgaatcactgctgaggccacggttactgcagctgctcgactgtgatttctggggcgaggaaacaggccataggctcacaggagcccggtattgctgggttgttgaccccaatgatgggactgcagactttctgaaaggccacaaaggctctgccatatctgtcggattgcttgaggatgcccaaccggtgcttggcgtggtctatgcccctgttttgctggatggtgattctgactgcgtcgcatgggcaaaaggctcaccatgcctactccgcaatggaagtccaattaatgcggggcttgcccaaaaagaatggaatcaaaacagcgcagtcatggtgagcactgcggcaatggacaagcccgaagtcaattctgaattgtgcgcacctgctggtttcgttgcgatgcccagcatcgcttatcgactggcacgagtagccgcaggtgatggggatgcaggtgtatcgcttgtgccggtatcagcgcacgacgtggtcgcaggtcatgcactattgattggcgcaggcggcgtgctgattgaccaagatggcaacagcatcacctatgtcactgaggccagcatgcaggcagtctctcagagatgctttggcggttcgttagaagcctgtcagtcactggcaagccgaaattggggcaaggtatttacatga

SEQ ID NO: 348641 - DNA, 498 bp, Pseudomonas aeruginosa
atggatgagccacttttcaacgaactgctggaaagcgtaaagcgggcggaccatatcatgacagaccacgcagagctgcggatgctggctaagcgggctgatgccttgcatggaacgccgagccttgaacacgtattcgccataaccaagtttcgggaagctgtcgagccgaaagcaatcctcgccctgctggacgaaatcgaccggctcaaggcggagagcgacaggctgcgtcaaggcatgaaaggcgactacgacattgacgcatggctggaatggacgcgagagaaagaccagatcaaggcgcagaacgaggcgctgcggggagcgctacatgccgttcaagccgaggtggacgggaatctacgcccacttacccgcgacctcgtgaacatggtcagcggcttgaataacggcactcacccgaatgacatctacgagcactgcgacgagatcgaccgggttatcgacgcagccctagaaggagcaacgcaatga

SEQ ID NO: 348642 - DNA, 681 bp, Pseudomonas aeruginosa; identical to SEQ ID NO: 325982

SEQ ID NO: 348643 - DNA, 675 bp, Pseudomonas aeruginosa; identical to SEQ ID NO: 325983

SEQ ID NO: 348644 - DNA, 762 bp, Pseudomonas aeruginosa
atgagctggctttgttctcgggcgctggtggaggcattctcggcggccacctcctcggatggcgcaccgtatgcgctgtcgagttcgagccctacgccgcaagcgttcttgtcgccagacaaaatgacggaattctcccgcccttcccgatctgggatgacgttcggacctttgacggacgaccttggcgcggccttgttgacgtggtttctgggggattcccgtgtcaggacatatcagctgccgggaatggcgccggaatcgacggtgagcgatcagggctctggagagaaatggcacgaatcgtcggtgaggtacgaccgcgattcgtcttcgtggagaactcaccgctccttgttcgaagaggacttgccgtggtcctcggtgaccttaccgagctggggtatgacgctcgatggtgtgttatgggagccgccgacgtcggggcgccccatcagcgggaccgcatctggatcgttgccaactccgcgggcgagcatggggaagcacgggatagcttggtgccgggcccgcataggcgagcatcgtcacaacctagaagacttcctagccactcaatggctgcaagaaggtggagaggaagtatctggcctgaatgcccacccggaattcatcgaatgggtaatgggattcccttccaagtggaccgacttgagcgccttggaaatgctcaagttccacgagtggcagcggcagcattcacttatctcgcgtctgaatggatctgaggaggcagcatga

SEQ ID NO: 348645 - DNA, 189 bp, Pseudomonas aeruginosa
atgctgaagaaccgataccgaatcgttagcgacgactatgccggttacgaagttcagatcaagagatggtggttccccttctggattcaatgcggtctctgtaacacgcacctgagcgttgatagggcagaagcatatgccagggcccatgcgggcaaaaggctcgtaaaggatcttggatttctctaa

SEQ ID NO: 348646 - DNA, 1065 bp, Pseudomonas aeruginosa
atgtccgcagaaaatcaactggtcgaagtaccagccaaagaaaccgctctgcaagtctactcggcagccaatggcctggatcctttcctggccaagattcgcgaagagatcgactcattcgtgccggacgtaagcactcgcaagggtcgagaagccatcgcttccatcgcctacaaggtagcccgctccaagacggcgctggacaacgtgggcaaggaattggtcgctgagctgaaggaggttccgaagaagatcgatgccgagcgtaagcggatgcgcgatctgctggacagctggcaggctgaggttcgcaagccgctgacagagtgggaagaggcggaagcggcgcgggttgctcgccatcagggcgagatcgacaagatcaacctgcgcctggaatgccgcgacctggactcggccgaactcaaggccaacatagcttggctggaaggcctggccatcagcgaagcctgggaagagttcgaggcagaggctgctcgcgccaaagataaggctttgatcgctctccgagaatccctggttgcccgtgagaagttcgaagccgagcaggccgaactggaacgcctgcgcgccgaagcagcagcacgcgagcagaaagagcgcgaggagcgcattgcccgcgaagcagcagagcaggcacggcgtcaggaagaggccaaggcccaggcagaacgcgacgccgcagtacgccgtgaagccgaagcacaggccgcagcagagcgccgcgaacttgaacttaagcttgccgccgagcgcgccgaacgcgaagccattgaagccaagcagcgcgcagaacaagcagagcgtgatgcgcaacgtcgcgctgaagaagccgcagcggcagaacgcaaacggcaggccgatgagcaggcccgcatcgaacgcgaggctgctgcacgcgaagccgacaaggcgcacaagaaatccatcaacaacgaggcgctggcggctcttatcgccggcggcatgcccgaggaatgcgccaagcaggcgatcaccctgatcgctcagcgaaaggttcctcacatcacgatcaactattga

SEQ ID NO: 348647 - DNA, 546 bp, Pseudomonas aeruginosa
atgatcgacccagcagacaagcaaacccaagccctccccctggagcagccgaagcgcgggcgcggtcggccagcaaccggcaacgccctgtccgacgcagagcgggcgcggcgctatcgggcgaacaagaaaaagcgtgacgatcaaccgtcacgaaaagataacgaggacgggaaagaggcgctataccggagaacagtgatccagcaagctgagcaaatacgggcgcttgaacagcaactggtgcagcagcgcgaggaatacaacgacctggtgcacaagctcatggctgaacgcgaccagctcaagcgcgacctggctgccaagccaaggcgtcaccgcgatcaacctgccgccgaactgccagagagcgcctacgaggacgaacccgaggcgaagacctgggcaattcaagagcgcaagggcaaagcgcgctggcagaccatcagcaagggcctgacccggaaggccggcgagcgccagttcgacaagctgctgtcgggcctgacagatccgcgctacacctaccgcatgattgaagaataa

SEQ ID NO: 348648 - DNA, 174 bp, Pseudomonas aeruginosa
atgggcctgcatgacagggagtggttcaacgaaagccgccaccagtccaagaacaccaccagcacgccacaacggcctcgccgagtgctgttcatccactacctggccgggttctggccgggcgtcctcatgggcttccttgcgggcctaaccgtcggcctgctgatcagctag

SEQ ID NO: 348649 - DNA, 207 bp, Pseudomonas aeruginosa; identical to SEQ ID NO: 324729

SEQ ID NO: 348650 - DNA, 858 bp, Pseudomonas aeruginosa
atgcatgacggtcgcctcgaggcgaagaagaagccgcgcgaactcctggagccgagggtcctgcatgacccgcagcgtccgcgcagcagaaaggctcgacatgggcatgtggcgctcgcgcttgtgcagcttccaggcgcggacatgagcgttatccaggtcctggcgcggttccggatcgaccgtggcaccgcgagcagccttgagaatttcgtccaactgacgccggaactccggccctttcagatacgccttgatcttgcgcagacgcccctctttcgaaccccagtaggccgtggtctcgtagtcatcaccccggttgcgggtctggccattgctgaccccgcgcatgaactggatgacctggagggcggtctgttcattcggcatgcgtgccgagaacgtgcagtccagggcgtagatctcaatcgacagcacatcgagcttcgaatacaggtccggataggtgccagccagccacttcaacatgacctcggcccccatgcggatcgaggtcggcccgaagacgttgtgcccctggagcagcttggccggagacgctttcagctccacaccaggatcaaggcgcttgcccagggactgatggaacaccttgaaggccatgggcgtgtagctcgacggcagcgactcccaggcatgggaaagcccctccacgtcgtacccctccccgtcctcacgcttgagcacgccgcccgaagaccgcatgcgcacccccaacgactccaggtcaacgaccagggtcggggactcgggccggccaatcatctggacgtgctccgagcggaagcggatgaacatgtggattcggtcgagcatcggatgcatgcacacacataa

SEQ ID NO: 348651 - DNA, 1056 bp, Pseudomonas aeruginosa; identical to SEQ ID NO: 292108

SEQ ID NO: 348652 - DNA, 321 bp, Pseudomonas aeruginosa; identical to SEQ ID NO: 292110

SEQ ID NO: 348653 - DNA, 1719 bp, Pseudomonas aeruginosa; identical to SEQ ID NO: 292107

SEQ ID NO: 348654 - DNA, 456 bp, Pseudomonas aeruginosa
atgatcagtgatgagcagttggcggagttggagcaggctgcaatcgaaatcaaaggttggaatcttgtagatgcttttcggtatgcagacccatgcattgaggatggcgaagatgaggaatggtgcgtcggtagtattgatgaggatggaaaccagtacccggtcatggaggttaacgcccatcagtacgacagccaggattcagagcttttggctcactattacggcctatgcaatcgagaatctatccttggcctgatcgcccgcctgcgcgctgctgaggctgatgctaagcgttatcggtggcttcgttcgcagccgaatgactgctccgcgcctcgcattgatatctgccattggcaacgaaatggcaacgactcagtaaacgagggcgaagggctgagattagaagaggcagataaagccatcgacgccgccatggagcgcacgccatga

SEQ ID NO: 348655 - DNA, 858 bp, Pseudomonas aeruginosa; identical to SEQ ID NO: 348650

SEQ ID NO: 348656 - DNA, 207 bp, Pseudomonas aeruginosa; identical to SEQ ID NO: 324729

SEQ ID NO: 348657 - DNA, 672 bp, Pseudomonas aeruginosa
atggacgtgaacgacccagtgaaccaagcgcaacagatcaatctttaccagaatcctggacaatctatctccggtctctacaagggcttggccaaccagtgctctccaggtcagccttttccagaggcacagctggtggaggcttgggatatccctctcgtactccatccggagtttgtgcctaacggagatgtctcgaaaatcgataaggagtacggaacgatccttgctgccgagtcagctcaggttatcctgcttcagctccaaatggctcaagacaaggctaaggcgagcggagagattacagccttgatcagttctgtttcctccaacctaaataccatcaagagtcgtcatggtgctaactatctgaacctgctgaaacgatccccgaaccgatacccgactagcgtcggagttgaaattatgtcaggtggcagcccaaaccaggattctggaatcgaggtctcttatggtgccaatctcgcccgactaacgcagttacaacttcagtcgatgaacctgcctgccagcctcaaacagcttctcactcagggaatcggtgtgaagctttctcagcctgagtattggcctgcttacaacaatatagccgctggaattcgttatacaacgggaatggcgataacgcttgcctattgggcaacggtttag

SEQ ID NO: 348658 - DNA, 363 bp, Pseudomonas aeruginosa
atgcacgaaggtatcgaagccgtacccgatagtgatgtgtccctgaactattgctacggttttcgctctctgcccggcagcgagttcgttgcgagcgacaaaatcagtatttatctcctgcccatacaggaactgcatgttggcctgaagggcctcaaccttctcacctttgtctccatcctgcatatcttgaaccatgctgatggcttgctgatttatggcgatttgatactcttcgagggtaatgctattaggacgaacacccatctcgacaggtgttctcagtgtggtttcatgaattttttggtaaatatcgcttactgcaactgggcgacctgccaggttggatatggcactcgttaa

SEQ ID NO: 348659 - DNA, 480 bp, Pseudomonas aeruginosa
atgagcctgacactctacggagccccgctgtctccgttcgtccgcaaggtccgcctgctcctggccgaaaagggcctcgactaccagttggaagcgatcgccccgttcggccagccggcctggtatcgcgagatcagtccgctgggccgcatcccggcgttgcgcgacggcgacctggccctcgccgactccagcgtgatctgccagtacctggaagaacgctatcccgaaccgccgaatctccagggcgacgcccccgccggccgcgcagcggtgcgctggctggaaaaatacgccgactacgagatcgctcccctggccacgctgacaatcttccgcaaccggatactcaagccggcgatgggccaggcctgcgaggaaaacgacgtgcgtcgcgcgctggaggaaaagctgccagcgcacttcgattacctggaaaccatctcgacggccgggccttcttcgtcggcgagcgactga

SEQ ID NO: 348660 - DNA, 348 bp, Pseudomonas aeruginosa
atgcaagcaattattgaaacggtggcaagttggtttaaggcgcttttggcgtggctcggtcgaatctttgagtggttccttggcatgttcaaggatttcatggagttcattgctgatttgccgctactgatattcaagggtgtcatggaaggcgcgctgtacttgatcaatgcgcttccggttccgcagttcctggtgcagtacaagttgcaaacgctgttcagtggtttgcctgaatcggtgctgtggttcgtccagttcttcggcattccgcaggggctggccatcctgggcgcgggtgtcgcgtttcggctgctgcgcaaggcgctgacgctgggtcaatggtaa

SEQ ID NO: 348661 - DNA, 1422 bp, Pseudomonas aeruginosa
atggctcgttattgcagtgttcggcggcttagtgtgtggtggtgtctctgcttatgcgttttatgcgcgacagtaactgaggctgctactcgaaagaatgtcaatgttccccctgctcgcgatcaagttaggggagggaaggcgtcgggtgtttcgggcggggttttgactatcgttggtcccgccctggagggggaatatattcctcgcggtggtactggcggtgcaaacattcctgtgcgcggcattcatggtggtgttacggcgggtgcgcggactattgcgggcggggcggtttctgcactacgtggtggcatagttggcgttgctgcaactgcggctatgtcaatggctcttgatagtatcgggggttttattgacgagaatggcaagccggttaagaaggtaagtgacgcgccttcgggtgcggtggcaggtgtttattacgttaggccgccacaaaatgttggcggtgtttatcttgatcttaagtatgggttaactcgtcaacaggcttgcgaatatgaggttactcagagtggcaactgtgtaattaggattaatggcattgtgggctcttctgttatttatgctaatagttgcgatcctggcgtgtggtttaatgtctcaaccggtaagtgcgatagtttgtggaaacctgacgaacatatagagcctttgaccggccctgactatgacggcattgctgacacgttgtcgggggtgacgaatccagattggctcaagagcttgcttgaggcttcttgtgaaggatcgctgagccctggccggtgctacgacgagctgaccagccttgccgaccagttgaaagggcctagctcggtcaaaggcccgtcaagctcgaccacaagcacttacacgcgccctgatggcactaccggaacaacgaacactactacggaaactaattacacgattaactacggtccgaactattttgactattcgaagacaaccaccacgacaactagcaaggatggcgagaaacccacgacgacgacggaaactgaatcgccggaggtgacgggggaggatcctgcgactgagcctgagtctcagacgccttcgccatgtacgacaaactgcgagggacccgcatatgaggatcagtacaagccgaccgaggaaacgaaagaaagcgttattgacagctatctgtcgcgtgtagagcaagcgccgatagtgaatgcggcgacgggatttttcgatgtttcggtttctgcgtcgtgcccaacttggcaagcgcctgtcgatatgtcgattatgggtgcaagctttcactctgaacttgtatttgatcatcactgtcagccctggtttaccggatataggacggcggccatggccgttgtgatgattctttgtgcgttcggcgcgttctatatcgccatgcttgattga

SEQ ID NO: 348662 - DNA, 804 bp, Pseudomonas aeruginosa
atggcagttgatgaaggatcaatacacagtctgctagatcctgtgaacctgtacgccccacagctttctgctggcggatatgcgggtgtttctttgagagatgtgcttgagatgtcatcaggaatagctttcagtgaggactacgggaattcggactccgatatcaaccagctaggtaggactatagcgcttggcggatcagtaaatgaaaaagtgagttcattgagaagagaagatgccccggggagagtgcaccactacgttagcgtagatacccaggtgcttggtatggtcttattgggcgcgactggtatgggcccctcacagtttatgaatcaaagactttggccccaactgggtgccgaatgtgaaggtgcttggttaacagacgatcggggcacagagctagcattcggtggggtgaacctttgcctaagagactttgcacgcattggtctattatttcttcatggcggtcgcagcctgactggaagtcaaattgtaagtgctgagtgggtcaaggcatcaaccaaacctcggagtgctcacttgcgtcctggacgttacatagaggatggtgagccaaatcttgggtatggttaccagtggtggattccagaaggcaaagaaggggagttcttggctatcggagtgtacgggcagtttatttatgtaaatccacttaggcgtgtggtgattgcaaagacctccgcgtatgtcgactacaacgttgacggcatccgtatggagcatgaggcacttgcagcgttcagggctatatcaagaacagtaggggtgaggtga

SEQ ID NO: 348663 - DNA, 978 bp, Pseudomonas aeruginosa
atggtgaccgaacacatatttgattttgaatggcgccctctgcagaactatcttcgtgatcgtgatatcgcaataccaccctttgcggcagaacaagagtcaagaagtgacgcactttacaactggatagtcagcaaggggtattcaggaaaagaaggactgaatcttggaacttattaccatatatctgattatggcgtgataggattggcgttgctatgtgccgagaacgtaggtgatattttgaaagtcatcagggcctatgtcaagttgttcaatcgtgatatagctaatgttggcgtcaagcctagggagaattacgaagtagaaatccatatttcagttaactttaagccagagtggaatgacgcatcccgtcagtttcatgtaaatgttatagcctctgcaacctacaagctcattatggatctgttaggtaatgactttcccatctctgcattgacagtgcctgtgcacggcgcagataaaacaatatatgaaggtttcttttctttgcctgtgaagcatgaaggaaatgacataatatttagctttccagctcatcagttgaatagaacactggcgactgccaatccggcggtatttcagtcggccctgactatggcaggtgagagtttcaatgctctgttggaagtagagatgggagggctccgtcagcgaatcgagttattccttgattccataccagatcaataccctagcttggtgactaccgcaaagtatttacgcatgaatgagcggacggtaagacgtcgcttggcggacgagggctgcacttatcgccagattgtagataaggcccgcaaagaacgagcaattgcactgctactgaattcatcgataccagttgatcgtattagcgatattctggggtactcggaaacagcgagttttagacatgcattcagacgttggaccgggcagtctactacagaattcagaaacagtttccactga

SEQ ID NO: 348664 - DNA, 417 bp, Pseudomonas aeruginosa
ttgaggatagtttgcctattggtattgctgagtctgatcggcggctgctcccattcagtcactttgcaggagcgagcagagcaagaggccatttttatccaggaattccgccaggaattcgccaagaggcttcgttacccgctgttcgcaccgggagatgagatccccgaggccgatgttatggtgtttttccgcttcgcaagctcgtcggggcgcataagcagttgccgggtacagtacggcgcggggaatgataagagccgcagtacgctcgatgaagtcttcgccaagcgcgtgatagccacctgccgcgagcccgatctaccggttgctccgccggcgctgctggatggtggcggaggtttcagcttcaagcagagagtgatgtttcgcaaggaagtggaacgcctcaggtga

SEQ ID NO: 348665 - DNA, 729 bp, Pseudomonas aeruginosa
atgaagctcaaaagcattagcatttttgccatactcaccctttactacaatatcactctttgtgtcgctgaagaaccaaagagctacttccctcctggggattactataggactggaaatagtgggctgctgacgatatctccgttattcgaaggacttcaaaagtttcggatacgaagcactggacacaatgcacatgcttgcggattgaatggaactatagagtcaggtcatgtgcaggtcgacgtccgtggcatcggcgatatgtcgtgcgatgtcgttttcaaactgaatgatgacagaattaccatagagaaaggagccgcaagcagggactgtcagggcttctgcggggcggcagcaggttttactggtacgtattggaagccttccccaatctgcgagcccgcctctataagattcaacgacaagcaagtgaagaaagcactgaagaataacgagacagagaaggcctactggatttctcgaaaactgataacagagtgtagggatatgtttgaaggttttggttatctctctcgtgtttttcatacggcacatctctccttgtctgccaaaaatcaccaatgcaagaagatactagagaagggcagcttcttcagagacctgaagcgagagtatttgccggaaaaaatgcaaaatgaatatgataagtattctactgagttcaatcgtctagaaagcgagtgcgaacagtcaatgaaataa

SEQ ID NO: 348666 - DNA, 1056 bp, Pseudomonas aeruginosa; identical to SEQ ID NO: 292108

SEQ ID NO: 348667 - DNA, 906 bp, Pseudomonas aeruginosa
gtggtgtcagttcctttacctaactctgttgtgattcagcgggacctacccattgggggaatagttgctttcgcagaggtccagacaactatgaaatgcaagaatagctattatcctactggatctttggcgaactactataaatcgtcttctaataccgccgtgggcgttgtaaatggggcctttaaaaccagtatccctggagtcgggcttagatggtatctgtcggggccaacttctggaagatatcaattcagcagcaccaatcttaatgatacctccacaaaaataggagttgccttcccgtattccgggggagaaaaaacatatgtaattcagcatacttttgagataataaagacgggaagcgtttcgggcggcagttttaaatttccgagtttttttgttaaaacatcccccgactcatttctgggtgggctttatgagatgaatctcaacagttttacttttccagaagttaaggttatggcgcctacttgtcagctaattaaggataatatatctgtagtcatgggtagggtgaatatagataattttcgcggcccggggagctttacgaaagaaaatctgttttctattgatttgcgctgtgaagctgggactaggatcaatctgactctcgataatacataccagattaatgagtatccgggagcaattagagtgtcaaacgcccttcaggcagctacaggagtaggaattcagatattgcgaaactcatcggctggatataatccaatcaagttaggggagtcgcaaataataggggtcgcagacgacgggattaattcgataaaattagccgctagatatgtgcaaactggaaagcaaatctctggtggacaagcgaatggcgcattaacttttgtcctgaattatcagtaa

SEQ ID NO: 348668 - DNA, 849 bp, Pseudomonas aeruginosa
gtgtcagacaaagtagaagaaaagataaggcgcagctctttcagtaggtgtcgaatctgccttttaagaaaagaacttacagaggagcatatattccctaaatgtctttccattccaggcacgaagcaaatacgtgaactcctgccaaaaattgaccctaaaaggcgaggcggcagagttactaggctttcccaaaatggcctcaagctaaagacaacatgtagcaactgtaacaacaacctgttaggtcaaatttatgacccagcattgaagtttatttacgatcaagccggtctttttataaggaatagaaaatttttatacggaaacattataacccttgagaagattgaactaaataaagttgtccgtgcagtaatcgggcatatgttggcggcagatgaagtccccaatgccaaatctctaaaatgccaagagatgagaagatttttctttaatcacgaacacgtattcagtgaaaatatttcagttctaatgtgggtctatcctactaatgaacaggctgtaattcgcgacatctttctaagtgagaattttggtacgggagctattgaattcctatggataagtgcttacaagacattccctttagcttttgctattgcacataaagataaaaaaactagtgcgccatataaaaatataattaaccttactagtcatttgacaaaaaatattaatgacaaatttgatataaggctatcaattaagggacaccctcccttcatgtggcctgaaaccccctcaagaaatgaagtgatcctcatgggggatggacagcgtttgctaacaaaaccacacagccctatccggagttacaagcattaa

SEQ ID NO: 348669 - DNA, 5079 bp, Pseudomonas aeruginosa
atgagcctgcacgcagaaggttgggcgcagctcaagcacggtggcttgttgattgcaccatccaagctggatgaatttttccctcgtgcagcggcggagatgtccgattaccaggctgagaagctgcgtcgagcactcacagtctttgacggcagcaatgaaagcctgagcagcctgttggattacatactgcaggatctttcaggcctgcccgcagatgaatggcaaaaggcccagggtgtcgacagccgttgggccgtaaggagctttaccggcgcccagattaagccgcgtcgcctgtggcttgggcctaacggcgagactctagccgtgttcgtgcctgatgatggtggctcccgccagttcgccagccgattgggggtagggcggtcacggcagttgttgggccgtgtggtggaatggctgcgccgtaccgggcaggcgctggctctggtcaccaatggtcgccaatggcgactggtgcacgccggtgctgattatgacgcttggtgtgaatgggatatcgatctttggttcaacgaaggtcagccatctgcccagaccatcgtctggcgcaccttgctcaatcgcaacgccctgctggccgagcagggtcaaagccaattcctgcaggccataagtgcctcccgtaagggacaggctgagctctccagcgtactgggtgagcgcgttcgccagggtgtagaggagctgatcaccgcttcccatctcgccatcgagcaggctcaacagcaagggcaggctcacgattacaaagatctgtatgttgcaggctcgcgcatcatcatgcgctgcatcatcaccctgtttgccgaagcccgggggctgatgcctgtcgacaacccgatttaccagcaggcttacagcctggaggggcttcgtcatcagttggatcgccgtgctggtggccggggcaacgaacgactgagccagggccgcagcgcctggccgcgcctgattggcctgttcaacctgatccacgaaggttcggctcatgagcgccttaccgtgcctcagtacggtggtgccctgtttgagccaggcaatccctccagcgaagatggtatttcccgcgcgctcgcgttgctggaaagccaccagaacctggtcagcgaccttcaggtgcacaaactgcttcgcctgctgacccgcaccaagatgaaggtgcgtcagggccgcagcagtcgctgggttgatgcgccggtagacttttccaccctgtcttcagaatacatcggcatcctctatgaaggcctgctcgacttcgagctgaaacaggctgctgagaatgacccggtgatcttcctcgccgtgggtaaccagccagctctgaccttatcgcagctggagaccatggaggataaggacatcaagcagctgttcgaggccctgaagaaaaaagacaaggccggtgacgacagcgacgaagaaggcgaagacgaatcagaggaagctgccgacatcgatgaaggcgatgacagcaccgacgaagaagtcgaatccagcgaagacgaaatcgaagaaaacgcaaacactagcgatgacagcggtgaagagctgaccatcagtgaagatcacctggcccgcgccaatgcttggctgcagcgtgctgcacagatcgccggactggtgaaaaagcgccgtggacgcaaagccaacaccacaggcgatgaagggcagcaagcactggagaaggccggcaagcagttgtgcgctcgaatggtcgcgcccggtcaattcttcctggtgcgttggggcggcacccgtaaaggtgcgggtaccttctatacccgcccgcaactggccgcacccactgtgcgtcgtaccctgcaaccgttggcctatgaagccgttcgtagtgagatcgatccgcgaactggcctggacgcagtagtggagtgggtaccgaaaaagcccgagcagattctggccctgaaggtgtgcgacccggccatgggctccggctctttcctggcgggtgccctgcgttacctcaccgaagcactgacccagtcgctgttccatcacaagctgatcgagcgcagcgaagacggcggtgtgccgcgcttggccgacggcaaactgaccgagctgctgagtgatgagctgaccaagctcaaccccaaggacgatggttttgaagaagcgctgcgctcccaactcaagcgccacatcgttgaaaactgtctgtacggcgtagatctggatcccctggcggtggaactgggccgcatggcgctgtgggtggaaaccatggatcgtgatctgccctttggcttcctcgatcacaagcttaaggtcggcaacgcgctggtcggtacctggttcgacacgtaccgcgattacccagctatggcgtgggagcgggaggggggggacaaggactaccagaagaacaaaccggacaacttgatcaaccactggtatgaagatgccaagggcaagcgcaagggcgatgtctttaccgatgcgatcaaggtgcgagccaaagccgtgcctgaacaattgcaggcgctgctcagcggtcagctgacactggacggcgggctggacgctagcaatgtgcacgacgaactgctcaaggtcttccgcaaactgcaccgcctgccggtacacgaaagcgaaaaacgcgccgaagtttatcgcaacgaggtgctgaacaacccccactaccatgccctgaaagcgcgtatggatctgtggtgcgcgctatggttctggcccggtgagctgatcgagcaggcaccgctaccgcgtgattttgctaacccaaacgagcaggttctggcccttgcggccgacttggcacgccgtcagcgtttcttccactgggaactagagttcccggatgtattcactgccacccaggacggctttgatgtgttgctgggtaacccaccatgggaaatccagaagcccaactccaaggaatttttctccaacttcgatccgctttaccgagcctatggcaagcaagatgcacttgccaaacagctggactacttccgtgcccgaccggatttggagcacgactggatcgcctataacgccaacctgaagggtatgtccaactgggcgaagtacgtgggcaagccctttggcgaccgggtcactgaagacaaaaacggcaagaagaaacatgacctgaatctgggcagtggccgtaacagcttcgagtcctcggcggccgtacacaaaaaatggctacagcagcgcaagaagcacaagggctttgctgataccgcgcaccccttcctgcatcagggctcggccgacctcaacacctacaagctgttccttgagcagagccatgctttgctgcgggggcaggggcggctgggcatgatcgtgccgagtggtatctacaccgacaagggcaccaccgacctgcgcgagctgttccttggccagtgcgactggcagtggctgtttggtttcgagaaccgcgaaggtattttcgatattcaccgctccttcaaattctgcccattgattgtgcagaagggtggtcaaacagaggccatccgcgccgcctttatgcaccgcaatgtggatgactgggagcaggccgagcgccatgtactggcctatccgcgggcgcgggtggaggagttttcgccttactccaaggccattctggaaatccgcagtgagcaggatctgcgcgtgctgcaaaagatctacgccaatggtgtgttgctgggcgaccagagtgaaaacggctggggcattaagtatgcccgcgagttcgatatgaccaacgactccaagcttttcccgccgcgccccaagtgggaggagaagggctaccgtcctgacgagtacggtcactggctgaaaggcccctggcacgattacaacggcccgcagcacattctggagcgtgagccggggctggtgctgtctcgtgatgggcggcaagcgctgcgggtggaggagattgaggatgtggcgttgccgctctatgaagggcggatgattgggcagttcgatttcagtgagaaaggctgggtgagtggcaaaggccgctcggccgtatggcgggatattgcgttcgaagagaaggtaattgagccgcagttcctgatgagctacgcagactacgtcagcgctaccgataagaacggaaatccgaaaactgcccgtggcctgaaaccctgctatatggacgttggttctgccaccaactcaagaacgatgatttcctctgctgtgtgggattttccttgtggaaacaaggtgccgctattgatcccaaataaaggagaggcagctggaatcgcacttgttgcgtgtctggattcttttgtcttcgattttgcaatacgcaacaggctgggcggtttgacgatcaactactttattgcagaagagtcaccactacctccgctacaaaatgttccgaagcagcttgtggaggcagctttcagtctgatttcagtaagcaatccaatctattcacccgtccttgagtcactcgcacgcactggcgttagagctgctgtttcagagcatgaacgcacaaggcagagggtaattattgacgcggcgctatttgcaatcgctggcctggactgggagggggcttgtcatattatgaaggattgtgatctccctgtggatgaactttctggggacgcagcgaaagcgcttaatccgaaaggcttttggcgtcttggcaaagggtcgccccctgagctacgtcacactgttctgtcgctggtcgccttccacgatctgcaacaaaaaggtcttgacgccttccttgcccagaataacggcgaaggctggatgcttcccgaacagctgcgtctggccgactatggcctggggcacgacgaccgtgcgcaggagcatcagccggtggcttcacgtatggggccacgcttctatgagtggcagctgaaagaagacgttgagcgttctcggcaggaatgcgcagcccatgcccagctgatgcgccgaatcgtgccgctgcaacaaccggtgcaagccgatggcatcgccaaagtgcaggcgacctataaaacagaatcaccgcagggagcactgttctga

SEQ ID NO: 348670 - DNA, 1005 bp, Pseudomonas aeruginosa
atgcagacagttcaggtaatttcggcaaatagtttcgcgaccgtattggcgttgagaccgaatcttgtggcttggtttcttggggctggagcttcggccgcctcaggaattccaactggctacgcaatgattcgggactttaaggcgcagatattctgtcgcgagaacaacatttccaaacgggaagtcgataccggtgaccaagtctggattgaccggattgatgatttctttcggagaacctccctcctgccacccgatggagatccaactgagtacgcagctgcattcgaggctgtctatccgcagccaaggcaccgaaggcaatatatcgatgacgccatctccaaaggcacaccatgtttcgggcaccggatacttggaggtttgcttgctgccaggaaggtggactgcgtgttcaccacaaacttcgatccgctgattgaggaggcggctctatccgccaatatgcttctgccgacgtcagaccaggttcggccaacggttgcagccattgactcaagtgagcgcgcgatgcgctgcttgagtgagtcggactggccactggtggcgaagttgcatggcgattatcagtccactgccattaagaacaccggttcggagttggaaagccaggatcagcaaatgaggcatgtgctggtcgaggccagcaagcgctttggtatggtattcgttggctacagcggtcgtgatgcctcggtcatggaggcattaagctctgttctgcaggagactgcctcttttccaaacggcctttactgggtaacgtcatcaccatctcggctccttcccgcagttactcagttcctcaagaaagcacatcttgcgggtgtggatgttgcggtggtcgagtgcaaaacgtttgacgaactggctgctgaggtcatcaagcatatcgatcttcctcaggtgttggtggataacgtatgcaggggcgagcgtctcctcgtctggtcccagtcaatttgccgagtgttgaggtaa

SEQ ID NO: 348671 - DNA, 1980 bp, Pseudomonas aeruginosa
atgagccacgatccgccgagcaaggaccgccgccatttcctcactaccagttcggtgctgggcgccgccggagtcctgtggtccgccctgcccttcgccaacgccgccagcctttctcccgcaagcaacccaggaggttccatgaccgccgacctgatcctgcacaacggccgcttccacaccgtggaccgcgacaaccccaccgccaccgccgtggcgatcaaggacggcaagttccttgccgtcggcaacgacgccgaggcgatgctccatcgcggcagcgccacccaggtgatcgacctgcagaagcgcaccgtgatccccggtctcaacgactcgcacctgcacctgatccgcggtggcctcaactacaacctggagctgcgctgggaaggcgtgccctccctggccgacgccttgcgcatgctcaagaaccaggccgaacgcacgcccagcccccagtgggtgcgggtggtcggcggctggaacgagttccagttcgccgagaagcgcatgccgaccctggaggaattgaacaaggccgcgccggacaccccggtgttcgtcctccacctgtacgatcgcgccctgctcaaccgcgccgccctgcgcgtggtcggctacaccaaggacacgcccaacccgcccggcggcgagatcgtccgcgacagcagcggcgaacccaccggcatgctgatcgcccggcccaacgcgatgattctctacgccaccctggccaagggaccgaagctgccgctggaataccaggtcaactccacccgccagttcatgcgcgaactcaaccgcctcggcctgaccagcgcgatcgacgccggcggcggcttccagaactacccggacgactaccaggtgattcgcgaactggccgaccagggccagctcaccgtacgcatcgcctacaacctgttcacccagaaaccgaaggaagaactcgccgacttcaagaactggaccggcagcgtcaagtacggccagggcagcgatttcttccgccacaacggcgccggcgagatgctggtgttctccgccgccgacttcgaggacttcctcgaaccgcgcccggacctgccgcagaccatggagcaggagctggagccggtggtccgccacctggtggagcagcgctggccgttccgcctgcacgccacctacgacgaatcgatctcgcggatgctcgacgtgttcgagaaggtcgaccgcgacattccgttcaacggcctgccctggttcttcgaccacgccgagaccatcaccccgcgcaacatcgagcgggtgcgggcactcggcggcggcatcgcgatccaggaccgcatggccttccagggcgagtacttcgtcgaccgctacggtgccaaggccgccgaggccacgccgccgatccagcgcatgctcgccgagggcgtgccggtgggtgccggcaccgacgccacccgggtctccagctacaacccctggacctcgctgtactggctggtcagcggccgcaccgtcggcggcatggccctgtatccgcagggcctgccgcgggaaaccgcgttgcagctgttcacccacggcagcgcctggttctccagcgagcagggcaagaaaggacagatcaaggttggccagctcgccgacctggcggcgctgtcggcggacttcttcggcgtcgaggaagaggccatcaagtggatcgagtcggtgctcacggtggtcgacggcaaggtcgtctatgccgccgccgagttcgacaagctcggtccgccggcgccgccggtgctgccggactggtcgccggtggccaaggtacccggccactggcggcaaggcgcgccgctgaccgcccaggtccaccagtgcgtcggtgcctgcgcggtacacgcccacgagcacaaccgcgcgcgccactccaacgtaccggtgagcgacttccagggtttctggggcgcattcggctgttcctgcttcgctttctga

SEQ ID NO: 348672 - DNA, 525 bp, Pseudomonas aeruginosa
atgaacgcaaggatcgccgcattgggactgctcctgcccctggccgccggcagcgccgtggccgcggaggagggcagctcggtcaaggatgcggccaaggccgcggtgtcctcggccatcgagaccggcaagaacctcctcggcggggtcagcgagggcatcaccagcggccgccagtcggcccagggcgccgatggcgccaaggtggtctccgacaacgccggcttcgccgagatcggccaggtcgaagtgctcaagaccgagccgcgcgaccagcaactggccgtcaccctcggcttcaagaacgacagcgacgccaccgtgcgcctgatcaacctgacccagaccggcgcgctgctggtgatcgacaacgacggctactccaacgccctggtcgccctcgccaaccccgacgacgtcaccgtcccggccaaggccggcatccgccagaccttcgtcttcgaaggcggcgcggaagggatcaaggcggtgcgcctgtggggcaaggacctgccggtgaagtga

SEQ ID NO: 348673 - DNA, 537 bp, Pseudomonas aeruginosa; identical to SEQ ID NO: 348431

SEQ ID NO: 348674 - DNA, 1482 bp, Pseudomonas aeruginosa
atgcatttacacagtctgaccttgaccaatgtccggcagttcgaacaacgaactttcgaatttcaacccggctttaacttgctagtaggtgagaatggagccggcaagacaacgatccttcgcgggttgcttgcggcattgggtagcgcacggcaaatggggcggcgcccaaggctggaagacgacgatattcgactgcgcgcgcgtcgggcggaagtcagtgcggtgattcattcaacgaacaacacgcctgaacattttactttccagaagtcgctttgggagcgtgctagtcgttcagttcctcgagggaatcttccattgattctgctttactcatctaacgaagccatctgttccgcgatgaaaatgaagcgcgcgagtcgggtcagggaggtcggcagcgatcagtttcggagcggtgaagaatttctgtacgcgaccgagagagagttctctcacgggtcaacgaaagcgaacgagcgccagttcggaaacagtcggtcggtgagagagtttgttggcaaagtactgtcaactttttctcctgatatggacgccttctattggcacttcgagccttatgactgttcactcgtacccgcagagggggcagggaaaagtttgccgctggatgcagaaacgcagaagcaggcccgtgtttttgctatgcgcaagttccaggagggctgggcacagaggcgaaagcggcctttcgattggcccgaccaggcaaaagtcgtccttacacccgagattacggagagcaagcgcggcgataggcatctgccctatctgcgtgagatttgggaaggcatgaagttttcgtcagaggccgcccgagagtttctactatcttgttcgttggaggttaaactcactccgcgaatcatgatcaagagaagaatcggcacgctcagtattaagcaactttctgatggggaacagcggcttttttcgctgtttgttgacattgcgagacagttgttgatcaaccgtcccagcgatgcatttggcgaaggtgaggcgattatccttattgatgaaatcgacgttcaccttcatccgaagtggcaacgccgcattgttccagcgctggaggacttgtttccgaactgtcagttcattgccaccactcactcgccctttgtgattcaggcggccggccgccagcggatcacattcatcgagccgcattcttcagtggggttcttaggtggcggcaatagcctcgaagatatcgcagaggatattcaaggagtttcccagccgcaacgtagcattcgagcagaaatattgagtcttgcggcgaaacgttacttcacgctccttgagatgcaagcgggaggcgcgcagcaagtagagccagctgaattgcgcgctgctgaaaggtcctaccgggaggcgagcgaaccatttacatcagactccgccgtacatgccttgcttgaggttcttctgatagagggaaaagctcagtga

SEQ ID NO: 348675 - DNA, 687 bp, Pseudomonas aeruginosa
gtgaggcctgttaaaagaggtgccgcaccgaagacatatgggaagtatcaagacgccattggcgatctagaaaactgctttggccattattgcagttactgcgagcgtcgtttcccggcgcttctagctgtagaacatgtgtctcccaagagctccgacgctgcacgtgcgaccgactggacaaattttcttcttggttgcgttaactgcaattcaacgaagggcgatacgcagacaaacgaccaagactttctttggccggacaaagacaacaccctaatggccatcgaatacagggcgggggggctagtggaaccttcgccagcactgaaccctcaaattgcgccaaaggcggccgctctgataaacctagtgggattggatcgccatcccggccaacctgtcaccaaacagcccaccgaccgagataggcgctatctggagcgggaggagaagtggaagcttgctcaggtcatgcgcgacaagctgacgcgaaacaacacaaacgactttcgagatctactcgtcatcctggctaaggagtctggatttttcagtatttggattgccgcttttcacgatgatcctgacatgcgtcgtcggctagttgaagcttatgtcggaaccgcgagagactgtttcgaaaatgactggactctcaaagccagagctggcggccatatctaa

SEQ ID NO: 348676 - DNA, 1482 bp, Pseudomonas aeruginosa; identical to SEQ ID NO: 324400

SEQ ID NO: 348677 - DNA, 195 bp, Pseudomonas aeruginosa; identical to SEQ ID NO: 344396

SEQ ID NO: 348678 - DNA, 582 bp, Pseudomonas aeruginosa
atggcaacgtctgtagttcgagccctccaactggccatcctgctggccctggtcaacatcgctcaggccgccgtggatccaccgccggcgtacaagcagatcgccctgcccaaaggggttccggccgaggtgctctactcggtcgcgctgaccgagagcaaggtcctgctgcgcggcgaatacgttccctggccctggacattgaatgtcgcagggaaatcctactattacgcgacccgcaccgccgcctgcacagcgctactcgcggcaatcaacctctacggggccaagagcgtcgattccggcctcggccaggtcaacatcggctggaacggacatcgtttctccagcccctgcgagtccctggatccgtacaagaacctggacgccacctccgacatcctgatcgagcagcgggacgccctgtatgcatccgccccgggaagaccggtggactggatccaagttgccggccgctaccaccgccccgccggcggcgcgcctgccgccaaataccgtaggacggtttcccgccaccttagccaagttctcggcgtcaacctactggtgaccaatccatga

SEQ ID NO: 348679 - DNA, 225 bp, Pseudomonas aeruginosa
atgatcaacgccggcagcgacatgaccgcgccggtcgcgttctggatgactgagcccatgatgttctggaaaccctgtgtggcaccgttgagctggttctccagggtggtgctcaggttcatgtttccgcacatcatgtcgttgttccagccgaagccgacgccgatcgagtccatctggccggcgctgcccatgctcaccgcactgccgccgccaatgctgtag

SEQ ID NO: 348680 - DNA, 891 bp, Pseudomonas aeruginosa
atgaaaggggttcgtcgcccaatcctgcgctaccacggaggcaagtggaaacttgctccctggatcatccagcacctggcgccacatcacacttacgtcgagcccttcggcggcgcagcctccgtcctgctccggaaagcccgcagctacgccgagatctataacgacctcgacggggacgtggtgaacctgttccgcgtcgcgcgggatcacggtgagcaactgcgccaggccctggcgcttaccccgtttgcccgggaagagttcgaagccagctacgcggaaacgtccgatccgctcgagcgcgcgcggcggatggttacccgaagcttgcaaggtttcggtaccgcagctgcgtccggcgaacgtacagggttccgctcaacctcgaccagatccggtaccggacctgcactggactggcgcaactaccccgacacgctgaccgcgataacagaacgcctgcagggcgtggtgatcgaaaaccgcgacgccctcgcgctgatggaatatcacgaccggccgaatacgctgcactacgtggatccgccctatgtccactcgacccgcagcacgaaggtgcgccacaacgccacaggcaagtcgtaccggtacgaactggacgacaaccagcacaaggagctggcggcattcctcaagcggctgcgcggcatggtggtgctctccggatatccctgcccactctacgacgagctctacagcacctggcacagagtcgaccgccacgcctatgcagacggctccagagagcgaatcgaatgcctctggctcaacagcgcagcgcttgaggggttggcacaactggatttcttccaggccagtaatgcgtctccatcgccctcattccagaccacggtcgctcagtactga

SEQ ID NO: 348681 - DNA, 198 bp, Pseudomonas aeruginosa; identical to SEQ ID NO: 330936

SEQ ID NO: 348682 - DNA, 231 bp, Pseudomonas aeruginosa
atggtcttcattgggctcgcgatacgtgtaacccacaccgccctggatcctgacgatctcgcctggggcaccgacgtgcagagcgatttcttcagccagatcagcgatgtgctgtcgcaggatttcgggggtgtcgatcgaccgctcgatgtaccagaggtcggtgatcgggcgcaggccgccgacttgcaccgggattgcctgcagagctgtttcctcgaagacaggtag

SEQ ID NO: 348683 - DNA, 300 bp, Pseudomonas aeruginosa
atgttcaccgtgcggctgttgagggcctcgatgttggcgcaggaggcgctgatcttctcggaaagctcgttcatcgcgcggatggtctgctcgaccacctgcttgccgtcctcggcctggtggttggcgtcggacgcatggtgcgaggcatcggcggcgttgcgggcgatttcctgggcggcggcgccgagttcgttgatcgccgcggcgacgctgttggtgcggttggactgctcgtcggagttggccatcgaagagttcgaggcgttcaccaccagttgcgccacgtcgtgcagttga

SEQ ID NO: 348684 - DNA, 627 bp, Pseudomonas aeruginosa
gtgaacgagtcgctggaggtctccccgtcgcggcacctcgacttcggccagctgtacctggccgcgcggatcaacatctccgagtggcgtaacaacaagcagtcgatgcagtacatctcgttcatcaagggcaagggcgggaagaaggtcaccgactacttccgcgatttcatcggctgccaggagggcatcgactcaccgggcgaaacccgcgccctgctcaaggccttcagcgacttcgtggagagcgagggcatggccgagcagcaggcccgcgagaaaaccgagacgctggtcgactacgccacctcgcaggcgcgcatcggcgagccgatgaccctcgacgcgctctcggaactgatggacgagcagcaaccgcgggcgttctacgactacatccgtaacaaggactacggcctgtcgccggaaatcccggcggacaagcgcaccctcaaccagttccgccgcttcaccggccgcgccgaaggcctgtcgatcagcttcgagtcgcacctgctgggctccaggatcgagtacgacgaggagcgcgacacgctgcagatcagcagccttcccactcaactccgcgaccagctcaagcggcgcaaggcccaaattggagaatga

SEQ ID NO: 348685 - DNA, 351 bp, Pseudomonas aeruginosa
atgcttcgctcgatcaagatcatatcgacctaccctgatctgcctgcgcggatccttgagcttcgctcactgacccttgacgatgagctggacgcaacaatcaccctgaccaccgcacacaaggccaaggggctggaatgggatttcgtttgcctgtacgacgacttcaacgcggacccgctggcccccgacaccgacccaggcaagcgcgacgatgagttgaacctgatctacgtcgcagtgacccgcgcgatgaagatcctcgccatcaacagcctggtgctgtcgatcatgcagcggtacgtggacgagagaaagctgaaggaactggtggtcagtaatagggagtaa

SEQ ID NO: 348686 - DNA, 447 bp, Pseudomonas aeruginosa
atggccaacctgctcgccgccctggaggtcgcactgggcaacgtagcagccctggctattgtcgaccgggtacggcaggtcgcagaccgaatttacccaacttcaaacctctcccctgttccgcaggcctggctcgatgtacaggccgagcgccggcgccagatcaccgtcgaaggcttcgataccagcaacgacgacgctagcgctggccagatcgcccaggcagccggctgctacgcactccatgccggcggcatcggcaccgactggccgggcggcattcggaatggctctgcactgttctggccctgggacgaagagtggtggaagcctaagtcggcgcgcgagaacctggtacgcgccggcgccctggtgctagccgagatcgagcgcctggaccgctccgccaccaagcagggctcaacctgctgcaaggggggcgcgtaa

SEQ ID NO: 348687 - DNA, 174 bp, Pseudomonas aeruginosa; identical to SEQ ID NO: 346824

SEQ ID NO: 348688 - DNA, 234 bp, Pseudomonas aeruginosa; identical to SEQ ID NO: 330735

SEQ ID NO: 348689 - DNA, 225 bp, Pseudomonas aeruginosa; identical to SEQ ID NO: 340271

SEQ ID NO: 348690 - DNA, 207 bp, Pseudomonas aeruginosa
atgtaccaggagttgctcggcctgatctcacgctacggcggtgaggtgacgtccaaggccttggaggacgagtcgaccctctgcgagctgctggaacagatgctgcctgatgatgaggtagagcaagccaggaaacaggtgctggaacttcatgccaagcgccgccaaccgggccgcctggactcgccggcgagcctgaaggtgtaa

SEQ ID NO: 348691 - DNA, 624 bp, Pseudomonas aeruginosa
atgaaaagactttcggtacttctgattcttgctataggttttctctgcagcaggggctatgcgcagagcgagctggagccctgcgataatgagttttctggtgaatactatgcacgcgtggatagagtaattgccgaagctgttggtcagcgcgctcagctaaagttaacaactattccttcgtttgaacctgagtccggcgtgcgccttgttggcacggatgtgtattttgttaggttcttgaattccttatgggcggaggccacttcttttgatgaagctgggtatggccatacggactatgccaagccgaaaatcaccactgaggtacgccacgccccgcttgctccaggacttgctaagcgtgtagagcaagttttcttgcagtcaattgcaaacaccaaaaagtctgatgacttgaggcttgatggtgttacttatcgattttcggcagatcagaatagctgtggtgctacttggtcacctgatcctgagtcgcacagcgggcacttggttgggttggtgaaactacttgaaaggcacgccggattagaggtcgaaagtgatctacggaatagcgagaaatcaatctctcaagctctcgatgtaatgaagtctgagtag

SEQ ID NO: 348692 - DNA, 747 bp, Pseudomonas aeruginosa
gtgaacttctttagccagcttacgcctcaccaatgggaatactttgcagattattactttcgcagcattggatatacgatattggttgcaccttcggtcggccaagatggcggaaaggatttactagtgcaacttggcgaggtgaagtcgctagtaagctgcaagcattattctagacagcctgtttatgagtctgatgaaaaatctattttggaccgactttcgcagcatggcgctcagcaattcataggattctactccacttatggaggagcatcattacgtaacgcgctagataaagacggagtggattatctgcttctcgaaggaaaagccatatttaaaaacctctcgaacatacctttcccagtacaccaggcgttatttagaagactgcagactgtcaaggagaaaacttttggacagccctaccagccacttctgtgcaaatgcggctgcctagctgacttacttgaacctgaaaattctgaagattcggtattattcctattagatggacttcagggcctagagatcgtttggaaaataaaaacacatccttatggcgactctggccaagaaatgggattgcacccactagcaccctgctttgggttaaagactcttaactccgtaatggattctcacgaggtcattatagacagagcggctcttataccacttgattttgagagagattattgcaccctactacagtctctataccaaatgattcagatagactga

SEQ ID NO: 348693 - DNA, 804 bp, Pseudomonas aeruginosa
atggatttcttaaaacaatttgagagctggcctgaggaagtctggcgtagctttggcctggattttctcgaaaataacggatggtatcgagattacaggtccccctatgatgtagtcatacataacggtacgcgctatctagttagctttaatcataatatcgcccgcggtccagtaggaacaaccattgaaagcgatctaattcggcgactgagacaagctgaagccaacgggtttattggcttttattccggaaactattcgaccggactgatcgaaagactagaaagccttaatataaaactcaaagtcctaagcggtgttcacatatcggttttgcttcctttttccacctcgtcatttattgataaacatttccttggcggcgagcgagatacactaaggagggccaattactttctgaacaaaccttccccgctcacatacaagccgctttactgcatatgtggctgtggggtggacattctaaaagacccgttttctataggatcgtcagctgcatttattcggcttgaaggtgggcgactttattttctgtacggccttaaggattgtatattttctctatgccatgagaatacaagctgcggatgggtcgaactaaatcaaatgcttcatcctgatcaattcaacatttggaatggaacaatcaatgcatacctttccaacaacaattatcttgacttaaaaaacttctggaaacccagaaaattattcaccatgagattattgcagcgcataagacctattaactcaggcttctttatggatggggaattttag

SEQ ID NO: 348694 - DNA, 1104 bp, Pseudomonas aeruginosa
atgccgaatctagacaaagacatctatcaaaaacagttagcgattagattttgcttagtcaatgggctcaccccattcctagaagtcaacatccaaaactttcgcgagctatcaaccacaagcacgataataacggacatagacgtcctcggggtaaaaatagactctgcaggaagacccaagagagttatctttgactgcaaaacccttggaaaaaccagcccaattaatcgcgcattctgggcaggcggcctaatgaattttgcctcatgcgatgaagcattcattattctcagaaagaaggcctccgaagcccatagactgtcagcaaagcagataaaagttcatctttttgatgagacacaattcaacaactacggcgagtcctgctcggtagactttaagatagactattgctattcaagcaatatcgacagctggatgtccctttatgctgcaagttccggaaacccaagcctagagcaactctcaggttttttacacaatgaagtacccatagaaaaagatgcggtaaaagctttaagaaaatttctcgcagccatttcaaaagaaaagggcgagtttgatccagcaaaacccaagcaccaagcattattttattattcagtttcaatttttgccttcctgctcgcgcaaatcgttcacgaccttcgaaacattgttgatttcgatgctggagaaaagcagttcgaaaccatactaaaatattacatatggggcgggagagacagttttcttattcgccaaaagatggcagagcttttcgctaacagccgagagggaactccaaaccaagagccagaattaaaagaatggtcttcattcatgctgcttgttagaaaattactcgactcacctgaagacattcaaaaatgcatattcccacttcgggaattttcattcatgtgccttacagagaacaacattcaaaaaacaaaatacactgccgaccacatcgacaacaacaatagaataagacaattctccatatcaatggcaaaatacctgaccgactcgctcaagctacctagagactttcacctcgcactagaaaataaatttaacgagctacggtttaaatag

SEQ ID NO: 348695 - DNA, 1281 bp, Pseudomonas aeruginosa
atgctaagaggaagaaaactaattgagctttctcacgatgtccaatcgggcttgggaaggatcgacgtgcctgattttgacagactaaaaaccatgggcatggctgccactcttgcgatacaccttcgcgggctccctgaaataacctacgaagtccttagaaaagtaagtgaccatttcttctctataccctcatactctttaaaagaggttctagaaatcctagctgaaatagaatacgttcagctagttaaacgaggctcgactatcgagtccataatcccagacgtaccacatttccaagatctctatgatggcgtagggaactacttttcattctcagagctaaacgaacacgagcaaggcactctactaatactatccgagctgcagaaaaaaccggaaaacagagacaagctaatatctcaaattggaatagagagcgaactccttaataggtgcttgcacatcggcgaaactggaaattacttcaaagaattcagagctagaggcagaaacataattgcgagccccttttatttttctgacaacctcgatgaacttgtcgatgtaaccgccaaagttggagctgacgacatcgccgtcgtccttgatgttataaaaagcaaccagggatggccgctttcattgattcaaaaaagatcagagctgggtggaagaaagctcacctcagagcaggcaaagctacttactcacctttgtagtgaaggaattttaaagccaccgtctattgaatttaagaaaactagagaaactttcgtattcacgccgcgcccaggcggctctcgcatggacccatctaaccgggaaatatacgaacgtgccatggcactagtatcgtgcgtgagaaagggtcagctattagctgagcaatatcgaataaaaatgcccgttcgtattttagaagtattgcgtgaaaaaggacacataggctccaattcagaagcaataaatcaatatagaaacttggtattccttcgcgtaggaacacttaagcatgtatcgggcagcatgtaccaattccacttaataccggaaccagaaaacaaagccgctctagatttagctattaatctactgagaacaggagagctggcaaatttggatgtacaacaagacgcgcgtctagcgctctccaaagatgaaaaatacatccagtccataatctccgcggcagagcttcggggtagagtgcaggttaaactaaacgctgatagtgcacagcagtttgaacaactcatcttctcatacgacgaataa

SEQ ID NO: 348696 - DNA, 189 bp, Pseudomonas aeruginosa
atgccgggctttttcatttcctccgagagaggacggcgccgggaagcgttatcgccgatcctcgacatggatcaccgccaaggcctcggcatcctcgccccgccgggagcgtccgtgcatgccgacgagcagttcgccggcgtgccgccccgtaccgctccccactcggccagcaatgcccgcgcctga

SEQ ID NO: 348697 - DNA, 621 bp, Pseudomonas aeruginosa
atgcgtgcgatcgatgccggcattctggtctgcgacgaatgccatcagctcaaccgtatcggcgaggagcaggtgccacgttgcggtcgctgcggcgcgaagctgcatcctcggcggccgaacagcatcgcccgtacctgggcgttgctgatctcggcgatgattctctacgttcccgccaacctgttgccgatcatgaccgtcaacatgctcggcaagggctccccggcgaccatcatgggcggggtcgtgaccctgatccaggccgacatgtttcccatcgccctggtggtgttcgtcgccagtatcgtcgtccccaccttcaagctggtcggcatcgccctgctgctctattcggtgcagcggcaccagccgatgtcggcccgccagcgaatcctgatgtaccgcttcatcgaatgggtcgggcgctggtcgatgctcgatatcttcgtcatcgccatcctcgtggcgctggtcaatttcggcaacctggccagcatcgaggccaatctcggcgccgccgccttcgccagcgtggtggtgctcaccatgctcgccgccgtgacgttcgacccccggctgatctgggacaacaccaatctggatgacgagaatgagtga

SEQ ID NO: 348698 - DNA, 195 bp, Pseudomonas aeruginosa
gtgaaacccgatggccgcgaaggcctgaccgccctcggcagctatccggtggtcaggctgggcgacgcacgccgcaagcgcttcgagatcaagcagcagctcgccaacggcatagatcccatccactccaagcaacaagccaagactcaggccgtgatcaacggtcgcaccttcgaaagcgttatgctcgactga

SEQ ID NO: 348699 - DNA, 975 bp, Pseudomonas aeruginosa
atggtacccaggtgggcgcccggccacgccaagactgtactcagccggttgaagactcacgtattccctttgctcggtgccagagcaatcgttgagttggacacccacgacctcatgcagccactggaggccgtgacgaagcgcggcaccatcgacgtggcgctcaggatcaagaactacctgcaaagcatcatgcgcgaagccaaacggctgcggctgatcacggcgaacccggctcatgacctcgatggctcgatcaagacaccacgggtaactcaccgacccgcactacccctatcgcgactcccagagctattggcatgcatcgaggactacagaggtcgcccgctcacgcgcctcacggtgatgctgtcgttgcatgtattcgtacgctccagcgaactgcgcttcgcccgttggaacgagttcgacctcaagcgcggaatctgggaaatccccgatacccgcccggcgctggacggagtgcccttctccacaaggggtacgaagatggccggtgacatccatgttgtacccttatcgccacaggctgtgaccttgcttgagcagatccacacgatcaccggcaagttcgacctggtgtttgcgggggatgccaaaccgtggaagccaatgtccgagaacacggtgagtgcggcactcaggacgatgggttacgacaccaaggtggatatctgcggccacgggttccgagccatggcgtgcagtgcgctggtcgagtccgggttgtggtcagagacggctatcgagcggcagatgagccacaaggaacacaacaacgtgcgcgccgcttatccccacaaggccgagctcctcgaagaacgccggatgatcatgacctggtggagccggtttctggaggcgaaccgcgaggaccatgtgacgccgcatgagtttgccaagcaaacgggcgagaacgtcacgcgccttcgcagtgccaagaggaccgagtaa

SEQ ID NO: 348700 - DNA, 981 bp, Pseudomonas aeruginosa
atggcattggtgggtagacgcgatggccgtaatttcggctacggcaggcaattgagctacgcaggtccgcaggcgctgaaagacatgttcggcggaggccactacggcacggtcaaggcacactgtgatcggtggcaggcattcgtcaaatggtgccgttccgaacaggggcctggcattaatgatgcgcggcagattgatcgaaaagtgttggccgactatgcggcgtatctgcgcgacgtggttagccacggtgatctcgccgtcaacaccgcacaaaaccggctatccagcgttaataggacagtggcggcgctgcgcggtgatcagtgtgtgaaattgcccagtccgagcaaggcgttgggaatgcagcgccccggggtccgccgctcggtaccgcagggccaagaccgcgatcaggttaaagagatcgtcaatgcgctttgccgaaatcatcagcaacgggcggccgcgattgtcctgttggcgcgagccaccggcatgcgcttgcgtgaggctatcttgactgacctgccacggttgagccgtgaggctaacgccataggcaggattaatattcaggacggcacgaaagttggtcgcaacggagcgtcggcgccacgctggattgcggtggacgaccatattcgaggtgcacttgggtttgcacggcaggtgtcgcttgcggggagccgcaacctgattgcaccagacgaaagctacctgaatcttttgcaaaaaatcatccgcccggcgcgggacatcctgcatggccacaacctcaaaggcttccacgaactgcgagcggcctacgcttgtgagcgctatcagcaaatcactcatcaccgcgcgcctgtcaacggcgaccaatgttgccaggtagataggaaccttgatcgtgaggcccggtggcaaatcagctgcgagctagggcacggacgcatcgacgtggtcaccgcctacattggtggccgggcatga

SEQ ID NO: 348701 - DNA, 1107 bp, Pseudomonas aeruginosa
atgatgaaccagttccgaaccgaaccagatgccgacgcattggcagaggtgattggggcagaaccagcagaagcaccaccaccagcgcctctgacaatatttaatgctgtggttcaaaaggttgactgtaaaggtcaagtactcggcgagccgttttataggacaaacgaagccgatattaaggcttaccttacaggagtgattcgcagcgtagtcagcatttcgaggagtcagcgctttcagttttgcgataaaggctttgactccaaagaggatgtagcgcaactaacatccgctgattttaaaacttcagcgctggcatggaccgagcggttactagactgtgaaattgctgcgcagaaaaaaattgtcgccctgaaaaaagagctgcgtacgggaagcttgctgtgtgcgcattttaagcttgcagagaccgagcatgtaatgcttgtgaaaattgatcatgcaggttttttagatgaagtaaattttcagcatacttcaggacttccggagaagcagcgggcgcaaaaatgtgcaactttttcagtgataggcggttcaattgataacacagtgatcatcagcgatagtaacaatacgttaactgaatattggtggagtagcttccttaatctcaagcctttatccgaccccgaactaaatacatttaaagcattcaaagctattgaaggctttctgaaaacaaaaatagaaaaaacttcgcccagtgactactggacattgcgcaacgcctttgttagctatttcactactcgtcctaattgcctctttgaccaaatgatcgatgagatcatgggggggtatccttgcgctgacgaaagtttgaacatgcctaaactggcacaggaagctaagctgctaccgaagaaaaatgacttcgattcgcattttgcaattgccccacacataatcagcaataaaattaagcggcagattcgtcttgcagagaacctagatcttcgcattaatggcgaaattgcaaactacgaaaaaatgttttccaccggagacgacgacggtcggaaatatctaaaaatttactccaacgaaggttacgacgccttcaaaaaacgagatagctaa

SEQ ID NO: 348702 - DNA, 1470 bp, Pseudomonas aeruginosa
gtgattttctcggaagtcgccaatgccctggcccagacgattattcacttggagaccgaagagaccaacaccacagttagtgaaaattttcgaatctccaactttagtctagacaccactgcgcttgccgagtccctaaaaagcgtacatatccgggatagcttttccatccagttcacttacgccggtagtgatcaatcgatagtgctgacgggccgccacaacgatcaggtaactactttctgccggatgttaaacctgcacattgatggcgataatacagcgtcggggatcttatccatatccatcaccaaagactttgtttcgcaaacggcctcaatctactcgctccatcatatagaggaatattggcggttgggtgggctaggccaagcagctgcgaaactcagatccctcgctcaagtagcctatatcctcgagtcgcctaaaatcaccgagtgcgcacggtgtggcctgtttgtgttccgttcgatgagtgactctgccgcaaccaccacgcatcctgaatctgcggacaagagcaagctcctggcttcccgcgacaaggcgtgtttattctacgaaagcaagtcctatcctttcattccccaggactttgatttcaccacccctctagctcatgtggggattacaaacctatttgatactctcaagctcgctttcgctatcattttcatagctgacgttagcagcttgagcgagcagaagttaacggcaacaattaaaggctacaggcacataactggcacgataaagctaacaggcacgtctgacgacaagatagcggctacttattacgaaatatatttgtggacctacagtgaaggcggcgtgaccgataaactcggcattgccaaaaatttactatccattcacattgaaaaaaacgatttgcgcgacatgcgtagcggcgcgctgcaagcgatggtttcaaatcacagcatctatttgaaagaaaacgtaaaacaatatattgaaattaagaataagctatccgaacaaatccagaaacaatctgaaaaagcaagcgaaatggtgaaatccatcggtagttacctgaggacttctgtctttacagtttactctttcatcgttaccacattcataattagatccttatctaaacctgctgcagaaggaatatttacgactggaatttactatatttttttgatgtttctctttctgtcgctggggactctcttctatgcttacagggaatctgaggcagaacttgatcgattcaaggcaatatatcagtcatttaagacgcgctatgatgacctcctgtcaaatagcgatagagatcgaattttacagaacgatactgacttcaagcgtgactgcgactatatcatccagtcgcgtaaacgtgctttgattctctgggcttctacacttggcgctgtattcttatttgtttcgataatcaagctgctcaactactag

SEQ ID NO: 348703 - DNA, 852 bp, Pseudomonas aeruginosa
atgctgacaaccaacaaaatcccttatgagtttctgcatgatatgcttgatatatttgagcatcaatcgtggactaaagagctaactcacgaactgaccgatttatggaatttgtgcgagaagcgcgaagagcaagaactgctgaaatccctgattaaagatttttgcatcttcgacgccaagatggaaaagcaagctcaaatagcaattgatgacaaagtacaagaactgggattaagacctaaatctacatggattgttggtgccgctaatagatctgaaattgacggatcttcggcagcgcttcaaagactaaaaaacaaaattgaaccatgcgaagaatggcattctcgctttctcccaaacatcccagaagcggttgaaaaagtaaaggaagggcaaacagtcatactgttcgacgattttatcggcagcggtaaaaaaatggttgacaaaggcgcatggcttcgcaaacttctcgccacgaaagaagtaaacgaattcaagatgatttatatgtctctctcagctatgaaatttgggcttgaccgaatagttaaagacacagggtgcgaggcattcgctcataatattttacagaaagccatctccgaaaaacatccacccgcacaagctgcagttctcattgagaccatgagaaaaattgagtccagacttgacgagacctatagacaaaaatctatcaaagagtactcattagggtttggtgaaagcgaagctttgtattgtgctgaaaacgacaactgcccaaacaacgtttttccggttttttggtggccccgtttaaagagtggagctccatttaaaaccattttaagacgagccggatag

SEQ ID NO: 348704 - DNA, 915 bp, Pseudomonas aeruginosa
  misc_feature (413)..(413): n is a, c, g, or t
atggccctagagcttgaccatactcagtccctaattttgccgcgagcaattgccaggccagatttattttatagattcttttcgatcccaaagagaactgggggattgagaaaaatccgggctccttaccctgcccttgcatctatccaaaaaagaatactagattgtctgctggcagaaaaacatgtgcatcacctttcgtttgcatatgttaaaaacaagtccgctatagacaacgcaaaagtccatttaacaagcaaggaaattctgaaattagacattcaggattatttccctagcattgatagtcaaatggtaattgaagcacttatgcggaatggatttagctccgcaacagctttctatatttccagactttgcactgtagatggcgctctgcctcaaggtgcatncaccagccctatcttaagcaatctagtattcaaccccatagacaataggctagccaaattggctgagcgcctaaatttacgatattctcgttatgcagatgacatcgtaatttctggcgaaagagttcctagaaaccttataaatctaattaggaaaattctgattgagcgaagattttctctcaatgaaaaaaaatgccaactaaagctttccggatcaaagaaaatcattaccggagtttcaatctcatctggagtgatgaaagcgccaaaggcatttaaaagagagctaagatcgcaaatcttcgcacttgaaaaatattctggcgacttatctaagctaagagagtttgatcctcttttcttcgaaagggttgtaggaagattaaactatcttttacagatagagccctacaacgaatacgcgagaaaaaagaaagccactatctgctcttaccatcaaaaattattgggcctgcaccctatagcacagccacaatag

SEQ ID NO: 348705 - DNA, 1080 bp, Pseudomonas aeruginosa
atggcgaagtacgtaatcaaagacgatgattctgcgttaaagctgctcgagagtttgttgaaggactctgatttacctttgcctgaggtcgagtttaaggattggcctcggtttgaaatgcacgtaaagggggagcgctaccactcgacaattactccagagttgatggaagcatttctggatttgcaaaagacgatcaataagtcgtttgctctagttcgctatgctgactctagccgtcgcctgacgaatgctgatcgtgaagagctgaaaattcttgtccatgtcgcggagggcagttctggctttgttgcaaagcttgaggagcaggctgagacgcttgcgaaagggatcgctgagggtttcaagactatggactccagacataaactaatagcgcttcttgctatcggagttatgggtttcggccatcttggttttagtaactatctggaagctcagaaggaaactaggcaggcggaacttgcaaaactagaatccgacgctgagcgggaagaacgccttaaaacgctggaactcttcaagggcatggacgaggctcaggcgaagagaaatgccgagttgttcaagatggttactgaaaagattcctcaggtccaaacgatctcagagcatatggctggaacctacgataagcttatttcgagcaccactgattcagattctgtagatcttcatggtgtaaaacttccaggcgcatttgttgatgagcttagtcatacaccgagaaatgttgcggtttctgaccgtattgctagcgtttatcggataagaggagttgatcatcgttcaagagaggaatataagctaactctctacgatgttgtaaggaaagttgaaattactgcgacgctccccaaagatggttcgtttgttacggatgcgattcttgatattgttcaagaggcggagtggggtggaaaggtcgttctgttgcagttggctacaaagacgcgagcagggaagcttattaaggcagaaatcgaaaaggttactcagattactgaccaagactcgtacgcggaagagacgagcggccccgaaaccgcttctaaatga

SEQ ID NO: 348706 - DNA, 1008 bp, Pseudomonas aeruginosa
gtgatcgaattccacgacgtccacaagacctatcgagttgccggtcgggaaatccccgccttgcaaccgacccgcctgaacatccaggccgggcagattttcggcctgatcggccattccggtgccggcaagagcaccctgctacgcctgatcaaccgcctcgaggagcccagcggcggccgcatcctggtcgagggcgaagacgtcaccgccctcgacgccgaaggcctgcgccgtttccgccagcgcgtcgggatgatcttccagcacttcaacctgctgtcctcgaagaccgtcgccgacaacatcgccatgcccctgcgcctggccggcggcttcagccgtgccgaagtcgatgcgcgggtctccgagctgctcgcgcgggtcggcctgtccgaccacgcgcgcaagtatccggcccagctctccggcggacagaaacagcgcgtcggcatcgctcgcgccctggcctgccggccgagcatcctgctctgcgacgaggccaccagcgccctcgatccgcagaccaccgcctcggtcctgcaactgctggcggaaatcaatcgcgagctgaagctgaccatcgtcctcatcacccacgagatggacgtgatccgtcgtgtctgcgaccaggtcgcggtcatggacggcggcgccatcgtcgagcagggcgatgtcgccgatgtcttcctccatccgcagcacccgaccacccgccgcttcgtgttcgaggccgaacgggtcgacgaagacgagcgtcacgacgatttcgcccacgtgccgggtctcatcctgcgcctgaccttccgcggcgaagccacctatgcgccactgctgggcaccgtggctcggcagaccggggtcgactacagcatcctttccggacgcatcgaccgcatcaaggacacgccctacggccagttgaccctggccctggtcggcggtgacctggaagccgccatgagccagttgaacgccgctgacgtacatgtggaggtactgcgctga

SEQ ID NO: 348707 - DNA, 165 bp, Pseudomonas aeruginosa
gtgagcgggacagccgcgctcgtggcggcgcctcgcatgccggcagccggtgtgctcctggtcgcgggcatcctgcttgccgcgctgacggaggcgatcgccggcaccgtactggcgttcggacgcagcgacatcatgggcgatgcccatgccacgcccgactag

SEQ ID NO: 348708 - DNA, 1266 bp, Pseudomonas aeruginosa
atggcgattgatgcatatgtgggcaagcctggacacggtaaaagttatggcgttgtcgagcacgtaattatcccgtcgctgaaacaagatcggcatgttgtgacgaatatcccgctcgaagtcgatatgttgctgatggactttggcgggactattgaacaactgccggaagactggtttgagcgtgaagacttggccgatttcgcgccgcctggttcggtcctggtgcttgacgaattgtggcggcgctggcccaagggccagaaaaccaacgatgcgccgatggccgacaagaagctgttggccgagcatcggcaccgcgtagacaagaaaaaccggtcgatgcgggttgtgatggtgactcaggacctcgaccagctcgccagctgggccactctgttggtcgaaacgacgtaccggatggtcaagaagtcgaagaccatgttcagggtcgatatctacaacggcgtggccaagggcgacagcccgccgaagtcgaagctgctgcgcagcacagccgggcgtttcaagcctgacgtttaccggtactacaagtccgctacgcagtccgaaacgggcgctgtcggcgatgagtcgaaggccgacacccgtggctcgttctggcgatcctggggcttctgggggcttgttgggctgattgtggtctgtctgtcagtagggattcccggggtcgtccggttcttcacgccgccgcagcccaagcaagcgtcggcgccgactcccgcggctaaggtcgttgaacaggcgcagccggtggcggctcctgcggggcgtgcgatgcaagcggtctacggctcgtcgtcgaatggacctgtgccgtcagcgatctggcggattgccggctatgtgcatgcgggcctgggcaaggctgatgcgtggccgtccaaggatggctacaacgcggagccggatcgaccgatcagcaagacgtcacgcgtggtgctggtgtccgaaggtggtcgcacacggttctggccgattgagaaatgccggttcttcgaacagacgcccgatttgtattgcgacatcgacggcgagcgtgtgacgttctggacgggccgaggggccgtatcgactgtgatggatgcgacaagcaccgcgagcggcggcagccagcgtagcgcagcgtccgccgcgaccggtgcgcaggtgcagaccccgcattcgtttcagccgcagcctcagcagcagggaacccgcgtgaccgttgttgctgatagcagccgttcgccccgcacgttgtga

SEQ ID NO: 348709 - DNA, 360 bp, Pseudomonas aeruginosa
atggaaggcattcttagtgctatcaaacaactgattcaaacggcgaccgatttcttccagcgcgcacttaaggcaatcgaagacttctttaagtgggtgcaagatgcgtttgattatttttgggaactcctgacgacgtttccgcagtttgtatttcacgaacttgtctccggtattgtgaagttcttccagtggctgccggtgccggatttctttgtgcaggcaggtaacgcgttccagtcaataccgccgtcagtggtgtatttcgccaatgcattccagattggtccaggcgtgactatggtcctgggcgcgtatctgctgcgattcattctccggcgtatcccgattatcggttga

SEQ ID NO: 348710 - DNA, 339 bp, Pseudomonas aeruginosa
atgctgatcaaacttcccgactttgacgacgatctggccgagcggctgaagagtcgtactggccagaacactggctccaaggctgtgctgcgtgctgctgaggagtatttgcctcttctgctgaagctggaacatcgcgaccggcagattgccgagcttgaagagcggttgcgagtggcaagtcaggtgatcgagggcgctcgctcggctgctgcgctgctgcttgaaaagaccgctcagggcgatttgctcgccgctccggcatcgagcaagccgcgtatgaccggtgaagagatgttgaacgaactgcgccgcagtgcgggcttgcgtcagcgttga

SEQ ID NO: 348711 - DNA, 810 bp, Pseudomonas aeruginosa
atgatgtggatgttcgagtggctgtgccgttcgccatcggcaataagcgagcagcttcagaagctggaagcattccttggtgtgaaactgctggtgcgcagcaaaaagggagtaacccttacccccgcaggcgaaagacttcatgcacatgcccatgatctactgactcgcagcagccaggccgtggacgatgcccggggagagaatctggacggagagttacgcctggcgatcacggactacttccgacctcacgaaatcccgaggatgctggcatggttgcgcagccgttaccctcgattgcggctgcatgtctcgatgcgcaggagcttgcagatcgaacatgggatcaaggcaagtcgtttcgatattgggctctccatgcagatcatcgacggcgatcgccaccctgagggcattacggtgcggcgcgaagccctccaatgggtcgcggccaaggagttcgagcatgatccgaaaactcctctgccattgctcgcactgaccgaaggatgcacgctgcagcaccatgtacaacaaagcctgcaaaaacatggcgtgccatttgtagtcgcacactccgcttccggcgtggccggtttgcaggctgcgctatcggcgggcttgggtgtcgcctgcctgaatgcctctgccattccagacggcgttgttccctggcgcgcgcgctgcgatcttccaccagtacctgatgttgagttcaggctgctcggcccatcctccggagagtcggatctggttagggacatgcgccaacggttggccgagcacttgactcaccccatcgtttag

SEQ ID NO: 348712 - DNA, 834 bp, Pseudomonas aeruginosa
atggagtggtggactgctttccaggcgttcatcctgggcgtcgtggaagggctgaccgagttcctgccgatttccagcaccgggcaccagatcatcgtcgccgacctcatcggcttcggcggcgaacgcgccaaggcgttcaacatcatcatccagctggcggcgatcctcgctgtcgtctgggagtttcgtggaaagatctttcaagtcgtccgtgacctgccgagccagcgccaggcccagcgtttcaccgccaacctgctgatcgcgttcttcccggcggtagtcctcggcgtcctgttcgccgacctgatccacgagtggctgttcaatccgatcaccgtcgccctggcgctggtggtgggcggggtggtcatgctctgggccgagcgccggaagcatgtgatccacgccgaacacgtcgacgacatgacctggaaggacgccctgaagatcggctgtgcccagtgcctggcgatggtccccggcacctcgcggtccggcgcgaccatcatcggcggcctgctgttcggcctttcgcgcaaggcggccaccgagttctcgttcttcctggcgatgccgaccatggtcggcgccgcggtctattccggctacaagtaccgcgacctgttccgccccgaagacctgccggtgttcgccgtcggcttcgtcacctcgttcgtcttcgccatggtggcggtgcgtgccttgctgaagttcatcggcaaccacagctacgcggctttcgcctggtatcggatcgccttcgggctgctgatcctggcgacctggcaattccacctgatcgactggagcaccgccggcgaaatgtga

SEQ ID NO: 348713 - DNA, 708 bp, Pseudomonas aeruginosa
ttgcatatcgtgatcgttgatgaccacgaggagatcaggaccttgctcagtcgttatctgagcgagaagggctttcacgtgaccactgccgaagatgcgcaaatgatgcgccgcctgttgctgaagaacaccccggacctgatcgtcctcgacatcatgatgccgggtgaagacggcctgtcgctgtgccgatacctgcgcgaaaacacgagcatccccgtcatccttctgacagcagtgtccaccgacattgaccgaatagtcggccttgagatgggcgcagacgactacgtcaccaaacccttcaatacccgcgagctgctagcccgaatcaaggcggtcctgcggcgggctaacaacctcccgccgaaacagcagcgcccgaaggcccagcaacttcgctttggtccctggatcctcgacgtaagcaagcgagaacttctaaatgagggaggtttggcgacgccattgagcagcgccgaatatcgactgctgatggttcttctcgatcacccccagatagtcctgacgagagatcaattgctcgatctcacggttgggcgggacagcgacgtcttcgaccgaagcatcgacaaccaggttagccggctacgcaaaaagatcgaggccgatcctcgcaatccggaactcatcaagacccattggggcggcggttactgcttaaccgtagaggtccgaacggtatga

SEQ ID NO: 348714 - DNA, 1506 bp, Pseudomonas aeruginosa
atgagcaggttctggaccaagagcctcgcggcgcagatcatctggttcatgcttcccatcatgctcctcgcgcagagcatcggtttcatcgtcactgccgaccagcgagcggcggaactccgcgagattgcgctggatgagtttgtggttcgttcggcgacggccgctcagcttatcgaaactacccctcttgcataccaggacgacttgctgaaggccatggggaccaattattcccgcttctggctgaccaccgcaggccctgaaaacctggacgcatggagccgctacgcctggcatcaactgcaccttccacttcggcaagacttcgccgcttcctccgatgtgtcgaacggcccttggggatcggacaacggaagcgatgacgcgtggggtacgacgcgcagcccggtgctgcagtccaccaaccctatccaggaggcccagtggcagccgatcgaactcaacgcatcggaacggccaacgcctgcgcagatcgtgcgtctggatgacaattacggtgccgggctggtggcacggctacccaatgggatgtggctgaacgccgcctatgcgaagccccccaagaaattcatatggctctcgccaactaccgtttcactggttatcacagcggtcatgctgtcggtgcttgcggttgtcgtggcccgccgcattgcccggccgatgcagcgtcttacttccgcggcagaatcgctcggtcgcggcgagcagaatggaaggattcccgaggaaggcccggacgatatccggcgcacagcggtcgccttcaaccagatgcaggaacgcctgtcccgattcctggcagaccggacggcaatgcttgccgccatcgggcacgatctgcgcacgccgatcacgatattgcgtcttcggacggagttcatcgacgatgaggaaacgaagctgcgcctgctcgacacgatcaacgaaatgcaggccatcaccgacgccacgctcgagttcacacaagaacaatcgatcgatgaaccgaccaggccagtcgatatcgccgccctggtcgacagtatttgtgcagatctcgcagatctcggccgcaatatccatttcacagaccgtggcatcatcccttatcgctgcaggcccgcggcacttcgtcgagcggtccggaatctgatcgaaaatgcactccgctacggagatcgggccgaagtctcgataagccattcgcctaccggcgtagacatcgagattgaggacaacggcccgggtattccggaccaagagattgaacgcgtgtttctacctttcgtgcgattggagcaatcgcgtaactcgcgcaccggcggcataggtctgggacttcctatagcacggaccatcgtgcgggcccacggcggcgacatcattctgtgcaacatgcccaatggattgcgagcggtggttcatttgccaccgatctccgacgatttgccgcagacttcgacagccgcgcaatttcccctgggccgcagcgcgccatag

SEQ ID NO: 348715 - DNA, 471 bp, Pseudomonas aeruginosa
atgcaacgactcaatgtcaacggcactgatcgtagtgtcgaagtcgaggcagcgaagccattgctttgggtgctacgcgaagacttgggactcaccggaacgaagtatggctgcgggatcgctcagtgcggcgcctgcacagtccatatcgacggcgtcgcgatgcgctcttgcattctgcccgtctccacgatcgaacagtcccggcgcatcgtgacgatcgagggcctatcgaaggacgcctcgcatccggtgcagcgcgcctgggccgagttggaagttccacaatgcggctactgccaatcgggaatgatcatggcggcagcagcgctcctcgatcagaacgccgagccgtccgacgaggatattgcggcgagcatgaccaacatctgccgctgcggcacctataaccgagtccgagacgccatcaagctcgccgctcgcaacgacagctcgtccaatcgcggctga

SEQ ID NO: 348716 - DNA, 2151 bp, Pseudomonas aeruginosa
atgattacgctatcccgtcgccggttcatcgtcggttccgccactgtcgccggaggtttcagcctgggtttcaacctggccggcgcgcaggccgatacggcggcaccagacgaggtaaacgcctggatcgtgattcaacccgatgagacggtcgttctccgaatggccaagtcggagatgggccagggcagcctcacgggtctcgctcagctggtggtggaagaactggaatgcgactggtcgcgcgtccagaccgaatatgcgctgccgagccgaaacattgcccgaggtgacgtctggggcgatctcagcacgggtgggagcggctcgatccgggaggaacatcagcggctgcgccaggccggagcaacggcgcggctcatgctggttgccgcggccgccagagtctggtccgtcaatcccgatgagtgcagcgtgtcccgtggcgagatttttcaccaggcatccggtcgcacaattacctacggcaaggtcgccaggctcgcttcctccctacccgttccgaaagatgtaaggctgaaggatcccggcgaatggcgtctcatcggtacgtcagcgcgacgcatagatactgccgacaagctgactggagcgcaggttttcggcgtcgacttcaagttgccgggaatgctgaacgcaacggttcgtgcctgtccgatcgagggtggccgagtgaaaagcttcgacgccgaagcagtggcgaaaatgccgggtgtgcgccatgtgctgcagatcgacgagacaactgttgctgtcgttgctgatggatggtggcaggcgaaatccgccatcgaagccttgccgatcgagtgggagctcggcccgaatcgcgacctcaacagcgaatcgattgctgcgatgctcgacgccggcctgtctcgcgagaaaggatttgtggggaatgagatcggcgatgccaggtcggtacttacagacgcgacggaaaccattagcgcgacctacagctacccctaccaggcgcatgccgccatggagccgctcaacgcaaccgcgctctacacccgtgacaaatgcgaggtctgggtcgcgacacaaaactcgacctcatgcctggaaacaacagcctccgccagcgggctcccgcgcgaaaggtgcgaagtctatcggctgcacctcggtgggggcttcggacggcgtctatataccgactttgtgcggcaggccgttctgattgccaaacaggttccaggcacgccgatcaagctcatctggtcgcgcgaggaggatatgacccatgacgcctatcacccggtcaccaagtccagaatgactgctgcattgaatgaacaaggcgagctgaccgctttgcatatgcgcatcgccggtcagtcgatccgcgcagtttgggcgccacaccgactagtcaatggcggcacgggtgatccgcatgtcttccacggcctgacagaagagacgctcggctattcgatcccgaacctcttgatcgaccatgtcatctgccagcccgccatcactcccggctcctggcggggcgttcatctcaaccagaacattatctacctggagtgtttcctcgacgaagttgcgcacgctgcgggccaggatccactcgcctttcgccaggcacttctgcgagagcacccgaaccacctggctgtactaacagcggctgcggagcgagcgaaatggtcaacaccgccagccccgggggttcatcgaggtctggccgttgcgatgggctatggaagctacgtcgccgctgtcgcggaagtatcggtcaaggatggccgcataaggattcatcgcatcgtcgcctcgatcgaccccggccatgtggtcaaccctgaacttgtcagacggcaggctgaaggttgtatcgccttcggtctctcggcctgtctctatggggaatgcaccgtcgagaacggcatgattgagcagaccaattatcatcagtaccaggtcatgcgtctcgcagatatgccaatggtggataccgtgatcatgccgtctggcggcttctggggtggcgccggtgagcctgtgatcagcgtcgccgcaccagctgtgcttaacgccatctttgccgccacgggccagaggattcgtgaattgccagtgaagaatcacagctttcaaagcacctga

SEQ ID NO: 348717 - DNA, 309 bp, Pseudomonas aeruginosa
atgcaaccgagcattgaagatttcaaaaaatgggaatcgcaattaaggcccgttgggtgggttttgtccggtctcagctttgccctagctctgtggctttccttgtccattgtcgaggacatggcggcattgctaagcccaggtggtgagggctggtggcaagccggggcggtcttgtggtcgatagtcgttaccgctttggtggtcttcccggtgctgttcggtggcagcgagatcgaccgactgatcgcggaggtgaagaaggaagaagcggcacggaagggggaagagaatgacctccaacactga

SEQ ID NO: 348718 - DNA, 966 bp, Pseudomonas aeruginosa
atggatgagtctggcgaacttaagattgaggtagcagacagtctatatacattcattgactctgctttacagagcatgattctgaccggcatggcaaaagtcatgctggtcatgggggggatcttcggaactttttggcttgttcacttgatgcttcgagctattcggtggctctggacagggctagatgtaccgtttcaggaagtttccatggaactgataaagatcgcttttttgatttcgattgcgttcagtgtcggctggtattggaactggattgttccagttgttcaggggctgcctctttggatggcgcaaaacttatcaggaggggagggaagatttacaaaccaagttgaccaactgattagcggcttcttcagttcagtcatgaaactggttggggcgtttgagtttagtcctattagtgatttctcaaaaaccctatttgccctgttgaccattatatatatgctgcttggcggtataccatttttgcttgtggcagttggcaccttggtgactttaaaagtcagtaccacggtgatcttagtagtgggtccgctgttcatcgccttcgccatacttccacagacacggcaatacttctatggatgggttggtgtgctgggcggtttcatgcttgcccaagttctgttctcggtggttcttggcttagaaatgaggttcatcaacgagcatgtaatccgtaacggcaatatgcccagcgaccttaagggggctatttccatcttgatttacttcgcggcgtttacagccattgcactggaaatcccgaactacgcggccaccatcatggcaggggcgccgacctcagcgggtggagggcttggtggtctagtcaaacgtggactgggtctgcacccggcgatgcggatggctaaaggagtagcaggggctgggcgcagacttctgtcgagggcacgaggcaacaggatcagctga

SEQ ID NO: 348719 - DNA, 348 bp, Pseudomonas aeruginosa
atggataccctccgaaaatctatcggggccaagataaaagcgttcagaacagcccgctctctcacccaagacgagctagcatcggttgttgaaacggactcggtatccgtcagccgctacgaacgtggcgtcagcaccccgagcgttgaacaactcctcaagatcgctcgcgccctgaacgtaaccccaggcgaactccttcccgttgaccaggacctcgacagggaacgcctcattgccctccgccgggatctggccgagaaagcgctcaaaatcgaatccacaactgccctggaacagctcaaccgcctggccgactctttcctcctggacaggaaaaaatcctag

SEQ ID NO: 348720 - DNA, 1368 bp, Pseudomonas aeruginosa
atgcatacccacctgtataaattgacagcaggcggagtggttaacgttcggcacgaaattacccctagtttatgcatggccacttgctatacattggccgtgtcaacggttacgttcggcccgctacgggtaaaggcccgaaggaagaggcggcaaacgagagggaacatgagcgatagaaatacgagcgcaagcgctagcgctgcggggtactgctatcagtttgtccgtgcattgcatcgaattttccgaagcacccatccccgaacgcgcttcggtattgaaacggcagacgacgtagaggaacttgtgccaactgcttctggagtgcttcaggttagcgagcaggacaagctgaccacaggcagcaaaaacccccttcaggacagcagcaagaacctttggaacacccttcgaaactggcttgatgtgcttgatcaagcccgcctcaaatatgcccaccttcagttcgtaatcgttaccaacaagccaatagttgaaggctcgcttgcagataaactatcgatggcacaaacgagtgagtcgatagctgatgtaatcagcctgcttcgccagcaggcgtcatcaatgtcgggagagaccgccgagattgctgccaaagtagccggcttctctgatgaggcactgggatatctgatagagcgtctcaaggtcatagatgatgttggagtcggcgcgcttaagcaggaagtcatcaatgcacttcagttgcctgaaggtctagatgagtaccacgagcggatctatgaggggctcttgggttatcttatctctggatgtcttgaggtatggagcgcgggcggtcagtactggacgacagccgagactttcttcacacaaaagcacgcgttgttgaccagctaccaacagaggtcattacagccactttcgcaggatgagacggatcatgaagcttttgcgcagatgcgcagcgacatggctcttccatttcttgatcagcttcggaacttagagattcctgactggttcctcaacgtagagttggggcacttttgggcagcctattcagagcgcacgcgtctgctgaaggcaggaagtgtgctgctagatgatttcgatgtcgcagaaaaagtactttgcaaccgatggaaaagtatcattacttcaagagctcttatggttagaaggccgccagatgagctagttgccgatgatctatatgaggtatataggaacacctcaagtcctgaacgatttgatatgaaaatcgggcgcgtccagtcagaccagcgatacctctatcttggaacataccattttttggctaacgcagagggaacacggcatccgatctactggcataaacagaaggattctgagaaataa

SEQ ID NO: 348721 - DNA, 1986 bp, Pseudomonas aeruginosa
atgaaattcgtgattgatgctgttgtgctttggccgcaagacatggccaatgagattagggtaatcccatttgagagctcgaagatcagtattgttcacggcctcagcagtactggaaaatcatcaattattcatataatcgactacgtccttggggcgagcaaatgtcagatacctattggaatcattcgcgaaagggtgttctggtttggcttaaaaatcaccatgctgggggaatcatggcttcttgcgcgcaagacgccaggtgccaagcaggtgtcaggggagttttatctggagcggtttaccggggagtatcctgagcatctccctgttaagcttaatactgaagctttcaaggataagtttaatgctctggttcgcatgagtgacttgcctcactcagacgatgagaagccagggaagcgagactcgcgcagttcctatcgagacatggcagcatttaactttctgccacaacatattgtcgcaaatcccaataccctgttcttcaaaacagattcgtggcagcacaaagatcgtttgattagagccatgccttatgcattgggtattgttgacgcagcctacgtcatgaatcaacggcgtcttgatgctgctgaaaaagaacgcgatgcactgaataaggaaatgctcgtttttgataaggccaaggtgcgttggagctatgaagttgatcgcatgatggctcgatgtattgagcttggtatgctctcagcggctgaccagtccgaagtgctggaaaacaacatagccaagcttgaatctgtggtgaaagcctatgaggagagcaggcttgaacagacgctgaaagagccagacaggctgcatacgaaccgagaattcgatgcggctgtaatccgtgaggcccagcaacaagagctggtagacaacctagctgctgaaattagtgggtacagcagcctggcccttaacggacagaaattcttcgcagcgatcaatgatgagcgatcccatgtcattgggctaaattggttgaaagacagccttgcaccagaggggtactgcgtggcttgtggttcgtccacatcatcgctgcccaaagttgtggaggtgcttgagcagaaggtgaatcagattacgactgttgcgacggtgcttcaggaaaatccagtagtggatcggcagctcgcctccctaaaacggaagatgagcactgagcagaagaagctatacaacctacgccgggaaaagaatgaaatccttgtccaggacaaaaaactcaaggatgtcattggccagatttacttcatggcaggtgacatttccgggctgttggggcgcatagggaagactaaggcagatcagtcaattcttgatcggcttgctgacttggatagggagatcagacattacgagaaagagttgcagaagtcagatcgcttcaatcgggaaaaaacggttagtaatgcgctgagtaatttgatcggcgagtatgttgaccgtttcccattggaggccccgtacgactctgagatcaaactcgatctccaagaactgacgcttcgctttgacgggcctgagggtcgaaaggactacctatgggaggttggcagtggcgcgaactggatgggttatcacatcgctaccttcatggcgatccatgagtatctgtccattgaggagaaccaaggccttccaccgttcagcttcctgattatcgatcagcctagccaagtctacttcccgagcagtcctgctggggaaaacgctctggatcaaagtttcgctgacgttgagaagcaccgggcgtcagatgttctcgctaccaggaggatttttgaaatgatctcccaaggtcttgagcgcgcgcagttcaatttccaggttatcgttcttgagcatgctgggcctgatatctggaaggacgttccccatacgtatgaagtggccagctgggacaccaagggtgatggactcattccagcggactggatctcatag

SEQ ID NO: 348722 - DNA, 237 bp, Pseudomonas aeruginosa
atgatgatcgatgccgaacccctcaaaccgtacattgcagccgtcgagcaggcccgtaaggactggcagtctgtaggcgctgcctacgatgccgccccggcggagaagagaggcgagttgttcgccgtgaaattcccgcaggccgagcaagcctattaccgggcctgcgaagagctggcgtctgtagttcgcgcccaggtgaaggacgccgaagccaagtccgccgactgcgcataa

SEQ ID NO: 348723 - DNA, 192 bp, Pseudomonas aeruginosa
atggaacgagaagaaccgagcttcaatgagtggctggacacaccggagcgcgaggaacacttgcgcgacatttacttcgacgaccagctcggccctggctccgagttctacaagtgggccgagtcgatctatcggattcgtaaggccaccgccgagcagacccgttgcccgcgccgttggccgtatgtgtga

SEQ ID NO: 348724 - DNA, 255 bp, Pseudomonas aeruginosa; identical to SEQ ID NO: 326524

SEQ ID NO: 348725 - DNA, 210 bp, Pseudomonas aeruginosa; identical to SEQ ID NO: 326523

SEQ ID NO: 348726 - DNA, 336 bp, Pseudomonas aeruginosa; identical to SEQ ID NO: 338786

SEQ ID NO: 348727 - DNA, 219 bp, Pseudomonas aeruginosa; identical to SEQ ID NO: 338787

SEQ ID NO: 348728 - DNA, 186 bp, Pseudomonas aeruginosa; identical to SEQ ID NO: 338788

SEQ ID NO: 348729 - DNA, 222 bp, Pseudomonas aeruginosa
atggccgcttataccgtcacctggaccatcgatgttgaagtcgatggggatcataaggacgctgcgcagttcgttgccgacagctatttccaggcgcgcattgccgcaggagagcaggacagcgcttgcagctttgtcgtcgtcgacgaaacggatcagcaccaggtcgatattgacctcgccgatagcctttcggaccttgacggtgatgacaccgagtga

SEQ ID NO: 348730 - DNA, 228 bp, Pseudomonas aeruginosa; identical to SEQ ID NO: 338789

SEQ ID NO: 348731 - DNA, 345 bp, Pseudomonas aeruginosa; identical to SEQ ID NO: 338790

SEQ ID NO: 348732 - DNA, 291 bp, Pseudomonas aeruginosa
atgccagaacgttacaccctggagcactgggagaagtgcctgccggcgatgaaacgcctacaccccgacaccctggcgatcgcccggagcgtgtacgtggatggcgtgaagccggtcgaagtcgcgcggcaaactggacgcagcgcgcagaacgtcaactcagcgctgaagcgtgtagaaccgtacttgcagaaaggcgccgcaggccttgttttcgtcggtgtctggttaccgccagagctggctgaacaagtcaagcaaatggcagcacagtatgagcgaaacgactga

SEQ ID NO: 348733 - DNA, 228 bp, Pseudomonas aeruginosa
atgagctgggttgagcaagcggcaccgattgtccacgaggtcattcgtcgtgtcggtcgatcagacctgaaggcgttgcgccgggagttcagggaagcctatccgttcggtcctcggacgaatgctccttacaaggcctggctgtcggagattcgccggcagctgggtcaccccctgaacctgccaaagtgtgacccggaggatccgcagatggagtttgagttttga

SEQ ID NO: 348734 - DNA, 387 bp, Pseudomonas aeruginosa
atgagtgagtccaaccttgtgctgagctgtcgtcacctgtcgaccctgctgcgctatgtctaccctagtgatcgacttacctgtgcgcttgaacttcagcagatccagcaggatggccaactcctgcgcgaagaaaacatccgctctgtgcggttccgctccaggggcctggactatgacgaagggcactgcatcccattcgccttcgacggccaggccgagtcggtttctgcgctggaactgctgaagcttgccgatacgtaccatcggaattcatgtgatgcaccgggctactacaagtcgcgggcctacgaactgctgtcccggatccgcgaggcggctatcgaggatctacctggtttcaaggaagccccaggctgggtgtag

SEQ ID NO: 348735 - DNA, 414 bp, Pseudomonas aeruginosa
atgaagagactcacgctcgatgatgtgatttgccctgtctgttgcgtgttgctgcccttggacaacgacggttgccctgaatgtggtcatcaggatcagctgcagggtcgaatccccccgattcgtgcctattccgatcgattgcactacccaggcatgagggcgctcatcggccgcctgcaggagcaggctgaggccgcctcccaggaggtgacagaggaggtgctcaggcgggaatgcgtcgacctggtgaaggctgggaatgtagtagctgccgtgcgccgctatcgtcacgccaccggttgcggcttgcctcaggccaggcgacaactcggcctcacctggccctcgctgctggacgttgatcctgcggatcctgacttccttgtcgaccgtccaggggtgattaagtag

SEQ ID NO: 348736 - DNA, 249 bp, Pseudomonas aeruginosa
atgccctcccccctaccaccgttcaagcccatcacgcttgctgatctgcggcggatatgggaagcccaccctgaccccgacgtgcgccggctgactctcgaaatcgccagataccgccgcgtcatcgcggaaatagatggcctgtataccagcatccacaagtcatggcgcgataccgttggcggcgaactctgcgccctacatctactgaagggggtcatggcaaccgaacgtcagcgcctgctatag

SEQ ID NO: 348737 - DNA, 1056 bp, Pseudomonas aeruginosa
atgcaagacccgaaagaccccggaaccctggacctgatcgaggcctgtaagcggccgctgactgcggccgagcgacagaagcggcaccgcgagaaactgaagcgagaacggcaggcagggaaacgtgcggtgctggacctggggcagccagagcttgcccttttgaccgtggcgctgcgcgagttcggtgagcgttggtcacgggtgccaagcaaggctgaaggggcggcggcgctgctgtcgcgtctacctgtcgtttccattgccgaggcgtttcctggcgactcggcatggatccccgatgcccttcagcagggggacgaccgtgcgctctggcccgcacgcacgtcggcgcagagagatattggaggtttcaatggcccttacgcctaccgtcaaaccccgtatggacagcccgaggtcgatgagctggtgaagcctggcgaccaggtttggacaagctacgacagtggaccgtacaaggttctggaagtgaagcgctatacggtggaggggatgcgggtatacaccctggttatgacggcgttgaacaagcgtaagccgtcagcgtggatcaatgaacttgtcgccgtggatgggcgcctgctgaagctgttcgccaacaacacggatgaagtcttcgtcgtcggtgccggggcgctggcatccgcggcgcctctgcctgagccggtgcggcagatggaggaagagcgggccgaggcaaatgcctggtaccagacagggcggcgccttgagggcgaagtggcacatttgcgcgaacagcgtgacgcctggatcgccgagaatgaaaagctgctgggaacgatccgcgagcttcaggcggaagtgaagcggctgaacgatggcgcacttcatgcgggccaggttgcggcccggctgagggggctacaggatgaaaacggacgggtgatcgccgagcgcgctggagccttccgtgcggtcgaagtattgcaagcccggttgaaacgtcacgggatcgatgccgacttccgcgaaaccgaggacgaccggcgcgccctgctgggatcgacgtag

SEQ ID NO: 348738 - DNA, 1056 bp, Pseudomonas aeruginosa
atgtccaagtgcgagcagttcagcctattccccgaaaactttgccctaagtgatgacggattcagcgggatctgcgacgagttcacagacgctggtgatattgaccaccgcttgttcgctgcaccgcgctcgaatgagattgtgcgtctggccgacaaagtacggcgatacacccgctcacacggctggatggctatgggcgaagcccgccgccgtgtcgattcctggcgcagccatgcgctcgctcagcaccgcacccgggcaaacgaggggcgcatcgtgctatcgctgttcgaccataccggccaatggtccaggccatgggaagaggcgggctaccaggtcgtgcgcttcgatatccaggacaaccccgaaacgggcgacgtgaacgcattcggcgtgaatttcttctcggattggttcggtgacttcgatggcctggatatctacgcggtccttgctgcctgtccatgtacggagttcgctatcagtggcgcgaagcatttcgccgccaaagatgcggacggccgcaccgtcgccgccgtggaacttgtccaccagaccctgcgtaccatcgagtattaccgtccttcggtatgggctatcgaaaacccggtcggccgcatcgagaaactggctgggctgccaccttggcgcctggccttcgacccgcatcacttgggggatccatacacgaagaaaacgctgctttgggggcgcttcaatgcggatttgcccatagctccagtagcggcgattgaaggctcgaaaatgcaccgtaagtacggtgggcgaagtgtggcaacgaagaatgctcgtagtgagacgcccgaagggtttgcttacggattctttatggccaacaacgccatcgacaaccccgtgttggccgttgcaaatcggtacgaccggttggacccccagctactgcgtgtcgcgcttgatgctggcatttgtgagaaagggattgatgcccttatagctgacgcctatttctttgaactcgacgacgttgctgccgaacgagcactacggcaggccataaactgccaataa

SEQ ID NO: 348739 - DNA, 924 bp, Pseudomonas aeruginosa
atggacggcgccacggaaccgtgcaagcacgggaaagtgccggccatcggctcccctgctgcgtcaatggggagaacggaatcagtgacacgaccttatgttcagcgaacaaatcatggtggcaacttctgtggccatcagccagacgcaccgaggctggacctcatccgcccaaccaccgacaaaaacaggcctggaatcctgcggcagctccaggaacgagttcgccgctactacagtacccctaccgtcatccggtctcttcgcaatgccaaccgtagccgcaaaggtcgacagcaacgcagcgagcgccgggaggcctgcttgttgctcctcagctcgatccttgaacatacggatctcgtatcgctgcgttgcggcgttcctacgtccagcggcttcttgtcgttgacgcttgactacctcacgcgctggaccggattgcatccccgccgagctgagcgcgctatggctgatctgaaacgtgcgaatctgctcacagtcaatcagcctcgacagctgaacgaagatggctcctggcgtgggcttgctgctgtgaaggctgttaacaagcacctgttcaccgcgttcggcctcggccgccgtttaagctatgagcgcgatcgagcatcgaagcgactcgcgaagaaagtcgccgtccgtggggggacactcactggctgggcgcgtaacgtcgcactgctggtcggcggattaggcaagaagccaggccgtgcattccgttccccggctgcagatgggcctcgggtgtcgcatggaatggaccctgcgacctacgaatctgcacggaatcaactgctcctcgacctgatgactaggcacccgggtatgcctagggatgatctgtacgcagaagctgagcggatcctccaagaacgattaaacaagtccattcgcgcctag

SEQ ID NO: 348740 - DNA, 363 bp, Pseudomonas aeruginosa
atgggactgaaggacctgcgcaagcaatcagctccaattccgcctgatggcgaggaccaggaggcgcagatccaggcgttcatcgctggagcaccggtcacaacagctaagagcgtgaagaggaagcgcaaaccaaaggcaacttacaagcgtctgactttctcgctgtcggagagtgttgaaaaagacattctgaagctgtcgcgggtcccgaggacatttgcgatcaacaagtcccaggtcgtgcgggctggagttctcgccctgatggaaatggatagagcggttctcctcgctgtgctcgaaagagccgttaaaggagaatcggccgagctttccgaaacgatggtcgacgaggagtag

SEQ ID NO: 348741 - DNA, 651 bp, Pseudomonas aeruginosa
atgatactactactcggtggtgagaaaggcggtagcgggaagagctgcttggcacagaacctggctgtatggatccaggcccgcggcggcgacgtgctgttgctcgacgccgacccgcagggcactacggcggactgggccgaggagcgctctgagcaaagcgacctgaaggctatcccggttgttcaagcgcaaggtcagattcggtctacgctgaccgacctgcagaagcgctatcggcagattgttgtagatgccggcggtgccgattctgaagcgctgcggtccgcgatgacagtggcgacacacatgctcatccctttcaggccgaagcggcgtgacctgaagaccttgccgaaggtcgagaatctcgcgaggctggccacggctgtaaaccctggtttggtagtgcgagcggtcattacacagtgccctgcccttcccagccaagtccagcgaatcctagatgcaaaagaggcctgcgcgtcctttggcatacaaccgctggaggctatcaccactgctcggaatatctacgatgacgccgacgaaaacggccgctcggttctcgaatcgggatctgacatgaaggccgtcgaagagatagaggctgtggccaccgaactgtgggggaacttcaaatgggactga

SEQ ID NO: 348742 - DNA, 2022 bp, Pseudomonas aeruginosa
gtggcggggtacttcctacgccgccacgaagagaaccagatcggacctgcgcagcgccgggcgctgttgcgggtcgaccagcagtttcatgaaacccgccgcgccctttttgccgacgaacgtttcagccgccaggagaaacagcagctcctggcggtgttggcgttcgagcgtatgaaggcgcgtcagcggatcgaggagccgttggctcaaccaccagaagaggaccgcagtatgggtagtaaagagatacgcgcgttgctgagcgcgaacgacgacgcgccggagaactccatcagcggggggcgtagttcagccccggcaagggagcgcatgcagcgcctgatggagcggatgaagcaagatgtgagcaccgagaaacagcgcgagcgagcgagggagcttagcgctgccgacctctacaccaagcgggcgaggttcagccagaacgtgcattacctcgacaagcagtccgacaaaacgttgttcgtcgacaccggcaaggcgatcacgttgaggcgcgaagcgatgagcgaatccgcggtgaaagtcgccctggagctggccaaggaacgcttcggcagcaccttgacgatcaagggtagcgaagagttcaagcgcctggtcgtcgagacggttgcgaagaacgggttggacgtgcacttcaccgacaagggtatgaaccagctactgtctgagcgccgggctgagatcgaggccgaacgtgagggggcgactatcaccgctgcggacctggaacagccggagcagacttcagcctcggccgaagcggaagtggacgatcccagcgtgatcaagggtgtactgctggaccatggggacgccccctacaagcacgatccgaagcagaacatgagctactacgtgcggctgatgacggcggccggcgagaagatgtactggggcgtcggcttgaaggacgcgatggaggctcaagacttcaggctgggccaggcgattcgcctgaaggacatgggcactgtcccggtgttggtgcgtacccgggacgagcgcacggggctggaactggagcgcgaggtgcagcggcgaggttgggcggcggagccggtggcgcgttcggcaccagaggtggccgcagaggcgggccaggtcgagcgggagcccgggcaggtggtcacgctggaagccgcacataccgtggatgctgaggaaggttctgcgatcctggcgcgcgaggcgcgctgggagcgaaacagtgggctatcgatggccgaggtgggcacggcgccggcgatgctgggcatgcgcgcagaggagcatgcggtgcaggtgctctttggcgaggacggaagcgaggccggccgcgagcgggtggcatccttgatggagcatgaggcttaccgggcaaccttccagcaggtggtacgcgatcgcagcgagcggctgaaccctatgttgcgcgaagagctgctggtctcgcctggctacgcacttgcccggtcgctcatcgagcaggcggagcagcgctacggcgcagtcccggacgccgtgcaggaagcacagaaggcccagttggaggaccaagagcggcagcgacaggaaaccgactggatcgacgtggacgcagcgatcgcagcgatcgaggcccaggaccgagcgttcgaagcacagatggccagcgaagcgccctcccctgcgcctgttacccgtgacgagcgtgacgaagagcggcaatcagcgctcacgccgaaggagcgggcagcagagcagcaggcgagcccggaggccctaccggacctgcaggcgaagcacgataagaacatcgccaggcgcgagaacgaacgcgagttcaagcagtggtccaaggagcagttggccgctgacccagaacgtttcgagcagttgtcttcgaaggagaaacgggcggagttcagggagtggaaggcggcagaggctgagcgcgatcaggatctgtccgcaagtgctcctgccgaggtagaggtactggagatcgaggagactggccccgaacctgactga

SEQ ID NO: 348743 - DNA, 360 bp, Pseudomonas aeruginosa
atggcttacatacttccgaacgagcgggaagtcatcagcgaagtcctgttgaagctggaagagaaagcacttccagatctgcccctggcctgcaagacctgtccggccgcgatgtggcagatcacagggagggatacggagaaggtgaccgctcgctgctactgccgcgcgatgcatacgtttacctgggacagcaagaaccgggaggagatcctggactgcgacatgctgtacgccacggaagagcaggaggaaggactggaggaagaggaggatcgcagcgacgatctgcccccgttccttcgcgggctaagggaacagccccagggcgagatcgaacgccagcaggacgaggactga

SEQ ID NO: 348744 - DNA, 357 bp, Pseudomonas aeruginosa
atgtcggacaagaaggcggcccgtagccaggtcgtggcttttcgcgtgccggacgaaaagttcgccccttatgaacagaagctcaaggaactgggcatcagcaagtccgagttctttaggaagctgctcttagagaagctggatcaagtcactatcgttgctccatccaaggacaatgccaagttgctctttctgtataacaaggcgagcaataaccttaaccaattagcacatcgggttcacctggcctataagtctgaagttgtctccgaaagattatacctcaaactcatgaattcccttgcggcaattcatgccctacttttatcgggggtggacgatgctgattcgggttag

SEQ ID NO: 348745 - DNA, 492 bp, Pseudomonas aeruginosa
atgatgaatgaacgccagacggatgtgctggacgaggttcgcaagcgggccctagctgaactgaatataaaggtgtcccgagaggacccagtattcagcgtagtgtttgctactgaagcagtgcttgaacggatgacggagccgctggtgctcgcggtgaagcagatacctggtgaaatgggtatcagcattgagaaaatcgcgagcgccgtcgaagatgccgagcagactgttgagcgattggttgaggaggggaaaaccgcccttgctgaagtgcgagataccgaggccaagaaactggtgaaagtggttcgggaaagcctggaggggagcaaaggcgtcagccataccaagttctctatcgtgatggccctgtgtttcttcttcgcttcaaccacattgggggttggtgggtactcatactttgcggtgaaagatgcgatgaaggacgccaactactggtacacccaatataaggcatccaggaagtga

SEQ ID NO: 348746 - DNA, 756 bp, Pseudomonas aeruginosa
atgaaaaacacttctcatcttgttcttcaaggtaagggcggcgtcggcaagtcttttagcgctagcgctttggcgcagtattttatcgagcgcgggtataccgtggcatgtgctgatactgatccggtgaacagttcgttctaccagttcgcggcgcttaatgtcagcttgctaaaaatcatggaaggcggtgtgatttctcaaaagctctttgatccgctgtttgaagagcttttgtccacggaagatgtttgcatcgttgataacggtgcatctactttcattccgatgctcaagttcatcagtgacaactgtatgttgtcggcgcttcagggcgcaggtaagcagctatatattcacactgttattacggctggccaagcgaaggatgatactttcaatggcctggaacgtctcattgaaatgatacgcgccgagcaaagtaacactaaagtggtggtctggcagaatgagttttggggggttcccgtttttgatgggaagccacttgataagacagagctgatcttgggcaattcagacataatccaaggaatatgtcctgtcattgacaggaacagcgacgccttcacggcagacattcgtaatgttctagaggcacatttgacgttacaggaggttaagcagtccgaggacttcggagttattgcgaagagccgaatttgccgagtgtataacgatattttcaccgagttggacaaggtgttcggcggggaggtgatcgatgatgaatga

SEQ ID NO: 348747 - DNA, 474 bp, Pseudomonas aeruginosa
atggcacgtggagttaacaaagtgatcctggtgggtaacgtcggtggtgacccggaaacccgctacatgcccaacggcaatgcggtgaccaacatcaccctcgccaccagcgagagctggaaggacaagcagaccggccagcaacaggagcgcaccgaatggcaccgcgtggtgttcttcggccgcctggcggagatcgccggcgagtacctgcgcaagggttcccaggtctacgtcgaaggcagcctgcgcacccgcaagtggcagggccaggacggtcaggatcgctacaccaccgagatcgtggtcgacatcaacggcaacatgcagttgctcggcggccgcccctccggcgacgattcgcagcgcgccccgcgcgagcccatgcagcgcccgcagcaggccccgcagcagcaaccggcgccgcaaccggcccaggactacgacagcttcgacgacgacattccgttctag

SEQ ID NO: 348748 - DNA, 2199 bp, Pseudomonas aeruginosa
atgcggttgttcatagcggagaaaccccagctgggccaggtgatcgccgaagcgctgggcggcggtcaacgtcgaggcggcagcatccagtgtggtcaggacgtggtgacctggtgcgttgggcacttactcgaactggccccgccggaggagcacaacccggcgtatgcgaagtggaacgcggcggatctgccgctgaagctgcgcccggtgaagtaccagccgattgccggaacggcggaccagttgggggtggtggggcaactgatcgcccaggctgatgagatcgtgcatgccggtgacccggatgaagaggggcagttgctggtggacgaggtgttggcctatttcggcaacagtcgaccggtgaagcggatcctgatcaacgacctgaacgcagccgcggcacggaaggcgctgggtaacctacgcgacaacagcgagttccttgggttgtcgctgcggggccaggcgcggagcatcgctgatcagctctacggcttcaacatgacgcgggcgtacagcttggcggcgcaggcgagggggggccgaggagtgttgtcggtggggcgggtgcagacgccgatccttggcctgatcgtgagtcgatatctcgcacacacggctcacaagggctccttctactacaacgtatcggcagcgctggactttaagggtcggatccgggggcgtctgctggtcgcggatgacgctccgactgacgaaaaggggcggatcctcgaagagagttatgccaacggcatcgcgagcgcgtgtcgcggccagccgggcctagtcgtgtcggtcatccaggaagagaaatcgcaggtcgcaccattgccattttcgctgctggacctgcaggcgcagatgagccgtgaacatgggatcaatgcggaaaagaccttggcgatcacccaggcgctgcgcgagaagcacaaggcgatcacgtacaaccgctcggactgcaactacttgtccaccgagcagcatgccgaggcgccgggaacgctggcggcgctatcgcaagcactaccggagctgcggacgaccttcgagcagcttgacccaggacgtaagggacgggctttcaacgattcgaaagtgtcggcgcataccgcgatcatcccgaccgcggtagtggtggacatgaaggcactgagcgccgacgagcaagcggtctacctggcgatcgtcaggcagtacctggtgcagttcatgagcgagaagcggtatttggccgtgaaggcgctgtttgaggtgcagggtcatgtgtttgaggcgagcgcgaccaagaccacggcgccgggctggacccagttgctgcgcgaggtagccgatgaagcgagccaggccggcgaagaggatgaggacgaggtggaagctacgcagttcgaggagctgtcggctctcgctggaggggagcaaggccattgccttgatgtatctgtttccagggcgaagaccaagccgttaccgctgtataccgaggcgaccttgctgaaagaccttaagcaggtggccaagtacgtgcaggaccagcgcatcaaagcgctgttgctggaccgcgatgatggcaaggccggagagcgcggcggcatcggtaccccggccacccgggcggcgatgttgggcaagttgcaggagcgcggattctacacggtcgagaagaagaagctggtcccgacagcccttggggttgcattcatccaggcgctgccccggatcgcaacgaccccagacatgacggcgctgtggcatgagcagcaggtgatgatcgagcgtggcgagctgtccgtcgatgccttcctggacgagctggaggccttcatcggtgagcaggtcagcacgatcgatctcggcgacatgcccattgccggacgtgctggggtcgagccgctggcggcgcgctgccccatgtgcggtggcgagctggccagaacggcaaaggtggtggggtgcaaggggtgcgagtttcgcgtgtacccgagcatcgccggcaaagagctgaccaccagtcacctcgaaagcctgctcagcaagggcaagaccagtttgatcaagggattcaagagcaaagagggcaaggccttcgacgccgccctgcgcctcgatggccaaggaaaggttgtgttcgatttcccgaagaccagcaagaccagcaagaccagcaagaccagcgggaagcgttacgcgtaa

SEQ ID NO: 348749 - DNA, 1806 bp, Pseudomonas aeruginosa
atgttgttaagggagctggcggcggtcaggggtggtccgagggtggaggctgcgcgtgccctggccagtgctgcttgtgaagagccggcggtgcgtcggcgcgcacgtgaagcatttggacgtgccgacttggcgaaggtttaccgccaggcgaaggacctcatcatcacgcacaagctgttccgcctggtgcggtatgcggagctggagggcgttcggcaactgacgatcagcaatctatggcgcatcgagcgctttgccgacggggcgatccggatcctggaacacgacctggttcatgacgcgtgggtagaggtggaggatttggcgggctggccagaagtgccgttctttccggtgcgagagacccgaacgctcgattggtggcgggagattgcgcgcaaggcgatttggaaggcgctgaacgcagcggggtatgccgagttgccgcagcatcgccgcctggtgacgagatgggtggaggtcaaaggttcgccgtttccagtgccggcccccggacagcaggaaatgtcagccgcgcacatggcctacagaatgattgagcgctacatcggcaaacaggtgaaagtgaaagggaagacaggcgtgtaccggtggaaggatgggctgttggaatcgaaatcgatgcaggccggtgcccgggcgttgcgcgcgggcttcttcgaacacatcctcgatggcgaggtgttgtcggcgatgcgggtcatcgactatcggaactgctctttcacccgttacctgagctatgcgcggtggcgggaggggctgctcaaggtcgctcgggaacaccgaaacctgctgccactgctacgtcgcatcaatccggagcagtgggcgcgaaacaacttgttctcgcgcaagctgtgggtgcgagggggacgccggtttacggcgctagaccggcggcctatcggcgttgcctggggctctggtattgagggagccgactactggcgggtgtgcagcttcgatgacggcgccgcgtggcgctggttgagtcgggccagcagcctggtggtgaaggaatggcgaggaggacgagcgatcgttacccacttggcgctggccaaggtcagtgtccgggtaccggtgtgcgcgtatgtccacgtgcttcgagcggcagaacgccatcaggaaagcatcgagcgttatgccggcagctatccggggcagttgcaacagctcttgcgggtctatctgatccactgcgcgacgctctggaaggagcaaggccacggttacgtgcggggctggttgcgcagcgaggccggcaatgtgtcgaacatgctcgattacctgatgaatgaagggttcgatcgtgggcagccagagcgcaatgcgacctggccggcgttgttgcggcgttccgaggactggcacaaacgcatcgctattgagcacctggagcgcgaaaagggcttgcagtggtcgtcgttgcttggcgagacggtcattgaggggatcgtgttcaccccgttgaacaacagccgggccttggcggaggagggttacgagatgggccactgtgttggctcgtatgacgggcattgcgccaagggggcgtaccaggtgtacgcggtacaggagccggacggcaggcgttccacgctcgggttcagggtcatcgaggggcacacccggtgggatcagcatgagggtgggcggcatggacgcgtatcgaccgccgccttgcgggctggcaagcaattggtgcgcgcctacgccgaggcgctggccgagagaagcgaagcgagccaggcggcacaagcggtagcggaaatctga

SEQ ID NO: 348750 - DNA, 333 bp, Pseudomonas aeruginosa
atgaaaaagttactggtaacgctggccctcgcgggagcagtgggactctcctcgggagcccaggcgatgagcgcctgcgaagtggcgttgtgcatgtacggcaagacgaccggcaacagtggaggcagtgagtgtcgggcggcggagaagaagttcttcagcatccaggtcaggaagaagggcaagttcaaaccgaacccgacgttcgagaagcgcaagcagtacctgaacggttgttccgaggctgaccccgatgcagctgctcgtgcactcggcgctgacccggctgcgaagtcgaagatcctcaacaagtacggccgcgtccccggctga

SEQ ID NO: 348751 - DNA, 852 bp, Pseudomonas aeruginosa
ttggccagcgcgaaggaccacaccaaccagcgtgtcgacgccgaggcccaggcacgtgcggatggcgacgccgcgaccctggcgagcgcgaaagaccacaccaaccagcgtgtcgacgccgaggcccaggcgcgtgcggatggcgacgccgcgacgttggccagcgccaagaaccatacggaggattactcggttgcgcgaggagtagaggccggggacggctcggtcgctgtaggcaaaggatcgagcgcaaccgctgcaggatccgttgcgctcggtgcggggtcggttgccgatcgcgcgaacactgtttcggtcggcgccgccggcggcggcgaacggcagatcacgaatgttcgtgccggcacggccggcaccgatgccgtgaatctctcgcagatgcaggccgccgacttgcagacgctgaatagcgcgaaccactacaccgacagccgggaggtggcgatccggcaggacatgtacgccggcgacgtgaacacgctgaacagcgcgaatcattacaccgaccagcgcatcgatgccctcgacagctcgttcaacgacgctctcgccggcgcctacagctatgtccgcaaagagaaccagcagatgcggcaggagtaccgtgcgattggcgcgctggccatggccacggcggcaatcggcattggccccaaggatctcggccgctcgcagttcgggttcggcatggggacggtgcagagcgcgtcagcgatggccatcggcttgaaccactacgtgaacgactcgaccgtggtcacgttccgcggcgctatcggtacgagcaaagcggtgtcgggcgcgtcgttcggcgtcgtgaaaggatggtga

SEQ ID NO: 348752 - DNA, 843 bp, Pseudomonas aeruginosa
atgaccgccgccctccccgacctgagcttccaccccgcctggcacgcccaactggagctggcctacgcccgcgccggcgacgccacccgcccggtgacgcggcgccacgccggaccgctgcgggtgcagaagcacctctacgccgaaggcccggaagtctgccagcacatcctcgtgcatccgcccggcggcatcgccggcggcgacagcctggccttcgacgtgcgcctcggcgaacgcgcctgggcccagctcaccagccccggcgcggccaagtggtaccgcgccgcctgcccgtcgcggcagaccctggagatccacctggagcccggcgccaccctggaatggctgccgcaggaaagcatcgtcttcgccggcgcccaggccgaactggaaacccgtatccagctgcgcggcgacgcccgcctgttctactgggacatggtcgcgctcggccgcccggccagcggcgagcgcttcgtcagcggccacttcgtcgcggccctggacatccgtcgcgacgaccgcctgctctggcacgagcgccagcgcatcgacggcggcgaccgcctgctcgactcgccgatcggcctcgccgggcatccggtgctggcgaccctggtcgccagcggcgagatcgacaccgacctgctgcaacgctgccgcgcgctcccctgcgccggccgcggcaacctcagccagttgcccggcggcctgctggtggcgcgctgcctggccgacgaggcgctgcacgcgcgtgcctggctgatcgaactctggcgcctgctgcggccggcgctgctcggccgcgaggccgttcccccacgcatctggagtacctga

SEQ ID NO: 348753 - DNA, 468 bp, Pseudomonas aeruginosa
atggtcttcaagggcctggagaccgtgcgcaccgactggtcgccgctggcccagcgcttccagcaggaactctacctgcgcatcttcaatcgccagccctaccaggactacgtgcgcgattacgtacgacggaccctggccggcgagctggacgacctgctggtctaccgcaagcgcctgcgccggcgcctcgacgattaccagcgcaacgtgccgccgcatgtgcgcgcggcgcgcatcgccgacgactacaacctcgagcgcgggcgcccgcggcagtaccagagcggcggctggatcagctacgtgatcagcgtcgccggtcccgagccgctcgaggcgcggcgttcggccatcgactacgagcactacgtgggcaagcagttgcagccggtggccgacgccatcctgccgttcgtcggcgatgatttcgccactttggtcgaccggcagatggcactattctga

SEQ ID NO: 348754 - DNA, 840 bp, Pseudomonas aeruginosa
atgcaggcgcgaaccggcatctccgagcgtcgtgcctgtcagttgatcgggctgtcccgctcggtgttgcgctaccagccgcgagccagtgtgcaaaacaccgagctgcaagcccaactggtggaactggcccaagagcgccggcgctttggctatcgccgcctgcacatcctgctgcggcgtgctggcgtgcaggtcaaccacaagcggatctatcgcctgtaccgcgctgccggcttgatggtgaaacggcggcgccgccgccatggcgtcgcggtggagcgcgaacgtctgagtttgccgagcgcaccaaaccaggtctggtcgatggacttcgtcttcgatgcactgagcaccgggcggcggatcaaatgcctgacggtggtcgatgacttcaccaaggagtcggtcggcatcctggtggagcacggtatcagcggctttcgtgttacacgggcgctggacgagatggcgcggtttcgcggctacccgaaagcgatccgcaccgaccaggggcccgagttcaccggcaaggcactcgatcaatgggcctatcagcgcgacatcaagctgaagctgattcagcctggtaagcccacgcagaatgccttcatcgagtcgttcaacggtaagttccgggacgaatgcctcaatgagcactggttctgttcgctggccgaagcgagaatccgcatcgcggcctggcggcgggattacaacgaacaccgaccgcacagcgcgattggcaatctcaccccggcagaatttgctgcaagttggcgaactcgccagcagcagctgaagcaggaaaaattaatatcaacccccagggcctactaa

SEQ ID NO: 348755 - DNA, 3489 bp, Pseudomonas aeruginosa
ttggagacgattgacgaactgaccgcgttcctgacgaccgcgaccgtcgacggcatccttgggcgcctcctctatcgcggcgcggcctggtcgctcatgcgcgacgagggcgtgctgccaccgaacgcaccgccccttggcgcgacaattgaaaccgatctcgccgaacacggcttcgccctgctccgaggcgcgatggccctgcgcgctcaggctggcgcttcggagctgaccagcaaggccttcgagcgcgccgccaacgcatttgaagccctagtgcgcaacggtgaccccgaggcgcctgatcgcggtttccgccgcaccatcgccgccgctgcctaccatctggccggcttctcggccgtcgcctattcgctcttcaacgagacagcgggcgacctcaacacctcgccgggcgaaacggcgatccgccatctgattcttcgagatctcgaccagttgcgcggcttcgttcgcgaatggctcggcgacgcggctcatggcgacgagcagatcgccgaggcgctacgaggcgaagaccctgacgtcgacgaggttctgtcgaccatcctcaatacgacgatctgccgggccctggcgtttttcgacttcgcgcttgagacgggcgagcccgagccgattgaaagcgcacgggccttgctcgccacggcagtcagcctggcaggcaacgccgagaatgttccgctgtggtggatatcgaacctctgccaccacctgatcgacgacctgtggcagcactctttgcaccagaacctaccgaccgagccgcccgagggtacggaggaaaaatatccagacctgcggcggctgttcatctcctcgctctatgcccgcaagacctcggaggtagagctatggccctcgcagcgcgaagccgcccagcgctccacggacgtcagggacgacttggttgtcgctctgcccaccagcgcgggcaagacgcgggtagccgagatcgcgacactgatgaccctgtcctcggtgcgccgggtgctgatcgtcacaccgctgcgcgccttgtccgctcaaaccgagaggtccttcaggaagaccttcgcgcccctcggcttcagcgtctcctcgctctacggcgccagcggtctttcggccggtgatgaagacgccctgcgcacccgcgagatcatcattgcgacgcccgaaaaactcgacttcgcgctgagaagcgacccgtcgctgatcgacgatgttggcctgatcgtcctcgacgagggccacatgatcggtccgagtgagcgcgaaatccgctacgagacgctcgtgcagcgcctgcttaggcgcgcggacgcggccgaacgccgaatcgtctgtctttccgccatcctgccgagcggcgacgaactcgacgatctcaccgcctggattcgttccgacgaaccgggtgagccggtgcgttccgactggcgccccacgcgccagcgcttcggcgcactcacctggcgcggcaaagacgcgctgctgcggcttgaccttgatgacgatggccccttcctcgacaagttcgtcgtggagaaaccagcgctcgggagggagacgaagccctatccacgcaagaactcgcacctcgttttgttcgcggcgtgggagttcgcgagccagggcaagcgcaccttgatcttctccacccaggcgaactgggtagagagctacggcaaacaggtcgtggacctctgcaagcgtggctatctggacccgctgctagatgacgaggcgtcgatcgcccgcgccctcgaggtcggcaaggaatggctcggcgaggatcatcccgccgtggccagcttgaaggcgggcgtcgccatccaccatggccggctgccgagcccgttcctgcgtgagctggaaattctcctgtccgagggcgtgctaaaggtgatcgtcgcctcgcctacgctctcgcagggcctcaacctcaacgccgccgtcctgctggtgcccgcgctctatcgggcgggggagaagatcaaaggcgaagagttcgccaacgttgccggccgcgcggggcgcgccttcgtcgacgtcgaagggctgatcgtccatatcatgttcgaccagatcgactggcgaaagcgcgaatggcgcaggctggtcgcctccgccaaggcccgaaccctgaagagcggcctcatccagatcgtcaccgagatccttgagcgcctggcgcgcgagggcgtcctggatcgcgccgacgcctgggaatatctcgccaacgcccgcgaggcctggagatcacccgacgaagaagtccaggtggccgatcggctggcagccgccgtggaatacgacgctgacgccgatgaagacgacgaggaggaacccatcgacgaggagccgctgtctcagctcgtcgaacgcctcgacgcgaccgtgttcggcctaatcgaagcgcttgacgccgatcgcgccgatctacccaagcttctggacgaggcgcttaagggctcgctctgggcccgccagattgctcgtgagggtgaggacgtcgcccctctgcacaagaaagtgttcgaagcgcgcgccgacctcatctggaagaccaccacggcgcaagcgcggcgcgggcatttcgccatgggcgtcgggctcgaagcgggtctcactatcgacgccatggccgacgagctggccgaactgctcgatcgggcagacgaggcggcgctgagcggcgacatcgacgaactcgtcgacgcgctctgcggtctcggcgaacgcctgctgttcatgcggcccttcatccccgacaaggcgaacgcgctgccggcgaactggaaggccatcctgcgcagctgggtgtccggcgaggaggtatccaagatcggaccgcagaacatgcgcgcggttgaagaggctttcacctatcgcttggtctgggcgttggaagccgtccgcacccgccgcatgtccctcggctggtcgccggagacggtggcgggcggcgcagcggcggcagtcgaaaccggcgtcccgcgattcatgatggcaatgctgatccgcgcgggcctgccgtcacggcgcgcggctatggtagccattgaggacgccgagccggtcttcgtcaccccggcggaaatgcgggcctggctcgaatccgacgagatcacggcctacaccgacgccggcgactggccgacgcccgacaccgccgcgctatgggcgcgcttccgaaccgaggctctcaacgacggtatccagaagtggtcggtcgaacgctacaagcgcctgctcgacatcgaggccgccccgcccgccggcctctatcggatcgtcaccgacgagggggacggacggacctggctggcaaccccggactaccagcgagtcgccgccttcaagaagccggcggtcgatcccaaacccagcctcttctcgggccggctgccgggagaaactaggctcgtggaagccttgcgcgtcggccgcggaaaactgcgctggccgcccgcagatgcgtaa

SEQ ID NO: 348756 - DNA, 783 bp, Pseudomonas aeruginosa
gtggggctgtataagaggtggtgcaagtccaccaaagaaaaggacaagcgcaagcattactggacctatgtcgagaaggatggtggccgcgacgagatccgcgatgacctcgccaagaccatccgctctcactacgatcgactcgaactcatcgccgaagacgtgaagcgactgggatacgaagtcgccagtgaaattctcagcgccaaaatgccccaaacggccaagggccgctccggcgatctcggcgagattctcgcgaccgagctggtcgaggaagagatcggccttcgcgtccccgtgcgtcgacttcgctacaaggacgaccgcaacatggccatgcgcggcgatgacttcatcggcgccggatacgatggggccggcgagaagctctggcttctgaaaggcgaagccaagagcaacaaggtactcggcaaggccacggtcacgagcgcccgcaaggtgcttaaccgcgacaacggtcgttgcacgcccgactctctgctgttcgtcgccaaccgtctactggagagcaacgaccctgacgacaacgtactgggtcgcagcctgcgcgacgaggtcggcctaaagtcactgcgcgccgatcgcatcgaccacatgcttttcacagtttcgggcaacggcccccacgcctcgctgaaggaggacctcgacgccaccgggaccaatcgggaccattacgtcgtgaacatccacgtcgaagaccaccaagacttcatcgcggatatgtacctggaggcagaaaaccttggagacgattga

SEQ ID NO: 348757 - DNA, 897 bp, Pseudomonas aeruginosa
ttgaaatcagatcattttggaataaaaaaggaaaccattaatgaacttatgagccgacttcgcagatctaaactaagcaaaagggagataatttggatattagtatttttaaaatcaaaaaaaccctcctccatgaacagcgaaattatagacctaccaaatttagaccaagcaatatccagcatgattgtggcagcccctagcattttgccattgattaattcaggcctttgcagagagcttttagaagaaaaggcattagcctggataaccgaagacaaaatccaacatgactggattaaaaacaaaatagacaagacattaacaagcaaaaacattaagccaagaaacctccacggaatagccccaacaaaaatcacaagcaaagatttcttgatagcaacaattgacacatggagcatagagctatctgagaaaaacgatatcgtcacaaatcttaaaaacgaatggcaatccaaaagaaacccatataaccactttagctgggccttaaatgcagacgaaagctatatatccacatgcatatgggactggataaaaaataataacacccatatccaacctctacaaacagcattcaaaagcctcgaagaggtgatgcagcattttaatcaagtttcgactagcgaatacgaactagaagctataaaaaaatacgcaaaaaatcgttggtatcaaaaaacctatagagaaaacctaaaaggaaaaaagcaacagaatcttgtgctgtcggaaaaagcaatatcacgactaaaattgctatctaagaaacatggcattaagcgtaataaagtaatagagctattactcaaactagaaacagagcaaaacctctacctcaagcaagcgttaaaaatcatgcacattgaggaataa

SEQ ID NO: 348758 - DNA, 678 bp, Pseudomonas aeruginosa
atgtaccgccaaccaccacctagcgcagctgaatggcaaggctttcctgttcagttaacacccagtgaccttaactcggactatctgaagaatatctgccttttactgctggatggcttgctcatgcattcgcgctggacggttattcggtttgacctaaaagcacccagaggattcatattgcctcaaggggcaataactggcttcatcgaatcacttaagcgccagcttgagcatgaccagtccattaagccagcgttagggggtagagcctacgatccgatgcttcgctatgtttgggtgcgcgagtggaacgacgcgagccagccgcattatcacctagcactaatgctgaatcgcgatgcctatttcactttgggcaattattcaaaattgcattcaggatgctgcaactatgacgaaatgcttgcgggtcgtatctgcaaggcctggggtgtggccctggggctggattggtccgtcgcaatgaacggagttcacttcccacagcagcctgtatcgccgttgaagattcagcatcagctgttcgagcggcagtatcagtcggtcttctaccgcctgagctacttcgccaaaaagaggaccaaggtgtatggggacggccagcgaaactttggcatgagtcagctgagtcgtcttaaaaccgaactcccctga

SEQ ID NO: 348759 - DNA, 1872 bp, Pseudomonas aeruginosa
atgcgaccacaaattgagttccgacacgtccttagtgaattatccgtcaatagaaatgatccatgcgaagttcttcgcgagcttatctcaaactcatacgatgcagacgctaagaatttattttatgcaccactaaagtctgaaaaaggttttatattttttgacgatggaacaggccttgacactgaaaagaagacaaatggagtaactccatacgaagcatttttctccataggaaagtcaacaaagaaaaaaggagaagctattggatacaaatgccaaggctccaagctttgcttcgcctgcgctcgcatactcattgcaacaaagtttggtaaaaaaaatacagaatggcatttcaagtccgtcgaaaaccctagaaaaaacctagacataagcaccaacattacccctgaaacctcggaaaatcttgagaaaatcatatctaactttttacccgaaacatcagcagacacccaacttgcgatagactcattaataaaatttataaaagaaaaaaactgccaaaccgggacattgataataatagacggattagacacagaaaattttagcaaatacttccagtttggaagaaaaattgaagaatcatatgcttacaactatgttagactatatacaaagcacggagatactcgtgctctaaataaagatcaaggctttagctccacacaaataactcagacttctgatggattcaaaaaatcagaacttatattctatggaaacaaaaaaacgcataacatcccatttggtttcccatatctaaaatccaaagagacagacgcagaagtaaaaaccccatctcaagtttcccgactcagagatgggcgattcttttctcgagcagcaaaaagatttcaaatctcaggcacatattacactgtaatcatggctcttgatgggaatagacgggctcacgaagattatccaaacctagatagaaaaggtaaaacaaaatccggtatacgactgggagatcaacgagggctattcatttctgtaaacggcataaagatatgtagatatatggatatattctctagcctggaaggctatgagatactcgcagagggcgaaagccctagccattacacgttaattctagatggcgacttcgacctcgttacaaaccgtaactcacttagcaagaaagcttttgacgccctttccgaccccgacctcctcaaagaaataaaaaaatttctagatcacttaaagaagaccgacaaggtatttcaagagcttctctctcgactaaaaaaagagagcactgaaaacaaactaaacgagcaaatagagatactcgacacatcaaaagaagacctcaagagcagagaaaaattcagaataaaagatcaaagcaaaaataatctaatctttgtatccccacaacctggcgaagagtacttagttggggttctttactcatccctatataacctaatagatccgagcaatgaacattatgacaaatggaaaagagtaataacattctccacccaggggattgacagcctcggcataaaagacacaagcactacccaccccctagcaagtgaaaatatcgtatcaatagaatacaagtacaactttaataactacggcccattcaaccacgccttagcaattgttgattacatagtagcctgggaagtggacatagaagaagagcaaatagttcaagacactttcacttgctctggaagaatcaagcaatcagacaacaccgacttcgagtgggaaatatacgagatagaaagcaatgatggagcacaatacccaaaagaagtaaaagttatctgcttaaaaaaactcatagagaaaactttcaacacaaagttcagataa

SEQ ID NO: 348760 - DNA, 561 bp, Pseudomonas aeruginosa
atgagccggttacacaaaatttcggacaccctcgatgtcgatggctggcgcatcgtgcgtgcccttcgagatgccggtaaacaggtccctgtgctctttctgacggcgcgtggcggtgtagacgaccgtgtcaagggattggaactgggagcggacgactacctcgtcaagccattcgcgttctctgagttgctggcgcgggtgcggacgctgctgcgacgcggaagcgctccgagccagcctgatcgcatccaggttgccgatttggtactggacttggcgcgccggcgcgcaacgcgcgctggccaacgcatcaatctcaccagcaaggagttcgcgttgcttgagcttctggcccgtcgccagggggaggtccttccacgttctctgatcgcgtcgcaggtgtgggacatgaatttcgacagcgacagcaacgtcatcgatgtagccatccgccgtctacgcgcgaagatagacgatgcgttcaatccgaagctcatccacaccgtgcgtggaatgggatacacgctcgatgcgcccgatgatgcccctgcgccataa

SEQ ID NO: 348761 - DNA, 660 bp, Pseudomonas aeruginosa
atgcggcgacgagaggggcgccgccgcgggcgcaagggtcaggagcgcgccggattggaagcgccgtggaggaacatctgctccagggtatgcgcggaattggagctggccgcccgtccgcggcgttccgcatcgaccatggatgaacagttcggtgaacacggctgccgtgatgtcgatgcgaaacacgcctttctgctgtccgcgcaggaagaaggcgtccagcgcttccaggtaggactgccagcgtgcgccttcgccgtgcgggtcgaggaagtccgggcggtactggaataccaggaataccagcagctcgcggtgggtgaggtgttccttgatcaggcgctgcaacgcctccagaggctcggcatgctccaggtcgcaggcctggatgatctggttcagtacggtctctccgtggtcctcgagcatctgcaccaggttgtcccgcgtgccgcagaagcggtgcagggtggccttgcttacgccggccgcctcggccagttccttcagcgtcgctcgcgggcggtcgacgatagcgactgccagcgccttgatgagtcgctcgtcatgggaaatcagggtcatcgatgggtcccggttgttttttctgattgtgcgcattgtgcagaaaactggcctcgcgtccaaaggaattag

SEQ ID NO: 348762 - DNA, 189 bp, Pseudomonas aeruginosa
atgggtgcgctcatgaacatgaaagctcgcatcttcctgcgcacgctgcgcttcgttgcttacaactggtggctgccgttcctgctgggcaacgtttccgcgttggtcggctttgcgttcaccgctgacctgattaatgacgcgttcgtctcgtcgctcgaaacggtggtgcagtcatgcgcacggtga

SEQ ID NO: 348763 - DNA, 189 bp, Pseudomonas aeruginosa; identical to SEQ ID NO: 348762

SEQ ID NO: 348764 - DNA, 447 bp, Pseudomonas aeruginosa
atgaaggcctgcgactatgcggtgctgctcaagcgcctgatcaagaacatcgcctacgaccatgagatggacaccaccttcatggccaagccctatccgggccaggccgggaacggactgcacgtacacatctcgctgctcgacaagcacggcaacaacatcttcaccagcgaggatcccgagcagaacgccgcattgcgccatgcgatcggcggcgtgctcgagaccctgccggcctccatggccttcctctgcccgaacgtcaactcctaccgccgcttcggttcgcagttctacgtgccgaacgcgccgagctggggcctggacaaccgcaccgtggccctgccagcccggacgcggtacgcctggaacaccgcgtggccggcgccgacgccaacccctacctgctgctggcctcggtgctggccggcgttcatcacgggctga

SEQ ID NO: 348765 - DNA, 534 bp, Pseudomonas aeruginosa; identical to SEQ ID NO: 334328

SEQ ID NO: 348766 - DNA, 207 bp, Pseudomonas aeruginosa
atgaaactgctggtcgttgaagacgagaacaagacggcggattacgtccgccaaggtctcatggaggcgggattcgtcgtggatctggcgcgcaacggattggacggacaccacctggccatgggcgagacatacgatctggtggtcttggatgtcatgctgccggatgtcgagagggtgtgcagaattttgtgtaaccggggttag

SEQ ID NO: 348767 - DNA, 477 bp, Pseudomonas aeruginosa
atgaaaagggttttgatggggcttatcctattgagcagctcgaatataacttgggcagaagccccctcaagtaaataccaggagtgtctgggtcgagtgaccttcgagataccggaggagatggagtgggcaacttatgatgcctcacgagtctggcagatatccaaagggggggggcataactttaccgccgaggtgaccgccgtaggtgacaacggcagctatgactacgacagtatgattttttacgtttccgaaaaggttgataaaaatgaattccataacgcctcaaactacataaaaggaacagcagaaatataccaagaccatcttagagaaaacataaaactagataagaaagcaataagtacgctccaaaaaaacaagagcgaagagaaaagtattgaacggataaaaaaaggaatcgcagaaatggaggccaagagggtgtgcagaattttgtgtaaccggggttag

SEQ ID NO: 348768 - DNA, 870 bp, Pseudomonas aeruginosa
atgctaaacaggatgaaattaaaattaagtatatttaaatcaatgctatacaccataattcaattcctaataaacagccccacaggaatactattgctatcatgcacactctacttatttttagaatataacgaccaaagggtctttggcccttccgaactagctctctggttatcagatcaaaacgatgaagttattggatcaataatcggcacaatagtaacggtgctaggctttattattgcgtacagctctggcatgactgcctggaaaaaacaacaatactacataatgaaacaggatttatacaaagacattgacaagttttcttctaaattcctatctttaatgacatcatgcaaaatatttataaattccacgttaaatctaaaggaggatatagatgccgggagaaatattgaaaaatcaaaatttatgctgacctatatggtggatcaatttagacaatggagtgaaaatcagtgtgccctcgcatcaatggaagaggaatactgcgaaatactaatcagaaatgcgcctgtaattattagtataaacaaagtatcaaaacacctagacatagctgaagcagcaataagcaaagtagtagaaaactcttacataagtatccctccaggcataagcccaataaccgatgaaaattacatcgatgcattcaaatattactcatcaaaggtagatgtagattcttgtaaaaaattagtcaatgagataacaaccaatcattccataatatcctacaatctttcagcagcaaaaggggatctttcatacccgataataacgccaaatctatcttttattttgggcggagtaaggctcttgaaacaaataaaaaataaaaaatag

SEQ ID NO: 348769 - DNA, 219 bp, Pseudomonas aeruginosa
atgccactcgacgcccctgccagccacgctgcggaaagccccgcgcagccgtcccgcgccgaacagctgggggccttcctgcgccgccggcgggaaagcatcgagccgcagcgggtcggcatttcccgcctcggccgccgacgcacgccgggcctgcgtcgcgaggaggtggcgcagctcgccggggtcggcgtgacctggtacacctggctggagtag

SEQ ID NO: 348770 - DNA, 1959 bp, Pseudomonas aeruginosa
atggcacgcattaccgccgccggcgaacgcttgattgcccagaagctgggcgaaaagaagattctggaggtcagccgcttcgtgctcgccctggtccctgggctggatcccaccagccctgtggaccgcgacgcggtcctgccgccggcgcagcagatcgtccacactgcgcccgttacccaagccggttacgtcaaccccaaccaggtggtttacagcctcatgattggttcggacgtgggcgacttcgactggaactggatcggcctggagacggcggaaaagatcctgctggcggtcgcctacgtgcctatccagcagaagcgcaagaaccgcccgccgctgcaaatcggcaacaacgtgacgcgcaacttcctggtggcgttcgacggcgcccaggaactgaccgggataacgatcgatgccagcacctggcagcacgatttcaccgtgcgcctggccgggatcgacgagcgcgagcgcctggcgaaccgcgacatgtttggccgtgcctgcttcttttcgggcggcctgttgctggagaaggccagcacgaaccaccgattgaaaggcggcctggcctacgtcgaggggattcgcgttcacgcgccggcggacgtcagcatcgccgcaccggcgctgccgaacaccgcatggctcgacgtgcgcctgcagcgcagccagtccgacgtcgtggcgtcctggtccatcgcctggggcgccaaccaggccgactacaccgacagcgccggcgtccgtcactacctagtcccgctcgcggatctcgacgccggcggcaatctggtggccgaccggcgtctgccgaagcccattaccgggccgctggtcgatcattgggccgcccaagtcggcgactatccaaagctgcgcgcccgggcgacgacgaaggtggacgtcgggctggaccggatcccgaacgcgatcagcgacgacccggccctggatcgcggcgacgtgctggccacgacgaaggcgacccgggccgtccagctccgggccgcccaggatctggacgacctggccaagagcctggggactgccgcacggcgagacgtcggcaccgccgccggcaacgtcctcgaggtcggcgcattcggctgggggaccggcgttctggaacgtgccgcgtctcttgaccgcctgcattcgtctatcgccctggttacccccacaaccgctcagccccaggcggtagtcgaatacggctcgctactgactgtcgcgtacaacgccagcgaaaatcgcgccgggcaactgctgttcggtcaggtcccaaccgaaacactgaaattccggtctggccacctggggtcggcacgctggttcgacgtctggcacaccggcaacctgaatccccaagccatcgtcccggccggagcggtgatggcgtttgcgatgaacggggcgcccgcgggctatctgaaagccaatggggccgccgtcagccgtaccacctatgcggccttgttcgcagtcctcggcacttactatggcgccggcgacgggtccactacgttcaacctccccgactaccggggcgagttcctgcgcggcctggacgacgggcgcgggctcgacctgggccgactgctgggcaccctgcagacaagccagaacttggcacacaaccatggcgcaagcagtagcggcaatggcggccacacgcacaccgtaaccgggaccgctgcagcagcaggtgcgcacagccacagcatcccgtcggtgaacgccaccgcactggttagcggcacacgcctggcaacgcttgtagggaatgcgtccaacagtacgacagacgttgccggtgatcacacccacaccgtcactggtgtcgccgcactcgaaggcacccacaaccacacgatctacgtcgagtccagcggcggcagcgaggcccgcccgcgtaacgtctccgtcctcatttgcatcaagtactga

SEQ ID NO: 348771 - DNA, 768 bp, Pseudomonas aeruginosa
atgcctgtttgtaatttgtgtctaaaggaaacggagctttcactgtcacacattattcctagatcttttttgaaaaggcttaagaaaagctctccacagcttataaagatccaggatgctccaggcgttaggccggtaaaggaaaatgctgactggaaggaaaggctgctgtgtggcgggtgcgaagtttttattaatgaaaactatgagcgagggcagatcttatttcttagggggagggggaatgtttctaaaagtcatgataaaataacttttagaaattttgactttgaaagattttatttatttttgctttcgatcctctggcgtgcttcgatctcaagccatgaggcgtttgaggttgtaaagcttactcaggaactacaaaacgtcttccggcaagcgctgttgaatagggaggataagataagtggttctgttagggtttcggatgttttgaagataggaattgtgagaataacaaaccatccttatatgacggaggaagaaactaagtctattatctctcacttcaatttgagacatacggaagaggggcatatttattattttatggttgagggttttttgatttcatattgcttgccaaaatcaagtgaaagtgagtttcctagagatcttggggtgttcaagaacagctttttcctacgtatgccaaaggtccaggttgagaagtctgaggtattagcaaaaatgtatgaggggatgatttcgaaggcgatagagttttctacagagcttcggtga

SEQ ID NO: 348772 - DNA, 759 bp, Pseudomonas aeruginosa
atggctataccacaccgacatggagttgctagggccgcatatgcttttacatctgccttggcgctccttttgaaacatttgggtaagcacaatgtcatggaggagccgaatatactcggcatagaaccagatatcatatatggccagcaggactcgctgaccatgattgaaacaaagctttatcgtcgcagctctccgccaccagcttctatttttaaacgcgctttagaacacacacatgacaggggtagtaggatcggcgctgtcaaaattgtgctggcaatctcatgccccatgggggagcgtttttttaatgtggcccaggcattccccactgtagaggtttgggatgaaacgaagctatttgagatggccgccccgttccctgagatcttgaccctgtttgaagagatattcgaagctgatacacctaagagtgttgaaactctgagcattagttcgcccacacccatacctgatgctgatgtactggcatcggagcctaaaaaaggtaaagtgttggctgaagccttagcagcaatcgagcgtggccgagatatggctacagattttgagaatgcctgcattaacgcccttaaatatctcttcgaaaaggatctacacggttggcacgagcagtctcgtaccgtagataccttgcatcgtagggatctggtgtgccggatcatggcaaaggcagccgaggtgtggcgcctgatgctcgaagacctaggaagcaggtatgtggtctttgtgtag

SEQ ID NO: 348773 - DNA, 1107 bp, Pseudomonas aeruginosa
atggatattacatataagcttcctcatccagccagaattaaatgctctgaattttcagaaatggaaatccatgcacaagatagaatttacagccaaatttttgatgctgaagaagtgaaagcttacagctctgatcatttggctacactattaaaacacagagctccgagcctgtttgataattaccgacgcacaaccaagacggatcacgatgcatttatcgcgctatcatcgacaatagccccatataggttcagatcccaagaaggaaatatcatcacaacttcgactttgattgatagattattagaacaaacggatattggagatgacataccaattgcttatctaaggccgcctttcaaacactgctatatcgaattcactgaagatagaagctcttcaattatgctgtacaacgaagagacgcatgagcatattttagaaggcgtctacatctccgagacggaagtacagcccgggtcggaaatcatggaatattacaatggcaatccgtctgttgatccatcaaagccgcttcgaatactggacttgatgttcactggatctccactaggaaagagccataacgcagatgatgcactgagaattcagggattttatatacaagatgacatggcaactatcaacgaagagctaaagcgcgttgaaagcctttatggtaatgatgtggactttgccgatgatatgaattacttatcaatggctctaaatcacatggcaaaggtactgctcttcgttaactgcaagcaatatagagatttcgcgtttaatgaaaggaaggatattctaaaaaaaatcgagtctttcaaaagcccatcaaaaataagaaaatacgaaagcaaactgagaaagacttatgacagaatcataatcaagccagttgataatgtagtttatgagcgtggtgcagagcatcaaaactctgagaatcaacctctaaagcgagcgcgctggagaaaaggtcactttaggatgcagctgtacggatcgggggcttctaaaagaaaagtgattttcatagagcccacggttgttggtggtgtatttgcaaataaaaaatcttatgacgtaagaacaaagtaa

SEQ ID NO: 348774 - DNA, 861 bp, Pseudomonas aeruginosa
atgattcgtctaccgctaccaaccttcgacgtgaccgaggctgtgcaggtgtgtgcgtccggcatcacgatagcggagagagcccaggcgctgttagatgccttaccggtcatccagcatacggagacaacgtatcgtgagcttgcaccacacggtaggctctatgaaatgcagggcggtgatcaggtgacacctgatctggacggggcactgatgagcgtcatctataagtcgcactttgcgcgaaacaactcgccatcgaggaaactctatgaacttataaaaatggcgcctgagttcggcatctgccccctatgcagccagcgtgttgttgctacagtcgatcactatctgcctcagaagcatttcccagcacttaatcttactccggtgaacctgattccagcctgttcggactgcaacaaacgaaagctggccatggtagctaagagcgcagaagatcaaacgttgcacccttactatgacgacctaggtcgtgatcgttggttgttcgctgaggtgcttccctcatcaccacctacagtggtgtttaaagtccgagctcctgctgaatggggcgacgtccttaccgcacgtgcggctcatcacttcgagcttatggggcttgcagagttgtacgccgctcaggcagctagtgagctcgccgatgtttctttcttcatggaggagcttggcacggcagcaggtgcgcttggagtctatcagcaactcgaccagcagttcagaacgcgctacgcacgtgatcgtaattcatggaaaactgcgctatatgaagggttgcgcgattcagagtggttttgtactgaagggtatcggttgattcgcccaagggcgagatag

SEQ ID NO: 348775 - DNA, 1770 bp, Pseudomonas aeruginosa
atgctttgtcccttagcagctgatagggcatcgatcagtgtaagctatcaatttgacattaaatcgggcagtcctgtctttgaggaatggccccatgaccgcacggaacctgctagcgccatacggtgggtatctcgggacaggcgagacttaacggttgcgattaagcggcaagcccccttcaaccaaggaataggttcaacaccagtgtttacagttattcgccctgggcaatcgcttcctaatcaaggccgttctcaagcgtacctcgtctgtgacaattgggacgattggttcgcgtatcggacgatgttcactctgttcgtgttcgacggggcaggcgtccgccataggccgggctctgtaaaaatcggggaagtggggttggtcggaggccctggcggcccagacaccccaaagggaacacgctttccgactcttcatgatcacttcagccagctcgatcccactgtgcacttttcgcttggtcaggacgaggactactacgaaacacttaccggtctttcctatgggttcggtgtgaaggtattaaaggcactgtgtgactgcgcctatgacctagacatttttcggcgtcacaaggcggaagatgtcatgtccgtttccctattgcgatcagtccacgagtcgtcggttctcaaccgcctgcatcgactcgctcatggcaatccgatactgaccaagttcgagtttcagttcatgtttccggctgcgccacggattgaaaacgaaattccaagcgttccaccgatcatgggtttcactgtgacccctaactctcagccgcaaacaaatctgcacgtactggttggccgcaatggtgtggggaagacgcgttgcattcaaagcatcatcaatacaattctggagagagatagcgaaagcgcgcctcggggcgctttgctgcgtatgggagacaacagagacgagtgggctttttctcgcttggtttctgtgtcgttcagcgccttcgatagcttcgagcttccgcccgttggccagcagcgcactgcagccacttttgtcggtcttcgaacgcagcgactatcagatggaaagctgcttgatgagctcaagacgcctgatgcactcgcaacagattttgtagacagcttaggggtatgtcgcaacggacctcgaagggatcgctggttacgtgcgattcaaacgctttccactgatccgcttttcgatgaaacaggcgtggagaccctgatcgagcacgatttcgaatggcaggagcgagccaggcgtttcttcaagctgcttagttctgggcacgcgatcgtgctgctgacaaccacgcgcctagttgagttagtcgatgagcagacgctggtcgtgcttgacgagcccgaggggcatttacacccccctttgctatcggcatttattcgtaccatcgcggacttgttggtcgcaaggaacggatttgcgttgatatccactcattctccggttgtgctgcaggaggtgcccagaagctgtgtgtggatgttgcgacgtactagaacactcgcggctgtagagcgcccctctatcgagacctttggggagagtgcaggggtgttgacccgagaggtctttgggcttgaggtctcgaactccggattccatcaactcgtagctgccgtctcgaaccagccgggaacctcgtatgaggctgtggagcggcacttcgatggacagttgggagcagaagcgcaagcgctggcccgtggattagtcattaggcggaacgatccatga

SEQ ID NO: 348776 - DNA, 1032 bp, Pseudomonas aeruginosa
atggataagagcgtaattttttccgtcgcaggatccggaaagaccagcctgatcatcgagcgtctcagccttgatcagcgggcactgatcatcacttacacggacaacaatcaccggcacctacgcaacaggatcatccaaagattcgggatgatcccgtccaacatcacgctcatgacgtacttctcgttcttgcatgggttttgctatcggcctttgatgcaatcgcagctaggaacccgaggcctgaacttcaggcgcccgcccgacaggcagtaccccctggacgatctcaatcggtatcgcgatggcagcggcaggctctaccactgccgcctcgccaaactgttacaggtcgtggaggccatgccggacgtgcgcgcccgcctggagcgcttctacgactgcctgtacgtcgacgaggtacaggatttcgcggggcacgacttcaacctgctgctggagatttctcgggcgcaaattggcacgacgttcgtcggagacttccaccagcataccttcgatacaagcagagacggagcgataaacaaaaatcttcacaacgatgtcacgcgctacgagaaacgctttcgtgatgccggtatcacggtagacaaggcaaccctgagctgcagctggcgatgctcaaaaacggtctgcaatttcatcagcgcaaagctacaaattgcgatggccgctcatgaggaacgggtcagccggatcattacggttgacgaccacggccaggccaagttgttgcacgctgacccaaccatcgtgaagttgtttttgagcgaacactacaagtacggctgccactccgaaaactggggggcaagcaagggcatggatcactttaacgatgtttgcgttgtgatgggcccgggtatctggaaagactatgtggctgagaggttacaccaggctaacccgcaaacccgcaacaagctgtatgtggcctgtaccagggcgcggggtgatctgtatttcatgcccgagaggctgttgaaggcgtttaagcagggaaaataa

SEQ ID NO: 348777 - DNA, 498 bp, Pseudomonas aeruginosa
atgaaactcgatcgcgatttacagcgtaagctgttggaagagttgcgtgaacactacccggcgccacagtttactaaccggatggatcacttacacgctgatcctcggcatctgatggcaaatgctgcctacctgatcgagcatgacctagttgccggtgagatacgtatgacctccactgggaagggcgacttcatgccgacgcgacttgtgctgacggccaaagggctagatttcctcgaggatgacggcgggctcactgcaatattgggcaccctgactattaggttgcatgccgacagcatccgcgatctactcgccgcgcggattgaggctgcggagctggaggacagcgttaagagtcagttaatctctgaggtgaaaagcctgccggcgaaaggtttggaggcaatgatagccgggctcgctagagaaggactggctcgcatgccgaatgccattcagtggctgcaaacagcgctaactaatgctcagtag

SEQ ID NO: 348778 - DNA, 594 bp, Pseudomonas aeruginosa
atgagtgaggtgaagcggtacatcattggccgaaacggcctgcctgagctccatgattccggtgaatatgttgcgacgagcgactacgacgccctcgccgccgaggcccaggcgctaagggagcagaatacgaagttccagcacatgctggctgacatcacagtcaaacacttctccgacaacatcaagcggagcaccgctcagaagagcatggacgtttacctgtcggacggcatccgactgctggaggaagagcgcgaccgtatcgagcggaatcgcgatatgtggaaggggcaatgtgagcgacaggccgaacagctcgcagccctgcgcgcaagggtggctgttgtgccggaccgcctgccgcgcagctctgacatcgcggcgatccatcagcacagcattggctggaacgcctgcctcgacgaactggcgcgcatcaacggtatgacggtcagcgaagggctgttgcggcgtatcagcaatctgttcccggctgacatggaagatgacggatcaggccgtgccggctggtttacgcatgtgcgcgagacggttgctgaactccgcgccctgctgagcgagcaggcatag

SEQ ID NO: 348779 - DNA, 855 bp, Pseudomonas aeruginosa
atgaaccccaaggactggattgatttgctgcagcgcctgttcgcatggatcagtgaacggcgcaatccggtacgccagcaggcggcacgcgtgctggagacctttgaagctcatggggttgcccgtactgagatcaatgctctgcttccggaggcgctacagctttcggcttaccagtggtcgagtgtcgatcagctcaagctggccttgcgtcaggcacatctggattggctcgatcagtatttcgcgctcgaagaaggctggctaaccgggaagagcgactcagcccaccagcacctcttcagctacaaagcgccggaacggctacatcaatggtttcaggagcaccgcacacctgaggccgcactcgagttcaagctgcatctgctaacagccgacacccgcgaaatcggaccgggctcggaaggctattacgccctggttctggaacagatggatgaggaccactcggcgtgcaggcacttttaccacctcaccgaaggtggagacctcaagcattggccgagcctgattcatcttctgcaggtgttggcgattgcccatcaccacggtgccctcatgcgccgctcgcagctggatgcggcgtccctgtatcagctgagccaccataaagggcttattcccaactggctggacaggtgccgccctcatctgctggaagctgaccatgagctatggccgcatttttctgggcgtcccacctggcttgaggagttgcgtgcagataccgagcaggggctctttggtgcccagctgattgaggtcgttgagaagatccgtacggacattcaacgtttctcgcgccagcctggcacgcgacactgtgacaggtga

SEQ ID NO: 348780 - DNA, 1359 bp, Pseudomonas aeruginosa
atgagtgagttgccgaagggatggcagttcgtttctttgggtgaaataggttacgtgcaaagcggcgttgggttccctaatgagcaccaagggttaacttccggagactatcccgtctacaaggttggtgacgtttcccgtagtgtcacgcagaacaacggaaaacttcaatctgcaaacaattacgtatccaacgagattgccgaacttcttaaaggtcaaatttttgaagccggatcaactttattcgccaagattggcgaggcactgaagcttaacagacgaggctttgtcataaagcctggattggccgacaacaatgtcatgggctacaagtcccagcaaggcattaatgatcgctttatttactacttccttcgcactcaagattttgcggaatattcacgatcgactactgtcccatccattcgcaagggcgatatagaagaaatcaaaataggccttccgccaacagccgaacaaacccgcattgcccaaaaactcgatgaactgctggcccaggtcgacaccctcaaagcccgcatcgacgccatccccgccctgctcaagcgcttccgccaatccgtcctcgccgccgccgtttccgggcgattgacggaggattggagggttcaacactcgctcgcggaatggagaatttctactttcggtgatgaaggtgcggtttcaggtggcctaaccaagaatgcgaaacgcagcgaactaactttggagaaaccatacctccgggtagctaacgtgcacgcaaataagctaagccttggcgacatcacacatatcggccttactgacaaagaattcgagaaaacaaggcttattgccggagatatcttgattgttgagggtaatggaagccttgagcatattggtagagcagcgatatggaatgatgagattcctgattgctgccatcaaaatcacttaattcggtggcgtccaattgatgggatgcaaccgaaatttgcgctctatcaactgctatcacctcaaggtcgcaagcagctagttgaagttgcaaagtccactactggattgcatacgctaagcatcaccaaggtctcggctctggcacttccagtaccagaagaagacgaacagatcgaaatcgtccgccgtgtcgaacagcttttcgccttcgccaaccaactggaagccaaggtcgcctcggctaaaagccgtatcgaccacctgacccaaagcattctggccaaggccttccgtggcgaactggtgccgcaagagcccaacgacgaaccggccagcgttctactggagcgcatcaaagcccaacgcgccgccgcccccaaggccaagcgcggcagaaaggcttcggcataa

SEQ ID NO: 348781 - DNA, 207 bp, Pseudomonas aeruginosa
atgagcggcaagcgcatcggcgcacgtccgctgaccgctccacaagccgaatcctggatacaccagggcgccgccttcgacagcgctcggctgacgctgaacgtgacatcgtcgctgcatacgcgcatcaagctgacggccttcgagcgcggcgtgaccatggcggaaatgctgcgcgaggtgctgaagcagcaggccacgtcatga

SEQ ID NO: 348782 - DNA, 639 bp, Pseudomonas aeruginosa
atgatcgtcgccctgctcaaccaaaaaggcggggtgggcaagaccaccctggccacccatatcgccggcgaactagccctgcgcggacagaacgtcatcctgctcgatgccgacccgcagggctcggcgctggactggacacaacggcgcagccagcaaggtttgccgagattgttcagtgctgtcggcctggcgcgcgagacgctgcatcaggaagccccggagctggctcgtcgcgccgatcacgtgatcatcgacgggccaccgcgcatcgccgccctcgcccgctcggcgttgctggcggcagatcgcgtgttgatcccggtgcagcccagcccctacgacctgtgggccagcgcggagatggtcaacctgatccgcgaagcgcaggtgttcaggcccacgctgcgcgcagcgttcgccatcaaccgccgcgtcagcaccacggtgctcggccgggaagcgcgcggcgccttggccgagcaaccgctaccggcactgcaggcggaagtacgccagcgcatcgtctttgccgagagcgtggcagcaggtcgcctggcgcgcgaactagcaccggacagcgccgccgcgcgcgaggtcagcagcctggtcgacgagctgctgaggtggtcgccatga

SEQ ID NO: 348783 - DNA, 177 bp, Pseudomonas aeruginosa
atgagcgaagagatcaggatcaaagttgccgacctgaccgaggaaaccaccagcattccgccgcacttagcgatgtatatcgattaccgcgccatggcccgtgacatgaaatacagcggcgacctgttcaccctggagactggcttcgagcaggtgcatgtgttctggaatcgctag

SEQ ID NO: 348784 - DNA, 1233 bp, Pseudomonas aeruginosa
gtgagccaagaggatgatgagaagtacccagccagcgccgtatcctcgtggagcggcttcgtttatcaagggaaagttgcactatatcactccctcaagcttattcatgatggcgacctagacttcgaacttcagctagacagtagtgatgacttcgccatttataaaaatggaaaactacacaccgctcatcaagtcaaagctaagataagtaaatatcgaagtggttacactgcggcgctggaaaagtctactttaattgaatacgacaaaatcaagggtacaacgcgttacttccatgtatccgtactgctagataacacagacgatcacataggtgctagtggagaagcagtaaagttctacagctatggagaaaaatattattgcggtctgggtgaggttgaagggctaaccaaagaactgataaaaaaattatgtgagaaaaactccatcactgttagtgataatcttataaatttcaactactgtttgctatcagaaaaaattagtaccaaggcaatacataatcacaaattgaatcaggttgacgggatctcagaagacagagctgcatacgagggccgtattaaggccaaaaatattttagaagacctgctgaccgagaatccctatcagaatcgggactactatgcagttgaattaaaggccaggctacaaactcatctagaagaaagactggatcaggcgcttccaacaatgagtgacgccacttacgagagagctaggcgtctgtgtgagcacattcgcgaaaccaatatcaacgaattgaaaaccctatgccagatgatgaagccctccgagcgatttcaagacgttcagacgaacgacatcaggagatacaccaagctcatccaagctatttcggtggagcccatattcagccatctcccgcactacctcgacagcgaaaatcggttctacgtacctaccgctcttgacgtggatgaaagcgaagagtgtgagtctgacataatccgtgaaatgaaaaacaacggggatctgctgagactactttttgagtacaaccatctaatcgccagcaaagcagaaacctcattcacctttaatacaaaattcacaaactcggctgacttcgacaacaaacaggccactgagaaactcgaaagcaacatcaccaaatcactatgtattagcgtgataacaaaagacgacgcggagggtcgactgaatgataaagcaactcattga

SEQ ID NO: 348785 - DNA, 666 bp, Pseudomonas aeruginosa
atgataaagcaactcattgatcaagcacttgttgcccatggttttgtgagtaaacgcgagctggacaccacgagtttctatgtccgcgaatctggatctgccatcaggttcgcggccctacatactctggacgacctccctgacccagccgagctgaataacagaatcaatctccttgctcctgaggcatttcacagaaacccgagttttaagaagaactgcgacttgatttgcattcaccgccttgacgttctggccgaattcaaggatcacgaagaagaaatcttcgcaattgaggaagacccgcacttttataaaaaatatgtcctctactacagcattgcggaagaaatcgctctcaataatttcacctacgacaaactggcatccgtgattgctgacaaaaaggaatttcttgactacaaagaaaaccctcttgtcgccacacaatacagcttcgcggcgaagacctttatcaagcttcctttcttagagctacctagccatcaaggaaaccttgtttccttgaggttgcaagcagctgaggccgtagcagaagccggtctgaacgatacatattcgactatccagcaagtcacagccaaaaacgccgacgacattatcaaggaaatgattcgcaatgaaatggaaaatatccaagattga

SEQ ID NO: 348786 - DNA, 2334 bp, Pseudomonas aeruginosa
atgaaatggaaaatatccaagattgaagtctctagcttcaaagcattcaagcatattttcttggatcttggcgagtcgtccttgctaactctggatggccctaacggttatggcaaaacaagtatattcgacgccatcgaactactgctcaccggccaaatcaatcgaatacaaaacctattctctacattattaaccaagaacaagagagactacgcggacaatctattctggaacagtcgctccggcgagaaagacctctgcattaaaatcgaattcattaatgatagccgcaaacttgttttagccaggcattgcccagctgcgatattcaaaaagccagcaaacaatcgtgcagacaaatacgaaaatttcaggctttacgagctgccagaattcgaatcatctgacttcacgaagatcaatcagcgcgacaacaatttccttgacgaagttttcggaaataatttcagagaaaacttctccttccttaactatctggagcaagggcaaaaccggctgttacacactcgagtagacgaacgtaaggataaactaggaaacctctttaacatcagcgatatcgaagccgagatcgaaagctgcaacaccctatacagtaaacttacgaagcacatcaacgatcctgagcgtaaggcaaaagtcgagtcactcacggaagagatagccaccctaagagacacactgcaggcagaggctggaattgttgggtacaaaaagctctcgacggccgatgtccagccagggtgggacaaagagatccttttctcaacgtattcagcggtagaccatactgcctaccaggagtccgttcgcaagattgccgcccttctgccactcaaagccacgataaaaaccagggttcacaacgagacaatcgatgccgacattgatcgtaacgaggaatctctgagaagtctggctcagtttggtaaagaccttggcaagcttgaagggcttgaagctatcaagaaggtgattgatgagttagagcgttcagcaagcatcatcaaacgcggtgccacggtgatcaagctcgaagaagcccgatcactaccaagctgggcggatgggcgtcttgggtggtttgagtcacaaattgaatctcgaaacagcctacgagaaaaaagcagcgccaacgcgaacgtcgtagccgaattggaacgcctaaaaaggcagttgcttgaggaacataataagtcttatcccaacgatcaattttgccctctctgtggcgctgattgggaagatcacaaatcaatggtggatgccattgaagaaagaactaagcagatctctgaatcactaggccaggacggcaaggacttagttaaccttatcgcggctatggacgctgagctgaagctcatcgatacccatatacaagacaatctgaaacttctcaggcctacatttgaaccaaatcttcatgcagcactgaccagaattaagcttcggctcccagcaataacccagctactcgagaagctccaaagcgataacattcaacttactgactcatttacggaaattgatgacgtagtagatgggcgacttgaaaagctcaaggagattctaagaaataaaaaacagattgaagctgatgccttagcgctgccagaggactggcgagaaacgacaaacagcgccttcaaagacctgcaggacttctacatagccacggctgaagacctgaaagaaaaagagcagtacatatcgattaaagctaacgaagctcaaagctccagactccaaacctgtattaccgatcttaagcttatcgaaaaagaaaccctggcggcccaaaatgcacaaagtaaaatcgaaaagctccgcagcacactgaagaagacagagcagagttataccgaccagacaatttcggctattgagttcatattccacatctacagtggccggctgatccaaaactaccagcgtggcttgggcctgtttatcgagagccgcgaaggaacgcagttgaggttcctgactgccgagaagtctgaacacgacgcagtcatgtccatgagttctggtcaggtgtccgccctcagccttgccttctttctctcgctcaacaaggtctatgctagggtgcctctcatcctgattgatgacccgtcgcagtccctggatgaagtcaacattgcttccttgacagacctactccgttgcgaactcaagcattgccagttggttgtctcctcccacgaggacgatatctcggcttatatgcgctatcggtttgacagagcaggtttgacaacaagttcactcaacatgcagctcttggcgaaagaagcttcgtaa

SEQ ID NO: 348787 - DNA, 1164 bp, Pseudomonas aeruginosa
atgaaaactttttaccttggtggccctacgtggatgttcctaataccagatcagatgtatggggaagacggaaagctccgcgcggctcatcaccattacaaaaacgcagacatatatttcataaccaaaatgtgcaaaatccggttcgacacaaggcaaactcgagttacttcagatggccagatacagacgacaatcattgttggcgacccatctggagagcacaaaacctaccgctttgtgttcccgcacatatacacactgtattcagtcaaacacatcgcccctcaattcgaaagcgtagagcatttctttaaatatactctatgccactactatcgccctcagtcacgcctgagtcgcgctgcgtataagtttggcagatcactagctacaatcaaagcactatcgtctttaggcttcaccttaatgaagtgggcgtacgcaagggaagtgaaaatctctcacaagaccgcatacgagataacgatcgacgatccccttctaagaagtattgttaacaatgccgaagtcgagcaaatgaagaccgaaaatccggaagtataccgccgccaacgggaacttcatgacgcagactgggatacggaaaggttaaaaaaagttgattttagtcaacttcctggcggtggtgaagctctggcttcacggctaacggtggatcaagttatcaacatatttgatgtcgatgtcggggtgcaggaaatactatatatcggaaaaaccaacagagaaccttttgagcgacttttgcctcatgagaaattgcaagagttagaatcaaaattcttaaggaatgatggtgaatccctcatagttcatctatttggattcaaaaaaatagacattgcaaatggaaccgtcaatcaaacaaagctaaaaaaggaagatgcgacctcagcgtgcgaagcggagcttataaactacttcaagccagcaatgaatagcgactacgtgaaagatacaggcaagtccaactgggattacattcggaagatgcgagccaataagtaccaacaaatactcgtagaattagacattgacggccaatataccaagttcgcgtcaacggaggcgggcatttccggaaagaataagcacgcatttattgtaaacctttcgtcgctggtccgacaggttcactga

SEQ ID NO: 348788 - DNA, 1215 bp, Pseudomonas aeruginosa
atgactgacgtacacctgcctgcaattgcagcgaatacgctgcctgtcctcgatcaattgaccaaagccctaggagttccccgggatattctcgcctcgccaggtgagatagaaaccgcatggataaatcttccgggaattctgaaaaaaatcccacctgctcttcgaaccgaagggatggctcgcatgtgtgtcgccgtcgcgtctgggctcttcgacagtgcaatcaactatgtctggaattgttcaataattgagctgcgggaaaaagtaaaacgctttggtctgaacgtggtcgaacaaatcaccggaaaaacagcattcgatgaacaggcgctactcgatctaaaggatgccgaactgcttaacttgtgcttgaagctgaacctgatcaccgaggacggatatttctttttagatcagtgccgagatatccggaacaatttttcggcagcacaccccgtcgttggaaaaattgacgaccatgaatttatcggatttgcaaaccgatgtgcaaagtatgctctcggcaatgagcacaatctgattggggtcaacctcgctgcctttatggctgcaatcaaaggaggaaaattttccagagagcagaaggaccagtgggttcatcgaatccggcagactcatgaagctcaacagtatcttattttcggttccctccatggcatatacagcgaccccgctagcaacgaggaaggccgagtcaatgctctttctgtagctgccgaattcgccccccacttcacacccaaagcccgatcagacttaataaaccgccatcacgactacatagcgaagggcgatgaaaaacggcataaagcgtctcagcagttcttcgaaaaattgggaatgctcgccttgctcggagagcatgaggtccactcgctgctttccaatgcgtgcaaaagactaatgactgtgcatcagtccttcgataatttttataacgagccgtcttttgctgaacggttgttgcagttatcacagcaggttgccgttcccgacacagtcaaggatgaactcgtagaaacggtcctgacctgtgccaccggaaatccgtatggagtgtcaaacgcggcagtcccatactttcacaaaatgatcaaaggattctctcctgccgaggtcgagataatgctcagccttccggtaaaaaaagggatcttgaatgaaaggcttaaaatcagtgcgacctga

SEQ ID NO: 348789 - DNA, 264 bp, Pseudomonas aeruginosa; identical to SEQ ID NO: 335931

SEQ ID NO: 348790 - DNA, 1074 bp, Pseudomonas aeruginosa
atggccgcggtggcaggtgtcttgaatgaaaacccaaccatgaaagcagtggctgcagccatgcggggctttgagcaaagcccgaccatgaaggccatggctgcagcggctagcgtctttaatgaaaacccgacacttaaagctgcagcagcgggagtgcgagcctttgagcaaagcccgaccatgaaggccatggctgcagcggctagcgtctttaatgaaaacccgacacttaaagctgcgacagcagcagcgcgagcctttgagcaaagcccaaccatgaaggctatggctgcagcagctagcgttttcaatgaaaactcgacgctgaaagcagctgctgcggcaatgcgggcctttgaggcaagtccggcaatgctggagcttgcgagggttgctaaggcctgggagacaaatccagcgacgaaggcgttggtggattcggcccaggactttaatgatcaccccagaataagtgcgctggcagaatctggcatagctccggaacagtggggcgttaccgatccgatcacacttgaggctgtttttactgaactgtcctctcgggctgaatctgcgacggtggtttccacaccatcacagggcggtgaggttgagagctcgcttgcagtcctagatagctataccggtgaggtgatcagctacagcccagcaaagcacccactgcttggggttccaacatgggtcatgctgttatggctctggctctttgcgccagcggtatatgtgatcgtcaactgggaaagtgcccgcgcagggttagctgatctcaatgcacggcttccacaaacggaaacccttgctggggtgagaaagttcattcgcaaggagttggccggtaaagctggagacttccgcattgtcactgggtcagatgtgcgtctgcgtgtagcgccaggaatgaagtcagaggtgttactgcatttgcccaaggaatcaatcgtggtcgtgctgggcaaagaggatagaacctggcttttcgtttcctacgagcaccagggctacatgattgatgggtatgtatccactacctacctgaagaaggcgaattag

SEQ ID NO: 348791 - DNA, 543 bp, Pseudomonas aeruginosa
atgttcatccgcgcatacctccgagcctccaccaaagaacaagacgccggtcgcgctcgggccgcgctcgagcagttcgccagcgaccataacaagatgattgcgagcgtgtacctggagaacgccagcggcgccacctcagatcgacctgagttgctgcgactgctcaaggatgcccgcaagggtgacgtgctgctggtggaatctatagaccgcctttcgcgcctcccggttgaggactggcaaaagctcaaagccgccatcgactccaagggcctgcgcatcgtggcgcttgacctgcctaccagtcaccaaggaatgcaggacaccaagggcgacgagttcactagccggatgctgggggccatcaactcaatgcttgtggaaatgatggcagctattgcccgcaaggattacgagcagcggcgagagcgtcaggcccaaggtattgaaaaggccagggcggccggcaaataccaaggacgcccggtcgatgccgatttacacaagcgagtgaaggagctatttgtagtggtctactga

SEQ ID NO: 348792 - DNA, 585 bp, Pseudomonas aeruginosa
atggcggccattggggatttgagcgaactgcacgagatgggaaaaccaacaagcggcattgcctggaaggcagcaaccatagggggtgtggcctacgacctgggccacctgcaccctcacctctgggaggtaaccatcccgggcaaagacgataaacccgacctggtgctcaaggtgaatgtcacctatggcctgcactgcttcgcccgggacgcgctaccaggtgagcaggtcagccaggatcgctggtacagcgattcacgcgagaaacgggtgttctgcgacctgcgatgggagctgtcgaagcaactgccagggatcgtcgcgactttgaccgagcgccgatgtatgcacacgggccgggaggagttcgtcaccctggaggtggtccaccaggggcgcaccttcgactacgcagtgttcttcaccgtgaccaaggccaagaaggccgagggggcgcacctcaacctcttcgtgaacagtgcccacgagcgctacgatccgctgcagtacaagaagcccatcagtttcaagttcatcctgctgaaccggtaccagggcaaagagatcaaggtgccgcgctga

SEQ ID NO: 348793 - DNA, 372 bp, Pseudomonas aeruginosa
gtgactcaccctctcgccagcctggccagcgctccgctggcccaggctgcgcctgaggccttgatcgaggtcgccctgctcgtttggtacgaccctgaccctctcccctcactgaaacgcgccctggatgccctggagggcatccagcagcgccgcgccaggttcgccctggacatactccgccgatacccctgcacgccgacagagcgcagccgggaactacgcgacctggtcgacctgaaagttagttttcgcggggggccactgccggcattgctccaggcctgggggctggatgacaccgaccgcatggacaccaagcccttgcttccctaccagcgacgtcactaccgaccagaaacaggcgattga

SEQ ID NO: 348794 - DNA, 222 bp, Pseudomonas aeruginosa
atggctgttgcgattgtatccccgaacatcaccgccgatctgctggtcgagtccagccccgggctggattcgccgcagggcgacgtgtacctgcaggcgctcagcgctctgctgcaaccggcgctcgaccaggtcgtcgccgcctaccaggcggcgtcggccacccgctcgacgcaacgcgccttccggcgcttcctggtcaacctggcagaggagggctga

SEQ ID NO: 348795 - DNA, 402 bp, Pseudomonas aeruginosa
atggcttggcacaccatccaggaagcgcagaagctgaccggcaagagccgccgcacgctctaccgtgacatggccgcaggccgcttgtcctgggagcctgagggcgacagtgcacgccgtttggaaacgtccgagctgatccgcgtctatggcgagctgaaacccctggcacagccagaacccgaaaaaacggcacatggcgacactggccttggcacacaggatacggccctgatcctggccgaactgaaggctttacgagaggaggtcgccgagttgcgccaggctatgcgcctgatcgagcacaagccggagtcggcacagcctgacacggctgaaagtgtgccagatgacaagccgttgccctggtggcgacggccgctattcacccggaacgggtaa

SEQ ID NO: 348796 - DNA, 453 bp, Pseudomonas aeruginosa
atgcaccacctggtggctcgcatgggccatcagaacgcggtggtagtccctcagaaggtgctgggcaagatcatgaactgcagcgtcgacacggtgcagagggcgctaaaggttctggaggctgagcgctggatccagatcgttcggatcgggaagggcaaggaagcggcatacgtgatcaatgaccgagtagcttgggggcaggctcgtgaccaactgcgcttgtcgatgttcagcgcgacggtcatagcggatgttgaggaccaggatcccctatccctttccaccgagcccctgcaacgcatcccgtccctcttccctggcgagacagccataccccatggcccaggcgacaccccgccgtcacagccgattttggaggggatggagcctagcctggttcgagatcctcgcaccctggactgggtgaatggccaggccgacaaagagtag

SEQ ID NO: 348797 - DNA, 285 bp, Pseudomonas aeruginosa
gtggctaccctcgacgatttgaagcagaagcgcgaccaactgaccgccaagattcagcaggtcgaggcccgcgaacgtgcccaacagaagaaggctgatgacaaggtgaaagttctggtaggcgccgcgctgctcgagcagatccagcgcggcggtgaggggctggacgatctgctggccctgatggatcgtttcctgtcgcgccagtacgagcgcaaggccgtcctgggcgaggatggcaaggggtctgagacactgctgcgcctggtcgctcgcagacaatag

SEQ ID NO: 348798 - DNA, 291 bp, Pseudomonas aeruginosa
atgcgatgcccttccgtcctgctggccgtactgctgaccgcttgcggccagcagtcggccgagagcctggcagacgccttgaccgcagatcccgtgcggctcaaggcgttgcgtgcgcagtgcgcggatgaccggcaggccgtgggcgaaaacgactgccgcgccgccgtcgaagccttccggcggcgcttcttctccggccaggccgggccggacgaataccggacgctggccgagctgccgccgattccggcgagcttcgatgaaccccttggagaggacgcgccatga

SEQ ID NO: 348799 - DNA, 267 bp, Pseudomonas aeruginosa
atgatgaagaactccattccgttcctgctggccgtggcattaaccgcctgcggtcaatcggagacgcccaagcaggccgacgggccgaccgtggaagaactggccgccgacccggcacggttgaaggaactgcgccagcagtgcaagaccgatcgcgccaggctgggcgacgtgctgtgcaaccgagtcgccgaggctacgcgcaagcggttctacggcgatggcaacaccccgtacacgcccccgaaggaaccgcccaagttctga

SEQ ID NO: 348800 - DNA, 411 bp, Pseudomonas aeruginosa
atgttgattgacggcacacagttccccctggtctggatgcgattaaacgcgccgggcaccgatcccgaagcctcgccttttgccgagttcgaggcattgctcgcacgtaaggaagtcttcgttctgctcaacgacgagggacttgataaaagcgagcacgaacattcgccggaagaaatgaagcaaacctcgctttggatgaaacgccacaagagcgaattgcgggccttcgtcaaggcagggatctacatcgaaccgagtaccgctaagcggctggcgaccaaggcgttcaccatggtgtatgagaagttctggggctatcccatgctcatggttgccaccaaggatgaggcattggctctggcacaaaagttgttgctaggcgaacaggcggatgcaaggacgctctag

SEQ ID NO: 348801 - DNA, 852 bp, Pseudomonas aeruginosa
atgtcgagcattgccatcaccgatctgaccgtgaccagggacgtcgataacgtccctcggcccgttgttgccctgagtgccacgacggtatccaaagactgggaacatgcgaggcatcagcatcgcaaggcgcaactgctttactccgttcgcggcatcctcaattgcgaaatcgaagacggcgtctggatcgtgccgccgcagtgcgctgtatggataccgggagacttgccccactcagctcgggggtcgggtgaaacggaatgctattgcctgttcgtggagcctgatgctgcaccggatcttccgaaaacctgctgcacaatttcagtatcgccgttactacgcgagttgcttctgaaggtggcgggtttccccgagctatacgcgctggggagccgggaagatcggctgattgccgccttgctggatgagttggcggcggctccggtggaagacctgcatttaccgatgccgcgcgatccacgattgcgtcgtctcgcggaaatgctgttggccgaccccacagacaaaacttcaaagggcgattgggctacccgcattggcatgagcgagcgcagcatgagccgccttctgctgcacgaaatcggcatgagcttcggacgctggcgccggcaactgcatgtgatccttgcgcttcaacgcctgaccaaaggcgaaagcgtgcagacggtggcgttggaactgggctacgaaaatgccagcggcttcgtcaccatgttccgcaaggcggtaggcaagccgcctgcacgatacctctccgaccgaacgacgaacgcggagtccgccgccgtacccggcatcatgcttcctgatcgagtttcaccttga

SEQ ID NO: 348802 - DNA, 795 bp, Pseudomonas aeruginosa
atggatttcggactgaaaggaaggcgggcactggtgactggctcaacagccggcatcgggctggccaccgcccgcgcactggcagccgagggcgcctccgtcacggtgaatggccgaacccaggctcgcgtcgatagtgcagtgaatgcgctgaagggcgaacttcccggcgcgaccatcaccgggattgccgccgacctgagccgtagcgaaggctgtgagttcctgatagggcaacttccagacatcgacgtgctggtcaataacctgggcatcttcgagccaaaagcgttcgagcagatttcagacgcagactgggttcgtttcttcgagaccaacgtgttgagtggagtccgcctttcacgtcattacgtgcagggaatgcggtcgcgcaactgggggaggatcgtgttcgtgtcgagcgaatcggccttgcagattcccgccgaaatgatccattacggcatgaccaagaccgcgcagctcgccatttcgcgtgggcttgcagagacgctcgcaggcaccggggtcacggtcaacagtgtgcttcctggccccactgcctccgagggcgtcggaggctttgtgaccgaactagcggcaagccgtggcgttgatacctcgactgtagagcgtgagttcttcgcaacggcccgcccgtcttcagttcttcaacgcttttcgacgccagatgaggttgccgcgatgattgcctatgtctgtagcgcgcgcgcatccgcaacgacaggcgctgcgcttcgcgttgatggtggtgtggtgcgggcaatcgcataa

SEQ ID NO: 348803 - DNA, 360 bp, Pseudomonas aeruginosa
gtgcctcgctgcctcgacgccagccagatgtatcgcatcctcagcccccagttcgagagcctcacaccggcctcgatctaccgtgcgctgaatgatttatggactgctgggctgctggttcgcacggaaggcgcgcaaggccgcgcgctctatgccctcaaaccggacaggaagaaccttcacaacgacaccatgcgctgccattgtggcgcgcggttggttttccttgaagacttggcattgcgcgagcatctccggttgctggcaagtaaggaaggcttcgatctcgataaggaaccagtttttaccatcaccatgacgtgtacggaatgtcggcagttacgcaagggaaggcggtag

SEQ ID NO: 348804 - DNA, 1470 bp, Pseudomonas aeruginosa
atgtcgtcctttgaaccgattgctgccatgactactgcttcgcgtccggccgtgtttccctctcggcgcgctgccttcatggccattgccgttgccgtgatcaccgcaggctgcgccagcgggcccgactatcacgctccggccacgccggaaacctgggcaggccccttcgtcagcaagccggccgatacggacaccgctgtatcactgccggcggactggtggaagctgtatgacgatcccgcgctcgacaatctggtgcaggaagccctgtcggccaatactaacctgcgcgtgacgctggccaacctcgaccgcgcacgggccatctacaaggaagcgcgcggtggcctatttccctcgaccaacgtatcggcggccgcgggctatggccgcgaccagaccacgtggacgggcaccggccaggcgcccacacaatggagctacagcggtggcctcgacgtctcctacgaactcgacttgttcggtcgagtcaggcgcgatatcgaagctgcacgcgacgacaccgatgcggtcgccgctgcccatgatgccgcgaaggtcgtcgtcgtcgccgagacgacacgcgcctatgtggacgcctgcacctatggcgaatccatcgacgtcgcgcactcgtccattgaattggctcagcgcagcctggatctgatcagccgccagcaacacgccggctcggcgtcgcatctggacgtggaacgggctggtgttacgctggcacaggcccaggccgccttgccgccgttgcagggtcagcgggatgccgcgttgtttgagttggccgcgctgatgggccgcacgccgtcggaagtgcctgaatcggcgcgcgtatgcacgcaggcaccggagatcgcgggggcgctgccgattggtgatggcactgcgctgctgcgccgccgcccggacgtgcgtcaggccgaacgccaacttgcagccgataccgcccgcatcggcgtggccgttgccgacttctatccgcgcgtcacgctgggcgcctcgggcaactacctgcgcaacgactacctgaaaggcaatcgcacctggtccttctcgttgggcccgctgatctcctggagcttcccaaacacaatggtcgcgcgcagccgtatcgcacaggcaaaggcacaaaacgcggcatcgttggccagctttgatggcactgtgctcaatgccctgaaagagtccgagcaatcgttgagcgcctacggcgcggcgatgcagcaacgcgaggcgttgatcgaggcgcgaaaccgtgccgagaacgcctttcggttggctgaccagcgttatcacgccggctccatcagctacctcgacgtgatcgtggcgcagaccagcctgattaacgcgaaatcgcaggtggccgctgctgaccaacgagttggctccacacgggtcagtgtgttcaaggcgctcggcggcggctgggagcaagccagtacgcagtaa

SEQ ID NO: 348805 - DNA, 3093 bp, Pseudomonas aeruginosa
atgcatttcaccgacattttcatccgccgccccatcctggcactggtggtcagcctgttaatcctgctgatgggtgccaccgccgtgttcatgctgcccgtgcggcagtacccctatctcgaaaacgccaccatcagcgtgagcaccaccttgccaggcgcgacccaggaagtgatgcaaggcttcgtgaccacaccgatcgcgcagtccatcgccacggccagcggcatcgagtacctcagttcgaccaccacgcagggcaagagcgagatcaaggcgcggctagtgctcaacgccaatgccgatcgcgcgatgaccgaaatcctcgccaaggtgcagcaggtcaagtaccagttgccgactggcgtgaccgatccggtcatcagcaagtccaccgaaggcggcaccgccgtgcagtacgtcgccttctacagcgacacgctgtcgatcccgcaggtgacagacttcgccacccgcgtggcgcagccgctgttcaccggcattcccggcgtcgcttcggcagacatcatgggcgggcagacgctggccatgcgtatctggatcgatccggtaaggctggccgcgcgcggtttgtcggccggagagattgcggccgcgctgcgagccaacaacgtgcaggccgcgccgggccagctcaagagttcgctgaccgtcaccaacatcagtgccgccaccgacctgcgcggcgtcgatgactttcgccagatggtcatcaagtccaaccccgagggtggtctggtgcggctgtccgacgtggccacggtggagattggtggccagaactacaacaacgccgcgttcgctaccggcaagccggcgatcttcatcggcatccagcccgcgcccgacggcaacccgatcgacatcgtcaagcaggccaaggaactgattcccaagatccgcgaaatggcgccgcctggactgaaggtctcgcccaactacgacatcgcaaccttcgtcaacgcctccatcgaggaggtcaagcacacgctggtcgaagcgatcgtgatcgtcatcgtggtgatcttcctgttccttggcaccttccgcgcagtcatcattccggtggtcaccatccctctgtcgttggttggcaccgccgcgctgatgctggcctgcggcttctcgatcaacctgctgacgctgctggcgatggtgctggcgatcggcttggtggtcgatgacgccatcgtggtggtggagaacattcatcgccacatcgaggaaggctacacgccggtgcgtgcagccctgctgggcgcgcgcgagatcgtcgggccggtgattgccatgaccattacgttggcggccgtctacgctcccatcggcatgatgggggggctgaccggcgcactgttcaaggagttcgccttcacgctggctggctcggtcatcgtctcgggcgtggtcgcactgacactctcgccggtcatgagttcgatgctgttgagttcggcgcagggcgagggacgactggccaaacgcgtcgagcacaccatgcaggggctgaccgctttctacggacgcctgctggcacgcacgctggccgcgcgcggcgcggttctgctggtgggtgcggtggtattggcggccatcgtggtgctgttcaatggcacgcgccacgaactggcaccaatggaagaccagggcatcgtactggccgtcaccaaggcgccgcagtatgcgggagtgggctacaccacccgctatgccgagcagatcgagaagatattcgagtcgatccctgagttcgacagcagcttcatgcatatcgccggcattgctggcggccagaaccagatgctcggcggtgcgatcctgaaggactggtccgagcgcaagcgttcggccaccgaaatccaaggtcagatccaggctgcgggcgccgccatcgacggagaaaccgtcacggccgtgcagatgcctccattgccgggttccagcggcggtctacccgtgcaaatggtgctgcgctcgcccgatgacttcaagacgctgtacgagactggcgagaagatcaagaccgccgcctatgccagcgggttgtttctctacgtgcagaacgacctgtcctacgacagcccgcaggcgcatatcaccatcgacaatgcgagggccagcgaaatgggcgtgaccatgcagtccgtcgccgatacgctggcggtgctggtcggcgagaactacgtcaatcgcttcaacttccacgaccgctcctacgacgtgatcccgcaggtgcgcggtggcgaacgcatgacgccggaaaacctcggacgcttctacgtcaaggcgacttccggcgcgctggtgccgctgtcaaccgtgacccgcgtcgagatgcgtccgcaggccaaccagctcacccagttcggccagatgaactctgccacgctggaaatgctgccggcaccgggcgtaagcatgggcgaggccgtgaagttcctgcaatcgcagccgctgccacccggcaccagcgtggactggctcagcgacagccgccaattcgtccaggaaggcaaccgcttgctggtgtctttctgcttcgcgctggtggtgatcttcctagtgctggcggcgcagttcgagagcctgcgcgatccgctggtgatcctggtgacggtgccgctggcggtctgcggcgcgctggtgccgctgtggctgggctttgccacgctcaacatctacacccagatcggactagtcacgctgatcggcctgatctctaagcacggcatcctgatggtcaccttcgcaaatcacatccagcatcacgaaaacttgagtcgcatcgaggccatcgagaaagccgcagcagtgcgtatgcgccccgttctgatgaccactgccgctatggttgcaggcctggtgccgttgctgttcgccgacggcgcaggttcggccagtcgcttctccatcggcatcgtggtggtgatgggcatgatgatcggcactttcttcacgctgttcgtgctgcccaccatctacagctttgtcgccaaggatcaccgtgcggcagcggaaagccctcgcgcccgtgaactcgctaccgcggaggctcccgatgtcgtcctttga

SEQ ID NO: 348806 - DNA, 1146 bp, Pseudomonas aeruginosa
atgagcgccgccgttacctcccgtgcaaaaccccttgtcatcagcgtcattggcctcgttgtggtttttggcctgctgtatgcctggcgcaccactcgcagcagcggcgcagaccatcaggccatgccgccgatgcccgtctcgacaatccgtgcagagcctcgcggcgtgtccgaggagttgcaggccattggcagtttgcaagccgtgcgcgaagtgctgctggcccccgacacgtcagggcgcgtgaccgccatcaatttcgacgcgggccagttcgtgaaggaagggactgtgctagttcagctttacgacgcccccgaacaggcggatcgcgccgctgcggcggccaaggccgactttgcacaattgcagctccggcgttcgcaagagctggcccctaccggcgcagagccacgtgaactgctcgaacaacgcaaggcggaggccgcccaggctgtcgcggcggttcggcaactcgacgcgcgtatccagcagaaggccgtccgtgcaccgttctccggccagatcggcatccggcgcatcaaccccggccagtacctgaacgccggcgatgcgatcgccacgctgacccagcttgatccgctctacgtcaacttcacgctgccccagcaggatttgcccaagctgacgccgggcgcgtcggtgcaggtgacggtggatgcggcgccgggccaagtgttcaacgcgaaggtcagcaccatcgagccacgcatagacggcgaaacccgcaacgtggccgtccaggcactgctgctcaatgccgaccggctactgaagtccggcatgtattcgacggcgaagctggcgttgcccgccacgaccgacgcgattgcgttgccgctgacggcgatccagacatcagcctccggcgacagcgtcgtgctcgtgcaagagatcaatgcggaagggatcggcaaggcggttgcggtaccagtcatcaccggccgccggctcggcgaggaagtcctagtgacgcatggcgtcaagcccggcgacatcgtggtgacagcgggccagaaccggctaccgcccggcgcgacggtgaagatcaacgcggccgctcctgccgccgcagtgctgcgtgcccccccggcggtcgcatctaccgccagcgcacgctag

SEQ ID NO: 348807 - DNA, 2217 bp, Pseudomonas aeruginosa
atgaggagcgcgccccgcaccatgcttggctcggcagttgcggcggcaatttttattagcgcgcagggcgcattcgccgccgagccaacgcagatccaaaataaggagggggaaaaaacgtccctggaggcgatgaccctgccggcgataaccgtgacgggtaagggagatacggcgacgaccgaagactcgggttcctacacgaccggccaaaccggggcggcgacccgcctgccactgtcgctgcgggaaacgccgcagtcggtcacggtcgtcacgcgccagcgtatggacgaccagcaattgaattcggtgcaggacgtgctggagaacaccacgggcgtcgcgtcgtaccagtccgacagcgagagaacgagcttctattcgcgcggcttcctgatcaacaacattcaatacgacggcatacccactgtcgtcggcgacatcatcaacggcagcggcatcggttctctcgataccgcgttctatgatcgtgtcgaagtcgtgcgcggcgcctccggcttgctgaccggcaccggcaacccctcggccgcaatcaacttggtgcgcaaacggccgacccgtgaattctcggcggccgcttcgctcggcgcggggagttgggactcctataggggcatggccgacgtctcgacgcccttgaccgaggacggtcgcatccgcgcgcgcctggtggggacgtaccaggacggacactcgtacatcgacggctacaagccggagaggaaggggttctacggcatcatcgaggcggatctgaccgaggacacgacggtgagcctgggctacgactatcaggacatcacgccgaaaggctcgacctggggcggcttgccgctatggttcagcgacggcacgcaggcggagtattcgcgctccaagacctacgcgcaggactggagctattgggacaacacgctcaagacggcgtttgccgaaatcgagcaccgcttcgccaacggctggaacgtccgggccgtcgccaaccagtaccgcaccgaatacgatgccgagttactcggcttggtcggttaccccgatcgcagcacgggactgggtacctatccctacggggcctatccggtggcactggcggcccaagggcgcagccgtcaaaacaccttcgatgtgatggccagcggccccttcgagctgctgggccgtcagcatgaactggtggtcggggcgacgagttcgcgtcgcaccgccagcaaggaggaagtctcgccgttctatccaggctttgtgccagtcaatgtctatgacctgagcactgcctatccccgacccgacttcgatgccatggcttcgatcccgacgcgcaccaggatcaagcagagcggcttctacagcgccgcccggttttcgctggccgatcctctgaagctcatcgtcggcggccgcttgagcaactacgaaatcgacgagactgtcagcggggcgcctttccactacaagaagaccagcgaattcactccgtatgctggcttgatctacgacatcaacaagacctactcggcctacgtcagctacaccggcatcttcaacccgcagaccgattatcgggacagcaatggcaacgtgctcacgccgtccaaggggaaaaccaaggaaatcggcctgaaaggcgagtacctcgacgggcgtctgaatacgtcggtcgccttgttcgagaccgagctggacaacgcggcacagatcgtcgccggaagctatacgccaggcggcgcccaagcctacaaaggcgtcgatggcacgaagtcgcgcgggatcgagctggacttacagggcgagttggcgcgtggctggaacatctacgctggtatcgcccacttcacggcgaaagatggcgatgacgtccgcttgaattcgcaaataccgcgcaccacggcccagctattcaccacctaccagttgccgggagagtggaacaaattgacgctgggtggaggcgtcaaatggcaaagccgcatctaccaggccccaaacaccggcaccagctcgctgggcggggagcagagttcttatgccctggtgtcactggtggggcgttacgccatcacgaagaagatcaacgtggcagtcaacgtcaacaacttgttcgacaagaagtacgcgctacagaagggcgacttcgacaccgtgacttatggcgcaccgcgcaacgtgatggtgacgctgaactacaagttgtga

SEQ ID NO: 348808 - DNA, 459 bp, Pseudomonas aeruginosa; identical to SEQ ID NO: 207999

SEQ ID NO: 348809 - DNA, 408 bp, Pseudomonas aeruginosa; identical to SEQ ID NO: 208000

SEQ ID NO: 348810 - DNA, 744 bp, Pseudomonas aeruginosa
atgtcatccgaacgtcccccttaccaactgcatcccgtgacggtcacccgctgccagcaggttgcgccacacatgaagcgcatcaccattgatggcagttgcctgtccacgctgcggcccggtcttccgtctcaatggttcaagctgttcgtcccgctgggaaacggccaacgcagcagcgggcgagcctatacggttcgctgcttcgaccaggccacccatgaacttgacatcgacatctttctgcacggcgacagcggccccgtgtccgcctgggccgagcgcgtgcaggtcggcgatgggttcgagatcagcgacgtgcatccgcgcagcggcttttccatcgatcccgccacggaacactacctgctgttcggtgacgaaacggcattgcccgcgatcggtgcgatcctggaagcactgccggcgcacgccaaagcgcaagtgtttgctgaggtggccaacccagccgagcggcaggctctgaccagtgcagccgcattgtccgtgagttggctgttccgtgacgacgacgcgcaagcgtcttccatgccgctgctggaagctgcccccaaggcgttggacgttgcaggggacgccgcgatgatttgggtcgcggccgaatccgcgcaggtagccgccattcgcaggctgatgaaagtgcgtggcgtcgatcgaacccgcctgaatgcaacgggctactggaaacgcggcgaggccgaccaccgcgacgaagaggcgtga

SEQ ID NO: 348811 - DNA, 801 bp, Pseudomonas aeruginosa
atggacatgcgtaagcgaggttttaccaagtcgccggcggaaatcgccatggcgcgcgccgccggggcgctggccgccgaggtgctgcacatgatttcggcgcatgtgaagccgggcgtcaccaccgaagaactagatcgcctgtgccacgaccacatcgtcaacgtgcagcgggccgttcccggcaacgtcggctaccacggcttcccgaagaccgtctgcacttccgtcaaccacgtggtctgccacggcattccttcgacgcagaaggtcttgaagaagggggacatcgtcaacatcgacattgccgtcgtcaaggacggctggttcggcgacaccagccgcatgtacttcgtcggcgagcccggcccgctggcgcgtcggctggtggacacgacctacgaagcgatgtgcgccggcattcgggccgtgcgtcccggcgccacgctgggcgacgtcgggtatgccatccagaccgtggcgcaacgcgaacggttcagcgtcgtgcgcgaatactgcggccacggcatcggacaggtctaccacgacgaaccgcaggtactgcattacggcagtcccggccaagggctgcggttggaggaaggcatggtcttcaccattgagccgatgctcaacgccggcaagcctgataccaagcagctcggcgacggctggactgtcgtcacgcgagaccattcactgtccgcgcagtgggagcacatggtcgcggtgacggccgagggattcgaggtactgacgccttggcctgagggcaccggccgctacaacgctattgcttga

SEQ ID NO: 348812 - DNA, 738 bp, Pseudomonas aeruginosa
atgcgccggggcttcaccaaaaccgggcgcggtaggtctgccgcgcccggtttcaacgtccacagcaaaatcgcgccgtcgccgccttcgaccaggcggcgacggcgcgcgcgcaagtgtattgcgcgcggtacggcgatcggtgcccgctggcgcgggcaaggtttcgatggctccccgccgcaatgggcggagcttgtggggctacgccccggcttgctgcggcaggttgtgccaaggcgtgccgtcctcgacgctggcggttcgcgcctctacttcacgaagggcggttcaccgacacgccgcccggccttgcctatggaacttccacgccacgcctcaagtacgtcgccgcaagcggcggcgggggcgttctcgcctgtcgttgggagattgaccttgcccgcgtcagagcacaagccagtgcagccgtcacgcggggatgccgagttggccacgtctccattcgggagcgggcggccggtgcgtccttggcttgtcgtgaatcctggcgagggaacggctgcgccttgggcttcatggccgcaaccttccagcgaaaacaatttcccctgcgctgcgcgcattcctcgcggcaaaaattgttttcgcttccaggttctccacggtgttgcgaccgctgcgcggtgcggccagcccatcccccgccggccggatcacaacaaggacgcactggcgcgaccttgttcaacccgaaaggagaaacatcatggctaa

SEQ ID NO: 348813 - DNA, 1284 bp, Pseudomonas aeruginosa
atgtcgaggtcatcttcattcgatcaatctttttgtatcaagacgcttgaacgcgtgctatggaagagagatttcctcggggttcctgctgctggtcaagctgccttgcgagaccagctcctcagtcaagcacttatatctgccatttcccattttgatcccccatccgcacctctgacaggctttcctcttaaagggaaaactgtttatcgcttggccagacatcaagacgagctggtggagcgaaaacttcgactgaacttaaagaggtgtacttcactagccgtggatgggcgatctcagatcgtcaaaaacctcaagctccttttagaagaaggagttccctatcgggtttatcgtctggatattcgatcattcttcgagtctttccagaaggatcatgtccttgatgctgttaccagcatcaagaatttgagtccgcatagcagaaaactaatcgagtctctgcttaacgcccatgctgcaattggaggccgtggcgtaccaagggggctgtctattagtgctgtcctatcggaaattttgatgcgggatttcgatcagaaggtacgctgggccagcaatacattttactactctcgctatgtcgatgacataattattgtctcgtcggcaagagaggaggagaaagattttctgcgtgatttgtgcacttggcttcctcccggacttgaattaaatccagataagaaaaatattgtcgcagcggcggccagggtggaaaaggaaagttccgcaatcgcgccaaacctccttcagttcgactatcttgggtatcagtttttggtcaaaaatcccacgaaacaggaagcgggaaaaacgaaggatggggagctttatagaaaagtccacgtggatattgcaaggaaaaagatcaaacgaatgaaaacaagaattgttcgatcatttctaagctatgccaagtcgaatgactggggattactccgtgatcgcgtagcatttttgacgcagaatttcagtgtttacaacccgaaagctggcgggaagaaaatcgctggaatatatcatagctatccattggtatcagaaggtgctgccggtctgaaggaattggatagatttctgagaaatgcagtgctctcgaaaaatggccgagtttttccgataacgaatgcaatgctttctgcgcatcagaaacgtcaattgctaacgcgaagttttgcaaaggggcacagtagccgcagcttcgttcacttctcggcgacaagaatatctcagatccagagctgctggatttactag

SEQ ID NO: 348814 - DNA, 1956 bp, Pseudomonas aeruginosa
atgaagaaaaatagaattcgtcgcagcgactacaacagggttcttattactgagactaccccatttgaaaccccaatcgttttttcaaatgatggtctctatgatcagattgccgccctagatagcgtcggacacgtgcaacgtgccgtcatcaaatctctggttttgtatgagggggtcagtaaaccaccaaactcgaccataccatatacatataaaatcaagaaggactcaaagagctttcggcgtcttgctctattgcatccagcttctcaatggaaagccaggatcttctatgaaaaatatgagcaactaataattcattattgctcaataagtccggcatctatccgcgcgccaaaaacggttgcaagcagcttttattcaaaaagctcctgggaaaatattaataaatacaaaaccggctccatcgctctcgatggtctcgatagatatgccaagcatgcgccctcatttttttcgtatcgaggatatgaccgtctgtataaattcttcaactcgagagattatcttgcactggagaagaggttttcttttttaaagacgcttgatgtcacaaaatgttttgacagtatctatacacactgcctttcctgggcagttaaggataagcccttcacaaaatcgcatgtctctgtctcctcgacctttgcccaagagtttgatggggtcattcgtcacgggaatcataatgaaaccaatggaatcccaatagggcctgaggtgagccgggtatttgctgagatactgtttcaggaaattgatagaagggtaattcaatcgctagcggatttaaaattcaagcaggactatgaatttcgacgctacgtagatgatgtttttatatttgctcgaaatgagtccattgcgaatagaattcatgataagtatgcagacgttctaattgatttcaatcttcatacaaatacagcaaagtcaacatgcatagggaggccgttctcctcatccaaggcaaggcttgtctatgatgctgggcaacaagccaattcattttttgacaagtttctggatcaaactgggatgggggtgctcagccccagagaaattcataacacgtggaaattaaccaaaagctacattgactcagtgaaggctctatgtcattcaaatgacgcgacctacgatgagattgcctcgttcttaatttcagtaattactgagcgagtcaagaggctggtgaatcatgatgatccctctgatgccatccaagatagtggatatgttgatgcgtttgttgtgctgctcgatgtgttgttcttcctttacagtgttgctccctcggttggtgcgtcgtacaaacttagtacatccttgattttggccgcacgattcagcaagaaacatctatccgccggatatccaaccgtacaccaaaagattttcgatctaacctgctcgttactgcatgatcaatgtggcatgaaacatgccagcgatattgaaggatttgtacatcttgaatcatttaatatcgcgctagcaacgcgggagctgggggataatcacctgttgccaccagagattattgatgagctttttgttagtgcgggaaaattgacatactttaccattgttgcctctctgttctatgtgcgagattccaacatgtaccaagggttgcgaaagaagcttttggatgcggcagtggaaaaactatccgatctttctgatattttgatgaatagcgaaaaagcccacctcctactcgatctcctttcgtgcccctacgtgcctgataagcaaaagaccacttggataaaaagcctatttaaaatccttcaatttacccagcccagcaaagcggattttcaggtatttttggcaggtattagtacaagccatgcgcaagtggattggaaggatattgatctcctcaattctttagagaagaaggagctgaagcaggcgtattag

SEQ ID NO: 348815 - DNA, 450 bp, Pseudomonas aeruginosa
atggccgttgccgcagatgtcgattggcagtggaacgatccgggtagttcgggcttctacaacggctcgcagacgctcagtaatggatcaggcacttctgcgttctcgcgctacgccccgggctccactccgaatatctccgcagacaccgtctcgcagccgccggtgctgcttatcgccggttccaacatcgatttcgacatcgtccaggccggcaccccgatcaataagccgacctgctccgcccctaaggtgccgacgatctacgtgaccgccgtgacggtctgcgactacggcattggctcgaatatcggcggcttccgcgcgtattccgacgagaccgccacgcagttcaccccgcgcctggcgatttgggtgcaggggcagggctggagaaacatcgataaccacccatgcgggatggttaaaaccgaaaccatgtgcaagtga

SEQ ID NO: 348816 - DNA, 363 bp, Pseudomonas aeruginosa
atgagcgccgaaacgttgtcagcagacctctggtggtcaactcgctactctcgcagcgagttgttcgccttcctgcgcgcgatgcgcgagatggccggcttccgcgtggtgctgtttgtcgtggacaaccaggacggtgtaccaatggcggtggccgccacgcgcagcgatatccgggggcgcgactatgtccgtaccggcttcagtcaccacctactgctcatgccccaaggccgttgggaggttcttctgcagagcctatccatcgagccatacgcgatcgcccaggccaatggccaggtccacccgtcgatgcctgaagatcttctccccagccccgcggtggccacggtcaaacgctga

SEQ ID NO: 348817 - DNA, 651 bp, Pseudomonas aeruginosa
atgatagctaccaacgtgagcataatgtcccgagtcattcccgtcctgcagctggcggccctgagttggatcggtgtggtgctgacctttcctcaactggtccaccaggtaccggcttcacctttctcgggtgaggtcctggagcagcttcgcgagttcagttcaaagcctcgggatgagaccgaactcaatcgccttcgcgctgagaacgcagcgctgcaggtgatcgtcaagagtgcgagcttcaacaaagtgatcgagggcactgccccggcagcaagtccgctaggcgatctcagcaccgtccctatgaccaccctgccacccttgcccgacttcatgacagggcagccgccgtatgcaccagttcgcagcgctcctcccgaggaggcgccggcggcagacggcaaagaagggaaggggggcgaggccaaggaccagaaggccaagcgcccggcgattgctttcaaacctatccgcatcacagacaacggctcgctcttatacctcgcagcagatggaaacatccgcgtgagtgcacccgggactcacctgtacggagtcaacggcgcgtttgttcgtggcgaagacggaaaggcggaactcgaaatttctggcagcactgtctggctgccgttgatcggcgaatga

SEQ ID NO: 348818 - DNA, 555 bp, Pseudomonas aeruginosa
atggctcgaaaagagcggtcaatcccgcgcagcaactacaagttctcgctagacccgctgcacccgttcgagcgcgatatggatgtggcgctgaaggaggcaatcgccaaagagcgtctgcactttggcgacgacgtggagcagtcggtggtggagcgcaatgccatcttcgaactgctccggatcggcatagagaccaagcggcgaatgggcattctgccgctgggtgagagtggaactgcgctccaggcggagcctgtggccgccgtgccgccggctgtgccgacacccgtttctgcgccggcttcgcagtcgccagtccccagcgagccacctcagttcgacgaggttggatcgcccagggtgaatggtgcagcaattgctgaagcagctctttccgctgcgcagaatgattcccaggaaacacatgatcccgatgcgggagagcagttcctggaggatctcatgtcgcctgatcaccaatccgccccggtaaagcctgcactgagcctgctcggcgggttgggcatcacctcgaaacgcggtaaggagtaa

SEQ ID NO: 348819 - DNA, 270 bp, Pseudomonas aeruginosa
atgaagagcaatgaatccgagttgaaaaacgcccgcgagcccaatgtggtgagcccggtgacaccatgcacaggctgtcaccaggttctgcgggtcgttattttcatggtcatcatcgacgtgatgcgcctccagccacttgtcgtctacccagccgcagaactggcatctgctgccatcacgactgagcgctttggcacgcgcgtcgcggaagcgctcgtcttcgcgaagatcgtcctctcgccacgtgtcgcgcttgactccaagtag

SEQ ID NO: 348820 - DNA, 1254 bp, Pseudomonas aeruginosa
atgaacgacttcgacaccgacgacttcctcccgccgccgaccggacgcagcacacgcccggcagaaaacaccggtagcgacacgttcgagaacggcgcacagtccactgcggacattccgcccaccttcgaaagcctgcaggcagaccaccttctggttgaggatgtccagaatgattctgcgcagcagcatgcccccatccaattccaggtagccccggaagcccctaaggcagccgaggaaccgtaccaagaaagccttcatgaccctctggcagcacaaaccctgactttggatgatcttcacctgcaggaagatccggagctcgctaacgcgaccgagtcgatcaaaagcaaggctacgcccaccagcgaagaaccgaaaaaatccgccaaggcaggcatcctgtcgaaggtgaagccgatctacgtggtggctgtgatcgccgtagcgctggtcatgtggaaccagcacaagaaaaaggaagctgcggccctccaagcccaacaggcagccgcggcacattcgcagcaggtcccgacgtacagccagtcgttgaaagagttgcagaacgcacaaggcccggcccagcaaactgggcagccagccgacaacgacccaatggcagccttcttcgatcaaggttcccaaccgaccgcggaacccttccagggtgctgcgcccgccagtgccgcggcgactgacgccgtactccaggtgcaacagccggcctctgcagatatcaatccgccaatcgccgacacggcaccggcaccggcaccggcaccgagcaacgatgtgacgaccacagcgccttcgccaaacctggatcagtacaaagaacagctggcggcacagcagaagaccatcaacgagctccaggccgagattgtgcaactcaaggatcaactgaaaagccaggcgcaaccgacagcgaccgagaagtcgccgactcccaagccggacgcctcttccacagtctcgaagcccacacccgcgcgagttgcgcgagtagagcaaccgaaacgggaagtccgtcggcaggctcagcccgcagcgagtccgaaggccgccccctcgcgatctgatatcgcgttccttggtgctttcagggaaggcggtgaaatcgtggcacacaccctgatcggctcgacggtctacaaggtctcgtccggtgaaaagatcgccggggtacgaatcgacgccgtcacgatggatggcgtagtcgtcaacggagttcgctatggcaactga

SEQ ID NO: 348821 - DNA, 264 bp, Pseudomonas aeruginosa
atggtcatcgtctacacatatcacgttaaagcattcgcgcctgatcctcggaatgagaagaactacttcacctatgacagcacggttgatcgtgaggctcccttgaataatggtcatgagtacgacttgttggccaaagggctctcggatcacgtgtttgccgagactggggttcgcgttggtcaggggagctttgtgatcaaaagcgttgagttgctcggtacgcgcgaggagaaatcatggccagtcaacctggggaaatga

SEQ ID NO: 348822 - DNA, 270 bp, Pseudomonas aeruginosa
atgaagagcaaggctcactcagaagcattctccaggactcttgccggcgccttgctggatttcaaggccgctgtggaaaagcgcgacaaggctggagccaacctggagtatgcatttgccctcggtttgattggaggtgcaacgctcagcggcgctatcggaaaggaggagggtgcagcgcttcaagcgaagctggaagagacgcgacaagcattgatggatgcttttggtgacgcacctaaacctaagacttggaaggcttgcaactga

SEQ ID NO: 348823 - DNA, 222 bp, Pseudomonas aeruginosa
atgattcgaaagctcctcttaccagccctctgcttcgccgccgggatagtcgccaccttcggcttcagctttgccaaggatgccgtggcacccgcccccacaacctcgcgcgcgctcatccaagcacctgctattaccaaaaccctcgactctatcgatcagtccagcacctgccgttcgctgacccggctgaacatccgcaagtccgacaccaaggagtag

SEQ ID NO: 348824 - DNA, 606 bp, Pseudomonas aeruginosa
atgcgcgacctctaccagagcccggtcatcatcagcatggagagagcgaatccactggctcagcacaggctcacgcggctgctcaggctcaacattctgctgctcggcgatcggcgcctgctcgacaggaggctccacagaatcattctgcggtgcagtgcccggcaaatcgcccacaggcggctcaccgactgcaacaacttgagagtcaaaccccgcatcgaccggcgcgggcgccggggccgcaccaacgggcgcgtcaaactctgggaccggcgggagcgacggctcggcaaagaaaggaatcgccgcctccgcctcgcgccgcaaccgatcttcctcggccacggcggccagaagcgtctcggaacgctggatcacatcctgaataacctggttagaaatagcgccatcagcggccggacgcaccttgaggatgtcgtccaactcacggtccgcgagcttcgcttcagggaagcgagccagccactcctcggacgcgatgcgccccgaggccggcgggaaaagaacggccgaggcgccgccgtcatgggatttgaagaccgtttgctcttccccacccagttctttcaaaagtgctcgtga

SEQ ID NO: 348825 - DNA, 891 bp, Pseudomonas aeruginosa
atggctgtagtgatcaaccgagaggcaattatcgaggcgtcggcgccgttgcgcgatgcttatccagcgctccgggacgagcaatttgttgcggcatattcagtgattcgcgagctcgcggtcgaaggggcgatgagtatggcgaatgtcgtaagcctgctcaatgcaggcgctttcgtatcgcgctctttcgtcagtggcacgtctgttctgcgggttcgtcccgatctggcgggcggcgaagagcaggaagtgcgggaactggttggggggtacgccgcagcgcacctcgcgcagcaactgctcggtcaggaacgtacccaggtattcgccgatcgtgtgatggccaccgcgctccatcaggtcctccagggggctgatggcgcgattgcagtgccatcggatgaacttgaagacctgaatgaggtcgaacctgaattgcttggctcctgcctgcgagctatggctgctgttgcggatcaggcccggctcgaactcagtgctgccctgggctatctgatgcgagggcaggcaagctattcctcgccagccgcggccctggagcgtgtggttgccagagagttgccgggaatgactccgggagattatgcccctctggttgaacggtcgatcgcgtacatgaccgatcacaaggacgagttggtagataccctgttgggcgagatgatcgatgagtgggcggaaattcatcttcccgatgctatcatgcgtgcaaggatgtattttgcggagcaggatgaggaactcgacgagggaatggacgatgatgccgtccttccagcagtgctgctcgaacatcaaggcgctgcggcgcaagatgaccgcgatgacgagtggttgaacgatggtggtttcagcctggatcgatga

SEQ ID NO: 348826 - DNA, 174 bp, Pseudomonas aeruginosa
atgcccaaatatgacggtgccgagccaactgagattgagctgcgtcgtattcagaaaatggttgaggaaggtcagtttgatgggttgagcaaggaacatcagcgctgggtcacccaccgcctgttgccttcacttgcccgtttcggggtctacccgccgccctctcagtcctag

SEQ ID NO: 348827 - DNA, 762 bp, Pseudomonas aeruginosa
atgaataacccgtttggggccggcacccagtctggtcaggaatcagcttgggaccgcgcggcaagctacgagaaggaagagcgtcccatgagcacggtcagcaagatcgtggtcaaaggcgcggtggacgtggtgttcttccgtgcaccttcgccgtacctggtggtggccggtgagaatcaggacgccatccgcaacatcaagacccgcttcgatggcaacaagctcgttgtcgaacaggagggggtatccatcaccgccgccggcggcagtattaacgtgtcgggttccggcaatatcgtggcgggcggtaccatctacgtcggcgatcgccggggtggcgtgacgatgcagttcaacggcccggtaggcagcgtcattgttgggcaaggtcgctgcatcatcggtattgcgctgccggaggctccgagtatccgcatcaagggcagcggtgatgtgaccctgtatgacctccagcaacctgtgctcgatgtaggcgttcagggttccggggacattacggcgtttggccaggtcgagcacctggacgctgaagtcgcaggatccggcgatgtggatgtcagcgaactgctggtcatgtccgcagatcttacggtcgcaggatctggagacattgacgcctttgtcacgaagtcggtgagagctcgcgtagcaggttccggtgacatcgtggtgcgaggcaacccgccgatccgtgatcactccgttgtcggatccggcgacatcaagttcaagaaatag

SEQ ID NO: 348828 - DNA, 618 bp, Pseudomonas aeruginosa
atggcaatcagtgccgcccacctgtccggcctcccgggtcctgtgtctgcagaggagtatgtgtttcgtctgctgatggatcgggccatttccaagctcgaccggaccgaggtggaatccgttctgcggactgccagtcgcgcattggccaatgccggcaagtggacagacgatgtccgtatcacggtcaacaccaaacgggcattccaggccggcaggcagtgcgttcggatgctgcacggtgtcccgtctccccgtatgtgggtcggtcaggctaagaacttcccagagatggccgcgaaagacgcgatctacttttttgagcccatcgaagcgaaccgtcgagatctgttgctcggcgccattcccgaattcgcgagtgctgaagcgctggctgactggcttttttcgttcagctcaacacgattcgagaagcaactggtgcaagcgctggtgggtcacctggcgtcccctttgttcaaacgctgggcaagccaaagcgagtccatggcttaccgccagatcgcgctgcttggggccgaaattgaccggctggcctggttcactgggcagcgttcgatgacattggccaatgcggcgccggtgtggcgcccataa

SEQ ID NO: 348829 - DNA, 957 bp, Pseudomonas aeruginosa
atgacagcgcacaccaacgcagcggtaccgcaccacgatcctaccctgctcatctgtactgacgtctccaagttcggcgcagatttcccggccacagcattcgagcgacgaattaccgacccgatctggcggcctactcgaaagcaggtctcgccggacacaatacgcacgtggcgaccgatggacgaacccgcctgggttgcaatgaacgccctgggcgccttccccaaagacctgcgcaccgcagcaaagcgcctccttgacggtggacttgcccaaccggaggagcactccatcgagaggatcttcgccggtgccagccgccagttcggccccgagggcatctggtgtaccgctctcgaaatcgtggtggcccacaggcgccatgcgcgcctggctgtagaccttgcagccacgcacgccggcgatggggttcccgaattactcaactgggccaactatgtgtcgctgctgggactgaccagcagcctacggaatgatcccgtccccgatccccacgttttgatcaaccacctgcgccgctgcctcagcgcgtcccggctgaataagctcctcgtcgatatccaggtgctcctggacaactcggaaagcatggcaaaagccctgcgctcatcgggcctgggcaactaccgctggctctggagtgatgcagccggcctgccggacgtgccggtgcgtttcgcggggccgaatgaggccctggagtggttgtgcagcagcatctcccccgacggccgcgaacagtccatgcaggaaagcccccgccgccggcttcgccccctgcgagagatgatccgccacggccaactgcagctgcacaacgatgcccacggcgcagccgtgccggcggcgcaactcattcggggcatggacgacctcacggttggacggccgatcagggagtacaagccagcgcaagcgccctccccgctgtag

SEQ ID NO: 348830 - DNA, 954 bp, Pseudomonas aeruginosa
ttgaaaagacaatacgcgactcctgccctccggcagttcaaggcgctcgaaacccttcgagtgaagaatctgcaggaaggtctgggcagcgacgagagcgagttccgtgaacagctgctgacccagattctgctcgggcgagacaccggcgatggcccggagcagcgctctcttgctcgggaggtcttcgctcacggatcctccgttctacgggccgcactgatcgaacagcccgacggcatggccaggcactgggtagtccagcgctggtctgctgagggcgctcgctgggcaacgatgaacacctatgcgccggacgaagaagggcagtccgccgcctacatcgacgcagcctttaccgagcccacactgtcgcctgaccagttgcgggcgaagtggggccggcttgatggtgatgaggatctccacgagatcttcgacacccgattgaagctcgctgagttttggtacgacatcaagcccggggtggtggtgggcggacagtggccggactggttgatcccggcgcttgtcgccggcgagatgatcgggaaactcaccgtcgagcccgcgatgctgccacggggccaaacctccctcgacaagctgcaggatcagcaagggaatctggtcagcacttggggtgaactgccgccaatcttgcttcacggcagtctcaagttcagcaatcctgagtgcccgtggtctacccaccaattctgctcgatcgcggaggcggtggcagagctgcgcaagccggggttggtgagcgcgacgttcagccctggtgggttcggctaccagaacaatcagaagctggagttcgcttcatcgccgaccaatctcagtgacgaggaggtaaccgcgctgctggagatgatgatcgaatctgagcggaaggtcgctgctgaggcggttgcagccgaaccctgggaaggcctcggacacccttga

SEQ ID NO: 348831 - DNA, 432 bp, Pseudomonas aeruginosa
atgagccacagcctcgtctatcacgccaccagcgccacgaatgcagagaaaattcttaatggcgaactgagtccgcgcagctacatcaccagttgtcttcaactggctgaatactatgcagagacgtttgaagatgagggcgaggacgctgtgatcctggcttttcaacttcccgctgatgctgttcttgagccagatcgcgcaggcatttgcgagccaatcatgacagtgctgcgttccgagtttgacttgtatagcgaagaagatgtcctgaatgggtgggagagtaccggcggtacgggtagagattgcctggacttgattggcagcgctgtccttatgactgctgttgacgggacgaccattcaggccgtctacggagaggagcacctaagcagcggcttggtgttctaccccgccccaggcatgtga

SEQ ID NO: 348832 - DNA, 237 bp, Pseudomonas aeruginosa
atggctttggacgagactcttccgaaccctgaattggatatgcgcgtcctggcggaactgcgcggcttgcgggtggctatcgggcagccaatactccggaccgaagctcgccaaggtgcggcgggcagcacgaatcaactgatcggcctgttcttcctctgcaagagcgaacgtgagatgtatttcgttgtctcgcgggtcaatgggttcgagtcggtcagcgtagagggcgcctaa

SEQ ID NO: 348833 - DNA, 966 bp, Pseudomonas aeruginosa
gtgagcaacagcattttccactattcgtgtatcgaaacagtcctggacgagaactacacgccgggtctatcgcatgcaatgctggattcggccgaggcttctctctgtgggatcgggcgaaatcactttggcagtgcgatatattcgggcctggccagagtggacggccaggtaggctgcaaggactgcatggcggagcttgaaaggctcaacctggtaggtgggtatgctggccccagaaccttcgtcatggacaggactgaagtggatggcgtactgctagagagctttggatggggcgtgttcgacaaggcctacgagcacttttttgccttcggtcaccatgagccgggggttgtacttgagatcgctaggcggctcgcggggaacgctctagccggatggggggaacaccacacaacgatctacgcccactggatgcccccgtccgaagatggcgaaacaggtgctccgtgttgctatcggctcttgcggaaatccgaaacgctgcatccgcatgatactgaaccccttcgggttgagcctattgaggtcacggtcctgaggtatgaggcttggccactcctgcaggagcgggatggtgacgctgattatgagtgccgaaggttcaaggcgtggtttgacggatccaccaagctgggaagagcacctactccggccgacatagatgccggagatgcgccaggttttgttgtctacgggatggcttctggctcgaccgagaagtgctgcctggaatggcccaccccagattttgatgtggctttgaagcagttggccgaatggcgccaggtgggagcgacagaactgcacatcctgaaccacgggtctctcttgcccatgagcatgctcacacctgacgttaatgccctcattcagcatgggctgaaggtctacggccgagaccactatgtcatggacattttaactcacggggtagattga

SEQ ID NO: 348834 - DNA, 402 bp, Pseudomonas aeruginosa
atgagcgcaattctgaagcaagcggcagagcattggcgttatgtcgccccgctgctgaccccgccacagaccaaggccgattacgacgaactggttgatgcactcgacgaactgctcgatcagatcggtgagtttgaaggacacccgctggcgggccttgccgcacgcatgggggacataattagcgcctacgacgccgagcactaccagatccccgccgcgcctggacatgaggtgctgcgcttcctgatgcaggagcacgggctgcatcaggacgatctacccgaggtgggtccgcagtcggtagtctcggaaatcctggcaggcagacgccaactcaatgtgcgccacatccgtgccctagcgggccgtttcaacgtgccggcggacgtgttcctctaa

SEQ ID NO: 348835 - DNA, 243 bp, Pseudomonas aeruginosa
atgtttccgaaagagatcaaggcagagcgtgagctactggaaggtggacggtttgctttcaacctgcgccacgacaccctgggcgagctaggacggatcgtgcttcaacctgtgcagcacaacggcagccacatctcctacgaagtcatcgacttgcctgatggcctcttcaatcagcgcaaggcgatgatggaatcgctggctaagatcgtcacggccgcgtttgaaaaggctaggcgctag

SEQ ID NO: 348836 - DNA, 312 bp, Pseudomonas aeruginosa
atgcataaacgcattctctgcggcctgatggcgctgtgcttctgcaccccggctacctccctgcttgctgctgacgcggtgggcgaaaacgccgccgccgaggcggcttctgctcccgcggactcgtctggcgagattgacctagtgagttgggtgtaccagcaggtgggtaccaagcccaaggaaaagcaggtcccctggcttaaagccatgcagggctgtgtggaggcccgcgataagctgtacccgggcaaagcgctatcgagcgcggatctcgacgaactgtcgggatgtgcagatcgcgggctctga

SEQ ID NO: 348837 - DNA, 267 bp, Pseudomonas aeruginosa
atgaagaagagttggctgtattcccttgcgatcgccgcggctgcaatgctgatcgattaccagaccaggggtaccggttggatgctcctggtttacgtcctctgggtaccggttttcgtcatcgggcaccgctacctcgacggttgggcgagcaagcggaaggatcgtcagcgctgggtgccgttcctggctgtcgccggcgttctaagcgtcggcgtccttttccaggtggtgatcgctgttggcgccctggccgtatccccctga

SEQ ID NO: 348838 - DNA, 312 bp, Pseudomonas aeruginosa
atgctctctgcactcggatacatcgttgcccgggttggtgatcagatctacggcgcgggccgcacggaacacgatgccattaagcttgcagctgcacgactgcaggcctcggaggagggcgttcgcgccttgctggtggatggacgcgtcgctgccgaagaggcgggggacggcaccctctatatcgcgccgtgcacccatgcgctcctcggaatggttctgaacctggaagggattgttgcctgggcgaacgtcgatggcgtggaatgcacgcctgtcgagcgcgatgaccacctgcggaaaccgcagtga

SEQ ID NO: 348839 - DNA, 255 bp, Pseudomonas aeruginosa
atgccactgatcaaacccaacgccgccatggttgcccacttacaagcaaggatcgcagcacttaccggcctgcatcgcgatattgcgacgctgggagaggctgccgacctagtgtccctggaacgcaccggggatcgcatcaatgatcgcctgcgcgagttgcatccaggggtgatccgcgaacatgaaatgattgatctacgcgagcaggtgcgagtcattaccgaagattgtcgccggctgctgggcaactga

SEQ ID NO: 348840 - DNA, 531 bp, Pseudomonas aeruginosa
atgaaagcaagattggtagacgagttgaaggctggttttcgggtcgagcattgcgtagacctctacaaagccacagcagctctggctgcggcgattaccgaagagctaaagccggtcaccgaatccagcatcaatgcgagttgggagagtgtaatcgagcctgaagacttcaggtttatcattgagcagggaggccgaaccctcttcggcattccgctcctgtttcaacggtacgcctgctttatgagcgcactgggagaagacctcggtattgagtttgacgaggacatgatggcggatgactggatatctgattcgatgccaaagactcgcgctatcgcctctgccctgatggagcttgccgttgactatctctcggaggcccgcgccaggatgaaggaacagacgggcaccacgcctgccgaggtctttgtccagtcaatcaacacgggcgaatcctttgagcagtcgcgtacaaggttgtcccacgccgcccttgggctccaggtcgtaaaactcaaggacaagtag

SEQ ID NO: 348841 - DNA, 225 bp, Pseudomonas aeruginosa
atggccaccggggcaagcatctatatctcagaggctgaactcgaagccttgtgcgacgcgcagtcgtacctttccgcgctgctcgaagcggcaaacaacgctgatcacctgatcaagaccaaggcaggactggcgagcattgagggcaaggtgtccagggctcgtaaatctgcgggtaagcgttcacttgtaaacgcggcccttcgcgccgctcaggacaactag

SEQ ID NO: 348842 - DNA, 225 bp, Pseudomonas aeruginosa
atgcagcccgcactcgtacgccgcgaatacaagcacttcggcttctgctgcggcctcggctccggcgccgccggattcaacgacagcgcccttagaatgggcaacttggtcggcagttggcgctgcctgggcggtgttgatgtcgatcccgctggcctggtcgatttggggtcatgccgagataaaggaaaattaggacatagtggttctatcctattgatataa

SEQ ID NO: 348843 - DNA, 291 bp, Pseudomonas aeruginosa
atgaacaacgctggagccaggttgcgccagcgttaccaggagcgcatgcaaacggtcgccgtaggcgcaaagctgaagcggaagggccgcgagtgggtggtcttgcagcagcggcgcaccgaaaccggcgtcgtgctcaatctgcgccatggtcatcgcgagtttcggctgtatgttccagtcaccatggacggccccgagctgtggcacgccaacatgcgatcggtggcccttcccccatcccagcgagagctattcgcgcagcagaatcacacaggtgtccagccatga

SEQ ID NO: 348844 - DNA, 492 bp, Pseudomonas aeruginosa
atgaccgaaaaacaagccagggcgacagacatcgtgccccctgaagatatgaagtggctgcgtcgcttcgcggagatctgcgaggactccgacgccggcgggcacgatctgcccaaaacagctgtgaagcggctggagaaaattggtgcgttgcgctcctgcggcttcggccgccacgaaacgacggaattcggagactggctgctcgccgctgatccggctcaggccgggcaggtgccggagggatatgcgctcattccgactcgcctgctgctcgacaaggggatcatcgaatccatcgcctaccactgtggcgatggcggtggttcgtatggtgagtaccaggatggcatcctcttcgtcggcgagatcactgacgacgaaggccggcaggtacatggcttgcacttggcctgtgctgagtgcgaggaagagggctacacgcccctggtcgagttcgccgctgcgccggcgcagggatgtggtcgatga

SEQ ID NO: 348845 - DNA, 339 bp, Pseudomonas aeruginosa
atgcagacgatcgagtccctcaagtcgcaagccaagcgcctgcgcacccatttctccgcacagaacatcgaactcagccattcccaaacgctggaagccattgcggtaatccatggcttcaaggattggaacaccgcgagcgcactcagcccgaaaaaaatcaagtatccgactaccgatgaatcggtagagcagttgcgtgagcgtttcaacgacatggcacgaacgtacgccaccaagcccgaaggctcacccttgagcgatgaagaaaaaacggaagtgaaaattctgctgcatcagcttggcgttgcggcgaagcgccaacaaaccttgagctaa

SEQ ID NO: 348846 - DNA, 123 bp, Pseudomonas aeruginosa
atggttgaacaaaccgaaaacccaccggtgctggccgcattccgtgatgccagttggtgggcaaagcctgacacccgtaccgccaagcgtggccatgtcttgcgcgaggacggtcatgtgtga

SEQ ID NO: 348847 - DNA, 597 bp, Pseudomonas aeruginosa
atgaactacgggttcatctactgtctgggcaacgccgcaatgccgggaatctacaagataggtatgacggagcgtgctccattgcagcggtgcgacgagctatccagttctacaagctcgccactcccattcaagcttttgtgttttggccaagttgaagatccgaaaggtgttgaggccgagattcacgatggcttagctgacaggcgagttaaccattccagagaattcttcgcaggtccttttaagtcgatagccagcattattcagggctacagcagtggctttgctttgacctctgacggttacgaagaagaagaaaaggaacggcttcataacgctttcctctgtgcagaagcggctgaacgagtcgatgccttgaacgaggctgcgaagttcagcggcatctacatgtaccagaaggacggacagatctggtatcgcggccgagctaatcccaatagctggttgtacggggcaatcatctgcctgagaggagaactgctgggctttgttccggaaaaggacccaggtgcgagcgcgccccaggaacagcctagcctcgtcgatgagaaagaagaggagcttgactggtga

SEQ ID NO: 348848 - DNA, 171 bp, Pseudomonas aeruginosa
atgaagctatccgcgaaactttggtgcctcataggcgttcacgaatacaaggtcatgtcgagcggagaggttatctatatcggtcttgatggaaggcccgatggaacctcaggaacctacttcgttaaccgctgcgagatttgcggaaagatcaaggagtggcgggtttga

SEQ ID NO: 348849 - DNA, 1119 bp, Pseudomonas aeruginosa
gtgaaagggaaaatatattcattcatattcatttctatcgctgttctaggaatagctcctgccgtaaacattgagcaagcgattagctcaaacaaaccccttccagaaactataggagggtggaaggacctttcctacaacatggattttacactaccctacatcgggatgactttctacaagctaggaatatccattagtcctgaaaaggttattattggaagagacggatggatgttcctcggcgatttcttcgaaaactctgtaaccgcaaaacgagtcggagtcacggactccgacactgcaaaaacagatattatcaaaaacgtttctaacggatggcgtgaatggttttcgtcaaatggcgttaggggctactatgttttaattggccctgacaagtctacgatataccccgagaaccttcctgactgggctgcaccttccggtacaagcattgcccagcacatatacagaaaatctccagatatttttgtatatccaaaaaatgaacttattaatataaaatctagatccaccgcacctttatactacaagacagacactcactggaatacactaggagcttgggtttctttttatgcactggcgaagcgtataaaatctaactccccagatatatctatacctgaagaaccaaaaccagaggctgtgattataaggaaacggggaggcggcgacctttctgcattccaaaggatacgtccgtacatcacggatgcagaggtggatctgtcggacagttccatacgtaaaatccatgttagccaaatagacttcgaaagcatggagaaagtctactcgggagacaatgttcaagttacagctcccgttaagccactattggtccgatcagagggcgcgcttaacaacaagcgtgttctgtggcttcgagactctttcggatctgctatatccccctttatggccgccacgttctcagaaaccctacagctgcatcatcagcgttctagccctaaagtaattgccgatctggttgataggtacagaccggatatcgtaatagtgactatcgtagaaagaaacacaaggataggaatccttgtgtccccatctccgaaactgtcaggtaaatga

SEQ ID NO: 348850 - DNA, 1482 bp, Pseudomonas aeruginosa
atgatcttcagctccgctgctttcatactggcctatttgccaatagtgttttttgtttattttggactaaacaagataaggatgatctcactggggaaagtatggctagtattagccagtgttttcttctatggatattggagcgttgactatataccactcctgatagggtcaattttattcaacttcgcagtagggtgcgcgatctccccgacctcaaagaatttatccattggtggatacagaaaaacaatactagcattaagcattactgcgaatctggctctgcttggatactttaaatatgcgaacttttttattgagaacctgaatgctgcggccggatcagaatttgcgctacatgaaataatcttgcctcttggtattagcttctacacattcactcaaattgcattcttggtggatagctacagaggcgaagcaaaagaatacgacctaataaattacgctttattcgttacattcttcccgcatctaattgccggcccaatactccaccacaaagaaatgatggagcaattcaagtccaaatggacatgggcagtacgctatagaaacattcttactggactgtttatattcagcatcggtctattcaagaaagttatgatcgctgacacattctctgtatgggcagatgcaggattttcgagcggtgccaatcatgatttcttcagctcatgggcgacaagcctttcctacacattccaactatactttgactttagcggttactgcgacatggccataggcgcggcccttctctttaacatttggctcccaataaacttcaactcgccctacaaggcgcttgatattcaagatttctggcggcgttggcacatgaccctaagccgctatctgcgagactacctttacatcccgttaggtggaaaccgctgttcttccgccagagtttacttcaacctaatggcaacgtttgttcttggtggcctatggcatggagcaagctggatgtttgtgatatggggggcgctgcatggtggagcgcttgtcatccacagaatgtggaaaaatctcggcatgtctatgccaagacctttggcttgggttgtgacatttctattcgtaaatataacctgggtatttttccgagccacatccatgcaggaagccatgtcaatccttggagggatgattgatgttagatctatctcatcggaaagcctggctgaaataccgacaagcgatcttgcgtgggcaggggtaatttccgacaagcttttacaatttctgccaatcggtgttgttgcgaactcgctgtgctatggaatgattgcagcagcatttttgataatttcacagaaaaactcattcgagctttcaactaccggaaggatcggaaatttaaaaacaatatacatgtcaatactattctgcttggcaatgtactctacactacaatcaacaagcaccgtattcctatatttcaatttctaa

SEQ ID NO: 348851 - DNA, 291 bp, Pseudomonas aeruginosa
atgcgcacgaaacccttccgcccgccgcgccggcatgagatcgccggcctccgctactaccgcaccgcgtcggcttacaactggctcggcgtagcgatggcacatccgactcgcgcaatccagttgttgctcgaacagtgtgagccagacgtgctctcgccgatgttcgagattgagatcgacgcgatcctgagccaagccgacgaatacgcaaagaccggccaggtgctcgagcgcgagcaactgcgcgaaatgctcatgcacctgatcgccaaagcggcgggcgagtaa

SEQ ID NO: 348852 - DNA, 183 bp, Pseudomonas aeruginosa
atgatcgacttcagaggaatcaccgtttttcgcatggatgacttggcgccaggaacgatgatcgtgagcccggacgtctacgacatgctcaagggcaaagaggctgatccgcagttgattagcgaggccaggcgaaatgctgagaaggtcgaggaaatgctgaagggagtgaggaagccatga

SEQ ID NO: 348853 - DNA, 378 bp, Pseudomonas aeruginosa
atgaacgaccgcgaactactcgaactggcggcgcgggcggcgggggtcaaggcacgctggttccgtgtaaaccaatggcgccaagtcggtggcaataagaagcaaacagggcaggaagatgtttttggaactcatcatagcaagccttggaacccgcttaccgacaacggccacgcgctgaggctggcagttcggctgaatctggacattcggtacgaatgctacgacgcaggcgtggccgtcatcgtgggcggcgcctgggacaacgcgcccgaagcattgcacgagatattcgaacgcgacggcccgagcgccactcgccgcgccatcgtccgcgccgcagccgagatcggcaagtctatgggaggttgggagtga

SEQ ID NO: 348854 - DNA, 951 bp, Pseudomonas aeruginosa
atgctcaaaggtctggctattaccccgcctgtactcgggcggatttccatcggcaaggtcatcgagaagaacggcaaacgcctgccggagaaggatgaccaattcactatcacgtcacaggtgcagggtaaggacggctggctgctgcacccgctcaatgacgagctgcgccagggcaaggacgacaagctgcgcagcattccggtacgcctgctgttcaacgaaccggagctgaatttccgcgccgactacaccttgttcgaccgccagtccggacgcccgctatgcgtgggcaatggcgagacctgcaagcgcgtcactcaggacggcatgcagtcgctgccctgcccttcgccggatgcctgcccgctggccaaaggtaatgcctgcaggccctacggccggctgaacgtggtcattggtgatgacgatccgctgggtagcttcgcgttccgtaccaccggtttcaacagcatccgcaccctcgccgcccggctgcattacttccaggccatctcgggcaatcgcctggcgtgcctgccgctggagttgcgactacgcggaaagtccacccggcaaagccacgggacgccgatcttctacgtcgacctgacggtacgcggcggtatggagatgacggaggcgctgcaggccgccaaagagctcaatgcacagcggcaagcagcaggattcgatcaggccgccttggatgaagcggcgcagcgtggctttggcaacggggctttcgaggacagcgaggaagatgctggtgccgtcgccgaggagttctaccccgccgaagaaacctcatcttcagccaccaccactccccaacgctcggcgaaaaccagcctggccgagaagctggacgcgcaagcccaacgccatatcccaccgaccgatcaccatcaaggagcccagcatgcgcctgcacaagctgaaggccagtga

SEQ ID NO: 348855 - DNA, 1446 bp, Pseudomonas aeruginosa
atgattaatgagacgtacccagatactcaacttttcatcaatggagagtggcgtgatgctgaaggtcgatcaactattgatgttgttagccccgcaaccggtttgagaattggtaccgttgcccatgcgtctgaaggtgaccttgtacaagctgttaatgcggcacaggctggattcgatgtctggcgtaatgtacctgcatacgagcgatctgccatcatgcgcaaagccgcttccatcattcgggagcgggccgaaacgatcgcccggtacatgactcaagagcagggcaaaccattgctggagtcgcgtatcgaagtcaactctgcggcagatatcattgagtggtttgccgaggaaggtcgtcgcgtttatggtcgtgtagttcctcctcgcaatatcaacgctagccaaattgtcgtaaaggagccagttggcccggtagcagcctttacgccatggaatttcccggttaaccaggtggttcgtaagctctgtgctgcattggcaacaggttgctctttcgtggtgaaggctcctgaagagaccccgcgttcaccagccgaactgattcgtgcatttgccgacgcaggtgtaccaaagggagttatcggtctggtgtacggtaaccccgaccagatctccaaataccttatcgcgcacccagtgatccgcaaaatcaccttcaccggttccactgcgatcggtaaacagttggctgccctggctggcctgcacatgaagcgggcgacgatggagctgggtggacacgcaccagtgatcatcgccgaggatgccgatttggagttagctatccaggtggcaagcgcctctaaattccggaacgccggtcaggtgtgcatctccccgacacgattcttggtgcataacagcatcaaagatgcctttgtgaaaggcatggtcgcatacgctgaaggcctcaaaatcggtaatggcctcgaagatggagttaactatgggcctctagcgaatgctcgtcgagtagaggcaatcgcaggtttggttgaagacgcacgtaaatcgggcgcgacggtagcgactggtggtgagcgaatcggctcgacaggcaacttcttcgccccaactgttctagcagatgttccgttggatgctgaagtgctttctcaagaaccgtttggtccgatcgcagctgtacgtggattcgatcatattgaggaagcgatagctgaggccaaccgtctcccattcggcctgggcggttatgctttcacgcgttcatatcgcaacgttcaccttcttacccaaactctccaagtgggcatgctctggatcaaccagccttcgactccggttcctgaaatgccgtttggcggtgttaaagactcgggctacggctcggaaggtggcccagaggctcttgagccgtacctggtcaccaagtcggtcaccgtaatgaccgcctga

SEQ ID NO: 348856 - DNA, 1365 bp, Pseudomonas aeruginosa
atgccgatgctgttaagcgaagcagaaggcaatacggagcatggcgttatacgccagtcatgctctgatcccgcgcggtcggagaccctgtgcacgtcgggaagtcctgcgcacagaaactgggagatctcagcggcgcccgctgcgcaagcaccgggcggagcaggaaaggccaaaagccgaaaccctgctgtctacgcccctgagaagtcggatacgtccgtagtacctgagaagccatcgaacaaagggcctggccctgcggagatagtggaggaaagggacgtagccaagggaaacaccaacaagcctcccgcgccccgaacactgagtcggatcagttgcgcgtcgatgggacttgaaggtgtacgtgaagcagcccgaaggaacaagggcatgcagttcacggctttgctgcaccacatcaccccgcagttattggcgcagagtttctatgctttgcgccgcgatgcagcggtaggcgtggacggcatgtcgtggcgggaatacgtggaaggtcttctcctgcgggtaactgatttgcacgcaaggctccacggtggagcctatcgagcaacgccatcgcggcgggtctacattcccaaagccgatggcaggcagcgtccgctgggcattgcctctctggaggacaagatcgtacagcaggcagtcgttaccgttctgaatgcgatttatgaagaggactttctgggattctcatatgggtttcggccgggatgtagccagcacgatgcgctggatgcgttgacggtcgcgctgaagggccagaaggtgaactggatattggatgcggatatcacgtcgttcttcgatgagatcgaccatgaatggatgctgatgtttctgggacaccggattgcagaccggcgcctgctcgggcttatctgcaaatggcttcaggtgggtgttatggaagatggccgtagggttgctgcaaccaaggggacgcctcaaggcgcagtgatatcgccattgctggcgaatatctatcttcactacgtgctggatctgtgggcaaggcagtggcgccagcggcatgcccgtggcgatgtaattattgtgcgttatgcggacgacagcgtggtgggtttcaggacgaaagtgcaggctcagcagtttctggtgcagttgcaggaacggttggccaggttcggtttatccctgaacgcctcgaagacacggctaattgagttcggtcgttttgctgcgagaaatcgcaggggttgtggtggaccgtacgcattcgtttgtgacggcatttctcatcagcgcaggcatcgcattgatcgcggcggcggtatatgccctggtagtcagaaagcgagtcgactcttccgacaatga

SEQ ID NO: 348857 - DNA, 336 bp, Pseudomonas aeruginosa
atgatccgcatcgatgccatctggctggccaccgagccgatggacatgcgcgctggcaccgagacagcattagctcgggtgattgcggtgttcggtgcggcgaagccgcactgcgcttatctgttcgccaatcgccgggctaaccggatgaaagtgctggtgcacgatggcgtcggtgtctggctggcagcgcgtcgactgaaccaaggcaagttccactggcccggcattcgccacggctgcgaggtcgaactcgacagcgaacaactccaggcgttggtgctgggcctgccctggcagcgcgtcggtgcaggcggtgtgattagcatgctgtaa

SEQ ID NO: 348858 - DNA, 1536 bp, Pseudomonas aeruginosa
atgactttctcgcccaacctcgaccagatgaccccggaacagcttcgtgccttggcggcacaggcgttgcaattgcaatcccaggtcgaggcgatgagcaggaagattcagaacgatgaaatcctcatcgaacagttcaagttcgaaatcgccctgctcaaacggcacaagtttgccaagcgcagcgagcaaatcagcccggcgcaaagcagcttgctggatgacctgctcgacacagaccttgaagctatcgaggcagagctaaaacagcttcttcccgcttcgtcacaggccgggtcgcggcaatcgcccaagcgtgcgccattgccgccgcagtttccgcgcactgtgattcgtcacgaacccgaaaacactcagtgcgcctgtggctgccagcttcagcgcattggcgaagatgtcagcgagaagctggattacacgccgggcgtgtttaccgtcgagcaacatgtgcggggcaaatgggcctgtcgccagtgcgaaaccctgatccaggcaccggtgccagcccaggttatcgacaaaggtatcccgaccgcaggtttgttggcccacatgatggtggccaagtttgccgatcacttgccgctgtaccggcaggagaaaatctttggccgcgccgggctggcaattgctcgctcgaccctggcgcagtgggtcggacaaaccggcgtgcggcttcagccgctggtcgatgcactgcgtgaagccgtgctgaaccagggcgtgatccacgctgatgagacaccggtgcaaatgcttgcgccaggcgagaagaaaacccaccgggcctatgtctgggcgtacagcacgacgccgttttcagggctcaaagcggtggtttacgacttcagcccaagccgtgctggcgaacatgcgcgcaacttcctgggagactggaacggcaagctggtctgcgacgacttcgctggctacaaagccggtttcgaacaaggcatcactgaaatcggctgcatggcccacgcccgacgcaagtttttcgatctgcacgtggcgaacaaaagtcagttggctgaacaagcgctgcactcaatcagcggcttgtacgaggtcgagcgccaagcgcgggacatgagtgatgaagatcgttggcgaatacgtcaggaaatggcggtgccgatcatcaaaacattgcatgactggatgctggcccagcgcgattcggtgcccaacggatcagccacggccaaagccctcgattacagcctgaaacgctgggtagcgctgacgcgctacctggacgatgggggtgtgcccatcgacaacaaccaggtcgagaaccagatacggccctgggcgctcggacgctcgaactggttgtttgccgggtcgctgcgcagtggcaaacgggcggctgccatcatgagtttgatccagtcagcacgcatgaatggacatgatccgtatgcctacctcaaagatgtgctgatgcggctgccgacgcaacgagccagtgagatcgggcagctgctaccgcatcagtggatgccagcctga

SEQ ID NO: 348859 - DNA, 1218 bp, Pseudomonas aeruginosa
ttgagcctggcgctggaggagatcctgcacctgccgggcctgcacgagatgaccgtgcgtgccggcgcgcacaacctgcagcggcgggtgcgctggccctacgtggcggagaacgaaggcatcgccgagtgggtgatggggggggaactggtgttcgtcaccggcatcaaccacccgcgtggcgaggccaacctgctgagcctggtcgaagacggcgaggccgtggggattacctggatggtgatccttaccggcggcaccttcatccaggccatcccacccgcagtgatcacccgtgccgagcaactaggcctgccgttgatcgagcagccctatgccctgaagatggtgatcgtcactcacctgatcggcacggctctggtgcagatgaaccaggtgcgccggtcgcgcaacgacattctcgggcagttgctcagcggcgactatccaagcctggccatcgcccgccagcgcgcggcgcaccttgagctggcactggatgagccgcgtcgggtagtggcgctgcgcctgctgcacgttgagcagttgttcgagcgccatggcctggcccagggcgagcgcctctggcaaaccatccgccaggcactggaggaccagctcgaagcctggtgccgtgagcggccggggacggtgacggcgcagttgccgggcgacctgcaggtgctgttgctgacggatgccgccgacctgccgatgaccctggccgccttgcatcggcagttgagcgcggggggcggggagctggccctgtacatgggcctgtcgagcctggttgccgattgcgcccactaccgacaggcgctcagcgaggcgcgccaggccctggaggtggcgcagcacctgcacccggccaacggcttctgcgacttcagcgagctgggcgtgctgcgcctgctgcaaggtatcgtcgaccgctcgctgatcgacgatttcgtcgcccagaccctcggcccgctgatcacccccgggcgcaagcagccgcacgtgctggtgcacaccctcgacgccctgctcaaggaaaacggcaacgggctcaaggcggcacagcgactgggcttgcaccgcaataccatcaaccagcgcattcaacgcatcgaacaactgagcggacagtccctcgacgacccgctgtttcgcatgaacgcttccgtcgccatgatcgtgtggcggatgaacgaagacccaggtaaggagtaa

SEQ ID NO: 348860 - DNA, 372 bp, Pseudomonas aeruginosa
atggaccgcaacggcaacggcgctcttgaatatgcccagcagatcttcagcacgcccggcaagcatgacggcctgttctgggagggcgaagagggcggcgagatcagctcgctggggccgctgtttggcaaggatgtggtgggtgatgcctggtacggctaccacttccgcatcctcgatgaccaaggctcgtcggcatcgggcggcgtctacagctacctgatcggcaaccagatgagccgcggcttcgccctggtcgcctggccggtgaaatacaacgatagtggtgtcatgtgcttcatgatcagccacgacggccaggtgttcgagaaggatctgaggccacagacgataagattgccaaggccatga

SEQ ID NO: 348861 - DNA, 582 bp, Pseudomonas aeruginosa
atgagcctatccgccagccagcccaagccgaagaaatgccagaaccctgagtgcggcgccgcgttcgtccctcagcgcctcgggcagcgcgtctgctcgccggcctgcgccctggccatcaaggacaagcacgccaagccggcgcggaaggccatcgctgaccgcgagcggagggagatcaaggttcggaaggagcggttgaagagcaaggcggatcacctgcgcgaggctcaagctgcgttcaacgagttcattcgtctgcgcgacgccgaccagccgtgcatcagttgtggccgccaccatgatgggcagtaccacgctgggcactaccgctctgtcggatcccatcccgagttgaggttcgacgaggacaacgtccacaagcaatgcgccccgtgcaacaaccacaagtcgggggacgtagtgaactaccggatcaacctggtggcgaagatcggcgctgcggctgtagcgcgcctggaggggccgcacgatgccaggaagtggacggttgaggagatcaaggcgatcaaggccctctaccgagccaaagccagggatgcgaagagggctgccgcatga

SEQ ID NO: 348862 - DNA, 600 bp, Pseudomonas aeruginosa
atgagaggccttgtttgtggcgtcggaatcaacgatgcggactatcaagtctcgtctgttgtgaatggaaagagggtcctatgtcatttttataataggtggcacgggcttatcgaacgctgttacggatacaggccataccgccaacgtttttacgaaggttgccgcatggcagacgactggctctcgttcatggccttcaaaaactggatgcaggagcagccttggcaggggaatagcctggataaggacattttgaggccatgggaaaagttctactgccaggagacgtcagtcttcattccgcaatggctgaacgccctttgtaccgaatctgcaaatcgaaaaagcgaccttccattaggcgtgagccggaatccccgcagcaaaccaaaccccttcatggcacggattaggggatgcgatgggaagcaattcctaattggcgttttccctgatcctgaatcagcgcatgtcgcatggagggaggcgaaagcaaacattctccgagaagccgtcaagagatacgagttgctggataggcatgacaaccgaatctgcgccgctcttgaggagcgcgcaagaaaactagaggaatga

SEQ ID NO: 348863 - DNA, 183 bp, Pseudomonas aeruginosa
atgaaatcgctcatctggaaactgcgttacgccgtgtatttctaccgccgaattggtggcgattgctggaaagactggcgccttgcatgggatgcggcatgcattagctgggacgaatctgatggacccgaataccaccctcacgacagcgctgaagaagagctgagcgagtggcgcaactaa

SEQ ID NO: 348864 - DNA, 585 bp, Pseudomonas aeruginosa
atgaacgaccgcgaactactccaactggcggcgcgggcggcggggatgctcgactacaaccgtgaaacaggacaaatggtttggcgcgcaaagccagtcatgaccagcgaggacaagcgttggaactcacgctatgcaaattctgtagctggaaccatcgacgacagggggtatatccgaatccttgtgcagattggcgtcaagaaacggaagatccgcgctcaccaactggcgtggttcattgtcactggctctcttcctgtcggcgaaattgatcacatcaaccaagataagcaggacaaccgattcatcaatttgcgcgacgtaccgaagtccattaatcagcggaacggaacgcgcaagagaaataacacgtcaggaatcccaggcgttacctggcataagcagcggcagaagtggtgtgcccaggcatccgtgaacggaaaacattatcacctttgtctgttcgcgaaaattgaggatgctgagcgcgcgacattgcaattcagggcggagaacggattcacgaagacgcacggccgcgccgcagccgagatcggcaagtctatgggaggtggggagtga

SEQ ID NO: 348865 - DNA, 1920 bp, Pseudomonas aeruginosa
atgtttcaactcctttcctggatatccaggaagccgtcccccaccccaacaaccaaagctgccccagggggattcatccttcctctgagcagcatggaactgctcggcacgcctcgccgccggcagctactggagaacatctggcagcgcgcctcgctatccaagcagcaattcgaggagatctaccggcggccactggccaactatgccgagctggtccagcagctccctgcttcggaaaatcatcaccatgcccatccaggcgggatgatcgatcacggcctggagatcgtggcctacgcactcaaggtacggcagacctacctgctcccgatcggcgcagcgccggagtcacagtcagcccaggctgaagcctggtcggccgccgcggcgtatggcgccctggctcatgacataggcaagatcgtcgtcgacctgcaggttgagctacaggacggcagcacctggcacccttggaacggaccgatcaaccagccataccgcttcaagtacgtgaagtcccgcgaataccagctccacggcgctgcctcagcacttctcatccaccaactgctaccgcgcactgcactcgattggctcagtcgctttccagagctgtgggctcaattgatctacctgttcgctgggcagtacgagcacgccgggatcctcggcgagatcatcgtgaaggcagaccaggcctcagttgcacaggagctaggaggcaatccggatcgagctctggctgcaccgaagcagtcgctgcagcggcagttggcagacggccttcgcttcttggtgaaggacaagttcaagttgaatcaacctagcggcccgtctgatggatggctgacccaggacgcactctggctggtgagcaagcctgctgccgatcaactgagagcctacctgctggcccagggtatcgatggggtgccctcctctaacgcgccgttcttcagcatgctccaggaccaagccgtcatccagacaaatgccgaggacaaggccatttggacggccacggtagacaacggtgctggatggagaaacaagttcacgctactcaagattgctccagccttgatctggacagatgctgccgagcgcccctcaccctacagcggatcactggtcgttgaagatggaaccgcctcaacggaaaagccggaaacgacctgtgaaattcccaacgggccggctgaacagcagcaagcaccagaaacgaagatgatgctccatcaacctgcgccgagcgttgcgaaaccggcaaacgagacgcaggcgattgcgaaaccctcaactgatgatcaagaagaaacagacgatttgtatgcacttcttggtaatatcaattcgccactagaagagctagacactagccacgactcgccggctgcctctcctacgaacacacgcggggaggagaacctacagcagccactagggaccaaggagccaacagattgcgctcctgaagcaattgaagatgtatttatgcctagcagaagtactgatctgggacagggattcgttggttggatgaaatctggcatcgcggcccgtcgcctgttcatcaacgacaccaaggctttggtgcataccgtagacgggaccgccatgctggtcacgccaggaattttcaagcgctatgtccaagagcatccggtgcttgaaaaactggcccaagccaaggagacgaccggctggaagctggtgcagcgcgcgttcgaaaaacaggggcttcatcggaagaccagtaaaaacctgaacatctggaccatcaaggtttctggtcctcgcaagacgaaagagctcaaggcctacctgctccaggatcccaaattgctgttccctgtgcagcctctggacaacccaagcctcacggtcatcaccgatgccgaaggaggtgtggaatga

SEQ ID NO: 348866 - DNA, 573 bp, Pseudomonas aeruginosa
atgtacatgggactgggaacctgcaggaccttccaagcgaaggtcatgcaatgggcgtgggaaaccggcgtcagtgagcggttctcaccgcttgattgctacctggaggccacagcgagagcggggaatctcgccgaagctgtgcaccgtgaagatctcgaaggggtgatctccggtgtcggtggtgcgttgatcttcgtgacgttgaaactctctttgatcggaatggatctgccggcggcggaggtcccgactaacgtcgtggtgcctggcgaaagcgatgcagttgcccgggctcgcaaggcgaacgtcctcaacatcagcgacgcacttctggcggtaacgcgggccgtgcagatcctgcaggccgaggaggtaacgcccagcgattgtgtgtcgctgacgcgggcgacgatctcgcgggcggcagagatggtgctccagtcgctgattctccaggcggagctctatggcgtcgagctgctgttgtgcggtcagtctgcgttggaccagctgagctcggctctaggtcaagtaccgtattcgaacctgctgccgcggaaggctggatag

SEQ ID NO: 348867 - DNA, 1104 bp, Pseudomonas aeruginosa
atgagcgactatcaatcgcaaggggttctgcagcggcttggggcaacagccgcagtgctgttccagcacggcgaggatgccggccgcaggaagttggctgcgctggccctggctgccgtgatgggtgcttcggtcacttcgggtgcgttcgccaaggaacccgcgccggcgcaggagtcgggtctgtcatatagcgacctcgtgaagatggtgcaggacgaggagaagtacggcacgttgcagttggtcacgcctgaaggtggtctggtcacgctgacgactgaccaggtgcaaccgatcgagccggcgtacgccaatcaactcgaaaaagacctcacccgcagcatcgacatcttcgagcgcacgcgtagctgggatctggtgatggccaacgtcgttgcgccgggcctcaaatcggctgatgcgttggagcggcaatctgccctgggcgtactcagcttctaccaccgggcaggcgagcgttctggtaacgggccgacggtcccagtggtgaacaatgccgccgattacatcgcccatcggggccctctgttggagcgcgaacgtcaggtagcgcaggccctggacgtgttggaccagaccgtaaggcagatgagggggccggtcacggaagagacattggccgcggaactgcagcggcgtggtggacctgactacgacacgctcaaccagcagttcgataacgctctccctgacggcgcgatggatctgatcaaccgcctgcagtatttccaggagtacacgctttcgttgcagaaccaggcggagcagtaccggacgggaaacgtgggggtgatgtcgccggaagtgcaagccgtgcgagctgaccttgagcagaagtatgacctcacgctcatcctcgacgactactcgggccgacccaatggctactcgggggatcttgcaacctggcatggagggatgccaggtgcgggtgtgcacgactcgtttgcgcgctcgtgggccgtccaggatgcgctgagtggtttcgaggtggccaatagcgtagcccctgctgcgcccaaatcgacgtactgggagcatatccctggtccggatgcagtcatgtcgccgcgaggctga

SEQ ID NO: 348868 - DNA, 303 bp, Pseudomonas aeruginosa
atgcaaaaggctagtaggtcggaagcgttcatccagaccatgcgagttcagcgcggcattgagtttgcgcggattggcatgatggtcgaagtgaacggtgagcggggaactatcaagggagcgaacggtagcgccaacctggacgtggtgttcgccaacgttctgaaaatgggccagcacaagcacaactgccatccttgctggcgggtgaagtatttcgacgatactggtgagctgattgctcaccatgatgacgaaaaatgggtcctgcggccccaagcgaaggtgatctcccatgagtga

SEQ ID NO: 348869 - DNA, 657 bp, Pseudomonas aeruginosa
atgaaatccatgatcgttagcgcactcgcggccgcactcgcactctccagtgccactgcatccgccatcgagcaccagagcatccccctcgtcatcgcccaagccagcacgcctgacgatgtgctcccgaaggaaaagcacctggctctgacctacctcgccacccttctcgaagtcgatccggcaaatgccgcggaaggagatctcaccatcggcgccgatgaatccatcgatgccttcaccaaccgtctgggcaagaaagggaagatcaggtccctcgcccaggaaatgatccacacgactgaaaaccaccccggcatcagcaaccgctggcatgagttcggcattccggtacagaacggcgggaatctcagttcccaccgcgtccataccggatacggcatctccatcaagccctccgtggccaacggcacggacctgagcgctctgccctccccgggtatcacgacgagcatgtcgattgaactcaacctgcccaccggcgacctcgctccgccggacgaaaagaccatcacctttaccgaggtattcaaggagggtcaggtgcactcccactcctgggagcagcagggcaagcgctactacttcgtcgtccgcctgaccaaggccgagcccatcagctatccgtcgatctaa

SEQ ID NO: 348870 - DNA, 444 bp, Pseudomonas aeruginosa
atggaccgtatcccgagcatcatcacgcgcctcttcatcggagccgtagccgtacccgccaccaccatcgcgctgatcctcctggctgctttcggcgggtctgttgaggacggggtacgggcctactacaacaatgtctacgacctcgctattcacccggcaaccactcccagcagcctgagcgtcctcctccccaactgcatactggccacgacattccccccaaacctcgcagaacgccccctgagttgtgagctcacgcgccaggatcgctcgatcgagaccctgtctacggagatggccaacctgatcaagtttgcctggatgctcatcgccacccttggcactgtcgccgcactgctttggcccggcctttggcgccgacaggaaacctacgccgaatgcactcccgtttcccccaaccgcactgatctggaggcctga

SEQ ID NO: 348871 - DNA, 591 bp, Pseudomonas aeruginosa
atgacatgggcttcggtgtgctgccgagcctgtgtacttgtgaggtggactatggctgcaagtggacaagcgggtagtgaagggctttgggggcggctgcggaaatggttctccggtcagtctgacgtcgcgccggccccggttagcgttgaagacaccagctttgacggcaatctgaagcgcttcctcgggcgtaccggcagtggactcccaggcccctccgacggcatcgaagatgtttcgttcgacggtaacctcgcgggtttcttggcgcggaccagcggttcttcagtgacggcctctactaccagtcctcaaatcgaggatgtgtccttcgattcgaatctgcgggcatttctcgaccgcacacctggtcctggccgacaacagcaggagcccgctcttgaagcaatgttgggcgctccgcagatattgggtggcaagggaggctatcaattgtcttcttcggtgaccctttttcatcagagtgcgccatgcaaggcgatttctggtccagttgcgccggttcctgtggaaccattgcccagctacgacgataccctcggctatgaactggggcccagtcgataa

SEQ ID NO: 348872 - DNA, 663 bp, Pseudomonas aeruginosa
atgctaccggtatcgtgcgccaacctcgcagttatcctgcgagatcgaaccgatctggaaacccgccgggtaatcaggaaagagctcatgtacctcagcttcatcgacaccaccgaacgtcaggtggtgaatcaaaccccgttcggtcaggcaatagcagccatagctgcgcaagcggcggatctccttcatgatgcggggcatccctttggatggcacgatggcggctgcaggatactcgccgaggcattgcagacctggtcggaaggtactctgcaactcggctgcagcggccgcgaccaggctggaccgccatcccacttctttgcagtcctggaaacccagccaggcttgccgtccctatgcattgatgccgacggcttggcgcttgagcacgagttcctggagaagatccgcttcttcgagatgagccacgagagcatcatcgccgtatatccaggtgatgcgcccgcctccgccgagattattcgagatccagacctatccgcccgagtagctgcgctctgcagcgagaggattggaccttttcaagggtggcgggctgacctactccagcgagggcttgctgcgggccaggaatacgtcgcagacagtgccgctgatgccgaacgcatggcagccatcgacggaatgcggctttaa

SEQ ID NO: 348873 - DNA, 744 bp, Pseudomonas aeruginosa
atgagccccgcaaaacagttggctctgcgaaacgagttggggcagaagaacgccggcaaacagatcttcgaacacagcgcctaccaggtcatggtcaggatgtttgccagcgtccttgattgcccggcagctgctggctacttccatcacgacccgctgcacaatgttgcggcgttcgccaggctcggggaggacgggatcctgatgaaggcctggttcgacgtattgcaccctaaccgaggcctggcaacgctgctgatcgttccgagcgcgggtgcgcaggcgttctcacgccacctggatcaccagcgcctggagatccaggatgccttggcgcgcgacatctatcagtccctgcatggcaacgacccggggccgctcaggttcatctgcgtatcgtctgaggcgccctatcactgcagcgtccatcacctcgatcgcgaaagtacccaactcggccgtgatcaataccgtgccgcggtaaagatcatccagcgttccgcgcaagaggggaactggccaatgttttccggtgccgaccaccaggtctcggtgagcccagcccgtcgaaacgagatcgagtcgaacccgctgatgaaagaaccggcgatgctgccaaggagcaaggcagacgagccgcagttatccggcacaagcagtgccttgctgcaccacgcacagcgacaccgtgaacccaaggctaaaagtgcgccgaacgacgtgttcaatttcgatgccgattga

SEQ ID NO: 348874 - DNA, 666 bp, Pseudomonas aeruginosa
atgaaacgtaccgtcatccctgaagcatccagcacctggacgatctatttgccggacggatgggcggcctccccggtgcggattgaccaccccttcagtgatcgacctaaggcccccaaggggtggatatctctctggccatgcaccaaaggccccagtgccagcacactgctcatcaatcgcgagagtgaggagcgccgctacgcgcttcacattggccaacaagccctccagccgcttgacgccggtcaactggaggatcgtttcctgcaaggtgttctgacgctaccgccacagtcccagctggcccgtgtctatgcttcccgcatcctgacactccccgcggagctacgcgcggcggccgttgaaaagcttaattcggcgaagctgcatggcgcctaccaatccaccgccgagttgacggctgccgtgaaaagcttcatcgcggccaacgatgaccgcgatctcaaaaaccgcgctgtgagcctcctggcgcaccgcattcgcatcgcggatccacatacccgtcccgcgctgttcgccgagcagcaatctcgactgccgtcttcctggatcgaggaggcgaagcgcagggtcttcaccaggtcctcgtcggcccgggcggagatctcgggctacgcggacatcatcttcgatttcaactga

SEQ ID NO: 348875 - DNA, 549 bp, Pseudomonas aeruginosa
atggggaagtgggccggaattgaccttcgaatctgtacggaactcagaaacatcccatacaagccagaacccgacaaagggattcatccagttgtgtggctcacaaaagagccaaaaaagattgatgatattcccgaacttcggaaagaccattacatgaagcgcctagttctagccctcaatagcgagggaggacgtttcgagtcttttcggtgcgagtgccttgaagaagagcaagaaaatgggatcgcggcagtattcggcgtcggcttcatctaccgtgatcgacgcgcgttcaaagactatgccgcacaactaatgatagccggcgagattctaggcttcatggcggatagcgacacattcgaaaacatggctcatccatacaccatagagatacatagagttcggctgaaagatgaggatctgattggctggtctgttgatgtttggcatcaatcggtttcttccaatctcgattcagccaagcagctccgggcaaatgccattgaattcttgaccagcgttctgagcaaggcttacccataa

SEQ ID NO: 348876 - DNA, 312 bp, Pseudomonas aeruginosa; identical to SEQ ID NO: 325389

SEQ ID NO: 348877 - DNA, 321 bp, Pseudomonas aeruginosa
atgcgtgccggcaggctgcgccatcctctcaccatcgaacgcatggagcgcatccgagatgagattgggggatacattgagaaatgggttccggttggtcgcgagtgggctagcgtcgaaggcatcaatggcagagagttcatcgccgccaacgcgcagcagtcggaaacgacctggcgcatcaccctgcgctatcgggccgacctggtggcgaagtggcggctgcgcagcggtaacaccgtgttcagcatcgtggccgtactccccgacaacggacgccgtcagcatgtgctgatgtgcaagtccggggttccgaaatga

SEQ ID NO: 348878 - DNA, 282 bp, Pseudomonas aeruginosa
atgaccaccgtaacccttgaagaagccaaactgcacatgcgcgtcgatcacgacgaggaagacggttacatcatggggctagtcgccgcggctgaatcgcacgtcgctaacttcctgggcgatggcctacccgatcctatgcccgccccaatcaaggctgctgtcctgctgctggtgggcgatctgtacgagaaccgcgagcgaatgtccgacagagacctgagcgaggtaccgacctatgccatgctgttggctccataccgctcgatgagggtgctgtga

SEQ ID NO: 348879 - DNA, 1497 bp, Pseudomonas aeruginosa
atgacccgggcagagaaggttatcgcctttatcgagcgctactgcgttacgccagaaggcgccgacgtgggcaagccgctgctgctggcagacttccagaagaagttcatccgcgacgtgtatgacaacccggccggcactcgccgggccatcctgagcgtggccaggaagaatggcaagtccggcctgatcgcgggcctgctgctggcgcacctggtcggccccgaggcgaagcaaaacagccagcttgtgtcaggggccatgagccgcgatcaagccgccctggtgttcaacctggccgccaagatggtgcagctatcgcccgcactgtcgaagatcgtccgcatcgtgcccagcggcaagcgtctgctggggctgaacctgaacaccgagtttcgcgccctggctgccgacggcaagaccgcgcacggcctctccccggtgctcgccatcctggacgagatcgggcagatacgcggcccacaatccgacttcgtggacgcgatcaccaccagccagggcgcccactcggcaccgctgctgatcgccatcagcacccaggcagccaacgacgccgacctgctgagccagtggattgacgacgccctgcgcagcaatgaccccaagatcgtgtgccgcctgtacgcggcgtcagcgggctgtgacctgatggacgaagacggctggcgagcggccaacccggccctgggcatcttccggtcggagacagacctgcgggagcagatgcagcaagctgagcgcatgccgagcatgagcaacaccgcccgcaacctgctgctcaaccagcgtgtcagcctcgacagtccattcatcagccccgacgtgtggatggcctgcgacactgcgcccgacccattcgagggcctggtctatgcgggcctcgatctgtcggcccgaaccgacctgacggcgctggtgctgatcggcagagtggacggcgtgtggcaggtccgtccgtacttctggacgccagagcagggcctgttcgaccgagcgcagaaggaccgcgccccgtatgacatgtgggtgcgccaggggtacatccgcaccacgccaggcgccacggtggacctggaagcggtggccctggacatggccgagatactgagcgactgcgaggtggcggcgatcgcctatgaccgctggcgcatcgacgtgctcaagaaggagctggagcgcctgggcctggagttgccgctggtgccccacgggcaagggttccgcgatatggcgccagccctcgacgccctggaggccgagctgctgaatggccgtgtcgcccacggtggccaccccgtactgaccctgtgcgccgccaacgccgtggcggtgaaagaccccagcggcaaccgcaagctggacaagagccgccgcaccggccgcatcgacggccttcaggccctggctatggcgttcggcgccgcccaggtggccgaggcccccgccgatcttgataccgaggtatttttcgtatga

SEQ ID NO: 348880 - DNA, 336 bp, Pseudomonas aeruginosa
gtgagaaggtacaagcccaagacgagggtgatcccgctcggtagtgctgcatggcagcgcctgcgtgcccaggtgctggctgaggaaccactgtgccgcgactgtgcggcccgtggcctggtcacacctgctactgacgtggaccacatggacaacaacggcgacaacaacgcacgcaccaacctggcgcccctatgccactcgtgtcactcgatcaagacagccgaggacatgggcaagcgcaccacgcggggctgcgacgtgaacggcatcccgctcgatccgaaccaccactggaacaggtccaaaagatcaccaggaaccgcgctcagctag

SEQ ID NO: 348881 - DNA, 1233 bp, Pseudomonas aeruginosa
gtgaaaaagctgttccgcctgttcacgcgctccaacaacaccccggcctatgatcggtacttcgaccagttcagccaggccggtaactcggcaggggtcaacatcacggtacagaccgccgagtcgatcagtgccgtgtacgccgctgtcgcagccatcagcgagagcgtgggcagtctgcccctggacgtgtaccgccgcaccgatgacggacgcgacaaggcccgcacccatcccctgtacgcgctgctgcacgacgccccgaacgagtggcaaaccgccctggaattccgcgagcaactgcaacgccacatcctgctgcgcggcaatgcctatgctcgcatccgctggagtggcgccggtcgcgtacaggcgctggagccggtcaacccggacagcgtgtcgatcctgcgcagttcggccagcgagcgcctggtctacgagtacaacgaccgccacgggaagctccagcgactgaccgccgacgagatgctgcacatccgctaccacaccgaagacggcgtgctcgggcgcagccctatccaggtggccagggataccctggggctggcgctggccgaacgtacccacggcgccaagatgttcgagcagggcaccaagctgtcgggcgtgatcgagacagcacccggcaccaccaaggagcaggccgcgcagattcgtgagagctgggccgctggccaggctggcgtgaacaaccacggcaagaccccggtgctgccccagggcgcgaagtacagcgcggtatccatgacgctggaggatgccgagtggatcgaggcccgacgcctgtcggtcgaggaggtggcccggttgttccgtgtaccgcctgtgctgatcggtgatctgcgcgaggccaactactccaacgccgtggagctgggccggtacttcgtcacccacactctgcgccgccacctggtcgcgtgggagcaggctatcaaccgcaccctactgggtagcgggttctttgctgagcacaacgtggaaggcctgctgcgtggcgatagcctcaaccgtgcccagttctatcaacgcggcattgaggaccggtggctgctgccgtccgaggtccgccgcatggaaaacctaccaccggtagaaggtatcgacgatgagcaagaaaccaagactccagatgctcaagccccgggtgcgagtgatcgagtcgatagtggaagaaaagctgcgactggcgaaggagaagaagcgtga

SEQ ID NO: 348882 - DNA, 522 bp, Pseudomonas aeruginosa
atggaacgccgagcagccgtaagcctggaacgtaggggccggacgctgttcggctatgccgcccgtttcggccaaccagcgcccatcgagggctttaccgaaatcatcctaccgggggctttcaagcgctcccttgcaagcccagccgccgccagcatccgcgccgtttacgagcacgacgatgcagccctattgggccgtgtcggagctggcaccctgcgcctttctgaggatgacgtgggcctggccttcgagctggacctacccgacaccagcctgggccgcgatctttccgaactggtgaagcgcggtgacgtggccgggtgctcgttcggcttcgtgccggtgaaggaggactggcaaggcgagttgcgcagcctgcaggacgttgacctgcacgaaatcaccatcacggcgaatccggcctacccgaccaccaccgtatcggtgcgcagccgcaagccaatgctggcgctggccaatgcccgccgataccttgagttcctggagtgcatccggtga

SEQ ID NO: 348883 - DNA, 1203 bp, Pseudomonas aeruginosa
atgaaacttcacgaactgcgcgagaagcgcaccgccgccgtcgagggcatgagaaagctggtggacaccgcttccgctgctggccgtgacctgactaccgacgaatccacccagtttgaaaccttcaagaccgaagagcgctcgctggccgaccagatcacccgccacgagcacctggccgatctggagaagcgcaccgccgctcccgccgccaccgacacccctgagcacctggagaagcgcgtcagcgtgatccgcgtgctgcgtgcgcagatggaaggccgtcaactggacggcgccgagcgcgagtacacccaggaaaccgaacgccgcaccggtcgcaaggccgaaggcgcattcgtaccgttcgccgccctggaacgccgcgccaacaccaccgcgaccgcgcccgagctggtgggcaccgaccaccgtgctgacctgtacatcggcccactgcgtgaagcactgctggcgcgctcgctgggcatccgcaccctgaccggcctggtgggcaatgtgagcgtaccgaagttcggcagcggcctggaaaccggctgggtaactgagggccaggccgtgcccgaagggcaaatgtcgttcgatggtgtgaccctgacgccgaagcatgtgggcggcaagaccgaaatgtcgcgccagctcctgcaacaatcgtcgccaggcatcgagcaactggtacgcgaagacctgtcgttcctgatcgcccgtcagatcgaccgcgccatcatcaacggcagcggcgctgctggcgagccgctgggcgtgctgaacaccaccggcatccagactgccgacatgcccgccacctgggccgaggtgctggcgctgctggagaagctggatgacgtgaacatcaccaacgcccgctggctgaccaccgccgcgatccgcaccatcctgggcagcaccgagaaggtggccgggtctggcagtggcttcctgtacgacaacggcaccctggccaacctggcgctggcggcatcgaagaacgtcccggctggcaagctgatcctgggcgactggagccaggtcatgctcggcgtgtggtccgaggtggacattctggtgaacccatacgccgaaccggcctacagccgtggcggtgtgcaggtccgtgcgatggccaccgtcgataccgctgtacgtcatcccgaaggcttcgtagtagcgagcgcaccgtaa

SEQ ID NO: 348884 - DNA, 249 bp, Pseudomonas aeruginosa
atgaacactcgaatcccggggcggatcgccgacgacgcggtggaagctgtgagctatggtcgggagcaaactcagtggctcgctgctctggcggcggctatcaagcttgacctgaagcacaacgaggggcgcgaggcgatggaactggcccgcctggtgcattatctggccggcgactgccacaactacctcgactgcgaggtagttcgcctgcgcaaagagatcgacggagcggaggcgatgcaatga

SEQ ID NO: 348885 - DNA, 126 bp, Pseudomonas aeruginosa
atgagcaccgaatggcgcgtcgtcgaaggtcgtgcagacctgatgcgatccgcaggatacgccctgggcgtgatcagccaattgctgcacgagaacgccgttcgcagaaccttggaggcgacatga

SEQ ID NO: 348886 - DNA, 426 bp, Pseudomonas aeruginosa; identical to SEQ ID NO: 325380

SEQ ID NO: 348887 - DNA, 123 bp, Pseudomonas aeruginosa
atgcgtaaggccatcctcgccgccagtggcgccgtgctttgcggcttggtagtggttggcgccagccagttgcttcccctggcgccggcgctcctcgcatggcagttcggctgtcatttctag

SEQ ID NO: 348888 - DNA, 2721 bp, Pseudomonas aeruginosa
atggcgcgaaagcctcgagtatgtgcttggatggctcgaaaagaatggggaaaaatgatggccacggtatttgacctgcgcaatgaactggatgctttgtacggaagcaactatgagctcgatgtcgcgtctgcaaacctagcgattttgacggttattcatgactcattcttggggctgacaaggtcggaccgcctagcgcctttggatcggctattcactagtgccggcctcaagctatccatcgccgaactgtatacggaagccgaagcgcgggagcgtggaatctctatttcaagtgcggaggatattcctcccgcgaactgggatactgccatctcgatgatcgcttctggtaagcggccagttgctcgagaagcaggggcaaagccacgtcgcgtagttttttattcctacaaaggtggagtaggaagaactacggctcttgtccacgccgcattccatctggctcgcagcggtgagcgagtcgcaattgtggatctcgatgtcgaggctcctggcttgcataagcttcttcctcgcccggatggcggcaggattgaagctggaatcgtagattttctctgggagcgccaagtgctccccataagctctggtacagatgaggcattgactacatgtctcgtggggatgggggcaggtggcaagaaggcaatctcctacgtcgtagaagaccaagcctcaagagcccaggtccacgtgataccagctggggttgttggggatgagtacgtccgacggctgctcacattgtcttcggaagaggctttgacccgtgccgatgacgcctggacgcttttcgagaaggagttagtcgatcaaatagatcctgacgtgcttcttatagacgcgcgcacaggcttgggcgactggggtgggctgtcattgctaaggctcgctgatgaagtcttcttagttatgttcccgagcgagcaaaatggggaaggcattaagttcgttcgtgagacgctaagaagtctttcaaatgttaatacaaatattgttctgtcgccaattccggaagggccggtaggtaaagaaatagtcgccaaattccttccccaattggagttggatgaagaggaactgccaacagagatatattataatccaggagttgctgcagcgataacctatccattagaggcagcgatgcctggttatgctcgaatcgcaaatattctattggactctgaagctcaagataaggcagaggtttcgattggccgcattaatcgatggaagatcattgagtccttaagcttcccggagcgggaggctaaagccattgcagcaaaggattttgagcagttcttccagaaaacctcggatttcgataaatttcttgacgacgcgagatgggttgttcgtggtcgtaaaggcactggaaagtcaacgctctttcatttgttcgtagagcacagagagaacgcagtaaagcgtgctcgcggccggctagaaggaatcgatattctccctggtcacggaccggcggcaggagcaaagttcagacccacaacggatgtttttgaggatatccaaagagggttgtcgaaagagcggcacgattggcttactctgtggagggcgtatgcgatcgttagaatctatgtttctaatatcaatctgattgattcaattcttcgtgctggcgtgatgaggcctctgcgggactttctgaacaaatctttttccaagaccggaccaggtagttcatggaagtcaattcatactacagctctattggggctgctttccgatccttacaaggggctatgtagggatttgatgatagacctaaatgcacaactaaattcggaaaatagaaagctatggcttctatatgacgatctggatcaggatattaaggaagatagtccatggcaagaggatgccttgagtggcctcttgcgccttgcatatgactctaacaatcaggatatacacaatataagatttaaaatcttcttgagagaggatatttggggtaagttggtcttcacaaataaaagccactttagtgagcccagaactcttttgctgcagtggaagatagacgacttccttcgacttgcatacagattggtgatgggggggtcgccagaatttagatcaatcgcgcatagggagttccctctcaccgatgccgaggtagacatggctggtgaggaggatctacgacaggctctagtcccgctctgggggctgaggcaagagaagggaaagaatgctactgtcgcgaaatgggtttataatcgcatgaccgatgcacaggataatacttatcctcgttcgctgactgtgctcttacacgctgcaaaggaagaagaactgcgggttcaaaatgacaaagcggcccccaatgaccggcttttaagtcctagatcaatgcaagttggcctgaaagcagcttcatctgaacgtgttaatgctctaaagaatgaatatcctcttattaggccgttcttggaggatattgaaaataataagactttgaggtcgcagttcaatgctgatgagctaagggatgcatggagtcgatgtggcgagccttttggggcttttgactcattcatttctaatctaagctcggccggcctgctagttaagaaaaaaccaggggcaagcttcgaatttgggatcgcaagtctctatattgatggcctgggtgtgacccgcgttcaaggcgagaaaaagtaa

SEQ ID NO: 348889 - DNA, 378 bp, Pseudomonas aeruginosa
atgcaccacctgacaacactgaatctgcccatcccatcctcgaaggaagccgatcgccagtggctggccgccaggctggcagaggctgggctcgggcaggcccctgaaacctctcccatcgagccccgaccgctggcctccggccagtggaccggggaatccatgaccttgtcgcagccgggctccaagcccagtagcaaccgcggccgcccgctggcccgcgacgactaccaactgatcgagcgcgccagcgccatggccaagctcggtctctcccgattcgcaaccgcccgcgcgctggccatcggctgcgcgcgcctggaccgactcgcccgcgaaaacgacatcaccttcacccaattcaaggccttcgcctga

SEQ ID NO: 348890 - DNA, 513 bp, Pseudomonas aeruginosa
atggcccgcggagtcaacaaggtcatcctcgtcggcaatgccggcggagacccagaggtgcgctacctgccgaatggcaacgctgtcacctccatcagcttggccaccagcgaaagctggaaggacaagcagaccggccagcagcaggagcgcaccgagtggcaccgagtggtgttcttcggccgcctggcagagatcgccggagagtacctgcgcaagggttcccaggcctacatcgaggggacccttcgcacccgcaaatggcagggccaggacgggcaggaccactggaccaccgaggtcgtggtggacaggaacggcaatctgcagttgctgggcttggcgcccagccagggcgcccaacgccagccccagcagcgtggtgctcaacggccgcaacagcagcccccgcgccagcagcagcccgccccgcagccggccgccgactacgacagctacgacgacgacatccccttcgacgatccctaccgccgcctctggctgctggtctag

SEQ ID NO: 348891 - DNA, 600 bp, Pseudomonas aeruginosa
atgaatcctaacgtactcgacaccgaaaccactggtctgccggcctggaacgaccccagcgatgcaccccaccagccccacctagtggaggtcgccgccatcctcttcagcgaccaaggtaaggagttggaccgcttcagcgccatcatcaagccagaaggctgggcaatttcaccggaagtcgccgcgctccacggcatcacccacgagatggcaatggacgtcggcatcagcgaggccgaagcccttgagggcttcctcgcgatccacgcccgcgccgacctccgtgtggcccacagcgcaaacttcgacgaccggatcatccgcatcgccatctcccgctaccacggcaagaccttcgcagatcactacaaggctggcccgcgctactgcactgcccagaacgctcgcagcatcgtagcgctgccccgcaacaaggtcccgaccctaggcgaagcctacaagcacttcttcgaccaggacctggtcgaggtgcatcgcgccgttccggatgccgaggcctgcgcgcgcatctacttcgccctgcagggcatcaccctgccagccgaagctgccgccaccgccgtgctggaggcctaa

SEQ ID NO: 348892 - DNA, 1038 bp, Pseudomonas aeruginosa
atgaccatcctgaagaacgtcgatctcgaaaatggcaccgtcgaggtcaccgagtacagcgccaccaacgctgccctagccatgcttcgcgagaagtacgcgacggtgccggatgccaacactgaggaaggttattccttcatcaaggacggcatcaaggaactgaccaccctgcgaaccagcctggaggctgcgcgtaagcgcgagaaagccccctacctccaggctggccagatcatcgacgccgaggcgaagcgcatcaccgaagaactggtgaaactggaaagcccgatgaaggctgccaagaaggaagtcgacgaccgtctggagcgggagcgccaggaacgcatcgcccgcctgcagcagaaagtcgacgcgattaaggcgatgcccgcccaggtgcgcggcaagtccagcgaggagatcagcgccatgctggaccgtgtcggcgagatcgacgccagccacgatttctacgacctaacgaaggaggcggtggaaacccgccaggctgccctggacgaactcacccagatgctgaccgaccgcctggccttcgagcagaccgagcgccaacggatcgaattggaagcacagcaggccgagatgaagcgccagatggaagcacaacaggctgaaatgcgccgccagcaggaagagatgcagcggcagcaggccgagatgcagcgccagcgcgaagagatagagcgccagcagcaggatctcgccgccgcccgccagcagctcgccgagcaggacacgtcggccgctgtcgagccagaggcgccgaaagccgaagcagcatcggcccccatccagatcaagcccgcagccaaggccacggaatccgccgatacccagtggcgcgcccgcgtcaccgacaagtccgcgctcatcgcagcaatcgccgcgggctacgccaccgaggatctgctgatgatcgatcagctggccctggactccctggcgaatgacaagcgccaggccctgaagctgcccggcgtagtcgccgagccggtaccggctaaagccgcctaa

SEQ ID NO: 348893 - DNA, 762 bp, Pseudomonas aeruginosa
atggcatcggacaaaccgaacccgaaaatggtgatctgggaccaggtgaaaaacaccccacccagcgccaccaagacccagcacttcgacggtcgtgacgtcaccacgatcaacgggcagtacgtataccagcgcgccaccgagttgttcgggccgatcggcaagggctggggctttgacatcctcaccgaccgcttcgaccaaggcgcccccatccaggggagggacggcgaaatcatcggccacgagcagatgcacaccgtgctcctcaagctctggtacgtgcacgccgggaagcgctgctacgcccagcagtacgggcatacccccttcgtgcgccggaccgcctacggcatctccactgacttcgacgcgccaaagaaaagtgtcactgacgcgatcaagaagtgcctgagcctcgccggcttctgcgctgatgtccacctcggcatgttcgacgacgccacctacgtcgaaggccagaagctcaaggaacgcctggatgacgccggcgagaccggttccgaagcagttctggaagaggccaagggagagttcggcgactggctgcgcagccaactcagcgccctggatgcctgtcccaacgagcgagccctggaactaatgcgcaaacagatcgcgcagaccgcacgcgccaaggcagaggtcgtgaagatccacccggacgtcgccgaggcccgtatcaacgaagtcgcggacgcccgcctggccgtcctgaaacccgccaccacggaggcatag

SEQ ID NO: 348894 - DNA, 480 bp, Pseudomonas aeruginosa
atgagcatcgagaacatcaccgtattcaccgacgccagtttctgccccaacacgcgggcagccggcggcgccgtatgggcccgtggggagcaaatccgcttccaggactcgttccagatccgccacgcgtcccaggcgcacgaggctgaaatcctggccgtctgccacgccatccagaaaatcgccgagcaccccgaactgggcgccgaactgcgcaaaggaccgatgacgcgcctggtcatcgtcgtcgactgcctcgccgtgaagcaggccttcgagcaggacatccgcgccggccaggtcgtaaaggaagccatccgcgccgccatacagctccgcgagcagctcggcttctggctgaaggtcaaccacgtcaaggcccacaagggcaccgataccccgcgtcagtgggtaaaccactggtgcgaccgccacgccaaggcccagatgcgccagatgcgcgccgccggccagcactga

SEQ ID NO: 348895 - DNA, 228 bp, Pseudomonas aeruginosa
atgacaacaccaacatcaaccccgccggacacgatcatccggctccccgaggtcatgcggctggtcggcctttcccgggcatcaatctaccgccggatgaagcaggggactttcccgcagcagatccaactcagcaactccgcatcgcgcggcggggctgttggctggtctctcgccgagatcctcgcctggatcgaggcgaacaagaactcgcgcagcgcggcctga

SEQ ID NO: 348896 - DNA, 150 bp, Pseudomonas aeruginosa
atgcgtaagaccaagctcgtgccgttcaccggccgccagtgctctgctgcgatcagcctcgccatcgccgcgggcatgaccgcgcagcagttggttcgctgcgttcgtgtcgaccaggtctggttcatcaccttcgaggtgccggcatga

SEQ ID NO: 348897 - DNA, 465 bp, Pseudomonas aeruginosa
atggctaagcaggctgctatcgacctgatcgagcggtacatcgagaagacccgcacctcgggcttcccctccgccgactaccagttcgccagcgggctgatcgagatggcctatgccatcgacgacatgagcaccgccgactacgaccgctacctcgcacagctcaaggtcgccgaggaagccggaaatctgcgcaagcgcgctcgcgacattcgcctcgctgcccagcacgccgagcgcctgagcgatgcgcgcgaagagctggcgcaggcctccgcgctggagcaacaggcggacgagatcgacggcacgaccgcccgcagcgcacaccaggatcaggcccgcagcttgttcgtcgccctgccgatgcagccgggcgaaagcgcagccgagcggcgccagcaactggtctctcgcggcctgcagcagatggaacgacttctgggaggcgcccgccatgcgtaa

SEQ ID NO: 348898 - DNA, 336 bp, Pseudomonas aeruginosa
atgaaagccaccgtgataacccaccctgcaggccgcgacggtctccgccagcgcgccatggacgtccagcagaagctggtgctgaacgaagtccagcagggcagcgaagccaccaacggattcgctgcgcactgcgccgtcagcatcccgaacgacatcacctacgcgctgtgcctggccaccatcaacgacgactggaagctgctcgaccaggccctgctggacctgagcaagcacgtccaggcctgcctcccccagttcgccgtccaggaagtcgagcgtcgcatccgcgtcctgcaactggaaggtactcaagggggtgttcgccatggctaa

SEQ ID NO: 348899 - DNA, 639 bp, Pseudomonas aeruginosa
atgaaaatcggcgcaacgatcagagctgctcgcaaagcgaagaagctgaccctggagaagctggcccacgaggtaggtaccgacactggcaacctatctcgactggagcgcgaccttcagacggtcaaccgcgagcttatggacaggatcatgaaggtcctggacatctccgtatccgttcaggcgcctggaatgcttggcgacaacctggcgcccgggccagagatcaagggcctcatccctttgatttcctgggtgcaggcaggatgctggaacgaagtctcggacatatacgctgtaggcgacgcggagatgatgctgccgtgccccgtagcccacggcccgcgcacctttgcgctgcgcatccgcggcgagtcgatgtacaacccgcacgaacgccggtccttccgtgaggacgacatcatcttcgtcgaccctgacgtaccggcagcgcaccgctccttcgtcgtggtgaagctcgaaggttcccaggaggcgaccttcaaacagctcatcatcgaaggcagccagatgtacctgaaggccctgaaccctgcctggcctgagccgatcatccacgtcgacgaccacgcgactttctgcggcgtggcaatcgccaagcacgagtcgctgatctag

SEQ ID NO: 348900 - DNA, 246 bp, Pseudomonas aeruginosa
atgactccgttgaagagagccaggacccggaaagggctgcgcctggcagacgtgatcgaccgcctgcgcgggatcggttgcgtgatcgacaccggcaacctgtcccggatcgagaacggtaaacagcaggcatcgacatccctggcggagaagttgtgccaggtattcgaaggggagctgaccgaactccacatcctgtaccccgagcggttcaccgaaaagcccccggggaaggccgttgcatag

SEQ ID NO: 348901 - DNA, 204 bp, Pseudomonas aeruginosa
atgaacaaagcacccgcgagtgatgcgaaggaaaacttgatcaaggccaggttcgacgacgaagtctacgaacagatcctggcccagtgccgccggctgaagctgcgccgcgccgtcctggtccggcagatcgtccaggcctggctggaaagccagccgactggcctgcgggcacagattacgccagttcggaaagccgcttga

SEQ ID NO: 348902 - DNA, 186 bp, Pseudomonas aeruginosa
atggggatgacaacaccgcgcccgccggtcgatgagcgggaggagttggtgcgcgaggcgatcaacggtatgccggaggatcagttgcttcgactgcaggagtacgcgcaccgccagggagtaaccgttgaggaggccgtagtgctggccgtgcgtcagcagttggcccgccaggcgggtggctga

SEQ ID NO: 348903 - DNA, 816 bp, Pseudomonas aeruginosa
atggattggttgcgatggtggcacggcacggtcaccgatccgaagttccagcgcgtcgcccgcatggccggcgcctcgaccggtgaggtgattgcagtgtgggcgtgcctgctggagcgagccagttcggtgacggctggtgacgcacctgtgacgtcacgcggtgacgctgagacgcgcggttccgttgcaggtttcgactgtgatgaccacgacgtgctgctggggttcgaggacggcacaaccgcgaaaatttttgcagcgctggaggatcgtgggctgctggtggagggacgaattgctcgctgggaggagcggcagccagttcgcgccgactccagcaaagagcgcaccagagcttggcgtgcgcggaaaaagggtcagcaggaagcgccggaggtgacgcctggtgacgacggtgtgacgcagggtgacgccctagataaagagggagataagagatctcccccttctagcccccctccggggaaggccgcacccaagccgcgggcgaagtccgaacgcgccaagccgaaaacgaaagtccctgatcccttcctggtgaccaccgggatgctggattgggctcgcgaacgggggctggcggtgaacaccgacaccgagaccgagcggttcctgaactacttccgaggcgagggcaagaccaaggcggactgggctgcaacgtggcgcaactggatgctcaaggcgcaagaagaccttgagcagcgggcgccacgccgatcgcagaagggaacgcacgggcctgatctcgacgataccaactgggcaaacgatgagggcggtgggctatga

SEQ ID NO: 348904 - DNA, 741 bp, Pseudomonas aeruginosa
atgaaatccgcaatcgacgtggtgaagaacctgcagaacatgccgccggagccggtgcgaaagccgcggcagatcgatcctgcgacggtggccgtcgtgaacgacctgtttcgcgagctggtgagcattttcccggcctggcgccaggcgtggccaaccgacgaggcgctggctggggcgaagcggagctgggtgaaggggttcatgaaggctggcatccgctccgtggagcaactgcggtacggcgtcgaggcctgccgggaactcggcgaggacttcgcgcccagcgttgggcgcttcgttcgcctgtgcgtaccgaagcccgcggacctgggcatgccggacgaggatgccgcgtggcgcgaggtcgttcgaggttgcaccgatcccgagggcttcgcttggagccatgaggcggtgcacatcgccggccgggcggtcggctggttccagatccgccagggcagtctgcccgaggaagtgctccggaagcgcttcggccatgcctactggcaactgcagcgtcgcctgtccatggggctgcccctggaggaaccgcgacaggcgctggaggacatgagcgcggggaaagaactgacgcctgagcaggccgcgcgccagggcgaacgcttcatccaggcggtcatgcgcaagcaggggctgaacggcctcagtggcgaggaggcccgccagcaactgctggccaaggcgcgcgtcatgcggagggtgcgcaatggctga

SEQ ID NO: 348905 - DNA, 558 bp, Pseudomonas aeruginosa
atggctgaagcagtctcgaagtcgcgtcctgagacaccggaatccaaggcgaagcggaagaagcgagctgcgcgtccggtctacatgacatggcggcgaatggtcgacccggacactggcgaagagcgcctggcgctggtcgccgagagcgggatagatcgcttcctcctcaaggagcgcggctaccaccgtggtgaccagatgcgcgtggaactgaagaaaccccgcaattacaaattccactgcctggtgcaccagttgggagtgctggtcagccgcaacgtcgatggcttcgccggtcttgacgcgcatacggttatcaagcgcctgcagggcgaggccggcgtgtgctgcaccatcgagcatttcgacatccccgacctgggccgggtgacacggagcatccccgaaagcctcgcgttcgacgagatgccggaagagcgcttccgcgagttctggaaggggctctgccagcacctgatcaccaagcactggccctcgctcaccgaggagcgcatcgacgagatggtcggcctgatgccggcggagggggcgtga

SEQ ID NO: 348906 - DNA, 348 bp, Pseudomonas aeruginosa
atgggcaactggcgctactttctcgcgccggagggcttgatttctccgaacgaactgcccgaaggctggggcctgctgacggttaacgggcgtggtcatgtgaaggcagttgctgggctcgccaccttctacaagggcagatacgacgtcctccgggagcagacggaagtctggcggcacgaggcagatcgcaatcgggagcagttcctcctggtgaagttgctgaaccgggtgggagatgtggaggcgctgaatcagcgtattcgcggcgcgtacgctgagcaggcgcgtctcgcaaatcgggtgaatgaactcaacgagctgctgcgtgtgagggctactgcatga

SEQ ID NO: 348907 - DNA, 651 bp, Pseudomonas aeruginosa
atgacgctctccaaccgacagcctcggccgaagaagtgccagaacgtcgcgtgcgggactatgttcgtaccgcagcgcctcgggcagaaggtctgcagtatggcctgcgcgctggctaccaaggatcagcatcaggagcgtgcccggaagtcgatcgcggatcgcgagcgtcgagagatcaaggtccgaaaggaacagatcaaaccacgctccaagcacatgcaggaggcgcaggaggcattcaacgagtacgtccgctggcgcgatcgcttggcagggcacgcctgcatttccagcggtcgcccgctcgattgggctgccaatgccgtcgacgccggccattaccgcagcgtcggcgccgcgccgcacctccgtttcgacgagaacaactgccacgcccagagcaagcaggataaccgctacctatccggaaacgccgccgactaccgcattgggttgatcaagcgaataggcctggctgcggtcgaggccttggaagcggacaacaccgttcggaagtactccatcgacgacctgaaggccatcaaggagcgctaccgcgcgcgctcgcgggagttgaaaaagcgtgtggagtcggggatgggaatcaactgccatgcgccacgaggagagcaacatgtccaagagtga

SEQ ID NO: 348908 - DNA, 225 bp, Pseudomonas aeruginosa
atgtccaagagtgatgccttctgctcccgtcacgcagacgtgccgatcacggtgcggctggatggtttgccgccaatgacgctggtgcgcacggccggtcagtgggccgtcatcgtgggggtgaagtgggagacggtgaagaagcggcggcagcggggtgacacctggctcagcgcgttgaagcccggccgccgcaagaggacgttcaatcgccggcgctggtga

SEQ ID NO: 348909 - DNA, 258 bp, Pseudomonas aeruginosa
atgaacaacaacctgaagcagagcgacgaccagtacctggctgtcaccgaggccatggacacgatcagcacggccatggaagggaaaggaaccgagtcactgctggtgatcaacctgggcagcagcggggatgacgccgtccttggcggcagggtatcgctggaagccatcgaacggctggagtccctgctgggcgagctgaaggcccgccatgccgacgacctggatggcgtgctgcacgtctggaccggcgagtga

SEQ ID NO: 348910 - DNA, 252 bp, Pseudomonas aeruginosa
atgagcgacaaggtgatgagtgcaaccagctacgcaggggcagcggcggccgcggtgagcgcgctgacgctgacggacatcggcatcatcgtgggtatcgtcaccgcgctgctgactttcgccgccaacatgatctacctgcaccggaaggatcgccgagagcagcgcctgctcgagttggaggcggcgcgcctgtgccgtgtgcgcgacctcaccggtgaacccggctgcttcccggcagagaccgagtaa

SEQ ID NO: 348911 - DNA, 513 bp, Pseudomonas aeruginosa
atggccagccggaagtatctcagcgctgccgtgctagccctgatcgccgccggcgccagcgcgcccgcgatcatggaccagttcatccgggagaaggaaggcgagtcgctgaaggcataccaagacggggcccgtgtctggacgatctgcaacggcaagacggcaggggttacccgttccaccaccatgaccaaggccgagtgcgacgcctggcgccggaccgagatcggccagcggctggagttcgtgcactcgatcatcaccgtgcgcatgagcgaacccgcctgggccggcgtcggcagttggtgcttcaacgtcgggaacaaggcttgcgcgggctccaccgcggtgcgcctgctgaacgccggcaaccagccggcgggctgccgctccctgctgcagtggcgcttcatcacccgcgacggcaagaagatcgactgcgccacccctcaaccgtactgcggcggcctgtgggatcgccggcagggtgaagcggagctgtgccgcctatga

SEQ ID NO: 348912 - DNA, 372 bp, Pseudomonas aeruginosa
atgaccatcgagccgtggcgcctgggcgcctatctcctcatcgccgtgctgtgcctcgccactggctggcaggtgcgcggctggaaggaggggagcgacgccgccatccgcctgcaggccgagcaggatcgtcaggccctggcccgcagcgttgtcgcccaggtagccgagagcaccaacaaggtgatcgccggcatccgtgtcaccaacaccactatctaccagaagacccgccaggagatcgtccgtgaaccgatggatcctgcttgccgcctgcctgctggctggatgcgcaacatcaacgccgcccgtgccggtcgaccagtccctgatgcagccgtgcccggacctgcaacaggtgccggtcgctga

SEQ ID NO: 348913 - DNA, 186 bp, Pseudomonas aeruginosa
gtgccggtcgaccagtccctgatgcagccgtgcccggacctgcaacaggtgccggtcgctgacgacggcaccggcgatcccgccgaactcaccctggccgacgtcgcgatgtcgggccagtacctggagtgccagcgccgccaccaggggctcatccaggccgtgaaggcgcagaccaaccactga

SEQ ID NO: 348914 - DNA, 480 bp, Pseudomonas aeruginosa
atgaacgacaatccattcgagcccggcgatttccgggtattggtgtcccaggcccgctggaacgccagcatcgtcatccgccgcggcgaatatcccgatcagaacgtggatgtagcgcgagatctggcccagcagcgcgctaggcgctggttggctgaagagttggccaaggccaccgagcccatgatcggcaaggtgatggacgtcaaaacgaagaggctgggcccgctgggctccccagaactcagcttcgaggcatcgctctacctgttcaccgagcaggccctgctcgagcttgtccgggcgatccggcacgacgagcagcagaaggcccaggggctgctcaatctcgaggtgccgctcgacgcggaactgcaggcgctgcgttctgccttgtcacagatcatcggtgacgcacgtgaccgcatcaccgaacgtcaccgcgccttgctcggcgtcaccgcgtcaccggagaactga

SEQ ID NO: 348915 - DNA, 300 bp, Pseudomonas aeruginosa
atgtccaagcgcaagacctacctgccgcgcgagctgcgcgccggctgcaccgtgttcatcgtgacctcacgccgtgacggcctgggccgcacccactaccaggtggccacccacctgatcgccggcaagggcgagccgcagccggagtcgatggggcgccacccgtaccgcatgcacccggcgatggcgcgctgggccgagtcccgcaccgacctgtggaagacgcgccgcgccgcccagcgcgaagccgatcgccgccaggcccatgaggtcgccgcattcctcgggaggcccctatga

SEQ ID NO: 348916 - DNA, 273 bp, Pseudomonas aeruginosa
atgagcaagccagcccctcaggtcctgggcgtccagggcttctccgccggcggcatgatgggggaaggcgagccagccccggcccctgcaggcgccccggaactcgacgaactggccaaggtgcgcaaccgcatgcgtgcccggctggctgggatgagcaacacctacatcaagcgccgcggcctggcgctgactatcgacggggaggtcaccgtcgcgcaattggaggcgctgctgttcatgatgaccgatagcgaggagtggagttcgtga

SEQ ID NO: 348917 - DNA, 630 bp, Pseudomonas aeruginosa
gtgagcagtaagaaggccatcgactgggaagcgatcgagcgtgactaccgcgtgggccagctatcgctgcgtgccctggccaccaagcacggcaccaccgcgggcgccatctccaagaaggcgagcgctggcaactgggtgaaggacgccagccaagaggtgcgagagcgcaccagggctgcactgctgactgagccgcgcaaggaaaaggcctgcaaggaaacaggtgacggaaacactgtttccagcgaaggaaacgcccccacgcagggagacatcgaagtcgcagtgcagaccaacctgcaggtgatcacccggcaccggcgtgacatcgccaagggccacggccttgtcaacctgctgttccagcaactggagcaggcggcgaccgcgcgggacgagttggaggatgccatcatcaaggagacggccggcgacgagaacaaccagcgccgcaaccggatgctgaaggcgctgagcctgcccacgcacgccggcgtgctgcgcgacctgtccaccgcgctgaagaacctggtaccgctcgagcgccaggcctacaacctggacgaggtgaacactgaggaaacctacgaggaccggctggcgcggttgctcggggccgatcagtag

SEQ ID NO: 348918 - DNA, 966 bp, Pseudomonas aeruginosa
atgtccatcctagataacgctgtcgcatctattcaggttggaatggacgactttagcaacgaggattctcgccgcgtactctctgcgattcgaaacatctatgcgggtattcttcttctgttcaagcacaagcttcaggagttgagtccagaggactctgacgaagtcttacttaagaccaaagtgatccctgcagtgaataaggatactggcgagattgcatggatcgggaagggcaagaaaacagtcgaggtatatgacatccaagagcgctttgatgcgctcggaattactggtattgactggaagcgtctcaatgcgcttcaaagtatcaggaacgagatagagcactacttcactaagcagcccgaggaaagaatgcgggaggctgtctctaatgccctccacctgataatagagttttgtggaccgcaccttgaggttcagccgtttgatctctttggtgcagattgctggaacctcatgcttgcagaggcagagatctacgatgctgagttggaggcctgcagaaagaaccttcgatccgtagattgggaatttgacctggtggctcagtcggtcccggaaatggtgtgtccagaatgcgattctcatttgattcgagtcattgatgctgctgctgctgtggaggctcttacctttaggtgtagcgcttgccaaagtgagtccccatacacatcaatcattggccccgcggtagaggtatcttcaaaggcagataattactggtccgtaaagagtggtggcgacccagttacctccgcttgcccccaatgtggctgggggacgtatgtccatagtgaaggaacctgcgtaacctgctttgagggacctgaagcaacggagtgcaagtggtgtgagggggcgctcaccgtagatgaggcccaccacgggaatgtgtgcagctattgtcaatacaagttcgacaagctgatggatgagtag

SEQ ID NO: 348919 - DNA, 798 bp, Pseudomonas aeruginosa
atgatcaaacccaccgtaggccgcgttctctggttctggccgtctcccgaagaccgttgtgcgcgcattgaaggtcagccgctggcagcgatcgtcgcgcatgcctggagcgatacctgcatcaacctcgcctacttcgacgccaatggcgtccaccgccacaagaccagcgtactgctggtgcaggaaggggcgcagcgcccggccgccggcttcgccgaatggatgccgtaccagaagggccaggcagcgaagaccgaggcaatacagcgcgaggcagtggatgcgctgctgcaggtgcgcgtcccgatcctcgatcagatcaccgaactgtgctgggccatcgagaagtgcggcgcctcgcccgagctgaccgacgcggtgaccaaggccagcgcgttgcgcgagccgatcagtgagctggtttgccaggcgctggtgctgggcatcggtgagggtatcgtgagcgtcagctactccagcaacgtgccgaagcactgcgaccgttgcctgcgtcctgtggcgcactgcgatggtcacgaggaccagtccgagccgcccgaacatggcgtgacgggtggcagcgcgtcgcaacagccgtcacctgttgctggtgacgtcaccgtgacgtcacgggctgtagccgacgcgtcgctcgctcctgcggtctccttgctgctggctagcgccgactgctgcgacaccaacgctgcggcgcgtgacgacagcgagcaggccgagcaggaccgtgtcaacgccgccagttaccgtctggccgccagcctgctgctggcctga

SEQ ID NO: 348920 - DNA, 186 bp, Pseudomonas aeruginosa
atggcaggcgatccgcgcaaggccaagacgttcgacgaggccgcgcttaacccggacggcaagacctggaacggctaccgcctgctgtcgtggctgtccgaggccttgcacccgggcgccggcctgagcgaggaggaggtgcgcaagatcgaccagcaggtgcgcgagaagagggtgcgccgctga

SEQ ID NO: 348921 - DNA, 243 bp, Pseudomonas aeruginosa
atgatccgctgggaggcgagcagcagcgggatgctggtggtggttaaagccgacctggtgggcgtgccgttctcgttgagccggtgcggccccagagaggcgctgcctcagatcatccagtccatgaccgaggacatggaccgcatgcgccgccaactgggtggcgaggccgttgactggcttctaccgccgcacgccgccgaactgaacacgctgcaggagggctgcccgggatgtcagtag

SEQ ID NO: 348922 - DNA, 1545 bp, Pseudomonas aeruginosa
atgtcagtagccgatcagcagctgtcccgcctcatcagcgacgatcgcctgtactgcgagcgcaacctgaagattcgcaccaaggacggcgagatccggccgtttgtgtggaacgacgcccaggtaatcctgcacgagaagctggagggccagctttcgctgcgcggctggattcgcgccatcgtgctgaagggccgccagcaggggatcagcacctacgtcgcggcgcgcttctacaagcgcaccagcatgggcatgggcaagcggacgatgatcctgacgcacctggatgccgccacccagaacctgttcggcatcgtgaagacgttctacgaactgagcgccgacgtcctgcggccgaggctgaaggcgaatagcggcaccgagatgtcgttctccaagctcaggagcggctacagggttgctacagcgggctcaaagcacgccggccggtcggacaccgtccagtacatgcacggctccgaggtggcgttctggcccaacgccgtgcagatcatggcgggcctgggccagacggtgccgatgatccccggcagcgagatgatcctcgagtcgaccgccaacggcctgactaacctgttccgccggctatgggtgttggcggtggccggcaagtccgacttcatgccggtgttcatcccctggttcgtgcagcgcgagtaccgccgcgaggtgccgcccgacttcgagatggacgaggacgaggtcgagtacatggaggcctacggcctcgacctcgagcagatggcctggcgccgggcgaagatcgataccgacttcgccggcgacgtcgactggttcaaccaggaatacccggccacgcctgacctggcgttccagaaggtcgggcacaagccgctggtgcagaccgtcaaggtctcgctggcgcgcaagcgcaacatcgcgcacatgaccaggatcggcgcccacgtcatcggcgtcgacgtggcgcgattcggtgacgacgacagcgccatcatccaccgccagggccgtgtcgcttgggggctggagaagatgtcaggcctcgacacgatggccctggccgggcgtgtcgccaagatgctcgacgacgacaagaccatccgcatggccttcatcgacgtgaccggcggcctgggcgccggcgtgtacgaccgcctggtggagctgaagtacggccggcgtgtcaccgcagtgaccttcagcgccagggctaacgacgagcgcaagtacgtgaacaagcgctccgagatgtggggggacatggccgagtggctgcacgaccccatcaccccatcgatccccgacgacgacagcctgcacgccgacctgacggcgccgagctacagctacacgtccaacagccagatcaagctggtcagcaaggaaaagatcaaggaggaactgggcaagtcgcccgacgccggcgacgccctggctctcaccttcgccgaggcgatcgccgcggacgacatccacaccgaagactggcgcaagaggctggccaagaagcggtcccgtaaaacagcaatgagttcatga

SEQ ID NO: 348923 - DNA, 2082 bp, Pseudomonas aeruginosa
atgaccgacccggtagcagagcggacctggcgccgctacgagtacgccaagcagcgtggccacatcgactacacccagaccgcctggatgaacgagggcatgtacgtcggcggcggccggcagtggtcgcctgaggaccgggaggtattggccgaggaggggcgcccggccttcgagttcaatcagatcatgcccaagatcaacacggccttgggctaccagatcgccaaccgaatggacatcgggtatcgcccgcgccgaggtgaggcgagccaggaactggccaccacgctgtcgaaggtggccatgcagatcgccgacaacaacaagctgcactggctggagtcgcaggtgttcggcgacgggctgattcagcaacgcggctacttcgagatatacatcagctacgaggacacgttgctgggcgaggtcaaggtcaaggtcctcgacccgctggatgttatccccgacccggacgcgaagagctacgaccctgacgactggggcgacgtgatcatcacgaaatggctcacgctcgacgagatcgaggccctgtacggaaccgaggcgcgcaacgaggtcgaggaatcgaaggcgggcgccgataccgacttcggcgacgacgatgatgcgacgccgcgcaatcgcttcggcgactccaacaccgcattcaccgacctgggcagcgagacggatgtcgacggggtgacgcgataccgcgtcatcgaccgccagtactgggagatgagccaggccgacgtgctgatcactatcacgggcgacatccgggtgatcgccggtatgaacgaggcgcgcgttgaggcgatgaagcgcgacggcgctatccagacgaagcgccgggtgcgccgcgtcaagtgggtggtgtgcacccgcagtgtggtgctgcacgacgactggtcgccgttcctgcacttcaccgtggtgccgttcttccccatcttccgccggggcctcactcgcggcctggtcgacaacgcgatcggtccgcagcagatgctcaacaagtcgctgagtcagttcgtgcacattatcagcaccacggcaaacagcggctggatctcgtgggcggacactctggagaacatggatgaggaggatctggaggagcgcggcgccgagaccgggctgaatatcgtgctgcggagcggcacgccggtggagaaacggccgcagaagatcacgcccaaccaggtgccgactggtctcgaccgaatcgtcgaccgctcggccttgctgctggagcaggcaactggcatcaacgagtcgatgtccggcgccagtggtccggaggtctccggcatcgccatccagtccaagcagttcgccgcgcagcagcaactggccctgccactggacaacctggcgcgcaccagggcgatggtcggccagcgcatcctcgagttggtgcaggctttctacgacgacccgcgcatcctccgtatcagcaagacggacgagcgtggccaggagcagaccgaggacctgcccatcaactacccgtcggaagacggcgtgctcaacgacctgacgctgggcgagtacgacgtggtgatcactgaggtgccgcagcagattaccttcgagaacagccagttcatgcagatcatggagatgatcgagaagggcgcgccgattccgtggcccttcgtgatccgctactccaacctggctcagaagcaggaaatcatcgaggcgctggagaaacagcagcaggcgcagccggacccgctcaacgaggcgcgcatcgcactgctcaaggcccaggccgtcaagaccaacaacgaggcggtcaacaaggccgtcgagtcgctgtacagcgcgatccagaccgccgggcccatcaccctcaaccccgccatcgcaccgctggccgacaccctgctcaagtccgccgggttcgaggatcaggacgcggcgccgatcgtgccggaggcctcggccggcccgggcatcaccgcgcccgttgcgccgaataacaccaatcccctgacgccggcgaatcccggtgtcggcctcaccgctggtatcgaaaccccaaccatagaaggagttccccaatga

SEQ ID NO: 348924 - DNA, 177 bp, Pseudomonas aeruginosa
atgaaaaccagggacatagcgtccgcagatgattggcgtatcgaatcggacctctcgacgatgttggaggccaagaagatcgccaaggatccgaaacgcatggcagccgtccgcaagctcgcagcgaagaagcaggcggatctgcaggcgctctcggagaagagcaagcaatcctag

SEQ ID NO: 348925 - DNA, 1053 bp, Pseudomonas aeruginosa
atgaaccacccgatcaacaccaagttcgccagcgaagacctggcgttggcgtttcgcaccggcgtgctggtgagcgagtacgacgagcctgacccggaactgctcggcggcgtcgaggaagaggaggaagaggaggagatcctcgatctgggcgacgacgatccagacgccgacccggatgatctggaccgcggcgacgacgtggacccggacctgggcgacgatgcctcggatgatgattccgatgctgatccggaaggtgatccggaggacatcgatccggaagacctggccgacctggcgggcaatggcaaagccaagatggtgccgcatgctcgtttcaacgaggtcaacgagaccttgaagtccgagcgtgccgctcgcctggcgctggaggaggagttggcccgcacccgcggccaggttccgccgaagcaagagcagccgaacgatgggccgaagccttatgacttcgacgccgctgaggaccgatacaacgacgcgatcatgagcggcgagacggataaggccaaggccattcggcgtgagatccgccaggaagaacagaagcagttcgagcgcgccgctgaggagaaggcggctgccacctacgatgctcgccggcagcaggacgagaagaaggccgccgagcgcgccctgcaggacgtcgcgaagcaggcctacgaagactacccgttcctgaacgaccagggcgaagcgcccaacgaggacgccatcgagatggtggtggctgttcgcgacgccaacatgcgcaagggtatggacgctgccgatgctctgcgcaaggccgtggccaaggtcgggccgatgttctcggagaagaagccggcgaaggatgacgatcctgagaaacgctctgcgcgtgagagggtgatccagcgcaacctggagcgcgagaggcagattcccccgcgcgatcagggcctgggcgagcgtagccgcgtcatcgactacagcaagctctccgaggaggagttcgatgctctacccgataccgagaagcgccgcgcccgtggcgacttccttggttga

SEQ ID NO: 348926 - DNA, 1104 bp, Pseudomonas aeruginosa
atggctgttaccaacttcgcgcggctgaccccgcgccagaagatcgtctggtctcgcgatgtgtggtccgccgcccgcaaccagatgttcatcaagaaattcctgggctccgacgacggcgccatgatccagcgcatcaccgagctgaccaaggacgagaagggcgagaaggtcctgatccacctggtggccgacctggtgggcgacggcgtgatcggcgacaacaaccgggagggtatggaagaggagatgatgtcgtactcgcaagagatcacgatcgacctcatctcgcaccaggtcctgtccaagggcaagctcgccgagcagaagaccgtcatcaagttccgcgagatggctcgcacccgcctggcctactggatggccgaccgcgtcgaccagctcggcatgctgaccctgtccggcgtctcctacgccttcaacctggacggcagcaagcgtgattccgaatcgccgttcccggatctggcgttcgcagctgacgtgactgccccctcgtcgaagcgacaccgtctgtggaacggcaccaatctggtacctggcgacacctccgcggtcaccagtacctgcgtacccaagtacgcgatgatcgtggacgcggtggcctacgcgaaaacccactacatcaagccgctgcgcgccggtggccgggactactacgtcctgctgatccagccgaacaccctggcccagttgaagaaggacccggattaccagcgcgccatcatcaccgccctgcctcgtgacgcgaagaacccgtggttcaccggcgctaccgtcaccatcgacggcgccgtcatccatgaggacaaccgcgtcttcggcacccagggcgccccggccggcgagaagtggggcgccgacggcaatgtcaacggcacccgctcgctgctctgcggcgcgcagtccctgggcatggccgacctcgaagagccggaatgggtggagaagaagttcaactatgacaagaagttgggcatctccgtcgacaagctgctcggcttcctgaaaccgaagttctactcgatctacgacaagtcggtcgaagacttcggcgttctggccatcgaccactaccagcagtaa

SEQ ID NO: 348927 - DNA, 396 bp, Pseudomonas aeruginosa
atgatccagaagaactacaaccgccaagccgtcaccgccgcactggtgaacttcgcgcttgccgatgtggccgatggtgtcgcccaggccgcagtgaagctgcccggcggtgcgattgtcgtcggcggcttcctggtggtggacgaggccttcaacgccgaaaccactgccaccgccaaggtcggtgattccctcgacgacgaccgctacagcgccagtccgctggacctggcgaccgtcggcgtgaagcagttggacatcactggctaccagaccaccaaggcaggcgacgtgaccgtgaagtatgccttcaccggcgcggcggccaccaccggtaaggctcggctgttccttcagtacatcgaggtcagcaagtccgagtggacgcaggactaa

SEQ ID NO: 348928 - DNA, 411 bp, Pseudomonas aeruginosa
atgagtgaaatcaagcgcgacaacgttcgcttcctgcccgccgaggatgccgaccatgaaggcactcaggtggcgctgagcagttcccacatcacccgtgtgtacgacgtgagcccggaagacggcgagcgtggcacctggattcaccagcgcttccgcaaggccgcgatcgctgctggctgctccatcgtgggcatcggagaccacgaagaacccgagggagacgacggcagcaagctggcgctgatcgtcgtcgcgatcgagaagctggtcgaaaccaacgccccggaaaccctcgacaacgagggcaagccgaagctcgctgcggtgaagaagaccgccggcatcggcatcactaagaccgaactggatgccgcctgggcgaagttcgtggccgacctggacgactga

SEQ ID NO: 348929 - DNA, 660 bp, Pseudomonas aeruginosa
atgaaccgcggccaactgcgcgagcgcttgcgttctgcctacctagacgacacggcagagccgtacctctgggaggacgatctgctggatagcttccttgaggaggctcagcaggaggctgccattcgctcgcgcagcctggtcgacaccctgcagttgccgctggtgaagggacagggcaattacaccctggcggatgccgtcctcgacgtcacgcggttccgtgtgcctgggggaggaagcctggggcgcacgtctatggaggagctggacgagtccggcaactgggagcagcggcagggacgccccactcactactccttcacctcgacgcagtgctccggcgacggggtgctgatcgtctatccggccccgggctccgatggagcggcaactctgaccgtccagcgcctgccggcagtcctggtggacgacaacagcgaaccggaactcccggctcaccagcacctgttcttactggattgggccgcccatagggccttctccctacgcgatagcgatgccgaggaccaagcccgtgcggcacagcacgagggggctttcgccgccatctttggcgagcggttggatgccaaggcaatgcgcaagcgggccgagaagcggccccgccaaaccaagatcaacaccgcctggagatag

SEQ ID NO: 348930 - DNA, 1017 bp, Pseudomonas aeruginosa
atgggaaagcgcatatggactacggatctcttgacggtagccgctggctctccagaggaatatgttcggctgttcgacgagatcaccgacgcgctgactacggtgtgtggcttggttcaaaccggggataccggccaactggatagcctgagtcctccaagcctcagcgccaacctgtcgtcgaacaacctctttggataccggatattccgcttcaacgattcgctgcaggctgtcaggccgatctacttgcggatagagatgaagtatgtggtgcgttccaaccaggccacggaccggctcccatacttcacgttccaagtaggggcaggttcagatggcgtaggaagtctgactgctccaggcgttgcttattcccgtccatactcctggggagcatccgcctggtcagcgctttcggtgatgcctgctggtggttacccttccttcgcttgcggcggcgatggcttcgcgtggcttgcattcaaggtcggcgcaatcccagtcctcgcgcagacaggccagccgtacccgcccaggacaaatgccaaaggtgccatgttcatattggcgatcatgcgctcgacgaatgtcgatggagagctaaccggcgaagggctgatgtcctatttcggcaccaccatgtaccagaacggcagttcggtatattggacctccggcctgcaatcgccagttcttgaggtgcgaaacagtggtggtatcaccgtgtgtggtgacacgctaaacgtgccactgcttcaaaccttcccaacttcaggtgggaagcccatcttgggcaggatatcgacgccgtttgcaggccttcctgcctcacccttcttgggtgtgactagcatctatctagcggatggagacaccttcacggccgctctggtgggggccactgagcgtggctacatctatcctggcgcgtcgttttcgacaatgcagttcacgcccaacaacacgcccccttgggctgcgccgttcttcctctgggagggcgtcaacgtatga

SEQ ID NO: 348931 - DNA, 357 bp, Pseudomonas aeruginosa
atgaccatcgcagtagttttggcgggctctttctgcattcgtggtggaagtgatagcccgaagatagccggcaactacggtaggaagccgcgtcagggtctcggctacctggccggcacctacccaggtggcctcaccacagtggatggtgtgccggtgcccgccaccgtgcgggttctctatcgaccagagtcgggcgccgcgggtgacggtgtagtagtggccgaggtggcctctgctgctgatggcacgtggagagtggatggtctcgatcctgccgctaggtacgacgtggtgggaaggaaggtcggcttcaacgacatcatcatggcggacgtctccccggcgctggagtaa

SEQ ID NO: 348932 - DNA, 852 bp, Pseudomonas aeruginosa
atgacgacggttgcagacctggatgcaagcaaattcatcgcggtcagcatggagttgaccccgaaaacacttgatgaatttcaggccgaatgggcggctggttttgagggctctacgacagcctaccccagcgtgtccggggatgatggtgccacgctcatcaatgtgccaacgctctggccgagcggtgcgtggcaggccgtctactcgtgggaatgcggtatagaactggcgccgtacccgttcagcggaaccccgagtcactatgcggcctcgattccgggagtcagccgctactactccatgaacatcggtctgcgtgtggctatcatctatcacccgaccggcgctgactccggcctgacatcgttcaccggcagctacgacgccggcttatcggtgttccgcgcgaagcacaaccgatccagcgagaacgtcgagctggtcgcgcggctcattgctggtcggcagctcgagatagccatcaagaacagcgcgcaggcagcggggttaccaatcaaggtagcggttctgaatggcaccacggtggtgtctgttgtcgacgtggcgagcgtggcgctgggcgccgtggggctggtgacatgctcgatatatgggggcacggtagccggcaccgttgttgaccaggccggcgagccggcaacgcgcattgtccgggcccatgagcggagtaccggtgccgtgctgggcgagacgcgcagcaacgcatctggtcaatatgaacttcccgtggtagccaaggtggggacggaaatgtatgtcatcgccctggatgatgaaacgccaccgctgattaacgccgtcatcgcagatcgcatcgtgctggagtag

SEQ ID NO: 348933 - DNA, 3009 bp, Pseudomonas aeruginosa
atgggccaggtcctcgacctgcggtttgacacgctccccagtggctacacgccggacagtagccgacaggtagacttgggcggaggcccgcccggcggcctgcctgctggcacgattggcgtgtggggcatccgcccgccgctgctttcgcgtgagttgacgctgaagcggatgctactgcctgatccgcaggtggcgctggaccttgatttttcgacggtggatcgcggctacaccgtcccgccatccagcaacgtccctctgttgttcttcaagccttaccgtccgccttttggaagtcaggccggtctggagtttggtacagcgtacacgccgcctgcaggcaatgcggtgcccttggagttcatccgcggtgggatgcccagtggcgatacccaatacgttttcccggcaggactggaggctggcgacctaggcgcgccgacagtcatcaactggacgagttctattgcgcctggcgggattccggccggtgctgtcggatcgcacgcggtcacgaactggaacagctacatccgaccgactggcttctccgccggcggcttgggctcgccttcggtcaagaatttcaatcagcaggctttcccgccggggatcgcgccaggcggcttgggtagaccacaggttgagaacttcaaccgcacggtagtgccgaccgggatctacttgggcggcgctggcacgcccaccgtccagaacctgcgcaagtacgctgcaccgacggggttcgttgctactctgttcggtacggcctacctatccggcggcgtccgcgaggtcaagactagcgggttcaacgctgcgcgctacggtacggcattcgtcgcctacgaccagcgcgagctgaagccgggcgggatctaccagggggctttcggcacgccgctgatcggcttccagcgcacgctggcgccgcagggtttcgaggccacctactgggggcagaccaacgtccaggacaacagccagcgggtgtaccctgttggccgcgacatgtctgccctgggcgtgcctggcgtcgatcacaacccgcgtctggtcgcgccgatctctattttctctgcgctcgagtgggggcgcgccgaggtttggaacctgcgccaggtcgtagttccctacgcggaaccgggggactggggcgagcggttcgggaccttcaactacatcgagaatcgcaaccgtgtggtggggaccttcggccaccagtccatccggttcggcacgccggacgtggtcaacggtgcgcgggcggtcgtggcccagggcatggacgccaccctctggggaaacccgctggtggcgttcgccatccgccatatccagccgcccggcctagactccctggtgatgagcaactggtcggcggtggtgaatgccgcccgtgtggttgccgccgctggcgccgacacatcgcgcttcggccaggcccaggcggtcaatacccgccgctacctggagcgcatcggcaactgggaaagcctggtgatgggcgtgccgttcgtggcgtttcgagtgcgcgaggtggtgcagtatcagttccctgatccaccatacccaggtcagccggaagtacagaacctgcgcagctatgtggacctcgacggcaagggcatcgcccccggcctgctcggtttccacgatgcccaggtgcatcgctcgatcatcgcgccgcgcttcaactacatcgacatggtgggcgagccggtggttcgcaacgtaacgccagaggttgcggcatacggtcacgactcggcggagttcggccgtgcagcagcgcacaaccaatgggagagctaccgctttcagggcttcgatgcggcgctgtacggccgtccggctgttgagtaccggaccaagaccgtgttctgcaacggaattcgtgccggcgcgttcggtacacccacctgcctgtggggcgatccaaacctaccgttcacgcgcgcccttggcgtcagcggtatcgacgcaagcgcctccttcggcatagcgaaggtcggcagcaacgtcatttatccgataggcatcgacgccttccgtgccggcgacgccctagtcaaagcgaacagcatctacccgaacggctacttcggccaggcctttggtactccgttgctcaactatccgcagaccgccgccccggagtcgatccaggcaggggagagcttcggtaaacccgtgctcaacccgctgaccatttgggctccctttggcgcgccgcagcaggcgatcaacaaccacggtgtgcgcggccatcgtatcgacgcgatgtacgccaagggcggtatcaacagcgacgacggagaccggccgtttttcggaacgccgcgggtgatgatcccagggacgcaatacgtcgcccccttcggcctgctcgcgttccgcagcaacgaagcgcattggatcagccttcgccgccggactctattggctgacggcctgaagtcgctcaggatgggcttcccggcgctgtcgaagggcggagaggcccaggcctacggttacgacatgtcggctttcgggacggcgttcgtctcgatctacgtcgatccgacgatcccgagagcggtgaatcctgccgggctcctcgccctggcgtttggtgctcaggtggtgcagaaccagcaccgttggatctatccggccggcttcctagcaacacgccatggagcctacctcgttgggccaccgaagcgagctgacaacgtgagcatgggcgtcatgaccgcctggggtgggccgttcgtggcgttccgcaatcgagtggtgcagccgtcagggatcgctggctgggccgtctccgaatatacagccgggcagttcgaccagcgcatccgtgttttgcacggcgctggagcaacgatcgtgcctggttctgctggcgatggcgagtgtttcggctaccccggagtgcggaatgcccagcacatcatcaggccgatcggctgctgctcctctgggctgcggatggggcggccgcaggttgcctga

SEQ ID NO: 348934 - DNA, 1149 bp, Pseudomonas aeruginosa
atggaaatgaagctcgggccctggcccatcggtatcgacaacctttcccctgacgaggcgctgcccgatggcgccttgcgtgacgcgctgaacgtcgtcctcgactccaatggcaacgtgagtgccgccggctctctccagcttcgggagccgagcgcgggcctccacagcctgtgttcgttcccctctggcgcggccttctgtttcggacagggcaagctcttcgactgctcgagcggtgccctggtggggcttgccgatatgccggtcgatgggccggttgcgtgcgaactgctcaacgggcagttggtcatggccacccgcagcggattgttccggctgcagggtgggcaggtcgagccaatggcgttgccggtgcccgcgctgcgggccaggccggcaagcgcaggcggcctgtatgcgggccgctacggggtggccatcagcttccgccgtggcgatgaagaaggcggcctcagccgcatgcaggtcgtcgaggtcgccgagggcggcggtatcgaactggatctcccagaggtcgatggcgcgactgcggtgtcggtctacagaaccgacgcgaatggagctgcgctctatcgggcactggatgcgccgccgggcttccagtcgttcctcgtcggcgccggcaagctgggtgcgatgcccggcaccaggttccttgagccgctgccaggtgggcacatcgtcaaggcctggatgggccggcaactggtcgcctcgggccgaaccctctactacagcgcgccgcttcgctacggcctgtgcaatcccgcgcaggacttcattcagttcccctcgctgatccgcatggtgctgccggtgaacgacggcatctatctcgccgactcgcagcactgctaccgcctcgctggtaccgatccggagcagtggcaactgctgccgctcgacgtctcgccgccgcctgtaggtgcaactgccgtgctggatgggagcttgttccaagacgtgccggcggttccggtggccgtttggctttccgacaaaggtttcgtcttgggcctgccagaggggcaactggtcctggctcaggagaaaaggctcaggctcccgatgcctgggcgtggctggctggtggccgacggtcaccgcctttacgcaggtggttga

SEQ ID NO: 348935 - DNA, 591 bp, Pseudomonas aeruginosa
atgaaactcagcaatggcgataagcgccgcttcttgaaggccctggagcagggcgactacatcatcaccgagtccggcctgatcttcccccgggatgggctcaaggcctcgggcgtctacttcgacagcgtgaacggtgggctcgacgcgcgcgagtctctgaacctgctacctgaccaggggctgaccgatatcctggcgacctacttcggcgcgaccgcgaagaaggccggctggtatctcgctctctattccggggccgtgagcccggcagcgaactggaccgcggcgaacttctccgcgaccgccagcgagatcaccagcgcgaccgagggttacagcaacgccaaccgtccgacctggacgcctggggctgccgccggtaacgcgatcgataacctggcggccaaggcggtgttcaacatcgtctgcaccaccagcatcgaggtgaatggcgccgcgctgctgtcgagcaacggcaagggctccaccagcggggtgctggcctcagccgcccgctatgcgcagacccggcagttgtacaacggtgacagctacgagcttggctaccgcgtcaccctgaccagctga

SEQ ID NO: 348936 - DNA, 2535 bp, Pseudomonas aeruginosa
atggactacaccatccacaacctgtcgatcatcggtgatcggcaggttggtctggcgctggcgccgaaggcgcaggaggtacttcgcgagctgaaggacaggatggctattaccggcatgttcagtggcgccctgtaccgacgcctttcggacgtctcctactgctacgtccgcgtggcgggtgaaacgaacctgatcagcatcgtcgcgggctcgctgcaggagcccgtcatgatcccgcagttccagcgagcgcagccgcctgaagtgctctccggtgtcgtcacctacggtttcctgagtgaagaggaagacctgctgagcagctactacccaacgctgaccagccagcgcctgcaccagttgccggctggccagcagcgctcggcgcgcctggcggtgaagccgtaccaaaccatcaacacctccaagttggaacactcgagccagtacagcggggtgcgtccgaccatgtattcggggcgcatgaagcgcgtggtgcaggccattatggggctgggccggctgccggcgaacccgctctacaaggacgtcctgcagccgctggcggacggtgaactgcccgagccgctgagcgacttcgagcaggaggtgctgcgggacggctatcaggtgcgttacgacttccggtggttccgaacgcacggcgttgccgtaggggccgatcgccggctgtggctggtggagatcggtggtaccagaggcatggtggccatgccgctgccgctcaacccgttgagcctgtccgagaagtacaggctgcaggccgagaagctaggcgactccgatgtgcttgcctacctggaggagttcgatggtgtgccgacgggagagaccttcccggacgacaccgaggacctggaagccctgattagggctggccaagtgcttcgcctgctgacgaccgagcagttatcgggcttctaccaactgaccggactgagcagcgcctgcggctgggcgttcaacgagtctgggaccgaggctcacaacacgggctacggctggtacgccgacgggctgcagttctgcgctcactacaacatcaatatcgccatcgccgcgagcaagatgccgaacgatggccagcagaagaagcgcatgcgacaggcgctgcgcgcctacaacagccgtttcagtaaggtccggttcgaggctgctctggcgaagttggactacatgtccaccgatgaactgcagcagcagtttcgcctgctgagcattgacggccctgacctctaccttgatcggcttgatcaattggttgttcagccgattgcgccgggctccatggccacgatgggcaaggtcggcgagggaaacatggcgaacgcccaaacggccagtgtctacaacctcaagctctgggagccggcctggaccgaggagatgagcatcctgtcgcacgacttcagcgcgaacaccaagccatggattcgcttcgccgaatgcgacaccactgtcttcgtcttctttgccggcgaccagctcaagaccatcaagtggttcgcgaccaacaaggatacggcgacagacgagaccgtgagcgactacgaggactgcatgtacatcgggaagtggtcgaagactaccacctacggcggccgcggcgtgcgccgagcctggtacagcgatgatttcgacgaccgcacggagttcgcggacagcagtttctacgaggagatcgagggcaccaagctcgggatcggtggggcggcatggaacgattggatttttccgcaggagcgcgggacgttgagccgcaatgtgttcttccgccgtcggacctaccgtaagagcgtgggctcccaggggcaggtgaccgccgtcgtctgcctgccggcctacatgcgcgaggcctgcttctatgccatccgggaaacgcaatctgggatcgccgaatccgagacctggagcaatctaaccctggcagatccatggtcggcgacctacgcctatgccatgtacgagccggcttcgataggttcctgcgggccgaactacctgacgcgctatgtgatgagcgtcgactacgacacgtcgagcccctgtgccgagatcgccgatagcggccagtggatgcgcccgtgcgacctcgtcgccgcgccgcgggtaggcaacatcctgatcggcgggggcatctcgccgtactggccgaacccaacttacccgccgctccccgctgggtactccagagaccgcgactatgaggggaccttgaacgtgcggcttgtgtacttcggcggggcgatcgacatgccggaggagagcggggacaccttcgagtgggtgtcgcaggacctgtcgtggttcttgccgtcgccggaggtgtcgatgcctgacggaagcaccaagggctatctcatgcacatgtgggcgacggccaatgccttcggcgcgtccgaagccatcgtctaccagccggagcccgatgctccggaggaaatcaaaggggccgacaacatgccctatctcaagaatcaagcctgcttcctgggggtggtgaatggctga

SEQ ID NO: 348937 - DNA, 1155 bp, Pseudomonas aeruginosa
atggctgatgaggagtgcctttgcgatctggtcagcgaatctgcgcaggccagcgaatccctgttcgcggtgctgggtgatgtcctggcctcggtcgccgtggcagctgcgttcactgtttcgactgttggccaggtggtgccggatcaggcgtcggccgctgaagtcgtggaggagcgggcggcctacatcgtcgtcgactccgcgcaggccagcgattgggccggcgaggcggtgctgtccagcaacctagtgaccgaccgggccagggctcgcgaggcgatattccatggagtgctggaggtcgcaggtgatcaggccgccgccagcgagtggatggtggagatgccgaaggccagtgtgctggattcggccagggcctcggaagagatcaccggtaacgccatcgggaggctagcgctgactgatgcggcccaggcctctggcgggttcattcttggcgcccaggatctggtagaggacgccgccgccggcgctgagcaggtcgtcgctggcgcgcgagtggccgaggtcgtcgaggaccaggcggtggccagcgatgcgctggagcaggaatccgccgtcaccgctgatctggtggacgacgtcctgcatgccaccgaactggcccaggggacagttgccgggggacaggtcgtagatgactgggggcatgccgaaagtgaggccgtccagggggagcatgttgtctggacctgccacacacagaccttcggcatgtcgagactgaccttgccggaagtgaactccttcgcggctgtcggcgggctgctgctggcggcggggccggatgggctctatgtggcggacggcgcgccgctgcagtcgctggtggtcaccggtctagtggacttcggttcgccccagctcaagcgagggggctatctctatctccgctacgtggcggccgggcaactcggcgtctcggtgggcgtcaccagcaccggcagcgaggtgacctacgactatgccctggcggccaggccggatgccgccgctgttcctgggcgagtgaagctgggcaaggggctccgctcccgtgactggcgcttcacgttgcgcaacgagcccggccgtggcttcaagctctacgacctgcaactgatgcaagacgaaacctcgaggagagtgtaa

SEQ ID NO: 348938 - DNA, 1902 bp, Pseudomonas aeruginosa
atggctgaacaagacggcggggtgtcccgctacgaccgcccctaccagattgttagcgagcagatcgacctgatgaaccggcgggcggacgctgctcttggcaaggcctatgagaccctgcagagcctgcaggacatcggcacttcgctcgacacgctaccacccaccccggccatcgacctgccgaacacgccggacaatcctttccccgacatcccagtacccgcgcgggctgacctaccagtgatcggcgacatccagatgccggacctcaacctggacttcagcgatatcgacaagggcctgggcgagttggatgagccgccggagttctcgccgtcggtgattggtatcgacctgccaccgaggccgtcgcccatcgatacctctggcgcgcccgtgcggccgaacaccggcagcgtggacttgccagtggcgccgtccatcaccatgccggatgtgggggacctggtgccgatctcggtgccggagttcgttttccctgacctaccgaggttcgacgagtcggctccagagttcgtgggctcggtaccgtcgacggtgctgcagtgggcggagccgacctaccaatcgacgaatctggacctgctcaagtccatcctcgcgcgcatgctggccggcgggaccgggctgccaccggcgatcgagcaggctctgttcgatcgcgccagggttcgcgaggacatcaacggccagaaagccgtcgacgacgctttccaggacttcgcgagccgtggccacatgctgccgccgggggcgctgctgaagcgggtggccgacattcgcgaggccaaccaagtgaaggtcagcgagaacgcgcgcgaaatcctcatcaactccgcccagtgggagatcgacaacctgcgcactgcggtagagcgcggcattgggctggaagcccaactgatggaccagttcaacgctatggcgcagcgcgcgttcgatgcggcacgccttcgcctggaaagcgatatctcgctctacaacgccgaggtgtcgttgttcaacgcccgtcagtccgcctaccaggtggccgccgacgtgtacggcaagcgcctgcagggcgaactggcgaagctggaagtgttcaaggcccagatcgagggagagaaggcgaagggtgacctgaatgagcagacggttcgcgtgtacaccgctcggctacagggcgtcacctcgttgattgacatctaccgggcgaagatggaaggggcgaaagtccaggccgacctgatcaaggcgcagatcgaagcctatggcaccgacgttcaggcttacgcccagaagctccaggcgaagaagaccgaatacgatgcctacgaggcgggcgtccgcgccgaacaggcgaagatcggcatcctggaagccgagagtcgggcgtttgcggctaccgtgcaggcctacgagtcgaaaaacaacgtcaagatccagggtgtaagggccagggtggacgtggccagcgcgaaaatcagccagtacaccgcccagttgcaggccgagcaggccagggtgcaggcggagttgtccaacatccaggcgatcacccaggcattccaggccgacgtcggccgctactccgcgcagatcaatgcggcgagcgctgaccgagacctgcaggccaggaccgtggaggccaggctgcgcaacaacctcgcctactacgagatcgagctgaagaagtacgacgcagcgatccagcagttgctgcagcgtgtccaggtgcagagcgaggccatgaagtcggtgggcaccatcaccgcgcagttggcctctggcgcaatggcggctaccaacgtgtcggcgagcatgtcgggtggggcgaacatcagttcgcaggacagcctcagcatcagccacaaccacagctacaacgagaagtaa

SEQ ID NO: 348939 - DNA, 1440 bp, Pseudomonas aeruginosa
atggccacgatcacctccggcatccccggcgatatcaaccaggcgaagcgtcggccgagcccgacctccccggacggtattcagcaactcacccgccaggccctgcagccgcagccggccgccacctccatcgctcaggtggacaattcgaggccgtcgcccatgctgccgggcgatcctgcgcgcgcggctcgcatgcaggcgcagatggatcagccggtgaccaagggcgtccaggcccccgatgctggagaccggctgacgcagatcgccaaggatgcctacgccatcaccaaaccgctgctcacgccggcggccacgttcggcggcatcttgggggcgccggtgattgatgctggtcgcaatgccctgatccgtgctgccggcggcgatccgaagaccgcagagggtggcgacaccaagtaccaggaccgggccttcgacgagatccagccggccgtgcaggctttccagaccgccggtgatgcagcccggcgcagtgccggcggcgccatcctctctatcaccggcgcctcgccggcccaggccgctggtccagtcgcgggcggtgccggcgcgagcggcagcatgccggacaagccaagccttccggctgtgccgaggcccagttctgcgccgtcgacgccggccggcaacggctaccaggggaccgaagtcgctggcgtagtaggtcggcgtggtgcgaacggcgtcatggagttcaccaacgactctgcggcggtgaagggggcacagggccagctagctgggtatggggatggcaagggctccctgagcatcatcagcggtggtcaggaggggatgcagcgtaatctccgtgcggccgagatcatgcagcagacgcggcgagccaatgccgggccaggcctgacgatcgtcgaagacagcacccgtggaacgaaggaggagcaggccgccagggctgccagtcaggctgctgtagctgccgctggccgcagaagtgggatcgcgcagccgtcgatagactacaacgaggcgaaccggaacctggcggcatctgacgctgccaacctgcaggtggcggccgcgcgtcgcaacgacgaagcccagcagcgtatccagagtgtcctggcacgtctgaccgatccgagcaccccggccgccgagcgagagcaactgcagcgcacttacgcaatcctcaccacccctgcgaaggaccgctacgtactgcaggacacggtgctgggctacgacgagaccagccagaagccgattctcgggcgaatcgctctggacaccaccacgggccagcccgtatctggaggtgtcggcgctgccgcccggccgggagcccagcagcaacgccaggtgggcacggtctatcgggacgccaatggcaatcgcgccacgttccagggctatgacgcccagggcaacgagaagtgggggagcgcctga

SEQ ID NO: 348940 - DNA, 219 bp, Pseudomonas aeruginosa
atgctgcaagtcgcaatcggagctgtgctgctggtcgccggcatggtagctatctttcccctccccctcctcggtgtggctgcgatcgccagcggctacctgctgatcaaggaagcgccgcccggcgccggccaggaactgcagggtgtgttcttcggcctagccatccttggcctcaccgccaccctggtagtcggcctactcggcatccttttctag

SEQ ID NO: 348941 - DNA, 1221 bp, Pseudomonas aeruginosa
atgcaccccatggcagaaaaaaatcttcaaaggaagattctcgggctgctaaacaacaccacagcatctaaaaactatcaaacccagccaggtgattttgatcgaataaaagacttagccaaagaaatatttaaattaaaaggagagtggatatccaagagtgattgcgaattcctactcttcgacattgtaagcgaaatagtaagcttaatcacaaaaccagacagtcatcccacactaatatctgaacacatcagcgttgaggagcacgcaaaccgtatcctatccattatccaatcaataccaagagaagaaacaatttactacccgctacctgcaataaacagcaaaacaaacctgcacattaagtttaaaaacggatgtgagatacttaaaatagacaagacacaaatagagaaccccacaggattacttgaatttttatcgccagataccaaaactcaagaaagatactatattgcaataaaaataaatggctatcttggacgaatcccctcaggcccggggcacagcttagcgctatcaaagctcaagcaaatcctcgagcgtgggcaatcccttggcttcttaaatactagccttagcgctttgtttagatcagtcaacacaaaacaacgcgtgcacagttggtggtctgattccgatagtttgaagtcagccgaaaaggggaaaccggagaagcaacgaacagaactcccacttgatctgagccattatgtccaacgtatagatttcgcagtcgcaagaggaatcctcccccaaaacagcatggaggaaaataacgctgccgcgcagagttttatcgatgccgtcaacgaaatgaattccgcaggtgacagcatgggagacagaataagagccgcatccgagtggctttgtaactcctacatcgcagaggatgtcccaatgaaactactccaggcatgtataggactggagtcgatctatggtgaggactctcagggggagaatgggttaacagagtctctttccgacagatgcgcatactctatcggcaccagccataaatccaggaaggaaataaaagatcaattcaaatcactatataagcttcgatcaaaaatcgttcatggcgttaaccatgcactcaaagatgatgaccttaattacattgaaactggcagaaaccttctgaaagcctcaatcagcaaggagatttggttaagcagacgggcgtag

SEQ ID NO: 348942 - DNA, 3321 bp, Pseudomonas aeruginosa
gtgaatccgttcgacagggctcgcctgaaggccattgaaacccgagcgaagctagccggcccccttgcttcccctctcctaacatctacagctcttctggcgaggatcgaggaaatcctggagatagctgtcgatcgggttccatttgggcacgccgcccttggtggagggaacggcgttctcaagcgcgatgacgaaaccatctctattcgaaacgatgcgtcccctgcccagacctcgtaccttatcgctcatgaattgggacactggtatctcgatcccgagcggtctgagacaaccgtcagctacctctcctcgcttacgcaatcacatgggaccctagctactgtcaccgtagaagcctatggtgtccatgagcgcttggagcttcaagctaatgtgttcgcccgggagctcctgctcccacgtgaagtagcgagacacctttgggcgacagggcaaactgcaagtagtattgctgagcagttggtaattcctttggagttggttcgacagcaactccttgatgcattgctgctccccgcccaagagccagagcttccatctggcttaccggaaatgagcactgctcagcgacgcgcggcaactgccgacgaacgcttcgtaaacgtcatagctggccctgggactgggaaaacgaccaccctcgttcatcgaattaagcacctaatcgaacagggtgttcgcccaaacaaaattctggtactgaccttcaccaacagggctgcctatgagctggttgagcgcctcagagcatccggcatcaatggagcttcggatatatgggcggggacgtttcactcgttcggtttggagttcctaagaaagtaccatcagctttacaacctcaatgcagagatccgaatcgccgatcaactcatgcaagtgcgcctgctgattcggctgctctcagagatcgatcttcagtactaccttcgtctgcaggatccttacgattggatccccgacgtcctcaagcacattcaaaggctcaaggaagaactgataagtcctgatgaataccgagcgcgactcaatgggctacctctatgcgcccctgatgttgctaaccaacgcgcagatatcgcatcgctctacagcgcctatcaagctgcaatgcgcgagcagaagcttgtcgattacactgacctcctcgcccttccagccattactgcacaaaacgaccgcgtggcgatcactcaatggatcgaccactacgaacacatccttgtggacgagtaccaagatgtgacagaggtaatggtggagctggtgcgtcaactggcggtgaaggcccgctctgtctgggttgttggagacgtccgacaagccattcaccattggcgaggcgcatcgatcatgagcctcgtcaaattcgacaaaacctttgatcgaagcgcacctggatctacgatcggcacctacccgcttgacctgaaccgtcgaagcaccccggaaatcgtagaattgttcagtgttgcggggcgagtgcattcactagaaaagcgcatgccccttgagagcgtttcagcatttcggccatccatcagatccaagccagtgctgttcacttgttcatccaactcttctcagtcatcaactctcgccagaaacgttggtgaactagtgcgtcgaggagtgccttatcgacaacaagccttgatcagccgaaagacagcagctatcgagcaagccgccgaggatctgaccgccagtggcatcccttgcatttatatcggcgacatttatcaacgctcagaaattaagcgtttgatctgcctgatgcagttactgtgcacgaggcaaccacgctctctgatcggcctgatgcaagatccttcattccctatgacctttgacgatatgcagttgctcatcgaagcaacccgcccaggggagggcgtcaagatgcaacgcgggaaatggataggcctcccaattcttggtctttcaaatcgggggcttttcgccaaggccaacctcgcagagctcctggacggcttcaatcgtcacactaacccttgggattttgtatgcaccctccttttggatcgtcgatacggactgccgagtcttgaagatcaatccattgctgcacacactgcaaggctagccctttggctgttcgtctatgcggtgcgtaacggtgatggcgacgcttctcaagccagattgtcgaagtttcttttgagagaagatctccgcaggcgcattggcgaaaagattggcgaccgggggcttcctcccgaagcaagggccctggacgcggtttcgttgatgacagtgcactccagcaaagggctggagttcgatgccatacacgtgactgaagtcgagaaaggctcatatggagatgaaaagccgtttgggtatgacagccgtatctcgcagcttctcccaccagaagtactcaatagcaccagcgaagagcacgcattcgaagaggcggtggaacgaaacaacctcctttatgtcgccctttcccgcggaagagactacgtacttctctatgaactggagactagagatcggccgctgcagctatggcgcgcccacaaactcgataagctcaaaatcaaggatggtcttccgaaccagtccgtagctgcacatccagtaccatttgcgaaggacgctcaaatcccaagtctttcgtacagcgagtttgaaacctacatcggctgcccgctgcaataccattatcgttacgagctaagtctcaccgcagagcaggaagtcgacacttcgatccgtgccagatgggcagtaatggatacgttgcaacagacattgagctccgaccagactcaatggtcagggctctttaacgactcatggagcacgtataacctgcctactgccgaggaggatcctggccttgtagccgatgcaacgctggcaatccaacgtggtctcaacctggtgggaagcatagagggttctgtagtcgataaccttgaagctgaggttggcggaatccgcatacgtctgccctggatgcttggagttaataccccatccggactggagcttcattggctgcgtgcccagctaggtatcgagcggacactaagtcatctccgcccgatgatgctaaccatgaacggtttgaagatttcgcgtgccaacgtttattcattaattaccgaccgttcggtgtcacaaaacccgtcagtcagtgctaccgccactactgcgtacaagatggctcgcagattcgcatgtggagacaggtcagcgagtaaagggttaatgtgtaagagatgtgcgtatctgagtatctgtgataacagaccatag

SEQ ID NO: 348943 - DNA, 1158 bp, Pseudomonas aeruginosa
gtgtccctacatgcgcgtgatataaagttgatacgaacctgcgcgaacgcgaagcgcatccgagcaaggctatctagcgtttctatgaaaaatcacaaccttacgacgtccgattgtctcaagggctgggcgtatttgctagccgagttggcagatgacatcaccacaaagaagacccgagcggggctccggtgtgaggtcagtctcccttctggactgaacgttgtaggaaccggcgaggactcgtccctcgcagtgcgcgaccttattgcccagattgttgaacagctacctgccccacctagtgcatgcgaacaacctcaggtgcactgtgtctcaattgaaaggcagaaagccaagctcaagccggagcaaatcatgcaacccaaggagcctcgtcgtatggatgcgacaacaaaagcccgcagggaaaccattggcgttaccaccaaggcttcgctcctcgcagcagtcaactcactagctgagcagcgtggcgtacccacagcagagctcactcgtgaattgctacagagcggcttcgatcgctttgaagatgaaagcgagtctgctaacccctctcgcctactgcgtacctacgagcaggaagcgagaagctttgatggctgcgaaaccaggcaatggatgataagggcagacagacgccttgttatgtctgtgagactgagagcgaaggagtatgagaaatcaacctctttcatcgcttcctgcttccttgctaacgctctgagacacgaagcgcctgcgtctatggtggcctctagcgtagcgaataatgctgccagccttcagaagacattagacgtcttgaagacggtacgaggtgttaagagcaagggcctggctgaggcgcttgacctggcaacacatcgacctctcgtaacccaaatactaaacgggtcagttactgcgccagctcgggtattagaacgcgttgctagctacttgagagtcccgcttgactctctgaagtcggccgtttcctatcgtttccagacgcagactgtagcgtctttcaatgccacagagaaaaaaccagagatgctcagtcaaccgctttcttgggaggctgcagttaaagatctgaagattccagagaagaaagaagagaagcgattgctagatatggcgagctag

SEQ ID NO: 348944 - DNA, 141 bp, Pseudomonas aeruginosa
atgctcgatgacgttgtgtccgagcacaaagcaggccccgcttcccatcgtatcgagccggcccagcgtctcactaagattgccggcgatcgttacctcaagctcgtcttcagtatctggacgcagcgcaccaaccattaa

SEQ ID NO: 348945 - DNA, 4176 bp, Pseudomonas aeruginosa
gtgctggccatcctagcgaccggtggtggcaagtccctgtgctaccaactgccagccctgaaccggttccaccgcaacggcagcctgaccatcatcatttctccacttcagtcgctgatgaaggaccaggtcgacggactgctggctcgaaacgtccaatgcgcagctacgctaaacggcctcctgacaatgcccgaacgcgccgatgttctggaaaaagtccagcttggcgacgtcgggatactgcttgtctccccagagcagttccgcaacaaggccttccggcgcgccatcgcccaacggcagatcggtgcctggattttcgatgaggctcactgcctttcgaagtggggtaacgacttccggcctgactatcaatacgtttcccgattcattaaagagttcaccgatgacggtccgcttgcggctattggttgcttcaccgcgactgcaaagcccgatgtgattgaagacatctgtcagcacttccgggagcagttgggcattgagttcaggtccttcttaggcacccatgaacgtaccaacctctcattcgaagtctttccgtgcacgcgcacggagaaatggcgccgcacccatcagttgctccaggacgaactgaatggccaggacggaggggcggttgtgttcgtttccagccgaaaaggtgccgaggagctctctgacttcctcatagggcagtcctggtcgtgcaagcacttccatgctggcttagaaccgcatgagaagaaggacatccaggacgagttcaaggccagcacccttcgcgtcatcgtcgccacaaacgccttcggtatgggggtggataaggccgacatacgcctagtcgtacacgcagacatcccgggctcgcttgagaactacctccaggaggctgggcgtgctggtcgcgatcaagggcaggcgcgatgtgtcttgctctacgacgcgcaagatatcgagacccagttcggtatgtgtgagggctcaaagctcaccttgcgcgacatccaacaaatcctgcacaagctccggaaggagtacaaacgtcgcaaaggcggaaagctcgtaatcactgctggcgaagtcctcatggatgagcaggttgataccagctttgaagcaggtgagcgtgacgcggaaaccaaagtggtgacagcggtggcttggctggagcgcggtcagttcctcaagcgcgaggaaaaccaaacgcagatcttcccagccagcctgaagctgaaaaaggaggacgcagataagcgactcgccactgctcaactcccaccccgacggctcgaggagttcaaagccatcctggactacctgtacggagccagtgccgatcagcgaatcgacaccgacgccctcatggcgctgaccagctccacttcagaggaagtgaccgctatcttgcggcagatggaagatctaggtctattggtcaacgactccaagctgaccctctacgttcgccatggcgtcgtaggggcctcaaatcagcgacttgtggcgactctcaagcttgaggctgcgttgattgaccaactgcaggaagtggcacctgatgcagagcaggggggggggcaggaccttcatctggcaccactcactgcggcactgaaaactgccactggcgatgcccagcttatccctcttcatgtcctgcgcttgctgcgaagcttggctcaggatcgtgacgatgacagtcagcaacgaagcagcttcgagatccgccagatcaatcaggactatctcaagcttcgtatccgaggcggccatacatggcgcggcattcaaaagctgggcgaaaagcggcgcgctttagccggtgtgatgctgaagttcatactcggaaagctagcacctggcgaacggagtaaagacctgctcgtcgataccacttttggcgagttggctactctcatcgatcaagacctggaactacgtgctcgcattcccgagtccgagcgtcgtcgtgctgtagagcatgtgctgctttatatgcacaagcaggaagtcctcacgctgaaccacggtatgacagtcatgcgccgggcgatgactgtagaaatcaaccctgagaagaagtcgagctatctcaaagacgactacctgaagctcgatgagcactaccgagagaagcgcattcaggtgcacgtgatgcgtgagtacgctgaggttgcctgtgaggaaatggcggccgccctgcgcttagtgatgcactacttcaacgatccccaagacgagttcattgagcgctacttcgctggtcgcgaagaggtcctaaaactcgccaccagcgaagaatcttggcgggcgatcgttgagaatctgagcgttgcacagcgcgtcatcgtcgaggacaacgaggatcagaatcgcctcgttcttgcagggcccggctctggaaagacccgggtgatcgtgcaccgtattgcctatctcctgcgggtacggcgggtaccagctcgatgcatcgtcgcgctcacgttcaaccggcacgcagcaaacgagatcaagcaacgtcttcttcgactagttggcgctgacgcctatggcgtgaacgtcatgacctatcaccgcatggccatgcgactcaccggcactcgcttcgagcgaggcgaaaccgtggaagaaggtcgcctttcactcgtactctcggacgcagtagagctcctcgaaggtaagcgccaggttgaaggtgaagacgacctgcgcgagcaattgctgcgcggctaccgctacattttggttgacgagtaccaagacattgacgatgtccagtaccggttgattagcgcattggccggccgcaaggcggaggaggagggtaggctttgcatccttgctgtaggtgacgatgaccagaatatctatgcctggcgcgacaccagcaatcggttcatcgagcagttccgcgaagactactcagcgtccagcagctacctcgtcgataactatcgttcgagccgcaacatcattgaagccgctaaccgggtgattgagcgcaatcctgagcgccttaagagccagcacccgatcaagattgatgttaaacggaccgagagtccgcgtggcggaatctgggaagagaaagatcccgaccggagaggacaggtccttctccttctcatcgctggcgacgaatccacgtacagcaatctccaagcgcaggctgcaacagaggagctgcagcgcttgatcaacatcgagtccggtgaatggcagggttgtgccgtacttgctcgcaatcaccagtacctctggccgattcaagcctggtgtgaacagcacggggtgccttactacctggctgcagataaagatggctcacttcctatcagcgctcagaggggctttgttgcggtaattgaacacctgcgtgcctcccgcgagtcgttgtcacctgcgcagtggtggcgccgattagatcaaacgtccttgcagcctgaatggcacaccttcatgagcctggcctttgctgagttgctggccgaactaggggattgcgagctggggagccaggtgattgtcgactggctatacgactatgctcgtgaactgcgacagcagcctgctcaaggtctctacctgggcaccgtgcactcagccaaaggcttggagttccggcatgtcgttctcctcgacggcggatggagcaatcgccctgacacgctcagcgatgagcgcaggctctactacgttggtatgacccgggctgagcaaaccctagccgtatgcgaattcgctgccggcaatcccttcagctcgcacctgagcagctcaacgacaagcaaagtcttccacggcgaaccgctgccggcgcttgaaaaacgctacctacagctctcgctcaaagacatcgacctcgatttcgccggacgccaaccagcggaagcatgcattcacagagcgctcgccaacctcaatcctggcgatcagctccagctcaaacccagcgatggccgctatctgattctcaacgacaacggtgaggttgtgagtcgtacagccaaatctttcctgcttccacttgaagtcgacacctgtctggtcaaagcagtgttagtgcgtcgttcagataacagcgacgaaccatatcgagcaagccacagagttgatcgatgggaaatagccttgccttgcattagcgggtcgccaaaagacagagaataa

SEQ ID NO: 348946 - DNA, 1275 bp, Pseudomonas aeruginosa
atggttaccctcgctactcctccgtccactctcgatggcatcaagcgcctggctaaggccataaagcgcgaatttggtatcactcatcacgaagccctcgaagaggccgcccgtaaggcaggcttccaaaacttccttcacgccaaacgtgcaatagctaaggcgccggcgcaaagctacatcgcctttgtgactgtgtactggaaagacctgggatctgaggctccctcctccggccgttacaccacggaagtacacctcaaacggccactttccgagctcctcgctgatggcctcaaggttggcggagcgtatctgagaaatttcaagcttgaggcgcccgatcacctcgaaatgcgcatggatgctggcagccagcacagtgcgatgcagtatctggatcaagccagttttactctgctattcataagcgcaactgggctggtgagggtttttcgaaagaggagcatcgatgccgtgaatggcctggaaaaaatacccgactccgatcacataaccggctgggaggatccggaaaccggcgattggctactgctcgatgagccctatatttcgcctgtgccggggtttaggcaggagtggttgcaagcgcacggcctgtaccaggtagcgccattatggtcgggactttactatccgggccttgccgtcccctacttgatttcacttaaccaggggttgctggcgaagatacaggcccaggtcgagggaattccggacagctcttatgccaggagtatgctgcaggaaatgccgtacggctctaagtttgttagcccggctcgcctcgcctcgggaaagccacatagatcgcgcacaatgccattcaccggcgtcaggaatggagcgatagcctacggtggggggcctggtgtgcgctctaagtggcgcccagcgtgggggatgtcgctggcaatgcacgctactattgggccaatactacataagctctgcaacagttctccgcgaactgccggcatatccgccaaggtatacgaaagattgaataaagtgcgatcgcgccttgaggactgggcctacatggagcatcccagcgaaatttcggcggaagtcggcaccaagctttactacggaccggccgttgaaggctataccactccgcaagacagtctcaaggctatagatactgtccgcggcctgctactgaaggggtatagagagtgcaaacctagggcccagatgctggccaagatcgagtctgctgctgaccttcagaaaaaaatatgcgagtag

SEQ ID NO: 348947 - DNA, 1269 bp, Pseudomonas aeruginosa
atggccattggtcaccctacaactctagatgtcttcggaacatctagagaactccctgcaaactatgtaatacgggatcatgttgactttaagtttatcgactcactaactaaggatcggcatgttgtaattcatggaagctccaagcagggtaagacttctcttcgaaagaagcaccttaatcaagaagactacaagacgattacatgtcagcggtcatggacgcttgtagatatccatgacgccattctcaaagaggcggggtatagcgtaacgctttcgaattcatccactgcaaatggctcaagaaaagttaatctgcaagtgggagccaatggcagcgagaacgaagagggtgactcttccagcgttgttgttcggcctcttgaaataaatatagagagcataaccgatgttattcgcgccctgcaaagcgtaggttttgataagtacgtagttattgaggagttccactatcttgatgagtcaactcaaatagagtttgcacaagctcttaaggcattccatgagctgagtaagatttgttttattgtagttggcgtctggctagagtctgacaagctgacttcgttaaacagagacctagacggaaggattacttcggtaaatgcggatagctggctggatgcggatattgattcgcttttcgaatccagtgagcgcctcttgaatatcaaattctcctctgactttaaaaacgatgccaaaaaatactgccgcggcaacgtctttcttgttcaacagctttgtttgaatgtatgtgaacgccaaggcatcactcgacagcaagatagtactattattgtcgcgcatgacttggatgtgtacggagaggtcaaagacatcctggagagccaaaccggacattacaataaattcttaatggatttttctgtaggctttggctcgaccgagtttgatttatataaatggattctctgcccgcttattacatttacaacgcacaaccttgaaaatggaattactgcacaagccttgcgacgattccttgagaagagacatccgtctggaagcatgataaagcacgggcgacttgttggtgcactcctcaaagtaatggacctgcagcaggagaaaaagatctctccgatcattgtcgagtacgaccaaacccgtatgcgattaaaaatagttgataagggttttttggtttggagagagtttcaagatgtcgacgagctactttccttggcggatctaagtgatgaatataagctatcgacgtaa

SEQ ID NO: 348948 - DNA, 678 bp, Pseudomonas aeruginosa
atgaaaatgatcagagcgatagcgctgttgctgtcctgctttgccatgcatgtcatggctgcggatgtgcaggagtgctggaagaccatccagttgaacgacatgaaaatcgcaatgcagatgggcaccacgacactggggacctaccaggtgtgcatgccgaaagatgcgccagagatcgtacgggtggtgacgcacaacggtcaggtcaagagcgtcggcaactacaacgtggcccactgcggtgctgatgggatttgccagaaagggactcagttcatcggcaatgcgcctgaaggcaactacatcatccaagccgagtggtacatcggacctgacagccatggcaaagcagtctcctatcgagatggaacgggtcctggttacggtggcaactattacgatccacccggtacgaagcccgagaccaatccggtatcaaccggtgcgatcaagccactgatcaatcccccggatatcagttgcatagctggcagctacggcactgaatatggctgcatgctgggggatcaactgatcgaggacgcggacctgccgaagtacctgccactggtggatgaggctgaagtgaagaaaatcggcggcagttgccagagcgtccccatgtgtttcacaaaggactatcgcctcctcggcctaaacaaacgcctgttctga

SEQ ID NO: 348949 - DNA, 570 bp, Pseudomonas aeruginosa
atgcaggacgcaacctcaaccctcgatacctcttggcactacgaacaaaacggcgagcgcaaaggcgccgtctcccagcaacagctcatcggcctcatccaacaaggccagctcacatatggttctcgcgtctggaaaaaaggcatggctgactggatgcagatcgagcaaaccgaactgcgccagcatctggaggacgtcgccccacccccgctaaccggcaacagcatcaacaacaagatcgtctggctgctggcgttcgctccgctgattggctacctactggaatcgtttgtggccgggctgtttaccggcagtgaagcgcagtgggaacgcgccatggctgccaaccgctactggtacgtcacgctggctctgaacatcgctctgtcggtgctcgattccaagcgcctcaaacaggctggtcacgacgtcagccgcttcaaaggctgggtgttcgtggtaccggtttatctctatcagcgcgccaagctgctgaaccagaacctcgcctacttcatcacctggatcgtctgcttcgtcattagcatcggcgcgcaccagggctag

SEQ ID NO: 348950 - DNA, 948 bp, Pseudomonas aeruginosa
atgcgatactggtgggtgaaccacaaaaagacggcgcgacaggagctgggcggtggctacctgtggtcgcccctgcatgaggccaatggtgcgcgaagtcagttctacgagaacatgaaagccgctgaacctggtgacgctgtgctttccttttcgagtggactcattcgccacgttgggcttgtcttagatttcgccagcccggccccgaagcccgacagttttggggcggtcggcgagtattgggacaacaacggttggctgctgccggttgaatggaagccattggccgaggcagtccgccctaaggaccgaatcgaggagttgggcccaatgttgcccacgaaatactcaccgattcatcctgtcacaggaaacggcaaccagaaggcctacctcgccgaaatagggcagccggtgtttgagctactaactggcctctccgatttcgcagatacgtcagcaccgatgatatttcgcacaagcgtttcagggctgactcaagtcgacgacgcgatagaagcccagatcaccgcagatccgggtctggactccacgacaaagcaacagcttatcctcgcgcgctatggccaaggtttgtttcggtctcgcgtatccgagattgagaaggcgtgccggctgacaaatgttgaaacccctcggttattgatcgccagccacataaagccgtggcgagtgtgcagcagtgctgccgaacggttagatggcgccaatggcctgctccttgctcctcatgttgatcgtctgttcgatcgaggtctgattggtttcagtgaccatggcgaagtcattgtctcgccacgcctcgaccgcctcgatctcaagcgtctagggttgcttgaggcatgcgcaaaaggctgtgcgcctttccacccgcgccaggccgtctatctagcctttcatcgagacaagattttattgccctga

SEQ ID NO: 348951 - DNA, 1404 bp, Pseudomonas aeruginosa
atgaaagctttcgacgacaccctctatcgcgttatggcccgtcatatgaatcgggcgataccaacacgaatctcaagtggtctatcaagcgatccagacgtctcgatcggtattgcaacgatcaagatcgtaaccgaggatcaaattcaggccatagccttcggctcgctcgatggagagccggaagtgatcgttcggctggacccgatcggccgtgatgtgaccgatctggtgccgttcgccaatttcatggaacaaacagccagccgcgcactggcggcggacggtgcactccgcgtctggattccacattccgtgacgttggaggcgctggacatcctcgggcaccggtactggcagaatcagaccgcacccgatgcggtcgttcgcatgggtaagatctgtcgcaccctcgcgcacgaggccacattccccgggcagcaggtagtagccgacgtctccactcttcttcaggaccatatcgtcactggccttgcgccgatcgaggaagggcaccttgacgccatgctcgcctggcttgatccggctgttcgggacccgctcaccgagtcccgaaagcgcattcgactacccgcatcaggcattcttcccaacacgcccgattatccctccgatgatcgcgtcgatcgcctccgcaaggaagccaagcgggcgacgggacaccggcgcgccattctcgaagcggatattgaagccacccttcgccgctgggttcttcgagagtggcggctcctggtcggcgcacggcaggcgtttcttggtcttggcctcccgtctgtgggattggacggcctagtgaaggactcgaccgctcggatgaacaatgcgctcgcgaatggtcattaccccgctcggcggccggacaagctggccgcgcttcttgcggaaatggaggccggcttggagaaggcggagttagcggcattagagagcgaccctgccctgcgtgaacaggctcaacgcgctggtggagtggtacgcggagttgtgagtgacgtccgtcaaccccgccgaaacttcaaaccttgcagcatcgacgtcgactctgaccaaggcgtcatacgctttcgcgttgacgacaaggtgagggttgttggcactaacgtaaccggtatcgtgcggtcgctgtcctcgatgccgaccggcggaacgaaggtctcgatcgagatcacgggcggctttcgccagacgggaatcctgagcgtcgactcgcagcttgaggtcttgcgtgagggctatggtttcgtcaaccaccgtgcgttcaaactggtcagtcagcaccggccgtgggtcttttttggtgagggggcacctacgatcgctgtgggcacgtcctcgggtcgctccgcactagcgattgctaaagaggtcaggcgtccatga

SEQ ID NO: 348952 - DNA, 1341 bp, Pseudomonas aeruginosa
atgactgtacagctccaggagtaccagcaaaacgctaaccacgtgctcgatgccgcgatcgaacgtgcactcttcggtaccgccccacttaccatcatcaagtcgccaccgggcgcagggaagactttccttgtcgagtgcgcctcggcggttgcggtaacagagtctgccatgcgtgtcattgtagtgacgccgggcgtgagccaactctacgacgtcgtcgatcggcttctggaatatcgcttgccccgccttgagcttgcgcatgccatgcatcgcacactaccgaacttgttggtcgaccggatcactgcgtcgagtggatgggtaccaggcttaaatgttgggccgggcgtgctcgtaaccaatgttcatctcctcgcagccaacctcgacaagctctaccctggcatgttcgacctgatgatcgtcgacgaggcttatcagctcgccgcaaaggatttcatgccagtagcggatctcgcggcgcgagtcatgatggtcggggaccccggccagctcgacccagtgatttcgatcgacaccagcaaccttgaggtcaatgcgcacaagatccattggccagcaccagcctacgtactagatcgcttccccgacactccggtctttgggctgccggtgacgcggcgcctgttacccgacacgtcggatttgattcaagcatccttctacccggacctgcctttccagtccgttgtcgatccgaacgatcggcggctgcgcttcgcagcatcaggcatggagtccgctgtcgatcaggctctcgacgcgatcgcgcgtggagcaagccttgtcgctgttaccgtcccgggcgttgctcctgcccatgaagaggcggatccagatgttgcggcggtcatggcgcatctagctgatcgactcctcgtccggcaagcagaatgggtggggcaacggcaccttaccgaggccgatattggctgcattgatccgcacgtcattgcgggcggtgcgatcagtgaccggctccggcagcgtggccttagcgatattcgtgtcgaaaccgtcgagcgctggcaaggcctgcagttgcctatttcaatcgttcgtcatccactgtcgcgcgccggccggccgaccgcttttgaccttgaggctggacgctggtgcgtatcgctgtcgcgtcatcagatcggctgcataattgtagggcgggaatcgattgccaacgtcatccgcgaatacgttcacggctgcgatacggtggccgcgggggccagggacgcgacatggtcgggatttagagcacatcggacaatatggaacactctagccgatcagggccgcatttttgccctctga

SEQ ID NO: 348953 - DNA, 1290 bp, Pseudomonas aeruginosa
atgaagttgtttgaggacgtgtcatccgcacactgccctgctcgcgaaattcaaagcttacaattcgactctctggcgtcaggcggcacgttcactagaccgatgcgcacgcaaactgttgcaactgactcagtcatatcgaagaagctggttgtcgcagggctgttcgccggcgttggagggctagaagagggtttccgccaggccggtcatgagagcacgatgctctgcgaattcgacccgctagcgcgctatgtcctgaggaagcactttccagatgcggaaattacgaccgacgtcaccgcgctgaaagggctgcccgactgtgacgtactgacggcgggtttcccctgccaagatttaagccaggtggggcgtcgaagaggcatatccggcccgaactctggattggttgagtcggtgttctatctgttgaggcgacagaagaagccaccgcgctgggttgtgcttgaaaacgtaccgttcatgttgagcctggatcgaggtcacgcgatccgctctgttaccggtgcactagaaaagatgggctattcgtgggcatatagaacgatcgatgcgcgcgcatttggattgccccagcgccgtcgccgcgtgattatcatcgcatcgaaaacgcacgaccctcggcctgtccttttgggcgtcgatgcaacgccccccccccctctaccacgcggctcacatgcctgcggcttttactggacggaaggaaatacagggctcggatgggccgtagactcggtaccgccgctgaagggcggctcgacactgcatataccctcgccgccagctatctggttcccgcggcgccggctgatagccactcctgcaattgaggatgccgaacgactccaaggctttgcatccggctggacagacatatcagaagaggatccgcgtggggcgcgcaaacggtggaaaatggtcggaaacgcagtaagtgtgcccatggccagatggattgccgaacgactgactctccctaccactgagttcgaaaccggcgacaccgaagacctccctgttgaaggaagttggcccagctctgcatggggggtgggggggaaacgcagtcgatcgcgtgtttccgagtggccggttgcagtaccgaacgagcatctatccgcgtttctcaagcacaaggttacgcccttgtcgaataaggcaacttccggctttctctcaaggctcatcaaaagcaccctgcgttacgaggaagcgttccgtctcgatctcgcacatcatgccgagaatgtcgaaagggactga

SEQ ID NO: 348954 - DNA, 507 bp, Pseudomonas aeruginosa; identical to SEQ ID NO: 330712

SEQ ID NO: 348955 - DNA, 522 bp, Pseudomonas aeruginosa
gtgaacaacctcatttccctcaagtaccagggtgagccggttcgttttaccccggacggctggttgcacgcgacgaagatcgcggagcgcttcggcaagcggatcgaccactggctcgataacgcggagacgctggagtacatccgggctcttgatgaagtgttgagcggtgctgagtcacagattctagatacccggaattccgggtatgtaaaaacgagccgcgcgcgcgttgaccgtggcggcggtacctggcttcacccacggctcgcggtggcattcgcccgctggctggatgcgaagttctcggtctggtgcgacctacgcatcgaagagcttttgcatggtaaccagtccgcaatggaccggttcaaccgggcctgtaaggcatacgaagaaggtgaagcggcagccagcgatcacggtcgcggcctgtccctttggaagcaagagaagcctcggctgcttggcgctgtcgagcgcgttcggtcgcttctgcaaatgaccctgagcctggagtag

SEQ ID NO: 348956 - DNA, 672 bp, Pseudomonas aeruginosa
ttgcggcggaagcggctggaggaggggatatccgggaagaccctgaacaacgaactgggatacatccgcgcggtgttcaacgagctgaaggacctgggccagatcgactacgacaacccgctggccggggtgaagctgctcaagctgcaagagcgtgaactgtcgtggctgacgaccgagcagatcggcgaacttctcgactccatccgcagccgttgcgacaacccacataccgagctggtaacactgctctgtctggctaccggtgctagatggtctgaggctgagaaacttcccgagcaacggctccagggcaacgtcgtgacctatgccggaaccaaatcaggcaaggtccgccacgtaccaatcccaacagagctggctgaccgggtgagggtgcattggcggatgcatgggccgttcacgtcctgcatcacatccttccgccgcgccctggagcggaccacgattcagctgccgcaaggtcaggctagccatgctctacggcatacctttgccagtcacttcatgatgaatggaggcaacatcctcacgctccaaaaaatccttgggcattcgacgctgacgatgaccatgcgatacgcacatctgtcgcctgatcatctacaggatgcattacggtttggtccggatatcatgagtcagctgtag

SEQ ID NO: 348957 - DNA, 444 bp, Pseudomonas aeruginosa
atgactgatctgcgcccagtgctgttcacggtccccggcgagccggtggggaaggggagaccgcgtatcggtcgcgtcggcgcccacgccaggctgttcacgccggcgaagaccgtggcctacgaaggcttggtggccatggccgcgcaggaggcaatggcggggcgcccgctgatcgccggccctgtgctcatcgaactgaagatttatcaccaggtcccagcgtcctggtcgaaacgcaggcgtgccctggctctggccggggagatcgctgccatgcgcaaaccggatgtggacaactgcctcaaggccatctgcgatgcctgtaacggcgttgtatggcgtgacgatgttcaggccactgatggtgtattccgtcggcgctggagcgaaacgccaggcgtgcacgtgaagatcgtccctctcctcgagggcgagcagtga

SEQ ID NO: 348958 - DNA, 1107 bp, Pseudomonas aeruginosa
atgtcctctacccaacaccaactgatcgagcagtgcgccacccgcctgcgcggcatcgtcgaagccctggacaacatccaccacaccagcccgcagcgctggttgacggacctcgacgacgttcactcctcagccgagagcctgctggccatgatcaaggaccaggcgccgccgtccgaagaccagttgatcgccgcaggcctcagctacccgctcgccaaggaagatgccgtgaagctctggtacgccggcttcaggtccgaagtggtcactgtgctcgaggcctgggaggctatcggccatgacaccggaataaaccctgacaaggaagagttgctggagtctctacgcaacatggcggcgatttgcaatgcgcacggcaatgacatgcctgcccagtcggcaatcgaccagcgccaggtcatcgcagacgccatcaccggcgcgctagcgttcggcgcccaggccagccagccgccggcggaggatcactggcttcgtccgttctacgacatcggccgcgccgagggacaacgcacccaggaactggcaatgctggttcgcatgctggccagttccctgaagcggcatgccccggaaagcaacctggtggcgcgcgccaccaactacctggccgccaagggcttggccggcacaccgcttcgtgacccgccggcaccggtagagcaggcaggcagagatgttgagccagcaccctgccccttctgcggtggcgaggtagaccccacgggctggcttcgcggcgatggtacacgcggtccagagtgcaactactgcggcgctacagcgcggagcatggaagcctggcagacccgtgccgccctgtcgcacgcgccgaccagttcggcatccccgtcgtgcaaatggaccgaaagcagcggcatctgggaaacaggttgcggccagacctggagcttcattgaggacggaccagcagagaacggcgcgctgttctgtcaccactgtggcggacgcctggtcctcatcaaaagcgacgaccaggaagatgacggtgagccgtgcccggaatgcatggaacacggctgcaacggcgaatgcgctggccacggcgcgatgggtgactga

SEQ ID NO: 348959 - DNA, 663 bp, Pseudomonas aeruginosa; identical to SEQ ID NO: 318788

SEQ ID NO: 348960 - DNA, 1380 bp, Pseudomonas aeruginosa
ttgcagcacccggtcgagggcgcgcacggcggtttccagggcggcccgcgagtcggcctcgaccaccgcctggaccagccggtcgatggccgggtccttcaggccgatgcggttgtagccgccgggatcggcgtagctggaggaatgccagaagctgtactgctcgttgcccggcgaattggactgggagaagctcgaaacgatcatgtcgtagtcccgcgcacgtatgcgctcgatgtattgcgaagcgtccacctggcgcaggcgcatatcgatgccgatccgcgccaggttgcgctggaacggcagcagcgcgcgctccaggctcttgccctggagcaggaggtcgaagcgcagcggccgtccggcggtatccagcaggcgcccgtcgacggcatgccagccggcctcgccgagcaggcggtaggcctgcaccaggcgctcgtggatatcgccgctgccgtcgttcaccggcggagcgtaggcctggccgaagacctcctcggggatctgcccgcgcagcggctccagcaaggccagttcgtcggcgccgggcaggccgcgagcggccatctccgagttgtcgaaatagctgcgcaggcgcttgtagcgaccgccgaagagctgccggttggtccattcgaagtcgaacaacaggctcagcgcctggcgtacccggcggtcctcgaacagcggccggcgcaggttgaacaccaggccctggaggctggccgggtacgggtagggaaagctctcctggcgcaaccggccatcgcgcagggccggcgagtcgtagccgctgctccaggccttgacgctggtctcgacattgatgtcggcctgcccggccttgaacgcctgcaaggccacgccgctgtcgcggtagtagtcgaaacggatccgctcgaagttgtacaggccacgcccgaccggcaggtcgcgagcccaccagtcggggttgcgccggtagctcaccgaacgccccgcctcggccttctccagccggtaaggtccgctgcccagcggcggctgcatgctgctgcggttgaagtcgcgtccctgccaccaatgcctgggcagcacgtagagctgggccagcaccagcggcagctcgcggttgccggcatgacggaaatcgaagcggatgcgcaggcgatcctccaccaccggctcgcggacctccttgtagtaggcgcgccagaacgggctgccctgctcgaccaggctatcgaaggaaaacttcacgtcctcggcggtgaccgccacgccgtcgctgaagcgcgcccgcggatcgatatggaaacgcacccagctgttgtccggggctttctcgatgtagcgcgccaggtagccgtattcggtgaacggctcgtccagtga

SEQ ID NO: 348961 - DNA, 765 bp, Pseudomonas aeruginosa; identical to SEQ ID NO: 6031

SEQ ID NO: 348962 - DNA, 765 bp, Pseudomonas aeruginosa; identical to SEQ ID NO: 6031

SEQ ID NO: 348963 - DNA, 288 bp, Pseudomonas aeruginosa; identical to SEQ ID NO: 347722

SEQ ID NO: 348964 - DNA, 669 bp, Pseudomonas aeruginosa
gtgctgcccggttccgcagtgccgctgaggctgctgccattgctcaggttgacggtcggcgtggccggcgcgatggcgtccacggtagtgctgccctggccgccggtattgccggccgggtcggtagcggtggcgttgaccacggttccatccgccagcggcgtggacggggtgaagctccagttgccgctgccgtcggcggtgacctgcccgatcggattgccgctgccatcggtcagggtcacggtggcgcccggttcggcggtgccgctgatctccgcgccgttgctcggattgaccaccggcgcggccggcgccaccgagtccacggtggtgctggccggagcgctggtattgccggtcgggtcgctggccgtggcgttgaccacggtgccgttagccagcggcgtgcccggcgtgaagctccagttgccgctgccgtcggcggtgacctggccaatcgggttgccgttgccgtcggtcagggtcacggtagcgcccggctcggcggtgccgctgagcgtagtgccgttgctcgggttgagcaccggagccgccggggcctgcgagtccacggtgacgctggcgcccgggctgctattgccggcggcgtcctgggccaccacgttgaccacggtgccgttggcgatcggcgtggacggggtgtag

SEQ ID NO: 348965 - DNA, 987 bp, Pseudomonas aeruginosa
atgcgtgctttcatcttcctggccgccttgttgtgcagcctctcctcctttgcggcggcgcgttgcgacgcacgcgtacctaccgagacggtcgaactgggcgacgtgcgcctggcctaccagagcatcggccgcgacagcgatccggccctgctgctggtgatgggcctgggcgggcaactgatccactggccggacgaggtggtcagcgccctgtgcgagcaaggcttccgggtgatccgctacgacaaccgcgacgtcggcctgtcggcctggaacgtgccggtgcccagctcgcggctgacctacgaagtggtgcgttatcgcctcggcctgccggtcagcgcgccctataccctcaccgacatggccggcgatgccctgcatctgctcgatgcgctggatatcccccaggcccatgtgctcggcgccagcatgggcgggatgatcgcccagcacatcgccgacatggcgccgcagcgcctgctcagcctgaccctggtgatgaccagctccggcgccgaaggcctgccggcgcccagcgagtcgctgctgcgcctgctggcgcggcgcgaggcggccagccgcaagcaggcggtcgagcagcaggccgacctgctggcggcgctgggcagcccggaagtgcgcgacgatcgccagcaacttctgttgcaggccgcacgttcctacgaccgcgcgttcaacccggaaggcgtgcagcggcaattgctggcgatcctcgccgaacccagccgggtgccgctgctgaaccgtctgcaggtgccgaccctggtgatccatggcaccgccgatccgctgctgccggtgatgcacggcgtgcacgtggcggcgcatatccgtggctcggagctgaagctgatccccggtctcgcccatcgcttccaggaagccttcaaggagccgttgctggcggcggtggtgccttacctgaaggcccatcggcaggccagcgtcgtccagctctga

SEQ ID NO: 348966 - DNA, 558 bp, Pseudomonas aeruginosa
atggatgtatctttgtcttgggaaacctgcaagggttttttggagtgcacgaattttgtgctaggtaccgatgtctttcggaatgtctctttcttgttcggcgtgctagtagccatcgtgtcggtgctgtctgcaaaggcgattgcccgtaagaagcaggctgctgacttgctcttcaatagccggggggatgaggagctacagaaggggctgcgtgcgctggctaaaatgcatgatgatggaaataccaacatgcgagcctttgctgctaaaagtcgagtggacgaagatattccgaagatgattcggtacgtactcaatcactatgagtacgttgcggtgggagtgcagtctaaaatttacgatgagggtatgttgcgctccgcaagttttaatacagttattaatctttataagcactcaaagccttttatcgaggcggtgcgggataataaccagcgccctaccatttatcaggagttccagtggcttgccaaacggtgggaggaaaagggccttccagtcaaaaagcgaccgccagtctggaaattttggtga

SEQ ID NO: 348967 - DNA, 1269 bp, Pseudomonas aeruginosa
atggctgagcgtgccatcgccctgatcgactgcaattcgttctatgccagctgcgagcgggtgttccggcccgatctactgcgcacccccatcgtcgtcctgtcgaacaatgacggttgcgtgatcgcccgcagcgcggacgcgaagcctcacatcgctatgggcgagccgtacttcaagatccgccacaagctggaacgcttgggcatcctggcgttctccagcaactatgcgctctacggcgacatgagcgcccgggtgatgacaatactcgaggagatggcgccggccgtcgaggtgtacagcatcgacgaatgtttcgccgacctcaccggcgtgcccggcgacctggtgcgtgtcggccgagagatgcgcgcccgggtgctacggtgcaccgggattcctgtgggcgtcggcatcggcacttccaaaaccttggcgaagctggccaaccacggcgcgaagaaatggcaggcgcagaccggcggcgtcctcgatgtccgtgatccggcgcgccgggaccggttgcttagggcctgcaaagtcagcgacgtgtggggtatcggccgcaggatgactgagcacctcaatgcccaaggcatcaagaccgcctgggatcttgcccaggctgacgcctggacgctgcgcaagcagttcaacgtggttatcgagaagacggcgcgagagctacgtggcatcgcctgcctggagcttgaggaggccgcaccgcccaagcaggagatctgctgtagcaggatgttcggcaagcggctgcacaaacttccgccgatccgtgaagcggtggccacctatgcggccagggcctgcgagaagctgagagcgcagggctcctactgcaagcgcgtccaggtcagcatccggacggggatgttcaacccggatgaacccaagttcgcgaagggcgttggcgtggagctgccataccctactgatgacactaggttgataacgaaggctgccatcgacggcctggatctggtattccgcgaaggcttcgccttcagcaaagcagaggtgctgctgctcgatttacggcagccaggcgaattcaccggtgacctgttcgcgccggtgcagccggagcgtgccacgaaggcgatggccgtcatggatgcgatcaatgcgaggtggggcaggggaacggttcggccgggtggggtacctgccgagccagactgggggatgcggcgggaactgatgagtcgaagttacacaacaaatttgaggcacctttggagtgtttcgtga

SEQ ID NO: 348968 - DNA, 432 bp, Pseudomonas aeruginosa
atgctctctgacgttgttgcgcgcctgctggcgggcagtcgcctgcttcccatgtttgcctttcgtgtgccggcgggctttccgtcacccgctcaggatcacctggagcgggaaatctccctcgacgagattctgcagattcgtgcacctcacacgtacctggtgcgctcgggcggcgacagcatgatccgcgccggcatacatgatggagacctgctggtggtggatcgttccagcgaagctgtgcccggggacatcatcattgcggcggtgaacggcgagccgacggtcaaacggctggcgagggaaggtggccaggtggtgctgcgcgccgaaaaccccaagtaccagccgcggtacatcctcgagggcgatgagctgctggtgtggggcgtggtgcgatacagcatccggtgccacgatcatggctga

SEQ ID NO: 348969 - DNA, 684 bp, Pseudomonas aeruginosa
atgtgtggaagagtcgcgcagtacgacagctgggcggacctggtggcgatcatgcgcctacccggaccggacatgctgaaggagccgatcgagccgcgctacaacgtggcaccgaccacccagacactgcttatgatcaacgatgaggggacgctcgtcggcgagcatgtgaggtggggatggcggccgcattgggccaaggacaagccggcgccgattaacgccagggtcgagaaagtggcgcacgggccgttctttcgcgcaatctggccgcatcgggcaatctgcccggtgagtggctggtacgagtgggtggccgagggcgggccgcggaaacagccgttccatatccaacaccgggacgggagtccgatcctatgcgcggccatcggccagttccccgggctcgatggcgcgcaggacgagcgacatggtttcgtgatcattaccgcggacgccgagggcggcatggtcgatattcacgaccggcgtcccgtcgtgctgtcgcccgactttgcccgcgaatggctagatccggcgacaccgccagagcgtgcggagcaaatcgtattgctgcatggcgagccgagcgaggcgttcacttggtacgcggtcgacgcagcagttgggaacgtccgaaaccagggaccgcagttgatagcgcctcagcgctccgcttcgtaa

SEQ ID NO: 348970 - DNA, 2022 bp, Pseudomonas aeruginosa
gtgaagaccgtactctatcccgctatcgcgctgatgaaccggctcagcttcggcatgaagttcggcctgatcagcgtgctgttcttcctgccgctgctgatcaccagcttctatctggtgcgcgatgcctatcgccagttcagcgacacccggatcgaactgcagagcttgacgctgctgggtagcggacttcagatccggcgtggcctggagtccctcaacgatctgttgcagatcaatgcggtcatcggccagtccggcaaggccggcgatctggaagcgcgcatcgcggacgtccagaagggactgcgcgggcggctcgaggcgctggcgccgctcagcgaggatggtgcggcggtagccgaattcgaggcccagcgcgaccggttgctcaacggcttgcaggccgtggaggccgaagggtccctgcagggcaagggcgcacgggcggagaagctgctcggtagcgcacaggtattcatcaagttgctcatcgcccaggccgggctcagccaggacagccagcgccaggtgcgccagctcagcgagctggtcggctcgataacgccggaggtgacggcggccatcagcaaggggcgcgccatcggcgcctactccctgggccagggtttcctcaattcgtcctccagcgcgcggctcgacgaactgctgctggagttcgagaaactgcatggcgagtacggcctgaagctgcaggagtccctggccggcagcccaccggcgctggaggaggccgcccaggccagtcgcgagaccctgaagagcctggggcagttgttcgaggaccgggtgatcgtggccgagacgctggataccccgtggacgcagttctacgatcaggtcagcgcggcgatggacaagacctaccagctcgacgacgccgttctcggctatctcgatacccagttgcaaaagcgcctgcaacaggtgcgcacgcagatgctgttgctagtcgccgcgctggccgtggttttcgccgcgatcctatacctctacggcggtttctacgtctccacccgcgccaccctgaaggatctcgggcgaatgatggagcgcgtcgccggcggcgacatgacggtcagcttccaggcccgcagccgtgacgaactgggcgagctgggacaatcgttcaacgaatcggtggcgaagatccacgacctgatcgagcgggtcagccagaccgtcggcgaggtcgagcggcagaccctgcgcgtcgagtcggtgtcggccgaaagcaaccaggcggtagccgggcaacgcagccagatcgagcaggtggccacggcgatgaaccagatggccgctaccgcccaggaagtggcacgcagcgcggcgatggcggtgagcagcgcgaacagcgtgaaccaggaaaccctcagtgggcgcagcctggtcgagtcgcaggtgggtagcatccagcgcctggccggcgagatcgaccagtcggtggcggcgatcaatcgcctggccagtgacagcgcctcgatcagccaggtgctggatgtgatcaagggcatcgccgaacagaccaacctgctggcgctcaatgcggcgatcgaggccgctcgtgccggggagcaggggcgcggtttcgcggtggtggccgacgaggtgcgcacgctggccaagcgcacccagcaatccaccgccgagatcgaacagatgatcctgcgcctgcagggcggcgtcgatgcggcggtgaaggcgatgggcagcagccaccataccgccgatggcacggtcaacgagtcggcgcaggtgcagcaggcactggagaatatcctcggcgcggtgggcatgatcgtcgaccagaaccagcagatcgccgccgccgccgagcaacagaccgccgtggcccacgatatcgaccagaacatcgtcgagatcaaccaggccggcgagcgcaccgcggaaggcgccagccagaccgaacgggccagccgcgaactgggcgcccaggtgacccagctgaaacgcctgatcggtgcgttccgggtgtag

SEQ ID NO: 348971 - DNA, 1314 bp, Pseudomonas aeruginosa
atgccgacacttgataggctgtcaaaccaagcaatcgaagccatccccgtgcccgccaagggccaagagttctattggcacggcgacccgaagggcttcgcaatccgtgtcaccgccaacggcgcaaagagcttcatcgtgcaggggcgtgtcaatggcaagacctgccgttacaccatcggcccttgcgaccgcttgcactacaaggaggctcagaagcgcgcccgcgaccgcctgagcgagatgtacgacggggtgaatccacaggttgagcgcaagcgccgtcaggcgcaggaactgactctgcggcaggtgatgcaggactacattgaaaacaagcgcaccaagcacgggccgctccgccccagcagcaagtccgatatagagaagtgcgtcacgaagcaattcggcgactgggccgacaaggctgtggccaacatcacgcgcgaggcatgcgtgaagcgcttccgcgaactgtcagccaccgcccctatcaccgcgaaccaggccttccgtaatctcagggcgcttctgaattgggcgcgtgagacgaacgtggcaccggacgggacttatccaatcctgcccatcaatcctgtggtgcaggcattcaagagcgtgcaatggaacaaggagcaggcgcgcgaggaattcataccgctgccgaaggtgggcagcgtttggaacatgctgacggagcgtgccgacaccgagcgttaccacagggacgacaacacggcggctcaccttgtcatgttcctggttttgagcggggccagaataggtgaagggtcggcgctgcgctgggagcatgtacgccttgacgatgaagtgcccagcttcacgttcgaggaaacgaagaatcacaacgtggtgacaattccaatcagcacgcagcttcacgccctgctcaaggctcgtcttgacgcgcgccggaagggtgaagaatacgtgttcccgtcacgcgctggcacgaaggttccccacatgcaggacgcacgcggcactatgcagcgggtcagcaaaatagcgggcatgcaccttcacaatcacgacctcaggcgtaccttcatcgccatcggcctcgaatgtggggtggagctgtggaagtgcgagattttgacaaatcacttgcccaacaccgtcacgctcaagcactacacgcagacgcgcgacctgcgctatctgcgccccgaggcgcaacgcatcgctgactggataaccgagcaggcgcgcatcgcaaccttgaacgagcgttcagtttgtggaaatgcagaagcgaatgaggtagagtcagagcaccagatcgcctga

SEQ ID NO: 348972 - DNA, 318 bp, Pseudomonas aeruginosa
atgaagatcgacattctcgacacgctctgccttgcccaagtcgaagcggccctaatgaatacaaacgacgaagtgatgcaggacatcaacggcttcgtgtcctttgactatgtgatgcgactggtcgaatcacatctccgcgctgaaatggaatcatcacttctaatgtcgttggatgaagtgaagaagaggcgcgcatcccttgccgggcagtgcgcccctgctggcttcaatcccgaaactgcaactcctccatgggcgcagccaaaggaacccaaaaagcagacgcgcaaattatcaaacaatgcgcgcatttag

SEQ ID NO: 348973 - DNA, 216 bp, Pseudomonas aeruginosa
atgaccgacttcagcaccctgaagcctaccgaccgccttccgcgccgcgaggctgccgaatacctcggcaacacctacaacactctgaccgtctgggccagccagaagaaaggcccgcccttctacaagaccgggaagaagtgcctctacaaggtcgccgacctcgacgcgttcatggaatcgcgccgcgtttcgttcgagccagttccactgtaa

SEQ ID NO: 348974 - DNA, 1566 bp, Pseudomonas aeruginosa
atggacaaacacactgtaggacagccgtccccggtcatacaagatgaaatgccgggcgattacatttccccggaatggcttgatttcaagatcaccttcatcaatccgccagacgtttcggcggtcatacagcaggctgagaacaagtggctacgcgcacaggctgcgcagccgctacagcacggccagcacgcgggccaagggggtagcactggcgtggtgccgatcgcggccccagccgccgcgcagtcgcccacgcttgcatggcctcccggtcgcgctggcaggcttgcccagtttattcacgacagcagctattcgcctgtccgtgaggtggcgattactgccacgctggggctgctggctggggtctgcggacgtgcttaccgtacccacaccggcaaggacttggcactctacatgatcctcgtggcgcgtagcggcatcggcaaagacggcattcacgagggtattccaaagctgatcgaactggcggcggtgccgacagcgaggcgcttcgtgcggagtcaggactatgtgagcggtgaggcactgcacaaggagcttctgcaagaccccggattcctcaacctgcaaggggagttcgggcggaagctcaagcgcatgtcgaacccgacggacacacccatgcagcagttccgcacggtgatgacgaacgcctatggcaagcgccaccttgaggggaagacctacagcaacgctgacaagaacatgatcggcgtggagtggcccgcgctttccttcctcggcgagacgacccccggcaccttctttgagtgcctgaccccggacatgatggaagacgggtttatgtctcgcttcctcatcgtctcctacgacggcgaacgccccttaccgaacaaggagcctccgcccgagttactgcccgaggacttgacgcaatgggcagacctcgtgcggcaggcgatcaggtatcagacccccatcgacacgccgcccccgtgcgtcgtggaggtgtcggcggacgcatacgagaaactagagcggtttgaactgcattgcatcgacagcgtgaatgcgaccgacgacgaagcggagcggcaggtctggaaccgcgcgcacctcaaggcgatgaaggtggcctgcctgctcgccgttgccgatcactatctgtacccacaaattcagatggagcatgcagcgtgggcgctggctctcgtcaggcaggacatagcggtattccagtcacgaaagcggaacggcgatattggcaccgacgacagcgcacgcgagcgcaagctggtggcgttcatgagggactatctgctcaaggctcccccggcaagctacaagatcccagatgcgatgcagcgtgccaatatcgtgccgcgtgcctacctacagattcgagcctccacgctgccagccttcactaaccacaaagccgggaagaacagcgcccttgacctgaccctgcgcagcctgcaagacgacggcgtaatcgaagagatgaagaagccggtattggtcgagtcctacggctttcatggcaaggcctaccgcatccttcggctaccgggctga

SEQ ID NO: 348975 - DNA, 183 bp, Pseudomonas aeruginosa
atgaagaacctgcacaccgacccgcgcgagaacgcgcccgtcaagcacacggtaacgcccgacgacctgcaacagattcagcagcgccgcatcgaggcgcatgcagcccgcgagactagcgacgcgctgaacctgctccgcgccttcaagctgggcgaggcgctgcgcgaggcacgggagtaa

SEQ ID NO: 348976 - DNA, 606 bp, Pseudomonas aeruginosa
atggacacatcctacgcacatctcatcgagcaagaacaagcgaagatcgctctcctaaaggcgaagatcgtcgaatgcgagcgccgtatcgaggtgcttaagtcgttcctgaatgctgacgagcttgatactttgctgaccaagagtctttcgcctgattctcaaaagaaaattgaggtcagcgcggcggtttctgtggagcaaaagggccaggccgtagtagaaacgcaacctgtctcgggcgaagaaagctacgacgatccgaagcgacgcctctctgaagatgttcaaagcatccttcggtttgtcgggttggaagggaagtcgttggatgcgttggaggcatactgcgccgctcaatcgtatagccacaacaggggaagccttcgctccctgatgagcaactacaagatcaagcacggttttatcgatagcccgaagctgggattcttcaagctgacggagcgcgcgttggctttccttgacgcgcactatccagtagaagtcccacaaagtgaaacgccctctgttggcgcagagggcgtttctggtacttcaatccaagccgctgtggaaggcggacccgaatcagacggattgatctga

SEQ ID NO: 348977 - DNA, 129 bp, Pseudomonas aeruginosa
atgcgctacgtcgcctattctcggtccaaggcagtccatgtccgcccttacgtgcgtttccggttcggcaagctggagcacgtgtgcgaacactggcggtcgcatccgggccaacttgcgttgttttga

SEQ ID NO: 348978 - DNA, 492 bp, Pseudomonas aeruginosa
atggaagcgaagacctacgcaagcgccaagggtgccaaagccgtagcgaagaaggcgggctttgacccggaactggtgcagatcaacgaagtgcagacggacgaaggcacgcgctacacctacaccgaggacacgagcgaaggcgaagcactcgaagcgatggagcaggagcgcgacgaggcgcagaaccctgacgcgcccgagtaccaagcagacgcaccggctgacgctgtggtgaccacaggcaagccgaagaaggagccgaagcccaagattgtccgcgtcgagcagaacggggtgaagcgtcctgcaccgggcggactgtgcgccgccgtgtgggagtggctggacgagaacgggaactgcatgcccaaggacttgaagccggtcgcggaggcgaaggggtggaacctcaacaatgcgcagatcgagctgtaccagtggcggaagttcagcggtattgctggccgacaagaaaaagcgcccaagtaa

SEQ ID NO: 348979 - DNA, 204 bp, Pseudomonas aeruginosa
atggctgaactggacagattcatgcgggaagccgaggtgctggaagccaccagcctagcgcgctcgacactctggcgggaggtgaaggccaagcgcttccccagtccggtacagatcacgcccgggcgagtaggctggaggcaatccgagatcaaccgctggctggaaaacccgatgggatggacgccaacaagggccgcgtga

SEQ ID NO: 348980 - DNA, 204 bp, Pseudomonas aeruginosa
ttgtctgaccaggccaaccgccagcacatgctggcatgcgaggcccggttctggatccggcgtggcatcaccacgccggagaaagtcgccgagctgagagaaaccctcaagcggcggggggaaagcaccgtcgagcagttgatagcggaaatgcgccgacagtggcagacgcggacagagtggctaggtggtgaagatggctga

SEQ ID NO: 348981 - DNA, 855 bp, Pseudomonas aeruginosa
atgactatcaccgcacccgttattcgctaccacggcggtaagtttcggctggccccgtgggtcattgagcatttcccgccccaccaggtgtacatcgaaccgttcggcggcgcggccggcgtgctgatgcagaagccccgtagccatggcgaggtctataacgacctcgacggcgatatcgtcaacctgttccgtgtgctgcagagcgccgcccagcgcgaagccctggtcgaactgctggtactcacaccctatgctcgcgacgagttcgagcgggcctggatcttcaccgatgaaccggtagagcgagcacgccgcacagtgatccgcgcgcagatgggcttcggctcggcaggagccagcaagggcaccactgggttccgcatcgactgctaccgacagtacggcaccgcccagcaactgtgggcccgctatccggatcagctcagcgcgatcggtaagcgcctcgccggcgtgctgatcgagaaccggccggcgatcgacatcatgctcgcccatgactcggcccaggccctgcactacgtcgacccgccgtacatgcacgacacccgtgtgcgcggcgcacagaagggccgctactaccggcacgaactggacgacgaccaacatgcagagctgctgtccatcctcaaccaactgacgggcatggtcgtactcagcggctacccgagcgagctgtaccaggcacaccttgagggctggacgatgaacagcacatcggctcgcatcagcgctggccgaggcagcgatacccgcacagagtgcctatggatcaaccccgcctgcatggcggcgttgtcgcggcgtggcctgccgctggaggtgacagcgtga

SEQ ID NO: 348982 - DNA, 324 bp, Pseudomonas aeruginosa
atgttcaccgtgtacacgagcaatagcggtgccaagcaggaaattacggactttgttactccgatctgcaacgaaaaggagatggagctagcggatgtgctggcctcgctgggctaccgctataaccaatccttcggcaatgattcggccagcatcgaggtttataccggtgaggatgaggccgattacgccgccctggtaattgtcggagtcggtgctggactacaatggtacgccatgccgaagttccacgatctgctggactttctgagagagtacgcagccaccatcaaggcgctggctgacctcgccgactatgtataa

SEQ ID NO: 348983 - DNA, 822 bp, Pseudomonas aeruginosa
atgagcaacgccattcgccaagtcatcagcatcgccaacagcgacctgaccatcatcgagcaccagggcaagcgcgttgtcactctggccatggtggatcaagtgcaccaacgtccagttggaacagcaaagcgaaactttcatgagaaccgcagccggtttgaggaggggaaacattatttcttggtaccgcgggcctgtgcggacgaatttcgtactttaggagtagatatccccaatcgtgggctgacggtgctcaccgagcgcggctacctgctgctggtgaaatccttcaccgacgaactgtcctggcaggtgcaggacatgctggtagacggctacttcgagggccagcgtcttgccgcaccgcctgtcacccagcgaattgccatgtctcgccaccggctcgccttggccaaggaactgtaccgcacccgcgatccagcgctacggcagaccatccaccagcagttggatgaggtttcccgtgccatgggactgcccacaccggaactggatagcctgggtcgcgccaccccagccgcaccagatgttcttcaagagttttgggaggcactggcatcctttgagcgacaaggcgttgcctataaccactcgccccccaactcaggaaacctgagtttcaacgtcaagcacttgcgggatctcttccagcagcacggcatcaaaatcaccgtcgaccagttgctacgtaacgcctggcgggccagccaattccctaggtttatcaagaacgacactgtgagcagcacactatggaagaaatccatcaagtgctggatctttagaaaggagggttaa

SEQ ID NO: 348984 - DNA, 147 bp, Pseudomonas aeruginosa
atgaacagccttcgccacctgctcagcctcctggtgctcagcgccgatgaacgcgccttgttgcacagcctgcgccggctcagtcaggctgatcggcaattcatccgccgcgccgtagaggctctggcgcaacatccggccaactga

SEQ ID NO: 348985 - DNA, 627 bp, Pseudomonas aeruginosa
atgaacgctgtgttcctttccaacgaaatcatgccctggccaatcagcgagggtgatcggcggttcttggtcatgtggcccgaggaaaagctgccggaggccaggcagaaggcgatcaagcacgagttggccaatggcggcgtcgaagcgctatatgcctggctgctggcccaggacttaggcgacttcgacccacagagcaagccaccgagcacgccggcgcgcgaacgcctagtggccttgagtaggtccacctggcagacgttcgtacacctctggcgcagcggtgaactcgggcacgggctgtggggggcatgcatgagcaaagatctctacgcactgtttctggagtggtgccagcagaacaaggagcattcgataagccacacgaagttcagtctgttcatcagcacggcaagtatcgagaagaccaggccaattccctggacggacggcagcaaccgtcggttcgcggcgttcttcttccctgaggacccggagtccttcctgcccccatccccttcctcggccgcgctgggtgcgcacgtggtcgagtggcgggcgcgagccaagctcgcgggctggaacgtggacagttgggaccatgtgaaggggcacacgacgtga

SEQ ID NO: 348986 - DNA, 666 bp, Pseudomonas aeruginosa
atgaccgacaccttcgcaggtccagtccgaaaaatcagcggcacctcgcgtggcgtgactgggctcgtccccggtatggggcgttacgagtcgacccttgaacgcgacatgatggagctgatccgcttcgatcgcagggtccggcagtacacgcctcagcccctgacggtcagttatcaggatgaggcaggcgcatctcggtcatataccccagatggcctgatccaattcaatgttctgagtccccatgaaccctcgattctctacgaggtgaagttcaggaatgacttcagagcagcttggaaaacctatctgcccaagttccgtgctgctaaggcgtactgccggcagaaagggtgggtttttcgcgtatacacagaggtcgagattcgtactgcgtacctctcgaatgtgaagtttctttggccctacgtcgcacgaaaaatagatccggcgatgagggatcacgtgctcaatgttctatgggacctgggcgaagccgacccggactttctcttacacgcgttgtgctctgatccgacaggacgggcgcgcttaattcctgtgctgtggcacatgctcgctaccggtgatatcggttgtgatctcgatttgaagctgacaatgagctcaaggatttggcccatgaaggaggccagcaaatga

SEQ ID NO: 348987 - DNA, 1857 bp, Pseudomonas aeruginosa
atgattcgtccaggctctttgttctactggcgaaaccaagcctgtgtcgtcctggaaatcaaaggcctttcagaggcggtcgttcggactgtggaggatcaggctacgcacattgtgcgggccgtggagctgaatagcacccctgtgagcgatcaggcgctttcggcgaaacacgtattcgttggagatagggattgggctgaagcaacggagcgttacaagctaatcaaaccgttattagtgaacgggcgcaaatctctagacgaggttcaagcagctgcacaggcctccggaaaaagcgttaccacgatttatcgatggatcaaaaggtttgaagagaccgggctggtgtcttcactgttgcgctcagttagggcggataagggggttttacgactagatagtgaactggaagaaattattaaaaaatggatcgatcagttttacttagtgccagagcgaccaacggttgcggcacttcacctgaatattcggactgagtgtgacgaaattgggattgctcctccgcatatcaatacgactcatcagcgggttcgagatattgatgaggaagagcggcagagaaaacgcttaggtccgcgtgcagctaagcaaaatttacagccacttcgcggatctttccctgagacagagtttcccaatgctgtagtacaaattgaccattcacctgtcgatgtaattgtggtcgatgaggttgatcgccttccaataggtcgaccgttcttcacgctgtgtattgatgtgcatactcgcatgattaacggatttgtattcacactggatcctccaagtgcaaactcggccgccttgtgcgtttcgcacgcggtgtcgcaaaaggaatactggctagccgctcgtgatattcacgcagaatggccgatctacggccttatgcagaaaattcacgttgataatgccaaggaatttaaaggcaccgccatgcagcgtggctgcgacgaatacggaattaccctcgagaatcgtcctaaagggcagccaaattatgggccgcatgtcgaacgggcttttctaacattcatgaccaaatctcatgaagtcccgggaacgacattctctaacacgctagagaagctgcactataactccgaaggcgaagcgtgtatgacgcttaaggagttggagctgtggttcacatacttcattgtctatgtttatcacaataccaggcatgacggcattaacgaaattcccccgatcaagttgtacaccatgtgtgtgcatggaactaatgataagccggggattggacttccagagccagttgagaacgaagagaaatttaagctagattttacgccgtatacacttaggacggtgcagcgtcgtggcgtagagataaataatattttttattatgctccagttttgcgtgctcgaatcaaagagaaagggccggatggtaaaggaaagaagttcgtttttgtctccgatcctcgggacataagtattgtgtacttcctcgatcctgatgaggaaatttactatccaattccttattttaatgccagccatcctcctattagtgcttgggaactacgccaagttacaagaagattacgggaaacaccgggcgcagctgtagatgaggccagcattttcgaaggggtgcgaaaaatgcgtgaggtggaggcgcaggcgatcgaaaagactcgcttggcacgctcagctcgctcttcagaaaagcgtaagcgccgcatggctgagcgtcggcgagggtgggcgggcgttcacgcgactgcggttccgaccgaagagcctgtgattgatacaccgcttgaagatatcgagccatatgacgaaatcgaaataggttga

SEQ ID NO: 348988 - DNA, 894 bp, Pseudomonas aeruginosa
atgaatgatttcgagcacctcattgatgcgcacgccgagaaatgccgccagatgaccgatgcagagcgcatggattggctctctaacccacggtggctcgggtatccgagagcgaaggatatcgacaccaagctggagtggttgtttaaccatccgcgggtaacgcggatgccgaacatgctagtcattgggcggaccaacaacgggaagaccgacttggtgaagcgctttgctgctcggcaccttccttcggaaaaccctggtggggagcacattctggttcctgtcttgtttgttcagacgccacctaagcccaccgaagccggcttttatgcggagctggtacgcccactccttaaacgcgttccgaatggatcggtcggtgacaagcgtgctcgtgtcatcgagatccttcgcagtgttcagttgaaagtgctcatcgttgatgagatgcacaacatgctggcttgcaccggccctgctcagcatgagttcctgaacgtcatcaagtacctgacaaatgagcttcagatatcgatcgtgggcgtgggtgatgacacgttgatccgggccgtgggcattgatccgcagatccagaaccgtttcgagccagccgtgcttcctagatggaaagccggggacgaattcaatcgtctgctgctgtcatttgagaaaatccttcctttgcgcaatgcgtccaacctgacggagccgctcctggccaggaagctggctgcgttgtgcgagggcacgattggtgatttgtcgttgctgctcaacagcgctacgcgatatgcaattcagaagaaggtggatcaaatcacgcctgaggttctgaataagtgcggctacaaaccaccttcagagcggaagaagcaggaggaggaaatttga

SEQ ID NO: 348989 - DNA, 1143 bp, Pseudomonas aeruginosa
gtgctgcccatccatccgcagccacttccaggcgagattttgtcgtcctggatggtgcggctggccttctctaatggctttccgcttcacagcttctactcgggtcttctcgaattcaaagggcctttgtggaatcgggatatcgatcgtcatccctcggatcgactgcttgagcttttgagtcttcaaactcggcagccggttgctacgctgcgtcgcatgacactgtgtagctacgagggcaccctgttccccgagctgttgatgaatggcgacgtacgctggctgttacccctagggctctttcaccggaacagaaagcgggctggactgcagttctgtccgatgtgtctgcgaaatgatcccgtcccgtactatcgactggcctggcgtatcgcatctgtggtggtttgccctgtgcatcactgtgtgatggaggacatctgtcctcagtgtcagtccccgatcatgttccacaggcatggggtggggagggagaaatttcctttcatgttccacctgcggctatgccaccagtgtgggttgaacttgggggggattgcgccgaggtttcccgattggccggactgccactcgctcgaatttctaattgcactgatcgctcatggggagctttgtccctggcgatatctgcgcattgccactccgtgtgcgattccattcttcagcggccttagggtgatgctggctttgttgaacggccgcttcgcgccgcgcttcgaccctttgttttgcggggagctcggctgtgtggagttgcctcgtcaggcacttggctttgagtacatggacgttgatcgtaggctgcagctgatgctcagagcctgctggttgcttcaggattggcctaccagatttgttgagtcttgccgtggtgctcacttatcgcgcagtcgcatgcctgaggttgcggatcaattgccgttttggttcgagtctggagtttcgcagttggatcagcgcgtttacttccccagcgatgaggagatcaccgcggctgttgcgtacctcgtttgccatgatcggcgagtcacttggcagtcaatggtggagctgcttagcgtgaatcgagattgtgccaagcgaatttgcagtgtctggcaggggcttgcagcctcttag

SEQ ID NO: 348990 - DNA, 366 bp, Pseudomonas aeruginosa
atgtccaaattggctgaattcaaggcgcttgaggctcaactggccgctcaactaaagcagctggatcatttgaagaatgacagtgaactgaggcgtgaaattgagtttgaggaaaagctccgtgagctcctggccgactacggctttagcctgaaaaacatcatcgcactgctcgatccacatgcacgtacagctgcaaccaaagcagctccaggggggcatggcaaacgccgggagcgcaagctcaaggtgtacaagaaccctcaaaccggcgaggtagtggaaaccaagggtggtaaccagaaggtactgaaggcatggaaagagaaatacggtgctgaggtagtagagaagtggctgcagtga

SEQ ID NO: 348991 - DNA, 1323 bp, Pseudomonas aeruginosa
atgagcaccttcatatgccttgagtgtctcaacgaggcctacctgcaaagccagctgagcgaaaatgaagcagatgagtgcagttactgcagcgaggttagttcgggggtaacgatggatgagctgacctccctctgcgacgaggccatccattcgtccttcagctacgcactccagcccgactcggtcattctttatggccgtgatcccatcggttctcctttgagcgaggttctggagattgttcttggcgccgagaacaccaccttgcttcaagacctggaaagcgcgctcctggagagttggcccgtgtgggaggacgacgatccgtactttgaggagaagctggatgcctcagctcaaatgtcggaatgggggaagatgcaacaaagcctgcagttcgaatccagactggtaaatccgatggtcggggaagtgctcgaaaaggtgtttggcgacattgaacagctgcacaccacgactggaaagagctcagcaatcatccttgcaggaccaggaatgccacacagatcgtttgtgcgggcccgatcgtttgagagcgaaggtgaaatggtgaccgccttaaaacacccggagcttctgctcggcccgcccccaaaaggggtaggctcagcaggcagaatgaatgccaagggcatctccgctttctacggggcaactgatcaacacaccgcgattgctgaggtacgccctcccgtcggtagctacgtcgtcaccgctgtattcgaagtcactcgccccctccggcttctgaacctgtccgacctcagcgacatgcgccccaaccaaagcttgagctacttcgacccggcaaggcacgagcaagctcagcgctgcgccttcctacaagagttgaaggaccagatgctgatgcccgtcatgccgaacgcggcggaccagaactatctcattacgcaggctattgccgactatcttgcaagtcaccccagactcaacctggatggaatacttttcccttcagtccaggctcccaagggcagccttgcaggtgaaaacgtggttcttttccataaggccagcagtgtgcaaggaactgaggcatcgaatgccctggcctacgtagaactctgggagacggacgaggacacgcgctttttctacccacagattcatgaggctaggccgcaagagcacacagggctcatgaaggcgccaactaccccaccggccttgaaactggatcggacccaaatcaccattcacaagatcgacggggtattgttcgcctattcaaacgaaacggttcgacatctaacctgggaagaatccccctatacatga

SEQ ID NO: 348992 - DNA, 594 bp, Pseudomonas aeruginosa
atgaacagtctctccaaaagcatcgttgagctctgccgtgacctccctgaaggggaagtgatatcgccacgagattttctgcatctagacggccgccctgcagtcgacaaggcgttttcagcactgaccaaggaagggcatatcttgcgagtgtctcgtggcatttacgttctacctatatcttcccgctttggagtccgtgcgcctgcagcctgggcggttgtgcgatcgctggccatgaaaaatgatgttctgatcgtccgtcatggtgcttgggccgccaatgcattcggactaacaactcaggtgcccgtcagagaagtatttgttaccggaggccgaccgctaacgctccagttgggcaagaggagtgttgaaattaggcaagggtcgcacgaggagctgtctctaggagctagcgtcgcaggagacgcagttcgagcgcttgcctggatggggaagctgcatgcaaccaaagccgtggagaagttaaaacaacgccttaccaagcacgactggcagacattgttttccgctcgatcccagctcccacagtggatgtcagaagctctagagtctcaggggccggattga

SEQ ID NO: 348993 - DNA, 621 bp, Pseudomonas aeruginosa
atggaacctgctgatctccttgagcgctgttaccctgggcgtcgtgccgactccaaacggcagattcttcgctgtgccctgcggctgttcaatgagcacggaatcgatgcaaccaccatcgataccatccgagctgagagcgagacgagtgtgggatcgatctatcaccattttggaaacaaggaaggtgtgatagcagcgctctacctggcggctctggacgaccaagcgcacctacgagacagctacgtaagcggcgtaggttcgacccaagagtgggtctacgcgttggtctttagttatgtcgattgggtagttggccagccagactgggcgcgctttcaataccaggcccgctatgcagtcgcgcaaagtgctttcggtgatcagctcaaagaagctaatcgcgtcaggaacgctcagatgagagactggttcagtgacccagcccaccggcgcgatttgaaggatctcccgcgcgagctcataccctcgctgattatcgggtcggctgagagttactgccgcgcctggctctccggtcgggtcaagcaaagtccagatatccacagacaattgctcgcagagtccgcgtggctgaacgtggggaatgaaggttaa

SEQ ID NO: 348994 - DNA, 441 bp, Pseudomonas aeruginosa
atgagccagactctcggcatgtaccaaagcgttggcgcttccgctttcagcaacatggcctgccaaatggccccttacttcggcactatttccccggaaatttccgtgctgactcctggccgcgctgaggtgaaagtgccttttcgcaaagaaattaccaaccatctcgcctccgtccacgctatcgcactgtgtaacgctgctgaactcgccggcggcatgatgactgaggtatccattcctagcggtgcaaaatggattccgaaaggcatgaccgtcgagtatctggccaaagccaagaccgccgttcatgcaatcgccgacggtagtgaagtggattgggaatcgtcgggtgacaaagtcgttccggtagaaatcttcgacgaggctggcgtgaaggtctttaccgcacgcatcaccatgaacgtgaagcttggctaa

SEQ ID NO: 348995 - DNA, 2037 bp, Pseudomonas aeruginosa
atgagctctgcaacctacccccagctgctttctcccctagatcttggtttcacgaccctcaagaaccgtacactgatgggctctatgcacacaggcttagaggagaaaccgaatggcttcgagcgtatggcggcattcttcgccgagcgtgcgaaaggaggcgttggcctcatcgtaaccggaggaattgctccaaacgtggagggtggggtgtattcaggtgcggccaagctgaccaccgtcgaggaagccgagaagcatgagattgtcactcgcgcagtgcacgaggcgggcggcaagatctgcatgcagatcctccatgctggccgctacgcctacagcccaaaatcggtggcaccgagttccattcaatccccgattacgccgtttaagcctgcggagctggatgacgagggggtagagaagcagatccaggacttcgtgaactgctctgtgctggcgcagcaagcccagtacgacggcgtcgagatcatggggtcggaaggctatttcatcaaccagttcattgctgctcataccaaccaccgaaccgaccactggggcggcagctacgagaatcgcatgcgcttgccggtggagatcgtccgccgggtgcgtgaggccgtagggccgaacttcatcatcatctatcgtctatcaatgctcgacctggtcgaggggggcagcacctgggacgaaatcgtcctgctggccaaggccgtcgagaaggccggcgccaccatcatcaacaccggtatcggctggcacgaagcgcgtatcccgaccatcgccaccaaggtgccgcgcgcggcttttaccaaggtcaccgcaaaaatgcgtggcgaggtaaaaattccactgtgcacaaccaaccgcatcaacaccccggaagtggccgagcatgtgctggccgagggcgatgccgacatggtgtccatggcccgcccgttcctcgccgatccggacttcgtcaacaaggccgccgccggccttgccgacgagataaacacctgcatcggctgcaatcaggcgtgccttgaccatacgttcagcggcaagctgaccagctgcctggtcaacccgcgtgcctgccacgagaccgagctgaactacatccccactaccaccgttaagaagatcgccgtggtcggcgccggccctgccggcctatccgctgccacagttgctgccgaacgcggccacagcgtgaccttgtttgacgcgactggcgagatcggcggccagttcaacgtggccaaacgcgtgccaggtaaggaagagttctacgagaccctgcgctacttcaagaggaagctggaaactaccggcgttgacctgcgcctcaacacccgggttacggtcgatgacctagctggtggggaatacgacgagatcatcttggcgacaggtattgtccctcgtatgcctgagatacctgggatcgatcatccgaaggtgatcaattacttagacgcattgctgcaacggaagccagtcggtaaaagggttgccgtgatcggcgcgggcggtatcggctttgacgtttgcgagtttattacccatagcggcagcgctaccagtctgagccgaaatgcattctggaaggaatgggggatcgatatggccctgaattccagggggggcgtcgcggggatcagggccgagatacatccagcagctcgtgaggtgttcctactgcaacgtaggaagaccaaagttggcgacggcctgggcaagaccaccggttggatccaccgcgccggtttgaagaataagcaggtgcagatgattaactcggttgagtatctcaaggtcgatgacgaaggactgcacatcagcatcgccggcggagagccgaaggttcttccagtggattccgtgatcgtctgtgctggtcaggatccgctacgcgagctgcacgacggcttggttacggctggccaaaatgtgcacttgattggtggcgcggacgtggccgcagagctggacgctaaacgcgccataaaccaaggctcgcgcttggccgcgatgctttga

SEQ ID NO: 348996 - DNA, 903 bp, Pseudomonas aeruginosa
atgcctagcttacgaagccacttactttctgccctcctgcgcgctacacaacgtaagcgaatttatagttccattgatggtttgcgtgaggggattaggcaagttcgcctacaggggccagcccggccagtattgggaacggtgggggatgtggttgtagaactagatacggtagaagatatcgaggtttatcgactctcgccgcacccaaaaccctccgtggtcacgccggtcctgtatctgcacggcggcgcatacatacggcccattacttcgtttcactggcgctttctccgctcactcgtggagcaaacaggctgcacgtttagtgtgcccctctaccctttagctcctgaagcaaactgcgttcaagcggttgagacagtgacgaacgtgtacatcagcgagtgcatgcgagcaggtgtcgagtctgtcgccgtcatgggcgattcggcaggaggtggtttggctctggcgctctgttacgccttacgccaaaaggcttttcccaccccccgcagcttggtgcttatctgcccctgggtagacgtgaccatgaccaatccgtcgattgcacttaccgaaaatagcgacccgatgttggcttcggtcggtacaagagaagctggccggttgtatgcgggcgatcttggtgtgcggcattgctatgtcagcccactgtacggagagcccaaacactttccgcctactttgctattcgcaggtactaacgacatcgcccattacgatgcattgttgtttgcggaaaaggcccgagcagcgggctctctcgtggatctgcaactaggacagggaatgatccacgtctggccaattttgccaattccagaagccaaagtagctcaggcgaaaattgtgaggcatttactgaccgatctatga

SEQ ID NO: 348997 - DNA, 222 bp, Pseudomonas aeruginosa
atgtggaaacaaccacttaaacaagcgttcggcatcgtagacaaacgctttgcggtgcaccagtcagaccaggagcgggcgcgcgaagcacgcaagctgatcaacaacgctggcattagctgggacgagatcgaggaggagatcagccgccttctgcaaggctgcaccgccgaacacttgcatgcccagctcgccgcagcgcgcaagttcttcaaattctga

SEQ ID NO: 348998 - DNA, 231 bp, Pseudomonas aeruginosa
atgacgatgcccagcgagcgatctcgctcagtggtacagactcgcgagtttctcgttgagctgagccggaacaaagatctgcccgaaaacgtgcgcgaccaggcgcgatttctattgcgccactttcccactaaggatgatgtggtactggctgggcggatagaagaacagtcggaaactctgccgatcggtgtgatggggcctgtattcagctcagttttcactgggtag

SEQ ID NO: 348999 - DNA, 1773 bp, Pseudomonas aeruginosa
atgagccgtgccctgctagaaatcccaaagaaccccaaattcctatccgacatgggcaaccacctggtcgaactggagcgaaaacttcagcagcaaggcttctttcaagaggccaaggccgcagcagcgctacccgctcgggagagcagcaccttcttcacgcaatgcgtccaagtaatcgaggcagagtttgaggctgacctgaacgctttttcagccatgcggtggatgtattacctgcgccgcatacccaacgtactttttgatggaagattgtcctccactggcgccaacacgcgcgctctgtccgaagtctatgcaaaccgtagccaggcggccgaggcagccacctttgggcatagcggctttgtctttcctaccgacacgggaacgctggaacgcattgcccgcttgatggcattcatcatgctcatctgcgacctgcaactcggcttccgattggcgagcaagggattcgagtaccgcttcggcagtaacgagcgcaaggccatcagaggccgaattctggcaggcgcagtgttcgctcctttaaccaatgtgccatcacccctcccacgaccggcactcaacccgacactggccgcatcggtaaggctctatgaccagcgtcgtgactatctagcagattcattccttagtatcgcaatgggccaagtcggattagctcgcgggcgtgccgacgtcgacgccgagagattcgtgaatatttctcaggcgttctgggggctgcacgacgatcaaaagttcgcgccccaggagcttctcaaaggacatcccaacgcggcgatctatggggatgatggaaaggttctgattaggttcggtcccgcagatctcgacctcacgcggctattcgagctctaccgcctccccgcaatggcgggcatcgcgattgaccccaatgcgtcgctttgcctgctcctggtcttgctcgggggacgcttactcgcaagccggcgcttctcatgcctacgggtcatggaagtcggctacttcatcgtcgaccccagtgagtgggccgagactggggaaaaagagtacgccaatgtctgtaatgatatcaggcagcaccttccgcaattccaagcgcccgacaacttcgcggcattcagcagcaactgcatgaccttcaaaggggaagtctggccccttgctcatggagccccggtaagaattaccgacgactacgcttgcatcgacatgtgggccgcctctatgggcttcctggcttggctccagttcccaaggattcaaggccaggtagctaatgcgcgagcaattaagttcgaggatctggttcaggacgtcattgaccaaacccgctgggccgaccagcccacccgagctctccgccagaaaacactgaatgttcgtggccgagctttgaccgacatcgacgctatcggcgccttcaatggcacccttcttctggtttcctgcaagagcatcccgtacacgcgcgagtatgaccaaggcgcccataacgctattcgtaatgctgcttcaacggtggatagaggcgttgattactggtcaggcatcgtcgatcagcttaacgcccagagggtaggcgacaacttcgacttatcgggcttcacacgaattgtaggcgtggtctgcacgcccttcgtggtctatacgagccattccaggtcactcgagaggtctgtcggaaagttgcgctggtcgagttctctggatgagcttctcgaattcctaacaacgtcgcccgtaccggatacagacgagtag

SEQ ID NO: 349000 - DNA, 171 bp, Pseudomonas aeruginosa
atgactatgaaatcactgcgtcagctcaagccccttactgacgagcagcgcaaagaaaacgctgagaagacccgtcgtagccttgagtcttacaagcgtgccgcacgggacatccaagagatttgtgcccgccaaggcatggccgagccggttatcgtcgccgagaagtaa

SEQ ID NO: 349001 - DNA, 636 bp, Pseudomonas aeruginosa
atggcattggaagctgaagccaatctggcccaagctgagcctggggaacagattccaaggctgaagcttgaattacaggatgtaatctccgctgaaacggttaacccaatcatcgacgtgctgaagaaggcagtcgagggtgacctgatcgagattcacctccgtcacaacgggggaggaaacgtagaccggatggtggcgctgattgaggccttgagcaccactgctgctcgggtagagatcacgttcagccgctacgtaatgagcgccgcagccacgatctggctatggttcttcatgcgagagacgccgcaggtgaagtcgctactccctctcaagaagggagtggtcatgtaccaccgcccgcgacgccaacgcagcggctatctttgtttttgtgacgagatggctgaagcgcaccccctaaaggggccgctgcaagaaaagatgcgcatgttcgacgagctgttcgaagaggtttttgccttgctcagctatctggccgcagaccaggaacagcaggatttactgcaagctgaactccatgatgccgaggatcagctgctgtacaagcactccctattcaggatgagggaggcttattacgggaaccaggattgtctgattcccgtctaa

SEQ ID NO: 349002 - DNA, 705 bp, Pseudomonas aeruginosa
atggtgcaaatccaccacagcctcagccaccacgctcacctccacgaagaaaccgcccgggagcttgataagctcagagcacttcctgaggagatcgtagttgcgttctttgcatcagatcctggcagtacgaacgagaacaagctggcgttagatgaagaggcacggcttattggaatccagattcgcgcctcgaaacaccgagacgcggttaagctcgagtcccgttgggctgtcaggccgatggacctcctgcaggcagtgaacgaactgcgccccacagtcgtgcatttcagcggccacgggtcagctctggaagagttgatccttcaagatgacttcggccaacccaagtatattgccaagcaaaccatcgttcagacgctcgcgctgacctctgacagtgtccagctggtctttttcaacacgtgtttttctcgcaatcaggcccaggattgcgtccaaagcattaacgcggcgatcggcatgaaccgcgcgatccaagatggcgctgccagagtattcgctgcccagttctattcggccatcggttttgggctctctattccgaaagcattcgaacaggcacgagccctattgctgatggagcatccgacccaagcggacatacccgcgctgtatctaaaagatggagtagacgaggaagacctcatcctcgttgagcctcagcccagcaaaacctag

SEQ ID NO: 349003 - DNA, 870 bp, Pseudomonas aeruginosa
atgaccacaacagagatcttttccgtagctagtcaaatcaggggctacgtcgccttgctcagcccctttgcgctgttggttgttgcgtacgcgtatgtatatacaaggaccgggtcaataagcttcctgcaggatctcgtatggcgaattgcaggaggcaaggctcagtttcacaacaaagccctgcaagctgagcagactcggatcgttgattacgagcgcttcaagtacaaaaccggcatcaggtttaccagctacaacaacatctccgagacgagagcctggttgcgtgaacacaacctcggcatcgaagagctaatgcaggtcaggaagtacttcgattgccaagcaatcgctctgcgcaagcctgatttgcacaaggcggataagcgcaagaagaacgctctttctttcttcgtcttcggggccgtggcgttcctcgtgcttgggtcaccagcagcgcttcttacgattaagaaaaccaacacgactttctggatgacagagacaagcgccagaggctggtatctggtcgactggaaggtcagtaaggatgactgccctaatcctacaacggagctagatgagcatgatcgccaggtcatctgtgagatcctcgaggacaaagacgcacgtgaataccttaaaagcgccatgctcactcagaaactcctcggcacttcagcactaggcttaaccctgcttctgctcttctacgcactggcctacagccgacaggctgaacatgcagctaggctccacgagaagatctacaaaagctcttctgagaagcccgcagagggccaagaaaccgcctctaacggctctctcctgccggctcgatcgaaagcccctgagctcaccacttaa

SEQ ID NO: 349004 - DNA, 1173 bp, Pseudomonas aeruginosa
atggacacgtacatcatattgcgcaaacccaatcagccggatgcacgcgcaggtgactataagaccaggactttcggcctaatcagaggcgtaagtaccagtccgcagcttgcggttgagcgcgtcccgactcacgcgatagccggtctaagaagagaccctcaggttatggccttggcgcgcagcatgcccaccaaactcattcagccattcgtgagctcatcgtctttcacaaatgacgcatggggcatcgcagccgtgaatgcggacacgtccccctacactggggatggggtcaccgtcgcagtgcttgataccggcattgacgccaagcacccagccttccacggggtgagccttacgcaaaaggacttcactggcgagggcgagatggataccaacgggcacggcacccactgcgcgggcaccatcttgggccgcgatgtgaacgggcttcgcataggggttgcccgcggagtaaagcaggcgctgattggaaaagtgctgggagataacggcggcagctccgacatgctcttcaacgcgcttcattgggcaatgaactcaggcgcgaacatcatctccatgtccctcggattcgacttcccaggcatggtaagtcagcgcgttcaagctggttacccggtggaaatggcgacctctgatgcactggagtcctaccgcggaaatctccgcatgctcgacacgatcatgcgcatgttcagcgatcgctccgccttcggcgacagcccaatagtcattgcagccgcaggcaatgaaagccgtcgccaggtccgcggtgatttcaaaattgccgcctcgcttccggccgccgcagataatgttatttctgtggccgcggccgggaagcaagggagcgattatggaattgcagcgttctccaatattcaccccaagctcagcgctccaggggtggatgtactttcggcatggccgggcgggacgctcaaatccctcgacgggacaagcatggcctgcccgcatgtcgccggcgttgcagcactttggtgggagcaggcgctgaaaagcaaagcggtctcaccttcagctctcaccagcgcgcagctcactgccacggcaagcacacagggcttttcagccgaatttgacagtacagactatggcttcggcctggtcacctcgccgaaataa

SEQ ID NO: 349005 - DNA, 2217 bp, Pseudomonas aeruginosa
atgagccaaacgaattttttgattgggcgtggcgagcttttaactagcgatatcaaaggccccaaaaggaaccctgataagtcggaggtctatagcctccatcaagcgctgcagcgccttgagccagaggcttctgacaccgcaaaggcgctggacgcgcttccagacgtagcttgcccccatgactttggcgtggcgcggctcatcatgaacccgagctacatcgcacgctcgtactttccagccaatctccttcgggctgccggccttgaatcgttgggtagccggcaaatctgtatcaaacctgaaagctggaagcgaaagggcgagccacgcgaatgcgcaaccactgagattttcgttgcaggcaagcggcaagccttccgctccctcagcagctggatgacgggcttagaagacgagacgcacgaggcggtggatctacgccgcatcgagcacatctctgtcttcgcacgagaacagcgcatcgcaaatgcagggactcagaaggacacctttttcgagttcggcgtccacctcctgcccgacgaaggcagcaatttcatccagcgcgccttcgcgcagatggcagagtctctaggactcaccgtgcacagcggctatagcttcgaagccgggaccctttggtttgtaccagtcgaagggaaccagaaagcagcactgcagctcgctgagttcgttttcgtccgagtagttcgacccgtcgccaaaatgcgcagcctactacccaacattcgccgaggcggcccgaaagtcgaatgcgtgcttcccacccaagaccctctatcgtcggagcctcgggtagcaatcctggacgccggccttccagagcaccactcaatcgggaggtggctcaaaacgtatcgtctgtcggatgagaacgcggctgacgaccctttaggccctgatcatggattagcggcaacgtcggcgtttctctttggccctctacagcccgacgaggttgcagcccgccccttcgcatacgttgatcacttaagggttctcgataacgaatcgagcaatgagcacccgctcgaactctatcgaaccctggggcacatcgaggaggtgctcctctcccggcaatatgagtttctcaacctcagtatcggcccggagattccgattgaggataccgaggttcatccttggacagccgtcattgatgaactgcttagtgatggcagcaccttcatgacagttgccattggcaacaatggcaccatggacgcgacccttcggaatgatcgcgtccaggtcccgtccgactgcgtgaatgcggttgccattggcgctgcgaatagcaccggcgagaattggatccgagccccttatagcgccaagggtccaggaagaagtccgggactgatcaaacccgacctcatggcttttgggggcagtgcgaaggagtacttccacgccctgtccccaggtaacgcccccgagctggttccgcttttgggcacaagtttcgcgtcaccgtacacgctccgcagcgccgtcggtgtccgtgcgattctgggccaggatctctcgcccctggccattaaggccttgcttattcacgccgctgaccagaacggccacgacatgaaggacgtaggctggggaaaaatccctgacgacctcatggagatcatcacttgtccggcgggagtggcaaggatcgtctatcaaggtgagctcaagcccggaaagtacatcaaagccccgatcccgcttcccgatgagggtctgtccggcatggtcacgctgaaggcgacttttaccttcgccagcgccactgatccgcaggactcctcctcctacacccgcgcaggtcttgaggtcacctttaggccgaatgaggagcgggtcaaggacggcaaagccaatgcggaaacgaccaccttctttaagaagaagaagtttgctactgaggctgaactgcgtgccgactcaggcaagtgggaaacagtactacatgaccagaagcgcatgcggggcagcagcctcaacaaggccgcattcgatattcactacatcgcccgggaaggtggcggtactgctgaccgcgcgcagaaggtcaagtactcgctgatcatcacggtagaagcgccgaaacaccctcatctctacgctgacatcctgaaggcttacgcgaagacactggtccctattcagcctcagatctcgctgccggtacggctatag

SEQ ID NO: 349006 - DNA, 1179 bp, Pseudomonas aeruginosa
atgaacgcggacgacaaagaaatcgtagcaaccgatttagcccaggtcgcacgcctcgctttaggtgagaaaacggacgacgcacgcctattcatagctcgactggtgaggaagtaccgcagcactgagccgaagctggccgagacgctcgaggagtacctgcgagcaaatgcgccaaagtcgtcatcaggcatgatgcgcagagaccagccctctatctccaaggggcaagaggcctccctccccgtagacgatgagtcgcgcctgtctctcctaaaagtcttccaagatgagccatcaaggccagcccctctcctgtccgagccgacaaaagaagggctggagcagctgattcatgagcgtaggcagatcaaaaagctcgcaggcctgggtcttcaacccaccaaatccgccatctttgtaggcccaccaggtgtagggaagaccattactgctcgttggatcgcgtctcagctgggtgttccgctttacgttcttgatctaaccgccgttatgagcagcctgctgggacgcagtgggaccaatctgcgagcagcgctcgactttgcaaagcgaactccgtgcgttctgttgcttgatgagattgatgccattgcaaagcgacgcagcgacgacagcgacatcggcgaactaaagcgcctcgtcacagtaatcctgcaagaggtggatgagtggcctgccaccgggcttttattggctgccacaaaccatccagagctcattgatccggctctctggcgtcgattcgacttggtcgtcgagttcaaagcacctagccccgaggcggtgaaggctgctattcgccgcttcctcgatcgtgacgcagctaagttcgagaactggatagacatactttcgtacgccttccagggcctttcttttagtgatattgaaagagagatccatcggttcagacgatctatcgcccttggcagcgcgacaacgcaaagcctggtcgaagatgtggcgagagccaggtctgcatcgctagatcggcaatcacaaatagagtttgccctcttgcttgatagccaaactgagttatcccagcgcagcatccatgacataaccggcgtcagccgggacaccattcgaaagcggcgaaccgctgacaagcaaccagccccacggacctcaaggaagagaagtagcgcatga

SEQ ID NO: 349007 - DNA, 210 bp, Pseudomonas aeruginosa
atgcgcgaaggcggcaaggcccttggggcggagagacttgagcagctggcaatcgaggttttcgaggatcaggatcgggccgccgcctggatggatcggccaaacgtcgttctaggcggtaaaactccgagattcatgagccgaactgacgaaggctgccagatcgcgaagcgagtgcttcatgccatcgagcatggcggcgtggtgtaa

SEQ ID NO: 349008 - DNA, 1761 bp, Pseudomonas aeruginosa
atggtgctttctcgcctgaaagatgactttgctgatccttatagaatcgatgcccgccttggcacgccgccccagaccctcacccttcatcccaaatggctttgcatcctcaccatcgggtccgtctggcactcgggcaaattccatagcaaacctgagccactgaatgagctcctgaccgttgagacaacacagggctgcaattacccatatcaaagagcggtaaagcttaatgacgtttggaccaaggctggaatagcagcagccgattttctgccgaaggataactacgaagacctttacgccacgctatacaccttggtgcgcataattgaccatcctgtttacaagtggatggtagttcctgcctctgagcttctacgattctacatgggagtatcaggaaggcttctgacagccgttatgagaggcgagacaggtgagtttttaaagtggccttcccgggaaccgcaccaatcgaatcgcggcaagattaatctgtacgaaatcaaacagctcagaagactagagattgaagtgctggggcgagcgcttgcaagcccaacctttaaagaggaaatgtttgcggcaaacaagagaatcacaaaaatcagggcgaccaactctctcggcggcccacaatccgcattggccattgacgtaaattttccatttaaaggcgtgacgaatctaagtgtgtccggtcaacccatgcagctggctaatgaccaagcaatcttcgccatggagatacatcactgcacattccccttggaattttcatcactaaccgtacatggagctggcagcacgaagactgagggcggcgaaactggcacacaaaacacccaccagcactatgtcgtggctgatcatgacccggatgatgaagatgacgagatcgacgacatcgatacggacgcgacattacagcaccgcgagttagcacaaagtgcctcgccattcgccgggagctccgaagtaaacatcgactacgaccgggccaacaaggagcgccctgggagtggctcttcgtctccgaccgatacacccagcaatggtctgggcatgggagacggagactataaatcgtcgtcaaagggaattctctgcgtcgatgaatttaaaaccccagaacatttgacctcttctaagttattagaatttcttgagatgatagaagagtttaggaacaaaacccgccctcaaggatggatcgctacatccattgagataaatggcgaaataccaataaaggttaagcgcaaagaattcgatccacccgaaaaaggcgacgacgacaacgccaaggaaaagattacttcttttccacccctcgataagaggcgaaagtggaatcttgtaacaacgacggacggggttcgagctcgacagctcgcttgcattgaggtctcttcaagcgtgaggagtggtaggttcttctatatcttagaaattgaacttaaagatgaggaaactggacagtgcacggcaataatcagaggcagaaactatcagcaattgaccccgactgaaattaacaagctactgaagctcacctgctacctgggacgttggccagacctgattacggacaagtgggataagaaggggcatcggagtcttgcggcagaagttagccagacgattattatctccaagctaatacaccctaagaatcgaagcgcgtgggttgcaaagttaattggccatatcaatcgctggatgaagcagccagaacccccaatcctccaggagtaa

SEQ ID NO: 349009 - DNA, 222 bp, Pseudomonas aeruginosa
atgcttcgcttgatcatttttgctgttatcggcctcaccctctacttcgggcgtttcaaaagtgactggctgtattcgttgttcgagcaagacatggccgctgatccggatcggatcttcggtctgatggcgaccatggggatcggggtcctgggcgttatcttgctcgttgccggctgcatggctgccggcaagcggagcgccgtcgcgcaagaacagtag

SEQ ID NO: 349010 - DNA, 330 bp, Pseudomonas aeruginosa
atgaaccagaacactgacgctaccaagccccaggacaccgaggtttcgcctcagaagcaactggccatcctcctatccatccaaggtggactcaccaacgggatcaccacccaacgctgcctctcgcagattgccaaggtcagtccgatcggcaactgggagtcagcatcttccgaatacgaaatgagcagctcgctgccgcgggcccttttgtgttcgggagccttctgttccgatgtccagctgctgctcggattcttggatggtcctcagatcaatccgcaccaacaactcgctcccgcaattgaatacctcaaagcaatcctttag

SEQ ID NO: 349011 - DNA, 333 bp, Pseudomonas aeruginosa
gtgagcaacagtcaattcccactctatgcctcacgaatcgcagacaaattcgtggttcgcttcccggacggaatgcgcaacaaaatcgcggacgttgcccgggggaacttccgcagcatgaactcagaaatccttgcccggctcgaagcgagcctcgaggtcgaatctgaggaagggaatgaaaaccttcctgcagcgaacggcgaaggtctgtccgccgatgaacttcgcctaattgcccgtttcaggaagctcgacgtgaaacagcagtccgcgctggtcgaactcctcacaccagtggcccaggctcctcacctcgccaaagcatcctga

SEQ ID NO: 349012 - DNA, 324 bp, Pseudomonas aeruginosa
atggacgctttcaccttcaccgtgcacctctacaagaactttggcatcgcacttcagatgtgggatgaggaaggccttccctactgcacactctctgtgaacgtgccggatgcactattgaaaacggatgagttctgcgtccactgggatgtcgacgaagacctgacccagcagctcctcgcctccggccgattcgaggacaccgggctcgtctggacagccggttatgccgttgcaccggtatggcgtttggtctgccctgagttactcgagcatgtacagcagcagcgggttctcgctcggccccacgttcgacaatcctga

SEQ ID NO: 349013 - DNA, 417 bp, Pseudomonas aeruginosa
atgagcaagcaagaacgtctggtgcacgccaaccagctaattcaaatcatcgcccggcatggccggcgatttttcttcgatgatcggaccaacaccactgcccggttggaacttgatcaccgcggcagggtgtggtttcacgatcactattccaaggcacgggtgtatacccacccagcaacattcggcaatgaatggcacggcttcactcacggcggaactatgcggaatctggttgaagcgatgcgtgactacattcgtaacggccgccagatcccagttttctggctcggttttcagcgcgattccgacaagaccaacatctggggctatgaggacgaggcaatgtccgctgtcaggctggaagctagcgctattcctatcatccgcggtaaaccagaagaggtgttcggctga

SEQ ID NO: 349014 - DNA, 141 bp, Pseudomonas aeruginosa
atgatcaacgaaaccacctatgcagggatcagcgttcccacaagcctgatggaacagtgcaaggcgcttatcgccatcaaggctttccgtgctgagacggggtgcagccttcagaatgcgcgccgcgccctcgagctttga

SEQ ID NO: 349015 - DNA, 126 bp, Pseudomonas aeruginosa
atgaagatcgatgatttccgttgcaaaggctgcaaccagtggaaggacgtattccagaagggctcccagaagggttactgcctggtctgcaagccgcgcaaagaaaacaagacaaacggtcggtag

SEQ ID NO: 349016 - DNA, 591 bp, Pseudomonas aeruginosa
atgaccacttcccttaccgacttcttcagcgaaaacccgaaatggagcaggcccgaaagcttcatcaaggaatcccggcccatcctccaggtgaaaaaactcatcctcaaaggcgcagttgatgtcgtgttctttcgagatcaaaccccgcgcctggtagtggctggggaaacgaaagaagctgttgatcgcgttcgtaccatcctgtcgggcgacaagctggtcatcgagcaggaaggcaacgtgatcatctcagggggtgggagcatcaacatttccggcagcggaaacattgtgatcaatggcgtgcaaatgcagttcaacggccctgtgggcgccaacgacatcaaaggtgcctcgatcggtaccggccgggttttagttggcatcagtctgccgatcgcacctcgagttcagattaacggcagcggagaaatcactctcaatggcctgcagcaggatgcttttgaggcaagtgtccagggctcgggcgatgtgactgtgcaaggcacggtacagagccttgacgtcgagattgcaggttcggcgacgtcgacgcccgtgaacttactgcggcaacggtggacctga

SEQ ID NO: 349017 - DNA, 363 bp, Pseudomonas aeruginosa
atggcaccagttctatccagcaccagcgaaccgcgcctgaatctcggcccgcacttcttcaacgccctttcttgggttcgtcagacgacctttcctgccgatctcgagtgtagtttggttgccctcggcaccgcaccggccctcgcccaggagattgccgtgacctatagccactcgatgtacagagatatcgtgcgcttctacgaggaatacgcttactcggtcagtagtgaggagtggcagcagccgctggcggcctacatctcggcccgcttggccgactacgaccggtatggcaagcacgaattacggatggccaagtacctgcagacgcaactggatacccggcaacgaaaggcctga

SEQ ID NO: 349018 - DNA, 456 bp, Pseudomonas aeruginosa
atgcaatgcaaccatcccatcactcaacacaccctgaacttctcaatgcaagctggccctgcccttcccctctgccctgtgggccttttaccggacgcggtagtcgccctggatgatccgttacttttgatcagtgatctgggcatccgtgaacgcatgcgcgctagcttcacttttgacgagatgcttgatgagatgagagccatcagcgacctggcggaaaagcgccagcagtatggctctaggactgagatgggtcttggagggcctcgcagttaccaggatgtcggaacggcacagaccctcatggattggatgcatgaacacgaacttcgtcggatgaatcagatcaagctttcgctgcccagccctggagaggaagcagaagctgcccgagagcgcattcagaaacggatcgcagcgcgcaggtccggcagagtgcaggctgccgcgtaa

SEQ ID NO: 349019 - DNA, 564 bp, Pseudomonas aeruginosa
atgaaatacccagggcggttatcgggagggcagtttgaggctttcatggcccgtcatttcccagcctttatcggcggcagcctgctctgcatgctggcctcgggcagtggcatcgcactctggcaatccggctacctaggcggtgtgccgaaaagcgagaattacgtattggccgcattcttggtgctggtgctgcttgtctgcgccggccaattcgccatgttgagagggtaccgtcttggaatctggctggtactgcccagcctgatgggccctgctttggtggcggccggcctgtttggcacccgccatgccggccctgcgcagatcaccgtcctgctgttgtcgctagcagggttgttggtgatcaacagtaaacgtcatcgtgctatgcgcgagcgccttgtcgaaatgcgcctgcaacgtaccggggtactgccacccacccgggctgatgagttcccggatggctccccacctgcaaagtcctggtttgccaattacgtgcttggtttgatggtgatcatgctgctgtgcaaactctatctgttcttctggggctaa

SEQ ID NO: 349020 - DNA, 1263 bp, Pseudomonas aeruginosa
ttgccgccgccctacagcacggcgagcgtcctgcacttccaactggaaccgctcaacgcactggcgttcgagaaggacggtatctgggaaatccacaccggcaaccagtggcagtcgctgatcctgccggtactggcgaaggcgctcggggtcggccaggacaagatcatcatgcgcagctatctgttaggcggcggcttcgggcgcaggctcaacggcgactatgccgtgccggcggcgctggcggccaaagccatcggcaagccggtgaagatgctctgcacccgcgccgacgatgtgcgcttcgactccatccgttcgccctcgatccaacgcctgcgcctggccttcggcgaaggcggcagcgtaattgccatggagcatcatgccgccgctggctggccgacccagatcatggtgccggacttcatgcccaagggcgcgaatggcgtgccttacgaccccttcgcgatagccggggccgaccactggtattcggtcggcgcgcatcgggtacgcgccctgtccaacgacctcgccaaccgcaccttccgacccggttggttgcgttcggttgggccgggctggaccaactgggccctggagtgcttcatggatgaggccgcccactcggtcgatgccgatccgctcgccttccgcctcgccctgctcgatggcaaaggcaggaacgccggtagcgcacccaatgcagtcggcggcgccacccgtcaggccaaggtgctcaagcgcgcagcggaaaaaaccaactggggcggcacactgccggcagacagcgggctgggcatcgccaccaccttcggtcaggagcgcggcatgccgacctggctcgcctgcgtggcccgcgtgaaggttgatcgtgccagcggcgtggtgaagctggaaaaactcaccatcgttgtcgacgcgggcaccattgtgcatcccgatggcgctctcgcgcagatggagggggccgccctctggggcgtgagcatgacgctgcacgaaggcacgcagatcgagaaaggggaggtgaaggacaccaatctcgacacctacacgccgttgcggatgggtgacgtccccgagatggagatcgaattcctcccgagcaccgaagccgcggtcggcctgggtgagcccgctaccacagtggtcggtcccgcgatcggcaatgcgattttcgctgccgtcggcgctcgacttcgccacctgccgatacggcccgctgacgtcctgcaattgctcaaaaaaacatcctga

SEQ ID NO: 349021 - DNA, 1209 bp, Pseudomonas aeruginosa
atgtttggcttggaggctgtcgacctggcccgaatccagtttgcgttcaccatctcattccacattatcttcccggccatcaccatcggcctagccagctatctggcggtgttggaaggcctgtggctgaagacgcagcaggaggtctaccgcgacctctaccatttctggtcgaagatcttcgccgtcaacttcggcattggcgtggtttccggcctggtgatggcctatcaattcggcaccaactggagtgctttctctgattttgccggcagtatcactggccccttgcttacctacgaggtactcatcgccttcttcctcgaggcgggcttcctcggcgtcatgctattcggctggaaccgcgtggggccgggactgcacttcttctccacgctgatggtggctatcggcacgctgatctcagccttttggattctcgcctcgaacagctggatgcagaccccgcaaggcttcgagatcatcgatgggagggtgattccggtggactggttcgcggtggtgttcaacccgtcattcccctaccggctggcgcatatggccactgcggcctttgttgccactgccttcttcgtcggcgcctcggcggcctggcacctgctgcgcgggcgggacaacccggcgatccgcaagatgctctcgatggccatgtggatggccttgatcgttgcaccgatccaggcgctcatcggtgacttccatggcctcaataccctaaaacatcagccggcgaagatcgccgcgatcgagggccactgggaaaacgtcggtgacgagccgaccccgctgatcctgttcggctggccggacatggggcgcgaggaaacccgcttcaagctggagattcccgccctcggcagcctgatcctgccccaccgcctggataagcaggtcccggcgctgaaggaattcccgccggaagatcgacccaactcgagcatcgtgttctggtcgttccgggtgatggtcggcctgggcatgctgatggtcctcaccgggatctggagcctgtgctgcgggtgcgcggtgggccatcgcccagcgctggttcagcctgcccaatctgttctagttcctgccggtgccggtgccggtgccggtgttgttgctggtctgtaccctggccctgctgcgcgcggtgaaagaacaacgcccactactcgccgttcgtgctcaccctggtgctga

SEQ ID NO: 349022 - DNA, 228 bp, Pseudomonas aeruginosa
gtgctcaccctggtgctgatcttcctcggctacagcggcctgggcatcagtctgtggccgaacatcatcccgccctcgatatccatctgggccgccgccgcgccgccgcagagccaaggcttcgcactggtcggcgcgctgttcatcatccccttcatcctgatgtacaccgcctggagctattacgtgttccggggcaaggtgacccatgagcatggctatcactga

SEQ ID NO: 349023 - DNA, 1560 bp, Pseudomonas aeruginosa
atggcacggaacaaccctcggagcgaaatggcccaggcgcaggatctgcttctggtgctgaccgatgccaaaggcgtcattacctatgccagctcaagcttttgccacttggccggctacagcgaggcgcaactgctgggccagcccatagcgcgactgcgtcacgccgagatgcccggcggccccttcaaggacctctgggaaaccctcggccgcggccagtcctggatgggcatgctgaaaaaccgccgagccgatggcgaggcgttctgggtggatgcctatatcagccccatcctcgacaacggccaggttctggagtatcaggcgatttaccgtcgccctacggcggacgtcattgcccgcgccagcgaggtctatcgcgtgcgcgcgcaaggcaaacaaccggcagccctgcgaaagccaaacccagcactggctgagcgcctcagcctaagcgcctgcctggccttcctgcccttgatcacgctggccctggcgcaggcgccgctaattggcgggctcaccctgctactgtcgggcgccctgtgttgggccctgctgcgctggcagagccgagccttccgggagttggtggatagcagccaacgcctggtgcagcacccgatcaaacagctgatctacaccggacgggtggatgaggtcggccagttacaactcgccatgcgcctgctcgaggtgaaattgtccgccatggtggcgcgcatccatgacagcagcagccaggtcgccgaacatgccagccaggccaccagcctgatcggcaccagcaacgacgcctcccaggaacagcaacacgccctggccggcatttccgccgccgtggaggaattcaccgcgaccatccaggaagtagcgagcaacaccctcaacgccgccgagttggcgcagcaggcgcaacagctggccgatgctgggcgcctgcgcgtgggcctggcccatcacagcatcggtttgctggccgaaaccctgaacagctcggcccgcgcggtggcgaccctgactcagcaaagccaggcgatcggacgcattttggacgtgatccgcggcatcgccgaacagaccaacctgctcgcgctgaacgctgccatcgaggctgcgcgcgccggagagaatggccgcggcttcgccgtggtggccgatgaggtgcgctccctggcccagcgcacccagtcctccaccgatgagattcaggccatgatcgaggccttgcgcgagggaacctccgaggtggtgcgggcgatggagcaaggccagagccagtcgcagtccagcgttaccgaggtggatgccgccgccgcggccttggtcagcattctcgacaccatcggcgcgatcacccaactgagcgcgcaaatcgccagtgccagcgaccaacaaagcctggcggcggaagagatcaaccataagctgcatgccattcatgaactggccctgcagagctctgaccaactgcgcgataccttgcgcttcgccgcgcaggtgaccgcccaggcacaacgccaacaatcccttgttgggcatcttctgacggcgtaa

SEQ ID NO: 349024 - DNA, 1329 bp, Pseudomonas aeruginosa
atgaactacaagaaatcccggcagagccgcaccctggcgctggccctgttgacgctgggcgcgaccagcggcgtgcacgccgccgacgaggcggtgatccagcagtccttctacccctaccagaacgacaagccgagcttcgccggtctgagcgccggcatgaccatcaacaagggcaacgtcgcccagttcaaggagattctcgacccggccttctacggctttatcgagaaaggttgggcggagctgaaggtcggcgacaccacctccttcgacctgcaccccaactatgtcgaggctacccgccagcacatggacacggtcaaactcggcgcgaagcccggcgagatcagcggcgccgtggccggccggccgttcccccaggagccggacgcgaacgacccgcgcgccggcgagaagctcgcctggaactacaagtacggctacaactggggcgacagcgccgccatctcgccgttctactggaagttccgcgacatgaacacgggcaagttggaacgcaccatcaagttcgacttccacttcctcaacttcacccgccgggtcaaccaggagcccacgccggcgatcaccccaaacccctcgcagctgttccgcggcatctacgtcaaggtgcaggagccgtatgacgtacgcaacacccagctgttgatccaccgcgccgaagacgacctcaagcgtgacaactcctggctgtacctgggcttccagcgtcgcgtgcggcgcctggccaccggccaggtgaccgatgccttcctcggttccgacttgatgatcgaggacttcgagggctacaacgggcgtatttccgacatgcagtggagctacaagggcacccgcttcatgctgatgccgttctacaaccacaacgacctgacgctggacagcgaaacgcacaaggacagcgacggttaccaggtggtggcgttcggcggtcagggcggctgtttccccaacatcacctggcagctgcgcaaggtctacgaggtggaatcggtgccggtggacggcagccacccactgtccaagcgcgtgcactacatggatgcgcagaccttcaccgtgccgcgcaccgtgtcgtatgaccgcaagggcagcatgtggaagaccttcaccatcggccaggcccacccggatcaccacctgccgaagaacaagggctccggcgtgtcgatcgacgacagcttcacgatgatcgacatccaggccatgcactgcaccacagggcagttcaagggccaggtcgatccggatatgagcaagccggagatgttcagcgttcagcatatgcgcgctaccggtaactaa

SEQ ID NO: 349025 - DNA, 1899 bp, Pseudomonas aeruginosa
atgccgacaacaacaaaaatgggcctgcgacactggagtctggccctgctgggcggctcaagccttgctctgacgccactgacttcggtcatggccgaggaagaaatgcagttcaccggtttctacgagaatgccaccttcgttcgcgatagcgccggattgtcgaaattccgcaacaccgtgcaggtcaacgcggacaagaaattcggcaccctgggccagctgaacttcaacaacgtggccttccacggcacattccgcgctacctacgacggggtctacgacctcaacagcagcgagtacggcagtggcgccggcggcgcggtcaacctggagaacaacatcgccggcgcgggctcgaccgtgccgcacggcggtggcatccgtccgccaggcaccttcttcggcttcaacgacgcgcgcaaccccaacgaggggatgatcgtgctcggcgaaaacctgcacaaaacccgtggcggcgtggccttcggcgtgccggtacggccctgcgacaaggacagccgcggctgcatcgacgactacctggactacagcagcaacgacctgcgtttccccgagttcaacgaacggctggacttcatccgcgagctctacgtcgacttcgacaacgatctgcccaacggcgacatcctgagctggcgcctgggcaagcaacaggtgatctggggccgcaccgacctgttccgcgtgctcgacgtgatcaacccggtcgactactcgcgtaacaacatctatgacgagctggaagacatccgcattcccatgtggatcgccaaggccgactggcgcatgggcgccggcgaggtgttcgacgacctcaacctgtcgttcgtgtggaacttcgacaagttccgtccgcacaacctcggtcagtgcggccagcccaactcgatcctcgacgctggctgcttcttccgcggcatgaacaacctgtgggaaaacggcggcaccgtggccaacttcgccggcggcaacatcgccaccgacttcggccccggccagatcggtatccgcaaggcgcacatgccgtcctggagcctgtccaacagccagttcggcatcaagctggaaggcgtctatggcgatttcggcttctcgctgaacgccctgacctaccgctcgcaactgccctcgctgcgtggcggcatcccggcgcagaacgccttcaccggtgaaaccgcggtatggccgggcctgatcgccttcgatatccatttcccgcgggtcaacctgatcggcggttcgatggactactactcgcaagcgatcgacacggtgttccgcttcgaagtcgcgcacaccgagggcgaggagtttgccaacaccctgcaatcacggctgttctccgagtccgacgtcacccgttacgtgatcggtgcggacaagaacatcttcatccccttcctcaacccgggccgcgccttcctcttctccggccagctgttcggccagcacatccacgagcaccagcttgaggatcgcccactgggcaaggccggcatgccggactgggagcagaactggatcggcaccctgctggtgaaaggctggtggatgaacgaccgcctcagcccgcaaataatcgtcgcgcatgacttcaaggcccaggccacggccatcgcgccgagcgtggaatacctgttcagcgacaacttgaagatcgtcgccggcgccaacctcaaggtcggtcgcggcgctcgcgagttcgacgactgccgcagctgcaacccctgggaccccttcaccagctatggcctgccggagggcgccaccgccggtctgagcggctacgagccgctgggccgcttccgcgccggccccatcggcatggcgcagaaggaagacgaactgcaactgaccctgcgttacagcttctga

SEQ ID NO: 349026 - DNA, 2469 bp, Pseudomonas aeruginosa
atgccgatactgcatccgtttagccataagttggctcaggccaaggtctggctgttcgaccacccgcgcaccgtgctggcgatcatcgcggtgctgaccctgttcttcgccctgcgcattcccgggctgaaggtctacaccgacttctccgatctgctgccgcaggaacacccgtacatccagctgcacaacagcatcaaggacagcttcggcggcgccaacgtgctggtcatcggcgtggccttcgacaaaggcgacctgttcagcaacgagcgcctggccttgatcgatcgggtcacccaggcggtggacagcctacccggagtcaaccacaacctggtcagcagcctgacccaccgcaactcgcgcaaggtctggctgaccgaggtcggcagcatcaactccgagccttactaccaacccgagtttggccagctctccgccgcgcagttggacgcgatgaaagccgacgtggtggccaacccgcgggtctatggcccattggtgtcgccggacctgcaagtggcgctggtcaaggcgcaactgatcgaaggccagctcgactacgccaaaaccttcgcgcagatccaggcgctgcgcgaagccgagaagatcgacggggtgaccctctacgccaccggccagccggtgctggtgggctgggcctacacctacatgagccagattttgcagatattcatcttcaccgtgctgatcatgctggcgctgctggtaatgcatttccgcaaggcctatggcgtgctgatcccactcggcggggtaatgatatcgaccatctggggcctcggcatcatcagcctgctgggctacaacctcgaccccctgggcctggtgattcccttcctgatcgccgcccgggccatgagccacggcgtgcagctggtcgagcgttattacgccgaggtcaaactgctcggcgacggcccgctggccgcgcgcgccaccttcgacagcctgttccgccccggcaccctgggcattgtctcggacgccatcggcctgctgctgatcgccatcggctcaatcgccctgaacaccaagctgggcatctatgcctcgctgtgggcgaccacggtgatcttcagcgtgctgatcggcgtgccgctgctgctgtcgatcctgcccaagccgaagaacccggagatgcgcgagaccgcgctgcgccacatcggcgcgatctgtgcgcggacggtggccaacccgagcgccgcgcgcaaggcgctgggcctggctgcgctggccatcctcgccagcctgtgggcctcctcccaggtgcgcatcggcgactccgagcccggttcgccgatcctctacccggaacacgactacaacgtctcgtccaaggagatcaaccagcgcttccccggctcggaagagctgtacatcgtcgccgagcatgccgagaaaggcggaatcaagaaacccgaggtgctgcgcgccctgcaatcgctgcaaaaccacatgctcagcgacccctcggtcggcggcagcaagggcttgccggacctgatcacccaggtcaaccggctgatgcacaacgacgatccgcgctggctgcagattccccacgacgccaattacgtcggcgggctgatgttcacctacatggcctccagcccgatccccggggcgctcaacgagtacaccgacaccgacgaccgcgtcgccaacctggtgttctattacaaggatcgtcagggcgagaccatccgccgcgccatccacatggccaagcagtggatcgagcagcacggcgatgcagtgccggggctgagcatccgcctggctggcggtaccctcggcgtggccgcggcgatgaacgagtcggcattcgagaccaacctggtggtgctgccgctggtgttcctgctgatcttcaccttcgtcatgctgttctacacctcctggcatgccggcttgatgatgctcctggcgatggccttcgccaccgcgctgacctacgcctatatgggcctggccggcatgggtatcgacatcaacacggtgccggtgatcgccgtcggcattggcgtgggcattgactactcaatctacatgatggatcgcatccgcgaggaaatggtcaagtttggccgtctcaccgacgcggtgcgccaggccatcgccaccaccggcatggccatcagcttcaccgcactgaccctgatggccgggatcatcatgtgggtgatcctctcggacctgcgtttccagtccgatgccgccctgctgctgtgcgtgatgatcgtcatcaacgccatcgccgccatgttgctggtacccgcctgggtgctggtgttcaagccgaagttcatcaccggggcctatgccgacgcagacggcattctgcacaccgacgctgtcgtgcccgcctctaccgaatccctgccggtcgcgccccgcgtggcgaccggcgggctgccgcaaggggaacgccatccggcctga

SEQ ID NO: 349027 - DNA, 1023 bp, Pseudomonas aeruginosa
atgaaccataacaagcagtcgcacggcctgttgccgtgcgtcctgagccgcccggtacgctcggcactcgggatgtttctcctacccattgtgctcgccggctgcgaagccgaactcaacctggccggagtcgccgccgaaggcagcaaatccagccgccgcaccgattactaccaggctctcgccagcgtgccgcaggctacactgttggccggcaacaacggcgtgttgctgaccagccttgaccaggggcagagctggacgcgccaggtgatcgccaagggcgccagcctgatcgacctcgacgcctgcgccgacggcagtttcatcgccctgagcttcgacaaccgcctgtggcacagcgccgacctcggcctgagctggcgcgaacacgccctgccgaccgaggagcaaatgctgaccgccgcctgcgccccggatggcgcctggtgggtagccggcggcctgaccaccctgctcgttagccacgaccaaggcggcgactggacgcacaccagcctcgacgaagacgccatgctgaccaacctgcagttcatcgaccgcgaccatgcggtggccgtaggtgagttcggtatgctcttcgccagccaggacggcggcgccaactggcagctggccggcaccctgccggacgagttctacccgcacgccagctacttccgcagccccgaggagggctgggtcggtggcctcaacggctttatctaccacaccgcagatgccgggcagagctggcaacgccagagcacgtcgagcagcgcgccgatcttcggctttctagcgagtgacaacggcctgttcgccgtcggcgaccacagcagcgtgctgcaactggccggtgaacagtggcaaacgctgccgacgcccgatgcgccggtctacttgcgcgccatcaccgcggatagcgcgcaacgcctgatcgttgccggcggccgcggcctgctgctgaccctcgacaccgcgcccagcgctacgcccgccgttgccaccacgaccgactga

SEQ ID NO: 349028 - DNA, 1692 bp, Pseudomonas aeruginosa
atgcctatccgctataaacccgagatgcaatacgcagacttcaaggacctcaccagcctcatccacttccagagcacggaaggcaagatctggctgggcgagcagcgcatgctgctgttgcaggtttccgcgatggccaatttccgccgcgagatggtcaacaccctgggcatcgagcgggccaagggattcttcctgcgcatgggttaccagtccggactgaaggacgccgaactggcctggaagctgcgcccgaatgccagcgagtacgacatgttcctcgccggcccgcagctgcattcgctcaagggcctggtcaaggcccgccccaccgaggtcgatatcgacaaggaaagcggacgcttctacgtcgaggtggagtggatcgactccttcgaggtggaaatctgccagaccgagctggggctaatgcaagacccggtgtgctggactctgctcggctacgcctgcgcctattcctcggcgttcatgggccgggaaatcatcttcaaggaagtcagctgccgcggctgcggcggcgacaagtgccgggtcattggcaagccggccgaagagtgggacgacgttgccagcttcaaacagtatttcaagaacgaccccatcatcgaggaactctacgagttgcaatcgcaactggtgtcgctgcgtaccaacctcgacaaacaggaaggccagtactacggcatcggtcagaccccggcctaccagaccgtgcgcaatatgatggacaaggccgcacagggcaaagtctcggtgctgctgcttggcgagaccggggtcggcaaggaggtcatcgcgcgcagcgtgcacctgcgcagcaaacgcgccgccgagccctttgtcgcggtgaactgtgcggcgatcccgccggacctgatcgagtccgaattgttcggcgtggaaaaaggcgccttcaccggcgccactcatccacgcatgggccgcttcgagcgggccgacaagggcaccatcttccttgacgaggtgatcgaactcagcccgcgcgctcaggccagcctgctgcgcgtgctgcaagagggcgagctggagcgagttggcgacaaccgcacgcgcaagatcgacgtaagggttatcgccgccacccacgaggacctggccgaagcggtcaaggccgggcgttttcgcgccgacctgtactaccggctgaacgtcttcccggtggcgatcccggcgttgcgcgaacgccgcgaggacattccgctgctggttgagcacttcctgcagcgcttccacgaggagtacggcaaaagaaccctcggcctttcggacaaagccctggaggcctgcctgcattacagctggccgggcaatatccgcgaactggaaaacgtcatcgagcgcggcatcatcctcaccgaaccgaacgaaagcatcagcgtgccggcgctgtttccacggccgccgaaagaaacgtcgatcgacagcgagcgagtgtcatcggacggcgtgctgatccagccggacaatggccagggcagctggatcagccagttgctgggcagcggcctgagcctcgacgagatcgaggaaagcctgatgcgcgaagccatgcaacaggccaaccaaaacgtctccggtgccgcgcgcttgctcggcctaagccgaccggcactggcctatcggctgaagaaaatcggcatcgaaggctag

SEQ ID NO: 349029 - DNA, 270 bp, Pseudomonas aeruginosa
atgaaagacccagagattcccttcgatcagctgacccggtttgtccgggtgcgcagcgagccggatgccaggttcgtcgaattcgatttcgccattggtcatccggagctgttcgtcgagctggtactgccacgcgcagccttcgccacgttctgccagcgccagcgtgtggtgcagatggacgcggcgatgtgccaagcggtggatgaagacgcggccaagtggcgctacggcgatgtcggacgacgcgaggcaaacgaccgagagtaa

SEQ ID NO: 349030 - DNA, 1002 bp, Pseudomonas aeruginosa
atgagcgtagagatcaagaccaatacggtggaaaccctccgccacacctacggcaacctgcagcgccgtttcggtgacaagccggcgagccgctatcaggaagccagctacgacatcgaaccgactaccaacttccactaccggccgctgtgggacccgcagcgccaactcaacgaccccagccgtacggcgatccgcatggccgactggcacgcggtcaccgacccgcgccagtacttctacggtgcctacgtgcaggcccgggcgcgcatgcaggaagccgccgagcatgcctacggcttctgtgaaaaacgtggcctgttgagccgcctgcccgaggcgctgcagcacaagatcctgcgttgcctggtgccgctgcgccacgccgagatgggcgccaatatgaacaacagcggcattgccggcgactgcatcgccggcaccatgacccaactgcacatctatcaggccatggatcgtctgggcattggtcagtacctgtcacgcatcggcctgttgctcggcgagggcagcggcagtgcgctggaccaggccaaggcttactggatggatgatccgatctggcaaggcctgcggcgctacgtagaagacagcctggtgatcaaggactggttcgagctgaccctggcgcagaacctgctgatcgacggcatgagctacccgctgatgtaccagcgcttcgatcagcaactgggcgaagagggcgctggagacctgtcgatgctcaccgaattcatgcgcgactggtacgccgaaagcacccgctgggtcgacgccatgctcaaggtggtgctggccgaaagcgcggacaaccacgcgcagatccagacctgggtggatgcctgggaaccgcgcgcctatgccgcactgcaaccgttggccgaagcggccaccggcctggccgccctcgacgacgtgcgtgccgcgctggccgcccgcctgcacaaacttgggctgcgcagccccggagtaccagcatga

SEQ ID NO: 349031 - DNA, 273 bp, Pseudomonas aeruginosa
atgaaacaactggctttcatcgtattccaggacaacgacaacgcccgttacctggtggacgccatcatccaggacaacccccacgccgaggttcagtaccagcccgcgatgatccgcatccaggccgagcagcgcctggaaatccgccgcacgacagtggaggaaataatcggtcgcgagtgggacgtccaggaaatgctcatcgacgtaatcagcatcggcggcaacgtggccgaggacgacgacagcttcgtcctcgagtggaagaactag

SEQ ID NO: 349032 - DNA, 1554 bp, Pseudomonas aeruginosa
atgacaactcagaagaaaaaactcagcctgaaagacaagtaccagtacctgacacgcgacatggcctgggaaccgagctaccagaagaaggaagacatctttccctacgaacgctttgaggggatcaagatcaccgactgggacaagtgggaagacccgttccgcctgaccatggatgcttactggaagtatcaggccgagaaagagaagaagctgtacgccatcttcgacgccttcgcccagaacaacggccacctgaatatttccgatgcgcgctacgtcaacgccctgaagctgtttctgaccggtgtttcgccgctggaatacggcgcgtttcagggctatgccaaggttggccggcatttcagtggtgccggtgcgcgggtagcctgccagatgcagtcgattgacgagctgcgtcacgtgcagacccagctgcacgccatgagccactacaacaagcacttcaacggcctgcacgattttgcccacatgcacgaccggttgtggttcctctcggtgcctaagtcgttcttcgacgacgcgcgctcggctggcccgttcgagttcctcaccgccatctcgttctccttcgagtacgtgctgaccaacctgctgttcgtgccgttcatgtccggcgccgcctacaacggcgacatggccacggtcaccttcggcttctccgcgcagtcggacgaagcgcggcacatgaccctcggcttggaagtgatcaagttcatgctcgaacagcacgaagacaacgtgccgatcgtccagcgctggatcgacaagtggttctggcgcggttatcgcctgctcagtctggtcggcatgatgatggactacatgctgccgaacaaagtgatgtcctgggccgaagcctgggaggtgtattacgagcagaatggcggcgcgctgttcaaggaccttgagcgctacggcatccgcccgccgaagtaccaggaccaggccaccatcggcaagcaacacatcactcaccagatctgggcgaccttctaccagtactgccatgccaccaacttccacacttggattcccagccaggaagagcagcagtggctcgcggaaaagtacccggacagcttcgacaagtactaccgcccgcgtttcgaccactggcaggagcagcatgccaaaggccagcgcttctacaactacaccctgccgcagctgtgccaagtgtgccaagtgccggcgctgttcaccgagccggacgacccgaccaccctcagccaccggcagatcgagcacgagggcgagcgctatcacttctgctcggatggctgctgcgagatcttccagcacgagccggagaagtacatccaggcctggctgccggtgcaccagatctaccagggcaactgcgagggcggcgatgtgcagaccgtggtggagaagtactaccacctgaaaaacggggtggacaacctcgagtacgtcggctcgcccgagtacctgcgctggctggcctggaaaaaactcggcaccccggcagtgcccgccggtgcgggcaacacgcgcgacgccgcctga

SEQ ID NO: 349033 - DNA, 360 bp, Pseudomonas aeruginosa
atgactgttaacgcgatcagcgaataccgcgccacgccgcgcgacctgcaagccaatttccatggcatgcagatgctctatgtctactgggaaaaacacctgatgttctgctcgccgttcgcctttctggtcgccccggcgatgaccttcggcgcgttcctcgagcaggtgttcatggaggcgatcaaggcccatccagacagcgcgcgcatcgatttcagcgcggctgtgtggcagctcaatggccagccgttcactgccgatcccagtgccagcctggaagccaacggcatcgaccacaagagcctgctgcgcctgagcacgccaggcctgaacggcgtccagggttcgtgcagctga

SEQ ID NO: 349034 - DNA, 1062 bp, Pseudomonas aeruginosa
atgagttacaacgtcaccattgaaccgaccggcgaagtgatcgaagtggaggacggccagaccatcctccaggccgccctgcgccagggcgtctggctgccgttcgcctgcggccacggcacctgcgccacctgcaaggtgcaggtggtcgagggcgaagtggatatcggcgaagcctcgccgttcgccctgatggacatcgagcgcgacgagcgcaaggtgctggcctgctgcgccattccgctctccgacctggtgatcgaagccgacgtcgatgccgacccggacttcctcggccatccggtggaggattaccggggggtggtcagcgccctggttgacctgtcgccgaccatcaagggcctgcacatcaagctggatcggcccatgccgttccaggccgggcagtacgtcaacctggcattgccgggcatcgacggcacccgcgccttctcgctggccaacccgccgagccggaacgacgaagtcgagttgcacgtgcgcctggtcgagggcggtgcggccaccggctttatccacaaacaactgaaagtcggcgacgcggtggagctgtccgggccttatgggcagttcttcgtgcgcgattcgcaggccggcgacctgatcttcatcgccggcggctcgggcttatcgagcccgcagtcgatgatcctcgatctgcttgagcgcggcgatacgcggcagatcaccctgttccagggcgcgcgcaatgtcgccgagctgtacaaccgcgagctgttcgaggcgctggccgcgcagcacccgcagttcagctatgtgccggcgctcagccaggccaacgacgacccgacgtggcaaggcttcaagggcttcgtccacgacgccgccaaggcgcatttcgacggccgcttcggtgggcaaaaagcctacctgtgcggcccgccgccgatgatcgacgcggccatcaccaccctgatgcaaggccggctgttcgagcgtgacatctttatggagcgcttctacaccgccgccgatggggccggcgagagcagccgttcggccctgttcaagcgcatctga

SEQ ID NO: 349035 - DNA, 339 bp, Pseudomonas aeruginosa
atgaaccgtgccggttatgagattcgcgaaacggtcagcggccagacgttccgttgcctgcccgaccagtcggtgctcagtgcgatggagcaacagggcaagcgctgcgtgccagtcggttgccgcggcggcggctgcggcctgtgcaaggtgcgcgtgctgagcggcagctaccagtgccacaagatgagttgcagccatgtgccgccggaggcggccaagcagggcctggccctggcctgccaactgtttccccagactgacctgagcatcgaatgcctgcgccgccaaggcccgggcgaccacaacaacaagaaccagcaagaggtgtcgtcatga

SEQ ID NO: 349036 - DNA, 924 bp, Pseudomonas aeruginosa
atgaaaaaaggcgtaatgcgccccggccacgtccagcttcgcgtactgaacctggagagcgccttggcccactactgcgacctgctcggtctgatcgaaatggaccgcgacgagcaagggcgcgtctacctgaaggcctggaccgaggtcgacaaattctccgtggtgctgcgcgaggccgatcagccgggcatggatttcatggggttcaaggtgatcgacgaggactgcctgaaccgcctgacccaggatctgctcaattatggctgcctgatcgaaaccatccccgccggcgaactcaagggttgcggtcggcgggtgcgcttccaggcgccgtccggacactttttcgagctctacgccgacaaggagtacaccggcaaatgggggctggaggagatcaatccggaagcctggccgcgcaacctcaagggcatgcgcgcggtgcgcttcgaccactgcctgctgtatggcgacgagctgcaggcgacctatgcgctgttcaccgaggtgctcggtttctacctggccgaacaggtggtcgacgacaacggcacgcgcatcgcgcagttcctcagcctgtcgaccaaggcccacgacgtggccttcatccagcacacggagaagggccgcttccaccacgcctcgttctttctggaaacctgggaagacgtgctgcgcgcagccgacctgatttccatgaccgacacctcgatcgacatcggcccgacccgccacggcctgacccatggcaagaccatctacttcttcgacccctcgggtaaccgcaacgaggtgttctgcggtggcgattacaactaccaggaccacaagcccgtgacctggctggccaaggacctgggcaaggccattttttaccacgaccgggtgctcaacgaacgtttcctgaccgtgctcacctga

SEQ ID NO: 349037 - DNA, 1461 bp, Pseudomonas aeruginosa
atgaaagagatcaagcacttcattaacggtgccttcgtcggttcggccagcggtcgcaccttcgacgacatcaacccggccaacggccaggtgatcggccgcgtgcacgaggccggccgcgccgaggtcgatgccgcggtgcaggccgcacgtgccgcgctgagcgggccgtggggcgcgatgagcgtggccgagcgcgcggacattctgcaccgcgtggccgatggcatcaccgcgcgcttcgacgagttcctcgaggccgaatgcctggacaccggcaagccgaaatccttggcgtcgcatatcgatattccgcgcggcgcggccaacttcaaggtgttcgccgacctgctgaagaacgtgcccagcgaagccttcgagatggcgacgccggacggcagcggcgcgatcaactacgcggtgcgccgccccaagggggtgatcggggtgatcagcccgtggaatctgccgctgttgctgatgacctggaaggtcggcccggccctggcctgcggcaacaccgtggtggtcaagccctccgaggaaaccccgctgaccaccaccctgctcgccgaggtgatgcaggccgccggcgtgccggccggggtgtacaacgtggtgcatggtttcggtggcgattccgccggggccttcctcaccgagcacgcggatgtcgatgccttcaccttcacgggtgaaaccggcaccggcgagttgatcatgcgcgccgccgccaaaggcgtgcgccaggtctcgctggagctgggcggcaagaacgccggcatcgtcttcgccgactgcgacatggataaggccatcgaaggcacgctgcgctcggccttcgccaactgcggtcaggtgtgcctgggcaccgagcggctgtatgtcgagcgctcgattttcgaggagtttgtcgcccgcctgaaggccggtgccgagagcctggtgatcggcccgccggacgacccgaccagcaacttcggcccgctggttagcctcaagcaccgcgagaaggtgctgtcctactaccagcaagccgtcgccgacggcgccaccgtggtcaccggcggcggcgtgccgcagatgccggaggcattggcgggtggcgcctggatacaaccgaccatctggaccggcctggccgacgactcggcggtggtcaccgaggaaatcttcggtccgtgctgccatatccgtccgttcgacagcgaagccgaagctgtcgccctggccaacagtctgccctatggcctgtccgccaccctctggagcgacaacgtcagccgcgcgcaccgcgttgccggccagttggaggccggcatcgtctgggtcaacagttggttcctgcgcgatctgcgcaccgccttcggcggcagcaagcaatccgggatcggtcgggaagggggtgtgcactcgctggagttctacaccgaactgaaaaacatctgtgtgaagttgtga

SEQ ID NO: 349038 - DNA, 849 bp, Pseudomonas aeruginosa
atgagcgcaccccagaacagcccggaaatcggccgcgaaatcctcgccgccggctatcgcaccaacctgcacgacagcggcgaaggcttcccgctgatgatgattcacggctccggccccggtgtcaccgcctgggccaactggcgcctggtgatgcccgagctggccaagcgccgccgggtgatcgccccggacatgctgggcttcggctacagcgaacgcccggtcgatggtcagtaccaccaacagcgctgggttgaacacgcgcttggcgtgctcgatgccctgggcatcgaacaggccgacctggtcggtaactccttcggtggcggcctggccctggccctggccatccgccatcccgagcgcgtgcgccggctggtgctgatgggcagcgccggggttagctttccgatcaccccgggcctggatgatgtgtggggctatgagccgtccttcgccgccatgcgccggctgatggacaccttcgcctacgaccgcagcctggtcaccgacgagttggctgagctgcgttaccaggccagcatccgccccggttttcaggagtcgttcgcgcagatgttccccgcaccgcgccagcgctgggtcgatggcctggccagcagcgaggcgcagatccgcgccttgccccacgaaaccctggtgatccatggccgcgaggatcaggtgatccccctggccgcttcgctgacgctggccgagtggatcgtccgcgcgcaattgcacgtgttcggccagtgcggccactggacgcagatcgaacacgccgcccgtttcgcccgcctggtcgaggatttcctcgccgaagccgacgcccgccattcctga

SEQ ID NO: 349039 - DNA, 786 bp, Pseudomonas aeruginosa
atggaccagataatgatcaacgcgctcggcgacgagctgtaccaggccatgctcaaccgcgaggcgatcagcccgctgaccgagcgtggcttcgacatcagcgtcgacgacgcctaccacatctcgctgcgcatgctcgaacgacgcctggcggccggcgagaagatcatcggcaagaagatcggcgtgaccagcaaggcggtgcaaaacatgctgggcgtgcaccagccggacttcggttacctgaccgacgccatggtgttcaacagcggcgaagcggtgccgatcagccagcgactgatgcagcccaaagccgagggcgagatcgccttcatcctcaagaaggacctgatcggccccggcgtgaccaacgccgacgtactggccgccaccgagtgcgtgatgccctgtttcgagatcgtcgattcgcgcatccgcgactggaaaatcaagatccaggacaccgtggcggacaacgcctcctgcggcctgttcgtgctcggcgaccaggcggtatcgccgcgccaggtcgacctggtcacctgcggcatggtggtggaaaagaacggccacatcatcagcaccggggccggcgctgcggcgctcggttcgccggtcaactgcgtggcctggctggccaacaccctgggccgtttcggcatcgcgctgaaagccggtgaggtgatcctgtccggttcgctggtgccgttggagccggtcaaggccggcgacgtgatgcgcgtcgacatcggcggtatcggcagcgcctcggtgcgcttcacctaa

SEQ ID NO: 349040 - DNA, 939 bp, Pseudomonas aeruginosa
atgaaccagaaactcaaagtcgcgatcatcggtccgggcaatatcggcaccgacctgatgatcaaagtgctgcgcaacgccaagtacctggaaatgggcgccatggtcggcatcgacgccgcctccgacggtctggcccgcgcccagcgcatgggcgtggcgaccacccatgccggcgtcgaagggctgatcaagctgcccgaattcgccgacatcgatttcgtcttcgacgccacttcggccagtgcccacgtgcagaacgaggcgctgctgcgccaggccaaaccgggcatccgcctgatcgacctgaccccggcggccatcggcccgtactgcgtgccggtggtcaacctggaggagcacctcggcaagctcaacgtcaacatggtcacctgcggcggccaggcgaccattccgatggtcgccgcggtctcccgcgtggccaaggtccattacgccgagatcgtcgcctcgatcagcagcaagtccgccggtcccggcacccgcgccaacatcgacgagttcaccgagaccaccagcaaagccatcgaagtgatcggcggtgcggccaagggcaaggcgatcatcatcatgaacccggctgagccgccgctgatcatgcgcgacaccgtgtatgtgctgtccgccgccgccgatgaggccgccgtcgcggcctcggtggaggaaatggttcaggcggtgcaggcctacgtgcccggctatcgcctgaagcagcaggtgcagttcgacgtgatccccgagtccgcgccgctgaacatccccggcctcggccggttcagcgggttgaagacctcggtgttcctcgaagtcgaaggcgccgcccattacctgccggcctacgctggcaacctcgacatcatgacctccgccgcgctggccactgccgagcgcatggcccagtcgatgctcaaggcctga

SEQ ID NO: 349041 - DNA, 1035 bp, Pseudomonas aeruginosa
atgaccttcaaccccggcaagaaactctatatctccgacgtcaccctgcgcgacggcagccacgcgatccgccaccagtactcgatccagaacgtgcaggacatcgcccgcgccctggaccaggccaaggtcgactccatcgaggtggcccacggcgacggcctgcaaggctccagcttcaactacggcttcggcgcgcacaccgacctggagtggatcgaggcggtcaacgacgtgatcagccacgccaaaatcgccaccctgctgctgcccggtatcggcacggtgcacgacctcaaggcggcctacaacgccggcgcgcgggtggtccgcgtggccacccattgcaccgaggcggatgtctccaagcagcacatcgaatacgcccgtgaactgggcatggacaccgtcggctttttgatgatgagccatatgatcgcccccgagcatctggccaagcaggccaagctgatggagaactatggcgcgacctgcatctacgtggtcgattccggtggtgcgctgagcatgcaggacgtgcgcgagcgcttccgcgcggtcaaggccgtgctcaagccggaaacccagaccggcatgcacgcccaccacaacctgtcccttggcgtggccaactccatcgtcgcggtggaggagggctgcgaccgcatcgacgccagtctcgccggcatgggcgccggtgccggtaacgcgccgctggaggtgttcatcgccgccgccgaacgcctcggctgggagcacggcaccgacctctacaccctgatggacgccgccgacgacatcgtccggccgctgcaagaccgtccggtgcgggtcgaccgcgaaaccctggccctcggctacgccggggtctactccagcttcctccgtcattccgaagtggccgcgcagaaatacggcctcaaggccgtggacatcctcgtcgaactgggcaaacggcgcatggtcggtggccaggaagacatgatcgtcgacgtcgccctcgacctattggccgcccgtaaggagcgcaactga

SEQ ID NO: 349042 - DNA, 795 bp, Pseudomonas aeruginosa
atgaaccgtaccctgacccgcgaacaggtgctggccctggccgagcacatcgaacacgccgagctgcatgcgcatgacatcagcaaggtgaccaacgattacccggacatgaccttcgccgacgcctacgacgtgcagtgggaaatccgccggcgcaaggaggcccgcggcaacaagatcgtcggcttgaagatgggcctgacctcctgggcgaagatggcacagatgggcgtggaaacgccgatatacggcttcctcgccgactacttcagcgtcgccgacggcggcgtggtggattgcgccaaactgatccacccgaagatcgaggcggagatcagcttcgtcaccaaagccccgctgcacggtccgggctgccatatcggccaagtgctggcggccaccgacttcgtcgtgccgacggtggaagtgatcgattcgcgctacgagaacttcaagtttgacttgatcagcgtggtcgccgacaacgcttcctcgacccgtttcattaccggcgggcagatggccaatgtggccgacgtggacctgcacaccctcggcgtggtgatggagaagaacggcgaagtggtggagctcggtgccggtgccgcagtgcttggccatcctgcttccagcgtggcgatgctggccaacctgctggccgaacgtggtgaacatatcccggcgggcagtttcatcatgactggcggcatcaccgctgcggtaccggtggggccaggcgacaacatcacggtgcgctatcagggcctcggctcggtgagtgcacgtttcatctaa

SEQ ID NO: 349043 - DNA, 192 bp, Pseudomonas aeruginosa
atgccgattgctcagctttacatcatcgaaggtcgtaccgacgagcagaaggaaaccttgatccgccaggtcagcgaagcaatggcgaactcgctggatgcacctctcgagcgggtgcgcgtgatcattaccgaaatgccgaagaatcacttcggcatcggtggtgagccggcaagcaaggtcaggcgctag

SEQ ID NO: 349044 - DNA, 534 bp, Pseudomonas aeruginosa
atgacgcgagagtgtcacgtacggttctgcgagcggctgcgggggcagttcccgcggccgactcaccactttggcatgaaggcccacatcggcgtcgatgacgaatcaggcctggtgcatagcgttgtaggtacggcggccaacgtggcggacgtcacccaggtcgacaagttgctgcatggcgaggaaaacgttgtctgcgccgatgcgggttataccggcgtcgagaagcgtgccgagcatgatggccgcgaagtgatttggcaggtggcagcacggcgcagcacttacaaaaagccgggcaagagcagcgcgctgtacaaagccagacgcaagatcgagaaagccaaggctcaggtacgggccaaggttgagcacccgtttcgggtgatcaagcggcagttcggttatgtgaagacgcgcttccgtggcttggccaagaatactgcgcaactggtgacgctgttcgcgctgtcgaacctgtggatggcacgccgacatttgctgaccaatgcaggagaggtgcgcctgtaa

SEQ ID NO: 349045 - DNA, 462 bp, Pseudomonas aeruginosa
atgatcgaacgtagtaccaacggtaatcgccagaagggctttaccctgatcgaactggccattgtgctaggggtcatcgcaatcctgactgccttcttcctgccgggcatgctcaaggcgcgtgaagactcgaagctgagcacagcgatcactcagctgcagaaggacttccccggggctatcgcccgccaggtgagccgcaccaacacctgcagcacgaccaccatcactgcggccaagctgaaggaacgcggtctgcctgatctgactgtctggaacactgcctggaccgttgatgctgtcaccagcaaccaggtgaccatcagctacacaatcgacagcaccgataccagtgccgctgccgacctcgccgatgctctgaaccagagcaacaacatcgtgaagaactccgcaacggcgaccggtaacaccaaagtgaccgtggcctaccgctgcaactaa

SEQ ID NO: 349046 - DNA, 132 bp, Pseudomonas aeruginosa
ttgatcctcgtctattccgcgtttttgcattattcgaagaaactgcgtgtcagctttccaataaaggccaacgtgctctattgcagtttctgggatgttttttctgtcagcagaaaattggctgtgatatga

SEQ ID NO: 349047 - DNA, 900 bp, Pseudomonas aeruginosa
atgatctcatataaagatcttctggaagaaaccaatgaatacttcacaaaagtaaaacaatacgcaagacaacaaatagaccagaagatatgggactcgataaccagcactgatcttgataattggctatccaacttcaagtcacctgaagaaaagctgcttagcgccatacttctcgacgcatttattccccgctcggccgcgcaaacaacttcagttctaacaagcgcaatagaaagagcactaccacaagcaatctattcaaacccacaagaagtttttgaaggaactaattttcttgaaaagtttaaatcaaaaaacatatctaacgacataagaattgttccagttattcgcaatattgacccacctaccaaaagtggtccatccatagccaggatgtttaaacgccagctaggcataaatgagaagtacatgatctggccctggcttatagatgaaaaaataaaagaaggagtagaaacatttgtcttcattgatgatgtactcgcaactggccagcaggcatcagaattttttgaaagtcacaaaatagaccaatacagtgaagtgacattttcctacataccgctactagcacattctcgcggattagagcgaataaaaagagatttccccaatataaaaatatgcgcagtagaacaaatcacccccgaagactctttattcaataacgagaaattcaaaaaaatatccgatctagaacatctatatatttcagtcgccaaaaaacatcaaagcgaaagattcttaaagaaaatggctaaaggatatgacgatctagcgctaactttttcctactatcatgcaacaccaaacgcgacccttcctctgtactggtatgaaagcgacgttttcaatcccttggtgaagcgatga

SEQ ID NO: 349048 - DNA, 1470 bp, Pseudomonas aeruginosa
atggctagaaatcatttaaggagtaagacagggcaaggccgttacgagtcaaaggcgcggcgagtcctcattcctgagttccgcttactacgcatcaacttcctcgaaacacataatgacggcaacccgaaaggcttgccagattatgagttttcaagtgcagaggatagttatctcccaaatttcccggtgcttattcaaggccatggcgagccgtgggccatcggaaacctttacctgaccaccaagctacagcgtgaggccgggtatgagtcgagaacatttcgtggcattgccgatcatctactggactatctgcgctttctggaagatgaaggcatggattatatgcatttcccgaagaatgatcggctcaaggttacataccgctacaggcagcgcttgattgattttgtgactgccggcctgctttctgcgagtacggccagcgccagaatcaatgcggtggttaacttctatcgtagaatcatcaactggaacctcgtgagcgatgcaaacatcgagggtgtcgcatttacagaaataaaaaagtacatcagcgtgacctcgaattatggtatcccgaggaatttaatggtcaactcccacaatctagctattgcgaacacaaaaaaacaatctcaggccgaatatatcaatgatggcggcgatttgcgcccgctgaccgtaagcgagcaatcatatatgttgcaagcgctgcttgaatcctcccgcgaataccagctcatgttctactttgccttattcacaggtgcacgtgttcagactatcgggactctgcgtatcaaacaccttctaggtggtctggacagcaacggctatcttcgactccctatcggggccagcaccctagttgatacaaagaacggtaagcgcatgacgctgcttgtccctggctgggtcgtgcaggacatgctggtctactgccgcagcgcggaagccaaaaagcgccgcgctcgctcgtactatggagatactgaggataactatgtatttctaagcaaaaatggggttccctattacactagcaaaaaagaaattctggacaggcgcgatagccgaatcagtgtaggcgcggggatggcagacagagctagtgaagttagcattcaggatggagcggcactaagaacgcatatccagcagatacttttgccgcgcattcaccgaggcaatccagagttccaatattttactttccatgacttacgagcgacattcggaatgaatttgctcgaaagtcaattgcagcacatgggtgatcagagcatcactgcggcccttgagtatgtgcagcagcgaatggggcacagcaacaaagaaaccacgatgcagtatttgagttacaagtcgcgcctgcagtggaaaaacagtgtccagcatgaattcgaaactcagctattccggcatgtgaacacttccgcgaacgcaggcgcaaccgtatggtaa

SEQ ID NO: 349049 - DNA, 1956 bp, Pseudomonas aeruginosa
atggtaagtgatttagtccagcgttccgtcgtgatcattgatgcgaaagataaaaatgtcgagataattcatcctcagctgactgtcttaatgttcgataacaaaagtggcgctggcaagcgccacttggatttgggtgctttgtgctatgtacgtcggggcagaggtacacctcaaaaaatgggatgccctgttgacctgctttctattgatcattcgcgaatccctgtggcgcaggggctaattgagcatctgaggggcagcgccagtatcgctacggcaactcaagtttttcaagcgattagctgtttttttgattggattgatgatcaaccgcggcgctacttttttgatgacgtggctgccatgcaaaaaggctacggcgactatacgcagcacttgctacatcgcatgaatagttcaggcgtcaatgggaagcccataaaaaaaacaaccgcgtcgcagtatcaagcaggcgcccgaaaagttttaatgctgacaaccggcctgagcgaacccgaggttaaaggaattgctacccatatatctcaaaaagacggtcagtctcgccatataaacctagcgctgccaaatgccgatgagcaagccaggacgtttgcagtgctggtcaattttattgatgaagcacatcgaattttggttcaaggaggagcttttcctctgtgcctcgcctctccaaacggcgagtcggtatatctatattcagagcaagtggatacaaagaaagccaaagccgcgaatttcagcctggcaccttttttggccaactcccctacgtttccaacgtggggcgagattaaggcgcactttggtcttgagggtggcagtgcagccacccaaaaacaaagagcgacttatgattacagaaggcgaatttatttaagcaataatgacaacctgcgaagttgcctcaggcaaaggattgggagtcacgctgtagcggctggaatgctcgccttcatcgcggcaacatcatgcaatttcagtgtcgctaaaaaccttgaagtcgatttacttgagattgtacccacatcacagggcaatcgtctctctggaaccaagggtcgggcgagaggaaagaaagtttctccagagtttggagcacggttcgcacctgtgttcaagaaataccttgatttacgtaagtgggtcttgaacggtgccgagagtacgctggttttcccatttttcagcccgcagtacggcttcgtttcattaacaggccaccagattaatagaactaaaatactattcaataaagcgcttcctcatacgtcctgggtgactccgacccaatggcggaaaggcgtcagttatcagtacgtcaagctcagcggcggcgacctggcgcttacggcggaaaaactgggcaatacggaagcgacgttgcggcaaagctacagccgcccggctctggaagacttcgcagcggaaatgacagttttctttgagttgatgcacaaagcggcgattgatcgcacgcgctctgtagagcacattccagtgcgtattgtggacgaaataaggcttgatgccgtgacgggtattgggtcgtgcgaaaaggcagctgaaaccgctcctaggcgcgcacagggcttcactgcccaagctccggcgcccgcgtgtggtgacccggaaacttgcctgttttgtgagttctatgccgtccatgcagacgaacaggatattcgccgtctgctgtcgttgcgctatttaatcgaagccattaagcacaagcagccaattgatcattggcaaactaaattcagtccgactctccatcgcattgacgaagtgctgtcggcgatacaagacgctgatggccgaatcaagccgactgtcacccgagtgcgcgatgaagtcgcatccggtgcgttcgatgcgttctggtctatccatttcgacaccttggttactgtaggagcggtgacgtga

SEQ ID NO: 349050 - DNA, 2013 bp, Pseudomonas aeruginosa
gtgagtattattgcccatctccaattcagtcaggtgcaagaccatcaactgccagatcgctgcaatagtgcatcgcagtatctgaatgttgacgataacttcgttatctcccgtacagcgcagggtgtgatcggctccatttatggggatgatgaatggaatgtaaaaatgtatgacgcggcaggaatctgcgtctacaacttctctgcctggaccgagggtatcactacgccgctggtgacagtaatcgccggagaaatgaaaaaaattcaaatagctcgcatgtatttgtttcaaaagccgcgcaagcctaattcgctcaggctaggagatcttaacaagctggcccgcctagcacttaacaacaatctgcccctgagtgatctgttcgatgatgcaaacctcaatcgactgctgctgcccagctttgcggagctagatagaaatccgatgcgaggcattctgcaattacttaaagagctatttgatatacgggtaaagcaccctgactttaagttcgcaccaagcgattatacaatcattgagtgcatgcaggcgctctacaataaacatcctaagcgccaacaacatgacccacaacaaaccaagctaattccgtcccgcctgtatgcggcgcttattgccgcgctcaacttagagctagacgattttaatgctattgctgagtcgatagccgagctttacaagcagaaaaacgaaaacacgctatttggaatccccgaatgtaggtctcgttggtacaagaatccgattgtctggggcgatgccattcagcagcacggattggcctcggcctttgaaagccgatccattgaaaattggattgatttgaaagcctatcttggtgagcttcaaactgccgccaaatactggattcattttttcaccggaatgcggtcaaatgaagcgagacacctacctgccgactcctatacgacgataaaggtgaatggtgccgacgttcacatcttacgcggatatacgtcaaaaatcgcgggtcaaaatcataccgaaacattctggatgactgctggcatcattgagaaaggtatcgccgccgccctgcatatcggaaagatcgccgcacttataaacaattttgacgatagcgatccttctcaatacccactattcccttcacttgtaaagcctagaaagaaagaaataagagtatttgcaggcggacctgtcatcagtcaatctggccgctctgtaagtcagcagcgactgcttgcgcgatggcctgacttaattattcaagaggcggatatacgcgaactggaacagttcgatggctttcgggattggcgaaacgatcctgaagttactgccggagtggtttggcccctgggaactcaccagtgcaggcgctccctagcggtatattgtgcgcgctcgggcttggtttccgtcggttcgctggggctgcaatttaagcatttgacggaggtaatggcttcgtattatcgaaagggtagcgcctttgcagttaattttctgaacacagaggatgctaagaatctgattgactcaatggagtacgagcgccaaaaagcgcagtacatcgactacgaagccaatgttatcaacacaacgagtcgcttgtggggcggtgaaggcaatcgcattcaggtggcacgtgataaaggccagccattgattattaccaccgacagggcgatgactgaaaggaaatttctcaagggcgagttggcttataagagcggcccgattggtggctgcacgaacctcgaaccctgcgataggatttcgttcaccagcatcttcgcctgtatcgactgcgagaaatccattctcgatgatgaccgcagcctgaagaaaatcaaacgtggcctgaataacctgaggcgcgaacaggcattttacgttgcggagaatgcacagtacatgcaacttgaatccgagatcgcggcaatctacgaaaagctagaaaaacggggcttgcgaaagaagatggaggcgcttgcatga

SEQ ID NO: 349051 - DNA, 1302 bp, Pseudomonas aeruginosa
gtgtccagcatgaagagtatcgccagtcatatcgaagccagcgtgattgcccaggcactggatcagtcagtgaatgccgttttgcttaccgatgcacacgagggcgagggtgggcaccgtatcgtatatgccaatgccgcatttttgcgcatgactggctatggcgaagaagaaattctgggacaaaacccgcgcatccttcaggggcctgatacttgcggcgaggtcatcaggcgccttcgtcagtgcctggcggacggcacattctttcagggttcgaccatcaactatcgcaaggacggtcgcccgtacgttgtcgagtggagtgtttcgcctgtgcgcggtgcgtccggtgagatcactcattttctatcgcttcagcaggacatcagtggcctgatcgccgcacagaaggccacacagctgttcgcccgtgtactaaacgctacggatgatggtgtcatcatcacggacagtcgcggcaccattgagtttgttaacaagggttttgaaaaaatcaccggatatggcctgaccgaggtactcggtcgcaatcccagcatgctcaagtccggggagcagaatgccgatttctacacagagatgtggaacaccctgaagcaggggcattcatacaaaggcacctttgtgaaccggggcaagaatgaccagctgatctactgcgacgagaccatcactccgcttaccgatgaaaacgataccatcacccattacgtcagcatctttcgcgacctgaccacaagggttctggaagaaaagatgctccgcgagatggtgcgttttgatggtctgactggggcgctgacccggacggctggagagctggcgctggagaatgcctttgtgcagtcgcgcggcagcaaactgcccatgtcgattgccctggcggatatcgatcacttcaagcaggtcaacgatcagtggggccacagcacgggtgatgtggtactcaaaacggtttcgggaaatttgattgccgcgctcagggccaatgacagtgtcattcgctggggcggtgaggagttcttactgatctttggcggctgcgatctgagtcatgccctgctgctggccgagcgctgtcgccaggctgtagcggacagccagcacgagaatgtcggagttgtcacgttatcgattggtctgggcgagctgcagccggatgaggcgctggcggatctgatcgagcgtgttgaccaggccctttatcgggcgaaaaagactggccgtaatcagacgcaggtatcaaccgccgaagagccgcctgcagtgggaatatag

SEQ ID NO: 349052 - DNA, 300 bp, Pseudomonas aeruginosa
atggaacaggccgaatctgtcactgatatcttttgcgacgtttgtggcaacagcatgcatgttgaagggtatgggttgcaattcggaacccttcgcgccagttggggactcggctcggctcatgatggcgagtgttatgaagtccacctgtgcgaactctgctttttcaggacgcttgggggcctgaaacgtgagcgaatggtgaacaccatgttcagtgacgcggacaaagacttaagcagttttgggtgcgttgctcgcgacgatttttccaaagacgggggcaattcgcccccttga

SEQ ID NO: 349053 - DNA, 378 bp, Pseudomonas aeruginosa
atgaacgcaattatcttctacaccaacgaagacgggcgcagccagatcaagctgcgagccaaggatcggacggtttggctctcgcagcgtgaaatggcggagctgttcgacgtaagcaccgataacgtcagcctgcaactgaagaatatctttgatgatggcgagttgagccgcgaggcaactaccgaggattcctcggtagttcaaaccgagggcgcccgccaagtacagcgtaaggtcacgctctacaacctggatgccactctggccgtgggttaccgggtgcgatcaccgcgtggggggccgttccgtcgctgggcctccacggtactagggagtatctgctcaagggctttgtgctggacgacgaacgcctga

SEQ ID NO: 349054 - DNA, 1173 bp, Pseudomonas aeruginosa
atgaccgttgcgacttttccaagtctttctgacctcgcacagcaactccgcagtgagttggagcaaaagaagtttgtactgctctatgcatataacggcaccggcaagacgcggctatcagtagcattcaaggacttgggcaaaaggccagttcagctggctcctctgctaacagaagcgggcgagcctatagaggcagaagatgaaaccgccgtaggggttgaaggcattcaaggcgacacgctctactttaacgccttcactgaagacctattccactgggacaacgacctgcaaaacgaccgcgagcgggtgctgaagatcaaccgggactcgctcttcttcgctgggttgggcgagctggagatggacaaccgcatccgtccgttgctgaatcgctacgccggcttcgatttccgtatcgacaccgatgagtgggaggtgagcttctcacgtgaagtggagatcgacagtaagagagaaattgcagaagacatcaaggtctcgcggggtgaagagaacattttcatctggtgttttttcctcgccattgtgcaacttgcagtcgatggtgccgaggcttacaagtgggtgaagtatgtctacatcgatgatccgatttcatcgctggacgaaaacaatgccgtgatggttgcgcaccatttggctcagacgcttgcggcttcgccacaacaggtgaaggcggtgatctccactcaccatgtgttgttcttcaatgttttgtgcaacgagttgaggaaatctcgcaaatatttcctgacccgcgatgcacgatccggcggctacctgctttccgagacggatagcacgccgtttctctatcacttgtcttcgctggttgaattgcatcaggccatgcagtccggtgcgctttacacgcatcacttcaacgtgctccgccgagtgatggagcagaccgcttgtttcttcggttacgccaagtgggaagagtgcataaagcctgatccagaagcggatgatcccaaccagaccggctacaagcgggtaatcgacctgatgagccacggtgactattcgctgtatgaaccgagagaaatgttgccggagaacaaggagtatctcagcaaggcgctgcggcaattcatcagcgcacatcccttcagtcaggcgctgtttggcggtgccgcatga

SEQ ID NO: 349055 - DNA, 714 bp, Pseudomonas aeruginosa
atggcggctggctgcttcgggggcttgccttgggcagggctgcagcttaggttgatgacattgggcgaaaccctccccctgttccgctttcctgagttccgtagtcagccagaatgggacgtgctgcgaattgctgagcttaagccctttatcacgagtggctcgcgtggctgggctgcctactacgtgaatcacggttcgctgttcgtgagaatcacgaatctttcgagagattcgatttcactggacctgactgactctaaattcgtgaacttgccatctggggcgagcgagggagtgcgtacccaactcagacctcatgacattctgatatctatcactgccgatattgggataatcggatacgtcgataacagtgttccatctcctgcttacattaatcagcacatcgctctggtgcgatttgaaaatgccaatgtttgtagcaaatttgttgcctatttcttggcctctgacgatgctcagcgccgttttcgttcatccactgataacggaacgaaggccggaatgaacctagtcagcgttcaaaacactccactgttgctcccaacgcttctagagcagcaacgaatcgcttcctttttttccagtctcgacagtcaaatatctgccgaagcccaaaagcttatcgtgctgaaaactcacagaaagggactcatgcagcgtctattcccctcaccagaggagctttag

SEQ ID NO: 349056 - DNA, 9459 bp, Pseudomonas aeruginosa; identical to SEQ ID NO: 341670

SEQ ID NO: 349057 - DNA, 351 bp, Pseudomonas aeruginosa; identical to SEQ ID NO: 146911

SEQ ID NO: 349058 - DNA, 561 bp, Pseudomonas aeruginosa; identical to SEQ ID NO: 15275

SEQ ID NO: 349059 - DNA, 2967 bp, Pseudomonas aeruginosa; identical to SEQ ID NO: 59353

SEQ ID NO: 349060 - DNA, 1164 bp, Pseudomonas aeruginosa
ttgaaaatcgccgtcagcaataccggctcgcccaactggaacagcttgctcgactctctggagtcctactcggccacgaccgagattccgttggacgccaaagtcttcgcccgtgatctgttcaacaggcctattcagaaactgccgtctccaacgctggaggcggtacaaatcctgcgaaaagccatctgtaccagtgttcttcaggaagagcctctggcgttccaacagcgtgcagagaggcagatggacgctgtccaaaaggtccagtcgcaaatcaaggatctgggtgacaacctgaccgcggcgaacatgctcaagctggctgatcttgcagagcaaggccggattcaaatcctagcgagtcgtgagtggtttgaatcggaaatcaagacctatgcggccgaggttcagcactggcgagatttcttcgcagattggcagcgcctggcggctcctgtggagcaggccaaggagaaggccaagtctaagggcaaagagcaactcgtgcaggtggtggagcctgttcccgaatctgaggtggtgaaggagttgcgaagtgagctcgcggatgccgagcaccgtaaccagcatctcgagcaagagctgaaggatgcgaagagcgaggctcatcgccttcgccaggtagcggatgcccggccacttcccactcaacagttcgcccctgtaatcgagccatctctactgcgccgtattgcaactcgcaagggcatcactccggtcgacgtccttgcgtacctgcaggtgacttccggtgatcgcgttgagattctggagtcagcgtggaagtcggcgaaggcgtcggagaagtttgcctactccgagcgcatgctggatctgctggacacgctggtgaacccctacttcgactccctggctgcgggcaacccggactctgtgtcacgcgaactccttggcggcgcctatgtcgccaaggagtcggatgcgaccagcaattgcggcaagatgcgcgctcagcgtgagttcagctaccaaggccagcggatgtacttcgagcgtcatctgcgggttggatctggcattggcaaccaggtgtgcatgcgcatttactttcagatcattgattcgaagatcgtcattgcgtacgccggagagcacctggagattgccagcacgaattga

SEQ ID NO: 349061 - DNA, 861 bp, Pseudomonas aeruginosa; identical to SEQ ID NO: 19455

SEQ ID NO: 349062 - DNA, 1680 bp, Pseudomonas aeruginosa; identical to SEQ ID NO: 10332

SEQ ID NO: 349063 - DNA, 3552 bp, Pseudomonas aeruginosa
atgacgatcaccgtcgatgatgtaaagctgctgaaatcccagcgcctcaccgatgaggacgacggcggcggccgtgccaccgggcaagccgtggtggatcgcgagatcaacaacctgtttcccgatatctcgcgcctggaccggaccatcggccggatcaacctgcgcaaggccttcgccggcatcagttcgaatagcgccgagccgtacctgggcgctcatgccatcgtcacgcgggcgccggccgatccgcgtgtctcggtgctgctgttcaacaccggcagccagaccgacgagcgccgcgacgcgcgcaacgccatcgagtccttcgtggtgccggccgtgtctgcctcgttcgaactgctgggcaaccagttgcagggccagcgcgccatcgcttgcgtgcagcgcgaagaacagcggctgcccgagatcggcgaggtctatcagttggtgttcgagtcgcgctcgcagtatgtccgcatcaccgacgtcgaggcgcggctcgaacagttcgcccacgactacggcaacggcaacttcgtgaacttcacccggcgccggctggacctgtcgatcagcgcgccgctgggcgcgaccttccccggcggccaggtgacgccaggcggcaccaccagcccgaaaagccaggtgctcagcacccaggtcgccgatgccgcgcggtactacggcatcagccccctggccgaggctgtcagccgcggcgcgctgagcctgcgggtcaagtcggtctattcccaactggtgcccagtaccacccgggaaaacgcgctggtcgaccaactggccggctaccagcggcgcctgttcgctgcggccgggccggcgcggacggtcaacctgaatgtcgcgaacataggcagcggcaggtcgcggacgttcctcggcaccggctgcgcgccgggttcgctgtcgctgagcgccggcggcggtgtgttcgccgacgaccgcaagggaggcctgcgctacatcagcggttcgaactggattgccagcggtaccgtcgactacgagagcggcgcaatcgagatggcggcctccggcagcggctggagcgggacagcgagcgccacctaccagcctgccgcggcggcgacgggcgaagcggtgaccggggagatccctatcgaactgggcaaccgcggcttcgtctacaccctgtcgctgtccgaagcgccgccccagccgggcaccctggtggtctcgttcctcgccctgggcaaatggcaggagatccgcgaccagggcaacggcgaattggccggggaaggcaccggcacggtggacttcgcgaccggctcggtatccatcaccctgagcgcgctgccggacgtggggagttcgctgatctacgcctacgtcgggcagaacgatgcggcgctgacccagcgcaccggcaccagcgtgcaggcgcgcgcgcggatcaaccggacgttgccgcaccaggggttgttgcccggctcctacaaggcgacgttcaaggtcggcggggtagagcgcaccgtgctcgatagcggcaacggctcgctcagcggtaccggtggcagcggccagatcaactatgccgacggcaaggtcagcatggaattgagcgccaccccggatgccgggagtgggatcgtgcatacctaccagcagggcagcgtgaccgacagcccgctggcggtgacctccgacagcaccggcatgtgcatcggcactctccccggggcgccgctcaaggcgggcagcgtgcgcctatcgtggatcaccaagcgtcgccaggcggcgccgaccctcggtgcggacatgggcaccggggcgctgccgatcttcgaatcggagatcaccgtggacaactcggtgaccgacgacgccgccggcggctgggccgggcgcgccgggacgatcaactacgagaccggcgagttcagcctgaaggtggccggcaactacgtgttcaaggagtacacctactacaccgacacggtcgacaacttcggcatgaagaagctgcgtctggtggccaccgataccacgttgctggaggggttcggcggcacgctgagcgtgcgcgcgcagagccgcggcgtcgagtacggcgagcagaccgattcgcagaccgtcgctccggtgaccctggacctgttgcctggtgtggccgagccgatcctgccgggctcgctggtgttcacctgggccggcgaggtctacgtcgaccgctccggtgtgctctacaagaacatcaacagcagcaccaacgccggcatcgccgtcggctcggtggactacgccggccgtaccgcgacgctgaatacctatggctcgggggcggcgccgacggtcacgctgctggcctgtctgaccaccaacgccggcttcagcgtcaccagcatgaccttccgcacgccgggggcgccgctgcgttctgcgagcctgcaggtgacggtggttcgcctggataccgcgcagatcgtgaccaccacggcggacgcgaacggcaagctcaatggcgcggtgatcaagggtagcgtcgatatcgtgaccggcatcgtccggctgcgcttcaccagcaacctggaggacaccactggggccagcgatatcccggtgattccgctgctgctgcgctacaacgcggtcgtcttcacctcgctaccgctggacgcaaccctgctcggactggacccggtgcgactgccggcggacgggcgggtgccagtgttccgcgagggcgacgtgatggtggtggctcataccgccgagaccacggtgccgagtcctcaagctggcggcgtgctgcagctcggccgcgaccagcaggccgagatcaaggtggtggacgccaacgcggtggaactggcctcggcgggctacagcgtcgacttggaacgcggccgggtgacatgggccaacccgctggtcctgcaggatgccgagggcaacccgctgaccctgccgctggtggtgcgtgaccgggtcgagcacatgaccctctgcaccgaggtccaagtgaacggcgagctgggaatctcctcgccgctgccctgggatctgccggcgggcgaaacgctggcgtccagtgcgctgagctggggcgacctgcaggcgcggctgcaccactggttcacccagcggacctgggatatcggctcgccgaactggaccgacgagcccaagggcgacgggaccaccgccaactacaacagcctcgcctatccgccgctgatcgccaaccgcggtgcgatcgatgcgaagtgggcgctggtgttcaactcctcgaccagtttcagcgtggtggaggagaagctgggggtgatcgccaacggcactaccaccaccgacacggcgccgatcaacccggagacgaacacgccgtacttcaccatccgcaaggaaggctggggcagtggctgggcggccggcaacgcggtgcgcttcaacaccgactcgtgcctggggccgatgtggatcgtgcggacggtgctgagtggcaagggcaccgtcgaggacgatgagttccacctgcagatcagaggagacgcggactga

SEQ ID NO: 349064 - DNA, 339 bp, Pseudomonas aeruginosa
gtgaacactccacatccatcccttcgccgaagctgcctggccgccttggcctgcagtgcgctggtcgcacagggagccttcgcagcgagcgcctccgagcaggcgaacctggaggtgatgatccggcagctcaacgccctcgaggacaccgcccgccgcagtgcccagggcgccgatgagcccggacagcgcttctacttcgactactcgcgcctggccgctgacctgcagcgcatccgccaaggcctgcaggactacatgacacccagccgcgcccagccgcgtgacccttccgacctgtccgggaattacaccctgcgcggagggccgatgccgtga

SEQ ID NO: 349065 - DNA, 387 bp, Pseudomonas aeruginosa; identical to SEQ ID NO: 324376

SEQ ID NO: 349066 - DNA, 603 bp, Pseudomonas aeruginosa
atgtgggatctgaagctgctcctaaaaaatgcagggcttccggtgtccatcaattatctgtcgtatggccagatgcctatgtccactgtacgaacagctcaacgtgaccatggcgttgggatgacattcttcggagacgaatgtggtactggattccgggagtgtgtcgaccactactactactcgccggccctacggctgaaagagcgcggtaaggtatcgttcaaagagtggctcgctccttacagctacttccctgacaacgagtggggccagatgaatcaacgtacgatgctggcacagggatttggtgcagacgaatcgtcggcgttctacgactggtggccaacgatggtctttctggtcaaccccgacaatgaagtcgtacgcgcttggcttcctcaaaccggtaacgccgcaaccccacataccattcttcgcgctgtagtggaggaaatggacgtggacccgaagacagtctcattgaccggggctcgcccagcccagtacaccaccttccccaaccatgcatactttggcaccagcatggaagacaaggcgatccaggatatcgccaagatccttgaggacatttcgggatga

SEQ ID NO: 349067 - DNA, 1557 bp, Pseudomonas aeruginosa
atgggccaggttgcgcacctcgtcggcgaccaccgcgaagccgcgtccggcctcgccggcgcgggcggcttcgatggcggcgttgagggcgagcaggttggtctgctcggagatgcccttgatcacctcgaggatctggccgatgttcaccgtgcggctgttgagggcctcgatgttggcgcaggaggcgctgatcttctcggaaagctcgttcatcgcgcggatggtctgctcgaccacctgcttgccgtcttcggcctggtggttggcgtcggacgcatggtgcgaggcatcggcggcgttgcgggcgatttcctgggcggcggcgccgagttcgttgatcgccgcggcgacgctgttggtgcggttggactgctcgtcggagttggccatcgaagagttcgaggcgttcaccaccagttgcgagacgtcgtgcagtttgtgcgcggtcccggcgacttcccggatcgagcgatggatccgctcgacgaactggttgaaggcatcgccgagcacgccgaattcatcgcggctggtcacggcgaggcgcttggtcaggtcgccctcgccctgggcgatgtcctgcatggcacgacccatcaggtgcagcggctgcatcagcaggcggatcagcaggccgagcaggaccaggatggcgacgatggagatcagcgcggcggcgatggccgagacgcggaacttgctgagcatggcgtaggccttgtccttgtcgatggacagcgccaggtaccaggtcaccgaaggcaggcccttgatcggggtaaaggcgaggatgcgggtatgcccgtgcaattcggcctcgctgaaaccggtggcgatcttcggcgtgttctgcgggtagacctcgctcagggtcttcatcacctgctctttgtccgggtgcaccaggatcttgccgtcgccgctgaccaggaaggcgtagcccatgccgctgaagtccagcgaattgatgatctgtaccagggtcttcaggctgaggtcgccgcccaccacgccgagggtgttgccggcggccttcaccggcgtcgccgcggtgatgatcagttcctgggtggcggcgtcgacgtagggctcggtcagggtcaggccgccggccgctacggcgtccttgtaccagggccggctgcgcggatcgtagccggccggcatcgggctgtccgggcgcatggtgaagacgccgtcctgctggccgaggtaggtgaagctgaaggtcgaggtcagggccggctgttcgagcagggcgctgacggcttccgggctgtggtcgcgggccagggtctgggcggtctgctcgaccagcaacagacggccaccgagccagttctggatgttgctggaggtcacgtcacccatttcccgcaggtagctttcgaggtcctcgcggatcgcgttgcgctgcaggtaatcgttgtagagggtgaacagtgcgaaagcggcgaacaccacgagggaggccgcgaggaggatcttgtggctgaacttcagacttttgatcatgttgtattgcgtccaggagtatgtagcgccagtctttga

SEQ ID NO: 349068 - DNA, 1026 bp, Pseudomonas aeruginosa
atgaacgctcagacccaaccggccgccctggccgccttccccctgaacatcaacctgaccgacttcatcgacgagttcggcgacgagctcctggagtcgctcaatcgctccaaccccccggtctataccggctccgacaacgctcaccgccagttggtgatggaccgactcaagcgcaagcccttcgcggcccaggccgaggtcgtccaggccatcaccgccctgctgctggaccgtaacgagcagggcgggatcatcaacgccgagatgggcaccgggaaaaccatgatggccatcgctgtcgcagcggtcatgcacgcggccggctatcgccggaccctggttgtctctccgccgcacctggtctacaagtggcgccgcgagattctggagaccatcccagccgcccgcgtctgggtactcaatggcccagatactctgctcaagctgctcaagctacgagatcagatgggcgacgcctacgacggacgccaggagttcttcatcctcggccgcgtgcggatgcggatgggtttccattggcggctcgcctgctggaagaagcgcgccgccggcggtcaactgttcgctgcgtgcccggattgcggccaggtcctcgaggacctggaaggcaacctggtcacggttgaggagttcgagcgtggtgaccgtcgacgtacctgttcctcctgtcgtggggcgctctggacgctgatccggccaggcaagcccgacggcggcaaccggcgcgcaacgatcctcaagtcgatgtgtcggattccaaccatcggcccggtcagggcggagcgcctgctgaacgacttcggcgaggacttcctggccacgatgttggtggacaacgtctcggagttcatcaacctgatggacgccaagggcaacttcgtcttcagcgatcggcaggccaaacgcatggagcgatcgatggcgaacatcgagttcggcttcggcgaaggcggctaccaaccgaccgagttcatcaagcgcgtgcgacgtgaagtcgtctga

SEQ ID NO: 349069 - DNA, 948 bp, Pseudomonas aeruginosa
  misc_feature (826)..(835): n is a, c, g, or t
atgaaagttcttgtaactggcgcgaatggatttgttggaaggaatctgtgcgctcatcttgcagagcggggtggtatcgaggtggtgccattcacccgcgagagtagtgttggtaatttgcctgagctaattcgttccgtcgattttatttttcatcttgccggggtcaatcgtccggaaaaaccagaagagtttaagatcgggaattccgaactcacgtatgctctgtgtgaggcggtaaggtccaatggacgagccataccacttctttatacttcatccattcaggctgaggtggataatgagtacggtttaagcaagcgagccgcagaagagcatctccaagtgctaggtgaggatattggttgtcctgtctacatatttcgccttcctaatgtattcggtaaatggtcgcgtccgaattataattcagcggttgcgactttttgtcataatattattcgagatattccgattcaaattaacaattcctcggcagagatcactcttgtatacatagatgatgtggttcgcaccttcatgaaagtcatggatgggaagctatccaatgcagtttcactacaggtcgagccccagtatcagatttctgttggtgagctcgcagaacaattgtatgagtttcgtaatagtcgaaagtcactgactaccgcaagggttggctcgggattgacgcgcgccttgtactcgacttatctaagtttcttgccagaagatagttttagttacgacgtgccaatgcattcggatccgcgtggcacattcgtcgagatgctgaagaccgcggactctggccagttctcgtttnnnnnnnnnngaagtataaagaagtggtatggctcgtccaggtgttaccaggggcgggcattaccatcactcgaaaacagaaaagtttctggttatcaaagggatggcacgtttcaagtttag

SEQ ID NO: 349070 - DNA, 489 bp, Pseudomonas aeruginosa; identical to SEQ ID NO: 336918

SEQ ID NO: 349071 - DNA, 1896 bp, Pseudomonas aeruginosa; identical to SEQ ID NO: 342721

SEQ ID NO: 349072 - DNA, 903 bp, Pseudomonas aeruginosa
gtgataaacataaagtctgcttatagcgatggagatttctccttccccaacaagttcagcctgggtatttcaggagaagcaattgatgatcgcacacgctactcttcatcatatttaaggaaaagctgtgatagctatgtggagattaaataccagaaaggattactcaacctattagttaacaatgaagtaattgagtgccatgagcttggcgacttcatagcaaagctagaccctacatcaacattaatcgacgcaacaagtcttgacattccagagctatcacttaccctaaaatctctacatcagaaaagtggacttgatatattcataacttacattgaaccttcggagtataattcagcaccaagtagcacgctagaccaagaagaatatagcctatctgacgaaatatctggttttgaaggaaccggaataccaaccatttccatgcctgtagatagtgaactagctaggagatttctgttttttgtaggattcgaaggaggaagacttcagaacgcaattgaaacttatgacatttcaagtgatgagatcagagtctttttcgggatgccggccttcaggcctggttgggaaataaaatcaataagaagaaacttgcaggcactcagcgatcactcgtttagtagccgcattggctattgctgcgcaagtagttgttcagatgcattacgttcgttatcaaaagcatcctccctctcccccgacacaataaactatgtggtccctttaggaaccaaaccaaactctattgcagccattctccatatgttggagaatccagactccactagactgctctatgatcaaccacagaaaaaatacgagcgcagccgaggcgtaggccggcgtcacttttacaactatctggttccgtga

SEQ ID NO: 349073 - DNA, 186 bp, Pseudomonas aeruginosa
atgagcccgatccgcacttgttcaccaattgccaagagaacaaccgagaccttcgttgaccacgtcaacattggcggcgagcgtcagagagttgaatttcagcgggaggttatctggctccaagagtcagagacgcaactcctgtacgttcacggaggcaagatcctcggcggcggcaaaaactga

SEQ ID NO: 349074 - DNA, 777 bp, Pseudomonas aeruginosa
  misc_feature (91)..(100): n is a, c, g, or t
atgaagcgcatctcgattctttgttccttgggtggggagggcatgcacataaactccaagtttttgctccacaaaccattagggcaagatnnnnnnnnnnggtttatgctggctcataatattgactgggaggtcgcaccacaccaatttagaaggacgttcgctcgatatgtggctcgcagtcaactcggtgatgttcgttatcttcgtgatcatttcaaacattggacgctggatatgactgcgatatatgcagaggatcaagttagagataaagagctgtttgatgaaatctatgttgcaatgcgtcacgaaaagatgctggtgcttgaaagtgtttttgaagaagatgcattggtttctggtggtttggcagagaccattcgtatttttcgatcctctgatgaggcgattcggacgtacaaaagccgccgtgaaatggttcagtttgtatcggaggttgtgcatctgagaagtactggtattgcatggtgtactgcagatagtacgggctgctccggtggcagtgtattggataaaactcgatgcggtgattgctcgaaaagtcttatcgatgaatcgcggctgccacattgggtaggcatatatgctcaaatgttggagcttaaagctatcgctaatgactgtggtccaggtgcgggtgcacgaattgacagcgatattcgacggtgtgaagtcgtccttcaagagcttggagctgatattgaggagcttaagctcggtgttttacttgaaggggggcttcgtcatgcataa

SEQ ID NO: 349075 - DNA, 681 bp, Pseudomonas aeruginosa
atgaaacgcccatcccctgcatcaatgattcttggcctctgcctggcggcaatggccggcctgctgggctaccagcagtaccaactcattcagctccgatcaggcgtggacagtgccgcggaaaagacctcgctaaaggcgatcctggctcgcttgaatcgagtcgacgagcgcctcgacaccgtggatggacagcacctggtcagcaacgaggacttccgctcaggccagaaggcgttgtccaaccgcattgacgccgcgcaggcgttcgccaaggatgccgtcgagaacctggctcagaccaccgcctcggccggcgatctcctggtgctcaaggcaaccgtggagacactggacggttctgtccgcacgcttcaagaaaagcaggccaaggcgccgccgctgatcgtgccagcgccaaaacgccccatacccgccaagcccaagccgaaacccaaaccgatggagcctcctcccttctcgatccttggcgtggagtatcgcgggggcgaacggtttctgtcggttgcacctccgggatccacccagctcagccagatctacctcattcgccagggagatgccgtcgccggcacgaactggcgactgaccgaccttgacgatggtaccgcgcacttcgacgtcgccggcgcctcgcgcagcgttcgcatccaaccatag

SEQ ID NO: 349076 - DNA, 363 bp, Pseudomonas aeruginosa
atgaatgaattatttggtcagccatacaacgaggctgacccgtgctgggtagttatgtgctacatggatataatgtactcggatggtaggtttattaaagccattgagtgcattgtaaataggtggggctatagcacggatggagcgtactgtaacttccctgatgaaaatagtccgtttgatgaggagcacttcgagggggttgagttttcttatggctatcccccgaaggatgaagacaccattgttgtgagcgaggctgtttgttctaagttcattcggctcgcttgtgaaaagtatcttcagcgccatcctgaagatactgagaaagtaaaagagcttttagataagctgtctttctga

SEQ ID NO: 349077 - DNA, 840 bp, Pseudomonas aeruginosa
atggtgacggtgttcggcattctgaatctcaccgaggactccttcttcgatgagagccggcggctagaccccgccggcgctgtcaccgcggcgatcgaaatgctgcgagtcggatcagacgtcgtggatgtcggaccggccgccagccatccggacgcgaggcctgtatcgccggccgatgagatcagacgtattgcgccgctcttagacgccctgtccgatcagatgcaccgtgtttcaatcgacagcttccaaccggaaacccagcgctatgcgctcaagcgcggcgtgggctacctgaacgatatccaaggatttcctgaccctgcgctctatcccgatattgctgaggcggactgcaggctggtggttatgcactcagcgcagcgggatggcatcgccacccgcaccggtcaccttcgacccgaagacgcgctcgacgagattgtgcggttcttcgaggcgcgggtttccgccttgcgacggagcggggtcgctgccgaccggctcatcctcgatccggggatgggatttttcttgagccccgcaccggaaacatcgctgcacgtgctgtcgaaccttcaaaagctgaagtcggcgttggggcttccgctattggtctcggtgtcgcggaaatccttcttgggcgccaccgttggccttcctgtaaaggatctgggtccagcgagccttgcggcggaacttcacgcgatcggcaatggcgctgactacgtccgcacccacgcgcctggagatctgcgaagcgcaatcaccatctcggaaaccctcgcgaaatttcgcagtcgcgacgccagagaccgagggttagatcatgcctag

SEQ ID NO: 349078 - DNA, 1341 bp, Pseudomonas aeruginosa
atgtcaagagcaccagtcagagatcgcagaatttctgtccggaaaagtcgcccggcctgctgctgtcctcattgctgtagcacccgacggagaagcactagggtttgccgagctttcgatccgcccgtatgcggaggagtgctactccggcaacgttgcgttcttggagggttggtacgttgtgccaagtgcgcggcgtcagggcgtaggtgtagctctggtaaaagccgccgagcattgggctcgtggtcgcggatgcaccgaattcgcctcggacactcaacttaccaacagcgcaagcacctcggcgcacctggcggctggattcacggaggttgctcaagtacgctgcttccggaaaccgttgtgaggggcgccgcgttggtgcctaacaattcgttcaagccgaacttgcttcgttacaccaaagccatggcagaaagagcttgccatggctttggctccactacgcaagtcggcttaactcaggtgttgggcattaaggaaaagttaatggcaatccgaatcttcgcgatacttttctccattttttctcttgccactttcgcgcatgcgcaagaaggcacgctagaacgttctgactggaggaagtttttcagcgaatttcaagccaaaggcacgatagttgtggcagacgaacgccaagcggatcgtgccatgttggtttttgatcctgtgcgatcgaagaaacgctactcgcctgcatcgacattcaagatacctcatacactttttgcacttgatgcaggcgctgttcgtgatgagttccagatttttcgatgggacggcgttaacaggggctttgcaggccacaatcaagaccaagatttgcgatcagcaatgcggaattctactgtttgggtgtatgagctatttgcaaaggaaattggtgatgacaaagctcggcgctatttgaagaaaatcgactatggcaacgccgatccttcgacaagtaatggcgattactggatagaaggcagccttgcaatctcggcgcaggagcaaattgcatttctcaggaagctctatcgtaacgagctgccctttcgggtagaacatcagcgcttggtcaaggatctcatgattgtggaagccggtcgcaactggatactgcgtgcaaagacgggctgggaaggccgtatgggttggtgggtaggatgggttgagtggccgactggctccgtattcttcgcactgaatattgatacgccaaacagaatggatgatcttttcaagagggaggcaatcgtgcgggcaatccttcgctctattgaagcgttaccgcccaacccggcagtcaactcggacgctgcgcgataa

SEQ ID NO: 349079 - DNA, 1404 bp, Pseudomonas aeruginosa
atgaccatgaaagaggtcagcaaactggttggtgtcagccttcgtttcctcaagaacttctcctacgaacacgacattgagttcgtgggttccaaagcccggccggttaatgaggcgctgtcccctgtcttcatcgccgaagagccgccttgccccaaactgatccagttcctgtcccgccccatgcctcgggcaaccgacatctacgaggacgagatcaccgagagcgaagaagtcccgaacaccgagcaggtcgacagcctcgcgattgtagaggccgtcaccacccctgaatcgagcgagtgcgcagcagccagtgaagctcaggtggaggtcgttcaggaccagagtgtgggtgggaattcagagttcgatcgttatagtccgaaagctcctgcactccggagtaataccgacttgaacatccttaccctcccccacaatcgggctgatgagacaatatcgacatcagcttccgttgaccaactaaccgccgccggagcctctccaggcatcaacggtgagcgtttactgggcaaccttccactgccagcgacatttgtgaatcagaggagccagggcgcagcctggacggcctggtatggttcagcaaaagcggtggccagcgtatttgaacagatatgcaaagcgaagatctccgccctcggcgatacgcggatgctgatgcgtgtaccgccccacgccgcgctgacctcgttgttcatttctccgcagtgcttcaccgcgatcgtggatgcatttccggccgatgaagcggccaatctgttccccgctagccgcttggaggccaacctcaagcatgtgctcggtgccgaagtgggagagatacgatcactcagtaatgcaggtaccgctggggaggttgcccgggcggtagagtcgatctggccttggacatcccggctccatgaccatggcggcttttctcggcacaactgcgtaaccctactaacgattggtgccctgctgaaggcattccaacgccccaatctcgcgtccacggatgctttccgcatcgacatggccatcacgacacttttgtcggtgcttcctgacccactggatcgtctgatcgccacgtcgtcgtcacggattcggcagattggatacgcgggcctggcaggagtggaagtgactgatgacgccggtgctgaagagttttggcaagcagtaggcactgaaaccttcaatgcctgtgtcgatgaggttaaacggcgggcacccagaattgagtcgggcctcactcgcgtttcgtcttcggagctgaaagctttcgaattggaacgaacgcttttggcggcacgccccgactcccaggttctacacgaaatctactccgactttgtcagcccgccgcgtcaggatagttgtcgtgtgagttga

SEQ ID NO: 349080 - DNA, 441 bp, Pseudomonas aeruginosa
atgtcgtccttcgtcgacgctactcccttgcgggtcgcctccatcgattcgccgatggccttgcgctggtccgagagcgatttggccgccttgtccgaggactccgcgaccgcctgcatacccttggcgccctcctcgccggccgccttcagttccttgatcttggcggacagcttggtctgctcctggttgaactcccgcgcgctgatcgtgccgtcgttgtacagccggcccagcgccgtccggatgttctggatatcgaccgtggtcttcgcgctgctgatcgcgtcttggacctgcttcaggttctccaggccggtgctgaggtcagacacccccagggcggcgccgctggcggtcgacttcagttcggtcagcttcgcgttgaggacaccggcgccgttcgcatactcctgctggctcagcgtgccggcctggtag

SEQ ID NO: 349081 - DNA, 303 bp, Pseudomonas aeruginosa; identical to SEQ ID NO: 268874

SEQ ID NO: 349082 - DNA, 894 bp, Pseudomonas aeruginosa
gtgaaggctcccggcttcggcccgaagggcatacaccgcttcgtattgccgttcaccgtgttcctgaagctcaaggatatcggtggcaacgtactgcccgactaccaggaggagttcgtcgacgtgccgatggcgcctgagcaggcctcggcctatcagcgcctggcggccacgctgacagcggagctccgccaggctctggcgcgacgagataccacgctcctgggcgtggtcctcaacgtgctgctggcttggccggactgctgtttccgaccggagatcgtcaagcatccgcgaagccgggacacactggccttcgtgccagcgatcttcggcgacgagcagttgatgcccaaggagcaggcgctggtggacctctgcctcgaggagaaagcgaagggccgcaaggttctggcatacaccgtctacagcgggacgcgcgacaccacgtccaggctgaagaaagtgctcgagcaatccgggctgaaggtggcagtgctacgtgcttcggtcgataccgctcgacgcgaggattggatcctcgaccaggtcgatcgcggcatcgatgtgctgatcaccaacccggagctggtgaagaccgggctggacctgctggacttcccgaccatcgcgttcctgcagacggggtacaacgtgtacaccttgcagcaggccgcgcggcggtcgtggaggatcgggcagaagcacccggtgcgggtggtgttcttcggctacgccggcagctcgcagatcacctgcttacagctgatggccaagaagatcgctgtggctcagagcacgtcgggagacgttcccgagtcaggtctcgactcgttgaaccaggatggggattcggtggagatggcgttggcacgacaacttattgcagcatga

SEQ ID NO: 349083 - DNA, 288 bp, Pseudomonas aeruginosa
ttgatcgtcctcgaggtcggccttgctgccctggaccgagtccgaggcctcgatgtcttcggcatccaggaccttcacctggtcgggactctcgaccagcttgatggcgtccgcgaacggcgccaggctgacgccggagcccggggcgaggcggacacggtggaccgagaggccaaaccgcttggcgaagtcggccagcaggccgaagctgttgcccgcttccgcgacgaacatccgtggcaggtacatggcgagcatctggctgatgaggttggtcagggacgctga

SEQ ID NO: 349084 - DNA, 252 bp, Pseudomonas aeruginosa
atggggctggatgactggggcgcggtgttcgagccgcgtctcgccgtcagcctgggccagcgcgtgcgtccgacgatcttttctggctggctctacgaggtgaccgaggccggggtactgccggcggctgagccggagtggtggccgatcgagggcgacaaccccagccgccaggtcggcacggcccgtctgcaggcgacgcgttactaccgcccgctcagccacgggccctttcctgtcgaggctctatga

SEQ ID NO: 349085 - DNA, 216 bp, Pseudomonas aeruginosa
gtggagaccggccgctatcagaatcgcagcgaagtcatccgggcaggcttgcgcctgctgctgcaacaggaagcccagaatagcgccaagctcgaagccctccgcaacgcaacatccagtggactgatgcaactggaacgcggcgagtacgacgagatcaccagcgacgacctggcccaatacctcgacgagctcggcaaccaggcgagccactga

SEQ ID NO: 349086 - DNA, 249 bp, Pseudomonas aeruginosa
atggcgaacatcgagttcggcttcggtgaaggcggctaccaaccgactgagttcataaaaaggcagcttcccaacggctacttcgacctgctggtggtagatgagggacatgagtacaagaacagcggctcggctcagggccaggccatgggcgttctcgcagccaaggcacggaaaacggtgctgttgaccggaacgctcatgggcggctacgccgacgacctgttcgtgcgacgtgaagtcgcttga

SEQ ID NO: 349087 - DNA, 201 bp, Pseudomonas aeruginosa
atgcccgagatcatcgttaccaggccgttcaactaccgcgaggggctcgacgcgacccactacccggcgtcgaagggcgccatcagcgttaccgccgccgtagctgcccatgccctgggcaagggctacgccaccgaggccaaggccaaggcgccgattccggcagcctccgccgaaccggccggcggcgaccagaagtaa

SEQ ID NO: 349088 - DNA, 195 bp, Pseudomonas aeruginosa
atgcccgagatcatcgttaccaggccgttcaactaccgcgaggggctcgacgcgatccactacccggcgtcgaagggcgccatcaccgttacggccgccgtagctgcccatgccctgggcaagggctacgccaccgaggccaaggcgccgattccggcagcctccgccgaaccggccggccgcgaccagaagtaa

SEQ ID NO: 349089 - DNA, 1050 bp, Pseudomonas aeruginosa
atgtcgtgcccctccacccatcgcttcacccgtagtacccgtctctggtgcgccgccctcggtgccagcgtcctgttgccgcagatggccccggcgctggccgggcaggccgcccgggacgccgtgccgagccagcaggaagtcaccttcggtggacgcttcatcgacgtccaggccgtccgtggcggcgcgctgtcgcgcagcgccgcatcgcccggcaccgagcgcctgcgccaggaggcgggggtgtcgatccgttccctgcgcgtgcaggacgatagcggctatccgggcttcaccctgctggccggcgccctggagggccaggcccggcaggccgccggcgatatcgtgatggccctgcgcgacgacggtagcttcgtcgccctgctgcccgagcgcaacgcgatgatccgcggtgctgccgacggccagcagacccttaccctgttcccggcgcaacgtggcgccgcccacgagcagatcgactacctggaagaacccgacgcgccgcttgcgacgacgatcgagtcgcgcaacggcgcgctgcgctaccaggcccagcgcaatgccgccggcgacctgctgatcgacgtgctggccggtttctccaggctgtccgtggcctatgtcggcgaccacgaggcctacgccctggcgcaggtcgcctcggtcaaccaggcgctggacaattccagggtcaagggcgtgcgcgtgcgcctggtcggcacccaggtgatcgacgacgaccaccgggtcaataccgataccctggccgacctgaagaacctcttcgccgagggcatgcgccagtacagcccggacctggtcgcggcgttcttcaccggccgcggcaccggccccgggcagaacagcgcggccggctgggcctacaccaacggacgctactcggtgaacgcggccgacggccccaccgtgtttcgccacgagctgggccataacatcggcggcagccactgcccgaccggccagggtttcaacttcggctacaacaacggacggatcggcaccatcatgtgcggcaactag

SEQ ID NO: 349090 - DNA, 174 bp, Pseudomonas aeruginosa
atggcggttgccaagaatgttgaccagcgcgccggcggcgggctgatggcgggctactccccagggaaggtcggcaacctggcaggcatgaaaattatgcgatggaggatggactgcgccgccacgcaggcggtggcgaagaaaagtctgcacaggcgaattgttatagtataa

SEQ ID NO: 349091 - DNA, 669 bp, Pseudomonas aeruginosa
atgcacgaagtgaggcttgccctccgagtggtggggcggcaaacccgccccgtcaggaggccgagcggaatcgttgcggagggggacgagtggccggatgccggggcgagtcttttggttccttttggacgcttgcaaaaggaactcgcctgggaaggcgaaacaagaggccaaggcaggcacgacaagcagcttgaccagcaaacacgaagcctgctcgaacgtcccgtagggcggataccgccacaggcggtatccgccgatgccctggagagccggcggataaccgcaagcggttattcgccctacggatcgggctcctggcatgcccttcgaggggcagggctagtcttttggacgcttgcagaaggagcttgcctggaaagaccgaaacaagaggccaaggcaagcacgacaagcagattgaccggcaaccacgacgcccgctcaagcgctaagcaacagcttccccccttactgccgtgcaggcagcgacgggagctgggggccagtgcacgcattcacggcccgccaggcagtccccgtgcacccggtgccgaaacgccaccttcgtgctctgagtcatggcgaatgccccacggcaagtcgctacccctcagtacccatccgccaccggcgccaggtagagcccgccggcaccgagggtaa

SEQ ID NO: 349092 - DNA, 1212 bp, Pseudomonas aeruginosa
atgaacaacagcttctggaaggccggccatgcgccgaccctgttcgcggcgtttctctatttcgacctgagcttcatggtctggtacgtgctcggcccactgggcgtgcagatcgccggcgacctgcaactgagcacccagcagcgcgcgatgatggtcgccacgccgatcctcgccggcgccgtgctgcgcttcctgctcgggatgctggccgatcgctggtcgccgaagagcaccggcattctcgcccaggtcatcgtcatcgccgccctggcggccgcctggctgctgggcgtgaacagctatccacaggcactgctgctggggttgttcctcggcttcgccggggcatccttcgccgtggccctgccgctcgcatcgcaatggtacccgccgcaacaccagggcaaggccatgggcatcgccggcgcgggcaactccggtaccgtgctcgccgccctcttcgcccccggcctggccgccgcgttcggctggaacaacgtgttcggcttcgccctgctgcctctcgtcctgaccctgctggtgttcgccatggtcgcgcgcaacgccccgcagcggccggtgcccaaggccatgggcgactacctgaaggccctcggcgaccgcgacagctggtggttcatgttcttctacagcgtcaccttcggcggcttcctcggcctggccagcaccctgcccggctacttccacgaccagtacggcctgaacccggtgaccgccggctactacaccgccgcctgcgtcttcgccggcagcctgatgcgcccgctcggcggcgccctggccgatcgcatcggcggcatccgcagcctgctgatggtctacaccctggccgccatctgcatcgccgcggtcggcttccacctgcccagcgcgatggccgcgctcggtctcttcgtggtcgccatgctcagcctcggcgcaggcaatggcgcggtattccagctggtaccgcagcgcttccacaaggagatcggcgtgatgaccgggctgatcggcatggccggcggcatcggcggcttctgcctgaccgccggcctcggcgcgatcaagcaaggcaccggcgactaccagctcggcctgtggctgttcgccagccttggcgtgctggcctggttcggcctccatggggtcaagcggcgctggcgcaccacctggggctcggcggcggtcaccgtcgcgcgggtctga

SEQ ID NO: 349093 - DNA, 480 bp, Pseudomonas aeruginosa
gtgctggtcggcacctgggatctgcgtggcaacggccagctcgccgccgcctaccacgacggcgccaacctgcaggtggtggaaggcggcagcacccgcaactacagcttcggcaacgtggtgtggtcggtcttcggcgccaccgataccgacggccagcccggcgcggagatcatcggccgcaccagcaccggcatctacgtgatcagcaacgccagttcccgcaaggaacacagcatcggcgccagcgcctgggcactccatggcggcaccacggacaccgacggcaagccgggcaacgagctgatcgtggtgatgcagggcaaggtgcgggtcatccaccacgccagcggcgacgtcaactacagcatcgattcggtggccgacatggataaccagccgggcgcggaaatcctcgtgcgcgacgccaatggcaagctgttcgtattcaacgaccgcaccggcaaggtaagcagctga

SEQ ID NO: 349094 - DNA, 1524 bp, Pseudomonas aeruginosa
gtgatccagaacctcgcgcagctgcgcgaggtcgaaaacgacctgaatggccgctatgtcctcggcacccgtatcgacggcggccagacccgcttcgaaaccctcggcagccgttcgaaccgcgccttctccggcaccttcgacggcctgggcaacagcatcgccaacctggcgctatacagcaacggcaactgggtggggttgttcaacctgaacaccgggcgcctcgccaacctcaccctcgaaagcatcggcgccagcgtggcacatcccgccaacatggaggcaggcagcctggccgcgctcaacctggggcacatcgacaatgtacggattcgcaacggccaggtcagcggcgccgcacagcgcaacctactcggtggcctcgtcgcgcggaactacggcagcattgccaacagcaccttccagggacgcatcaacggcagccgcaacacctacgcgatgggtgggctggccggctacaacggcagccaggccctgatcgcagccagctcggccgacatggtgctgggcggccaaccggcagaagcgagcgccggcgcgctggtgggcgtcaacgccggtggccgtctcctcgacagccatgcgcgcggcagcatcgacctggccggcgaccggctgaacatcggcggactggtcggccacaaccagggcggcttgctgcgcgacctcgaatcctcagtgaacgttaccgcgcgcggacgcgacggcctgctgggcgggctggtcggtctgaacgaacaaggcactctggaacacggctcggccagcggcaatgtcagcggctacggcagccaggcgatcggtggcctggtcggcaggaacctgaagggtaccctgcgcaacagttccgccagcggcaaggtgaacgacctgatcagcacccaggtgggcgggctggtcggacacaaccgcgacggcaacctcgactcggtatcggcctccggcaacgtcagcggcggtgtgcgagccatgatcggcggactggtcgggctcaaccagggcggcaggctcagcgccatctcggccaccggcaacgtcagcggccttggtgcgggcaacgtcggcggactgatcggagaaagccaggacgccctgatcgtcggcgccctggcgcagggcaaggtctcgggtggcgcgcagagttcgacgggcgggctgatcggtcgccacgccagcggccgggtggagcaggcgacagcccacggcgatgtcgcgaccggccccggcggcattgccggcgggctgatcggctggagtggcggagaggtcgtcgccacctccgcctccggcgacgtttccagcgaccacggcatggtcctcggcgggctggtgggctggaaccagggctctgtgagtcactcgtccgccagcggcaaggtcgataccgacgtcagcatccatggcggcctgatcggcctgaacctcggccagcagcacgccaacagcaccgagggcgaagcggcgaagacccgcctgctgggctacaacgcacaacgctga

SEQ ID NO: 349095 - DNA, 828 bp, Pseudomonas aeruginosa
atgcgaacgaccggccaggatggccgggccgggggtgggctgaacgacgaagcctcgacaggatgtcggctcggcctcaccccaagacgccgaaccgcatgcgtttttcaatgcgaacgaccggccaggatggccgggccgggggcgggctggacgacgaagcctcgacaggatgtcggctcggcctcacccaagacgccaaaccgcatgcgttttgaagggcgaacgaccggccaggatggccgggccgggggttggctgaacgacgaagcctcgacaggatgtcggctcggcctcaccccaagacgccgaaccgcatgcgttttgaaaggcgaacgaccggccaggatggccgggccgggggtgggctggacgacgaagcttcgacaggatgtcagctcggcctcacccaagacgccaaatcgcatgcgttttgaaaggcgaacgaccggccaggatggccgggccgggggttggctgaacgacgaagcctcgacaggatgtcggctcggcctcaccccaagacgccgaaccgcatgcgttttgaaaggcgaacgaccggccaggatggccgggccgggggtgggctggacgacgaagcttcgacaggatgtcagctcggcctcacccaagacgccaaatcgcatgcgttttgaaaggcgaacgaccggccaggatggccgggccgggggttggctgaacgacgaagcctcgacaggatgtcaactcggtctcacccaggacgctgaagggcatgcgtttcgaaaggcgggcgagggagtgcagcacgctcccccgctgccgtcctacaacgcaaacggcaaatga

SEQ ID NO: 349096 - DNA, 483 bp, Pseudomonas aeruginosa
atgcaacccggaaacaaccaactgtcgatgaccgtgctgatgaccccggacatggccaatttttccggcaatgtccatggcggcaccctgctcaagtacctcgacgaagtcgcctacgcctgcgccagccgctacgccggtcgctacgtggtgaccctgtcggtggaccaggtgatcttccgcgagccggtgcacgtcggcgaactggtgaccttcctcgcctcggtcaactacaccgggcggacctccatggaaatcggcgtgaaggtgatcaccgagaacatccgcgaacagtccgtgcgccacaccaacagttgcttcttcaccatggtggcgctggatgacgagcgcaagccggtggtcgtgcgcccgctggagctggaaaccgcagagcagaagcgccgcttcgcccaggcccagcagcgtcgccaactgcgtgccgagctggaggcgcgttaccaggcgattcgcgaggagggctga

SEQ ID NO: 349097 - DNA, 870 bp, Pseudomonas aeruginosa
atgcagttcctgcacgcgccgccaatccacatcgccgcgctgctccatctgcttcagccacgccagttgcggatccgcctgcaccatcgcgtcgatggtctggctcacggtcttctggtcgatgtgcttgaggtcgatcttcagcccttccacggccttgatcgccagattcccctgggccacgatctgggtctggcgtacggtttcgtcggtctggcccttgcccttcgacgactgccacgccaggtcgcccttgctcttctcgtggctttcctggtgcaggtccttcaccgcctcgaaggtcaccgcgccgccgctgacgatggccaggtcgttgcccgattccagcttcgcgccctggtaggtctggtcgccgccgctgagcagggtgaggtcgccgccgctgctgatctggctgcccaccgccttgacgtcggtgacttcgtcgcgccgggtttccttgcggccgaagtcgcctttcttcttcttgtcgtacaggtagtagctgctgtcgttggcggccagcagttccagcttgtcgccggccaccaggtaggcctcgtcgccggcgctggcctggctcgcgatcaggcgcaggtcctgtccggcattgatcgccaggtcgccgccagcctccacgcgggtgccttgctgggcgaccttgtcttcctggtaggtgaccttcctggtcttgctgtaggcgtgctcctcgttcgccgccgccgccagggtcacgtcgcgcccggcggagagggcgatgtcgcggcgcgcttcgagggtgctggccaccgccgtcaggtcgcggccggcgctgacgttcaggtcccgcccggcgctgacttcggcgccgagctgggtcacgctctgtag

SEQ ID NO: 349098 - DNA, 768 bp, Pseudomonas aeruginosa
atgcctgtttgtaatttgtgcctaaaggaaagtgagctttctcagtcccatattatccctagggcttttttaaaaaggcttaagaagaactcgccgcagcttataaaaattcgggatgctccgggggttaagccagtaaaagaaaatgctgactggaaggaaaggctgttgtgtggtgagtgtgaagtgtttattaataagagttatgagcacgggcagattttgtttcttaggggaaggggtaatgtttctaaaagtcatgataaaataacttttagaaattttgactttgaaaaattttatctatttctgctttcgatcctctggcgtgcttcgatctcaagtcatgaggcgtttgaggttgtaaagcttcctccggaactacaaaatgtcttccgactagcgctgttgaatagagaggataagataaataattctgtaaggatttcggatgttttaaagatagggattgtaagaataacaaatcgtccttatatgacggaggaagagactaagtctattatctctcacttcaatttgaggcattcggaagaggggcatatttattattttatggttgaaggatttttggtttcatattgctggccaaaaacaagtaaaagtgagtttcctagagatcttggagtgttcaaggatagcttttttctacgtatgccaaagattcaggttgagaagtctgcggtattagcggaaatgtataatgggatgatttcgaaggcgatagaattttctacagaactttggtga

SEQ ID NO: 349099 - DNA, 174 bp, Pseudomonas aeruginosa
atgcaacgctatgacgtgatcgtgatcgtgatcggtgccgggcccggcggctacaacgccgccagccgggccggccaaccgggcctggcgctgacctgccgtccgtacccgacccgctccgaggcgttgcgccaggcggcgctggacgtgcgcgaacgggccatgcagcgctga

SEQ ID NO: 349100 - DNA, 600 bp, Pseudomonas aeruginosa
atggtatcccggcgcaaggcagcccggcggagggagacactgttcaccaccggcctgaacccgtgcatcggtgtgctgctgtgggacgataactggatagtgctgggccatttgcaggactccagcagaggatcgttcgaaaagtcttaccaagcggtgttggaaaagatgcgcgcggattccgcaggctcatcggtcgtctatggggggatcgcctatcaccggcattatgatgacagcagcatcgatcatcgggagacactcaggaatttccttcgcctcaatggggtcgtggtccagaccgactcggtgggaagcaacgaggatgctgactcgccttcgctgagagtggctatctcacgctcctcgaaatatctccatccacagatcaggacggccctgaaaagatcggctgaacgcttccccgacgatgcggttccaaagccgctccaggtggccaggagcggccagtacgccggtcgggtcccgctcaatggcgctcctgccatcgcgctggtgagcggtcagaacacggtggaaaccttcgactatggcaacttcactgacaagatgaagaagaatgcacggtacgccctgtag

SEQ ID NO: 349101 - DNA, 768 bp, Pseudomonas aeruginosa
atgaacattcggcagagaatcatcgcagcgggcgccatcagcatcatggcggccatcttccttggtggcgtcggcttctgggggcagatccgcttgagcaaggcgttgtcggagaacgaactgagcgtcaacgccatgcgcaatcacatggaaggcgacatgatgcacgatgcgctgcgcgccgacgtgctcgcggcgttcgtcgtgcagcccggcgacagcgccgccggcgaccaggtccggcaggacctgcaggagcacagccggtggttccgcaaggtcgtccagcagaacctggacctgccgctcgacgatgccacccaccaggcgctggtggaactgcaaccggacctgcaggcctacatcggttccgccgagggcatcgtcgaaaaggccttgcgcgatccgctggcggcgcgcgccgacctgccgtcgttcgacgaggccttcaaggaactcgaagggcgcaacgaagcgctcagcagcctgatcgaggcgcatgtcgagcagacacaccgcgagcgcgaggacagcatgcgttattcggcctggatgctgggaggcgggattctggtcgcctgcctggtcctcggccagctctgtcgccaattgttgcgcgccgtcctgaagccgctgcgcaagttgctttcctcggcccgggtgatcgcccagggcaacctgcaggagccgatcggcgtcgacagcgacgacgaagccgggcagttgcagcgggcgctgggcgaaatgcaggaaaacctgggcagatga

SEQ ID NO: 349102 - DNA, 696 bp, Pseudomonas aeruginosa
atgagcgctacagaacatgcccaacaatcccgtctgctgactccgaccgaactggccgcttgcatcaagctgttccgcgagatgcggcagtggtcacaggaacagttgtccgcgatttccggcctcaacgtgcggacgatccagcgtgtagagcaaggccaagtcgccagccttgacacccgccgagcccttgcccgagcgttcgagcttgaggacattgacgcgctcaacaagccgttcgtcattccatccgaagaagacgccaaggctgcgaaggaaaagttcgaccaggagcacgtcaccttgacggcgactccgctgactactggtaagcaattggccaagctggcagaaacttgctcaatggacttgtcagaaccggcttttgagctgcctcgcgaggccgacgaaaccttcgcgatgctggtggactacctgcgtgagtatcgggattgtgccgatgcctataacgaaacgcagaaattcgagatatacgatgagctgcaatcccacatcgacgcgctcaaggtgctcggcgtctcactgcgctacgccacgcgcaagattcaggtgaagtggggaacaggtgcagatgtgaagccgatgctcgccacggtgctttatatcgttggcttcccactcggcaaagaacccgaacagtttgcaacaccgaagtctgccagcatccgtctgtag

SEQ ID NO: 349103 - DNA, 1683 bp, Pseudomonas aeruginosa
atgaactcgaaaaaatgcctcgcatccctgattgattctttgggggagcatgccaacatccgagaaaccatcgggcaaatcgacatttccgggcatgtctctcctgaaaaatcggacgatttcaagcaggccttcaaagatttctcggaaaagaaatctgaggcttggtcgatttctatccgtgatggcgaattttccgagatctccacagatgccattgcgaatgaggatgtcacccttgtaatcaagaagccaataggaggcaggattttctttgcgtcactagcaggattctcggcagccttggaagacaaggcgctgacattggctagcgagctattggtgctaagttcttttaatggattcaaaaccagaggattttctgtcctgccttgggatggtgaacctttgcctggcttgccgtgcttggagcctgattcagatgcaatcgaccctagaaaaggcgtagtacgagacttgaccggcaacactgttccggcagacccctatcgttggatactagtaggtcatgacggcggcggcgagccgtggaatatatggaagactctggcaactaaaaatctggcaacactacttgtttcggatgtctggaaagaagatacaacgaaagtatccatcaatggcgcgagaaagcgcactttctcactcggagaaaaatgccaggatagcaacgcttactcgaaaatatgccaagctgccgattggatacttgtaaagcaggacacggaagcccggcatgaagttcttgtgcgacgtctttcttcgattgtcagagactccgactccaatggagtcgcggagtggctaaccgtattgcctgaatctctgcaagaagcccttgatggggctcggcttgatcatcgcgcctatgtgagatcaaagtcagcagaaacggtaaaagctatggccgacctcagaaaggcggttggagaagatgtttcgcgtatcgtagagcgcattcatagactttctgcaggttttgtgattggtctggctgcactggcaacggggctaggtgtccgccttacattgctgacctctcagaagaacacctgggcagttgctgggataattttctgctgcgtcgtactagcgattacatgggcaagcattgttcttcagcatcatgttagctctaaatcattggtaaatgagttgcgcaacatgaggcgttggcataaaaacattcacatagcactaacccggtcggactatcgagagttggcattacatccggtgcttgatgccattcgcctatataagaaaacagcgaagtccaccattaatggaatgattgccgcttcatttgtttttattgccctttttattattaccccttttttctactcggcagaacctgttggcgccaatgataaaaatagggagtcgcaatcattacttaattctgacattgaagagtcggctttaaaagttagccctacccagagagagggcagaaatttggaagtagctccccctacagggcaagagtcaaattcagaagacgacaaagccgtacaagatacgagcattcttgatgataagcagagcagctcttcccaagatgtatttgaggccggagaaaagggccgaagccccgaaaattatattagccctcgctcggcgaacgacaccgttcctacacccgctacgatcatgtga

SEQ ID NO: 349104 - DNA, 1131 bp, Pseudomonas aeruginosa
atgagcattcttagcgaaaaagaggcagaaagcctcaccattgagcgaatgatcttccacgttgtcgatccagcatcagagtcccccgttttcttagcagaagtcaaaccaccgcaatgtgtggattttttcgttgagcgagttaaagaaactcttcgtggagccgcgtatgaatttctcccgggcgcaggaattccgggccttctttatcgagccttgccgagtcagggcgcgaaagatgaatttgttaaagtctcgcacgacctggcggatagattcaaagagaaagtaaaacaagataagcgacttgcacccggcgtattgatgcttttctccttaaaaacggaaggtgataaccgacttgtcgccgtcataaaatatgagcaccagcaagttgtatcttactcctacattaaggatgacaagggcaagccgatattggatgcagacggaaaccctgttcctgatttgcagacgcttgtggaaacatttacgaaggatcgcaaggctatgcagaaatctgcagtcatacgattccaaagaagtaatagctctgaatcggatggagacgttcaatcatcaatcgttgtaattgaccattcgtccggtcgctaccgcgatgccactcaacactttgcaaatttcctggatatacgccgagcccttgaacctgtcgaactgaccaaacgcctcgaagatgcggcagtcgagtccatcaaggcgcacaagagcgaggtccccccagaagttgctaaagctcccaagcggtttgtacgagcagccatgtcaaggcttgaagggtttgactttgaaaaaccagaggaatttcttggtgccgtattgcaaggagtggctccagaggccgcaatcctcaaaaccttcaagagcaaactcgccagcaagaatataagcacagaagcattcaagtttgagggagccaccccaccaccagccgagtaccgacgagtagtcacaaacgaggggattactctcttgtttagtgccgggcatgaagaaaacaagaacgtagagataaaaacagaggggaatggaggcgttgaaataaccatacgctctaccggcctggaacgtaacgatgaactcgaaaaaatgcctcgcatccctgattga

SEQ ID NO: 349105 - DNA, 1176 bp, Pseudomonas aeruginosa
atgccttttgccctctacatgcttgccctggcggtcttcgtcatgggcacttcagaattcatgctcgcgggattgctccccgcgatcgcgaccgaacttgacgtctcggtcggcactgcgggcctgctgacctccgcattcgcagtcggtatggtcgtcggcgcgccagtgatggcggcattcgctcgccgttggccaccgcggctcacattgatcgtttgccttctcgtgttcgcgggaagccacgtcatcggagcgatgacaccagtgttctctctcctgctcatcacccgggtgctcagcgctctcgcaaacgcaggattcctcgccgtagcactgagcacggccactaccctcgtgccagcgaaccagaaggggcgtgcactgtcgatcctgctctccggcacgacgatcgcaaccgtcgtgggcgtccccgccggggcactgctcggcacagcgctgggctggcgaacgacgttctgggcgatcgccatcctctgtattcccgcggccgttggagtcattcgtggcgtcacgaacaatgttggtcggagcgagactagcgcgacctcaccaaggctccgtgtcgagctcagccagttggcgacgccgcggctcatcctggccatggcactcggagcgctgatcaacggagggacctttgcggcattcaccttcctggcacccatcgtgaccgagaccgcgggcttggccgaagcgtgggtgtccgtcgcgctggtgatgttcggcatcggatcgttccttggcgtcacgatcgcaggacgactatcagatcaacgacctggcctcgtgctcgcagtcggcggaccgctattgctgacaggctggatcgtgttggcagtggtcgcatctcatcccgttgcgcttatcgtcctcgtcctcgttcagggattcctgtcgttcggcgtcggcagtactctgatcacgcgtgtgctgtatgcagcatcgggtgcgccaacgatgggcggttcgtacgcaaccgcagcattgaatatcggagctgcagcggggcccgtgcttggtgcgctcgggctcgcgaccgggctggggctgctcgcgccggtttgggtcgcttcggtgctgacagcgatcgctctcgtcatcatgcttctcaccagacgcgcgcttacgaagaccgcggcggaggccaattga

SEQ ID NO: 349106 - DNA, 351 bp, Pseudomonas aeruginosa
atgaccctgccgcttgtcaccgctgatgaacgcgcccggttgctggcccacggcgcggcgctcgccgctggtcagcggctcgacccgctgcccgtggtgcgtctgttcacgccggacgcgcatgtgacctggctgctggtgtcgctcgatcctgcggatggcgacacggcctacggcctgatcgacctcagtatcgggatgcctgcgctcgggacggtcaagctgtccgacctggcgggcatcgtcgggccgcgcaagctgccggtgcggcgggatcggtatttccaggcggtgcgtccgttatcggagtatgtccggctggcgcaggagaacggcgcgatcacggactga

SEQ ID NO: 349107 - DNA, 573 bp, Pseudomonas aeruginosa
atgacgcccccttcccaaacctccccgccctcgccaatcggcctgctggcggcgtcaatcaaacgtgaacgagagcgtttgggcctttccatttccgagttggccaagcgggccggcatcgccaagtccacgctgtcgcagcttgaagcgggtgtcggcaacccgagcttggaaacgctctgggccttggctatggcgctggacgtccaggtgacccggttgatcgcccaaccgagaagccgcgttcaggtcatccgcgccgatgaaggggccaccgtggcttcggaacaggcccactacgcggccaccctgctggcggtctgcccggccggcgttcagcgtgatctctaccggctcgtggtcgagcctggagcgccacggctgtccgatccgcatctcccgggaacgctcgaacatgtcgtcatttgtcacggacgtgccaggttggggccggtcgggcacccggtagagctgtccgcaggcgactatgcgagctattcggctgacgaggcccacatgttcgaggcgctcgaagccagaaccaccgccgtcatgttgatcgagcacacgtga

SEQ ID NO: 349108 - DNA, 753 bp, Pseudomonas aeruginosa
atgctgttggcctgcgctggcctgggcctgctgcgccggggcgtactcgacgccaggcaggcgggactggctgcgctgggcggcgtggccttgatcgccaactgggtcttgctgttcaccgcctactcgcacgcctccatctctgtcgccaccgtgacctaccacactcagcccttcatgctggtggcgttgggggcgctgttcttcggcgaaaagctgacggcgaacaagctcggatggttgggtgtggccttcggtggcgtcgtgctgatcgtcatcggcggccagcaggccggctcgcacgctccgggttacctggccggcatcggcttggcactggcggccgcgttcttctatgccatcgccgcggccatcaccaagagtctcaagggcgttccaccgcacgtgatcgtcgtgattcagatgatcgtgggcagcgtgcttctggcgccgtttgccctctggcccgatggcgcatcctcgccccatgcctggggcctcctgctggccatcggcttcatccacaccggcctgatgtccacactgctgtacggcgcgatccagaagatatcgaccgcgctggtgggggtgctttcgttcgtctatccgatcgtcgccatcgtggtcgatgcctgggcattcgaccacctgctgggcgcgatgcagatcgtcggggccgtcgccatcctggctgccgtggcggggatgaatctcggatggaaccttttccatctggatcgtagaaacgcttag

SEQ ID NO: 349109 - DNA, 795 bp, Pseudomonas aeruginosa; identical to SEQ ID NO: 140057

SEQ ID NO: 349110 - DNA, 276 bp, Pseudomonas aeruginosa; identical to SEQ ID NO: 140056

SEQ ID NO: 349111 - DNA, 735 bp, Pseudomonas aeruginosa
atgatgggacttcccagtgaatcgagtccgggtgcgccggccgcccgggttctcgtcgtcgatgacgaacctcagatccgcaagttcatcgacatcagcttgcggtcgcaaggctacgcaaccctgctggcgggaacaggccgggagggcctgacgctgctggccagcagaggggccgacctcgtcgtcctggacctgggattgccggatatggacgggaaggatgtgctcaaggagctgcggcaatggtcgcgcgtgcccgtcatcgtgctgacggtacgctccggcgaggacgaaaaggtggccctgctggacgcaggggccaacgactacgtgaccaagccgttcagtgtcgaggaactgatggcacgcattcgcgcattcctgcgcacggtggcgacagggacagacgatagtccgatctacgacgacgggattctccgaatcgacctggcgcaacgggaagtggccgttcatggagaagccgtcacgttgagccgcaaggagttctctctgctggccttgctggtcaggcagccgggacggctggtgacgcaggcacagatactgcgggagatgtgggggccgacgcacgaggaagatacccactacctgcgcattctcgtgggcaagttgcgccacaagctgggggacgatgcctccgctcctcgctacatcgtcaccgaacctggggttgggttgagattcgtctcggaggaacagcatccggcctga

SEQ ID NO: 349112 - DNA, 2745 bp, Pseudomonas aeruginosa
atgagagccgaacagactgaacaagcagatgccctgttgggcgaactcgagcgccagaccgctggacggttgacggtgttcctgggtgctgcgcctggcgtaggcaagacctacgccatgctggtgcgcgcacgcgaacttcaccaccagggggtggatgtcgtcgtcggcatcgtcgagacccatggccgtggcgagacccagaccatggtcgaaggattgtcgttgctgcctcgcaagaaggtggaataccagggccgtcagttggaggaaatggacctcgatggcttgctggcgcgcaaaccggcaatcgccctcgtcgatgaactcgcccatcgcaacgtccctggaagccgccatgagcgacgctggcaggatgtggaggaattgctcgacgccggaatcgacgtctatacgacggtcaatgtccagcacctagaaagcgtgaacgacgtagtgcatcagatcaccggcgttcgggtgagcgaaacggtgcccgacgccgtattcgagcgactgcgcgatatacgcttggtcgatctgcccgctcgcgagctgatcgaacgcctgaaccaaggcaaggtgtatttgccggagcaggccgcccaggcactgcaggcgttcttctcgccctcgaatctcaccgcgctgcgcgaactggcgatgcagaccgtcgccgaacatgtcgatgccgatttgcgcgagaagcgcgcggctcgtgggctcgaaggcatttccatccagcgtcatgtactgatcgccgtcgacggccggggacactcggaatacctcgtaagggccggcgccaagatcgccgagcgccgcggagcgccgtggtcggtggtcacggtggagaccggacgctcggccgatgccgccttgcatacggacgagatggatcgcgcggctccaacgctcaacagaatggcgcgcgacgaacagcagcgtttgatggaaatcgacaaagcgtttgcgttggcgcgcaacctgggcggcgagacggaagtgatgcacaacaccgatgtcacccaggccctgctcgatgccgctgcagcacgtggcgccaagtccatcgtgatcggccgcacacgggagcggcccttcgcccgcatcttcaatcgcacgctgacgcagcaactccttctgcggggggcacgctacgaactgaccatcatcagcacaccgcaggctcggcaacgctcgctgaggctgcccgacatcacgggagaacgcctcacgtggcgagaggctttgttgatcctgatggccagcctcggagccgtcggtacggcggcgctggccgagcgcaccctgggtttgcaggatctatccatggtcttcctggtggcagtcattctggtcgcttcgcgcacgcgcatggcctcggctgtcattactgcgacactgtgtttcctcgcctacaactttttcttcattgagccgcggtacacgttcctgattagtgcccatcgtggggtggctaccgtgatgctgtttcttgcagcggccctgatcgctgggcgactggcctcgcgactgcgcatgcaggtggtggcactgcgcgcggcgaacacccatgccatggccatgcagaatctggggcgccgcctcgccaaggcagccgatctcgggcaggtcatcacggcaggggcatctatcctgcagtcgactttgcatgctgaggtgtggatacgcatcaatggtgaatctggacccgcaacttctgcgggccgccttgccgataaggatttgacagctgctgattggacgcaacagcacgaccaagccagtggacgctataccgatactttgaccaactctgcctggtggttcctgccagtgtcctcggacaaggacactctgggcgtggtcggcctgagattcccaccgaacatgggccgcctgtcgttcgagcagcgccgccttgccgagagcatggtggaagacatcggccaaacagctctgcgcacgcgcttggtgtcggaactggaggtggcgcgcgtcacaggagagacggaacggctgcggtcagcgttgttgtcttccgtgtcacacgaccttcgctcaccactgtcgtcgatgatcggtgcagcggacagcctggcgcgctacggcaaggacatggggctagaagatcagcaaagcctactggaaaccatccacgtggaaggcgagcgcctcgaccgctacatccagaatctcctcgacatgacccggctcgggcagcaaggattgacgctgacgcgcgactggatcggtattgatgagttggtgggttcagcatcccggcgcttgcagcggtacgagcccgacgctcgcattgagcatgagattccggcagaactgacgccgatccacgttcatcccgcactcatcgagcaggctttgttcaatgtcatggagaacgcagcgaagttctcgccacctggagagcccgtccgggtgcaggtccggcgaaccaatgacgatcagttgcagattgacgtttcggatcgtggtccgggcattccagaggaagaacgacggcgcatcttcgatatgttctacagcgtcgaacgtggcgaccgaggcaaacagggaaccggcctcgggttgacgatcgtccaaggtatcgtaggtgcccacatgggcagcgtcgaggcgctgcctggcccggaaggccgcggaaccaccatccgcctgaccttgccttggggcggatactccaatcaggaggcgaaagagaatgatgggacttcccagtga

SEQ ID NO: 349113 - DNA, 294 bp, Pseudomonas aeruginosa
atgagcacacttggcgcctatctacaggccgaggatgttctcctcaacctgccggtcgccgacaagggcagttgtttcacgccgtcggcgtgcacgtccagcgcatcggtggcttggcaccccgaggacgtttcctccgggctgatgcggcgcgagcaggccggctcaacggggctgggcctgggcatggccgtccgcacatactacagcggcatcggcaacacaaatcgcgacaaagagttaaaacaactggactttgaggatcgggctttccatgagagccgaacagactga

SEQ ID NO: 349114 - DNA, 663 bp, Pseudomonas aeruginosa
atgaacatgatcgcaccactttcaaacaatgcgcgcaaagccgcagcgaccgactccacggtggtggaccgagggctctggcgcggcgccatcgggctgaccgtgctgtccttggccggattcggctttctctattcgctcgccggcgtcggagtcgggcaggcgctgtttccgcgaacggccaacggcagcctgatcgagcgcgacggcaaggtgatcggctccgagctggtggcccagccgttcgcaagcgacaagtacttccagccccgcccctctgcggccggctacaaccccctggccttggccggcagcaatcaagcacggaccaacccggacctgcgcaagcgcctggagggaacacgcgcggccgcggcgcagcgagaaggcgtggattcgtccatggttccgggggatttgttcacccagtccggcggaggcatcgacccacatatcagcccgcaggcagctgccatccaggtcgatcgcgtcgcgcgcgcccgtgggctcggacgcaatgtggtcgaaggtctggtcgcctggcacacggagaacaagcagctgggtctgctgggccagccccgggtgaatgtgctcgacctgaatctggcactggatgacttggcttcaccggccacccgggcgcctgcggcgaaccaatga

SEQ ID NO: 349115 - DNA, 2025 bp, Pseudomonas aeruginosa
atgtctactgcacataaaaaaatgccgatcgacgtggaccggggtctgaagcccgcgctcgtcgattccttcaagaagctggccccgcaccatgccatcaagaacccggtgatggccgtggtgtggctgggcacgctggtcaccgccgcgacgaccatcgctggctgggccagcacgggattcggctgggcggtcaccatcatcctgctgatcaccgtcctgttcgcgaatttcgctgaagcggtggccgaggcgcgtgggcgaggccaggcggcctcgctgcgccgtgcgcgcaaggacctcgtggcgcgccgcctcgacaaaacggaccacgagacgagcgtccctgccgccgatcttcggccgggcgaccgggtcgtggtggaggaaggccaactgatccctgccgacggcgagatcatcgagggcctcgccaccatcaacgaagcggcggtcaccggtgagtccgcgcccgtcctgcgcgaggccggcaccgaccgctcaggtgtgatcggcggcaccaaggtgttgtccgatcgcgtcatcgtgcgcattacggccgaaccgggcaacagcttcctcgaccgcatgatcgcgctcgtcgaaggatcgaaccgccagaagacgcccaacgagattgcgctgggaatcgtgctggccgtgatgacgttgaccttcctgatcgtggttgtcactctgccgttcatcggcggcttcgtggatgtccagatcaacgtcgtgcttctggtggcgctgctggtgtgcctcattccaaccaccatcggcggtctgcttccggccatcggcatcgccggcatgaaccgcgcactcagggctaacgtgctggccaaatccggcaaggccgtggaagtggctggcgatgtggacgtgctgctgctggacaagaccggcaccatcacccacggagatcgtcaggccacggccttccatgcactcgccggggtggacagtgcgcaactgcgcgaggcggcgttgctggcctctctggccgatccaacgccagagggcaaatccatcgtcaagctcgcccgcggcaagaacgagaggctcgacgaacccgaaggcgcgcacttcgtaccgttctccgcgcagtcgcgtatgtcgggcgtggaccttcctggcgagcgcagcatccgcaagggcgcaatggacgcaatcgcacagcacgtacaggttttgggtggcctgattcctacagagctggaagcccgggttgcaggagttgcccgcaagggtgccacgccactggtggtgagcgatggcaagcacgtcctaggtgtcatcgagctgtccgacgtgatcaagcacggcatcaaggagcgctttgcccgcttgcgggcgatgggcgtcagaaccgtgatgatcacgggcgacaacccgctcacggcggcgaacatcgccgcagcggccggcgtcgatgactacatcgccgaggcccggcccgaggacaagctcgcgcgcattcgcgccgagcagactggcggccgcctggtggcgatggtcggcgacggcaccaacgatgcgccggcgcttgcccaggccgacgtgggactggcgatgaactccggcacccaggccgcgaaggaagccggcaacatggttgatctcgacagtgatccggcgaagctgctggccgtggtggaaatcggcaagcagcagctcatcacgcgcggtgcgctgaccacgttctccctggccaacgacgtatccaagtacttcgccatcctgcctgcgctgttcgcggcggcaatcccgtcgatggcagcactcaatgtgatgaacctgtcgagcccatccagtgcggttctgtcggcgttgatcttcaacgccctggtcatcccggcgctcattccgctggccctgcgcggcgtgcggttcaggcctgccagcgcgacccacctgctgcgcaacaacatgctgatctacggcgtaggtggtgtgttgctcccgttcgtcgccatcaagttgatcgacgtcgtgctcgccgccctgttcaacgtttga

SEQ ID NO: 349116 - DNA, 1728 bp, Pseudomonas aeruginosa
atgattgagtccatccttctcctcgttctgctcgttgcccttggttggccgtttgggcgctatctggccgcggtcatgcgcggcgcgccgatgcgcagcgacgtgctgttcggctggatcgagcggccgatctatgccgcgctgggcacacgcccccatacgggcatgagctggcgcggatatgccggagccttcctgctgtccaatctgctgctggccatcgtggtctggatcatcttcatgacccaggcctggctgccgctcaaccccgacggcgtgcccaacatgagctgggacctggcgctgcataccatggtgtccttcctcacgaacaccaatcagcagcactactccggccaggcgcaactgtcctacctgtcgcaaatgaccggtatcgtcgggctgcaggtggtcacgccggtgatggggctggcggtggttgccgccacgctgcgcggcctcttcgggggccgtcaggccatggagcatggcgtggaaggtggcgccaccgctcctgccggtgcgatcgatgtcggcaactattgggctgatgtgacccgcgcgacgctgcgcttcgtgctgccgctgtgcctggtgtggtcggcgctattgacctggcaaggcgtgccggcaacgttggcagccgggcctgtcgcagccccgatagaggccaccgccgaactcaaggagcagaagatcccgctcggccccgtcgctccgatggtcgccatcaagcaactgggcagcaacggcggaggctggtatggccccaacagttccgtaccgctggagaatcccacgcccctgtcgaatttcctggaaaccctggcaatctgcctgattccggtgagcgtcatcttcatgattgcgccgttcacggggcgccgaaagttcggcgccatggtgttcggcacgatgctagccatgtccgtggtttccgtgggcctttcactgtggtcggaggggcactcaggaacggctaccgatatcgccctgatggagggcaaggaagtgcgtctcggtgccgacgcatccgccctgtgggcttcggtgaccactcaggtgaacaacggttcggtcaactcgatgctggactcggcggcgccgctcaccggcatggtgtcgatggtgaacatgctgatgaactctatctggggcggcgtaggctgcgggctgcagcagttcatcgtctatctgctgctttccgtgttcctggcaggactgatgaccgggcgcacgccggaactgttcggccgcaagatcgaagggccggaggtcaagctgttagccatcctggtgctctggcagccgttggtcatcctgggtttcacggcggtgacgcttgcggtgcccagcctcacgggcacttcgaacccagggttccacggtatcagccaggtgttctatgagtacgtctccgccttcgccaacaacggctcaggtttcgaggggctgggcgacgccaccgtgtggtggaacgtcagctgcgccttcgttctggctgcgggacgcttccccgctctggtgatcccgctcgccatcgccgcgatgctggccgccaagcgccgtgcccccgagggctccggcacgctccacatcgaaacgccgaccttcgcactgacactgatcgggatcgtcatcatcctcacgctgctgcagttcatgccggtgctggttctgggccccgtggccgaccacctcgccctgacgcaactgcttgctcgttga

SEQ ID NO: 349117 - DNA, 708 bp, Pseudomonas aeruginosa
atgcctctcaagattattcaatcgaccgccaaggtcgttgctgttgccgtcggtgggttgctgctgggaatggcgagtaacgcgcaagcgcaggtttcaggcagcgccacactgacgtcggactacgtttggcgcggatcctctcaaacgcgcgaagaccgcgccatccaggcgggggtcaagtacgcccatgagtccgggctgtatgcctccgtctggggctcgagcgtcaagttcaagccagacagcggtgcacgcagcgagttcgaccttgccgttggatggagtggaaagatcgccacggattgggcgctggatgtctatctcctccgctaccagtacccctcggcggacaccagcctgaactggaacgagatcaacgcgagcatcacctggcgcgacaactactggctggcggtggggcactcgaacaacgcgatggccaccgacacgaccggcacgtatgcgctgctcggtgcccgttatccgatcgacgaccagtggcgcgtcgaaggcagcgtagcccgctatgtcctcgatagcacctatgccgacagctacacgcacggcgcgctcggcgtcgtctggacgtttaaggcgcctttcgaggccaggctcacgctgcatggcaccgactcggcggccaagcggctgtttcccggcatggctggcacgcgcgcagagctggcgctgcaggcctcgttctga

SEQ ID NO: 349118 - DNA, 264 bp, Pseudomonas aeruginosa
atgaacaagatcacaccgttcttgctgaccgtagtgctggccgcttgcggccagtccgagacaccgacgtcggcagcggtgccgacggttgaggaacttgcgaccaaccttgaacggctcaaggagcttcgccaacagtgcaagctcgatcgcgccaagctgggtgacgagttgtgcaaccgcgtggctgaggccacgcgcaagcgcttctatgggaatggaaccgtgccctacacgccgcccgagacaccgccgaagttctga

SEQ ID NO: 349119 - DNA, 2043 bp, Pseudomonas aeruginosa
atggtgaataacatgacagaatctgatggctggctctcccttgaggagaccgcgacctacctgggaatgggcaaaacggcgctgtatgcgatggcgcgcgagggccggattccggcgcggaagatcggcaaaaaatggatcttcgagaagagcgggctcgaccaatgggtgcgcaccgctcgccctcttcagtcgttttttctcgacgctgatttcaagatcgacgggaacgaccatcttcgcgacccgcaacgcgagggttacttgcgcacctacgagttcttccgcgcaggaaagaacaaggcaatcctccagattcccgtcgggtgcggtaagaccggcttggcatccttgcttccgttcggaatttcggaaggcagggtcatcgtcatcgcgccaaacctaaccatcaaggatggtctctacgaggcgatggacatcaccaaccgtcagaaatgcttctggcggaaatccggcgtactaagcactgaccagatgctgtctggaccactcgcctgtacgcttgacagcggcaacctctcgatcgcggcgaagtcccatatcgttattacgaacgtccaccaacttgcgaccaacgtggacaaatggctgacccagttccctgatgactttttcgacatgatcatcgtcgatgaagctcaccacagtgctgctgccagttggcagaaagtcatcgagcgtttcccgaaggccaaggtcgtgcttctgacggcaactccattccgaagcgatcgccaggaactcgatggcgaactggtgttccggtacccattcaggaacgccactctgaaaggttatatcaagcgccttaaggcgagctacgtcgccccctcgaccattgaactcggcttctccgatgctggcggaaagacgtacacattggaagaagttctgaagctgaaggaggaggaatggttcagccgcggtgttgcgcttgccaggctgtgcaacaagcacatcgtcgacagcagcttgcagaagcttgaggaactccgtcaaagcggaacgcagcaccagttgatcgcagtcgcatgctccatcaaccacgcgcgggagattcgttcgctgtaccaagaacgcggcttcaatgccgatgttatccatagcaaacagacggaggatgagcaggcggccattcttgccgcgctgcgcaacggctcgctcgactgcatcatccaggtgcagatgctgggcgaggggttcgaccatccgaaattgagcgtagcggcgattttccgcccgtttcgatcgctagccccctacatccaatttgtcgggcgcatcatgcgagtcgtggtccagaacgatccggggcaccctgacaacatcggccatatagtcactcacttgggcatgaaccttgatgcgcgcttgaaggaattcaagcaattcgagaacgatgaccaggcattctgggacaaggttattggtggcgatgaacctgaggtgccgcaggcggtgctcgacggtaccacgcggctccgcgcgggtgatcaggttgtcgttcatggtgaggtcgtcgattctttgtgggaagaggacttcacgtcggttgaggacacgcagatcgttgcagatctccgcgagcgtctaaagctcctcggcctcgacgacagcaaggctgaggagatggttcgactcgcacagcaatctcccgtgcgcaagaactcgcccactgcacctttcatggttcagccccagcgggagtgggaagaagccaggaaacggatgcaggagcaggccaagcgcttggcaaacgtgctgctaaaccatgttgaactcaagcagaccggcaacgaaatggtctacaaatacaagaccttgaagctcaccggaagaaataactacatctgcgcgctgatgatggtgaacaaagagatggaaaagcgcctgggaaaagaaaggcagcaggcgacaactgaagaattccgctccgttctcgataatctggatgacctgttgcaggtgctcgtgcggcgcgtgcacaaggcgaaggctgtgtatgaaaaaatcgagtcctag

SEQ ID NO: 349120 - DNA, 969 bp, Pseudomonas aeruginosa
atgcctctgaagataatgatctggaatgcgcaacacttcgacaaccagaaatatttccgatcacaggcatacacggataaacttgattttctcaggcattacctgacacaagaagaaattgatattattgctttgatggaaaccggaaaaaccggagacatcaatcaaactctaattgacgacctatcctccgagtacacatttatcggagcgacatcacaagaaagcggcgcgagaaaaaatacgacactggggaccatgatttttctaaagaatataatatccacgaaattctccctgattgacaactacattctctccccaaccgaacagcgcggcgctgtaataataaagcacaataaaacccacttgggattcgccttttatcattcaaactcttcgtaccgagcaatggccaacattgtcgatacagtgcagtacattcaactcaacctgagttctctaggcatctcgaaactctgctatttcggcggcgacctgaatacagatggaaactacgagagcaaagaaatctccagcagaaaaaacctgagcgacaagaacaatccctatgcaagggtgttccaggtggcaggcccctctctgtacaaactactgccaacgggcagcggctacacccatgcaagtatcaaagaagtattcgtaccggacgcaaaaagccgcagattgctcaagagcgccgaacagcagaagaaacaaccaagggtttcactgaagaggactgtacctaaaacattggtcctcacaggaaaagtgaccggatacaccacaacgtttcgcctcctcgattttgcctatgtcgatgaccttggagcctggtcggccacttgcgacgcctccctgtcagcaccaggaggtctcataaggcccatccggatgagcaaaggaaaagccatgcgcagtgaccactatcccgtcgtgttcactcacaacggtaatttcgactga

SEQ ID NO: 349121 - DNA, 1491 bp, Pseudomonas aeruginosa
atgcgcggattgttcctcggcatcgattgcggcacccagggcagcaaggcgctgctgctcgacgccggcagcggccgcacgctgggcctgggcagcgccgcgcagcgcccgccggaaggccgcgacggacgccgcgaacaggacccggcggactggctggaagccatggccagcgcggtacgcatggcccttgaggaagccgcggtggacggccgcgaggtccgcgccctggcggtttccgcccagcagcatgggctgctcctgctcgacgccgagggccgggcgttgcgcccggccaagctctggtgcgacaccgagagcacagaggagaaccgcgagctgctggaagccctcggcggcccggccggctcgctggaacgcctgggactggtgctcgcgccgggctacacgctgtccaagctgctctggagcaggcgccgctttcccgagctgttcgcccgcgtcgcgcacatcctcctgccccacgactacctcaaccactggctcaccggccgcgcctgcagcgaagcgggcgacgcctccggcagcggctacttcgacgtgcgccggcgcacctgggccagcgacgtgctggagctggtcgagccgggcggacgcctggcggcggcgctgccggagctgatcgagcccggcgcctgcatcggcaacctgcgccccgaagcggccgccgccctcggcctggctccccacacgcgggtggccggtggcggcggcgacaacatgctcgccgccatcggcaccggcaacatccgccccggcctgctcaccgccagcctgggcacctccggcaccctggccgcctatgccgagcggcccctggtcagcccgcacggtgagctggcgagcttctgcgcctcgtccggcggctggctgccgctagcctgcacgatgaacctcaccggtgcctgcggcctggtacaggacctgctgcatctcgacctcgacgaattctcccggctggcggcccaggcgccggtcggcgccgagggcctgctgatgctgccgttcttcgacggcgagcgggttccggcgctaccgcacgccagcgccagcctgcacggcatgaccgcggccaacctgagccgcgccaatctttgccgggcggtgctcgaaggcaccgccttcggcctgcgctacggcctcgacctgctgcgcgccagcggcctgccgggcgaggaaatccgcctggtcggcggcgcggcgaagaacccgctgtggcggcggacgctcgccgacctgctcggcctgccgctggtctgtccgcggcagaccgaggccgccgcccttggcgcggcgctccaggcggcctggagcctgggccgcgaaagcggcgccggtgaaagcctggaagccctgtgccggcgctgcgtggcgctcgacgagtcgacccgcacccagccccaggcgcgacaacaggcggcctacgaacaggcctaccggcgttacctggagcacctgcctgcgcgataa

SEQ ID NO: 349122 - DNA, 1965 bp, Pseudomonas aeruginosa
atgagtcgacacaaattaccgatcggggtcattgacttttttgagcgaacaactagaaaaataaatcatatatacagacctgcatggcttcttaatgagttggaaagttctacatggatcgtagactcaggggtggttgttcggaatgtagacggcacccttaaaggtggcgttcgtctaaattgggacaggcttttgccaagcggaagcttcacaagccctgtttatgcggttcctttggaacaggcaaaaatgatagtggtgtgcgcctatgatggagctcttaaagtcgctagatcgttaagaggcattcttcactttcatctatatctgttgtggctagctgagtttcttgctgttcgatatggagacaagttttctgaagagggtttttctatttttggggtggatgacgtagttgagtttcttggagcggcagaggtaggaggtgttagtggaacagcggctttcatacaacgctgggaagattatctatcaaattccaaggatggaattgagccaataccactttccgagcatctgggaaaactaggagcactggatggtgacggtaatctaaatctgcgcttcgctgcggctgctttgggggttgactacaagcggttatctcaatctaccgagttcagaagatacttgacgcatgggtttgattgtgaggctggaggtaagtccagcgagagcggggtatcaagagccacaactgctctgtcaaattggatggttaatttctgtgagctgctatcctctctgcctattcaatcgcatgtagagataggtaatccttacttaatatcggatattgtgcggcctttccgcatcggaggaaacggtagaacaagaactttgcctctttctacgggaagaagacttatgttcggttgcggcaaatggatgattgatacgtatccggtgctcagctattactgcaatgaaattattcctctttcacgatcgataatgaatgagtcgaatgtttcagtatttacggcgttatccatatcagaagaaactgttccgataccagatggactggtctctgcttttgatgtttacagacgaatgcaggtggatcctcttatctctgaggcaaaaattagaactcagtttccattctcgattttcttgttgaggcttcatacggctgtctgcttctgcttgatcggtgtcctgactagttgtcgcagaagtgagctggttgatctggatggaagcgctagctatgaggttgacggtagattctatctttctgttttactgaggaaaactgggtttgataatattcgtgaaccgatggaaaagccggttccgcgccttgtttatgagtgtttattatctttgaatgcgctaaaagaactttggcaaatcatagtgccttcaagtgatgttttatttaagtcgcaggcgttttttaaagttaacgtcagaggtgcctatccactaagtgtggctgatgcttatgtttttctaaaggaacttagtgagttcctaaaactggttgataactcgggagaacgatgggtggtgctcccacaccaacttcgccgctattttgctgtgacattttttcacttcggaggattggagaattccttgccggcgctttcttggtttatggggcatgaagatgttggggaaacctggcgctacattaaagaaagcttaacaggaaaagaactcagtgcatccgaagctgctttggctacttctgcagtttgctcagatgatcaatctcatggcgtgcagcaactcaggaatatccttgttaagcatttcggcactgaaaaaatcaacgtcatgcatgaggatgagttaagagattacctagagttactgtcggaaaaaggtgtatacaccgctaccccgattcagattaatgttggaaaaagaaagaggtatacggtagcaatttcagttagggagggtgccgatgcctcgacttggtaa

SEQ ID NO: 349123 - DNA, 795 bp, Pseudomonas aeruginosa
atgaccttcggcatgggccctctcaccaccagtctcaagccgatagactcggcccagggcctctatgaaagcggggtcaagggtgtcggcattcgcatccgcttcaagcccaggtggggcggttcagtctggtccgcatatatggtcccccccttcgaatacaggaccacggcctcgctgaacgacgccgagtttccccacataacgctagtggagttcatccgtaccggaatggaagtcggccgcggcgccattcctccgttcgatgtgaccaccagtcacttccgcagcgacaacgccggccgtgtcaacgttgccatcctcggcactcagttgaagaccacgctgacccagaacatctatttcaccagttgccacaatccctcctccgaccccaccgtcgacatgggccatccttacgccgccctggtcaagcaggggcaggtggaagaacacacgttctcgctgaccatccgttgcgagggcatgaactccaccaccaagccgccggtgaagatctacttcgaaggcaacgccgtgcgcgacggcctgctgcgcctgagcggcgacggccaggcgggcgtggcccggggggtaggcatcgagttgaagaatgacaggggcgtggccctgcccttcgccaaggagcgggcgttgccgctggcctggcgggacagcgcgcccgatgccgagatctacggcttcgccggcaaggcgaagtacgttgcgaccgagagcgagatcaaggcgggcaaggccgacgccgtcctgacctacgtgctggaatacaactga

SEQ ID NO: 349124 - DNA, 348 bp, Pseudomonas aeruginosa
atgtccccggtcgtcattcgttttactgataccgcagagcaaagcatcgaagaccaagtccaccacttggctccattccaaggtgaacaggctgcactccagtcagtactgagccttttggatgagattgaagagaagatttcacttgcacctaaaggttacccagtcagccagcaggcgagtcttctgggggtgctgagctatcgcgagcttaataccggcccctatcgtgttttttacgaattccacgaagagcaaggcgaggtggcagtgatcttggttttgcgacagaagcagagcgttgagcaacaattgatccgctattgcttggtggggccaatcgagtga

SEQ ID NO: 349125 - DNA, 792 bp, Pseudomonas aeruginosa
atgagccgtctgacggccgaggcgatcagcctctcattcgaacagcgcggccagcgccgcgctatcctccgcgatctcagcctgggcctggccaagggcgagtcgctggtggtgctgggtccttcgggctgcggcaagtcgacactgctgaacatcctcgccggtttccagaagccggaccagggacgcgtgcagatcgacggccggacactcgaagggcccggcggcgagcgcggcgtggtgtttcaggacgacgccctgatgccctggctcaacgccctcgacaacgtcgccctgggcctgcgcatccgtggcctgggcaaggccgagcgcaccgcgcgggcgcgccaggtcctgcaactggtgggactccaggagtacgccgggcagtccgtcgcccagctctccggcggccagcgccagcgcctcgggctggcacgcgcgctggcggtcgaaccggacttcctgctgctcgacgagccgttcggcgcgctcgacgcgctgacccgcgagcgcatgcaggtgcttgtgctggacctgtggaagcagaccggcaagggcctcttcctgatcacccacagcgtcgacgaagcgctgttcctggccaccgacctggtggtgatggacggcccgccggcgcgcatcgtcaagcgcctgccgatggacttcgcgcggcgttacgccgccggcgaaacggtgcgttcgatcaagtccgatcccgagttcggccgtttgcgccaggcgttgctggacgaattcctcgatgtcgcggaggccgaacatgcccactga

SEQ ID NO: 349126 - DNA, 309 bp, Pseudomonas aeruginosa
atggatgtgcacttcgcgccgaccgtggagatcggctggcggctggcgcccgcccattgggggcggggactcgcccgcgaagcagcggaaaccgcattggacttcgccttcgagcggctgcgcctgccggaggtggtggccttcaccacgccgcccaaccgtagctcctggggcttgatggagcgcctgggcatgcgtcgcgatccggccgaggatttcgaccacccgctcctggcggcagaccacccgatgcgccggcatatcctctatcgcaccgatgcggctcgctgggcggagcgacggcgatga

SEQ ID NO: 349127 - DNA, 597 bp, Pseudomonas aeruginosa
atgcagtcctacctacaatccggccgcttcgtggatagtgaccacccggtggtggtggagttcgcggaaaaatcccggggaaactcggcgaacccgcgtgaccaggcggtcgcgccgtatgacgcggtgcgctacgacccctatgtgttcagccgcgatccacggaccctggtggctagccacgcgctgcagcaggggtgcgtgcccaaggccatcctgctcgccgcctgcgcccggcattgccggactccggcgcgaatcggcctggccgacgtgcgcaaccacctggccacgccgcgcctgctggcgctgctgtgcagcgacgtgttcgccatgcatgcttatgccgagctgtatctcgacggtcgctgggtgaaggccacgccggcgttcagccgcgcgctttgccgtgccttcgacgttgctccgctggagttcgacggggtcgccgacagcgtctccatgcgttcaatcgccagggcgaaggctacagggagtacctggccgaccacctgcaggccggggccgggcaagatgaaagccatcgatagtcaccatcagccggcgcgtcttccttcttcggtccatcatcggtag

SEQ ID NO: 349128 - DNA, 951 bp, Pseudomonas aeruginosa
atgaatctcgacattggcgtgctctggatagaagactcttacagcaaagaagaggaggacagtcttcgtcgacgcatacttgacgcaggttttgtggcgcgcatagaaactattcccaatagtaatgggataaaagagctagcccaaaaccatgaactctaccattgtttcgatattattttgcttgactataagcttcaggacgaaaaaggtgacgaaatagccccatcggtccgcaagctatttccttccacaacaatactattctactcaggaagccttgaggaaagcgagcttcgtcagaaaatggcggccaagaaaatagaaggcgtctactgcagtgagcgccggagattcatcgagcgagccggatccctcatagatcaaacagcacgatcccttaatcggctttcgggaatgagagggctggcaatgagggtagttgctgaatgcgacgtgataatgaaagaagccatcttgtccatggcagctcgtagcccagagtgctctgaaaagaaaaatgagcttgacgacgatgtcattggatttatcgaacagacgaaagaaaagtatattgctgcgatcaaaggtgatatcgaagatcgcctagcaactttcgcagtggatagcacaaagctgttcaagcatttccgtcgactaactcaaatagccaccaatagagcagaaatttttgggttagatgaggaccaatcagaccgcctccgggagctacgaaaatccagcgccaactacgacaaggaggtcttgaggaagcgaaacatactcggccatgtatttgaagctcaggaggcatctggctgggttctgaggggaagcgatgaaatcaacattagtgacttccctgatataagaagaggttttgccaagcatatcgataccctccgcgagatgaatgatctagtcacccttctggatagaaagcaatcctga

SEQ ID NO: 349129 - DNA, 2325 bp, Pseudomonas aeruginosa
atgaccgaggatgtgtttcgaatcagctcgcacttaaaggatataattggtcgagatttggtaacgaaccagttcgttgccattttcgagcttgtaaaaaattcttttgatgctggcgcaacaaaagtagatatcgagtttgaccctgaagaacaacaaatagccataatagacaacggccatggaatgtcacgagatgacattacaaaaaaatggctctttgtcgcctattccgagaaggccatggctgaatcagggacctaccgagataagatcaagccagcgggtcagtttgcaggaagcaagggtatcggccggttcgcgtgcgacaccttaggagaaaagcttgagttatatagcttaacagaggctgaaaagtctatttccaaactaaaaatagactggacagaatttgagagagatagcaccgaagagtttcagaacatccctgttagcttagaaaaggcagagtccttccctataacctacaatgtcggagcgccatccccccatggcacagtacttttaataaaaaacacacgacaccactgggacgaagaaagaattagcagacttcggagagatcttgccaagctaatcgacccattcggcactaccactcatgtttctgtatccacctggctaatagattattccgacaagatcattgaaaacgttgatggccctatcggaaacgagattgcagagctcctgcaagaaaagactagtcgtatcgtagtctcgatcgagaactcaaccatcgagagcactctgattgaccgcggaagaaaaatatactcaataaaggaaccctccccatacaacgagctcaatgaaagccgaatcacaggcgaaatttattatctcaatagagcagcaaagcaaaacttcacccttcgcatgggcgttagacctatcgaattcgggagcgtgtttctttttctgaacaaattccgaatttatcctatcggggaagaaaacgatgacacgctgggactgaaccgcagaaagcaacagggacaatcgcgctatctaggtacgcgagacataatagggcgcatcgatgttatagctcgccccaaaatgttccgcgaagtttcgagcagagacgcaggtctagtagaagatgcatgcagccgcgcattatacgaagcaatacgccgacacatgatttttcgactggaacgctacgttgtgggcgtcaactggcaagacaaaacagaccagaataaagacacccctgagcgtttagaaacggatgagtcacgagaaagaattctaaacgttattggagcactcgcgagatcaaaggatatcgaaatcctttactacgacaaagagattctccaagtctcggaagacccagaccagatcacggacgaagtgctcaaaacgatgtcagaagtggcagagaatcagggcgatacctctctccgcgctcaaattgaagaagctaaaaagagaatcgtcgagctaagagcgtctagagaggaagcacgagaaattgcgcagcgcgcaatagaagaccggaatcgcgcggatgctcatatcgcaaggctagagcaacaggcagcctttttgggtagtagtcaagatgtagatatagagcgcactcaactgctaatgcatcaggcaactatccacttagggcatatacgctctgcaattgccaactctgcccatgaacttagaaatgttctctcgaccgctcaaatgcctagtgaggggctggacaaccctgacgatatagaagatttactagcgtccatacgccaatcaacgaaacgcgcatccgcatcgatcgccagcgcgaccctttcgggtgacagattgagcacagtcctatcattcgcccccaacattcgggtagatcttcagactgataaagtccatggtgatttggtgcagttcttagatgaatactttgacgttcggctagcgggaatgtcgggagtacctcgcgctaccttcgatgattcaggagagtcattgattagagacttctcccccgtcgatatcgcagtacttgtcgacaacctattagataacgcacgaaaagccaaagccagcaaactagagttcaaagtaatcaagaaaacaaaaagccatataaaaatccatgtaagcgatgatgggctaggcattgacgagaggaaagtcgatccctccaaaatctttgagcgaggatataccggatcggataatggcacaggcataggactctatagcgtaagtcagataataaaagatatgggcggatctatcgaactcgtgggtgatggaagtcgcgcagactttgaaattacaattcccggggataaataa

SEQ ID NO: 349130 - DNA, 2148 bp, Pseudomonas aeruginosa
atggagagctcccaacacgaaggcgcacgctaccctgccgcactggttgactgggccggccatcactcaggtggagtgaagcgactactcgacaagaacagcggccagccgaacaaacaactgctacgtacaaacctcctctcgcgactccaagcctggaccaacgagctccccaccggtaatcccagcactccaaaaatcatcctactggtggggggacctggaaacgggaagactgaggccatcgagtccactatccgctggctagatgaaagcctcggttgtgatggccgattgatcgacgagctcacgcagtccttccatccccctgctggattagcagtaccgcgtagagcaagagccgacgccgggaaattagccagtattgccagcaacctgagcctggacatcgttcaggatgcctccgcaacggctggacacgatggaagcagcgccccagtcctcctaatagaagaacttagcaagcttctgagcgagtcgtcttcccaggcttatctctgctgcgtcaatcgcggcgtccttgatgacgccctgattcatgcaatagacaacgatctggacgaggcgtgcaccctgctcgaggctattacccgggccgttagcctggcacacgatgccccttcatgctggcctctcgaaggttttccatcggttgcagtgtggccaatggatgcagagtcacttctggtcgagcctgacgacgactcgaaggcgcccgcggagatacttatcggacaagccactgcatcggatatgtggccagcaaagggaacatgccctgcgggcgacaaatgcccgttctgcgccagccaggcaatactctcacgagacgaacacaggacagctcttctgcagatactgcgctggtatgagctagccagtggcaagagatggagcttccgggacctcttctccctgacatcgtacttgctggctggccaccatccggcagtccatgcacccaccgggaatccccaccagtccaccccgtgccaatgggctgcaaaccttgtcgaactggaccaaaaggcccactcggcctcaaggcataccaagcagtcgcttaccgcaatcttccacctggccacatcgagctaccagcacgccctcttccaccgatgggacagaagcacggctggctccctccgcaccgatctcaaggagctaggactcgagaaagagctaggtacggaggaagttcggaccttgatgggtcttgcccatttcctggcggaacgcaaaggccactatcttcctgcgaccatcgcccccttgctggaaggtttggtaaacatgctggatcccgctttcgcaagtccggacagcgaggtcgctgtgagcggccggagcatgatcatgctcggtgacctagatatgcgcttcagtcgctcccttgccggcggtatcgagttcatccgcaagtaccagatgctctcaccaaacgaactggaaatactcaagcgtctttccgttgcagattccatgctttccctgccgatcgtccggcgcaagaagcccgcggctgctagccgggtccaacatatccttcgcgactttgcgtgccgcttggttcgcaggagcatttgcacccggacagctgccgtggcggacttttcgatccttcaagctttccagcaggtcgtcgaggacagcgacaaacaccagcacctctatgaggtggtcagacaggtaaaagaacttctgaacacgggcaaggaattcgaggtatcgctaacaactacttttggccagccgcttcctcctcgacagcgacaggcgacattggttgtgccgcagagcccggtaaagatgtttgcccaggacactgccggacgccctcgcccaccgatctgctacctaaaagtgggccaaggccgatcggcccaacccgttccgctgacctatgacttgttcaaggccgtaaaggaactcgaaaggggactctcccctgcctccctcccacgtacagtcgtggcactgctcgatacgacaaaggctcgtctatccggccctatcgttcgtgacaaggagctactcgacgatgccaggatccgcgttggagcagacggcacggttgtagggcactcgtggagcggcttcgtcgcagacaaggagagggacgtatga

SEQ ID NO: 349131 - DNA, 1488 bp, Pseudomonas aeruginosa
atggagacgaaggtcccacaccttgaaggctatacaagcaatggtcctggactacagctgacgctccttcccccccacatagatccatctgggcaggagcccatgaagcagaacgagaatttcccccccttaccccccctggaccagcccctaaagtttgccgacctatttgcaggttgcggcgggctatccttgggcctttcgctcgcagggctgaatggagtgttcgccgtagaacgcgacaagatggcgttctcgacgttgtctacgaacctgattgagaggaaggatgttcccatcactccattcgcctggccttcctggctagagaagcaagcctggggcatcgatgacatcctcgaccagcacggtgctgagctcgcatccctgcgaggaaaaatacaggtacttgcaggcggccccccctgccaaggattcagcttcgcagggagacgacaggaggccgatcctcgcaacaagctgttcgagaagtatgtggagatggttagagccatccagccagcagcgctcgttctggaaaatgttccaggaatgaaggtggcccacgccactaagggacgagagctggtgaaggagatttcgaaggagcgaggactacagatcaaaccacagtcctactatgacaagctggtcgaaagcctgactaggatcggttatcaggtccttggcaagattgtcgattcttctctattcggggttccgcaaaagcgcccacgcctaatcgtgatcggcctccgccaagatctggccaatcatctcgtcggaggcatggacagagcgtttgacctgctcgaggaagctcgtcgcaaacagttgcaagacctcgaccttcccgatcaggtccgtgccgtagatgccatttcggacctagagatgagggggcgcggtacaagaccttgcagtgacgacgactcccccaaagggtttgaggaaatccgctataccggcccccgaactcatttccagcgattgatgcaccgggactgtgtcggcgacgttgacagtttgcgactggcgagacaccgggccgaagtcagggataggttccaagcaattatcagtgacaaggaatgcgccaagggcgtacgcatgagcgccaagcttcgtgagaaatatgggctcaagaaacatcgcatctacccaatgcaggcaaacacgcccgcccctacgatcaccaccctgccggatgacgtcctacattacagcgagcctaggatattgaccgtcagggagtctgcgcgactgcagtcgttccctgattggttcaggttccgcggcaagttcacgactgggggcagccagcgtacaaaggaatgtccacgttatacccaggttggcaacgctgtgcctccctatcttgccagggccattggcatggcgatccaggcaatgctgaaagagaccgtggcgctagcaaaagagcaggcggaactcgagcaagaagaagaaatgatagccatcgcttga

SEQ ID NO: 349132 - DNA, 480 bp, Pseudomonas aeruginosa
atgatgcagtggcttggggactcggagaaccacctgaccttatccttggacaacacgagcaacctgccggccgaaaaggtcaaagtgagaatccttgatgccgtcaaagccaacgagaaagtatcaaggacactgcccctttcaccgagtcgagcgattccccaaaagctgcttgataccctgaccgtcccgagacatggctcaattcagatcccaattgggcctgagtccgagctcgtcatattgaccaaaaggcgcgtgaccactggctatgatttcttgggcgtgagcctgtccccaaacgtaccggacagcatcagggctgcatacttgagccgtaaaggcataacgcacaactaccagctggcgatcgagagcgcgggcctcggcgtcgagctgaaatatgacaacatctttggtgggagcagtacggtcctcacgggactttacttgttctacggccgcgtcattgcacactga

SEQ ID NO: 349133 - DNA, 270 bp, Pseudomonas aeruginosa
atgggctggccgcacattcgatatctcatcggtctttatctcaagcagtttcttggagcgctggcggcgctgttgagcttgatctcggggatgttctggcatatttccgccaagcagcagctggacgcgctgacggctgctccagaaatggtggaaaaactcaccagactctccattcagttcaacctctgggccgcttactgtgcagtgtttgttggactatgccttgcttgcgccttgttctttgatgggatgtcagacccttcgtaa

SEQ ID NO: 349134 - DNA, 1407 bp, Pseudomonas aeruginosa
atgaacgacccccagggcttcgaggccatctcgcgccgcgaacagggcctgcaacggcggctctcggccgcgcagatgagcatgatcgccatcggcggcgccatcggtaccggcctgttcatgggcagcgccttcgccatcggtttcgccggccccagcgtcctgctcagctacgccatcggcgcgctgatcaccctgctgctgatgggctgcctggcggaaatgaccgtggcccacgctacccccggctcgttcggcgccttcgccgagcactacgtcggcccgctggccgggttcctggtgcgctacgcctactgggcggccatcgtcctggcggtgggcaccgaggtcacggcggtggccatgtacatgaagtactggttcgccggtgtcccggaatgggtctggatcctctccttctcgagcctgctgatcggcctcaacgccagcagcgtgaaggccttcggcaacttcgaatactgcttctcgacactcaagatcgccgccatcgtcgccttcatcctgctcggcgcttacctggtattcggctccgccaacccggcctacggcatgcacaactacagcgcccatgggggcttcttcccgcatggcctgaagggcatgtggatcgccgtggtggtgtcgatcttcagctacctcagcgtggagatgatcgcggtcgccgccgccgaggccgaacatccggaacaggcggtgaagtcggcgttccgctcgaccatcgtgcgcctggtggtgttctacctgctgaccctggcactgatgctggcgatagtcccgtggaaccaggccggacagagccagagcccgttcgtcacggtgatgcgggcgatcggcctgcccggcgccaccggggtgatgaatttcgtggtgctggtcgccgcgctgtcggcgatgaacagccagctgtacatcaccacccgcatgatgttcagcctgtcgcgcgccgggcatgcaccgaagggcctcggcgaactgagccgcaagggcgtgccgctgaacgccctgctgttgtcgagcgtcggcatcgccctggcgaccctgctcaacctggtctacccggagcagtcgttcaccctgatgatggcggtgtcgatgttcggcgcgctcttcacctggctgatgatcttcttcacccacctctgcttccgtcgccaccgcgcccgccacggcggtgcgccgctggctttccgcatgcgcctggcgccctggtcgacgctgcttggcctgctactgatggcggcgatcctggccaccaccttcttcaccgaggcgttccgcatgaccctggtcttcggcgtgccgttcctcgcgctgctcaccgccttctacctggcgttcgtccgcaggcccggcagggattccccggtagagcgggcaacgccatag

SEQ ID NO: 349135 - DNA, 402 bp, Pseudomonas aeruginosa
atgagcgaacagcgacagaccttgccggcgcaacaccaggaccagcgccccggccacgaaagcgagatgcggccgaagccggagttcgtttccggcgactaccatccggcggccaagctggagggcaaggtgaccctggtcaccggcggcgacagcggcatcggccgcgcggtggcggtgaccttcgcccgcgagaaggcggacgtggtgctggtctacctggaagagaacgaggacgcggcgaagacccgcgagatcatcgaatcgctcggccgccagtgcctggtgttcgccggcgacgtcgccgacgccggcttctgccgccaggtggtggacacggtgcggcagaaatgggggcgcctcgacgtgctggtcaacaatgccggcgagcagcatccgtag

SEQ ID NO: 349136 - DNA, 888 bp, Pseudomonas aeruginosa
gtgatcatcgatctttcccaactgccggaacccgaggtcatcgagagcctcgatttcgaggcgatctaccaggagttgctcggcgacttccgcgcagccatggccggcgagtggacggcggagctggagtccgatccggtactgaagctcctgcaactggcggcctatcgcgaactgttgctgcgagcgcggatcaacgacgcggcgcgggcggtgatgctggcctatgccagcggagcggatcttgatcaactggcggccggctacaacgttcatcgtctggtcgtgcagaaggccgacccggacgccgttccaccgaaggaaagcatgctggagagcgacgactcgttgcgtaatcgcacccagttggctttcgaccaactctccgtagcgggtccaagaaacgcatacatcgcctatgcgttgggcgccgacggaaacatcgcggatgtctcggcgatcagtccggctccttgcgaggctttggtgtcagtactgtccacggagggcaacggagtggctggcgaaccgctgttggaagcggtgcggcgggctctgaacgacgaggacgtacgcccggtgggtgaccgcgtcaccgttcagtcagcgcgaatcgtggactatcgggtcgatgcagtgctctatctttatcctgggccggaggcagaactgatccgcaaggcagccgaggcctcgttgcagggctatatcgccacccagcggcgcctgggtcgtgatatccggcgttccgcactgttcgcagcattgcatgtggaaggcgtacagcgtgtcgaattgtccgcacctggccaggacatggtgctggacgaaacccaggcagcctattgtacgggctactcgatccgcgtggggggctccgatgagtag

SEQ ID NO: 349137 - DNA, 615 bp, Pseudomonas aeruginosa
atgagtagccgcctgttgccgaacaattccaccgtgctggagcgtgcgctggccagcgtattgccgagcgatctgccggtgccgttacgcgaactgatgaatccgcagcgctgcccggtcgaattgctgccttacctggcctgggcatggtcggtggatcgctgggatgaacgatggagcgagggagtcaagcgcaaggcgatcgccgctgcattccacatccaccagcacaagggcacgatcgcggcgttgcggcgagtgatcgagccgctgggttacctgatcgaggtactcgaatggtggcagagcgacccgccggggccgccaggaaccttccgcttgcgcatcggagtgctagagagcggtatcaccgatgtcatgttcgaagaggtggagcggttgatcgacgatgccaagccgcttacccgccatctggtcggcatggatatcagccttgaaacccagggatggatgcatatcggctccggccactatgacggcgacatcctcaccgtttactcctatctacccgaggtgatcgaggtggcgggcctctatggctcgcccgggcacgatcacatcatcgacagcatgagcgtctatccatggccgtga

SEQ ID NO: 349138 - DNA, 1200 bp, Pseudomonas aeruginosa
atggccgtgacttattacgcaatcctaaccaatatcggtgccgggaagttggccaatgccactgccctgggcactaccctgaaaatctcccacctggcggtaggcgacggtggcggtagcctaccgactccggacgcctcgcgcaccgggttggtcaatgaagttcgccgagctccgttgaacagtctcagcgtcgatccaaagaacggctcacagatcatcgctgagcaggtcattccggaagacgtcggaggctggtggatccgtgaaatgggcttgtacgacgacagcggcgccctgatcgcctatgccaactgcgcgccttcgtacaagccgcaattgtccgagggtagcggtcgtacccagacggtgcgaatggtgctggtggtcagcagcactggagcggtggagctgaagatcgatccgagcgtggtgctggcgacgcgagagtatgtcgacttgcgcatgaaatcctatgcaccgctggactctccgttttttgtgggtaacccaaaggcgccaactttatcagtgtccgataggtcttcctcaatcgcaaccaccgagtttgtgagaagggcgcagggaagttgctcgggaactgcctactttcttggtgatgcgatactcgaggccgctgatatcggtaaagttattgtcgcgggtgccagccctgctgcttcgacctggacacctcccgatatggattcgttgcctgtcggaagttctttcgaagtcgttaacttcagtggcttcccagtgaatctggtgcagcgtcgtgatggcgatgtctatttgagtcccgagaatacgcaagggtctgcgaagaactatctggtggcgaatggaacctcggttaaagttactaaatatcaagaaaaaatgtgggtggtgagcagcgtctcgccggcctacccgaaatcattttctccagccggatatgtcaagcagccgagtggtttgattattcagtggatggcggttggtttggagtctccgtactccgattcagaggtattgctacccattgcctttccgaatgcaggtctttctgtcgtggctagctatgtctcctcgctgggacggtacgctggacgttgtggggcctcgtttgtcggcctatcgagactgaaagtgtccaatgcagtcccggaacttaccggaatacagactttgaatataattgctataggatattga

SEQ ID NO: 349139 - DNA, 1161 bp, Pseudomonas aeruginosa
atgagcttctttcacggcgttaccgtgaccaacgtcgatatcggtgcccgcaccatttcgctgccttcttcgtcaatcatcggcctggttgataccttcattccctccgccgacctaactgccatccccgatgtgccagcacttatcaccagcgagcgcgaggcggctgcggcgttcggtgtcggctcgtcgatctacaaggcctgcaaggccatctatagccaagcctcggcggtgatcgtcgcggtcggagtgctcaaggtcgaagaggctaacgagcaggcgtccgctatcattggcagtgtcaccgccgctggccagcgcaccggtcttcaggccttgctggatggcaagagccgtttcaacgctcagccccgcctgctggtcgcaccgaagcattcggcgagccaggcggtggccagcgccatggtcagcctggccgagaaactgcgtgccgtggcgatcgtagatggcccgaacagtaccgacgaagcagcaatcgcctacgccaagaacttcggcagcaaacgcctctacctggtcgacccgggcgtccagagctgggatgtccaagccaatggcagcgtcgatgcccccgcctcggcctatgccgccggcctgttcgcctggaccgacgccgagtacggcttctggtcctcgccgtcgaacaaggaaatcaagggcatcaccggcaccgcccgcccggtggaattcctcgacggcgacgagagctgccgcgccaacctgctgaacaacgccaacatcgccaccatcatccgcgatgacggctaccgtctgtggggcaaccgcacgttgtccagcgacagcaagtgggccttcgtcacccgcgtgcggaccatggacctggtgatggacgcgatcctcgccgggcacaagtgggcggtcgaccgcggcatcaccaggacctacgtgaaggacgtcaccgaaggcctgcgcgctttcatgcgcgacctgaagaaccagggggcgctgatcaacttcgaggtctacgccgacccggacctgaacactgccagccagctggcccagggcaaggtgtactggaacatccgcttcaccgatgtgccgcctgccgagaaccccaatttccgtgtcgaggtgaccgatcagtggctcaccgaagttctggacgtcgcctaa

SEQ ID NO: 349140 - DNA, 1281 bp, Pseudomonas aeruginosa
atgaccactgaccggttgttttcccgggggcggcgtttgctgctgatcgccgctgccctgctggccgccgtcgcgctgccgacctggctgctgttcggcgggggggcagttccacgcgacgaagacgagcgctggatcgatgtacgcccgtcggcgctggtgcaccggataggcctggtcgggcgcctggaaccggggcgggtggtgaccttggcggcgcccttcgccggcaatgtcgaggcactgctggtgcaacccgggcagcgggtcgaggaagggcaggaactgttgcgcatggacactcgcgagatcgccgtgcaggttcgcgaggcccgctcggcgctgctcaaggcccggcggaccttgcaggagttgcgggactgggagcgcggcgagaacatgacgcgcgcccgccgggccctgcgcagcgcgcagctagcacaggacagcaccgaacgaaagttgcgcgagacccggcaactcttcggcaagggcatcgttccgcgcaacgaactcgacgacctcgaacagcaggcgcgtcaacagcggatggatctggaggctgcccgcctggaagtggaggcgacgcgcagcaaggggcagggggaaaacctgcagatcgccgagatggacctggccaatgccacggtgaagttcgagacgctgcaggcgcagttggatgggcggacggtccgtgcgccgttcgccggcatcatcgttgtcgctcccgggtcttcgaatgagcagggcgtgcgggagccggtgcagaccggaagcaagctgggccagggccaggcactgttcggactggccagcgtggaacgcctgaaggtttccgccagggtgtcggagctggacatcaatcaactgcgcgaagggcaggaggtcgaggtgagtggtgacggtttcgacggcatcgccttgaaaggagtcatctccgctcttggcggacaggcgctgccggggggcacccagggcagcagcccacagttcgaggtaacggtatcggtggcgcacctcacccccggccaactgaggaaaatccgcctgggcatgagcgccaaactggcggtcaccacctatcgcaacgagcgagcactcgtcgtgccgcccgaggccgtgcgtcatgagggcgatcgattgtccgtggtttaccgcgcgtctcctgccgccccgatcgagcaacttcctgtccgggtggggcgttccactcccgagggcgtcgaagtactggacctggcggcggggcaggtgcgcgtgcacgtagcggacgggagctga

SEQ ID NO: 349141 - DNA, 489 bp, Pseudomonas aeruginosa
atgaaatccatcaaatccctgccgtcccttgccgctctcgctttctgcctgagcgcttcgtccctggccagtgcggccaccatcaccccggtcggtaccgcattcaccgctcccggcaccatcagcgtgagctcgccggcgtcgctgcaggttccggtgaactgcaacgtgaccttcaagggcaccaccgctccggatggttcctatgccagcatcgacagcgtcaccgtcagcggcagcaatccgctgtgcaacgtgccgcagatgaccggcctgccctggaggttgacggtttccagcgtcaccagcggccaggtcgatggcgtcggcttcaagatcctgacttccacctgcggcccgagcaccgtgtacggcgcctggagcaatgccaccaacaccttgagcggcagcaaccagccgctggccggtaactgcaagatcaacagcctgagcgtgaatccgagtccggcattcaccgtgaatccgtaa

SEQ ID NO: 349142 - DNA, 1995 bp, Pseudomonas aeruginosa
gtgatccagaacctcgcgcagctgcgcgagatcgaagccgacatggacggtcgctacgtgctcggcaacccgatcaaggggggcaacgccagcttccgcaccctcggcgacggcgtgaacttcaatggaaccctggatggcctggggaatagcatcagcgacctctccgtctacggcaccagcggctatgtcggcctgttcggcgtcaacgacggcatcctgcgcaacctgaatcttgaccatgtctgggtcagcggcgcgcaatccctctactacaacacacaggtcggcaccctggcaggcgtcaacctcggcaccatctccaacgtcaaggccagcaatgtgcgagtcaccggcgcctcgtacttcaacagcctgggcggcctggtcgcccttaacctgcagaacggcagcatcgaaaactcctccgccagcggcatggtcgtgggcgaccagtacacctatgccatgggcggcctggttggcgagaacatcgccaacgccaagggggtggcccgtatcgaaaacagtcaggctgctgtcgtcctgaacgggcaactgtcgagcgacttgcgccactacggtgccggtggactggtcggctcgaacatcggcggcaggatcgccaacagcaagagcgcgggcgccctccaggtcagcggcgacaacctcaacctcggcgggctggtcggttacaacaacggcggcaacctgagcaatgtcgagtcctcctccagcgtgacgggacagggactgaacggtctctacggcggactggtcgggctgaaccgctccggcgagatcatcaacgccaaggccagtggcaagatctccggcagcggtagcgaggcaatcggcggcctggttggcaagaacctgtacagcgccatcatcaccagcagcgccacgggcgacgtgagcgacctgcgtggccgctacctgggcggtctggtcggttacaaccagggcggcgcccttaccaatgccttggctaccagcaacgtcaccgccggtgctggcgcacacctaggtgggttgctgggctacaacagcgacgctccgctggtcaacgtctcggccaggggcaaggtcaccgccgatggctcgcgggccatcggtggactggtcggctacaacctgaacggcccgatcaccggtggcagcgccagcggcgcggtagccgacagccgcgggctttatgtaggaggactgctgggctacaacaagggcggcagccacaccaacctttccgccactgggaatgtcaccggcggccgggaaagccgggtcggagggctgatcggtgccaacctggacgccttactgaacaatgcttcggccaaaggcaacgtcatcgccgacaaggcctacgccattggtggactcactggctggaaccagggcggcaggctggagaacctcgaggcgagcggcaatgtctccggcaaggaggctcagaacctaggaggcctgatcggcatcagcagtggtgccacgatcatcaatgtcaaggccagcggacaggtcgctggcggcgacgctgccgtggccggcggtctgatcggcaacagcgacgacgttgccatcagcaacgccagggcctccggcaaggtgagcggaggccggaacagctatgtcgccggtctgatcggtgttctcggcaggaaggccaccgtggaaaacagctcggccagcggcgacgtgcaaggcaaccacgcttattacctcgccggtctggtcggcagcaactcgggtaccctgcgcaacacctcggcatccggcaagataagcggcatcgccaccggtatgggcggcctggtcggcttcaaccagggcggagtctatacctcttctgccagcggcaggctcgagccgcagctccagggacaggcctatggcgggctcatcggcaggaacttcggcaagcagtcgcaaaacacggtctacggagacgccaccaaggcgccgttcatcggccgtgatttcagcttctga

SEQ ID NO: 349143 - DNA, 201 bp, Pseudomonas aeruginosa
atgaccgtgaattgcgcgagctgcgacgtcgactgtggttgttcaccagagatcctgcacaaggtttaccggctgcaagtttgccagcctcaggtcaatggcttcctccgctacaagaacgagttgctcagccccttcgtgaaatccagcgtgatgttggtctggcccctcactcattcctccccaacctatacccactga

SEQ ID NO: 349144 - DNA, 1251 bp, Pseudomonas aeruginosa
atgcctcggaacttaacaaccgaaataagcccagcccaagatacagtcaggatcggaattgagcttgagggggttggaactgtccgcattaaatggccagaagaactcggccatggatccatcaagaatctagaacacctccgagctcaaacagatttcaaagacaccctcaagcgaacccctctgctccgctctaatagttatggggatttccgtggcatctatattacgccagaggaagcacaagaagaaaaactaggtatagatcatcctgccgaaatggtttcccagccacacactcttgatgaacaaaacctagactttctcaggaactcagtatacaaagcccttcgatcaaaccttaaaggcaaaatcgccttatccactaacgagcagaatacccggtatggcaatgcgccagacaagtacccagcaattcctaacgggaaagtcccaacaatccaaactggcgcaacattttcgggcatgtacacaaacagtggcgaagcctttcccaccgtcaacattgttcaaacgagctggggaaagcaagtgccggtgcttggcgggaatcttcaggttacctgtggcattgcagttgagcaactctttcggcaggaccctgaacagctttcactaatggcagacttcatctcccgcaacgagtacaaaacccgatatatctcccttgtaacttgtacgctagccattgttgaagccctgaccgctcaaggcgaaatcttttacgatttcgctgacaagcgcaacgaacttcacctcgcaacatacatgttcctgcttcatcatgtcgcccctatctggaagcccgcggccggatatgaaaagtgcgccgttggagcaaacttcaagggaggaagttcctttgtcggctgcggtgtcagcaatacaaacgacctaatccccgacagcagttacgcctccgtcttcgctaaaataatagtcgcgataaatagcaccaatgcaactgacaaagcaaagatcctaagcaccctcacatccccccaagtcattgagctctacggaaagcctggactttcctgtcaagtgcattttgacaagtggttttcgatccccaattttagcgacgctggcgggaatctttataccgtcgtcgaaatccggcagcatgcaacaggaatgaatcttgagatggctggatttctaggaggaaggcttacttccaaccagtttctcacgagaattaccccatttgtttttgctcagcactga

SEQ ID NO: 349145 - DNA, 1395 bp, Pseudomonas aeruginosa
atgacgtttccctgttatccaaaatacagagcttcaggggtcgagtggttagaccaagtgcctgaccattggagtagtgttcccattaagtacatggcgcttgagcgaaattcattgttcttagatggtgactggattgagagcaaggatatttcgtcagatgggattcgctacataacaacagggaatgtcggcgagggtgcgtataaagagcaaggtgctggatttatttccgaagaaactttccatgccctcagatgtacagaggtttacgagggtgacgttctggtctctcgtttaaacaaccctattgggcgggcctgcgtggttccaaacctcggtgggagagtggtcacctctgttgataatgttatttttaggccggacttaaagttttataagaaattcatcgtttatctgtttagcagtgaagagtattttaagcacacgagtaaccttgctcgtggggccacaatgcaacgtattagtcgcgggcttctaggtaatattcgagttgttacgccttcgcttgaagaacaaacccaaatcgcccgcttcctcgaccacgaaaccgcccgcatcgacgcgctgatcgaagagcagcagcgcctgatcgaactgctcaaggaaaagcgccaggccgtcatctctcacgccgtcaccaaaggcctcgacccgacggtgccgatgaaagactccggcgtggagtggctgggtgaggtgccggcgcattgggaggtcagatcaatctcatcgataagcaaaaaaattaccaacgggtatgtagggcctacacgtgacatattggtcgatgagccaggtgttcgttacttacagtcgctacacataaagtctaataagataaaatttgaagtgccgtatttcgtgtcagagcaatggagcgctgagcatgcaaaatcaatccttgcttccggcgatgtgctaattgttcaaactggtgatattgggcaggtcgccgttgttacagaagagcacgctggatgtaattgtcatgcgctgattattgtctcgcctgtccgtgaggttgttttaggcgagtgggtgtcatgggttctaaattcaacttatggatatcacagcttgctttctattcaaacgggcgcgatgcacccgcatttgaactgcggcaatgtgaaatttttgaatctccctattccccctcttgaggagcaggctcgcatagtctctttcattgaaagtggtgagttagagatggactcgctaatgtccgagaccaaacgaagcttactcttgctccaagagcgccgcaccgccctaatctccgctgccgtcaccggcaaaatcgacgtacgcggctggcaaccaccggccagtacccaagcccccgaaccagcagtagcagaggccgactaa

SEQ ID NO: 349146 - DNA, 1083 bp, Pseudomonas aeruginosa
atgagaagctccaagggcgagcatggcccggttcttattgactttctattacacataaacggtgacgtttccgcccgggtggtgcgggtgctgcgcgagctggcgccgcggcttgaggtgtattcgatcgacgagagctttctcgacctggccgggctgggccggccgttggctggctacgggcggcacattcgcgcggaggtgcagcgcctgacgggcatgccggtgggggtcggcatcagcacaacgaaaaccctcgcaaagttggccaattgggccgccaagcggcgcagccagagcggggtggtggtggccacgcggcccgagcagcaggcggcgttgctcaaggacgcgccgctgggcgaggtgtggggcgtggggcgcaagctgcaggcgcacctgggcgcgctgggtgttaaaaccgcctgggatctggcgcagcaggacgcctggacgatgcgcaagcagttctcggtggtgctggagaagaccatccgcgagctgcgcggcgaggcgtgcttcgccctggacgaggggccggagccgaagcagatgatcacctgcagccgcagcttttcgcgccgggtgacggagctggcgccgctgcgcgaggcggtggccagctacgcctgccgcgcagcggagaagctgcgcgcgcaaggcgatgtgtgccagctgctgcaggtgtatatccgcaccggggtgttcaacccggacgagccgcgctacgcgcgcaccgccagcgtgccgctgcacacgccgagcaacgactcgcgcgacctggtgcaggcggcgctggccgggctggagggtatctaccggcccggctaccggtaccagaaagccggggtgatgctgatgaacctggccagccccgggcaggtacaggccgacctgttcgctccggcgccgcggccgcgcagcgcggcgctgatggcaaccgtggacaggatcaacaccaacatgggccgcggcaccgtgcgcctggcgcgcgtgccggccctgggcggctggtcgatgaagcaggagctgcgttctccgggatacacctgccgctgggacgagctgccaagggtactttag

SEQ ID NO: 349147 - DNA, 2781 bp, Pseudomonas aeruginosa
atgaacgcagtagaaattgaatcagccgtctcggacttggcgctccagcccttcgatggaacggagttcccgtttgcattcctacaagccttcggaaacaaggagacgacgatcaagcgcctgcgttcgggcgcatcgaacaagtccgacttgggcggcgtgcttcaaacgaacaacattcacatcgcggttgcacagccgggagaggtgacgaagacgctggctgcactgaaggccagctcggcaacgaccagggcgaaagcacgcttcattctagctaccgatggcgaggggttcgaagccgaggacatggagaccggggagacggtcgcatgtacctaccagcaatttccggatcacttcggctttttcctgccgctcgccggaatcacgacagtcaagcaggtccgcgatagctctttcgacatccgggcaacaagtcgcttgaaccgactgtacgtcgagttgctgaaagacaatccggactggggagccgctgcacagcgccatgagatgaaccacttcatggcgcggttgatcttctgcttcttcgcggaggacaccgacatcttcaatggtgaaggtctgttcactgcgaccatcgagcagatgagcgcgcgggactcctcgaacacgcacgaggtgatcagcgaaatcttccgcgccatgaacacgaagatcgcggaccgggcgaacgcgaagctgccccgctgggccgatgggtttccctatgtgaacggcggactgttctcgggcagcgtggatgtgccgagattcagcaagatcgcgcgctcctaccttctccatatcggcagtctggactggacaaagatcaatccagatatcttcggctcgatgatccaagcggttgcggatgacgaagagcgtggggagctcggcatgcactacaccagcgtgccgaacatcttgaaggtactcaatccgctgttccttgacgacctacggatgaagcttgaagaggccggtgacaaccctcgcatgttactcaacctccgcaaacgtctcgcgcggatcagagttttcgacccggcatgcgggtcaggtaattttttggtcatcgcctacaagcagatgcgggagatcgaaaacacgatcaacgaacggcgtggcgaacgtggccgcaagagtgacattccgctgaccaacttcaggggcattgagctacgggatttctcggctgagattgcacgtctcgcgctcattatcgccgagtaccagtgcgacgtattgtatcgagggcagaaagaagccctgctggaatttctgcctctcagcagtcagaactggatcaccagcggcaatgctctgcgcttggattggctgagtatctgtccgcccaccggcactggtgtaaaactgcacgccgatgatttgtttgaaaccccactgaatcaggctcaaattgattttgagaatgagggcggtgaaacctatatctgcggcaatccgccatatttgggctcaaagtggcaatcggcagagcagaaggctgaactagccggaatctttgatggccggataaaaaattggaaatcgctggactatgtagccggctggttcatgaaagccgctgactacggcaagcacactcctgcggcggcggctttcgtgtctactaactccatttgtcaggggcagcaagttcccattctctggccggccgttttcgctactggctgtcaaatcgagtttgcccatacgtcctttaaatgggccaaccttgctgctcacaacgcgggcgtgaccgttgtgatagtgggtatttccagtaacgcccgcccagtacgacgcttgttttccatcagtgaagaaagcggagccgtgctacgtgaaaccgacaatatcaacgcttatctggtagctgcgcccaacatcgagatacaagcccagtctgcaccgctatcggatttggcacccatgcagttcggcaaccacccgtattatggagcggcgttgatttttccagtggaggaagctcgtgaactgattgaggaaacccccgatgtcgctcgctatattcgtccgctttacggcgcccaagaattcattaatgctgtgccgcgtgcgtgcctatggattgaagaccacgaagcagcggaagccatgcagcttgctcctgttgccacgaaggcaaccgaggtggtgcgctcacgaagggctgcgaagcaggataaggccgcgcagaagctgtctgaaacaccatatcgattccgcgatcaggtaacggctacaaggcacttgcttgtaatgccgcgcgtcagttcagagagtcgcccctacttaccagttggactgctagggcctgagtgcgtggttcaggatcaggcgctcgctctctacgacgcccccctctggaatctggcgctgattgcctctcgcttgcaccttgtctggattgccaccgtctgcggcaagttagaaacacgttaccgctactccaacaccttgggctggaataccttccccgtgccaacactgacggagaaaaacaaggcagacctcactcgctgcgctgaagacatccttctagcccgcgaagcgcatttcccggccactattgccgatctctacgacccgggaaacatgccgcacaacctgcgtgcggctcacgagcgtaacgacgaggtgctagagcgaatctacatcggccgtcgcttcaagaatgacaccgagcggctggaaaagctgtttgagctttacacaaagatgatcgccatttctggcaagacgtcgaaggcgaggaaggcgacaacggcatga

SEQ ID NO: 349148 - DNA, 2301 bp, Pseudomonas aeruginosa
atgtcgcgtcagtccacggatatcgccgtttcgtcgcagcgcctgctggcttcggccatcggtgtcgccatcactgccatcgccacgccgcaggcggcccatgccgaacaggccgggcagaaaaagaccgacaaggacggcgttctgtcgctggacgcggccaccatcgtcggtgagcagcaggacgaaaccacctacaacgtcgatcgctccgcgtcgaaaaagtacaccgcgccgctgctggatacgccacgttctgtcaccgtggtgcccaagcaggtgatcaaggataccgccgctgtttccctccaggacgcgttgcgtaccgttccgggcattacctttggcgcgggcgaaggcggtaaccccaccggtgaccgaccgttcatccgcggattcgatgcgcagagcgacacctatgtcgatggtgtacgcgacaccggcgcgcagacgcgcgagatcttcaacctcgagcagatcgaggtcagcaaggggcccaactcggcgttcggcgggcgtggctcggccggcggcagcctcaatctcgtgagcaagcaggccaaggcggggaacttcatcgatggtggcttcacctatggttccgaccagacccgccgctataccctggatctcaatcaggagttcctcgatggcaatgcggcatttcgcctgaatcttctcaagcacgacgccaatgtcgccggccgcgacgaagtggacgtcagccgctggggcgtagcgccatcgcttaccttcggcctcggttcgccgacgcgagttaccgtcagccactatcacctggaaagtgacgatacgcccgactcggggattccatacgccaagagcggcaaccgcagcaagcacaatccagataagccggtgaatgtcgatcgaggcaatttctatggattgacggggcgcgatttccagaagagccggatcgataccagtaccgtcaccatcgagcatgacctgaccgacagtctcaccattcgcaacacctcgcgttacggcaacagccatcaggactatctgtggacgcagccggacgacagccagggcaacatcaacaatggcacggtctggcgccggcagaacaaccgcgtgagcaccaccaccacggcagtcaaccagacggacctgttcggagagttctacctgggtggcttcaagaacagcttcagcaccggcctcgagttcagccgcgaagacagcaagcgcgatggctataccgtcgataccaataccggtctgggcaacaacaagtgcaatccatcgctgatcggggctcccagtggctataactgcaccagcctggaaaaccccaatccgcatgatccgtggaatggcagcatcactcggaaatatgcgccgctgaatacggtcggcaccaccaaggccatatatgcgttcgataccatcgacctgaacgagcaatggcaggtcaatatcggtgcccgcttcgacagtttcgaaaccacggcgaagaaccatggtgtcagccccactaccaagctcagcgacaagtcgagcttctggaactggcaggcaggcctggtgtggaagcctgcaccgaacggcagcatctatgcgtcctacgccacctcggcgaccccgccggggagcatgctcgacaatggcgacacctcgaatgccgtcgacgggttcgccatcagcaataatctcgagccggaagaaaccaccaactacgagcttggtaccaagtgggccttcttcaacgagcggctggagttgagtgcggcgattttccgcacggacaaggacaacacccgtatcctggtggccaaccagacctacgacaatgccggacaatcccgcgtcgatggcgtggagctgagcgccagcggcaaactgaccgagaagtggaaggtgttcgcaggctacagctacctcgacagcgagctggttgatgccggcaaggccgggcgcaacggcaacgtcaacgcatcggcagtttccagcaatggcaatgagatgccgaacacgccgaagaacagcttcagtctgtggaccacttacgacctcttcccgaaagcaaccatcgggggcggcgccttctatgtcgacaaggtctatggcgatgtcggcaataccgtctatgtccccgattactggcgctacgatgcgatggccagctacaagctgagcaagaacgtcgatttccaggtcaatgtgcagaacgtgttcgacaagaagtatttcgacaaggcctacgcggcgcactatgcgtcccaggctgccggaaggacggtgttgttctccaccaacttccacttctga

SEQ ID NO: 349149 - DNA, 174 bp, Pseudomonas aeruginosa
atgtgcacaaacacgaaaccgtcccccgaccagcaggatgccccgctgactccggactcgccggccgtgcggccggaacgtcacaagcacgaccaggccagcgaggcgcaaccggagttcgcccccgacgatcccgacgtcgccggccgtggcgaagccgatcggcccgcctga

SEQ ID NO: 349150 - DNA, 2532 bp, Pseudomonas aeruginosa
atgaccactcggaccacccccccccaacccaaaccccctgctgatggcgaacgccgggctattcgcaatctatcggcgcagtacagagttgcagcggcactcgcatatgaggcgcttcagcaaggcgagttggagtgggttcgcctcgtcgatccagacgcaggacgcctcgatgacgtcatgattgctcgcccaggtcgtctagatgcctatcagatcaagtggtctgagtatcagaacgaggtcaagttcaatgagctggtgactgcaaccacggtttcaaacaagccctaccctgcccctttcgagctaatggcagacgggtggcgccggttgcgagcagcacatccaatgcgacggatacatgcacactatcttatgcatgacagcccgtcggcgcgcgatatgaaggatggtcgtatagatgggcaaccttcccacttgcagtcctttctgaggaatgccttccctgcacgcgcgcattggttcgacgtcaatgatcccatttacgctgcctggtcaacaaagattgacgcgatcgcggcagccacgggactgcctcacgatgagcttacgatcttcattgcagactgtgagcttgacctcggatttgtgctgccacacgcaactacgtcgcaagaagttcgccgcgccgaagacgttgatgccttggcgcatttctttatgcagcgcgtctcaagtacttcgggaccggtggagcttcgtcctgaggacattctccacggactgggatggagcgatcgctttgcgcttcgattcaaacatgagttcccggtagacgagcagctttatcagccgatccaggaaacggtcgcagctctggacaaagcggttgcgcagtttcggcggggctatctggcattggtgggaccgccggggtccggcaagtcgacaacgctgacccaaactctccgctatcgggaaggtatccgactcgtccgctactacgcattcgttagggatgatcctcgcaccgggcgcggtgaagccgcggcatttcttcatgacttatgcctatcgttgtcgggtctcggcgtagggcgtgccaaccgcttctctgccataccggatacgctgcatgcccagcgcgagcgattgggcacgctcctcggcgagctaggagaggaatctcgccagtctggggtacggacgatcatcttgatcgacggtcttgatcacatcgaacgggagcagagtcctgagcgttccctgattgaggagttgccgtcccctgccgccattccggatggcgtcttgatcgttttgggaacgcagccagtggggctggggggaccatcgcccgcacttcgcccgattcgcgcgcacctcgacgaaccttcgcgaactatcgccatggacccgctctcacgcgcgaatgtccgtcacattgtgcgaaccgcaatacccaacgttgtcctcagccgagaggacgaagatgacgtgtaccgccgttgtgctggccacccactctccttggcatacctggtgaagcgcttggctaccgccgagaattcaacagctgcagccgggcttttgaacgagatgcaggacttcggcggtgacacggacgccgagtacgcagcgtattgggagcaactcaagcatgacggcgaggtacgagagctgctggggctcatatcccgggtcaaaggaacgattgagctgtcgacgatcaagatgctcgccctcgactcagcggtagagcgatttgcgggcagtgccttctaccttttccgtcaaatcacctcagaacggtgggcgttcttccacaacagctttcggcagttcgtaattcagcggaccgaagtagacgtatttggccgccgtgatccggctaaggcggtacgttttcaccaacgcttggccgctatagctggagagccaacctccccaccggagctgcgctgggagtgcctctatcacctagagcacgccggcgaaaaaagggttctgcttgagcgtgcgcaacaaacatggttccgcgagcaatacttcgcggggcggccactggcggatattcgtgaggacatacaccgtagtcttggagcggccgccggcgagcgcgatgtagtcgctcttgccggcctactactcgtccacaaggaactggcagagagggacgaagctctagaaagtgtcgctctcaccgaccttcagctccgcttggctgacgagacaatccgaggctcattactaatggctggtagtgagttaatggtgagcgatctggttgcattgcaatggtctgggagattgtcacaagagggcagcgcggcattcgcggcaaagctttttgacgccgcggaacccgttgacgtgctagctggtgttgagggtgtcactgcggctggtgacgcggtgctggatgcatgggcttcagtggcttggcgatttcgtccattaggtcaagtggtcgaggcaattggtcatgtacgcgttgactcgagtggcccacggttggactcggacccggcgccatctacggacgaggacggggtcatgccgagataa

SEQ ID NO: 349151 - DNA, 411 bp, Pseudomonas aeruginosa
atggagtcagtccgactttcaggcgatccgctggggtcactcgcaggcgttgacgagatcatcaatcgcggcgatcgcgaggcgtttgtcgggctgctgcacgccatcattgagcagccgggcgggcctgtagcagaccgcgtgcgcacgctctatgagcgcgtccaccatcgcgcagccgatccagaatttgcagcgtggccgcagtatcaggtggcctactggctgaccgaggcaatgggccagtttcggcctgccgacgtgaaaagccaacgattcgccagcgtctgggatgccatcgaaggcgaccccgccgaggccgagaagatgaaacggtggtcggcgctgcgtgcagccgttccggtgcatgagcgtgatgtgtcattttcagaagacgactgcaccagttga

SEQ ID NO: 349152 - DNA, 645 bp, Pseudomonas aeruginosa
gtgctggccgccgagctgggcgagccgtcaccggatatggcgcgggcgctggcgatcatcgagcagatgctgggcgacatcgaggccgggcggcatccgctcgaccgccccgacgactggccccagcgtgaccgctggccggatcgacctcatttggctaggtggcgctgggcgatcaagacgcttgccgttgccagcggtacgaccgcccattgcagcccgaagcatgaatacatgcgagtcgataccaaacaggccagatcagatgctttgaccgtggcactggaggacatcggctgtctgatcgagttggcgagcgaccgcaacgaccacgcacgacctgccggcaccatcgacgatttctttcacgccctcgacggcaaactgaagcccaaaaagcccgtgaccattaacgttgccgacctgatcgcaacgctgcaaaccttgccgccagacttgccggtgatgctcatagtaagtgagggcggtatcgactatgcccgtgccgtccgggtggccgacgtagcgcggcaccgcctcgactggtcatttacgcccataggccaatactgcgagttgccggacgagaacacggttggagatccattcaaggccgtggtgatcgaccttgacactccccaatag

SEQ ID NO: 349153 - DNA, 396 bp, Pseudomonas aeruginosa
gtgagcatctggaggttcgacgagaaccggactgacttcgtgttggtgccgcctgccgatatggaggccgaccccgaggggtgctacatcatccagcgcggcgacatgctgatggtgcgcgatggcgggcatgaatggcccatgcccgaacggctgaacattgctggggtgatgttcgaccgtgagcagttcgagggcacccatctcttatctctgcgagaagagatggagcgggacgggcgatgggcgcgggcgcagttgcaagcctgtgagcagagcgaaatcaaactgccgctggaactgccgatctgggtgacaaagcgctctctggatggggctgtcgagcagacaccgccgaacctgattacgcgattgaaaagatggatgcggtcatga

SEQ ID NO: 349154 - DNA, 1224 bp, Pseudomonas aeruginosa
atgtaccggctggagctgaactacatcagccgcgatggcggcagcaagggacggaagcgggatgccgccaagcaggggcacggcttctccgctactgctgccattgcctatcgcagcggcggcatcgtgacggactaccgcacaggcgaagtgcatgactacacgcgcaagcgcaggatcggtcacacggaaatcgtcctgccgcccggtgcgccgtcatgggccagccaccgcgaggcgctgtggaatgcagtggaagcggcggagccacgaaaggatgcgcggctgatgcacgagttcatcgttgccctgccgcatggcctcactccggagcaggaaattgcgatggtgcgcgaccttgcccaaagcgttgcagaccggcacggattacccgtggactttgccatccacggcgacgatccgaagaagtgggacggctcggcaaaggggatcgtaggaaagcatgcgcatttggcgatgccgacgcgggaactgacgccagaaggcttctcgaagatcaaggggcgcgagttcattgaccggaagctggggccgaaaacgctccgctactggcgcgagcaatgggccttgattggcaacacgcacatggagcgtgcaggtctggatgaacgctgggatcaccgcacgctgtcagtccagcgtgaggatgctttggagcgtggggatacggccaccgccgaagagcttgaccgtctgcccggtgtacacatcggcgctgcttccaccgcactggagcggcgaggcatcaacacgttctggggaaacctgaaccgggccatctttgcccagaacgctgagcgcaggctggggcacgagcgtaaacgtgttgaggattcgctggccgacctggagcgccgcctgaatgaactgcgtgctgcgcaggaagccgatgcggcccagtccgaatgcagcagtgacgatccgcgctggacggtgttcgagcgtgcattcatgcacgccgcccagtttgaatatgatctcagcctgatcgaactgacggctccgctgactggactcaaggcgcaattctcggcgtatatggataccgctgccgaacagggcatgacggcggaaatgttcgcccaggcctgcgcgaagactatggcagcgcaggatcggcagaacatgcaggagcgcgccgcgaaggatgccgacacgaaatcgtcaccggaggactctcccgatgcgacgccgacgctctga

SEQ ID NO: 349155 - DNA, 240 bp, Pseudomonas aeruginosa
atgacctcgatcctgcgcactgtcttgcaacgccttggccgcgagcgaatcaccgcgatctgctgcgtactcggcacctgcctcgcgctctgggcggaaagggacgcgctgattaacgggcaccctgccgagcagctcggaaccatcgccctcgccatcgttgtcccgatcctgtacctgacgccgctggtctggctccttttccgctacctcgtgagacccgccgatgaaaaccaatag

SEQ ID NO: 349156 - DNA, 165 bp, Pseudomonas aeruginosa
atgaaaaccaatagcagctatcccctactgcgcgtgtccttcctgcgcgagcacgatcaggtcatcgccgagatggttgagctgtggctcgcacggcaggccaaaagacagcccaaaccccagccagccgtccgaatgcagcgaaccaccaacagccttcagtag

SEQ ID NO: 349157 - DNA, 306 bp, Pseudomonas aeruginosa
atgttcgtattcctacatcccgaggtcctgaaactgctctgtactgaacaggaggatcggcagcgtttcgtccgggcgatgcgctcgtgcccaggtactattctgcaaacgctgccattcgagccaagaaagcggaagccggagccccgtatcgtgctgatcccgtcacggtgcaagcgtgagtaccgccgagaggagcttgtcatctgctgcgatcgcttcgacctgttcgagaagatggatcttctggcatacctctcgctgcttcagatgcgcatagagcaagaggtaatgacagcgcagtaa

SEQ ID NO: 349158 - DNA, 900 bp, Pseudomonas aeruginosa
atgcgcagcttggacaaagccgcagccctggacgggaacgaactcgtcaacatggctgggactggccgcatcgacaagttgcagcgatcagcctatctcaagaccaagggaattaaaccgaccgagcagttccagcttgatctactttttccagacaccatcggtgaccgagaagacctgcggcacattccaaatgactacgcaaggtcgtccctcttcacggtgggcaacaagagtatgccgcgccggacgctcatgcacgaaaagctgttccactataacgatcacgtttcaatcctctataccggcatcgagcttcgcgccgaagatgacgaaatcgtgtggctgcaaatcctcaattacgcccagcgcgtgacgctcggcgagccgttcgagttttcggtcaaggacttggtggccgacgtgggatggcacaagaacggtcgctactacgacaaggcccgtgaatgcatcagccgcttgaaagcaaatgaagtgctggctctcaacaccaaggcttacggaaagagcggcgctatctcgctcattcagaactacactgcgatcaacggcgcggatggcaagccgacacattaccgtgcgtggatcgaccccaacctgattgtgctgttcgcgggtaacaccttcaccagtcattcatgggaaacctaccgcagcctgtcgccagtggcccgtcgcttggctgattacatcgagagccacaggcatccctatcccttggcattggcgaagttccgcgccatgtgcggctcgcacaacaaggacgttgccgactggcggcggacggtcaagaaggcgtgcgcggaggtgcaggccgtgaagatcgccaagctggcctttctctccaacgatgaccatatccgctgcgcaaacgactag

SEQ ID NO: 349159 - DNA, 666 bp, Pseudomonas aeruginosa
atgaatacagagttgaaatttcactatgtggcctttctggatattttaggtttcaaggctatggtcgaaagtgaagtgaagagcggtgaggggttcttcttaaggaagctctataattgtcatcagaaagcgaaatcgatttttgagtctgatcctgaattgtcagttatacaattctctgactccattgttatctctcgcccatactcaaagtgctattttgagagttttgtggaaaggatatgtatgtatcagcgataccttctcgaggaagggctgctatgcaggggaggggtcgctgtgaatcagcattttaatgatgagtcatttacttttagtgctggtttgattgatgcgtatatggtggagagtacaagcgcaaaatatcctagggttgtagtatctccggatgttgttgatcttgttttttcggaaggcggagtgtcaaatagtcttattagggagggcgatggattgtattttgtggactatttgggaggatgtgaagaggaaagggttagacttatcccagtggttcgctctatattgaacgaggtgtcaggttcagcgagttcaagcgtcagggagaaggggacttggcttgcgtcgtattgcgacgctgtgtggaacacggatttttgtccaccaagatttattgttgcctga

SEQ ID NO: 349160 - DNA, 1332 bp, Pseudomonas aeruginosa
atgaaaatcgtaactctatacaatcacaaaggtggtgtttctaagacaactactaccttcaatatagcaacctatctcgctgatcacggcaagaaagttttaatggttgatgctgatcctcagtgcaatttgactgaaattgcattggcaagaacaattgcttctttagacaaggctgcggaagctaatggtttagctgatgctggtgcgttgccggggacgagcgttttggatgcgctgaatcagcgtattaagggtgatgtagcctacattgatatcgagaagattgaaccttgcgaaattcatgagaatctagaccttcttagaggctcagttgacttgagttcaattgaggatgatctggcggaggctcatgttcagcgtatgagtatgaggacaaacctcatgcgaacctatgtctctattggggacttcttagttcggttagctgataagaaagggtatgattacatattcatcgatgtaggtccgagctccggggcgcttactcgcgcgttcttcttggcatgtgacgcattttttattcccgtcgcgccagaccgttttaatgtccaagcaataggcactttgtctaagattcttagtcgttggattagagagcatcaagaagttatttctaagtatcaagatctagagatgcctattagagctgggcggccggcattcttaggtgcaatcgttcaggcatttaagaaatatgccggtgaggcaaagcctggcttcaaactctggatggggagattgccggttgaaatagaaaattcgttgaggcctgttcttgaaatttactctgatggtttgtatcttcccgctttgtctacgcgaagtgtcgagaactcaattgcagttgagattccggatttcaatcagttagcccctttgatgcaagaagtcggaaaggcggtgttcaatattgatcgacttgatactgctctaattacaaaaagtaagaagccatggggtggaaataactggtctggggcgcagagacgcatggccagctataagctgctatttaagtggctggcggaagctttaattgctttcgataatggcgccaaaatttctccataccctaagcctgccatcgcgaaaaggaaagctcgcagaaaacctgttaaggctgtggatgctgctcaggcagcggtaaattctgagcctaagaagagtggtaagaaaacaagtgcgagtgctggtaataaaaagcctgctagtaaggcggtagcagtaaagccgaaaggaaaggttgcatcaacttctgttgctaaaaagaaacctttggttgcacctaagtcgacttcgaaaaagtga

SEQ ID NO: 349161 - DNA, 849 bp, Pseudomonas aeruginosa
atggctcgtcgccgcagaacctcgctcattgaggaccttatagagattgctagccgcttaccctggtgggtaagcctgctcattgccttgggtagctggttcatcctccatccaatcgctgacagccagcccgcagtgcccaaggacttgcatgagatggggcagtcagttgccggccagctcatccgcactttctccttttttggccagttcgtgttgcctacggtgttcgtgataggcgccattggctcagtgcttgccagggctgaacgcaagaagctgcatgcaaacgtggcaaacgcgcgagaggccggacggaccattgaaggcattagctggcgcgagttcgagctgctggtgggcgaggccttccgccgcaaagggttcgccgttgtcgaaaaaggcgaccgcgggccggacggcggtgttgatcttgtgttgcacttaggtacggaaaaatacttagttcaatgcaagcaatggaaggccatcaatgttggcgtgacggtgattcgcgagttcttcggcgtgatggctgcggaaggcgcagcaggcggctttgttgttacgtcgggtaggtacacctccgaagctaaagcgttcgcagaggggcgtaatatccagttggtagacgggggattgctcaaacgatggatttctaatcatgtggtagataagtctgaagactatctaaactcatctagttctatacagtcgaaaagtcccgcttgtccattgtgtgatggggctatgaatatcagagtcgctaagcgaggatttaattctggaggagaattctggggctgccaaaagtttccggcctgccggggtgtaaaggaagttttgtaa

SEQ ID NO: 349162 - DNA, 3225 bp, Pseudomonas aeruginosa
atggctatgtcggagattcctagaggtcagcgaaagggggatttcgggtgcgtactgtttcaacgcctggtcgtagtggtcgctactctctggggcgaggcatacgcagatcgaaaattggcagcatccgccttcgttcgccagttggaaccacttttagcctttcggcgacgcacatatcaggaagtgaatcgttggcacgattggtatgcgatagaccgcgcaagcagcgagctatacgcgcgtgctctgcttgcagctgaggcgcatagccgtgagtgcttcgaagaaaccctgggcgtttttattcaggagtggcggcgttcaacccgctcgggtgagatcatctggtccaccacgctgcgtcgaaaagtcatcctcgcggcatacggcgtagatggggacggatatcgaactgaagctctgctggaggaaatggatggcgaaatagacgcttcgtgggaactgcatgagcggcttgaggacttacacgcttccgcgattgcctggttgacgcttcgccgcatcgacaaggcgcgcgtggcgctcgacacgatgatcaagagtagctttggcatctaccatcgtaaggatcggcaaatccaggactggacccgatgggtctgtcgtttgattacagagcaagcagagccgacatgcgttgaatctgcagcagccaagctcctcagattgatccccctcctctacgagtcaggacgcggccggggcatgtccgaggcaactggcgacctgctcgaagcgatggcacgacgttggcctgttgccgcgttgagaatcggtgagtggttactggcgcaaggcttagcggagcgtgccactgttctcggcgccctgcttggcgcagagcttaagtctacggatgtgcctcgtgctgcggaggctactatcgccgcggcacgcttggttctgccgtttgcaggctatgagcagcatgttcaccgtggacttgaggctctcttggagtcagcaatcgctggagatttgaaggtccaacgtgcgcttggggtactgcgcacgatagccgagggacgcgcgcagtctggccatctgtatcttgagttactcaatgggtcaaaaagggaatccaacacctctgaagctgagagcgagcgcgacgcatcgcctaaattagtgcagacaaatggagctgagctttcgccacaagaagtcgagagtcttgctgggcgaccggcagacttcacgtctgcgctggcgggcgcgaaggcgagtggccgatttgactggcagccaaccataaaagcagttttcggccaaagtgtcagcggcgccgtgcgcagagcagcccaggcgctgcttagcatggacttatccaatgacgagttggagctgttcgttcgacatgccatcgcgaccggggagcggtcactcgcggagcaggcgactgagcgtgtcgctacaagagggaagccatatggctgggcacgcttttacgatggtgggtcgagattatctgccgcacgctgcttccagttgcttgatcccgaggaggggaaagaccgggcgcttgcgctgtttgtcgacgactttgttagccatagactctcagcagcggacctggtggtcgatctagacgatctgctgctcgccttgaccgatcggttaccggttgtccaattgtgggaagagatcgatgagcacatatcggcgcttgtcgaccttcaagaaagcccattcgagccgccggagtttaggcttgcgcctagcgaggtcgagcccgcagatactgcagttcaattgctatggcgggatatggacgacgcagcaattgaattggcctgggaagccagacgcggtctgatcgatatcgcagctctcaatggaaacgccgaaagcgtgcgatgccgcttacaagcggcgcttggaggaagcttccgacatcagacagctgcactagccatgttgaactgcatggcggttgcgaacagcagcctggccgccgaattcctttcggagcttgaggctttagcgtggtcgcctttgggggtggtacggctggcagcccagaatgttttgggcgagctaggagaatccctgccgacggcaccaggacctcgaattcttccggccatctatcagcttcagcttcccccggcgcgcaggacagaaaccagcctaacgggggagccaccacctggcgcgccgctacctgataccaaggatccgttcgatttgacgcgcatgttccacagtgcgcttagggtgctgtcagaggcaaccgatttcagcttcgaggtacttacgcatcgcatggcgcagttgatgccacttgtcgccccggaagaaacgtggtcttcggaggttgaacacaaagagcggcagctcagagagtgcttggggatcaaactcacgtatcggcgctcgcgttccacggtcgcgcagcacgctttcggttgtctgctggctgaactgtgcgatggtggggtcatcgagtgggtgccgcatttctttgagcgttttctcacttgctctgatccgatcatcaatttgcgtacgccgaccacacgtccggcttgggtgagtgtgccggcgggagaggcattgggtaagtacccgattgaggaatggtttgattcggttgctgaggtactgccgcaacttgagcccattccttcaggcggttgcgtggtcctggctgagttgacagctaccgtcagccagggccgagaccgggaggaagaaggccacctaaccgtagttggccatgcccgcctgccatttagcacggaccaaatgccggacatcagtttgctttggcaccaggaacgctatgccgcgcgcgactaccctcacctgctgagcctcgacgaccgcatccccattacggttgtggctgggggatcaatctttgccaattcacaattcattgcactgaatccattacttggctgggaactcaattggcaaccgtcgtctgaggggctcttccgctgggtaaacgaggaaggtcacacgatggtggagagtttgtattgggcggagggtaacgtcgaagtgcatgatgcagggggcatcgatcagtcggccagcgagggatggttggtgctcgcaactgccgtggcctggcagcaaatgcgtccacttctacattcgtttgttttccaccggttggcagggagacaaggcggcttctcacgtcatgggcatcggacattcaaggtcgcaaaagaccacatctcgctctga

SEQ ID NO: 349163 - DNA, 2691 bp, Pseudomonas aeruginosa
atgtcattgttggacgagatcatcgcgtggtcgggtggactaaggccctggcagcaagaggcccttcgtcgcatctttgcgcggcccgagctttctcaggtcgacctcgacgctatcttgcagatgctccgcgagcaggaaggcgatggcacggccactagcgtcggcagaccgttcagcatcgatgacgtcccgggcgccggcagtggcgctaccgtcagactggttggagtatctgggctggatcaggtcaacggtttcccttccggccgagcctttgacctagtgccggagggcatgaccatccttttcggccacaatggtgccggtaaatccggctatgcccgcgtcctcaagaatgcctgcaaggcccggcatcgcgtggaggtcctgcccaacgcctttgaggcagtggctccgcccagaccgccttccgcagacttcgccatcctggtggatggctcgccggaaacggcacgttgggtccagaacgggccggcccatccgcatttgagcgccgtctcggtgtacgacgtggcctgtgccaacgactacatcgacgcggagggtacccccgcgttccaaccgtacggcttgacccatctcacgcgcctggtcctactgcagcgcgacctgcaagcccgcgtcgctgccgaacgcagtgcgttggtcctcgatacccggccgttcgagcagttgaaaggtgacaccgaggtcggccgctacatcgccagcctgggcagcgactcggacctcacgatgcttgctcggttggggacggtcagtgacgaggaactcaggcggctggagtttctgaagcggacactgctggaaaccgatccggggccccaggcgttggccatggagcgtttggctacccgcctggagcaagcgcagcagcgtgcggaagtggtccagcgctgggtgaacgaccgggcaattgcgcgggcaaaagatctgatcgaagccgagaaggccgcgcacattgccatgcaactggcgcaagcgcggctccacggcacggtcacggcgggcgacgatgaggcgccagcaaccgctacgctcaccacctcgttgctggagggaactggcaacacgctgtggcaatcgatgtatcgggccgctgaagccttctcgcggcaggccgcctatcccgagcacccgtacccgcacctggagtcggacgcgcactgtgtgctttgccagcaaccctacgcagcggacgcggccgagcgcatgcatcgctttgcagcctttgtggctgacagcgccactgcggacgctcaggccgccaacgctgcgcgcctggaggcgctcgggaaggtaaaggtgcttgatcgcagtgttctggacgcgcccacgctggctgaggtggctgagcgtctgcctgatctgcatgccgccatcacggcagcagtttccgtctgggccgcccggcacacctgggttacccaagccttggacgctgggaattgggcccccgagtcagcgctgcttccgccggaggcgaacctggatggtgccttcgccgccaaggccacctcgctgcgcgccgacgccaagaccctgcgtgcctccgctgatcccgccgtacggttggccctgacccgggagctggcagagctggaggctcgacaacgcctgtccggccaacgcgctgcagttgagcgttttatccaggacagccaggtgcatgacaaactgagtcgctgtcatggcgcgctcaacccacaggcggtgtcacgcaaactgacagccctggccgcgacgcatgtaaccgaggccctggccaccaccatgaatgccgagttgaaggccctgggctacaagcgccgggtacaaccagacctgaccgggcgtaccgacctcggtgtgaccaaggtgacgctgcgcctgaaggacatcagcgcaaaagcctccaaggtgctgtcggaaggtgaacagcgcgccttggggttggccatgttcctggctgaactcgaatcgctgccgcacacgtcaacggtggtgttcgacgatccttccacctccttggaccatgtgtatcgccgggccatcgcccgacgcttggtggccctgtccgaaacgcgccaggtactggtgcttacccatgacgccgtgttcttgaccgaactggccatggcgcttcaccgagccgagcgctcggccaattacaagaccatcggttgggatgagtcgccaggattggtgagcgaggggctgacctggaccacgatggacactaaagcccgcctggctgatctgcgcgagcgggtgaaagccctgaacgccatcgacggcagttatccggatgatgaactcgaacggcaaattgcagcgggctactccagtctcagaggcaccgtcgaacgggccatccgcgagatcttcctgaacaacacggtccagccgttcagcgacgtggtcagcgtcgaagcatttggcgccgtggtcggccatcccgcggaggagtgggagcagctgcaggacgtctatgcacgggcatgtgaagccacggaagcccatgacactcccggtgaacgccaactggcgctgcccacgcgcgaggagctgctcggcgacatcgccctggtcctggagctggtccaacgtgctgccacgcgccgaaccgcctacgagaaccagcgccgggaacggactacgcaacggaagaaagtcttcggcggctag

SEQ ID NO: 349164 - DNA, 402 bp, Pseudomonas aeruginosa
atgacccgggaggcattccagccagcggcgccgtcggctgccgagctgaacgaccacctgcgccccgcgaaggggacggcctattcggctgagcgctatgccgaggtcttcggcctcagcccggccgcttttgccgcgcagctcgatgcttatcgtcaccgccagccgggtgccgtcagcgcatccgaagcggccgccgcgcaacagttcatcgaagattccttgcgcgtggtactgaccgttgtcgagagcggggtggccgtcgagcgggcgatcgcctggtttcgccacgagtccttaccgaccttcgagcagcggaccgcggagcaactggtcagtcagggccaggtcgagcaggtgttgcagtttctggcctcttggcaggccgggagtcagggatga

SEQ ID NO: 349165 - DNA, 210 bp, Pseudomonas aeruginosa
gtgcagcagcaactggtgcaggaatatgatggcacggccacctatgtgcgtggggtggaaaatcgcgcccactgtgaagtcgatcgcgcccgggaggcgagtagggcggtgaccgtccaacccaagaccgtgagcaagcagccggtgcggcccaagcgcacccgcgccacgccggcgaaacggcaacgaaaaccgacaggctccagctag

SEQ ID NO: 349166 - DNA, 513 bp, Pseudomonas aeruginosa
atgcaggaaattcgtttctatcgggcaaacgaaaagccctatggcgccttcagcaatctatacaaacgtgaagtcctgtttgagggggttgtttaccccacatctgaacacgcctaccaggcggggaagccacgcaaggaagccgtgcgtgattggattctaagtgcgccctctcccgctctcgttgccatggcggcccatgggctctactggtgggatatccgacctggctggtcgaagattaaatttgatcggatgcgtgcaatcctcctggccaagttcacccagcatgaggacttgaaagcattgttgctgtcgaccgagcaggcgcgcttggtggagtcggccacagtcgacaacgaagtcaatcgcacgtggggcgaagtcaacggtaaggggaaaaacatgcttggggttttgctcatggaagttcgggaggaactcctgcacgcggtgtcaaagccggcgaacaatccagccaaaaagtccagaaaggtcgtcccagcgatttag

SEQ ID NO: 349167 - DNA, 1068 bp, Pseudomonas aeruginosa
atgtggcagcagaatcgaatagtcggtaccgggctgtttgcgctagacgtaattcttggggcggactcgcgccgattaggctctgcgctaggtggctcgacagggaacgtcctgtcaattttgggggccctcggctggaccgcaaccccagttgccagctttggccaggacattgcaggtgaacgcctctgcaacgaactgcagtccattggcgccgatttacgctttgtggaccgttccagcgctcaacggaccaatgtcatctatcagcatcaattgccgacaagccgtaatggttcggcgactcatcgctttagctttgcttgcccgtgctgcggggaaaaacatcatccggtggtcgagttcgacggcagcatcgtaagtaaggcgctcgaggggcaggcccaaaccgacgtcttttacttggaccggcccaccagagcgggatacgaactggccaagtcttaccacgaatcgggcgcactggtggtctttgaaccttccagtgcgggagatgacccggagctatttgaggcgatcttgcaccatgcgcatattgttaagtacgcagatgagcgctttaaggcactttcgtgcgacatgccgagttccgttctggcggaaatccagacattaggcgcgagcggcttgcgatttcgcagcgccgccaccggccgcgcgtggcgtcaactatcggcctttgccgtcccccaagttgaagacacgtccggtgctggcgactggtgcaccgccggactggtgtatgccttactgcagagatgctcgcgcacttggcacgacttgcgggagttggagctggagcatgcgctggcatttggccaggccttgtcctcactcaactgtctcacccgtggagccagggggttgctgaagattctcacgccagctgaaattctctcgctggcatgggaactgtgtgcagacagggccaatcagcagggcctgctgggagccaagcaatttggcaagctcacccagcaaaaggcgcagaccttaacccttgaaggacatgatgcgccgcaggtttgctgttcggcgaagagttaa

SEQ ID NO: 349168 - DNA, 1047 bp, Pseudomonas aeruginosa
ttgcaactgatcactcacaaagataaagaagagtgcctagctttctttaatggttactttacggccgacaagaaggcactatttgtcggcaccttgggcttcaacgatgcctgcctgtactttccacgcttgattgccgcgttggaatgcttcgactttctgtttctgattgaacagcggcccgaggtctcggccattctccaggcatctgccgatcaaaaccggcacgagttagagcgctgcctggtcggacggagcgtcagcttcggaacggtctcgatcattgccgacgacactgcaagtattgccggtcggagcgcggcttctgcctttagccaatggctagccaagggctattccgacgtcatagtggacgcgaccactatgtcgcgcggggtctgtttccccttggtacggcaggcatatgaaagcgctcccacacgcgcccacgtggtgattgccgaccgacctgccagccccttgaaggccgccgcaatgtatacggagtcgccgcagtacatgcacggattccaggccgatatgggtaccgacgaagtgaccaatgccatcaagctgtggatcccgcagctgtctgagaacaaccatgactcgcttgagcgcatctaccgcaaggaacagccggatgaagtcgcacctatccttccattcccggcgctcgacccgcgccgtggcgaccggttgctgcgcgagtttcggcgcctcatcttgtcggactgggacgtcaatctcctggatatcatctacgcgcatgagtcggacccaaccgatgtgtttgagacgatcaagcggatacacagtggacgcagcatggccctgggagacttcaaggcgacgccgccccgaaccatcttatcgcccagtggcagcaagatgggcagtctggggatgctgtttgccgccattgcgctagatctgccggtgatatactgcgagacgatgggctaccgatgtgacgaccacgcagttccactggtctctacggcgatgccagatcgcatgtggcatgcttggttgcgcaatcggtaa

SEQ ID NO: 349169 - DNA, 1896 bp, Pseudomonas aeruginosa
atggataacccattcaagaagcgcgccaccgaatatgtggccgatccaagcacgctgctgccgctggtcagccatacccccatccaggagttcttttcacccgacggcggcgaactcctggagaagctgagcatcgtggtgggcactccagggtgtggcaagaccactattgctcgcgttatcgagtttgagtcgctggcgaccctggcccgcgatccagtggaaatcaacaaggagctggcgacgacgctcacgcacttgcgcatcctggaagacagcacgccgtccctcttggcctatcgcctgccgatgaccacaaactttcgcagtatctgggatctaccctatcccgagtcgctccgagcgacactcttgcgggcgtatgtgcaatcaaaagccgtactgggctggttccggcagcttgagagcattgaaagcatcgacctcgagcaaatcgagatcattacccgtagcgattcggagtcggcacgagaagtcctcagggccgacacgcccagcgcgttccgcgagaaagcgcggcaggtcgagctcgccgtattcaaggtgattaccgcgctagtcgcacccagtgaacgggacttggccgaagtcattaataccaagtacgacgtctttgaatatatcgaacgcattcgtgtcaaaaattgggtgagcagttcgaaccttgtatatgccgagctgcgcccaatggccattgtggacgatgctcatgaactgcatccattgcagttcgctcaactgcgtgattggctaaaaagtcggaacattcgcgtcggacgatgggtgatgtgccgccccgatgtggtgtcacccgaggattaccgggaggcaatggccaaggatgtactggaagaagagcaacgccatggcacggcgcgtgggcgtgattacatcctcaaactgatgcagcccagtcaccgcaacacccgacggtttcaggtggtggctcgtgacatcagtgcgcgctatctccatgggatcacagaactgtcccggcgttcggtgaggagtttaggcggcgttcttgatcacgatcatgtggtgctcgcgcccgcgcagttggagcagttgcgtaatagcgttgagacgtttgcacgtgaatcaaagctctcggacgcggtgctccactcgctccgttcgcgcattcccgcaacacttccaactgacgaagcgacagcggcgtttcgcatactgctgcgccgagagtggaacaggagcccgcaactgggtctacttgatgatgaccccgctgaggaacctgtcacgggtgatcgcccagtcagctcagcgctgcttgagggcgctcgcctgcagttgtttcatgagttcggtcggccttactacttcggcatggacaaactcgccgaggcgagcaacaacaacatcgagcagttcattcgtctttccggcgtgctgatcgatgaacttatcgctcgggtggtgcgcggcaagaccccagaactttcggcgaaactccagcatgatgtgttgcgaaaactggctgcgcggatcatggaggagtgggatttcccctatcatgcgctggttaaggatgtgatcagtgggatggcacagcgatgcctggagcgcaccttgctgcccaatgcgcctctcgatcacggcgctaacgcgattggcataccccaggaagaaatggaccaggtgctggcacggtccgagcggctgacccgcgtcctgcactacgcctttgcttataaagcgctggtcttcgtgccgcagtatcgctgtaaagggcgggtatggtgcctgctggagctaggtgccattcccagcattgcctatggccttacgctacgtcgggggggattcatcgaagacacgctgtcggggctgcagtccctactcaaggagtga

SEQ ID NO: 349170 - DNA, 1119 bp, Pseudomonas aeruginosa
ttgaaaagtagtattgcgctgcgattgctcgcagaccaattagcatggaccgatgaagaagtcaccgaggagtttcccgccctccagctgatggtcacgcacaagtacgacggctaccagggatttcaaccggcttcgcgatttcacgtcgccctgttgaattggttgagccagttcgcttcagtcgagcagaggcgtctggcttttaacttcatcaaggatcgcctgatctacattacgcagcgcgagatgcatcatctggtgagcctgatgatgccaaccttggatcggctcatgcgcaagcaggtggctgccgaactgggcattcagttctttgagacgtggacagacacggcggcagaacgacgcttgggcttgctgcgccggaggacactgttcgtcgggttgagcgacggggcgcgtatcgacgttttccgccgctacaatgagggattgatctccaatgaacaggtagtgcccttcagcgaaatgtctgaacagaagtggacaagcttggtcgatgaactcggcaagtggctcaagaagcacgactacaaagatgaaccggccattttcgaggcagtctgcctggtcgacgactttgccggctctggcgcctcgctgttgcgattcgacgagaaagagcagcgctggaaaggaaagatcaacaaattctacgaggccaatgttggcaaaattggcacctcgctggcccttcagtgccaactctatgcccatcatcatttggcttcgcatcaggccgagcagaccattgcccagcggctgactgggtacagcgccaaccacaccgaattttgtttcaagtccacgttctcctacgtgctccccagcgacatcgtcattggcgagcagaccgaaccagcggaactggtgcaactgattaagacctgctacgaccccggcattgaggatgaccatctcgggagcgctgcgtggttcggctatagcggctgtggtctgccgctgattcttgagcacaacactcccaacaactccatcgcgctgctctgggccgattcctccggggcgaggcagtcctgcccgcatcaaatgaagcctctcttcgcccgacggaaacggcactcaagtcatggataa

SEQ ID NO: 349171 - DNA, 1731 bp, Pseudomonas aeruginosa
atggagctgtcggctaaagcccggttcaccccaagctccaaggtcatgctgctgtctgccgaagggcgcaatcctgatgtgctagccgccgcttcctatgccatgcagtcggatatgacctgcgcggcgctgactttgacgtcggacaacccgttgattcggcgtgccggagagaaccttgccacacgggtatttgcttatgacatgccgtggggaaaggacgggtacctggcgaccaacacgctgatcgccaccgtattgctgctgcactgtgccttgtttcccaaaaactatagtcagacgtttctcgcccaactgtttgaggagcagaggctgcgtaaccttcgcgaccagtggtaccaggacagtaccctcagggctataggcgggcgtaacttcatcgtgttgcacgatccgatgactaagtcatttgcgattgacctcgaatcgaagctttcagagtctgccgtagcaaaggtggagatcgccgactaccgccagtttgctcacggccgccatttgcagttggcctccgataccaagggaactgccgtcatcgcggcctatagcgctgaggcacgcgcacttgctgaagcaaccctggcgctgttcccgccggacattctgacctttcagctcgaaattcccggcgatgagccgaacgaattggtggttgccggactggtgatggcgacgctcttgactgaagccattgccggcgcggtgcagcgcgacccaggacaaccgacagtgccgcagtttggtcgggacatttaccggctggacagcagccaccactaccagggtgtgtcccagtccaccaatcgctaccgactggcagcgagacgcaagtttgaccacctcaacgtctccgacgaggaaatggcgaaagccaccgtcgccgccgaaatctacgaggccaagctggaaggcgcacggtatagggccatcatcagtgactttgatggcaccctgtgcaatgccgagcaacgatacagcggtatgtgtccggccattgcacagcgcatcatggagttgattgaggatggagtggtgttttcgatcgcctccggccgtggtggctcgttgcggacggacctcatgaaagcgtttccaccggactatcacccagtcatctgggtcggctactacgggggctcactgatccagcccctgaacgtcgaggttgaacatcccgccgccaatcaggacttcaagagcctgctggggtggttgaaaaccacggtgtactaccctcgactgaaaagcttcgatgagtcggtccggggcgggcagttgaccattcgcgtgtccagccctgaggaatcgagaaagttgcgcttggcgctgcgcacacgtctcaatgcggcgggcttgtcgacctggcgggttttttgttcgggacattccatcgatgtgctggatagccgtaccaacaagaacaacgtcgtgcgcacgatcgcacagaaattcggattcgatccgctcactcaggtactgcgcctaggagatagtggggatgaagacggcaatgactatgagttgctgagtgagggctgtagcctgagcgcagaccgcgtttctgcctcgcttacctcctgctggaattttgccaccccaggttgcagtcaggccggcgccactaagcggtatttggaccacctgcacaaagtcgaggaggggtacgagttgcgtttcgacctgccaaggaaggtgtcgtttgaaaagtag

SEQ ID NO: 349172 - DNA, 876 bp, Pseudomonas aeruginosa
gtggagaaagatattcgggatatacgctcgccacaatatgaacgaccgatatctgctgccaccgaaaaagcctatcgacaggctcgagagcatttcaagtccaatggcggccttcttccagcaactgagcatatgatcctcaactacatagcggatctatcaaccacttattctttcagtacaatttcacatcgcatggctgcgctgtcacactggcactatggttttggatttcaggatccaaccaaaacatcgcgcgtcagacaggccttgagtgaggccgagcggatctgtcgggtagggggaagaagccggcctcccttggagtttcataatttcgacaagatcatgagtactcatgaaagcgtgcttcaacgagcagtcagcgaaaataagaaggagcagttgctacgcatgtatcgagacaaagccatgttctcgttaggtttctggcgtggatttagatccggtgatcttaactcactcaaggttgagcagatactgatcacacccgctgaaggcatggtaatttataagggtaacgccgaccaaggggctcttctcaatattcctgcaatggaaccacattgccccgttcaggcaatggagcaatggctgaccgtgtcaggcctcacctctggaattgtattccctgcaatcagccgctgggggactattgataacacaaggcaatccaacgtcaatgaggctcttagaaagctaactaaacaggccgaaatagacattgactttaccagtcacagccttcgtgtcggttttgcagagtgggcatacaaccaaggctgggggttcatggagatcatgaaccatgtcggttgggcacctgcgctagcaaagcttaggtatgccaggtga

SEQ ID NO: 349173 - DNA, 1158 bp, Pseudomonas aeruginosa
atgatgatctttgcggaagacgagtctatttcatcatggatttgcaggcagatagtctataggcgtctagaggctgctaacgcaaagtggttgctgctgtcggattttattcgcggaaaagagctacatggagatattgatttcaattacagtgagcaagatgctgaaagggtagaggagttaattggtgcacttccgagtaattttctcaatcaagccaagccctctccgttctggctgctaccagatcaccgagctcgtgcttcgttctgcaagctgtgcgtgaagagagatctcctgacattcagagtgccagtgtggcggcgtgactggtctaccggatggtacgttgtctgccccgaacacaaagtgcctatgactactctcaaaggcccatatggcgtgctcagaaccgaagatcgaaacaagtcggcaagtcgttatcttcttgagtcccgagatctgcaacctgcactcgcagagagtcgcgagctatcgacagagggtgtgaattatcaatgcagacaggttcaggcgctggtcggcatggcatggtctctacagagaccgattcttgcggcagtagaagccggggatatcaatcaacaacaacacgatgtggtgctggatctctgtagcgccatgcttcgcccctatacgcctagtgttgagggtactccctacgtgcagtggattgctcagcacgtttttggtcgagaatccccaggtccgctggacgaacccgtaaaaagaatgcgcgtagattatgagcaattccagatgtctcttgagcaatcggcccagactccctgcgcccatcggcgaatgatcgctcttggattgactgcatgcattttggggtgtgatgatgtttatccgccttgggctgatttcgtggatgcaagtaggcagcgtgggttgttggtggcagatagcccggactggctttactgtgcggtgctgggcccagcggggtcgcacgcgaggatgtggcacctgaatcgtattagagcgtacgccccaccacttagagagtattttttagagctgatcaatagcccagcgccaagctctagattaaaaaatgtgtcgcgcaacattatacgtttggctcctgaagagcaacccgcctcacctggcatacctaagctttgctag

SEQ ID NO: 349174 - DNA, 870 bp, Pseudomonas aeruginosa
atgagtgagcgacaaatgagtagcttcgagcatgttatagaaggacgtcgacatcttgtggaggccgaagagtgtctccgactgaacgtaatctatgaagatgtctggattaattacccaagcgcagattacgttttgaaactgattggcactttcctaagaatgccagagaagattcaagcgcctagtgttctagtgtatggcgacccaggcatagggaaaacggcgttatttcaaaggatagctcgaacatacggttttagctctggtgtagaaaagtgtgttgcctgcctaactttggcggaagagaatcccgaaaatagcaaggcctttcgctcgctggttgttcgtgcattaacggcaggggcttatgataatcccaatcttgcagacgagactttgctttcctccattcgatcactaaacatcaaagcactggcagtagacgagctaaatgatatgcttctatgctctgcgtcggaagttcgtaagaatattaggctcttgaaaaagctctctggcaggccttttggtctgtcagtcattggtctaggtactgctgatagtgagtccgtgattggctatgagaaacagatggatcgccgatttgagaagattaaactcaagccgtggcaagccagcgaagagtttgagtcattcttggcgagttttgaggctactttgcccttgaaatatccatccaggctatattctcgtcgcaatataaattatttgctcaaggaaacggatggaattcttgacgagatactgaagcggatctgcaatgcagccgcttatgcaatccttgagggtggagaaaagatcactatggatcttctaaagaagggggagcgacggcccatattctag

SEQ ID NO: 349175 - DNA, 1845 bp, Pseudomonas aeruginosa
atgaagattttgaataaggggcagggcgtcctatgggacggaaagctatgtgcctacgaagcctccctggggccagacttggtacaggtctacgtgaaggaagaaaagaaatatcagtcggtgcctgtcggggagttggcaatagtttcatcaacggagggaaggagcgaaaaggctgtaagtgatatatccgaaataagcgaaaaagagtggcggaaagcaaagtttcgatttgaaatgataaaaaagtttttagagggtgagcgaacgacagaaaatctatctaaattatctaaaaggctcaggctgagctctagcagggtctatacgttgattagaagcttcgatgaaagcatgggacctagatgctacttgagggagaagtccggaaggcccgttggttgtcgtcagcttgaccctcgcgttgaagaaattattgaggccgccataaagagcgaatggaacggtcctggatctcgtgtagcgaaagtttggaaggcggtaaagagcgtatgcgaggtcgcagggtattctgtgccagcatttttgacagttaagtcgcgcctgcatgacagagggcagttccagctcgacaaattaaggatcgggcttaaggcggcaaacgacctgcaccaggctaggcctggaaagaatgaggccaatgcccctctacaccgatggcagattgatcacacggtgatcgactgcattattgtggacgagataacccgaaagcctctctgcaggccttgggttaccttgataatcgatgtatatacgcgagttgtcattggatattacctttcaatacacgcacccaatacttacagtgttgccatagctctcactcatgctgttcttcccaagaataaatggcttgccgtcctagatgatcaggacctaagtcatccttactatgggcgacctatagagttgcacatggacaatgcaaaggagttcaagtctaagccattcaggagagccgcggctgacaaccaaatcaaacttgtatggcgccccaagggcaagccatggtggggcggacatattgagcgcttgaatggaacactcgctatggggtatgtccactatctcccggggaccaccctctcgaacgtcgaggcaagaggtgactacgatagcgaaaaggaggcctgccttacattctcggagttcaagttatggtttgccagggctattcagatataccatcatgaaaaacatagagctctgggcgtttcgccacaccagaaatggatggaggcattcacaaaaagtggtgtgctaacacatcctgcactcttggatgatcctatgaaatttttattggactttatgccggaggagagtcggtgcataagcaggtctggaattatatttaaaaaattcaattattggtcgccagccttggcgccatacgtcaaatcaggaagctgcaaggtaaagtataatccgctctcgcttaaacaaatatgggtatgggtgcctggcggtagatatatagaggttccatattcagatttgtcgcttcctgatattactcttgaggaactgaatattgccaaaaagcaggtctctgaagaggcaaataagcatccgggtcatgaatcaaaaatttattctcgtttggtaattaatcagataaacaagaatcgccaattggttgagcgggctaaattggcaaccaaaaaggcgagaaagactagtgagaacttgaggcaaggcgagttctttcacgaaatcttgcctgttgatgttccggagaacgcctgtatgacaagtgaggactatactgatttagactcttcacctaagccaagcctatacgatatagatctctcatga

SEQ ID NO: 349176 - DNA, 177 bp, Pseudomonas aeruginosa
gtggcggcgaagccggcggaggaaacgcgctggtgcctgtggcgccaggacgacaacggcaatgcctgcgtcgtgcgccgcgacctgacgcgtgacgaggcctgcgcgctggtcagggactgccgggcgcgcgggcatcggcaactgcactgggcgagcccgcaggcgcgcgactag

SEQ ID NO: 349177 - DNA, 192 bp, Pseudomonas aeruginosa
gtgcatttccacgactcggaagtcttccagtacagcaaggcctgcgtgatccgcgccgagtccgggatcctcccggagtaccgcgggagcaaccagagcatttccttccttacccgccaggtgctgcgctacaagttgctcaaccccggcaagcgcctgctgttcctcgacaccctgatccatccctcctga

SEQ ID NO: 349178 - DNA, 264 bp, Pseudomonas aeruginosa
atgactgccaggatctaccgggaagtcgtcaacccgggaaaactcgacgagacacagagggaaaacctcgcaagcgaactctacgcgattcacgccaggatctttcatggcgtccagtgtgagtccttcgctcgcgaggtcatccactccaccgcccgcctcacccgcatcgccatctaccgcaaccgccagcagaaatcgtcggctactgcgccgtgcatttccacgactcggaagtcttccagtacagcaaggcctgcgtga

SEQ ID NO: 349179 - DNA, 216 bp, Pseudomonas aeruginosa
atgccatacgtaaacatccgcgtgacccgcgagggtgtcagcgccgaccagaagcgccaactgatcgaaggtgccaccgacctgctgctgaaggtgctgggcaaaccgccggagagcaccttcgtggtgatcgacgaggtcgaccccgacaactggggcgtggccggcgaaagcgtaagcgccttgcggcgccgccagacaccccggacttcctga

SEQ ID NO: 349180 - DNA, 729 bp, Pseudomonas aeruginosa
atgagcaagaccgtgatagtgaccggcgcctccagcggactcggcttcgccatcgccgaggcctgcctcgggcggggctataacgtggtcggcaacgcccgcagcatgcagcgcctggagcaggctgcggcgcgtttcaccggcggagggcggttcctcccggtggccggcgacatcgcccgggcggataccgcgcggcggctgttcgccatcgccatcgaggccttcggcaaggtcgacatcctggtgaataacgccggtatcttcatccccaagccagtcgccgaatacaccgaggaagacctcgaggcgctggtcggcaccaacctcaagggtttcttctatcccgcccaggaggcggcgcggcacatgcccggcaatggcggcgggcagatcgtcaacatcaccgcctcgatcgccctgcagcccaacctcaaggtgccggcacttttgccggtgctagtcaagggtgggctgaaccaggcgacccgcgccctggccctggagctggcggcggacaacgtgcgggtcaacgcggtggcgccgggaatcatcgacaccccgctgcacggcgagggtagccgcgaggcgctcagggggctggcgccgagccggcgggtgggccggccgcaggacgtggtcgacgcggtgctctacctggcggattcgcgcttcaccaccggcaccgtgctggccgtcgacggcggttcggccagtggtgtctggtaa

SEQ ID NO: 349181 - DNA, 930 bp, Pseudomonas aeruginosa
atgacccgccatttcgacgacctccagctcggcagcctcgaactgttctgcctcgccgcggaaagcggcagcttcaccgccgccgccaaccaggccggagtgaccccggccgccgtcagtcgctcggtggcgcgcctggaggagcgcctgggcgtacgcctgttcgtccgcagcacccgacagatgcgcctgagcgatgccggccgtgactaccatcagcaatgccgccaggcactcgcgcaattgctggaagccggtcatcgcgccagcggcagccaactcagcgccagcggcctgctgcgcatcagcgtacccacaccctacgcccatcaccgcctgctcccggcgctaccgcgctttcgtgaacgctatccgtcggtggaagtggacgtgcatgtcagcacccgcaacatcgatttcaccgaggagggctacgacctggccatccgcggcagcgaaccggcggactcgaccctggtcgcgcgccggctggaggaggccgagctggtcctggtcgccgccccggactacctgcggcgcagggggcgcccacgccacctggacgacctggcggagcacgagtgcatccagttcgagcgcccgagcagtggccgccgggtgccctggaacctgctggtcgacggccgtccgctggccatcgctacccgcggcggctacagctgccaggaggactacctggccggcaccactttggcgctggctggcgccggtatcttccaggcctaccgcttcagcgtgcagcgggcgctggacaacggcgaactggaagaggtgctgcctagccacggcggcgcccatcgcccgttctttcttctctacccgcacgcacgctacctgccgcagcgggtccgggccttcgtcgagttcgccgtggaacagctctccaggcctcgtcgactctcgccctga

SEQ ID NO: 349182 - DNA, 795 bp, Pseudomonas aeruginosa
atgggcgtaacagatcgtggtttacgtgcatggaaacgccgtcctccatcactgcgccagcgtcgtgatcttatacttctagcgcatatacgtgagcagcatcggttgtgtttggggagctatggtaggccgcgtatgacagaagagttgaaagcgctgggcctgcaggttgggcagcgtcgggttggacgtttgatgcgccagaataacattacagttgttcgaacgcgtaaattcaaacggacaacggatagtcatcataccttcaacattgcaccgaacctattaaaacaagactttagcgcaagcgcacccaaccagaaatgggcaggcgatatcacttatgtttggaccagagaaggatgggtctatcttgctgttatccttgacctgtattcccgtcgcgtgattggctgggcaacaggtgatcgattaaagcaggatcttgcattaagggcactgaatatggcgttggctttacgcaaaccaccaccgggttgtattcaacacacagaccgtgggagccaatattgcgctcatgaatatcaaaagctactgctcaaacatcaattgctgccgtccatgagcgggaaaggcaattgttttgataactccgcagtagaaagcttctttaaatcattaaaggctgagttgatttggcgcagacactggcaaacaaggcgagatattgagattgcaatcttcgaatatataaatggcttttataatccacgccgaagacattcaacactcggctggaaatcgccggtggcatttgagaaaaaagccgcttaa

SEQ ID NO: 349183 - DNA, 885 bp, Pseudomonas aeruginosa; identical to SEQ ID NO: 54013

SEQ ID NO: 349184 - DNA, 1200 bp, Pseudomonas aeruginosa; identical to SEQ ID NO: 6086

SEQ ID NO: 349185 - DNA, 678 bp, Pseudomonas aeruginosa; identical to SEQ ID NO: 54015

SEQ ID NO: 349186 - DNA, 243 bp, Pseudomonas aeruginosa; identical to SEQ ID NO: 15164

SEQ ID NO: 349187 - DNA, 378 bp, Pseudomonas aeruginosa
atgaaatctggtatcgcgacccgtcgcctgttcatcaacgacaccaaggctttggtgcataccgtcgacgggaccgccatgctggtcacgccaggaatcttcaagcgttatgtccaggagcatccagagctcgaaaagctggcccaggccaaggagacgaccggctggaagctggtgcagcgcgcgttcgagaaacaagggcttcaccggaagaccagtaaaaacctgaacatctggaccatcaaggtttctggtcctcgcaagacgaaggagctcaaggcttacctgctccaggatcccaaactgctgttccctgtgcagcctctggacaacccaagcctcacggtcatcaccgatgccgaaggaggtgtggaatga

SEQ ID NO: 349188 - DNA, 564 bp, Pseudomonas aeruginosa
atgaccgtagaccgcatcggcgaacgcctgcgtcgctatcgccgcgccgccaagaaaaccctgcaccaagtcgccagcgaatccggtctcaccgcgagcttcctttcccaggcggagcgcaacctcaccggcgtatcgatctcctccctggccaacatcgccaagtcgctgaacatcccgctcaacgccctgttcgaccaaccggcccagccacagcccgattcccacgaaggcgaacgggtgcgctacaccatcgagggccagccgctggcctacgagcgcctgtccagctcctttcccggcaacctgatcaacgcggtgaagatgaacatgccggtgggctatcagtccgagctgatttcccatgagggcgcggagttctcctacgttctttccggacagatcgtctacaccatcgaaggccgccagtatcccctcggtgccggcgactcggtgcatttcgacgccaccaagacccactgcctggccaatgtcggcaacgacgtggcggaagtcctgaccatcaccaccatgggcctgttcgacgaccatccagcgccctga

SEQ ID NO: 349189 - DNA, 1218 bp, Pseudomonas aeruginosa
atgaccgtgggtgttggcggtagtacccctgagcaggcgctggcgcgtctgcggaacatgacggacggtgcgcagccgatcggcctgccggcctatcgccagcgcatcgccgcggcccaggcctggatgcgtgagcgcggcatcgccgcggcctacctgcatgcgggcagcaatctgcgttacttcagcggtgtgcaatggcaccccagcgaacgcctggtgggcgccctgctgcccgccgaaggagcgctcgaataccttgcgccggccttcgaggaaggtacggtacgcgacttccaggtggtcgacggcatcatccacacctgggaggaacaccaggatccctaccgcctgctgctcgagcgcctggccgcgctcggcatcgacgaggcgcgtccggtcgcattgtgcccgaccctgccgttcgagatgttcgaccggctgcgctggctggcgccggcgcggtccttcgtcagcgccgcggcgctggtcgaccaggggcggatgcgcaagtcggccgaggaactggcgctgatgcagcgggccaagaacatgaccctggaagtgcagaaggctgcggcgagcattctccgcgaaggcatcagcaccaccgaggtcgccgaattcatccaccaggcgcaccgcaaggtgggcgcccccggctcgaccttctgcatcgtcctgttcggcgccgccagcgccttcccccatggggtgaagcacgcgcaggtgctgaaggggggcgacatggtgctgatcgacaccggctgccagctccacggctaccagtcggacatcacccgcagctacgtattcggcatgcccagcactcgtcagcgcgagttctgggcgatggagcgtgacgcccagctggcggccttcgacgccgcgcgcctgggccagccctgcgaggcggtggacgccgccgcgcggcgttcgctggaagccaacggcctggggccggactaccgcttgcccggcctgccgcaccgcactgggcacggcatcggcctggacgtccatgaaggtccctacctggtgcgtggcgaccgcacgccgctggacgtcggcatgtgcttcagcaacgaaccgatgatctgcgtgcccggcgagttcggcatccgcctggaagatcacttctacatgacggcgcaggggccgtgctggttcacccagccgagcccgtcgatcgacgatccgttcggcctgcaaggctga

SEQ ID NO: 349190 - DNA, 642 bp, Pseudomonas aeruginosa
atggtcaaaccccgcagatactggccttccggtatcgcgaagcggtgtagttgctgtgcggccattggcaatatttatacgagattggacacgaccgggaacggctatggcagtttctcccgcccctttcccaacccacaacccaaacctacccaaccccgcaacaatcccaaggccggcagcctccgcaaccatggcctcgccccaggccttgatgaactcattcgctggctgtacgccatcgaagccctgtccctgggccagatcacgttgcgcctgggtgatctcctcggctgtcgccccgttcttgcgcatgtactcggtcaaggagctcgctgcctgaccgtagctgatcaagcccggcggggttccgccgccaaggaagttgttttccgttgcgttcttcccgcctgcggccccggcaatggctcctccgctgctcccattgacaacggagccggccaatccgccggccaggctggccagcgcggtgatagtctgcttctgcgcttcgttcagcgtcgagctgtcccgggttccgtacagtcgctcgctgatcacctgcgccgccagttcgctccccgccgctcctgcgccccccgcagagtaaaaaaggggtcagatttattttctctactctaa

SEQ ID NO: 349191 - DNA, 735 bp, Pseudomonas aeruginosa
atgttgagggatttgccgatccggacacgcgcggggaaggcgagagccactgaactagactcagaagtgcgcggcggggccggtcgcttgccggcccggtgcgcgggacgagcaccttcgtcccggggtggcccggccgggcggtcggggaggtcgatatgcggatgccgtgccggctcgcgctggcgctgttgctgtgcttcgccggcccggcctgtctcgcggcctccggaccggttcgggtgctctcggtggatggtgcgatcggcccggccagcgccgattacctggtgcgcggcatcgagcgtgccgccgaggacggcgcgcaactggtggtgctggaactggacacgcccggcggcctggacgcatcgatgcggcgcatcgtcaaggcgatcctcgccagccaggtgccggtcgccggtttcgtcgcgcccagcggggcgcgggcggcgagcgccggcacctacatcctgtatgcctgccatatcgcggcgatggcgccgggcaccaacctcggcgctgccaccccggtgcgcctggggacgccggacaagcccgcagagaagcccccggcgcgggacgccgaacccatggcgcgcaagcaggtcaacgacgccgccgcctatatccgtggcctcgcgcaactgcgggggcgcaacgtcgagtgggccgagcgcgcggtgcgcgaggcggtcagcctggcggcgcacgaggcggcggcgcagaaggtga

SEQ ID NO: 349192 - DNA, 996 bp, Pseudomonas aeruginosa
atgaacccgcaaccttgcacccttcgcggtgcgccccaggccgcgccactgctgtacggcagcgtgtgcagcggcatcgaggccgtgagcctcgcatggcaacccctcggcctcaaagccgcgtggttcgccgagatcgagccgttcccgagcgccgtgctcgcccaccgttacccccatgtgcccaacctgggcgacatgaccgcgatcgcccgtcaggtgcgcgccggcatcgtgccggcgcccgacatcctggtcggcggcacgccgtgccagtcgttcagcgttgccggcgcgcgccaggggctgaacgacccgcgcggcgccttgacccttgcctatgtggagcttgcaaatgccatcgaccaaacccgccaccaagaccgccgcccgccggcaacgctcgtctgggaaaacgtccccggcgtcctcaacgaccgcagcaatgccttcgggcatttcctgggagcactggccggagaaagccgtgcgctccagccgccaggggaaaaatgggcgcacgctggttgtgtgtctggaccccgccgccgcatcgcctggcgcgtgctcgacgctcaatatttcggtgtcgcccaacgccgcaagcgcgtgtttcttgtggcatgtggtggtgatgacctcgatccctccgaagtactttttgagcgcacaggcctgcgcggggattcttctgcgggccgcgcgccgtggcaagaagctgcccgcgctgctggatcgggtgctgctgcagcaggcggatacgcaggattcgctggactgaaccagccctacggcaaggtcacgacgacgttcggattcagcggcggcatcggccccgtcgatgttgcggcatgcctgatggccgcgggtcccaagcacgacatccgcaccgagacgttcatggtgcagtccatcgccggcagcatcgcccacaccctcgacaccgccaacaacggcaaggggtcgtttgcgggagagggcgaaatcctacgctaa

SEQ ID NO: 349193 - DNA, 798 bp, Pseudomonas aeruginosa
atggtcgccccgccggcggtacccggagatgactttcgcatgacaaaaatgtcaccgagtccgcgccgcgcgctggctagaatggcggcgaacgagggggaacgagacatgcgcatcctggtgatcgaagacgatacgaagaccggcgagtacctgaagaagggcctcggcgagtcgggctatgcggtcgactggtcgcagcacggcgccgacggtctctacctggcgctggagaaccgctacgacctggtggtcctcgacgtgatgctgcccggcctggacggttggcagatcatggaagtgctgcgcaagaagcacgatgtgccggtgctcttcctcaccgcccgcgaccagctgcaagaccgtatccgcggcctcgaactgggtgccgacgactacctggtgaaacccttctccttcaccgagttgctgctgcgtatccgtaccctgctgcgccgcggcgtggtccgcgaggcagagcaggtgcaactggccgatctgcagctggacgtgctgcggcgcaaggtcagccgccaggggcaggtgatcgccctgaccaacaaggagttcgccctcctgcacctgctgatgcgccgcgagggcgaggtgctgtcgcgcaccctgatcgcctcggaggtctgggacatgaacttcgacagcgacaccaacgtcgtcgacgtggcgatcaagcgcctgcgcgccaaggtcgacaatcccttcccgaacaagctgatccataccgtgcgcggcatcggttacgtctgcgaggagcgcccgtgcccgcccgccgctccctga

SEQ ID NO: 349194 - DNA, 279 bp, Pseudomonas aeruginosa
atgagcgcggtctggaacaagccccagtcgtctgcactgaaggctccgatatctcagcttccgccgcggagattcgcagcgattaacccgaccacgacggtcgaagaggcgttgagcgaggccatcgcgctgacgctaagtgtttctagcattctcggagcactgaccatctccgacgaagagcacgcgtgcttgtatgccctggagattgctgcagagatggctggcgatttggttgacgccgcgctcgactccctgcgtgaggaggaccagcaatga

SEQ ID NO: 349195 - DNA, 609 bp, Pseudomonas aeruginosa
atgtctgccgaaggaacccccgacaatgagcgcatcgccttcctcccgcctgcacctgcaggtcaccgatttccgcgctgttgcgcgcgacgtggtgctggtcgagctggccgccgtggacggcaccgaactgccggccttcacccccggcgcgcatctggagcttcacctgggcaacggcctgatccgccactactccctgctcaacgactgccgcgaacgccagcgctaccaactggcgataggccttggcgacgacagccgtggcggcgcccgcttcatccaccgccaactgcgcacgggcgaccgcctgcacgcggcggcaccgcgcaaccacttcatgctgcgcgaagacgccgcgcgctactgtttcgtcgctggcggcatcggcatcaccccgattctctcgatggttcgctggtgccaggcgcagggcaaggactggcgcctactgtatgcggtccgcgaacgccagcgcgcagccttcctcgccgaactgatgacgctcggtggcgaacggacgcggctgcattgcagcgacgaaggcgacccactcgacagtaccgcgctgatcgccggcctaggtgtgatgtccagggacgttgttga

SEQ ID NO: 349196 - DNA, 618 bp, Pseudomonas aeruginosa
atgaagatcaccgccgatcaactcgaccgtgctaccggctgcggcggcgctactgcttcggtctgggtcgagcacatcaacggcgccatggcccggttcgagatcaacacggctgagcgggtggcgatgttcctggctcaggtcggacacgaaagccagagcctcaagcgtctgatcgagaacctgaactactccgccgaattgttgctccgtacttggccgaagcggttcacgccggcagaggcgaagcagtacgcacgccagcctgagcgcatcgcgaaccgcgtctacgcaaaccggatgggcaacggctcaccggatacgggcgatgggtatcgataccggggacgcggcctgatcatgatcaccggccgcgacaactacaccgaagctgcacgtgccctggcgctgccactggtagcgcagccggaactgctggagcaacggacctgggcagctatcgcctcggggtggtggtggcagtcgcggggtttaaacgacctggctgaccaaggccgattcgagcgaatcacgctgaagatcaacggcggctacaacggcgcagacgaccgtgcggctcgccttgaatgggcgcgcgcagcgctggcgggtgcgtga

SEQ ID NO: 349197 - DNA, 384 bp, Pseudomonas aeruginosa
atgagcaagttgcgctttaccaccgaccacgaatggctgcgccaggacgacgacgggctgctgaccgtcggcatcaccgcctacgcccaggacgccctcggtgacgtggtattcgtgcagttgccggaactcggcgaacacgccgccggcagtgaagtggcggtgctggagtcggtcaaggccgccagcaacatcctgatgccgctggacggcgaggtggtggcgatcaacgacgcgctgccggacgccccggagctggtcaaccaggacccgctcggcgaggcctggttcttccgcttccgtccggccgacgccggcgcctgggaaaagctgctcgaccaggccgcctacgaccgcctgctgaacgccaacgccgacgcctga

SEQ ID NO: 349198 - DNA, 714 bp, Pseudomonas aeruginosa
gtggctcaatgcactgccccagtgaatggtcatcgcacagcgagtgctgcggccaactgcccagcttgtcgctatcgctccagtggctaccgaagcagttatggctacggaggtggttacggttcgtcctactcttcaggcggcagtagctacagcggcggcggtgggcggtctactagcgggggcagttctaggccgcgctggtcgcgcgccaactcaacggttttctacacaccagcgcaggtggtgtcacttacgcctgtccgtgaagccgtcgaagcgcaaaccgcagcgaagccggatctccgcgattgcttcctttgccatgcttgggatgatcgccagggagccgccaagcaattgcacgatctgcttgaaggagctggggtcaaggtgtggttcagcgaaaaggaccttggtcttggcgttccgatgatgcgcgccatagacaagggcctagcagcctcaaaaattgggcttgtcttggtgacccccgcgctgctcgcacggctaccgaaagagggcgtcgccgacaaggagctatcaacgctattgcagggcaatcggctggtgccgatcgtacacggcactacgtacgacgcgctccgggatgtgagccccatgctcgcttcgagaagcggtctggacacatcggaagattcgatgtcagtggtagctaccaaaattgcagaactagtagcaatttggagctga

SEQ ID NO: 349199 - DNA, 705 bp, Pseudomonas aeruginosa; identical to SEQ ID NO: 8686

SEQ ID NO: 349200 - DNA, 705 bp, Pseudomonas aeruginosa; identical to SEQ ID NO: 8686

SEQ ID NO: 349201 - DNA, 204 bp, Pseudomonas aeruginosa
atgcaccagctaacagcgaatcaccgcccttgcggtgtgacggtcaccggctggcctgaagaaagccagcttatgacatcggacgacattctgcgcatcgcgagagcggttaagcagatggcgatcaaccagtcccagggcgccgatggcgttcgggtctacccggaggtgggtgatggaagtcaaggcgaagaccaagcgtga

SEQ ID NO: 349202 - DNA, 171 bp, Pseudomonas aeruginosa
atggaagtcaaggcgaagaccaagcgtgactccggcctgcgcacggcagtgctcctcctgaagcgcgcaaaccgctacgtcggtgtccacaacagcattggcgcaatggacctcagcacagagattgtcgaattcatcgctgctattgagcggcaggagaaggtattgtga

SEQ ID NO: 349203 - DNA, 648 bp, Pseudomonas aeruginosa
atggtcatgtcgcccttgaggttgtccagctgggtagcggcgaccctcgcggcctcgccctcggagttgttcaggctttcgcgcatggtctggaactggccgccctcgacggcgcgcatcagggtgccgaagctggtcaccgcgtactgcccggcgatgtccttgaagatcgcgccgcgctgcacgttgcccatgccggcggtcttcttgttgatgtccttcaggatgtccagcatatcgcgcatgttgccgttggcgtccttggtctggacgcccagcttggctaccgccttggacgtgcccaggcgggtcagaacagagcgcatcgaggtgccggccatgctgccctggacgccggcgttgccgagcagggccgtggcggtggtgaccgtctccaggctctggccgtactcgcggccgacgccggcggagtacttcagcgagtcgccgagcatgcggatgtcgacgttgttccgggtgaacgccgcagtcagtacgtcggccacctggtccattttctctgccggaatccccatcgccgtctggatgttcgaggcgatgtcagcagtgtcgccgaggtccatgtcgcccgcggctgccaggttgagcatgccgggcatggcgctgaggatctgctgcgcgttgtag

SEQ ID NO: 349204 - DNA, 174 bp, Pseudomonas aeruginosa
atggtgctgagcatgaagcggaccgcgatcatcgggccgaggatgccggcgagggtgatggccaggctgccgacggtggccatcagcgccgagaacgcggcgacggtgatgacgatgcccttgctgacctgcgggttggccttcaggaactcgccgatgttgtgcagcaggtga

SEQ ID NO: 349205 - DNA, 207 bp, Pseudomonas aeruginosa
gtggatgtgatcgaccaagccaacgaacgggccgagaacatggtccaggccgccctggcccagcggacaaacacccgcctggcgcccagcgccctctggtgcgaggactgcggagagcagatacccgaggcccgccgccaggctgctccgggctgcgagtgctgcatcagttgtcaggaactgcgcgagcaccccgcgcggcgctga

SEQ ID NO: 349206 - DNA, 1083 bp, Pseudomonas aeruginosa
gtggtacaccggcacgatgatcaggtcgcgcaggtagccgtcctcaacggccagttcgttcaggctgcgccagtcgctgccggctcgcaccagggcgaggcgcacccaggtcttccactgcagggacggcacgcggtgcatcgggccggcggcctcgatatcaccgggaagcggcatgcggccgagtatgtcgccgacggcgcggagcgacttcttctctggctcgtacaggaagggcggcactttctcgacgtggcgggcgacaagcaggaagcgcttccgggactgcgccaggccgccgagttcgccgcagtcatgagtggtttccgccacggcgtagccgaagccgccgagcaactggccaatctggtcaagcaggtgccggccgcggctggcgaggcgtgggacgttctcgaagacgatcagcggcaccgggtcatcagcccatgcctcgcccatgagccagatgcagcgcagcgtcaactcgttcagcgcctggtacttcggggtcaggctcatcttctcggagaggaggccagaggcgcccttgcagggggagctgatgaacacggcatccggtcgacgcccgccggcggcgcgtcggatgtcctccggggttgcctccctccaaccggcgggcggctccgttccatggaagcggatgtattggtcgcgggtgaacaggtccagcagggtgcccgggacgccggccaggcgctcgaagtcgcggaggccggccgggtccacgtcgatgccaccaaggcattcccaatgggcctcgacgttgccgacccgcggacgcgcccggttgaagcctgcggcgccgccgcccaggccgcagcagaagtggaagtggtagagggtacgcttaagcatgccgccgccctccctgcgttttcctggccgccaggttggccatgtagctggcccactcgacagccttggcctgttggcgaattcggctgcagcgttggtgtttgccggtggaacgtgcgttgccgcagatatcacagatgctcggaaggtccagccgcttgctggccatcgctgggcgagtgcgagccgccgacgtggttgtgctag

SEQ ID NO: 349207 - DNA, 231 bp, Pseudomonas aeruginosa
atgtacgaggaactgacctggctgatcgacgatgccaagccgttgacccgacacctcgtcggcctcgccatcagccttgagagcaccggcagcgtgcgcctgggtgcagccgtctacgacggcgacgaaatcgacgtttatcccccgagcccccgcgacatcgaagtcaccggcaccatcggccggggcggtcgcgatcacaccatcgataccctggatgtgtacccatga

SEQ ID NO: 349208 - DNA, 198 bp, Pseudomonas aeruginosa
atggtcgagggcaccggacgcatctacggcctgtgggtgatcgagcgcgtcaccgagacgcggacactcttcttcgccgacggcaccccgcggcggatcgagttctccctcgagctcaagcgcatcgacgacggccgcaccgatctgctcggctcggtcctcggtaccgccggcaacctgctgagacgcatcctgtga

SEQ ID NO: 349209 - DNA, 270 bp, Pseudomonas aeruginosa
gtgacgatgaaccctatcgccagtgggctgaccagcctctgcctgatgttgctcgccggctgcaacagcgccccgctatcaccggagcggccgcttaccatcagtggctgtcccgccgtgacgccctgcagcctggagtcagcggcaccgaaggacaacggcggtctacagactgaggtcgagcgtatcggcctggcctgggccgagtgcgccgcgaaggtcgacatgatcatccgcacccaaggggccacccatgaacaagcccgatag

SEQ ID NO: 349210 - DNA, 897 bp, Pseudomonas aeruginosa; identical to SEQ ID NO: 342917

SEQ ID NO: 349211 - DNA, 1563 bp, Pseudomonas aeruginosa
atggtcttttcttcaaacgtgttcctgttcctgttcctgccggtctttctcggcctgtactacctgagcggcgaacgttaccggaacctgctgctgctgatcgccagctacgtgttctacgcctggtggcgggtggacttcctcctgctgttcgccggggtcaccgtcttcaactactggatcggcctgcgcatcggcgccgccggcgtacgcaccagggccgcgcaacgctggctgatcctcggcgtggtggtcgacctctgcgtgctcgggtacttcaagtacgccaacttcggcgtcgacagcctcaacgagatcatcacctcgttcggcatgcagccgttcgtgctgacccacatcctgctgccgatcggcatctccttctacaccttcgagtcgatcagctacatcatcgacgtctaccgcggcgataccccggcgacccacaacctgatcgacttcgccgccttcgtcgcgatcttcccgcacctgatcgccggcccggtgctgcgcttcaaggacctggtcgaccagttcaaccaccgcacccacaccgtcgacaagttcgccgaaggctgtacccgcttcatgcagggcttcgtcaagaaggtgttcatcgccgacaccctggccgccctcgccgaccactgcttcgccctgcagaacccgaccaccggcgacgcctggctcggcgccctggcctacaccgcgcagctctacttcgacttctccggctacagcgacatggccatcggcctcggcctgatgatgggcttccgcttcatggagaacttcaaccagccctacatcagccagtcgatcaccgagttctggcggcgctggcacatcagcctgtcgacctggctgcgcgactacctctacatcagcctgggcggcaaccgcggcagcaccttccagacctaccgcaacctgttcctgaccatgctcctcggcggcctgtggcacggcgccaacttcacctacatcatctggggcgcctggcacggcatgtggctggcgatcgagcgggccctcggagtgaacgccgcgccgcgcgtgctcaacccgttgaagtgggcgttcaccttcctcctggtggtgatcggctgggtgatcttccgcgccgagaacctgcaggtcgcctggcgcatgtacgaagccatgttcagcttcggcacctggcagctctccgaactgaaccgcgccagcctcaccggcctgcaggtcggcaccctggtcctggcctacctagtgctggcgttcttcggcctgcgccagttctacaaccagccattgcagaccaaggcgcccaaggccgcggcgaacagcgacgaagtggccgccgacggcccggccagtgcccagccgcgcgccccgcgcgaggccgccggcgacccggcggcgatcgcctactcgccgagcggcgcgctggtctaccagccgagctggctcagccagttgcccgtcctggccacccgcctggcgctgctcctgctgttcgccgcttcggtgctgaagctctccgcgcagagctactcgccattcctctacttccagttctga

SEQ ID NO: 349212 - DNA, 255 bp, Pseudomonas aeruginosa
atgacagaacttggattggcgacgttggtcgcgtttctgatatgcgtgccctggtggttcttcgagaactacaagcagcgccctcttagtgagtttcccgaactggagcaaatgatgggcaccttgttcccggatgacctggcggacatccgggcgaaaggttcccttagccgtgtggagcatctccggtacctcaagactcaactcaaggcaatcaaggcagagatcaagcgccgggatggctatatcgagtga

SEQ ID NO: 349213 - DNA, 282 bp, Pseudomonas aeruginosa
gtgcccaaaataaacagcaaactgattggctacctgatgattctgagttcgatcatcctgggtgtaacaggcatcagcaccattaccaaaatccagagcctcatcatctcccaggcagtgaagatggctaacgcttcggagagtgggatagatcagtggccagagttggctttcgcgctgtgcctacctctcgcgatggtgactgtattcctgtttttcttcggtcttcagcttgtcagtaagcgccttgaaatcgtccgacctggcgtgactgcccagtaa

SEQ ID NO: 349214 - DNA, 1260 bp, Pseudomonas aeruginosa
atgcagatcagccaagggcaacgtatccccttatcgaacctcattcagggccagtctctgtccctcgcgatccagatcaactccccccatacagtcgacctcgcctgtttcggcctggatgctgctgggaagctttcggacgatcgctacatgatcttcttcaaccagccgatctccccttgcggcagcttgaagcaagctggagcagagttcagtctgagcctggctggacttccctcctccatcgatcgcgtggtgtttaccgcggcaatcgacggggccggagctatgcgcgatatccagtcctcatcctttttggtcaaagacccaactggtcaaatcgtcgccacctgccccttcgctggcaacaccttcgccggggaaaaggccatcatggtggcggacgtctaccgcaaggatggccaatggcgtttggcgtcgaatctccaaggcttcaacgaagggctcagcgccctggtgaagcatttcgggggcgaggttgcagatgatgcagctcccgcaagttccccagcgccagcccccgctcaagccaccatctcgctggaaaagaaggttgcggccgcggctccgcaactgatcagcttggccaaaaaggcccaggttagcctcgagaaagcgaaactgacccatgtgaaggcgcgtgtcgcgctggttctcgatgcgtcgggctccatgaactcccagtattccaaggggcgtgtccaagaggtggtcaacaggctgctgcccctggccgtccacttcgatgatgatggctctattgactgctgggccttcgcagcaaagccgcaaaagctctccgaaatcaccctgagcaactaccaagacttcatcaacaccgacaattacggttggcgtgactggaacgtaggcagccggatcaacgacgagcccagggtgatggagcaagtgatcaactattacctcaacgacggtgaccggtcgcccgtttatgttctcttcatcagcgacggtggggtacacgagaacaggaagatcaccaagctcatgaccgaggctgcgaagctgcccctctactggcagttcgttggccttggggggcacggctatggcatcctggaaaagctcgatgacatgaaaggccgagtggtcgacaactgcggattcttcgccctggatgacctgcaccaggtaagcgaggagcatctctacgaccagctcatggaggaattcccgagctggatcaaggaagcttctgcgaaggggatcatcgcctag

SEQ ID NO: 349215 - DNA, 357 bp, Pseudomonas aeruginosa
atgaacaagccgaactcagctttcactgcacgcaagctgctgagcatcacactgcttggcctgctgatgctactcctcctatcgctggccggcatttttctcagcgtggttgccgtgcactacttcggcggtattcaggctcttgaggcctggcgcgaccagcactacgactcgctactggcctggaggctctgtctgtacggcctgcttgcgttcggctggctgaaagtgaaacagaagagagcatttcctgcggcacagcgtccgcgcatcctgcgcatcgagctgctggtcgttctcctgttcgttttgctcgaattcagcaaagcctaccttcacacgggagcctcggcatga

SEQ ID NO: 349216 - DNA, 1548 bp, Pseudomonas aeruginosa
atgaccttcatgaccaatgactacctggagtattacctcacgctcctgggctggattatcaataacggaatctggaacatcatctccgataccggcatctttgcgattcccttcatcactatcgtcattcgcgagtggctgaaagtacgcggtgaaggcgccgatgaaggcaacaaaggcgtactggccctggctcggatcgaaacccagatgtacatgggctacgttgtcgtggcgtttgccgggatccccttcatccccgtcagcttcgacaccctccagttcgaccaaacccgcgcccagcaatgccagtacaatctgccggcgccggcggacaccggctggtcgacctccttcagcagcctggccggcaagagtgcgcatatgccgatctggtgggcaatgatgcatgccttgtccaaaggcttcaccgctgccgccgttgcctccatcccctgcggggcagacttgcggcagatgcgcatggaggtggacagcacccggatcaacaacccgctgctggcacaagaaatcgctgatttctccagggactgctacgggccttcccgcgcgcggctgttcatgcggcaacccgatctgggctccgtggccgaggacaacaaggcgctgcaggacctgaactggatcggctcccgattcctgttgaacaccccggggtactacgacaccgactactcgaagagtccccgtcagtcgtggccctacaacgccacccgcgatgccggcctgcctcaggtgggcggtggtggcggctacccaacctgcaagcagtggtgggctgactcagggattggtttgcgtgatcggatcaagggccaggtggatccggacctgatgaccagcttcctcaagtgggcgaaatggctgaaccaggacgaggtaaccgaggcagtcattcgccaggtgatctccccctccagccaagtcaagggcaacgtctacaccgattacggtgggcaggtaggcggaaccgtctggaatggactggctcgtgccggaggcaccctcggagtggcaatgggcagcctagcctacttcccggcgatggatatggtccgccaggcgctgccgatggtgatgtcgttcctgaagatggccatggtcatctgcatgccgatgatcctgattatcggctcataccagttacaggtggcgatgaccatgacggtggtgttcttcgccatgatgttcgtcgacttctggttccaactggccagatatatcgacagtacgatacttgatgccttctatggctcaggctcaccgcatctttcattcgacccagcgatgggaattaatacggccactcaggatgcgatactgaacttcgttatgggatcgatgttcttagttcttcctgcactttggattacggcaatcggctgggcaggcgtaaaaacaggctcagtgataaaaggcctaactgatagcacaaaagatgttcaaagcgctggagcgaaaggaggcggactggcatcccaaggcattagttcagtaacccaagggtacaatcagaacggcagttaa

SEQ ID NO: 349217 - DNA, 354 bp, Pseudomonas aeruginosa
atgaacgcacatgccaacaaaggttttgccgcccgggtcggttataccctgggcacgcttgtgcgcttctgcctgcatgaccgccgccctgtgctgcgttggatcaagcgcgtcagcctgttcgtggtgctgttcgttatccttgttcagaactttacctggctggccagcaccttcatgaccttactgtcgtttgggttgattgggttggcgttggtaaaaggtgacctatcactgttgtctcaggtcacctatgtgaatagtagtagttttgatgatgacgggattgagagtcgggctcctttctatggagagtatgagcatcctgattatcaccagtattatgatgattaa

SEQ ID NO: 349218 - DNA, 264 bp, Pseudomonas aeruginosa
atgcgttcggtattcgctgttctttcttcaattgctttaattatctatgccacctccatgaggatcgtaaattttttcacagattctcactcagagcatattgaagattatcgcgaggaatttgaagaatacgctttgacccaagagagatttttgggatgcagatttacgcgcggggcagacgggaaatacctgaatgatgatcttcaaaaggcgtgggtcaatttccacgaagaaaaatttcagagggataatgcctggtga

SEQ ID NO: 349219 - DNA, 1428 bp, Pseudomonas aeruginosa
atgaagatgcccatcctccctcccctgcccctggcgtcccggcacctgctgctggcctcggccatcgccctggccgccggctgcgccggactgcccgaccagcgcctggcccaggaggccctggagcgcggcgacctcgccaccgcccagagcaactaccaggccctggccgcgatgggttacgccgacgcccaggtcggcctcgccgacatgcaggtcgccagcggcgacagcgcccagcaggccaaggccgaaaagctctaccgcgaggccgcgcagacctcgccgcgggcccgcgcgcgccttggcaagtggctggcggccaagcccggcgccagcgacgccgagcaccgcgaggccgagcgcctgctcagccaggccttcgaacagggcgaggacagtgccctggtgccgctcatcgtgctctacctgcagtacccgcagtcctggccggaaatcgacccgcagcagcgcatcgaccagtggcgcgcgcgcggactgccgcaggccgacctggcgcagatcatcctctaccgcacccagggcacctacgcccagcacctgggcgagatcgagcaggtctgccagcgctggctgcggcgcctggacgtgtgctggtacgaactggccacggtctaccagatgcagggcaacgcggaaaagcagaaggtcctgctcgaacagctgcgcgccgcctacaaggccggccgggtgcccggcgagcgggtcgactcggtggccggggtgctcgccgacggcgaactcggccagcccgacccgcagaccgcccaggcgctgctggaagagatcgcgccgagctaccccgcggcctgggtcagcctggccaagctgctctacgactatcccgaccagggcgacctggaaaagatgctcggctacctgaagaacgcccaggacgccgcccagccacgcgccgaactgctcctcgggcgcctctactacgacggcaagtgggcgccgcaggacccgcgcaaggccgagcggcacctgctcaaggccgccgccagcgaaccccaggccaactactacctggggcagatctaccgccgcggcttcctcggcaaggtctatccgcagaaggccgtcgaccacctgatcctcgccgcccgcgccggccaggccagcgccgacatggccctggcccagctctggtcgcagggccgcggcatccagccgaaccgggtcaacgcctacgtcttcggccagctcgccgtgcagcagcaggtaccgcaggccagcgacctgctcgggcagatcgaagcgcaactgccgccggccgaacgcagccaggcgcagcaattgctcaagcgcgaacaacagagccgcggcaacaactggcaggccaccgtcagcctgctgcagagccaggactcgccgatcaacgaagaagagccagaaagcctatga

SEQ ID NO: 349220 - DNA, 1632 bp, Pseudomonas aeruginosa; identical to SEQ ID NO: 323228

SEQ ID NO: 349221 - DNA, 318 bp, Pseudomonas aeruginosa; identical to SEQ ID NO: 327288

SEQ ID NO: 349222 - DNA, 855 bp, Pseudomonas aeruginosa
atgggcagagtggattcagcacaacagcgtcaatcgattcttgaattgctgctgctatgggaaggtttcctaaaccggcgccggatagcgagcctgctcggccttggagatattcgcgcaagccaactaatccaggagttccgcgatgcgcatcccctatgggtggaatggaacaccaagtcacgtagctaccatgcaacgagcgcaacctacgcgcacgcaaggccggacactcgtgattatgctgagtctctagcgaaatacctcagtctggtggggctgccttatgtgactggcgaggcggtcgtcgacgatccagtttgcgctgcgttccctgatctgacgacgccagaaccgcgtattttcgccgccttatcgcatgcaattcgaaaccatgcggccgtccagattacctatcgatcaatgaagaacccagcgccacatcagcgcactattactccccaccacctggttcgcgccgggcgacgctggcatgtacgtgcttattgctcgatgcgcgatgatttccgggactactcccttggccgggtggtggatgtgatgcctaccgggttgcgcggagagcgctccgaggaagatgacgcagcgtggaacacgcacgttccagtttgcttgatcgcgcaccctgagctcagtcgcgagcaagaagatgtcatccgatttgaatatttcgctaacacgtcgtctcgcattgtcacatgccgcggcgcgctggtcgggtacttcattcaagacatacgagcagccgttgatgtaacgaagcagcgtccgcccgactaccaattggctgtctcgaacgtaacggaagtcaaaccgtggctgtttcccatatga

SEQ ID NO: 349223 - DNA, 1128 bp, Pseudomonas aeruginosa
atgatgagacgtaatggctatttctcaggcctgctaaagccggtgcctcaagaagccttgtctgcctggcttgagagagggctgcatggaaagcaaccgcttccatttctgcaggcgaaagagtgtctgaagcatcatggcgtcgaggatgctgacgcccccctttccccgccagttgtagaggcggtatctaaggtattaggtctgtcgaaagagtattttaaacggacattctctttgcccggtgactggttaaaagcgtcgcccaaaaaacgttttcggtactgcgaatattgcctccttattgactttcggttcaatcgacagcctacggcgagagtcacttggttctactggtggttcaatgtctgtccagtgcacggctgccttctgcttgaagaggagagtacctcggcaccagtggctctacactctatgatccgcaagaatcaggcgctgatgccctttggcgggcgggtgctaagttcgtacattcagagaagacagaacttgagccgtgactcatttaaggtgctgctgcttatggcgctggggtttcagaaatggtaccaacacgctgtccagcgcggtactttccttgtagatggcgccgaagttggtctcgccgagatggaaagatttctaagtgaccttctggcaatcattggcaaaaaacgagtttatcctggcgatccacttcctgatatcgcgcaaattctgcgtatcaagtcctggagtacgcttagttcttcgctgccaatagattcaggctgtgagccttttttatgcctagatcccggcgagcactccggcgacatccgcatggcaatgtttgcttttctcggcctgcttctgaagctgccgtattgtgttcatctgtggcctggtggcagcgggccgatcgacgagggatcgttcgccaacatttggattggaatgcatagtgatgcggcgagggtgcctagctattttagttggttgcggcagcgttctgaggagtggagcgagccaattcgcatccatttccaatatctgcttgagggtaagacgcggaagatccgctctggagagaaggtaaaaagctgggtacaggaagaaactaaccccctggtgcgcagtgtgagataa

SEQ ID NO: 349224 - DNA, 894 bp, Pseudomonas aeruginosa
atgaagacgtcagttaattttgaccatgtcgacccaaagtttcgtgagcacctgttcctcaacgaccgtgagcgtatcagtaagatatacagggattgttgggtaaattacccgcaggtggtggcgatcagggcaggggtacgcgctatttacgaaatgccaccgaagactcaggcgcaatgcatgttgatttgtggccgcccaggcatgggaaagaccagcctatttaagaagattgagtccgatatggaatcactcagaaaaaggcatatagactcttatggctgtattgcgttcagcctatctcccgaccccaatctccatggttttgaggacagcattagtgaagcactgggagttccaataggtaagattcgtaacggactggtccccgaagtattctgtcggttagcacatttgcgcagaatgaggctcgtgttaattgatgaagtccacaacctattaaatgctgggcgaatcgaccagcgcaagaacttggcttttttaagagcactaagcagtccaccgatgtcactatccattattgcgtttggggtggatgatgcgcttcatgctattagcagtgacgagcagttggaacggcgttttcagctctgcgatcttcccccctggaaagaaaatgaaagcttccgctcgttccttgcagcttatgagcgcgcgttacccttgaagaagccgtctgagctaggaaagcaagaaaacgtccgatatttactgggcgctacaggcggcatcaccgacgccatcgtcaaacgaataacgcgaggagcggtatgggcgatagtggagggcaaagaagctattgatcactactgcttagagaaagcggctgaaattccaccttaccttgattgttttgatgatgagacgtaa

SEQ ID NO: 349225 - DNA, 1083 bp, Pseudomonas aeruginosa
atgcctctaatgcgtccatggataacaattgctatcgatgtgtatacgcgagtggtgcttggtttttacttatcgctgtcatatccctcagcaatgtctgttgcgctatgcatcgctcacgcaatactcccaaagaatagctggttaaagtcttatgggtttagtggctatgaatatcccttctacggcctgcctaagagaatacatgtagataatgcaaaagagtttagatcgaaaaaattatccgacagttgtcggtcgtatggaattgaattgacatttcgccctaggggcacaccacataatggggcccatattgagcgattgattggtactctcatgggcaagattcatattttgcctggaaccaccatgtcatcgactaaagctaaaggtgactataaaagcgaaagaaaggcctcactgttattctcggagtttcgggagtggctaattagggaggtggagatatatcacagtacagagcattctgccttaggctgctcaccgctccataagtgggaaaagtattatcagaacaaagatggcagcttctcctaccccttactagttgatgatccgaaacgcttgcttattgatttcatgccgtctaagacgcgagtaataggaagagcaggagtcaggatacacaacattgactactacactaatacattgaagcgctttgatatcggtacaaagtgcgtggtgcgctatgaccctgattctctgaaaaaaatatgggtacttccagatggtgaaaaaaattacattgaactaagctatgctgacctacgactccctgatactactctatccgagtttaaaagcttaaggaaaaagattcgcggcgaaagcgcgcgaagggtgccagctgcagaagtcttcaagttgattgagaaaaatgaacaccttgttagtgccgcgactatggcgagtaaacaagcccgtaaaacacgagagcgtaaaaagtctcgactcgccgatccagggcatccattgaatgggcagcgtcaaattgaaaagcacattgagtcggtagactacagtgttaatcctgtcgcttatactctagaagactga

SEQ ID NO: 349226 - DNA, 696 bp, Pseudomonas aeruginosa
atgcaaaaaataagcataagcccgggcgttttagttcttgcagggaataaaagattagaaattattgcatcggcctctccaagcaagattgaggctagagatgtcatctctggcgaaacagtttttatttcaccgggagaaatagagtttgaactaaaaacgcctcttcattcaggcagtgaaacgttccaggcagaagcagagttcgccataagggattcagatataaagttggcaactgatcgtttcaacgtattagcccctttaaaaaccaagcagtttctctctaaacaagacgtagagcaatgtagtgtagcgcttgggcttagtgcttctcaggttcgaaggcttttcgcgcagctagacatgaaaaaagggccggagagcttaattctaaaaaaacgcggaagaacgagaggcgtcaaaataatcggggcggaggtagaagatatcatccaacaggtcattgatgaatactatgcagggcctggcgcgaccgtagagcgtgttatacagaaaataaaagagcagtgtttggctctctccctcaaaacgccgagctcagctacgatagctaatcgggtaagagagcgtaagccccgcgaattgctggcaaaaaatccgggaaaaaagcggctcgccaagcttatgctgtccgtggagaaaaagtacagcctgaagctcctcttcaattaa

SEQ ID NO: 349227 - DNA, 1125 bp, Pseudomonas aeruginosa
atgacaaccaagactcttcgcgaagcccttaatcactaccgtgagaaagtctcgattctcaagaagggctacaagcaagaatgctatcgcattcagcagatagccaactcgctcctgggtgagaaaatcgtgcgcgagatcacatctgttgacatcgcgacctacagagatgaaaggcttcagcagctcaatggcaagactggtcaacagatctcgccggctaccgttcgcctcgaaatgtccttgctgtcgaatctgttcgagcttggtcgtatcgaatggggcatctgcgatgacaatccggtcctcaaggttagaaaacctaaaatgccgcctggccgtgagcgtcggctgacatccagagaggaacgcctgatcctccgttacgcccacaactatgggaactccgagctctacgcgatcatcgtcgtagccctggaaacagcgatgcggcaaggtgagatcctcaacctcgcgtgggaacacatcaacctcaaaacgcgcattgcacatctccccgatacgaagaacgggacacgccgagatgtccctctctccatcaaggcccgagacgccttaatccagctaggtgttgccggcaatggccgggtgttctcctacacgaatgccggactcaagaccacatggcgagtcatgctgctccggcttggaattgaggatctccacttccatgacctacgacacgaggcgattagcaggctctttgagcttggaaccttggacatgatggaggttgccgcgatcagcggtcataaatcgctttcaatgctcaaaaggtacacccatctcaaggcgcagcgtctggtcaagaaattggaaggagggaagagccggggccgccaggtggtcatcaaccaccttgttccgtatcccgcctctgtagctcggacaagcaagaacgtgacgattcggctgctggatttcgaagggctgacggcgtcagctgctacgaaggagtctgcgattaccttggcacaggaccaactgttgaggcgcctgatgacctcgattcgggacgccgaaaccataccccagccggatcagtacctggacatcgttcatgaggcggacatcgtcatgatcgacccgctggcagcagcataa

SEQ ID NO: 349228 - DNA, 360 bp, Pseudomonas aeruginosa; identical to SEQ ID NO: 328157

SEQ ID NO: 349229 - DNA, 852 bp, Pseudomonas aeruginosa
  misc_feature (571)..(571): n is a, c, g, or t
atgacccacgtaattgcctgtatcgacggttccacctcggctccagctgtttgcgactacgcggcctgggccagtctgagcctggaagcgccgctgaccttcctgcatgtgctggatcagcgccagtatccggttgcagcagatttgagtggcaacattggccttggcagccgcgagcacctgcttgatgagcttgcttccctggatgaacagcgcggcaagttggcccttgaacaagggcgaatcatgcttgcagccgcgaaagaacgggccgtgaatgatggtgtgcgcgcaccggagtccaagcagcgacatggcgatttactggagagcttgcaagagctgcaaagtgaaacgcgcttgctggttatcggtcgccagggcgagtctagtggcggtctgagtcagcatgtcggaagccagctggaaagcgttattcgtatcatgcaccggccaatcctggtcaccccggccaacttccaaaagcccaagagcgcgatgctggcattcgatggcggcgctacaacccgcaagggtgtggagatgctggcagccagcccgctgctgaagnggctgccgatccatctggtcatggttgggcccgtgaacgacgaagcgtccgcgcagctggactgggcgcagaaagtgctgatcaacgccggatttaccgttcgcgctgagactcggagcggtgaaatagaacgtaccctgcacgcctatcagaaagagcatggcatcgatctgctagtgatgggggcttatggacactcacgtatccggcagttcctggtcggcagcaccactaccagcatgctccgtaccaccaccagtccgctgttactgctgcgctaa

SEQ ID NO: 349230 - DNA, 1488 bp, Pseudomonas aeruginosa; identical to SEQ ID NO: 328155

SEQ ID NO: 349231 - DNA, 291 bp, Pseudomonas aeruginosa
atggagctggtcgcggtgggcgtcgatcagctcgatcacgccgtcaagaccgccggcatgacagcgcaaggcgaatgcggccggctacgcatcggtgtctatgccctgattccgggcagcttccttgcagagctggtcggccagtatcggaaggactatcccaatctcgacatcgaaatcacggagggcaccgctggcggccggtcatcgaccgccagctcggccgcgaggtcatgggcgtcgtgcagggcggatcggaatcgtggcaactcgcgcggcagagggggataa

SEQ ID NO: 349232 - DNA, 225 bp, Pseudomonas aeruginosa
atgcggcgcacccgtcatcgcagcttcatgaatggcggtatcctgtccggcaggataccgctcatttcccttgttcaattcatggccgttgccgagcatctgaattttcggcacgcggccaacgcgctcggcgtcagtcagtcgagcgttagcgcgcgcgtgaaggcgctggagaaaatcttggtgtcctgctgttcgagcgccatgcgcgaggtgtccggctaa

SEQ ID NO: 349233 - DNA, 1041 bp, Pseudomonas aeruginosa
atggttatgctcggcgtggggcaggtgatctttggcccaatatcggatcgcatcgggcgacggccgatcttgcttgcgggtggggcgcttttcatcgtcgcttctctcggagcggcatggtcgtcaacggccgcagccttcgtcgcttttcgcctgctacaagcggtcggcgcgtcggcggcgttggtagcgacgttcgcgacggttcgcgacgtttatgccagccgcccggagggtgtcgtcatctacggtcttttcagttcgatgctggccttcgtgcccgcccttggccccatcgccggagcactgatcggcgagtttttcggatggcgggcgatattcgtcacgctggctgcacttgcgttgcctgcactcttgaacgccggtttcagatggcacgaaacccgcccctcggatgaagtaaacccacgccgttccgttttgcctatcttcgtgagtccaaacttttgggtttatacggtcggctttagcgctggcatgggcaccttcttcgtcttcttctcgacagccccccgagtgctcataggccaagccgattattccgaaatcgggttcagtttggctttcgccactgtcgcactcgccatgattgtgacaacccgtttcgcgaagtcctttgtagccagatggggcattgcgggatgcgcggcgcgtgggatggcgttgctcgtttgcggggcgattctgttgggaatcggtgaacttttcggttcaccatcgttcctcagcttcatcctgccaatgtgggtaatggcagtcggtattgtcttcacggtgtccgtcaccgccaatggtgctctcgcacagttcgacgacatcgcaggatcggcagtcgccttctacttctgcgtccaaagcctgatcgtcagcatcgtcgggacactagcggtaacgctgttgaacggagatacggcttggcccgtgatctgttacgccacgacgatggcgatgctagtttcgacgggtcttgcgctacttcgattccgtgaggttcacgccgagaggtcgctggtcgtctga

SEQ ID NO: 349234 - DNA, 969 bp, Pseudomonas aeruginosa
atgcgacggcggaaacagtcaacatcactgaccgaccgccaatgggggatgccgaccgcgcttggatcgcgtattccccttgcctcgctcatccagacgattgtcgtcgccgaatatctcaactttcgacacgccgccaatgcgctcggtgtggcgcaatccagcgtcagcgcccgcgtgaaggcgctggaggacgatcttggcatcctcgtgttcgagcgccatgcgcgcggcgttcgcctgacagaagccggacgccattttgtcgagcggatcgcggccggcatcgaccaacttgaccatgccgtgaagaccgccggcatggcggcagccggcgaaagcggtcggcttcgcatcggtatccatgccctgattccacacagcttcctcgcaaacttgatcgaccaataccgcgaagaccaccccggcatcgaggtcgaaatcgccgagggcacggcccgcgataccgtcatgcagcttcgcgccgacatgctcgacatagtttttgtggccggcacgcccgaactgcccgactgcaattcccgccgcatctggacggaaccgctggtcgccgttctgtcggagcggcaccgtctcgccgggcaggcaagcgtcacatgggccgatctggtcggcgagacgttcctagtccggcatggcggcaccggcccgcaagcgcatgaccatatcgttttgcgcctcgccgggcgctggcccgcgccgtcgattctgcgtttcgacgtggggcgcggcaccctattgtccatggtcggacaggggttcggcatcaccatcgtcggggcagccacggcgctgctgccaacgtccggcgtcgtcttcctgccgttcgccgacgagccggaaccgattacgttctcggccatctggtcgccgtccaaccgcagcgccacgctgaaaaatctgctctgccttgccagccacatggggcagatcgcccgcaccgactga

SEQ ID NO: 349235 - DNA, 693 bp, Pseudomonas aeruginosa
atgactaagaacggaccatcgcagacggagcgcggttcctcgacgatttggctgaaaccagccaagcgagtgcgcgacgttcccgcgctgacgcgggaccgcatcgtccaagccgctgtcgagattctagacatgcggggccaagacggcctgacgatccgcaaactggcggaacatctgaacgccggtgccgcatccctctactggcatgtcgagacacgcgacgatgtgcttgaactggcactggatagcgttctcggtgaaatccctctgccaacagaaccgttgaaatgggacaaggagttgatccgcttcctaacagaatggcggcagacgcttctacggcatccttggtcaaccagcctgttcggcttccggccgctgctcggtcccaatgccttggtccgatccgaacatcttcgcgcaaccctcgcaagggcgggattgccgaaggccgacattatccatgcgggatacacattatcgaacttcatgctcggatcggtcgcgacgcaagtagcatggcaagccggcgacgaagctgcaacccgtgcgcgcgtcgccactttccttcgggatcacgcggccgaatatccagccctttcctcgcagatcgagagcgaacccgatgattggggtgagagcttttcgcgtgggttaggctggataatccgttccttcgctacctcatag

SEQ ID NO: 349236 - DNA, 573 bp, Pseudomonas aeruginosa
atgagcaatcaaaacgatacccatggcggcttggcagatcgaaatttcctcgccgtcttgccgatctcagatggcgtggtaacgatcagagccatgtcggatgcagatgcggaagcatatgccgccgggacgaacgatgcttcggtcaagcacttcgctcacctgccgttggacgaatatacgccgcagatcgttcgtgacatgatccggggtacgattgcagacggattgcgcgatggaaccttggccgtcctgacaatctcggatgctccctcggattcgtttctcggaagtctggtgatctttgacgtgaaaccggatgacgcggagattggctattgggtcgcgccggagcatcgtggccgaaaggtatcgggtcgcgcgctcgcgctggccgtggaaatggcccgcaagttgggcctgagaaagctccgcgctcgaacggttcaagaaaaccctgcatcggagcgggttcttctcaacgcgggatttgaacaggtgggtgaagtccggccagagattgttccctccggcaagaccgaaatgagcgtgaactatctcgtcgaggtttga

SEQ ID NO: 349237 - DNA, 801 bp, Pseudomonas aeruginosa; identical to SEQ ID NO: 96018

SEQ ID NO: 349238 - DNA, 1221 bp, Pseudomonas aeruginosa
atggctcgacatcgacacatcgtggcctggctcgaggaggtcgccgacgacctgcgtagcctgcgccaggacatccacgcccatcccgaactgggcttcgaggagcgacgcaccgccgcgctggtcgccgaatgcctgcgcggctggggctacgaagtgcacgaagggatcggccgcaccggcgtggtcggcgtcctccgccagggcgacggtacgcggcggctcggcctgcgggcggacatggatgcgctgccgatcgtcgaggccacggggctcggctacagcagctgccacggcgggcgcatgcacgcctgcggccacgacggacacaccgcgatgctgctcggcgcggcacgctacctggcggcgacgcggcgtttcgacggcaccctggtactgatcttccagcccgccgaggaaggccagggcggcgccgaggcgatgctcgccgacgggctgctggagcgctttccctgcgatgcgctgttcggcatgcacaacatgccgggactggaggccgggcacctgggcttccgcgcgggaccgatgatggcttcccaggacctgctgagcgtcaccctggagggcgtcggtggacacggttcgatgccgcacctgagcgtcgatccgttgctcgccgcgtcgagcgcggtgatggccctgcagagcgtggtggcgcgcaacgtcgatccgcagaaggccgcggtggtcacggtcggcgcattgcaggccggcgaggcggccaacgtcataccccagcgcgccgtgctgcgcctgagcctgcgggcgctcgacggccaggtgcgcgagcaggtgctgcagcgggttcgccagatcatcgagttgcaggccgccagctatgggtgccaggccagcatcgagcactacccggcctatccggtgctggtcaacagcgtcgaggaaaccgagttcgcccgccaggtcggggtcgagctggccggcgcggagcaggtcgacggcgacacgccgaagctgatgggcagcgaggacttcgcctggatgctacagcgctgccccggcagctacctgttcatcggcaacggcagaggacggccgatggtgcacaacccggcctatgacttcaacgacgacatcctggtccggggcgcggcctattggggcgcgctcgccgagacctggctggccgcccccgcggcgtccggccttcgactgactgccgccaataacggcgcggcctga

SEQ ID NO: 349239 - DNA, 741 bp, Pseudomonas aeruginosa
ttgcgcaaatccgcgccaaatttcgcgcctcgctacatccagtccaaccagttcctgatcgtcgacaacggccagtacctgctgctcgatcccggcggcgacctgacctacacgccgctctcgctggaattgtcgaaacgctttccgctgcaggagctggactacatcttcgcttcgcaccaggacccggacatcatcgccgccctcgacaagtggctgctgcacacccgcgcccgggtgatctgctccaagctgtgggcgcgcttcctgccgcacctgacggccaactacctggcggtcagccatggcatcaacacctacgaccgggtcatgccgttgcccgaccgcggccaggcgatcgctctcggcgactgctcgttgaaggcgatccccgcgcatttcctgcattcggtgggcaacttccagctctacgacccggtgagcaagatccttttctcgggcgacatgggcgcctcgctggtggacgacgcggcgccggtcagcgatttcgccgcgcatatccagtacatggacggattccatcgccgctacatggcggcgaacaagatctgccgcctgtgggcgcggatggtccgggacatggatgtggagatgatcgtgccgcaacacgggcggcccttcgtcggcaaggaaatgatcagcgccttcctctactggatcgagaacctcgagtgcggcatcgacctgctcggcccggacgactaccgcatgccaggctga

SEQ ID NO: 349240 - DNA, 192 bp, Pseudomonas aeruginosa
atgtcaaagccctaccgggttcgagataaattcgtcgaagaagtgaaggagcgccgcgtcaaaatgatcatcgagacaaaggacgacgtccgggagtccgatcttgtgaacgccacgctgtggaaatacctgagcaagatcacgacgaaagacgttcttgaattcagagaagagttcggcgggaaggaatag

SEQ ID NO: 349241 - DNA, 228 bp, Pseudomonas aeruginosa
atgatttccgccctgtcctgcgatggctccatctcgattgcgccggatggggcgcccctgtgttcgggcatgtgggtcttgacccatgtgccggagcagttcgacccgtcgatgttggacacccaggcgctcgcccaggtgttctctgtcgggttcggtcttgtcgcgacggtccttgtcggcgccctgggcgtcaaggccgtactcgacttcattaaaagagcttaa

SEQ ID NO: 349242 - DNA, 366 bp, Pseudomonas aeruginosa
atgaaaattctgaaagggtacgtcctgggcgtagttgacaagggggaaggggacaagcgttgggccatcgttggcatcaaggcgaccgacaaggaccgtgacggctttgacgtggacactacgtacaagcttcgtgtcttcggtgatgcggtgaagaacggcctgcataacgcctatcgcaacctcgctggtgtcgaggtctacgcgccctacaacgacgagttcgacgagaaatacaagcgcattagctactcgctggcaggcgcgcccttggctctgatggaaaagcccctggggaccgcccagtcgaagtctgctgctcccgcccagccgcaggcggcgcagcccgttaggcaggcttcctga

SEQ ID NO: 349243 - DNA, 237 bp, Pseudomonas aeruginosa
atgagcgcctacagcctccagggcgtgtccctgtcgtccagcgagcgtcggtcgctccagcttcgtcagcaggcccgcgctgctgtcgatcgcagcgtgttgcagcagaccgtcgctcaagcgctccaggcgctcgaaaagcataaggaggagggcggcaaggcctccaatccttggatcactgtcaccaatgaaaagggcacgccgtgggtcggcgatgccttcgggtggccgtga

SEQ ID NO: 349244 - DNA, 1170 bp, Pseudomonas aeruginosa
atgtttcctccgaccgatcatcagagcaggatgttctacgactacctcacggtagagcaggtgttcccgtaccagctcccgcaggttggcgacactggcatctgctactacgaccggaagaccggcgagcaactgcgcgacacgtctcctagcttcaaggttgagggcagtcactcgacgtcgattcgggttcgggtcgatgggaacaagctccgcgtcgaagggaatccgagtgcagtcaaccgcttggacaacctgcatggattccagtccatcgctgagtgtgtcgcggtctataacgacatcctccacgagatcaaggacgacaagggcaaccgtcttccgtcgttcacggcttgcactgattggggccacctccagaccgaggacggctcgaaaactcggatgatcggcaacggtgcgcgcctgcgccgggttgacttgacgacgaatcggacggtggggaagggcaatgaactggcctacatccgggccctgagtactcagcgtgtgggctacaagaacggccacctctacgaagatggttggacctgcgactggcaggcccgcgaccactactacaaggcctacggcaaggctcaggccatccgcaagttcctgtttccgaagtgcaaacggaactttggcgaagactcccccgaattccgctacctgctcgacctggccgcgtactgcgatcagcagggcgtggtgcgcatggaacaggaactcaagagtgagtatctggcccgtgagcggctggagtggtgggggctttttgatgaaggccgctttgcggcgatccatggggagtttttgaggggattcgacaagctcgaggtgatggcgatggattacgagacgattgcggaacggctgctttctgaagaggttgtaggcagcactcaggcggcgaatgcgaccgccaatattgcgatgaagtggatgcactgccctggtattagcttcgactttacgaagtcgcaaatgaagacctaccgggcgcgcttgaaccggatcggcatcaacatcgctcagccctacgacgtgacccgtcattcggtcgtgatgatccgtcgtgctgaggaaatcgtcaccagcgacgtgctggatctgccggagttctatcggcatgcaccgcgcccgcgtcacctgcggttggtggcctga

SEQ ID NO: 349245 - DNA, 351 bp, Pseudomonas aeruginosa
atggccaaggatacccgcgatacccagaccctcgacgccttcccggccaagccatccaggggccggcctcgcaaggctgacgcgctctccaatgctgagcggcagcgcctctaccgtcagcggcaggcgggcaaggcaccccaggtggacgcggatgccctggtccgtctgcagaacgaattcgaccggcacgttgataatgcgcgcgccctggtcgcccatcttcgaaagaccattgcgcagatggagcttgaggtggatctgtgccgccaagagcgatccgatgccatgcgcgtcaacagcatttaccgcgagcgtctggagcttgctggtctccctacagactactag

SEQ ID NO: 349246 - DNA, 897 bp, Pseudomonas aeruginosa
atgagtaaagtaagtgttttcgatactgaaacgttgctgcccgatggtcagctgtctgcgcgtgaaaatggcctcctgggcttctccaagcggtacgatcgagtttacaaccagcttcggctgttactggatctcggccaactaggagcttggagcaaggattaccatcagggtgttttgccgatttgcagcctggttgcagatcagtacccactggtcatcttccatggtgacgttggtacagggaaaacggccatggccgagtgcattgctaatcgcatcgtgcgtgaatccgggacggaagattcggtgctgctcaagctgagcaaccgtgtgcgcggcagcggtcgtgtgggtgaaatgggcaccttgctgactcaagtctgggcagaggtcgaagaggcggccggcaaaaaccggcgagcgattctgctgattgatgagggcgactccatcgctgcgtcccgctctcaaagccaaagccatcatgaagacaaggtagcggtgaacacgctaattcagggcgtggacgagatgcgtaaatacaaggggcgagtggtcgtgttcctgtgcaccaatcggctttcagtagtcgacgcggcgcttcagcgccgtgctgcgatcgtcgaagaattctgcaggcccgacgctgatgagcgcaaagccctgttcgagatggatctgcaagggctgcggttgactgagaagcagctccaagagctggctgcgctgaccggcgagcgcagcggccggccaacctggacgtactctgatcttcgtactcgtctctatccggcagcgcttgcgttggcttatccccatcgcgcgctgaccttcacggatttgaaggactccattgagtccctgcgtccttcacctgttatggaagacaagtaa

SEQ ID NO: 349247 - DNA, 495 bp, Pseudomonas aeruginosa
atgagtcagacggctactcagacagaaacgtactcggtcgcagacatcgagaccgtcatgaggcgggtgaagatggacttgatgatgatcgcatccagcactggtgctgcgactgaggagcgtgccaaggaatgggctcacgacattgagctgctggcgaagggcggctacttgaagtcggtagacattaccatcctctccaatggtaaagagctcaaagctgcctgcttcaccatcgacgcagagtcggggacgttgagcaacgagcggcccggcgacagtctgtggccaaggtgccctgagggcaacttgcggattgtgttgtcctacacccaccactacgactcagttgccaaagataaattgactcctaaattcaagcgcccctggtcaccgtctacggccgacatcagtcatacctcgctggcttcgaagccaggccgagagtattccagcaacggttacggcgtacagcgcaaggatttcggccaatga

SEQ ID NO: 349248 - DNA, 948 bp, Pseudomonas aeruginosa
atgccattgaacaatgcagagattcgacgctacgacagtaacgtgctgcgcctgccgaaggacaaacgggagatttataacgcacaggtcgaccggctgatcaaagcgttgcggagcaagattcgcgagcaacacaagatcacgatcgagcgtgtggtcaaagcaggctcgttcgcaaagcacaccattctgcgcaagagtagcgacaaccctgttgacgtggatgttgtgttctacatctcaggcaaaagcgtgagccaggagacctatcaaaccttgagcgacttgattcacgctgcgttgatcgagatgtacccgacaaaggccgtcgaggattttgttatccagcgtaaggcagcgaccgtgaccttcaagggcacggggcttgatgtagacatcgtcccggtgatcgccaacccgaacaaagagggttacggctggcagttcgatcgcgtggatggctcgaaggtcgagacatgcgccccctgccaaatcaaattcgtcgcggatcgcaaaaacgaggacgccgatttccgcacgttggtgcgtctggccaaacggtggcgcaactacacggagtgcaccctcaagtcgttcgctatcgaactcatcatggctcacgtgctggaggtcaacggcacggacggttcgctggaacaacggttccgtgacttcctactctacattgcccaatccgagcttaaggacgtgatcaagtttccggagaacacaggggttattccggccttcgatgaccctgtcgtcatcctcgatcctgtgtgtaacgccaacaatgttgccagccgtattaccgaggcagagcgcaaggagattgtcgcactcgctaagtcgtcgtgggagaccgcctacctggcatctgtcgatgatgacttcgacgtctggaaagaactgttcggtaaaaacttcagcgtggaggatgcggcatga

SEQ ID NO: 349249 - DNA, 906 bp, Pseudomonas aeruginosa
atgaccgatgaacccaatgcgcagggcaacagccctgctatacccgcacgccctggcgcgcgctggggtcaagagcgtcgtttagaatttatcgactaccgactcaggtgggacggacagatcaaccgaagcgatctgaccgatttttttgggatatccgtgccgcaggcgtcgatcgacctctccgagtacgcgcgcctggcttcgcacaaccttgagtacgacaatcgcactcgtgtttatagatcgactccagcatttgcaccggttttcgcctctagcgcattggagcgctacctggacgaccttctcagagtcgcgatacaacccgacatcccatacggaagctttctcggttggcatgcgcctgtcgcaaccgtgccccgccccggacgccgcctggatgcggacactgtagggctggtgctgcgtgcgattcgtcagaaacatgcactgtttgtaacctactgttcactttcaactcctgacccgactgatcggaagttgacgcctcacgcgctagttcaagatggtgctcgctggcatttccgagcgttctgccacaccaaacacgaatttcgagacttctcgttgtcccgagtaatcacggcccgtgacgctggccctgatgaagatcgggctcccgaagatactcaatggcacacgattgtgaagctcgtgattggcgccaatcctcgattgaagccgcatcagaagaaggtgatcgaattggactatgccatgcaaaacggcgagatcacccttcagtgccggcaagccttgaccttttacttgttgtaccagttgaacttgcaggaggagaagcctgagaccccccccctgcggcagcaactgactcttaaaaatcgcaaaaaaatagagcatctattaccgccaatgagctga

SEQ ID NO: 349250 - DNA, 1524 bp, Pseudomonas aeruginosa
atgtccagcttaggaaaacagtgctttctgatcgcagggagcatttcaaaattaacagaccgaacccaggttgaacgagcacaccagttggttcgcgggcttacaaaggcaactctggccgagcaggcttctctggttgtctatctgagcagcgagcccaagaatgaacaaggcgaccctatggtcttcgattggacggttgctcgtgaggtcgagcaattgagctcggtgatgaatgttaaaggtagacttcatatcgtcacttcccagcgttccctttatgggaaaatggatgacgaaagccgacaattggtttctcgccttgtcgaccaggacatcgctcagattgagtatgtcgatgacgacgtagtaactggcggcaatattcgtgacgcccagttggatctcgcgacagcaatgattgcaattggaggcggcaaaggcgtgattgatcgtgcgcagcgagcgctcaaactagggttccctgtgttcccgttcgacattgaggtcggggcattctgtgaagatggcccgggtgccctccaactccatcgccaatttacacagaatccaatcgcctattttccccatacaggcgaaagcgtacgacgcaaattgcttggtttgtctgctcagcatgcctcaaccgagcttcaagcactcgccgacaaagcaatccagctcttcgctcaggaactcatcgccaaggatgcggcagcgacacctgatgtacttgtgctgacagccctgccggttgagctagctgccgccaaacatgctctgggcattgatgaggacgattacgggatacagaccaagcacggcattcatgcatggagggtcaaggtggagggccgtaacggtccactcacctgcctcgtggcatcgttcaacggtgctggcaacacgcaggcatcggcagttacgtcgatgctcatttctgaataccgccctcatgcagtattcatgatgggtattgccgccggaatgagatccaagctgaagctgggcgacgtaatcatgtcggagcgcgtcgttgcctacgagggcgcagctgcattgtcgaacggcgtcttgattgcgagacccgacatggccaagccagagtttcgaactcaacaagacatgggcgcctatcttgctcaaggttctcgtttggcgcgcctcgcaagacacgccgactccgtcggactggtttttccgggttcgtcggatgccggcgaggtatctacagcccttaacccaatacctgctacgattgccgcaggggaaaagttggtacgcgacgaaaacctcttcaagaaaatgcaagagctacatgggaaggtgtgcgtcgctgaaatggaggctcacggggtgtttgaagcgtgctccagacatgaagtccctgcactggtgatccgtggaatcagtgatcacggtgaccacctcaaggacgatgtgcttcatgaggtggcatcgatggccgcagcagttgtgactgcggactatatcgctcacgggctcgtcttgcatcgcaagtag

SEQ ID NO: 349251 - DNA, 1107 bp, Pseudomonas aeruginosa
atgtggattgttctagatacgaatatatattttggccactggtttgctgacagcccaaacttttcgatgctcctgaatttttgtaataatggtcgtcacgctcttctgcttccggagatcacggctcgcgaaatcaataataaatattttcaaagtagggacaaagctctccatagctacgagagcgccctgaaagacttcgcaaaactaaaaattgatgtgcccagcgcaagcgaacagatcaaggctgtaggttatgaaattattgaaatccttcgcgcacttaccgggcagctagtgctggtgagctatgatacagtttcacattcccacttgattgaaaaggcactgaagccaaagttacctttcagggatggcgagaaggggtatcgggatagtttgttttggatttcgattttgaatcatatcaagcagcacaactatcaaggtgaggttgtatttctgaatcagaactctaaagattttttcattgagcgcgggggggataagatttttcacccggatttacaagaagacattgatcgcatgggaatttctgcgcgatttataatctacgatagcatcaagagcttcatagatacgcaagggggacaagaggctcatcaattcgactggacagacttttatcatcagcataacgggacgcttgatagttcggtcggagaagaggcgattgattacctggactctcaaccgttggaaactatcaaaagtcttttaagctccgccgggtacgatcagagaatgctcgacgcagcgttcgaggcttcattcgaggattgggaaggtgttgaggattctgaaattacaaatatgcggaatatccaacctgactcaggtgaggtttttatagactataaattcgatttccgaatgcttgatgtaaaacttttgatgacccatacgcattactatgctgacaaattttatattgaaaacaatgcggaaaccgatgtctctgacgacattgtagaagttcgtcttttggtgagagctgatctggccgcaagcatcatttttgatccgcacaacgaccatgtatcaaaagtggaaatcaaccaagtaaagtttaggaagctgcgctag

SEQ ID NO: 349252 - DNA, 1014 bp, Pseudomonas aeruginosa
atggcggtaggagtaccggaaaccgacgtatttgccgcggctgacgcggtgttggcgcgcggcgaacgtccgacggtggaacgcgtgcgcctggagctgggtcgcggcagtccggcgcgggtcggggcgctgctcgatcagtggtgggacagtctggcgcagcgcctgcgcggcgagacacgcctacccggactgccaaccgaggtggctcaggcttttgttgctatctggcagcaggcgaacctgctggcccagggcgctgcggaacaggcactagcagcgcaacgccaggtactggaggaagaacgcgagcgactagcgagggatgaagagcaaatgcgtctggaaacggctcgcgctcgccagcaggctacggaagccgacgccttacgccagatcagcgagacccgactggtcgacttggagcaattgctcgagcagcgcctgatgcagatcaatgacctacgtcaggagcgcaagcagcaagactgtcatttggccgaggcacgcctagacgcagctgctttgcgtcagcagttgcgggaaaaccaagcccaggcggaacaactgcgcctcgatcaggagcgctacactcaggaagtagaaaatcgggcgtttcgggaaatcgatcgtgctcgcgaagaagccaaaggcctggcgacccagctcaaagacaccaacacgcgcctccagctcgcccatcaaaccgtgcagaccacccagggcgccttgagcgaagctcgcgagcaggccgcggaggcacgggcgcaggccgcagcgctacactcgcaggtagagcaatggcgccaggcgacggcgaaggcagaggagcaactgcaagctgtagagcagcgcctgcagatcgcccaggccgaactgagcagcacgcttgtgcacgctgcggcagcgcaatcgcgtgctgaaaccctcgaaaactatataaagcaacagggctccatcaccggtcgtgagcggtcgccacgcgcgcacaaaacgcccagaaaaaatagttaa

SEQ ID NO: 349253 - DNA, 1119 bp, Pseudomonas aeruginosa
atgaataatacgctaatgccaacgtctaggggctgcggcctgctcgccgtcgatcgcctcaatgccgaggcccgtgccgccgccgcagcgttcgttgccgccggcaccgccgtcaataccgtgcgcagttaccgcagcgcactcgcctattgggctggctggctgcaactgcgctatggctatacgttggaagcggggccgctagccgacacggtggcagtgcagttcatccttgatcatctggcgcgtccgacagacggagactggactcacctactgtcgccggagttggatgccgcgctggtcgacgcaggagtcaaaggcaagctgggcgccctgagttacagcacggtgcgccatcgtctggcggtgctcgccaagtggcatgacctgaagaactggcctagcccgaccgagatggcgtcggtgaaaacgctgctgcgtgaggcgcgcaaggcccaggcacgccagggcgtcacggttcgtaagaaaactgcggcggtgcgcgagccgctggaagccatgctgaccacctgtaccgacggtatccgtggtctgcgtgaccgcgccctcctcctcttggcctggagtggtggcggccgccggcgctcggaagtggtgggactccaggttggtgatgtccgtcaactggacgccgacacctggctctatgcgctgggtgtcactaaaacccagactgacggcgtacgcagggaaaagccgctgcgtggacctgcggcacaagcactcgcagcctggctggcggcggctcccgcctctacggggccgctgtttcggcgggtttaccgcggcggtcgggtcgggacggcaggcttgtccagcgaccagattgcacgcatcgtgcaacgccgggccaagctggccaagcttgatggtgactgggcggcacacagtcttcggtccgggtttgttagtgaagccggccgccagggtgtgcccttgggcgaagttatggccatgaccgagcaccgctcgttgcctacagtgatggggtatttccaggcaggcaccctgctcagtagtcgagccagcgccctactcgatgccgaagagtcgaaggggattgcgagcgctgctactgaggagcgacctatttag

SEQ ID NO: 349254 - DNA, 1146 bp, Pseudomonas aeruginosa
gtgcctgagcttcatgagcgcatctacgtgtggctttgcaagaagtcgaagggaagcgctaccggcaagctgcggtgcagcggcattctcgacagattgcgaaccgatgtattgaacgacccggtggcattgcgcaaggcgctcatccagcttcggggcgagcaacttatcgattacgccgccggacaacacggagagccgatcagtggcttcctaaccgtagtgcggcctgaccaggaagtgccttcgcatgttgaggcatggcgtgccgtcttggctgactcaaccctcccagaacgagacaaactcgcactacaggcaatcggcagcgcaatggaggggttctcctcaaaaaacatggcgatgctgctggacgggcttattcgcctgcgagaaaaccaagcacagcactttggcgagcaagtgttcagcgtcagtgcgatgtacctcatggggtcgtcgaagctgctatccagcctcgattggaaggctctatacagtttcggtatcgagatcgcccgattcttgcctcgcccggtctatgtggtggtaggcggaaatgtggaggcacccactgcggtcgtgcttgtagagaacccagtgtctttcgaggcagccgtggactcggtggcggctcgtcattgccttttcgtctgcactttcgggttcggtctgagtgcctcgacgaatgactacggcaatcagcttgcaggggcagtcgaggcggggcaggcgcgtgtcctcagccgctccgctggcggagaagtgccgaccttgcgcgacatcttgcggcatcagcgaatccagttttggggtgacttggatgtggctggcatgcagatattctgccgtcttgcttccaaggtaccgggcatgactttgtcggccctctatgaaccgatgatcgaagcgatccggcacgacgcttccagacatccttacgtctcagccgtatgcaaggatggacaggggcggatgatcgttcagacagctcggagcgacgttcagggattgctgcgcctttgcgaacactttgctgttgatcaggagttcgtcagcgcaaatgacatcgcacggttggccggcaagccgctcagcctggctgcccctcagaatgagcctaacagtaacctcttgattcgataa

SEQ ID NO: 349255 - DNA, 726 bp, Pseudomonas aeruginosa
  misc_feature (95)..(95): n is a, c, g, or t
atggcgcgcacgccgaacgctcgtttttttgtcgaagcagaggttgcggacgaggagacgatccgtcgcatcatagaatcccttatcatcgaaantcaggatcgagagcaagctgcccgtgaccgtaacccggttgcgctcaacaaggatatcgagcgccgcaacaagtcgtacaaagcagagattcacaagcagatatacgcgaacatcttctccaaggaacgcgtccattttacgcatgctgccatttgggatggcatgaaatcgcctctcagcggcgagggtggcgggctttctaccggccagcgcacggctttgatgatgatgtggctcatcaaacaggccgagtattctctaacgcgagcggcgcttatgtacggtagtcgtaagcaacagaaggcggcgctcaagagcgctcagcgcatcatgttcttcgacggcctgttctcgaacctcagcaacgaggactacatcgatcacgccttccagggactcaaggatgtcgatgagaatttccagttgatcggcctaatccacaatccgcactacgtcaacaaccagaacatcttcccggttcatctggtcggtaagaagaaggtgggagtcaaaggaggtgtgcggcgtcggttcgtcaccgtcgagccgtggcaagacgacaacgggatgatcacctacacgagtgcattccgggaaagcagtgctggtgaggattaccctcgtgcctga

SEQ ID NO: 349256 - DNA, 213 bp, Pseudomonas aeruginosa
atggtgctcaccgccagcccctggtcgattgtccagcgcgacgagagcgtgacgctggccggtggctgcacggtggtgaccgggatgatgctgatcgggcgctcctccagccgtgcgccggtatcgatgtggtcgaacttgctcggctcgtactgcaggccgttgatggtccactggccgttgtcgtcacgcttggtgctcatcacccgatag

SEQ ID NO: 349257 - DNA, 432 bp, Pseudomonas aeruginosa
atgagcagaagtggatattgcgacgatttggacagttggtctctgatctgctggcgaggcgcggtcaactccgcgatcaagggccggcgtggtcaggccttcctgatcgaattgcgtaatgcactggacgcaatgccagaaaagcgtctgattgccgaagaactggaggctgacggccagttttgcaccctcggcgtgatcggcgccaagcgcggaattgatatgagtactctggaccctaattgccgagagacagtggcctcggcattcgacatcgcgccggctctagcagccgagatcgtcttcgagaatgacgagtttccgggcggcttctacgggactaacggcgagtggcagagagaaaccccggaacatcgctggcaacgcatgcgcaactgggttgaagcaagcattcaggagtcaaaaccatga

SEQ ID NO: 349258 - DNA, 573 bp, Pseudomonas aeruginosa
atgagcattgactggaacacggcaccggagggtgcaacgcattgggagccaacaggacctgagttccatgaaggctggatgaagaaagaagggaataaatggttctattggggaacaggaagtgaaaaatggctccacacacttcgatactgcaatgtgtccgcagagcgtgaggcgacattcgaggctagaccgcaagatgcatgggacggccagggcctgccgccggctggcaccaagtgcgagcactacggcaccgcggacgacctcgagtggcttgaagtcgaggtcatcgggcatggcaatgtcgacggcagaaatgtcgcgttcttccgctacgggacgggctcgccacgtttcaccgtcagctactccacggccaacaacttccgccccatccgcacccccgagcagatcgccgccgccgagcgctgggcttcgatccagcagatgctggcctttgcggacgtgaagtacggcgccggcgaactgatgtccccgaaggagtacgtagagacagccgtggccgcgctctacgacgccggctaccgccgccaggaggaagggaaatga

SEQ ID NO: 349259 - DNA, 729 bp, Pseudomonas aeruginosa
atgagctggctttattcgctggagctggtggaggcattctcggcggccacctcctcggatggcgcacggtctgcgctgtcgagttcgagccgtacgccgcaagcgttcttgtcgccagacaaaatgacggaattctcccgcccttcccggtctgggatgacgttcggacctttgacggaagaccttggcgaggacttgttgacgtggtttctggcggattcccgtgtcaggacatatcagctgccgggaatggcgccggaatcgacggtgagcgatcaggcctttggcgagaaatggcacgaatcgtcggtgaggtacgaccgcgattcgtcttcgtggagaactcaccgctgcttgttcgaagaggacttgccgtggtcctcggtgaccttaccgagttggggtatgacgctagatggtgtgttatgggagccgccgacgtcggggcgccccatcagcgtgatcgtatctggattgtggccaacccccagcggagtgacatcagggaaaaatcatgtgacaggccgtttggacgaatggggcggctctgggaatccactccgtggaacagacattgccgcagtgcgctgcgcgagtttcgaagaatggatgatgggctggcctacggggtggagcgcactaacacaattagaaatggacaagttccgcgagtggcagcggcagcattcgcttaccttgcatccgggtggacctgaggaggcagcatga

SEQ ID NO: 349260 - DNA, 318 bp, Pseudomonas aeruginosa
atgagcaataacgcatatacgcctggaccttgggctgccgttgagggcgcacacggatgcccggtagtcgtgacttttcgcgactgccaagacccggccaagtgggtgcccaccaactactcggcaagcatttccaccagcatcggggatcacactgagtctaggacttatggcaacgagtgggctaacgccaagttgatagctgccgcccccgacctttttgaggctttgcagacggtcatcgactacggctccatgacaggggctgactgggtaacagaacaggccctagccgcaatcgcaaaagccaccgcataa

SEQ ID NO: 349261 - DNA, 933 bp, Pseudomonas aeruginosa
gtgaatgctgctcgggacgccacctacattcgaggtgatgcttacaaccttcttcacgctgtcgaattccgcgacttccagaaagtcggtacgtttgctgatgagatcgtcagccagcttcgcaacgagatcctcgacatcctctcagcgctagaaaaggtcgggaagacggagacagccgaaaaatacgtcggccggttcgaccaatactgccgagtcatcaacgaaacgatcgatatcgtccgtaaggcggaagaagaggtagacaagaaatcgacagccgacgacttctccgaatggctggaacgtagtgacgcggacatcaccttcgagagcgtgcgagcccacctccttcgggtacggcaagtcctgataatcttcaaccggcgcgtatccgaattagtacaggccgccgcccagaacaagcgtattgcagtgccgccgccatcattcctggatgtggcgcgcgaacttgtgcgggctcccttcagtgaagtgcaagaagcgcacttcatgcgccaatggggcgcgacgacgcttgaggccccattccactcggttctcgatggttggcacgcggttcctattcgtcaagggcagcccgaggcaaaagccatggagttctccgatgagacggtggagtcggtgtcccagttgggcaaggttctgttcatcgcacgacacggagaagagatcgccacattcttgaagaagtcaccgctgcgcctctcagaggccattgatcgcggctggttccttctggatgggaagccctcggtgggcgatctggtcggcgtgttcgtggcgccggatacccttccgatcaaagagccgctcgaaatccgggtgtcgccgactttggtgaccaagcaggtcaatggcggcgacttcctgttctgtgaccttgaattggcaataaggagcaatgcgtga

SEQ ID NO: 349262 - DNA, 792 bp, Pseudomonas aeruginosa
gtgaataactcggaacttggccgcgtccaagccttcctgctcaagcaccgcattgctgagacgaaggcggcacgacggaacatctcacgcgaggagcgcgaggtcgccacgatcttgcgggatgccgatcctcagatgcgaaccctgcttgaagaaattctcgacggacagggccttgtgctccagtcattccgtgagttcgacgtggctggtatacctgccggcgcaatgatcttcgtgcttgcgcgcaagccggatacgaatccacctttcttcggcaccgagcgattggtttcgcgtatgaaacaactcgggcgctacaaggtttcggacaccgagatcaagatctggttcacgcaactctggttcgtccttctcgacctcctctacacgaagaagaaccgtagtcccggagcgatgcaggattgggttgacacggccttcaatcgcctcgttttcaccgatgcggtgaagaactacatcaacgactcggttctcaagatggatccggcgtccttgaagacgacggccatctatgacgcccttacgtccacgaaggagggcacgatcacgcaactgtgttcggcctttatcgagattatgcaggacgccagcttgctggagcgccttgaagaggatgtctaccgccagtcgctcctcttcgcattcgagatgaagatgaactatgaccggcagcttgtcccgttgctgccggcgttgttgccgtttgacgcggcgtccactgtgctgatcgaggaagtcgaggaggtcgctcatggcaacaatcactag

SEQ ID NO: 349263 - DNA, 4248 bp, Pseudomonas aeruginosa
atggcaacaatcactagcattcaggtagccaactttctaagcgacggctacaccgaagggcgtgaatgggtgccgctctatcgaggtgagaccttccgtctctttggtcggtcgtctgccttacaaatcgacaacggcggcggaaagaccagtcttactgagtcctctctattccttctgagccgggatgctcggctcaaggccaaagtcgcggatcgcattgcaccggcggagcacggttggacccatatccgcatggagttcgtcgagaagccgcacgacgaagatattcttcagcgcgacttgatcactctcgatcctagtgagattccgggggtgacctacgtgatcggtctcgcctggagccgtggcaaggatccatatttctatcattatctagggctgctttctgacgctccttgtttcgttcaggagcctgacaaacttcgactcatcgacaacgagaccttcaggcgttccgtcgagcgcatacagggggcgcgatgggacaaatggcggaaccagaaggactggctggaagagatacgtcagttcaccaacatcgaagtcgtcaagaagaacgtggagtttcagttggagggggctggcgactactccgcgatgatcaacaaggtggaacctgaaagcggtgaatcctacgacgccgcgttctttcgtcagtttgtcgccccagagcttctccgccaatcgatgggcactgagggcgatgaagacgaggagcacttcgaagacacgctctacaagaccttgaagccgaccgctgacgccctggtccacatcaacctgcgtcagcatgagctgaacgacgcggaagcagcgctcgacaagttcgagccggtcgaagccaaagcacgggatgttctcgaagccaacgcgtcttacgaggatgaattgtctgaggtgatccgggacgcagcggtggtgcatgtgctctcagtacgtgatcccataccaggtatgccgacaatccctcgtgacgcgccatggagaaaggacagcaagctcagcgcggtgattgccagccttgtgatcgacaagacagccggcgtgttgatcgctgaccacggactagcaaaactcttgggaatcgaaaccaagcgggttaacgaacgagcgatggctgtccgcgtgagcccggtagtttgcggagcacaagtcgttgacttcacgaacgactttaagggcatggttgttgcggcgccagatgcccagtatggagatgaaggggcctatcttgttgaaaataaaggcgaccttaaagaatccaggcgcgggcagcaccggaagtacgccgtcaatggctatacgcttacgggtgccaaagctttgctgccggcaggtgaccccggcaaccttgctgatctcctgactcgcgccttcgggatcgcgatcgacatcatcgatacgaacccgtaccgcagaactcagcgcgagctctctgcccaacttgaaaaggcgtccagctcccacaagactgctgatgcgggcgtcaaacaatggtcagccgagtacgagaacctcattgcagagtcccgtgaggctgaagagaaccaagtggcgtatgagacgttcgccgcgcgggcagacctattcccggctgagcacaagaaccaaccgagggcggccaaggaatggggatccaagcagcttacttgggaccgtcaggcgctctccgaccacaatgaccgcgtggcgtcactgacaggcaaacacgagatttggcaagcggtaactaccaagtaccaggattgcccgttgtcggaggcgctgtcgatgattgtcgaccggcataccgaagcggttgcggctggcgaggtggcaaaggatgcaatggatcaagcttgccggcggcgagatgaacttcgtcctcggcacaaagcagcggcagaccaactcaataccgcagtcgccgcgcatcagcgcttaagcgagctggcgtcagcgcttcctgtttttcgcgaactgttcggcgatgtcgatccccttcagcagaaccctcagggcaacctcgaaacaacgaacggacagcttcaaagtgtgaccgagcgactgcgcgcagctgtcgagacgcgtgacaagctggataacctgcagcccaaggtgaaggttttccatgaggtcttcggcgaagcagccccgaatacactcaatccgatccaagacttgatcaacctgaagggcaagatcgcgacggaagagacaattctgtccgagcacctgccttacgttaaggcgttgttgcagttccgcgaggcccacggcgaggagactcctgaacagcgcctcgaagccattgaacgtctgcgtggcgaactgcttggagagcgcgtcgcgatcaagagacgcctcgaagagattggtgcggagcggaaagagcttgatgcctatgcggtcgctgatgggcgagtctactcggctgcactggacgcgctggcgaacgcgggagtttccttcacgcgactgcacaccttggcgatggcggcgcctgaaagtcgccgggaggcagtcctatcactattctccgccgcgctctccgcaccggtcgtgcagtccgcagaagatgcggacaaagccaccgaggttctggagaaggcgaaactaactgttccggtctttctggccgggccgctgcgtcaattcgtcgaagccggcagctacgaggtgacgggagaagtcactcacaccttccttgctggtcgctcgacacggcaggtcaagatcctcctgaatccggcccttatagtcgaggaaaaggagcggctcgtgtcggaggagaagagccttgagtcgcgtgatgcggaggctactgcgcagcttgccagtatcgatccggcatccgaagcggtagcgatgatactcagggcgcgcgatgccgttcggaaggcctcggatacgaaatatgcagaggcaaagcagaaccttggtgagctttccaagcagttgccgcaacagcagcggaaggtagacgccatggacactattgcggctgcgaaggaataccaagcgctcggtggcgagacacggtggcaaaaattggttgatcaaactatcccccacgaagagggggaggtggcccgtctcaaacgcgatattcggcggctacagcggctggtcgaggaggacgcctcgcgtgcactaatcgccgccaaggacttcttccggtctggcggagagggcgccctggcacgagcaaaagcagatgttgaacagcttgagtccatgaccactgacctcttcaagcaactggaagtattgcggagcgagatcgagggcaagctggcggaaaatcaacgctctgcagcggcggccctaaatagccttgatcagacgttccacctcgacaagcgcgatctcgaaacgtcgatagcgtttgaggaagacggatccgcacatttcatgagcgaagccgagaaacaactcaagaccttgcaaggcgccgtgagtacttctattgcccggcttcaggacatcgacttcgagcgtgcccatcgctacatcgaggcatcgaaggccgaaggcttggcactggctgaccggatcgcagaagccaaagggaagcgggacaccttcacggagcagcgtaacactgcggaacggtccataaacgatctcaacggccgcctgtctgccttggagccattcctctacgacctccacgacgccatcgtagaaatccgcgagcagtacggaaagatcgtaacgttctcggatgacgttcgtgcacgtatcgccatggaggcgaaggcgcatccagacatcctcgccgacgccgaggtgttgcggaatgggtgcattgggaagctaccgtcgacttcggtggagacaaaggctgccatcgccaacttgcgggaagcgatcaaggcactggaaatcgacactcggctactcaaccagcgccgccaagcacgggcggcggcgcaaaacgccttcgtcgatgaacgcgaacgcttctgcgaacaagcccgtactggccacatcaagggattgcaactccccgagattgagagaatcgccgaagcgacgacgctcgcacagttgggtgcgattcaccatatccgtgaaaagattcgagcgaccattgatgaatacgtcgataagttgacgaaaatgcgagagacgatggaaaccaataaggctgcgactgtcgacagccttgtccggttcgcacggcaggcggaaatgaatctcaggatccttaggctctgtacgaaaagtccgaacgggtag

SEQ ID NO: 349264 - DNA, 360 bp, Pseudomonas aeruginosa; identical to SEQ ID NO: 340432

SEQ ID NO: 349265 - DNA, 564 bp, Pseudomonas aeruginosa
atggcactcgctagggggctgctcagcaagatccacatcgctcgtcagcagctcggcctgcaggacgatgtctatcggcagaagctgcaggtgatgttcggcaaggggtcggcgcgggatctgaacctgcgccaagccgagcagttgctgacggagttcaagcgcctgggctggcaaccacagcccagcaagcgagcagccggtaagccgcataacttcagtcaactgcccgccgaggtccaggtcatcgaggcgcagttggccgagatgaggctgccctggagttacgccgacaagatcgcaaagcagatgttcggcgtggccaaggtcgcctggctgaagaagccagatcagctcacggcaatcctggcggcactgcatgtcgagcaggagaagcggtacctactcgctgaagtggatcggctctgcctgggcctgggcattgagcatccagaacaggcggccggcttggaacagctgccgaaaggatggcggcggcagcgtccaatcctcaaggccctggtggaaacgctccaggcggccgcagatagcaagcggaggtaa

SEQ ID NO: 349266 - DNA, 321 bp, Pseudomonas aeruginosa
atggagcgctaccactcaacggccggcgatccacctcggcgtgatgctgacgtaaagcggcaggaggcccaggagctggacgaactggttcagcagttcttggccggcggcgggcagatcgagaaagtcgggtacaagatgcgcgagctgccggacactttcgtcatcaaccccatgaagacgccggtccggtatacaacggtgccctggccgagaactcgtcgctcaaagccaagcctgccgcaccgcgcgcgcaagcaaagaccgagccccaacgctcaccagcgcccgtgccggctttgcagccggctcctggcgtga

SEQ ID NO: 349267 - DNA, 219 bp, Pseudomonas aeruginosa; identical to SEQ ID NO: 340460

SEQ ID NO: 349268 - DNA, 690 bp, Pseudomonas aeruginosa
atggaccaggaccgtatcctcgacaagatcaagaagtgcctggaaatggccaaggggcggggttccaacccgaacgaggccgagatcgcgctgcgtcatgcccacaaactgatggaagcctacaacctggagatgggcgacgtgctggccagcatggctggcgaagccagggttcccgccggctcggatggaaaaccgccggcctggcgggtgcgcctcgctcaagtgtgctgccatgccttcggcacgcacctgatcatctgcacctcctatttcgaaagcgcttcgttcttgttcgtcggctgcgcggcggcgccggagctgaccggctacgcctaccaggtgctggagcgacagctgcagaaggcgcgcaaggacttcctgagcacgcagaaacgctgtaagcggtccaccaaggtggcccgtggagatgccttcgcgcatggatggatcgaggccgtgtacgccaaggtcgaccagttcgcgggcgtcgacgacaacatcgccgacgcgatccaggcgtacatggcgaagcaccacgctgacgtcggcaagttcgagatgaagcgccgcaagctcaaggcacgtgacgaagtggccagtgaagcggggtatgccgcgggcaagcgcgcgcggctgcaccaagggatcgggcaccaggccgtagctcggcttactcagggggtgtga

SEQ ID NO: 349269 - DNA, 639 bp, Pseudomonas aeruginosa
gtgcgggcgaacgaggacgaagcgcaggcgaagcggacgagcctgttggaggccaggacggcaactgcagaagggcgcattaccaccgttgagcaggtgaccgctagcgataggcaggccaccgctcagcgcattgaccagttgtcagcggaggtgggcagcaacagcgcggcgatccaaaccacctcccaggcagtcgcttcgctcgatggcaacgtcaaggcgctctacagcgtgaagctccaggcgcatgccaatggccagaagtacgccgctggctggcaactgggcttcgacagcggtacgagcgtgacgaccatggcgttccaggctgatcggttcctctggttcaacagttccagcgggcagaccgtggcgccggtctcgatcgtcggcggccagatgttcatcaacaacgcgatgatccaggacggatcgatcaccaacgcgaagatcggaaactcaattcagtcaaataattatgtggcgggtcagactggttggcggctagataaaacaggagcgtttgaaatcaacggatccgtggctgggcaaggaagagttgttatcaccaatcaactgatatctgtttatgatagtaacaatgtgctgagggttagaatgggtatttggagttga

SEQ ID NO: 349270 - DNA, 705 bp, Pseudomonas aeruginosa
atgccagctgccggctttgaggtgaggaacgacgcgagtaggcttttagttgatggcaattacctgaacctgggtctaagactatctggagaggctacaaagggagggcttatcaacactcaggtcgtggcctatccatactctggaaatccagtggtcgcgctgcgcgttatatctgcatcgagccaggaagcctatgtttttgtcaaggagtgcgccagggacggaagcgggtggcagatcactctggagtcttgggctccaactggaggatccataaagtttgcttggtacgtatttgataactatgtgcctagcggggggtttggtttggaggtttacaacgcgacaggggcgctggtgttcactgcgatatctccccctatgagagtctcctctgttatctctgggaagatatacgtggctaacgatcagaccagagtgaatatagctgacgcccaagttggttccagtgtgtatgcactcttgcaggcaactaaagcgtatcaccggaccatggaattgattccgagccaaccgccgcgaacggtggcaacgctgaacgcttcagcggtttgcttggagtccggcaggcaaaatattaagtactttggtatagcgggatcaacgaacgccgggagtccggagcctgagcaagagtgggcggggacttggttagttattgatgtaaccggatttcaatag

SEQ ID NO: 349271 - DNA, 408 bp, Pseudomonas aeruginosa
  misc_feature (373)..(382): n is a, c, g, or t
atggatgcaataaacctaaaggctattcacaaaaaatatggtgagcgtccgctaagggactacaagactattagttttcttgagtactatttctggtatccctttgtcaaaggaatgagaacggtccgtccgttgaatttcatggcctatgataaggccaaggctgaaaccttccttcaagaaacgataggctatcgttcttacgcgcgaaagcatggagagtcgattttcaccaagcttttccagaactactatctaccgaccaagtttggctatgataaacgcaaactgcactactccagcatgattttgtctgggcaaatgacgcgtgacgaagctcaggctaaactggctgagccgctatatgatgcannnnnnnnnnggttggtttccatgattgtaggctaa

SEQ ID NO: 349272 - DNA, 408 bp, Pseudomonas aeruginosa
gtgaagctccaggcgcatgccaatggccagaagtacgccgctggctggcaactgggcttcgacagcggtacgagcgtaacgaccatggcgttccaggctgatcggttcctctggttcaacagttccagcgggcagaccgtggcgccggtctcgatcgtcggcggccagatgttcatcaacaacgcgatgatccaggacggctcgatcaccaacgcgaagatcggcaacgtgattcagtcgaccgccctcggtgccaacggcgagccgctgtggaagttggataagggcggcgcgttcacaatgaacagcgcaacgtcgggagggtttatgcgtcagacggcagaggcaataaaagtgtatgacggaaacttggtgcttcgagtccagatcgggaatcttgatgtatga

SEQ ID NO: 349273 - DNA, 369 bp, Pseudomonas aeruginosa
atggcaaagcgttaccaactcccggatgccgcttgggagctgatcgcagatctggtttcccccgagcagaagatggggcgaccccgcagagatgaccgactgatgctcaacggcatcctctggatcttgtgctcaggcgctgcctggcgtgacctccccgagcggttcgggccatggtcaacggtctatcaacgcttccgtgactggcgggatgacggcacgttcgaccaagttcttgagcgcttgcacattcgcctgaaccaggaaggactgatcgatctggatacctggatgatcgactcgacagctgtacgagcaacccgagcctcttctggcgccggaaaaaaggggggccagaagagccggtag

SEQ ID NO: 349274 - DNA, 408 bp, Pseudomonas aeruginosa
gtgaagctccaggcgcatgccaatggccagaagtacgccgctggctggcaactgggcttcgacagcggtacgagcgtgacgaccatggcgttccaggctgatcggttcctctggttcaacagttccagcgggcagaccgtggcgccggtctcgatcgtcggcggccagatgttcatcaacaacgcgatgatccaggacggctcgatcaccaacgcgaagatcggcaacgtgattcagtcgaccgccctcggtgccaacggcgagccgctgtggaagttggataagggcggcgcgttcacaatgaacagcgcaacgtcgggagggtttatgcgtcagacggcagaggcaataaaagtgtatgacggaaacttggtgcttcgagtccagatcgggaatcttgatgtatga

SEQ ID NO: 349275 - DNA, 480 bp, Pseudomonas aeruginosa
gtgccgttcgatcccgccaagccgacgctgttgtccacactggttcgtcactacgaggaactggtcgaccatgttcgccggcgcttcggcgaccggggcatggcgcgcgaagtggtgcacgacgtgtgcgtgcagttgctcgaacgcgacgagaaggaggacgtgcacacgcccctggccctgctgcggaaaatctcccacgacgccgccgtgagccgctatcgtagcgaccgtcgtcgaaccgcctgggtggaagccgtcgccgagcttccggaagtcgcctgcatggcggcgacgcccatgggtcgccatgaggccgagcgcgagttccaggcactggtcgacgccatcgccacgcttcctcctcgctgccaggccgttttcgtcatgcacaagatccacgaagttccccaggcgcaagtcgccgaccgcctcggctgtcattttcagaagacgactgcaccagttgattgggcgtaa

SEQ ID NO: 349276 - DNA, 162 bp, Pseudomonas aeruginosa; identical to SEQ ID NO: 328044

SEQ ID NO: 349277 - DNA, 2082 bp, Pseudomonas aeruginosa
atgttcccgcagggctcggcgcgcatcgccgaggccatgtacagccagggcctgcatgcccaggcgctgcacgaggcgatggccgaggccatcgccgccatcgtcgagcgccagccgcaacggcgctggcgcctgctggagcttggcgccggcaccgccgccgccagccgcgcggtgatcgcccggttggcgccgctggtgcagcgaggggcggaggtggactacctgttcaccgacgtttccagctacttcctcgccgccgcccgcgagcgcttcgccgaccagccgtgggtacgcttcggccgcttcgacatgaacggcgatcttctcgaccagggcgtggcgccgcactcggtggatatcctgctcagctccggggccttgaacaacgcgctggacaccccggcgctgctggctggcctgcgcgagttgctgagcgccgacgcctggctggtgatccaggaactgacgcgcgagcacaacgagatcagcgtcagccagagcctgatgatggaaaacccgcgcgacctccgcgacgagcgccgccaactgttcgtccacaccgggcaatggctggagtggctggcggcacagggtggcgacctggcttgtggggtggtgccgccgggcagcgctctcgacctgcttggctacgatgtcctgctggctcgctgcaagaccgaccgcgcccgcctggagccggccgagctgctggccttcgtcgaagcgcgggtgccgcgctacatgctcccggcgcagttgcgcgtgctcgaacgcctgccggtcaccggcaacggcaagatcgaccgcaaggccctgaccggctttgcccgccagccccaggcggaccttcggcatggcgtcgcgcaggcaccggccgacgaactggagaatgcgctgctggcactctggcgggaggtgctggacaacccgtcgctgggcgtcgagcaagacttcttcggggctggcggcgactcgctgttgatcgcccagttgatcgcccgtttgcgcgaacgactggaaagcgcccgccggcatccgttcgatcgcctgctacgctgggcgctcagccagccgacgccgcgcggcctggccgaacgcctgcgcagcgcgccggaagagggccgtgggccagccctggccgcggcgcgcggcgtcgccccggcgcaggccggcatgtcgcgcgcaccgctcgccgagggcgcggtggcgctcgacccgctggtgcgcctggtgcccggcgagggcgtgccgcgggtgctggtccacgaaggcctcggcacgctgctgccgtaccgcccgctgcttcgcggcctgggtgaggggcggccgttgctgggcctggccgtgcatgacagcgacgcctacctggcgatccccgccgagcatctcaacgcctgcctcggccgccgctacgccgaggcgctccatggcgccgggctgcgtgaggtcgacctgctcggctactgctccggcgggctggtcgccctggagaccgccaagtccctggtccagcgcggggtgcgcgtgcgccaactggatatcgtctccagctaccggattccctaccgggtggacgacgagcgcctgctgttgttcagcttcgccgcgaccctcggcctggataccgcggcgctcggcttccccgcgccggaacgtctcggcctggtggtgcaggcggcgctcgcgcagacaccggagcgcctgggcgccgaggcgctggcggggctaccgggcctggccgatctcgtcgctctgcgcggccgcgtgctacaggcggccagcggtagcgccgacgccgccagcgtcgaacgcgacaccctctaccggctgttctgtcactcggtgcgtgccagccaggccgcggcgctggagccctacgtcggcgcgctgcggctgttcgtgccggacgccggcaacccattggtgccgcgctacgccgaggccctggagacccaatggcgggccgccgcgcttggcgcgtgcggcatccacgaggtgcccggcgggcacttcgactgcctgggcgaagccctggcgcaatccttgtcgaaacccatgccagaggaggcgagccgatga

SEQ ID NO: 349278 - DNA, 345 bp, Pseudomonas aeruginosa
atgaccatcggcgagaacctgaagcgtgccaggatgaagcgagagctatcgcaagcggcacttgctgagcgaatcggagccgggaaaagcacgtacataggctgggagcacgacataaacccacctccagcagacaagctaatcccactggcaaaagaactggacgtgtcgatagacaccattctcttcggagaaaacgccggcatgagcgccgaaatgcgggacctattcaggcgtttcgatgagctatctccagcagtgaagccgcaggcaaagctactgctacgagcactgctattcagtctggaaagtggtgccgcacaaggcgaagagcacgccgcctag

SEQ ID NO: 349279 - DNA, 345 bp, Pseudomonas aeruginosa; identical to SEQ ID NO: 349278

SEQ ID NO: 349280 - DNA, 678 bp, Pseudomonas aeruginosa
atgttgggttttgcctcgactcctattcgtggagagatacaggctagtccggaagagtatagttttattgccgtcttgtatgcttgttttgcagttctgtccatttcaaaggttcgatggttcattgagcgtatcggatggagatattatgtatttttttcaattattttgtatttagttggtgcgctggtctgtagcctcagtgacgaaaaaataagcttctcgatcgggcgtgccattatggctttgggaggagggacatttatgactatcgggaggctccttgcaaatacgctcccaggtcatttacgtttcaatggaatttgtttttttgcaacaggcgtcctgcttggtaccatgggcgggccttggctagctgcgttaactgttagtgaaggccattggcaagcgatgttctgggccctgctgctattggcatgtatcgttgctttgttgactattatttatgctccgaaaatggagcttcctagagagacctggtctagtagtagtttttcttttgtttttttgttagggcttttttcattctttatactctatttgctgcagcgctcttattatgatttttataatgaaggagtgatattggtatgttttgttttcttgttccttgggggcttgatatctattttttatactgagcatcagcgtgactaa

SEQ ID NO: 349281 - DNA, 726 bp, Pseudomonas aeruginosa; identical to SEQ ID NO: 327979

SEQ ID NO: 349282 - DNA, 255 bp, Pseudomonas aeruginosa; identical to SEQ ID NO: 327978

SEQ ID NO: 349283 - DNA, 936 bp, Pseudomonas aeruginosa
atgtcggtgtcggcacacgttaagcatgtaattttcttggaaagaacttcaatgggaaccaaagcagctgctggagtaaaaatcgcggttacatgtatttttgcggcatttctctctacccccgtcttcgctttaaacacagcgaagctgactgaggttgttcagtcagaagaaagcgcgttgcaagccagggtaggcatggctgtgtttgatgcaaacaccggaatgacttggcaatatcggggcgacgaacgctttcctttgaatagtacgcacaaggtattttcctgcgcggcaatgctcgcgaaagtcgacgggaagcacctctcgctggatcagtccgtatcgatcaacaggggaatgctggtcacctattcgccgattacggaaaagtcgctgtcacccaaaaccatcacattaggcaaagtttgtcaggcggcggtgagctatagcgataacacggcggctaatgttgtctttgatgccattgggggatcagccggattcaacgcgtacatgcggtctatcggcgatgagcaaacccggcttgatcgcaaagaacccgagttaaacgaagctacgccaggcgatgtgcgtgacactaccacccccaacgccatcgtcagtagcctgagaaagatacttcttggcgacgtgttgtcagacccatcccgatccgagctgacgcaatggatgctggacgatcaggtcgccggagcactcctgcgtgcctctctgccatccgactggaagatcgccgacaagaccggagcgggtggctacggctcacgctccatcgttgcagtgatctggccaccatcgaagcagccattggtagtcggcatctatatcacgcaaaccaaggcatccatgcaggccagcaatcaggcgatcgcaagaatcggagcggtgctgaaagatgcagttggcccttga

SEQ ID NO: 349284 - DNA, 1218 bp, Pseudomonas aeruginosa; identical to SEQ ID NO: 328711

SEQ ID NO: 349285 - DNA, 624 bp, Pseudomonas aeruginosa
atgagcggcattcccgaaatcaccgcctatcccttgccgaccgcccagcagctgccggccaacctggcgcgctggagcctggagccgcggcgcgcggtgctgctggtgcacgacatgcagcgctacttcctgcgcccgctgcccgagagcctgcgcgccgggctggtggccaacgccgcgcggctgcgccgctggtgcgtcgagcagggcgtgcagatcgcctacaccgcccagccgggcagcatgaccgaggagcagcgcggtctgctcaaggacttctgggggccgggcatgcgcgccagtccggccgaccgcgaggtggtcgaggagctggcgccggggccggacgactggctgctgaccaagtggcgctacagcgccttcttccactccgacctgctccagcggatgcgcgccgccggccgcgaccagttggtgctgtgcggcgtatacgcccacgtcggggtgctgatctccacggtcgacgcctactccaacgacatccagccgttcctggtggccgacgccatcgccgacttcagcgaggcgcaccaccgcatggccctggagtacgccgccagccgctgcgcgatggtggtcaccaccgatgaggtgctggaatga

SEQ ID NO: 349286 - DNA, 840 bp, Pseudomonas aeruginosa; identical to SEQ ID NO: 6027

SEQ ID NO: 349287 - DNA, 204 bp, Pseudomonas aeruginosa; identical to SEQ ID NO: 329441

SEQ ID NO: 349288 - DNA, 759 bp, Pseudomonas aeruginosa
gtgaagacgtcggtcaaggtccgccactacgtgcctgacgcagtcgtctccagctatgcgaataccgggagcaacccctggaccgaggtgtcggcgctgggcacaccgaatcccctcgcccaggccggcaatgacgcgaccaccaactacaaggccgagaacagcatcggccgcttcaaggaagcggatgtgatcggccatcctggcggggccacgttcagccggttcgccagcgcctctgggtacgtttgccctggcgccaccttcccgctggtgccgtacttcctcagcacactggacgccattggctggcggcatggcattcccgagcaggtgtaccccgaagcgttggtcccagggctgcgcgaggtgggtggaatcttctccggcgacatgtgggggaacctctatccgcgcagcggattcctgcaccagaccgacgactacaagacggcggccgtcatcgcccagcgcgccggcgacatcaccacgcgaatcggccagctccacgtctacctccccatgcgcgcagcacccaaggacggctactggccggcgggcgagctgaaagagggcgatgcctcgaccgggaaatggcaggagctgaccccgtccctgagcctcaactgcgcggtgtttcccaactcagggccgaagacgcaagccgtcgacggcgattacgcctgggcgctctggcgtccctactcctgctgccagcgcaaggggcagatcttcctcggcagtaccgacttccaataa

SEQ ID NO: 349289 - DNA, 627 bp, Pseudomonas aeruginosa
gtgaaaaagtccctcccggcggaccttcctcaccgcactttcattcaccgcaccgttatcggcgtcatcgaaaatgccctgcagcgtgtgcgcaataatccggcacccaagttctactgggtaggcggtatcgacagttactcgctgcgcgacctggaggacctgtacgcattcagccgaggcctgcaccaaaacgtccaaaacaagaagctgctccgtgactaccgcgactacacccagtacgtggagatcgccgagatcagccaggacggtgaaatgctgcgctcgatcaagatcatctcgacctaccctgatctaccggcgcggatcctcgagcttcgctcactgacccttgacaatgagctggacgcgacgatcaccctgaccaccgcacataaggccaaagggctggaatgggatttcgtttgcctgtacgacgacttcaacgcggatccgctggcacccgacaccgacccgggcaagcgcgacgatgagctgaacctgatctacgtcgcagtgacccgcgcgatgaagatcctcgccatcaatagcctggtgctatcgatcatgcagcggtacgtggacgacagaaagctgaaggagcagatagctagctgtgaaaaatga

SEQ ID NO: 349290 - DNA, 381 bp, Pseudomonas aeruginosa
ttgaacctcgccgggaaatcctactactacgcaacccgcaccaccgcctgcacagcgctactcgcggcaatcaacctctacggggccaagagcgtcgattccggcctcggccaggtcaatatcggctggaacggacatcgtttctccagcccctgcgagtccctagatccgtacaagaacctggacgccacctccgacatcctgatcgagcagcgggacgccctgtatgcatccgccccgggaagaccggtggactggatccaggttgccggccgctaccaccgccccgccggcggcgcgcctgccgccaaataccgtaggacggtatcccgccaccttagccaagtcctcggcgtcaacctactggtgaccaatccatga

SEQ ID NO: 349291 - DNA, 351 bp, Pseudomonas aeruginosa
atgcttcgctcgatcaagatcatatcgacctaccctgatctgcctgcgcggatccttgagcttcgctcactgacccttgacgatgagctggacgcaacaatcaccctgaccaccgcacacaaggccaaggggctggaatgggatttcgtttgcctgtacgacgacttcaacgcggacccgctggcccccgacaccgacccaggcaagcgcgacgatgagttgaacctgatctacgtcgcagtgacccgcgcgatgaagatcctcgccatcaacagtctggtgctgtcgatcatgcagcggtacgtggacgacagaaaactgaaggagcagatagctagctgtaaaaaatga

SEQ ID NO: 349292 - DNA, 270 bp, Pseudomonas aeruginosa; identical to SEQ ID NO: 324403

SEQ ID NO: 349293 - DNA, 864 bp, Pseudomonas aeruginosa
gtgttcctggtcgcgaccggcctggcgctgggcctgccaattcccgagactcaatggtcgcccgtgggattctcgttgtcgaagttcatggtggcggtcagcattgcggtcacctggcagctgtcctatgcgccctatgtcgccgactattcccgctatctaccgagcgacacgccgatgtctcgggtgttctggttcagctatggtggaacagtggtcggcggggcctggatgatgatcctcggcgcaatgctgtgcgtggccgtcgacggcttctccgacaacgtcggcagccatctcgcaatgctgttcggcgccgccgccgtgccgctgttcatcttcatcgtctacggccaggtagcgatcaacgtgttcaacctgtacggcgcattcatgtcgacggtcacggtgatcgagcccttcgcccgcctgcgagtaacaccacgtatgcggggcctgttcatgctggtgatcagcgtcatcgccactgcgctctgcaccgtcagccaggaagacttcatcagttacttcctgaatttcatcttcttcatgagttacttcctgatcccgtggaccgccatcaatctggtggactactactgcctcaggaaaggagactactgcgtggaggatatcttcgacttggacggtcgctacggccgggtcaacatggtggcctgcggcagcttcctgttagcgatcctgctggagataccgtttatgaacaccacgctatacgtgggccccatcgccaatgcgctgaacggcgtcgacctggcctgggtggtgggcctgctagtaccagccctgacctactactgggcgatgcggcgtagcctggagcgcagcctccagccctcataa

SEQ ID NO: 349294 - DNA, 126 bp, Pseudomonas aeruginosa
atggcgccaattagcgagcccagaatgatggccagggcgctccagaacaggttgaggccgatcaccaccggcagcacgcccgaggcgatggtggtgatgttcatattggcgccgaaccagatgtag

SEQ ID NO: 349295 - DNA, 687 bp, Pseudomonas aeruginosa
atgaacacagacagagccttactcgtcatcgacatgcagcaggaagacggttttcccctgcatggcttcgaccgggttatccacaacaacatccgcctgctggatgcagcccggcagacgggcatccccattatctacacccggcacgtcaacgcgacggacggcagcgatctgcctccgggcgagccggtcgacgccgccggtcgcccgcggagttatcgtgccggcacccaccaggtggaaatcgtcgactgcctggcgcccagagccggcgagcgagtgatcgacaagccacgttacagtgcattccaccgcaccgacctcgctcagcagctagcgggaatgggaacctgccggctggtcatcagcggcgtgctcaccgacgcctgcgtactggccacagtgctggacgccttcgccctgggctacgccgtcgacctgatcgccgatgcctgcaccagcacgactgaatccgcccacaacgcggcgctgttgatcatggccaactggatttacgccatcgaactcttcgccaccgagcaattcctgcaagtccttgagggaagagcctgccagtcctgccgcccaagcgagcccgatcagttcgcacaccatcccgagcagttcgtcgccaccattgcccgccttcaatccgccctgggtcaacccgggcgtaaacaggagtga

SEQ ID NO: 349296 - DNA, 159 bp, Pseudomonas aeruginosa
atgcacacgactggcctcaccctctgcaccgtcaagccactgcccggggccgccatggcctatctgcgcggcacgtgtacacccgcccatgtattcctcaagcgcctgcgttcctcagttaccgccaagcagaatggcttctggcagatagtccgctaa

SEQ ID NO: 349297 - DNA, 1044 bp, Pseudomonas aeruginosa
atgaaattttctttgttcgtgcatatggagcgctacgacgagcagaccagtcatcgccaactgttcgaggacctcaccgagttgaccctgctggcggaagccggcggtttcagcaccgtatggatcggcgaacaccatgcgatggagtacaccatctcgccgagcccgatgccgctgctggcctacctggccgcgcgcaccagcaccatccgcctcggcgccggcaccatcatcgcgcccttctggcaccccatccgcgtcgccggcgaatgtgccctgctcgacgtgatcagcaacgggcgcatggaggtgggcctggcccgcggcgcctaccagtacgagttcgaccgcatggccaacggcatgccggccaccgacggcggcaagtacctgcgcgagatggtgccggtggtccaggcgctatggcggggcgacgtcgcccacgacggcgagatctggaagttccccacctccacctcctcgccgcggccgctccagcagcccggtccgcccatgtggatcgccgcacgcgacccggactcgcacaacttcgccgtggccaatggctgcaacgtgatggtcaccccgctgatgaagggcgacgaggaagtggtcgatctgaagaacaagttcgaggccgccctggccaacaatcccgaggtgccgcgtccgcaactgatggtgctgcgccacacccacgtccacgccaaggacgacccggacggctggaaggtcggcgccgcggccatctccaagttctaccgcaccttcgacgcctggttcggcaacaagcagaccccggtcaacggcctgctgccgccgagcccggaagagaagttcaaggagcgcccggagttcgagctggacaacatccgcaagaacaccatgatcggcaccccggaagaaattatcgcgcgcatccgccactaccaggagctgggcgtggacgaattcagcttctgggccgacaacagcctgccgcacgccgagaagaagaaatccctggagctcttcatcaagcacgtggtgcccgctttccgctaa

SEQ ID NO: 349298 - DNA, 1911 bp, Pseudomonas aeruginosa
atgaacatcaaacacaagctgatcctggcattcgcggcgatcgccagcctaccggtggtcctggtcgcggttctggtcatcctcaatgtgcgcggcgaggcgcggcagggttttctcgacagcagcagccgcgagatgcgccaggtggacaacgccatgcagctgttcttcgagggaatcggccagaacgtcgactacctggcggggcaccccttgttgaacagcctagaccgcgacgtcaaacgctacctcacggccgacgccgcccagttcggcgagggtgagcacgacgctcgggtgttcgagcttttcgccgccctggcggccagtcatccggcctacgcctatctgtcgttgggcaccaacgagggtggttatgtgttctggcccggcgatgccagcctggccaactacgacccgcgcacccgcccctggtatcagcgggcgatggccaaccccggtaagaccctgcgcaccgaggcctactactgggcggcggacgatgtggtgctggtcagcaccgtgcgcagtttcgccaaccgcctcgggaaggagggtggggtggtgaacatcgacgtgtcgctgcagcagctcaccgacatcgtgcggcagatcaagctgggtgacagcggctacctgatgctgatggagaaaaacggtacggtgctggtggaccctagccagccgcagcataacttcaaggccctggccgagctaggcgagggctatgcgcgcctggccgcgactcagcaggggctggtcgaggtggagctggacggcgagcattacatggccaatgtctacagctcagaacagctgggttggcagttcgtcgggctgatccgcgagagcgaggtgatggccgccgcaacccgcctgacctggatcatcgtgctgatcgcggccctggtcgcgctggcgttcgccgtcactggcgcgctgtttgccgggttgatcgtgcggccgatccgcgccgtggccagcgggctggcagacatcgcccagggcgagggcgacctgaccaccagcctggcggtgcgcgggcgcgacgaaacggcgcaactggccggctggttcaaccagttcctcggcgccattcgccaactgattcagcgcatcggccaggccgcggcgcagatctatcgcatgtcgagcagctccaccgcggtttcgctggagatggccaacgccgcttctcgccagcgcgaggcggtggacatggtgtccaccgccttccatgaaatggtcatgaccgccaacgaggtggcgcgctcctgcagccaggccgcggactcggccgacaacggccagcgccaggcgcacgacggccaacggcagatcgaccaggcggtggccagtgtcgatcgcctgagccgtgagatcgagcattcggtcgcggcgatgcagcaactggagcaggacagcagcgatatccagtcgattctcggcaccatccgctccatcgccgagcagaccaatctgctggcgctgaatgccgccatcgaggccgctcgcgccggcgagcagggccggggttttgccgtggtggctgatgaggtgcgcgctggccaagcgtaccgccgactccaccggggaaatcgacagcctgctcggcaacctggcgcggcgcaccaacgagatgggcaagcagatgcatgccagcctggacgtgtcgcagcagacggtcggctcgatcaacgatgcgcgcagcagcttcgagctgatccgcgagtcggtggacgtgatccgcgacatgaacacgcagatcgccaccgccgccgaggagcagcaccaggtggcagaggagatcaaccagcacatcagccagattcaccacaatgcgcagcgtgtggcggagctcgccggcagctccagcgaggatgcgcagaccctggccgggctctccgatga

SEQ ID NO: 349299 - DNA, 786 bp, Pseudomonas aeruginosa
atgaccgccatcgaaaccccggatcgggaaaccgattaccgcgtgccggcgttgcaacgcggcctgagcatcctcgctatgttcaatgcccgcgaacgcagcctgggcatgaacgacatggccgaacgtctcggggtcagcccttcggccgtctaccgcatcgtgcagacactggtcgacatgggctacctgcgcaaggtcggccgccatgccttcgaactgggcccccaggtagtcagcgaaggctttgcctacctggccagccgcgacatcgtcgaagtggccatgccccatctaaacgacctacgcgaccgcacctcgctgtcatgtcacctgagcatccgcgagcagaccgatagcctctacctgtaccgcgccatggccccgcagcgcctggcggtgaacattcccgtcggtactcgcctgccctgccacagtacggccctgggccgcgtgctgctgagtggcttgagcgaggtacagctgagcgcgctctaccagcacgtgcgcctggacgactatccgccgccagccccgcgcaccctgccggagctacagcaggtgatcgccgaggaccgccagcgtggctgggtgctgcaccgctccgactactccaccgccatcgccaccggcatccgcgatcacagcggcgccatcgtcgccgctatcaacctgtccggcccggacgcggtgatggatacccaagttgcccaggaaggctttctcgccgccttgctcgcggcaagccacgatgtgtcgcaggcactgggacacatcgccgcgtga

SEQ ID NO: 349300 - DNA, 579 bp, Pseudomonas aeruginosa
atgaccagcctcaataccctcgagcgctgcgcgctcatcgacctcaccgacctgccgcgggtgggctttcgcggcgtggacagcgccacctggctcagagagcgcggctaccaactgccagaagtgcccaaccgggcactgctccaggccgacggatcgctggtggcacgcctgtcgcagaccgagtacctgctgctcggcagcctggccgatcgaggcgagcggattgccagcgaggaagctgggtggcagttgaccgatcagggcaactacctgctgccgcgccaggacagccacgcctggctgcaactgtccggtcggcacgtggccgaggtgatggccaagctctgcggagtcgacctgcgtccacaggccttccccaccggccaggtggcccagacttcagcagcccggatcaacgtcatagtgatcaatgccggctcgggcgatctgccgcgcctgcatatcctctgcgaccgagcgtcgctcgagtacttccgcgacgccatgctcgatgccatgaacgagttcggcggccagccggtggcgctggacgtgctggaaaagcagctggcctga

SEQ ID NO: 349301 - DNA, 2898 bp, Pseudomonas aeruginosa
atgaatcgcctcccagcccccatgggcctgctgatcgaccgcgatcagccactgcgtttcagcttcgacggcaccgattaccagggtcttgctggcgacagcatcgccagcgcgctgctcgccaacggccgctggttgctctcgcgctcgttcaagtaccaccgcccgcgcggcccgttgagcatggccgggcaggacgccaacaccctggtgcagttgcctgacgagcccaatgtgctggccgacacccaggcgctccaagccgggctcgccgtcaccgggcagaacttcaacggctcgctggacaacgaccgcgacgcctacctgggcaagttctccaaattcatgccggtgggtttctactaccgctcgttctacaagcccaagggcatatggaaggtgtgggagccgctgatccgcaagaaggccggcctcggcgtgctcgatctgaacttcaagccgcagtactacgacaaggcctacctgttcgtcgacgtcgccatcgtcggcgccggcccggccgggctgtccgccgcgctgaccgccgccaatgccggggccaaagtgctgctgatagaacagcagccgctgctcggcggctcgctgacctacgcccgtttcgatatcgagggccgccgcgccgaggcgctgcgccgtgatctggtgagcgccgtgcaaggccacaccaatatccaggtactgacgcaggccacctgcaacgcctggttcaccgacaactacctgccggtgatccagagccgacggatgtacaaggtgcgtgcgcggcagtgcatcgtcagcgccggctccttcgaccagccggtggtgtttcgcaacaacgacctgcccggggtcatgctcaccagcgccgcccagcgcctgatgaagctctacgcggtcaagcccggccagcgcgccgtgctgctcaccggcaacgacgacggctacctggccgccctcgacctggccgaacagggcgtgcaggtcgctgccctggtggacatgcgcttgcagccggccgatgtcgcgctgaaggtcgccgtggaaaagcagggcatcccctgccacctgggcagcaccgtgtacgaggccctgcacgagaagggtatgcgccatgtcagcggcgcggatatccgccgcatcaccgcccagggccaggttgccgcccagggagttcacgtcgactgcgacctgctgtgcatgtccgccggctacatgccggtctaccagctgctgtgccaagcaggcggcaagctggcctacgacgagcagcgcgccgagttcgccatcagtggcctgccggaagggttggcgatcgccggttcggtcggcggtcgccaccatctggacaacgtactcgccgacggcgcccgcgccgccgcacgggcagtcgaagcactgggcctggatgccggcattggcgaagcgagcctgcgcggcgaggcgcgggtcaacttcgagtggccgatattcccccatcccaagggcaaggatttcgtcgacttcgacgaagacctgcaggttcgcgacatcgtcaacgccacccgcatcggctaccgcgacgtgcaactggtcaagcgcttttccaccgtcggcatgggcccgtcccagggccgccactcggcgctgcccaccgcgcgcctggtagcccaggccaccggccgcagtatcggcgaaaccggcgtgaccaccgcgcggccgccgttcgaagcagaaaaactggcccacgtcgccggccgcgccttcgacccctatcgtcacaccgccatgcacagccgccatgtcgccgccggcgccaagctgatgcccgccggtatctggcagcgtccagcgttctacggcaaggccgaagatcgcgaacgctgcatgcaggaagaagcccgccacgtgcgcgagaaggtcggcctgatcgacgtgtccaccctcggcggcctcgacgtgcgcggcccggatgccgccgagttgctcgagcgcatctacaccctgccattcaaaaagcagccgctgctgcgcactcgctatgcgttgatgaccaacgagcacggcgtggtgatcgacgacggcgtctgcgcgcggctggcggacaatcacttctacgtcaccgccaccaccagcggcgtcgaccgcatctaccagcagatgctcaagtggaacgcgcagtggcggctgaacgtggacatcaccaacgtcacagccgccctggcggcggtcaacctggccgggccactgtcgcgccaggtgctgcagaagctctgcgcggacgtcgacctgtccgccgagggcttcccctatctggccgcacgcaccggcagcgtcgccggcataccggcgcggctgatgcgggtcggtttcgtcggtgagctgggctatgaaatccacgtaccggcacgtcatggggcacggctgtgggacgcattaatggaggccggcgcagagttcggtatccgccccttcggcgtcgagacccaacgcctgctgcgcctggagaaaggccacgtgatcatcagccaggacacagatggtatgacccatcccggcgagatcgacatgcagtgggccatcggccgcaagaaaccgttcttcgtcggcaagcgctcgatcgaaatcctcgaagcgcagccgctcaagcgcaagctggtcggtttcaccctgcccaagggcagtgcgcagccgctggagggtcacctggtgctcaatgggcccgacatcagcggcaacgtcacctcttgcgagtattcggcgaccctcggccagatcatcggcctggcctacgccggcgccgaccaggccgagccaggcatgcggattccgatccgagtcgatggcggccaggtggtgcaggccacggtggtgcaactgcccttcttcgatcccgacaaccagcgccaggagctctga

SEQ ID NO: 349302 - DNA, 303 bp, Pseudomonas aeruginosa
atgaaaatcatgaactgcccgctcaacgggccgagaaacatcagcgaattcacctacggcggcgaactcaaggccatgccggatccggccacctgcagcgactccgagtgggccgactacgtgttcaacagcgacaacgccgctggcgtggtgcgcgagtggtggctgcacaacgcgtccagctactggttcctcgccgagcgccatacggtcagcgacaagatcattcgcaccttcgatccgaaggaaatcttcacccagcgggtcgagttcgccgcgcacaccgaggagatcgtacgatga

SEQ ID NO: 349303 - DNA, 924 bp, Pseudomonas aeruginosa
gtgaacacacaagcccccatcaagctgatcgacggcaaggccgccgccgcccgcgtgctggccgaagtggccgaggatgtgcgcgccctgaaagcggccggcatcgtcccggccctggccgtggtactggtcggcgatgacccggccagccaggtctacgtgcgcaacaaggtgctgcgcgccgaggaatgcggcatccgctcgctggaattcaagttgccggccgataccgccgaagccaggctgcaggcactgatcgccgagctcaatgccgacgcttcggtgcacggcatcctggtgcagttaccactgccggcacacatcgacgagcagcgcgtgctgcaggccgtcaccccgttgaaggacgtcgacggtttccatgccgagaacgtcggtgggctcagccagggccgcgaggtgctcaccccctgcaccccagccgggtgcctgcgcctgttgcaggacagctgcggtgatctgaccggcaagcatgcggtggtgatcggccgctccaatatcgtcggcaagcccatggccgccctgttgctcaaggcccactgctcggtgaccgtggtgcactcgaagagcgccaacctgaagaccctgtgccgtcaggccgacatcgtcgtcgccgccgtcggccgaccgcgcctggtcgatgccgactggctcaagcccggggccgtggtgatcgacgtgggcatcaatcgcatcgatgaaaacggccgctcgcgactggtgggcgacgtcgacttcgactctgccctgccgcaggtttcggctatcaccccggtgcccggcggcgtcggcccgatgaccatcgcctacctgatgaaaaacaccctggtcgcggcgcgcctgcaacagacggccccgtccaacctgacccagcgcgcggaggcagcatgcccttcaatctcctga

SEQ ID NO: 349304 - DNA, 867 bp, Pseudomonas aeruginosa
atgcaacacgccaccgaccatttcatcatcaagatcagttgcccggcagcctcgggcatcgttgcggcggtcaccacctatctggcggacaggggttgctacatcagcgagatgtcgcagttcgacgacgagaccagcggccgtttcttcatgcgcgcggtgtttcgcttcaacgaccgctacgaaggcgatatcgacgaagtcgagcaaggcttcgtggccgtggcccagcgtttcgagatggaatgggcgctgcacagcaccgctcagcccatgcgcgtgctgctgatggtgagcaagtacgatcactgcctggtggacctgctctatcgccaccacaagggcgagttggacatgcagatcaccgccatcgtctccaaccacctcgagctgcggcccatggccgagcgcgagggcatccgcttcatctacctgccggtgaccaaggacagcaaggcccagcaggaagcggcgctgatgaagatcgtcgacgagacccagaccgagttggtggtgctggcccgctacatgcagatcctttccgacgatctgtgcaagcagctctcgggccgcgccatcaacatccaccattccttcctgcccggcttcaagggcgccaagccctaccaccaggcctacgagcgcggcgtgaagctgatcggcgccaccgcacactacgtcacctcggacctcgacgaaggcccgatcatcgagcaggaagtgcagcgcgtggaccatgcctacctgcccgacgatctggtcgccatcggccgtgataccgaaaccgtggccctgtccaaggcggtgaaataccacctggagcatcgggtcttcctcaatggcgagcgcacggtgatcttccggtga

SEQ ID NO: 349305 - DNA, 594 bp, Pseudomonas aeruginosa
atgaccaccgagatccctccccgcctccgcctggagcagtacctgggcatgcagatcaagcgtcagcgccaggcgcaggaactgaaactggcggacgtggcccgtatcgccggaatcagccagggcatgttgagcaagatcgagaacgcccaggtctccaccagcctggataccttgagccgtctctgcgacgtgctcggcatgcccatgtccaaactgttcagccagtacgaccaacccgacggcagcgccatcctggtcaaggccggcgagggcatggaggtggttcgccgcggcaccgagaagggccacacctaccacctgctcaaccacactcgtggaccgaagaagaacttcgaggcctacatggtgagcatggacgacgccagcgaggagttccccaccttcgctcaccccggcaccgagttcctccacctgctggagggcgagctggtctatcgccacggtaaccagctctaccacctgcaggccggcgacagcctgaccttcgacggcgacatcccgcacggcccggagcaactgctgcaggtgccgatccgcctgctgtcggtgatgaactacggcaacgagtaa

SEQ ID NO: 349306 - DNA, 900 bp, Pseudomonas aeruginosa
atgtgcggaatcgtaggtctttacctgaagaagcccgagctggaaggccagctcggcaaactgttcgaacccatgctcgaagccatgaccgaccgtggtccggacagcgccggcttcgccatctacggcgatgaagtggccgacggctgggtcaagctgaccctgcaggccatcgaggccgactacggctggaagcacctgatgggatcgctggaaggccgcctgggttgctccctggactggttccagaacgccagcgccgcggtgctaaaggtcaactgcgatgaagagcgcgtacgtgccgccctcgctgacctcgcccccgacgtgcgcatcatgagcgccggccagagcatcgagatcctcaagggcatgggcctgccgaaggaaatctctgagcgcttcggcctcgcgaacatgaaaggcagccacatcatcggccacacccgtatggccaccgaaagcgcggtgaccatggaaggcagccacccgttctccaccggcgccgacctctgcctggtacacaacggctcgctctccaaccacttccgcctgcgccaggagctcaagcgccagggcatcgtcttcgagaccgagaacgacaccgaggtggccgctggctacctgacctggcgcctgcagcagggcgacagcctgaaggaggccctggaccactccctggaggatctcgacggtttcttcaccttcgcgattggcacccgcaacggttttgcggtgatccgcgaccccatcgcctgcaagccggcgattctcgccgagaccgacgactacgtggccatggcctcggagtaccaggccctggccagcctgccgggcatcgacaaagccaaagtgtgggagccggagccggcgaccatgtacatctgggaacgcgcctga

SEQ ID NO: 349307 - DNA, 675 bp, Pseudomonas aeruginosa
atgaaaaccatcgacctttccaccgcctcggtgcgtgaactgaaccaatccctgcatggcgaagtgcaggaccgcgaatggctggtgacccatccggacggcaaacacaacctcgccgttggcgtgaaccaggccgtgagcatcgatatccagggccacgccggttactactgcgccggcatgaaccagaaggcctgcatcaccgtgcacggcaacgtcggtgtcggtgtggcggagaacatgatgagcggttcggtgcgggtcaagggcagtgcgtcccaggccgcgggcgctaccgcccatggcggactgctggtgatcgaaggcgacgccggcgcgcgttgcggcatttccatgaagggtgtcgacatcgtggttggcggcagcatcggccatatgagctgcttcatggcccaggcgggcagactcgtggtgtgcggcgatgccggtgacgccctcggcgactcgctgtacgagacccgcatctacgtcaagggcacggtcaaatcgctgggttcggactgcatcgagaaggagatgcgcgccgaacacttcgaagagctggccgagctgctcggccgcgccggcttcgccgaggatccggccagcttcaaacgctacggctcggcgcgccagctgtacaacttcaaggtcgacaacgcatcggcttactga

SEQ ID NO: 349308 - DNA, 351 bp, Pseudomonas aeruginosa
atgagcttgttcagtgccaatgccgccggctggggcttcctgcttctggccggcctcagcgagatctgctatgccgctgcgattccccgtactcaggggtttacccgtctgtggccaagcctgtattgcggcttcttcatcgcccttagtctgtatctgctggctcaggcggtgcgcactctgccggtgggcaccgcctacgccgtgtgggtcggcatcggtgcactgggcaccgccgtctacggcatcatctatctcgacgaaccggctgacgctgcgcggctggcttgtctggggctcatccttgccggtgtggtgggactcaagctggtttccggcacgatagcctga

SEQ ID NO: 349309 - DNA, 180 bp, Pseudomonas aeruginosa
atgagcatcactaccttcgacggcgccagcgccgtcttcaccttcgccgacaagccggcgatcctggtcttcatcagcctgctggtggctggcgtcagcctctacgcgctgatcgccaccatgattcatgagaagcacagctacgccctaccggacgacaagctgcccaaactcaagtaa

SEQ ID NO: 349310 - DNA, 1374 bp, Pseudomonas aeruginosa
atggaagagcagaaaacccccactctggaggagctgcaggctctgatagagatgaccaacaccctgagtatggaaatattctactggtggtgtatcgccctgatggtctgcattcatgccggcttcctgtcctacgaaatcggcgcatcgcgcctgaagaacgccctggcggccggggtgaagaatatcctcgcgttcggcttcatcatccccagcgtgttcctgctcggctgggcggtatacaacgccttcccggacggcatcgtgccacgcatggatgccttcctcgccggcatgccctggagcgaatccatggggccgaacatccaggacaacgccaccggcatcttctgggcggccttcgccatgttcgccgccaccaccggctcgattctctccggcgcgctgatcgagcgggcgcggatgagcgccttcatcatcctcaccatcgtcctcggcggcttcctctggctggtcgctgccgcctggggctggcacccggaaggctggctgaccgtcaagtggggctaccatgacgtcggtgccgccggcgtggtgcacatgatcgccggcttcttcgccctggccgtggtgatcaacctcggcgcacggatcggccgcttcaacccggacggcagcgccaacgccatcgtcggccacagcatgccgatgagcgtggtcggcctgatgctgatcatcgtcggcttcttcggcttcctcggcggctgcatcatctacaacgcaggcgcccagtggatcaacatctacggtcagccgaccaccctctcggccttcgccttcaacaccctgatgggcttcgccggcggtctgatcggcgcttacctgaccacccgcgagccgttctggatgatgtccggcggcctggtcgggatcatctccgtggcaccgggcctggacctctaccaccccggcctggcctacctgatcggcatgggcgtcgctgccaccgcgccgctggtcaacaacctgttgctcaagttccgcctcgacgacgcggtcggagccttcgccgtacacggcttcggcggctttgccggcctggtgatcagcggcatcttcctggccggctacccgaacgtgaacggcatggcgccgatcagcttcctcggccaactcggcggcgccgtggtactggcagcgctgggcttcatccccggctacgtgctgtcctacgccctcaagcagttcggcatgctgcgcgtaccggcccacgccgaggaacgcggtctcgacctgaccgaggtcccggcccaggcctatccggaatggaactcgatgtacggcccgagtaccagcgttggcggcgccgccccggcacctgccagcctgatcggcgaaagcaaaccggcctga

SEQ ID NO: 349311 - DNA, 987 bp, Pseudomonas aeruginosa
atgtggttcaacaacgcgactcgcaacctggccagcgaacttaaccaatggctcgacagcctgctcgcccagcgaccgcaggacaccagccgcccgcacttgcagcgccagccgcagctgctcggcagcctgcagcgcctgcaacacgactggacggagctgcagcgcattcgccagcacgccgagcaactaccgccggcgccctgcagtaccgagcaatacgccgccctgcaacagcgcctggcgcaggccgaacagcaatgcgccctgctcgaggacgagctgcaggccagccgccagcagttcgaaaccctcaccgccgagcgtgcgcactggaacgaggaacgtcaggtctgggacctgaccaaacgcaccctgaccgaaggctgctgggcgatgaacgtggtgaacggcgaccccgaccacccgcagaacctgatccgctggtctgcgcagttccgcgaactgatcggctacagccaggcggaatttcccgatggctgggacagctacttcaaggtggtcaacccggacgacctcaaacaggtcatgcaggccttcagcgcctcgatgctggacaagagcgacgatggtttctacgccgtggagtaccgcatgcgccacaagacccgtggcgagctgtggttccgcgaacgcggccgctgcctgcgcgatgcgcaaggcaagctgctctatgtcaccggtgcggtgcgcgaaatcagcgacgagaaaaccgccgccagcatgcacgaacgcgagcaggccaacatccacagcacctacgggcagatcgcccaggtcgccggggtgatcaagggcattgccgaacagaccaacctgctcgccctcaacgcggccatcgaagcggcccgcgccggcgagcagggccgcggcttcgccgtggtcgccgacgaggtgcgcaatctggccaggcgcacccaggactcggtgcaacagatccaggccatgttgcagcagaagcgctga

SEQ ID NO: 349312 - DNA, 2346 bp, Pseudomonas aeruginosa
atgaacctgcccgtgatttcccggccgctggagccggcgctgttcgcccgtaccccagggctggaacgccaccgcgtcgcccccggcggcttgaccgtggtggccctggagccgggcgaccgcctggagctgatcgacctcgaaggcgaccaggccgccgagctgctggccttcgccgacaatggccgagcggcgcttaccgccctcgggctcgccgcctgcccgggtgccgagttcatcactcacctgctgcacgacggcagccgcgaggcggcccaggtcggcgccgcgctgctgcgccgcggcatcgattgccgccacctgccgcctgccgcgcggctctggccacccggcaccccagccggttaccgccgcaccctcagcgccagcgcagcactgctggtgatagtcgccgcacccggcggacagacgccggtggaccagcagacgcgcgccagcgagctgcgcctgctgatccaacgcgccaacccgtccagcctgctgctgccgacactgccggcgccgctcggcgaactggttgacgagttcaccatccaccccggcacggcgcgcgattacgtggtcgctgccggccagtacatccaggtgatcgacgtcgccgggcggcaatgctcggacttcgtcgccttcgaccggcgcggcctcgacgccggccgcgagatcgacctcgaccccaccgtcacccgcaccctgaacggcaatgcctacccgggccccggcctgttcagcaaattcttcgaccgcgacatgcagccgatgctggaggtggtgcgcgacaccgtcggccgccacgacacctttgccctggcctgcaccgcgcgctactacgaaagccagggttacttcggccacgccaactgcagcgacaacatcagccgcgcactggccaagcatggcgtgcacggccgccccggctggccggcgatcaatttcttcttcaacaccggcatcgacgcccaccagcaactgaccctcgacgagccctggtcgcgccccggcgactatgtactgctgcgcgccatgaccgacctggtctgcgccagcagctcctgcccggacgacatcgacccggccaatggctggcagcccaccgacatccacatccgcgtgtattccgaacaggagcgtttcagtatcgccatggccactcgcaagacacccgacgccgacccggtgctgacccgcgagagcggcttccaccccggcacctctgccctcacccgccacttcatcgactaccgcggctggtggacccccacccagttcgacggctacggcacgctggcggaataccacgcctgccgcgaacgggtcgcggtgatggacctctccgccctgcgcaaattcgaggtgctcggccccgacgccgaagccctgctcaactactgcctgacccgcgacgtgcgcaagctggcggtaggccaggtggtctacagcgccatgtgctacgagcatggcggcatgctcgacgacggcacgctgttgcgccttggcccggacgccttccgctggatcggcggcgaggacttcggtggcgaatggctgcgccagcaggccgagaaactggacatgaaggtgtggatcaaatccgcctccgagcagatccacaacatcgctgtgcaaggcccgctcagccgccaactgctgcagcagatgatctggacgccaggtacccagccgcccctggcagagctgggctggttccgcttcctcaccggccgcttgggcgactacaacggctgtccgctgatggtctcgcgcaccggctacaccggcgagctgggctttgaaatctggtgccaccccagcgatgccatgcagatctggcaacgcctctggcaactcggcgagccactgggcctggcaccgctcggcctgcacgccctggacatgctgcgcatcgaggcagggctgatcttcgccggctacgagttcagcgaccagaccgacccgttcgaggccggcatcggcttctgcgtgccgctgaagagcaagcaggacgattttatcggccgccaggcgctgctgcggcgcaaggaacacccgatgcacaggctggccggcctcgaactggaaggcaacgagccagcgtcccacggcgactgcgtacacctcggccgcgcccaggtcggggtgatcaccagcgccacccgctcgccagcgctgggcaagaacatcgccctatgccgtctcgacgcctcctactgcgagcccggcacccggctggaagtgggcaagctcgacggccagcagaaacgcatcgcggcaacggtgagcgccggcactgtcgcctacgacccggacaagaaccgtgtgcgggcgtag

SEQ ID NO: 349313 - DNA, 1371 bp, Pseudomonas aeruginosa
atgaaacaacgagtcgccatcatcggcgccggcccctgtggcctcgcccagttgcgtgccttccagtcggcccatgccgagggcgccgagatacccgagctggtctgcttcgagaagcaatcggactggggcggcatgtggaactacacctggcgcactggcctggacgaacacggcgagccggttcacggcagcatgtaccgctacctctggtccaacgggccaaaggaatgcctggagttcgccgactacagcttcgacgaacacttcggccgccccatgggctcctacccaccgcgcgaggtgctctgggactacatcaagggccgcgtggagaaggccggcgtgcgccccttcatccgcttcaacaccacggtgcgcggggtaacctgggacgctgccaacggcaccttcgaggtcaccgcccacagctacgagcaggatctgacctacagcgaaaccttcgactacgtggtggtcgccagcggccacttctccaccccaaacgtgccctacttcgagggtttcgaatccttcggcggccgtgtgctgcacgcccacgacttccgcgacgccctggaattcaagggcaaggatgtgctcatcgtcggcggcagctattcggccgaggacatcggctcgcaatgcttcaagtacggagcccgctccatcaccagttgctaccgcagcgcgcccatgggctatcgctggccgtcgaactgggaagagaagccgctgctgcagcgcgtctgcggcaacaccgcctttttcgccgacggcagcagcaagcacgtggacgcggtgatcctctgtaccggttacaagcaccacttccccttcctgccggaagaactgcgcctgaagaccggcaaccgcctgtggccgctgaatctgtacaagggcgtgttctgggagcagaaccccaggctgatctacctcggcatgcaggaccagtggtacagcttcaacatgttcgacgcccaggcctggtacgcccgcgatgtgatcctcggccgcatcgctctgccggatcaggagcgcatgcacgctgagaacctggcctggcgtcaggaagaagaaaccctggaaaccgcccagcagatgttcgagttccagggcgagtacatccgccaactgatcgaagccaccgactacccgagcttcgacatcgccgcggtgaaccagaccttcctcgaatggaagcatgacaagtacgaaaacattatgggttaccgcgacaagtgcttccgctcgctgatcaccggcaccctggccacgccgcaccacacgccctggctgcaggccttggacgattcgctatccgcctacctcgccgacgagccgtcgaccgccatcaaagccgtgggttga

SEQ ID NO: 349314 - DNA, 912 bp, Pseudomonas aeruginosa
atgagcgccgtcctgtctcccaagctcatcgatggcaaggcggcggccgcccgcgtgctggccgaagtgaccgaggatgtgcgcaccctgaaagccgccggcatcaaaccggcgctggccgtggtgctggtcggcgacgacccggccagccaggtctatgtgcgcaacaaggtgctgcgcgccgaggaatgcggcatccgctccctggaacacaagctgccggcagacacggctgaagccgacctgctggcacttatccacagcctgaatgccgactacagcgtgcacggcattctcgtgcagttgccgctgccggcgcatatcgacgaaacccgcgtgctgcaggcgatcaacccactgaaggacgtcgacggcttccacgccgaaaacgtcggtggcctcagccaaggccgcgacgtgctcacgccctgcaccccggcgggctgcctgcgcctgctgcaggacagctgcggcgacctgaccggcaagcatgcggtggtcatcggccgctccaatatcgtcggcaaacccatggccgccctgctgctcaaggcccactgctcggtcagcgtggtgcactcgaaaagcgccaacctgcgcgagctgtgccgccaggccgacatcgtcgtcgccgccgtcggcaaaccgcgtctggtcgacgccgactggctgaaacccggcgccgtggtcatcgacgtcggcatcaaccgcatcgacgaaggcggccgttcgcgcctggtcggcgatgtcgacttcgactccgccctcacccgcgccgccgccatcaccccagtgcccggcggcgtcggccccatgaccatcgccttcctgatgaagaacaccctggtcgcggcgcgcctccagcacccggccaccggcctgcccctatctaccttggagaaccccgcatga

SEQ ID NO: 349315 - DNA, 855 bp, Pseudomonas aeruginosa
atgaatcattacatcctcaagatcagttgcccggccacctccggcatcgtcgcggcggtcaccacctacctggccgggcgcgactgctacctcagcgagctggcgcagttcgacgacgagttcaccgggcgcttcttcatgcgtgcggtgttccgcttcaatgacacgacccgggcggacatcgacgccctgcgccagggtttcgatgacattgccgtgcccttcgccatggactgggaactgttcgaaagccagcggccgatgcgcgtgctgctgatggtgagcaagttcgaccactgcctggtggacctgctttatcgccaccacaagggcgagctggacatgcagatcaccgccatcgtctccaaccacctcgacctgcggccaatggccgagcgcgagggcatccgcttcatctacctgccggtgacccgcgacaccaaggcccaacaggaagcggcgctgatgaagatcgttgacgaaacgcagaccgagctggtggtgctcgcgcgctacatgcagatcctctccgatgacctgtgccagcagctctccggccgcgccatcaacatccatcattccttcctgcccggtttcaagggcgccaagccctatcaccaggcctatgaacgcggcgtcaagctgatcggcgccaccgcgcactacgtgacttcggacctcgacgaaggtccgatcatcgaacaggaagtccagcgcgtggaccacgcctatctgcccgatgacctcgtcgccatcggccgggacaccgagacggtggccctctccaaggcgctgaagtaccacctggaacaccgcgtgctcctcaacggcgacaagacggtgatcttccgatga

SEQ ID NO: 349316 - DNA, 1131 bp, Pseudomonas aeruginosa
atggccaattcatggcgcatcagcgcgctgcgcgaacgtcacctggcactcggctcgcaactcgaagactggaacggcatgggcaccgcctggacctacgccagcgacctggccgaccaccacgaagccatccgcacccgtgccggcctgatggacgtatccgggctgaagaaggtgcactacgtcggcccgcacgccgaaagcctgctggactacgccaccacccgcgacatcggcaagctgtatccgggcaaatcggtgtatgcctgcctgctcgatgaggacggcaagttcatcgacgactgcatcgtctaccgtaccggccccaacgccttcatggtggtgcacggcgccggcaccggccacgagatgctgatccgctcggcgcagggccgccaggtggcggtgctgttcgacgacgacctgcacgacctgtccctgcagggcccacgcgcggtggattttctcgccgagcatgtaccgggcatccgcgacctgccctacttccaccacctgcagaccaagctgttcgaccgcccggtgatgatctcgcgcaccggctacaccggcgaacgcggctacgagatcttctgcaaggccgccgacgccccagcgatctgggacgccatcctggagcagggcaagggctacggcatcatcccctgcgcattcaccgccctggactggctacgggtggagagctacctgctgttcttcccctacgacaactcgcagatgtaccccttcgccgatcagaaggccggcgacaccctgtgggaactgggcctggatttcaccgtatcgcccggcaagcaggacttccgtggcgccggcgagcactaccggctcaagggccaggagcgtttcaagatcttcggtgtgctgctcgacggccaccaggccgcccaaggcggcgacaccctctggcacgacggccgtcaggtcggcgtcatcacctgctccatgtactcgcgcctgaccgaacgctccatggccatcgcccgtgtcgagccgcagatcgccgagcagggcgtgcccctgcaggtgcgcggcagcctcgactgcgccgccatcgcccacagtctgccgttcgacgaccccgagaagaagaagcgcaccgccaagggctga

SEQ ID NO: 349317 - DNA, 1017 bp, Pseudomonas aeruginosa
atgaccctgaccttcaaaccgctggagagctaccgggaagacttcagcttccgcaacagccccgccgccatcgcccgttttcctttccccttcccggaagaccagtacatgtactcggtcaacctggagccggcggtgtcgcgcgatcccggctcggtgttcgaacatcaattcgacgtggacgagcactacgtgtccgagatggccgagcgcgcccgcgtgctggaactcgaccccggccgttgcctggtgatgccgcatatggcccaggccgcctgggacaccctggccatgctgatggagcacctggcccgcgattacccacagcactttcgcctgacgcggcaaggcgatgcctggcactggcagaacctggctctgggcatcgaccagcgcttcactttcggcgacccggccagcctgccctgcgagccgctggagtacatcacccggcagatgcagggcgacttcgcggtgctcgaccagcgcgacggcgacctgttcatggacgcaggcatggtcacctgcccggccgactggtcgctgcgcttcgacgccggcatgagcttcaagcagtggcattcgccggtgccgatggcgcaccagatgggcgtgttcgaccgcgcgctgaagtatttgctgaacatccaggtcggtgcgccggtacgccggctgaactggaccctgaccatcaacccgcgcctggacacctcgcccgagacctaccacgaatggggcaacgatcgcggcaaggtcacgccggacaacgtcggccgcctggtgcacctgcgcgtcgagttgcaactgatggcccgcctgccgcgctccaacgcgctgctgttcggcatccgcacctacctcatcagcctcgatgaactggtcagcaatccggcctgggcccaacgcctgcaccgggtgatgcgcgacctgcccgatcccatcgccgactacaagggcatcacccgttaccgccagacgctggtggactggctacgccggttcgatcccgaagcctga

SEQ ID NO: 349318 - DNA, 930 bp, Pseudomonas aeruginosa
atgagcaccctgctcgacgtccgcgtcgccgctatccgtgagctcaccccggtgatccgcgaatacagcttcgaagcactggccagcacactgccggggttctcggcgggcagccacgtgcaactgcacctgcccaacggccggcgcaatgcctactcgctgctgagcgaccctgccgacacccgccagtaccgcatcgccgtgcgccagcaggacgcctcgcggggcggttcgcgctacctgcaccagcacctgaaggtcggcgaccgcctgcgcctgtcgccaccggccaacctcttcccgctgcacggtgaagcacaaaagcacatcctggtggccgccggcatcggcatcacacccttcctcgcttacagccaggagctcctgcgccggggcgccgacttcgaactgcactacgcctaccgcgccggcagcagcgacgcctatgtcgatgaactgcgccagcaactcggtccacgtctgcacgaatacctcagcggccagcgccgcctcgacctcgccagcctgctgcagggccgcacgctgggtacccacgtctacgcctgtggcccgcaatcgctccttctggaccttcaggaacaggcctccgcccagggctggagcccgcgccgcgtgcactgggaagcctttgccgcggcggagcccggccagccgttccgcgtcgagctggcgcgcagtggccaacaactggaagtggcggcggacgaaagcctactggaagccctggaggctgccggtgtggaggtgcccaacctctgccggggcggagtctgcggccagtgccagacgccctggctgaaaggcgacgtggaacaccgcgaccactttcttagcgccaacgagcgcaccagcagcctgatgccctgcgtctcgcgtggctgcggcagcccgatcctgctcgacctctga

SEQ ID NO: 349319 - DNA, 528 bp, Pseudomonas aeruginosa
atgagcagcgccgcaaccaaccaccccttcagcgtgccgcgctatcccagcggccagacgtgcccagcagcgtccgagcacctattggtaacccagggtgccgggcaggaagagcgcgacgctctcgccgcgcagctgggaaaggtccggataacccatctggccctgccggactttcccagcgtcgccgacctgcagctggttctcagcacgacgctgaaggacgctcgcgtcggcctgcgcctggatttgcgcggcgacgaggccttcgtctggccgctgcacgccctggcgcgggccgctggcctgctggccgacgaaatcttcatgagcagcagcccggaaggcacccgcctggtgttctgcgtgcactgcgccacctgccagccggccaccagcgctgggcacctgacctgcacccagtgcggcgtgatgctggaggtgcgccgccacttctcgcagcgcctgggggcctaccttggggtctgcgccgatgccgaccagccgtatcagggggtacagccatga

SEQ ID NO: 349320 - DNA, 666 bp, Pseudomonas aeruginosa
atgcaccacgccagcctggtattgaccgccgcgccgccggtgccggcctgggaagagttgactgagcgcgaagggcagaccctggcgctgatcggcgcgggcctgagcaacaagcagatcgcccgtgagctgggcatcagcgacggcacggtgaagatctacgtgcgcagcctgctgcgcaaattccgcctcagctccaggctggagctggccacccggctgcaccgccgcggcgcttcctggcgcatgagcgacgaagcggctttgccccccgagggtgcagacgagggcgtgactgcaccgattgcgcccgccgcaggcctgctcgacgaactgccggggctgatctaccgcggtgacaacgaccgcacctggtttatggaatacgtcagcgccggctgcctgcccctgaccggctaccccgccgagtacctcacgcgcagccctcagcacagcttcggttcgctgatcctcgacgagtacgccgactacatctggtattgcgtgcagtgcgcgctgctcaagcgcgagccctatcagctcagctaccgcatccgttgcgccgacgggcggatcaagaacgtctgggagacgggagtgggtatctattccagtaccggcgaggtgttggggatcgagggggcgatcttcgagcgccacgactga

SEQ ID NO: 349321 - DNA, 486 bp, Pseudomonas aeruginosa
atgatcgatgcaaatacctacaaactcgtcatgggctcctttccgtccggcgtcaccgtgatcaccacgctggacgacgatggccagatcgtcggcctgacggccagcgccttcagctccctgtccatcgacccggccctggtgctgttctgcccgaactacagctccgactcctacccggtgctgatcaagaacaagcgcttcgccatccacctgctgtcggcagcgcagcagggcgaagcctatgccttcgccaagaagggcaaggacaaggcccacggtatcgaatggacgctgagcgagctgggcaacccactgctaggcaacgccaccgccatcatcgagtgcgagttgtggcgcgaatacgaaggtggcgatcacgcgatcctggtgggtgcggtgcagaacctgatcgtgccgcagcagcgcgtcgaaccgatgatctactgccgcggcaagatgggcgccctgccggccttcgcctga

SEQ ID NO: 349322 - DNA, 1155 bp, Pseudomonas aeruginosa
atgagtgccgtaatccaagacagccgcagccaggcaccgctaccgctggtcagcctgcgcaacctgaacaagcactatggcgacttcgtcgccgtggacgatatttccctcgacatccaggagggcgagttcctcaccttcctcggctccagtggctcgggcaagagcactaccctgtcgatgctggccggcttcgagacgcccagcagcggggagatcctggtcgacggtaaatccctggtgaaggtaccgccgcacaagcgcgacatcggcatggtgttccagcgctactcgctgttcccgcacctgaacgtgcgcgacaacatcggcttccccctggacattcgcaagcaggcgcgcggcgagcgcgagcgccaggtcgaggccatgctcaagctggtgcaactggagcagttcgcccaccggcgcccggcccagctctccggcggccagcaacagcgcgtggcgatcgcccgcgccctggtctacgagccgcgcatcctgctgatggacgagccgctcggcgccctcgacaagaaactgcgcgaggacctgcaggacgagttgcgccacctgcaccgtcgcctcggcatcaccatcgtctatgtgacccatgaccaggaagaagccatgcgcctgtcgcagcgcatcgccatcttcagccacggccggatcgttggcctgggcagcggctacgacctgtaccagaacccgccgaacgccttcgtcgcctctttcctcggcaactccaactttctcaagatcaaggcccagggccacgcggcggccagtttcgagggccagaccctgatcgttcgccccaccgtgggcatcgccgagggccaggaactgctgctgatggtgcgcccggagaaagcccaggtgctgaccccgcagcaggccgggagcatgccgcggccggccggctggaacgagatccaggcgcgggtcgcggaaaccgtgttcctcggcgaaagcctgacctgcagcgtgaccacccccggcggcacccagctgaccctgaaggagctgtccggcagcaccccgcccctgcaaaccggcgccccggttctggtgcgctgggccgcggacgatgcctgcgtctacaaccagtggcaggaaagcgacctgagcaaggccgccggcgcgcactga

SEQ ID NO: 349323 - DNA, 807 bp, Pseudomonas aeruginosa
atgctgctttcacccaacgccatggggccgcgcctgcgcgtcggcctctacctcaccacgggggccatcgccgccttcctgctgctgccgatcgtgttcatcgtgctgctgtcgttcggctcgtcgcagtggctggtgttcccgccgccgggctggacgctgaaatggtacgagcagtttttcgccaacgtggagtggatggagtcggcctataccagcctcaaggtcgcgctgctgaccaccctttgcgccgtggccctcggcctgcccagcgccttcgccctggtgcgcggcaggttccccggtcgggagttgctctacgccctgttcaccctgccgatgatcgtgccgctggtgatcatcgccgttgccatctacgccctgttcctcaagctgggctacaccggcacgctgttcgccttcgtggtcagccacgtgatagtggccctgcccttcaccatcatttccatcatcaactcgctgaaactgttcgaccagtcgatcgaggacgccgccgtgatctgcggcgcctcgcgcctgcaggcggtgatcaaggtgaccttcccggccatccgccccggcatggtggccggcgcgctgttcgccttcctggtgtcatgggacgaggtggtgctgagcgtgatgatggccagcccgagcctgcagaccctgccggtgaagatgtggaccaccctgcgccaggacctgacgccggtaatcgcagtagcctcgaccctgctgatcgccctgtcgatcctgatcatgctgatcgccgccttgcgtcggcgcaacgaacccagcgcctga

SEQ ID NO: 349324 - DNA, 897 bp, Pseudomonas aeruginosa
atgaagatcgccgccgtgcagttgacccagtcacccgccggcggcactccccgctcggcgcgcctggctcgctggaaaggttcgctcccgctgctgcccgccctgctgtttctcagcctgttcttcctcgccccgctgatcggcctgctgctgcgcggggtgctggaaccggagccgggtctgggcaactacgaaaccctgttcgccaactcggcctatgcccgcgtgctgttcaataccttcgccgtcgccggcctggtcaccctgatcagcctgctgctgggcttcccgctggcctgggcgatcaccctggcaccacgcggctggggtcgctggctgctgagcatcgtgctgctgtcgatgtggaccagcctgctggcacgcacctactcctggctggtgctgctgcaggcctccggggtgatcaacaaggcgctgatggccatgggcctgatcgaccagccgctggagatggtgcacaacctgaccggcgtggtgatcggtatgagctacatcatgatccccttcatcgtgctgccgctgcaggccaccatgagcgccatcgaccccatggtgctgcaggccggctcgatctgtggcgccagcccctggcgcaacttcttccgggtgttcctgccgctgtgtcggcctgggctgttctccggcggcctgatggtgttcgtcatgtcgctcggttactacgtcaccccggccctgctcggtggcgcgcagaacatgatgctgccggagttcatcgtccagcaggtgcagtccttcctcaactggggcctggccagtgccgccgccgcgctgctgatcgccatcaccctgctgctgttctacgcctatctgaagctgcaaccggaatcgccggtggcttccagtacagcgaggtaa

SEQ ID NO: 349325 - DNA, 1026 bp, Pseudomonas aeruginosa
atggtgttcaagaaaacagctaccgcggtaatcgccaccgcactgatggccataaccgcaggcacggccaccgcagccgataacctcagcttcgtcagctggggcggcaccacccaggaagcgcagaaacaggcctgggccgcgcccttcagtgaagccaccggcattcgcgtgctgcaggatgggcccaccgactacggcaagctcaaggccatggtcgaaagcggcaacgtgcagtgggatgtggtcgacgtggaagccgacttcgccctgcgcgctgcccgcgaaggcttgctggagccgctcgacttcaacgtcatcgaccgcgagcgcatcgatccgcgcttcgtttccgaccacggcgtcggctctttcttcttctccttcgtgctcggctacaacgagcgtcgtctgggcggcaagcagccgcaggactggagcgctctgttcgacaccgccacctacccgggcaagcgcgccctctacaaatggccgagccccggcgtgctggaactggccctgctggccgacggcgtaacgcccgagcagctgtatccgctcgatctggatcgcgccttcaagaaactcgacagcatcaagaaggacatcgtctggtggggcggcggcgcccagtcgcaacagctgctggcctccggcgaggccagcctcggccaattctggaacggccgcattcatgcactggaacaggaaggcgcatcggtaggcgtaagctggaagcagaacctggtgatggccgattttctggtcatccccaagggcgccaagaacaaggatgccgcgatgaaattcctcgctgccgccagcagtgccgagggccaggccgagttcgccaacctgaccgcctatgcaccggtgaatctggattccgtcccgcacctggaagccgacttggcgcccagcctgcccacggctcacgccgccgaccaggttaccctggacttcgcctactgggccgagcatggcaacaccattgccgcccgctggaatgagtggctgctgaaatga

SEQ ID NO: 349326 - DNA, 1110 bp, Pseudomonas aeruginosa
atgccattcaaccccatcgaagaaatcatcgaagacttccgccaaggcaagatggtgctgctggtcgacgacgaggatcgcgagaacgaaggcgatctgctgctggcggccgagaaatgcacgcctgaagcgatcaacttcatggcgcgcgaggcgcgcggcctgatctgcctgaccctgaccgacgaacactgccagcgcctgggtctggagcagatggtgccggccaacggcagcgccttcgccaccgccttcaccgtctccatcgaggcggcgcagggggtgaccaccggtatctccgccgccgaccgctgcctcaccgtgctcaccgccgtggcgcccgaagcctgcgcggacgacctggtccagccgggccatatcttccccctgcgcgcccgtgagggcggcgtgctgacccgcgccggccacaccgaggccggctgcgacctggcgcgcctggccgggctgagcccggcggcggtgatagtcgaggtgatgaacgaagacggcagcatggcccgccgtcccgatctggaaaccttcgccgagaagcacggcatcaagatcggcaccatcgccgacctcatccattaccgcctgagcaccgagcacaccgtcagccgcatcggcgaacgcgaactgcccacggtgcatggcacctttcgcctggtgacctacgaggaccgcatcgaaggcggcgtgcatatggccatggtgaagggcgacatccgccgcgacgaggccaccctggtgcgcgtgcatgtgatcgacccgctgcgcgacctggttggtgccgagtacaacggcccgcagaactggacgctgtgggcggccctgcagaaggtggccgaggccggccacggggttgtcgtggtgctggccaacaacgaatcgtcgcaggcgctgctcgagcgcgtaccgcaactgacccaagcacgtcggcagttcagccgttcgcagtcgcgcatctactccgaagtgggcaccggcgcgcagatcctccaggacctgggtgtgggcaagctgcgccacctcggcccgccgctcaaatatgccggcctgacgggctatgacctggaagttgtggaaagcatccccttccagggatga

SEQ ID NO: 349327 - DNA, 288 bp, Pseudomonas aeruginosa
atgaaggcctactggattgcccacgtcgatgtcaccgaccctgctcgatacgccgaatacaccagccgtgcccctgcggtgttcgcccacttcggtggtcgactgctggcccgcggcggtcgcagcgaagcgctggagggcagagccacgccgcagcgcagtgtggtgatcgagttcgagtcctatgaacaggcgctggcctgctaccgctctgcgcaataccaggcggcctgcgcccatcgcgtgggcgctgcgcaggctgaagtaatcatagtcgagggcatctag

SEQ ID NO: 349328 - DNA, 564 bp, Pseudomonas aeruginosa
atgcccagcccgcgcttctgtccgcaatgcggcgacgccggcctcagccgccggcagccggtcggggacacccacgaacggctgatctgcgcggcctgcggctacatccactacgaaaatcccaaggtcatcgccggctgcatcatcgagcaggacggcaagtacctgctgtgccagcgcgccatcccgccgcggccgggcacctggacgctgccggccggcttcatggaaaacggcgaaaccaccgaacaggccgccctgcgcgaagtctgggaggaaagcggcatccgcgccgagatcgtctcgccctactccatcttcagcgtgccgaagatcagcgaggtgtacatcatcttccgcgccaccgtcctgcagatcagcggccagcacggcccggaaacccttgcctaccgcttcttcgcacccgaggaaatcccctgggagagcatctactacccggccatccggcagattctcgagcgctatatcgaagaacgccaggcgggcgtctacggcatctacatgggtaacgacgactgcggcagagtgcactttatccgctaa

SEQ ID NO: 349329 - DNA, 753 bp, Pseudomonas aeruginosa
atgaaacgcctgccactcgacgatagcttcaaggttaatcgcaaccccgtcaccctgcgcgaaatcgtgctcgacaagttgcgcggcgccatcatgaactttcaactgctgcctggcgatcggctggtggaacgcgacctgtgcgaccgcctgggcgtcagccgcacctcggtgcgcgaagcactgcgtcacctggagtccgaaggactggtggagttcgccggcgccaaaggtccgcgcgtggccatcatcaccctggaagacgcacgcgacatctacgagctgcgttgcgtgctcgaagggctgatcgtccagctgttcaccctcaatgccaagcccaaggacatccgcgccctggaaaaggcgctggaggagaaccgcaaggtgctggcaagcggcgaattgcagcaggtgctcgattccgtgcagggtttctacgacgtactgctcgaaggctccggtaaccagatcgcggcgacccagctgcgccaactgcaggcccgcatcagctacctgcgcgccacctcggtgtcgcagagcaaccgccgtggcagcagcaaccaggaaatggagcgcatcgtcgaggcgatcaagagtggcgacccgctggcggcgcaccaggcctcggtggaccacgtgcgcgccgcagccaaggtggcgctggactacctcaagtccaagcaggacgagccgggcgaggttcgcgacttcgtcccccccatcgcgctcaacgagccgcgcataggacgttga

SEQ ID NO: 349330 - DNA, 384 bp, Pseudomonas aeruginosa
atgagcaacgagaaatacgacaagggcctggccattcgcacccaggtgctgggcgaggcctacgtcaacaaatccatcgagaacgccgatgacttcaaccggccgcttcaggagctggtcaccgagtattgctggggccacgtgtgggggcgcgagggtttatcgctgaaagagcgcagcatgataaacttggcgatgatttcggccctcaatcgccctcatgagctaaagctgcacattcgcggcgccctgcgcaatggcctgagccgtgagcagatccgcgagatcctgttgcaggtcggcatctattgcggcgtacctgcagcagtggacagcttccgcatcgctcgcgaagctttcgctgaagctgaggcggagcagtag

SEQ ID NO: 349331 - DNA, 1440 bp, Pseudomonas aeruginosa
atgaatgctttgctgcgccaacaggcctatatcgacgggcactggctcgatgcccgggacggcgcgacccaggccatcttcaacccagccaacggccagcagatcggcagcgtgccgcacatgggcgcggcagaggcacgtcaggccatcactgcggccaatggcgcctggccggcctggcgggcactgaccgccaaggaacgcagcaacctgctcaagcgctggcatgcgctgattctcgatcacaccgacgaactggcgcgcattcttaccctcgagcaaggcaagccactggccgaggccaagggcgagatcctttacgccgccagtttcatcgaatggttcgccgaggaagccaaacgcgtctacggcgacaccatcccgagccacaagggcgatgcacgcatcgtcgtcagcaaggagccgatcggcgtggtcgctgcgatcacaccgtggaacttcccggcggcgatgatcactcgcaaggtcggcccggccctggccgccggctgcacctgcatcatcaagccagcaccggaaacccccttcagcgcgctggccctgatggtcctcgccgaacaagccggcattcccgccggcgtgctcaatgtggtcactggcgacgccgtggccatcggcggcgagctgaccagcagcgcgctggtgcgcaagctctccttcaccggctcgacgccgatcggcaagctgctgatggcgcagtctgccaataccctgaagaaggtttcgctggagctgggcggtaacgcgccgttcatcgtcttcgacgacgccgatctggaaaaggccgtggaaggcgcgctgatcgccaagtaccgcaacgccggacagacctgcgtgtgcgtcaaccgcttcctggtgcaggacggcattcacgacgccttcgtcgcgcggctggccgaacgggtcgccgaactggcggtgggcgatggcttcgccgagggcgtcaagctcggcccgctgatcaaccagcgcgcggtggagaaagtcgccgaccatgtgcaggacgcgctggccaaaggcgcacgcctgatcgccggtggtgagcgccatccgctgggccacggtttcttcctgccgacggtgctggccgatgtaacggctgagatgaaggtggcacgcgaggaaaccttcggccccctggccgcggtgttccgcttcaccgacgaagccgaggccgtgcacctagccaatgacaccgagtacggcctggccgcctactgctataccaaggatctgggccgcgcctggcgcatgagcgagtcgctggaatatggcatggtcggcatcaacgaggggctgatatccaccgaggtggcccccttcggcggcgtcaagtcatcgggcctgggccgtgaaggctctaaatacggtatcgaagactatctggagatcaagtacaccctcatgggtggcctgtaa

SEQ ID NO: 349332 - DNA, 486 bp, Pseudomonas aeruginosa
atgatcgaacccggcatttataaagaagtgatgggctccttcccgtccggcgtcaccgtggtgaccaccctggacagcgaaggcggcatcgtcggcatcaccgccagcgccttcagcgccctgtcgatcgacccggcgctggtgctgttctgccctaactacgcctctgacacctacccgatcctgcgcgacagcaagcgcttcgccatccacctgctatgcgccgaccagcaggccgaagcctacgctttcgccggcaagggcaaggacaaggcacagggtatcgaatggacgctgagcgaacttggcaacccgctgctgagcaaggcgaccgctatcatcgagtgcgaactgtggcgcgagtacgacggtggcgatcacgccatcatcgtcggtgcggtgcagaacctgatcctgcccgagcaggaggtgacgcccatggtttaccaccgcggcaagctcggcgccctgccctccatcgcctga

SEQ ID NO: 349333 - DNA, 1482 bp, Pseudomonas aeruginosa
atgacactcgcccgcttccagatgtgcatcgacggccaatgggtcgatgcgctctccggcaagacctttcagagcctcaacccggctctggccgaaccctgggccgaactgccggatgccgacgaacaggacgtcgagcgcgccgtgcaggccgcacagcatgccttcgaaagcacggcctggcgcagcctgtcggccaccgcgcgcggcaagctgctgcgccgcctgggtgatctgatcgccgagaacaaggagcacctggcccagctggaaagccgcgataacggcaagctgatccgcgagacccgcggacaggtcggctacctaccagagttctttcactacaccgcgggcctggccgacaagctcgaaggcggcaccctgcccctcgacaagccggaaatgttcggctacacggtgcacgagccgatcggcgtggtggcaggcatcatcccctggaacagcccgctgtacctgaccgcgatcaagctggcaccagccctggcggccggtaacaccatcgtcctgaagccctccgagcatgcctcggcgaccatcctcgagctggcgcgcctggcactggaggctggcttcccggcaggtgtggttaatgtggtcaccggcttcggcccgagtaccggcgcggcgctgacccgtcatccgctggtacgcaagatcgccttcaccggcggtgccgccactgcccgtcacgtggtgcgcagcagcgcggagaacttcgccaagctgtcgctggaactgggcggcaaatcgcccaacatcatcttcgccgacgccgatctggacagcgccatcaacggcgccgtggccggcatctatgccgcctccggacagagctgcgtagcgggctcacgcctgctggtccaggacgagatttacgacgagttcgtcgagcgtctgatcgaacgcgccaagcgcatccgcatcggcaacccgcaggacgacgccagcgagatgggccccatggccaccgcccagcagctcgcagtggtcgaaggtctggtcgccgaagcccaggctgaaggcgcccgcctgcgcatgggcggcaagcgtcccgaaatcgacgccaagggttggtactacgaaccgaccctgttcgagtgtgaccgtcactcgatgaagatcatgcaggaagaagtgttcggcccggtggcctcggtgatccgcttcaaggacgaggctgaggcgttggccatggccaacgactcgcagttcggtctcgccgccggcatctggactcgcgacctcggccgcgcccaccgcatggcgcgcgatgtgcgctccgggatcatatggatcaacacctaccgcgcggtatctgccatggcgccgatcggcggcttccacaatagcggctatggccgcgagagcggcatcgattcggtgctggcctacaccgagctcaagacggtgtggatcaacctctcgcaggcgcccatgcccgaccctttcgtgatgcgctag

SEQ ID NO: 349334 - DNA, 834 bp, Pseudomonas aeruginosa
atgattcggctcaccgctaaatccaccccggccggcaccagctacctggccaccggccaaggacatcctgtggtgctgatccacggggtcggcctgaacaaggaaatgtggggtggtcagatcgtcggtctggcacctcatttccaggtcatcgcctacgacatgctcggccacggcgccagcccgcgcccgcagccgggcacgggcctgcccggctatgccgagcagttgcgcgagctgctcgaacacctgcagatcgaccatgccaccgtcatcggcttctccatgggcggcttggtagcgcgagctttcgctctgcaccacccgcagcaaatcgatggcctggtagtactcaacagtgtgttcaaccgcagcagcgaccagcgcgccggggtaatcgaacgcactcgccaggcggccgaacacggcccggatgccaacgcagagcaagccctgtcgcgctggttcagtcgcgaataccaggcggctaacccggcgcagatcgcagctatccgacagacgctagcaggcaacgacccgcagggctatctgaccacctacgagctgttcgcgacccaagacatgtatcgcgccgaagatctgggcagcatttgcgtgccgaccctgatcgccactggtgaactggacccgggctccaccccggacatggccaggcagctggccgagcgcattcccggcgcccaggtcgcggttctgcccgaacagcgccacatgatgcccgtggagtcgccgcgcctggtcaatcaggttctccttaacttcctcgagcaggcccagaacctgcgcaaccaagcaaaggggatagtcgcatga

SEQ ID NO: 349335 - DNA, 591 bp, Pseudomonas aeruginosa
atgagtttcgagatccgcaagatcgtcagctatatcgaggaaaccctgattgaaggcggcaaggccaccgacaagccggtgaccatggtcggcctcgccgtagtgatcaagaacccctggctcggccgcggtttcgtcgaagacctcaagcccgaaatcaaggccaactgctccgagctgggcgccatgatggtcgagcgcctgacagcagccatcggcggcgcggctaatatcgaagcctacggcaaggccgctgtggtcggcgccgatggcgagatcgagcatgcgtcagcggtgatccacaccctgcgctttggcaaccattaccgccaggcggtcgatgccaagagctacctgagcttcaccaacaagcgcggcggcccgggcacctcgatccagattccgatgatgcacaaagacgacgagggcctgcgctcgcactacatcaccctggaaatgcagatagaggatgcgccgcgcgccgacgaaatcgtggtcgtgctcggagctgccaacggtggccgcctgcacccgcgcatcggcaaccgctacatcgacctggaagaactggccgcagaacaggcgcagtga

SEQ ID NO: 349336 - DNA, 1581 bp, Pseudomonas aeruginosa
gtgagcgaacgtcccaagaaccacctcgaacgcgtgttcgcaggtgtcaatccgaccatggcgatcgcctcgatcaccatggtcctcgccttcgtgctgttcactgtgaccaacgccgagctggccaacggtatctataccgctaccaagtcctggatcgagggctcactgggctggtactacgtagccgtcgttagttcggtgctgttctttaccgtctgggtcggtttcagccgatttggcactttgcgcctgggcaaggacgatgagcgccccgagttcagcaacttctcctggttcgccatgctgttcagcgccgcagttggcaccggcctactgttctggagtatcgccgagccgctgatgcacatgcagggcaacccctacatggacatggccggggtcgcggctggcagcgctgaggccgcgcagatcgccctgcgcatcaccatgttccactggggcctgcacggctggtgcatctatatcgtggtcggcctggtgctggcctatttcacctatcgccgcggcctgccgctgaccatccgctcggcgctgtatccgctgctgggcgagcggatccacggtccgatcggccatgcggtggacttgctggcgatcttcagcaccctgttcggcaccgccaccaccctgggcctgggcgtttcgcagatgaacgccgggctgagctacatgttcggctgggaaatctccactaccaaccaattgctgctgattgccggcacctcggtggtggcgaccttctccgctgtctctggcgtgcgccgcggcatcctctggctcagcgagtggaatatccgcctgagcagcattctgttcctgttcctgctgctggccgggccgaccgtgttcctgctgggcttgtatgccaccagcatcggcgactacctggctcacttcattcccatggggctgtggaccgactccgatccggagcgccagtggcagggctggtggacgatcttctactggggctggtggctgtcctggggcccgttcgtcggcatgttcatcgcccgtatctcccgtggtcgcaccgtgcgccaggtggtggtgggcgggatgctggcttccaccctcggcgccttcctgtggatcgtgatcatgggcggcaccggcgtctacctgcagctcaatggtgtcgacctggcgagcgtggccaacagcgacctgaccatggtgctttacaagaccatcgaaggtctgggcgtggagtgggccatcctgcccatggccggcctggcgacgctgatgatcgtcagctggttcgtcacctcggcagactcggcgacgctggtgatctgcaccatcctttcccagggcgaccacaacccgccgcagcgctaccgcatcatctggggcctgggcctcggcgccctggccggcgtgctgttgttggccggcggcctgcagggcctgcaggcggcgaccatcgcggcggctctgccgttctccctggtgctgctgctgatctgctactgcctggtcaaggcgctgcatcaggaggaaagtgcactgcagcgcactgccgaaccgagggtgggcgctcgcgtctcttga

SEQ ID NO: 349337 - DNA, 276 bp, Pseudomonas aeruginosa
atggtcaacctgatccgcgaggcgcaggtgttcaggcccacgctgcgcgcggcgttcgccatcaaccgccgcgtcagtaccacggtaatcggccgtgaagcgcgcggcgcgttggccgatcaaccgctgccggcactgcaggcggaagtacgccagcgtatcgtcttcgccgagagcgtggcggccggtcgccttgcccgcgaactggcaccggacagcgccgccgcgcgcgaggtcagcagcctggtcgacgagttgctgaggtggtcgtcatga

SEQ ID NO: 349338 - DNA, 435 bp, Pseudomonas aeruginosa
atgtcatctaccccctaccgaacccctgacgccgacttgaacgccaatccggagcaatcccagggtggttacctaagtggtggaaagccgctgtggaaagcgttctggctgttccacctgcttggccttgtagttctgtatgcgctcgtcaggctcactcttgattctctcggtgagaccattaccgagcttgtacggagctggaacgagctgatcttgttgactgcatttcgcgaggtctacgggctcctcgggttcactccattgctgttctacgtttgcttcagctccgtggtggtctggcggtgtagccgtaatacgcgctggggtggatggacagtgttggcgcgccttgtcgtgagtctgaataccgtgcttctggctggcctggtcgcctactgcctgtggattttgggtgatcgccttatcccgtaa

SEQ ID NO: 349339 - DNA, 1548 bp, Pseudomonas aeruginosa
atgacctcctcgcccaacctcgaccagatgacccctgaccaactgcgtgcactggccgcgcagttgatgtcgcaagtcgattcgctgggccagcaggtcgatacgatgggcaagaagatccagcgcatcgaaacggtcaacgaacagctgacccacgagatcgctctgctcaaacgtcacaagttcgccaagcgcagcgagcagctgagccctgcccaaggcagcttgctggaagacctgatcgacaccgacatcgccgccatcgaggccgagctgaaggcggtcaacccgccgaccaccccggctgagccgcgccagcagcccaagcgcgcactgctgccagcgcaattcccgcgcaccgtgatccaccacgagcccgaaaacacccaatgcgcctgtggctgccagctgcaacgcgtgggtgaagatgtcagcgaaaagctcgactacacgccgggcgtgttcaccgtcgaacagcacgtgcgtgggaaatggatctgccgccagtgcgaaacgctgatccaggcgccagtgccggcccaggtgatcgacaagggcattcctaccgccggcctgctggcccacgtgatggtggccaagttcgccgaccacctaccactgtaccggcaggagaagatctttggtcgtgccggcttggccatcgcccgctcgacgctggcacagtgggtcgggcaaaccggcgtgcagctccaaccgctggtcgatgctctgcgcgaagcagtgcttgcccagagcgtgatccatgccgacgaaaccccggttccgatgctcgcgcccggcgagaagaagacccatcgggcctacgtctgggcctacagcagcacgcccttcgccgacctgaaggccgtggtctacgacttcagcccgagccgtgcgggcgagcatgcccgcaacttccttggccactggaacggcaagctggtctgcgacgactttgccggctacaaggccggcttcgagcaaggcattaccgagatcggctgcatggcccacgcccggcgcaagttcttcgacctgcacgcagcgaacaaaagccaattggccgaacaggccctgcactcgatcgctggcctctacgaaatcgaacggcaagcccgtgatctgagcaacgaagatcggcggcaaatacgccaggaacaggccgcaccgattctcgacgcactgcataactggatgctcgcccaacgccagttggtgcccgacggctccgccatcgccaaggcgctggattacagcctcaaacgctggacggctctgactcgatatctcgaggacggcgctgtgcccgtggacaacaactggatcgagaaccagatccgcccctgggccctggggcgctccaactggctgtttgccgggtcgctgcgtagcggcaagcgcgcggcggcgatcatgagtttgatccagtcagcacgcctcaacgggcatgatccgtatgcctatctcaaggatgtgctgacgcggctgccgacgcagcgggcgagtgagatcggccaactgctgccgcatcaatggaagcctgcctga

SEQ ID NO: 349340 - DNA, 336 bp, Pseudomonas aeruginosa
atgatccgcatcgacaccatctggctcgccaccgagccgatggacatgcgtgcaggcactgacaccgcgttggcgcgggtggtggccgtgttcggtgcggcaaagccgcactgtgcttacctgtttgccaaccgccgcgccaaccgcatgaaagtcctggtgcatgacggcgtgggtatctggctggctgcgcggcgcttgaaccagggcaaatttcactggccaggcatccggcacggcacggaagtcgaactcgacaccgagcaacttcaggccttggtactcggtataccctggcagcgggtcggtgcaggcggcacgatcacagtgctgtag

SEQ ID NO: 349341 - DNA, 312 bp, Pseudomonas aeruginosa
atgagccttttccaatgcgaatgctgtggttgccgcgagaacacggcactgtcttggcagggcttccgcatgttccgcgatgacatcgactgggcctatgcccctgagcgtgagggccttcgactgtgcagtgcttgtggaccgactcacttcaagagtggcgagccaaccgactgtgggaaatggcacgaccagttcgagcgcgtattcctgccgctggggatgttcgtcaccagtcagcgaggaaacctggctcaccgcgaaactggcgatgaggattaccgaaaatatagaatcgaggagcctgcctaa

SEQ ID NO: 349342 - DNA, 204 bp, Pseudomonas aeruginosa
atggctaagaaagtcgagcttgagctttccgtctgggtagatgggcgtcaatggaacctcttcactttcgactacgacacgccggatgggaagttcagcggctatctccatgcgatttctccggagcacgccgccgaaatgctgatggatatgaaggcgaacgcgacaatggctggtcagatgatcgaggtgatcgaaccatga

SEQ ID NO: 349343 - DNA, 279 bp, Pseudomonas aeruginosa
atgtctggaattcgagaagagtttgaagcgtggcaccacgctgagttcggctatgtgatcgcagaggaagacgatccagcacaagacggccagtgcgcagagcgctggaaggtatggcaagccagccgcgcggctctgagggtggagctgccggatcgtcgcgatccgttgaactggaccggagacgatgagaacccaagatcttccggcttcaacgcctgccttgagcgcgtgaaagaagccctccagcaagccggaatcgaggtgaagaatggctaa

SEQ ID NO: 349344 - DNA, 528 bp, Pseudomonas aeruginosa
atgacgtggggtgctcgcggcgcgcggtggccactggcgctgctcgccggcagtctggttgccctgggttgggcagcgctcacaacgttgccaccacggctggtctacaacgcctccgacagcgtgcccgtcggctggtaccgcatttcgccggccaactcgttggcgccgggcgatctggtgctggctcgcctgccgccagaggcaatgtcgctggcgtcgcagcgcggctacctgccggcagacgtgccgttgctaaagaccgtggcggcgatggcgccgcagcgggtatgcgtgcagggcagtcaggtgcgtatcgatggcgtcgttgtggccaggcgcttgagatgggatcgacaggggcgcgcgctgccaacctggcaagcctgccggcgtctggttggcgacgagctgttcctgctcagcaccgccaacccggcgtcgttcgacagccgttactttggcccggtgtctgtcaacgcggtgatcggccgggcgcagcccttgtggctggaggcgcgtcgatga

SEQ ID NO: 349345 - DNA, 1299 bp, Pseudomonas aeruginosa
atgctttccattttggccaaccgcacctatcggcatctgttcatggctcaagtcattgcccttatcggcaccggcttggctaccgttgccctgggacttttggcattcgagcttgcgggcgcacaggccggtgccgtgctgggtactgcgctggctattaagatgatcgcctacataggcgtagccccgattgcagccgcctttgccgagcgactaccgagaaaggaaatgctggttactctggacttgatccgggccgccgtggcaattctgctgccattcgtgaccgagatctggcaggtgtacttactcatcttcgtcctgcaatccgcatccgcagcgttcacgcccacgttccaggcgaccattcctgacattcttccggacgagcgcgaatacacccaagcattgtccctctcgcgcctagcctacgatctggagagcgtcttaagccccatgctggcggccttgctgctgacagtgctcagcttccacagcctgttcggcgggactgtcgtgggcttcctggtttcggccgcaatggttgccaccgtcgccctgccaactgcgctggccggtccgaagcgaggcatctacgagcgaaccacccggggcatgcgcatctttctggccacccctcgcctgcgcggtctcctggctctcaatctggccattgcggcagccagcgccatggtcatcgtcaacaccgtggtgctggtacagtccgaatacgggctgccacagagctcaacggccactgccctgatggcctttggcgccggctcgatgatcgtggcactgattctgcccagtttgctggagcggcttgatgacaggaaggtcatgctggccggggggagcgtgctggccgctggactttttgccggagtcttcttgcccggctacctgagcctactgggactatggctcatcctcggcatggggtattcgctagctcagaccccagtcgggcgcatcctgcggcgctcctctgcaacccaggacagacccgcgctgttcgccgcccaattcgctttatcccatgcttgctggctgatcacatacccattagccggctggctcggcgctaatctgggcctcacagcagccttcgttgggttgaccatgcttgccgcggcagcactgctggtcagtctacggatttggcgccccgagcacgaccaggaggccatcgaacaccaccacgacgacttgcccgaaggccacccgcacattgctcacggcaagactcatacccacgccttcgtcatagacgacgaacaccggcgctggccatag

SEQ ID NO: 349346 - DNA, 1032 bp, Pseudomonas aeruginosa
gtgtttatcaaaaaactctgttcagttctggttgccggcttattggcgatcagtgctgaagccaatgatttccgatatagcgacactcatttgcactacgtggatttctttcagtcgagtgccggcaccaagccattgcttgaggagaaggctgaggcaaagattgatcatgccatgctctcgggcatctcggtcgccaaggagtgggatgaggatgagcccaaacgcccccgttactatgccggggacgatgcaagagcttactggtacagcgccaccgatacgctgatcgccgatgcctacaagcagttgccggcgcaagagcaattgcgctttcaccccttcatatcggggttcaaccccaatgacatgaatgccgatacccagatccggcgcctgctggaactcgaccctggtttgtggcaggggattggagaagtgtttactcgccatgattacctgacggcactgatctacggtaaagccccgcgggcgaatagcaaggcgctggctagggtgtatagggtggccgctgagtttgacttgcccgtcctgcttcactccaacatcacctccaagcgggagcgctatcccctctaccttggggaactcgaggaagcactgcgtgagaacccgggtgttcgtttcatttgggcgcatgcaggaacgagcatgggaatctaccgaacccagggcaagatgaatttcctgctgccaacccttgagcagttgctgcagagatatcccaacctctacgtcgacctttcctggacggtacttcatccctatctcctggatgaagccgggcacccggatgctgcatgggttgatctggtgacgaggtatccgagccgcttcatgctcggctccgatgtggtgggtacattcggcagcctgagcaaatacatgttcggcttcaatccattcctggaggccctgccgcatgaagttgctcatcaagtggccttgtcaaacttcatctccatactgccggcagcgcgacaagaggagattaaaaggcacgagcgttga

SEQ ID NO: 349347 - DNA, 651 bp, Pseudomonas aeruginosa
atgaagaacatcttgctgacaggcttcgagccattcgctggccacaaactcaatgcctcatgggaggtcgtgcgcgggcttggcggccaaagcctggacgaggaacatctgatcgtaagcgagcttttgccctgcaccttcgacggctccctgcagcgcttgggccagctgattgccttacatcagccggtcctcaccatagccgttggtcaggcaggtgggcgcgccgccttttcactggagcgagtcgccatcaacctgcaggatgcggcgactcccgacaatgcgggacataagccgatcgaccgagcggtcatcgcgagcgggcccgctgcctatttttcgaccttacccatcaaatcaatcgttgccggcctgcgtgaccaaggcatccctgccgaagtttcccagagcgccgggacctacgtatgcaactcggcgttctacggcctgatgcatgctgcaagcagctctcgggtgccgttcagtgccggatttgtgcacataccctatctacccgaccaagcggccaataaggctggcgctgcaagcatgtcggaggcgctcatcgctcaggggcttcgcctggccctgactatcgcgttgtccgtgaaacaggacctcgcgatgagcgccggcaagacccattaa

SEQ ID NO: 349348 - DNA, 135 bp, Pseudomonas aeruginosa
atgagcaccacaatcaccctgagccgttccctgctgttggcctgcctggtaggtctgctgtctgcatgtggcggcggcgaaccggctagtcagagccaggcagagatcgaaagccacggacactcgcatgattaa

SEQ ID NO: 349349 - DNA, 663 bp, Pseudomonas aeruginosa
atgttcaataccaagcttccgacccatagcgaactgccaaccagccgccaattgctgcgctccaccgtgattgccgtgggcgtagccgctgccctgctggtcaccgtggtgatgccatccgagtacgccatcgacccaacaggtgccggtcgcgtacttggcctgacccagatgggtgagttgaagctcaccctggccgaagaggcagcagcagatgccgccgctcaggtagcagtagctccggtggcgcaagcccccgcaccggcccagcaggcagcaccggagcaagtggcggtagcgccagcagctgagccggtagcaatgcctgagccggccctgaagtccgatgaaatcaccgtcacgctgaagccgggcgaggccagtgaaatcaaactggaaatgctcgacaaggccaaggtcagctatgagtggacaaccaatggcatccctgtcaaccacgacacccatggcgagccctacaacggtccacagggctactaccacagctacagcaaagccaagcaggtgaagagcgataaaggcgaattcactgccatcttcgacggcactcacggctggttctggcgcaaccgtagcaacagcaacgtaaccatcacgcttaagacgaagggcgagtacctgagcgtcaagcgcgtcatctaa

SEQ ID NO: 349350 - DNA, 1137 bp, Pseudomonas aeruginosa
atgctcaccttcgccgaactcttgcagcaggggggcagtcaggcctggctgtatgtccccaccgccatcctgctaggtgctctgcacggcctggagccgggtcattccaagaccatgatggccgcgttcattgtggccattcacggcacggtgcgtcaggccgtcctgcttggcctggcggccactgcctcgcacaccgccgtggtctggctggtggccatcggtggcatgtacctgggacagcacctcgacgcccagaccaccgaaccctacttccaactcgcctcggccgtgctcatcgtcgtcatcgcgctgtggatgctctggcgcacctggcgtggcgagcagatgtggcgtttcgagcaggacgacgaccatcatctccatcatcctcatgaccatcatcattacgaaagccggcgtatcgacaccggccacggtcgcgtcgagctgtcgatctgcgaggacggagtaccgccgcgctggcgcctgaacgtcctcagcggccatgcctggagggcggccgaagtctggctgcagacgacccgcacggatggccgcatgcgtcgcttcgcctttgtcgagcgcgacgggtatctggagtccgtggatgaaattcccgagccgcacgcgttcaacgtgcggctgagcctggggcatggcggtcacacccacgattacgaccttgacttccgcgagcctggacacgcccacgcccattcggagttggaaggcctggagctgtccctcgagggttaccaggatgctcacgagcgggcccacgccaacgacattcgccgtcgtttcgccagccgcaacgtcagcaccggccaggtgatcctgttcggccttaccggcgggctgattccctgtccggcggccatcaccgtgctgctgctctgcctgcaggtcaaggaggtgacgctgggtgcggttctggtactcggcttcagcgtcggcctggcgctgaccctggtcgcggttggcgtcgccgccgccgtcggcacgcgacacgcgtccaaccgctggccctcgctgggcgtggtggcgcgccgcgcgccctacctgtccggcctgctgatcatcgccgtgggcatctatgtcggcctgcatggctgggccgggctgagcgcctga

SEQ ID NO: 349351 - DNA, 441 bp, Pseudomonas aeruginosa
gtgtgggacttctccgcctatctgggattgttcgttgcggccttcggtgccgccaccctgctgccgatgcagtcggagacggtgctggtcggcctgctgctggccgctgaacagccacctgcgctgttgctcctggtcgccacgaccgacaacgtactgggttcggccgccaactggctgctaggccgctatatcgaacactttcgccacagacgctggtttccggtgcaggaagacaaactgcagcgtgcccggcaggcctaccaccgctatggacgctggtccctgctgctgagctgggtgccgatcatcggcgatccgctgtgtgtgatcgccggcgtcctgcgcgagccgttctggagcttcctgctgatcgtgctggtggccaaggccgggcgctacctggcgctggcggcgctgacgctcggagtcatgggatga

SEQ ID NO: 349352 - DNA, 708 bp, Pseudomonas aeruginosa
atgaaaagggatacggggctcgacctggtcaagtggctggccatgctcagcatgctgctcgaccacctgcgctacctgtggccggacgcctatggcctattcgtcgtcgggcgcctggcttttccgctgttttgcctcggcatcgccgccaacgtggccagaacccgtcccggcgagctgttcagcgagggcaacgcgcgctacctcggctggctgatggttttctccctgctgtcggagctgccctatcgcctgctgtcgtcggaaagcgcgacgctcaacgtgatgccaaccctactgctggggctgctggtcgcctggggcgtccaccatggcgagcgcaccagcctgctgctggcagcggcgacggtgctgatcgccatcctgctgcatcggcaactgatgtacggcgtactcggcgtcctgttgccggccgccttcgtccaagggctgaaggggctgcgctggtggtggttgcctgccaccctggcggtgctggccaacggccgcaaccgctggtttgccgagctgggcctggtggcggataccctggcgtcgttcgcgatggcctgtgccgctgcgctgctggggctctacctgttgcatcgagccctgccgttgaagatctggcccgtcggccgctggggctacctgttctatccggggcacctgctggcgctgcatgtgctgcgcagtgccatgccctga

SEQ ID NO: 349353 - DNA, 453 bp, Pseudomonas aeruginosa
atgaagtggattacccgtgagcggccgaaaatcgaccgcatcgcctgtccctggctgatcagccggttcatcgatgccgacgccgagtttctctacgtcgccagtgcggacgtgctgcgtctgtccctggaactgggggcggtgccctatgacattccgggggtcgggctgtcgcacgttggcgagcagtgcagtttcgacgctttcctcgccaagtacgggctggatgagccggctctgcagcaactggcggccatcgtcaggggcgccgacacgtcgcggctcgacctcaccgcgcagtcggccggtctctatgcgatctctctggggttgtcgcactgttttgccgacgaccacgagatgttgcgtcatggcctggtgctgtacgacgcgctctatgcctggtgcaaacactgccagggcgagtcgcacaactggccgcccgtgctgtga

SEQ ID NO: 349354 - DNA, 324 bp, Pseudomonas aeruginosa
atggcgcgtatctcgatctgcgaactggccgagtggcaggctgccggccgtaccttcaccctgctggatgtgcgtcgcgccagtgcgcgtcaggccgatgcggcgcagatcgcgggcgcccgctggcgcgatccagaggccttgctcgcctggaaggatcaggtgccgcgcgacagaccggcgattctctactgcgcccatggccacgagctcagccagggctgcgccgccaccctgcgcgccatgggcctggatgcgcgctacctgatcgacggtttcgccggctggcgtgcggccggtcaacccctgcaatcgctggaatga

SEQ ID NO: 349355 - DNA, 1362 bp, Pseudomonas aeruginosa
atgagtgagacgattatgcaacccgatgagcaggcactgccgcgccgcgaatccgtcagtttctggcaggccctgctgttctggctcaagctcggcttcatcagcttcggcgggccggccgggcagatcgcgatcatgcatcaggaactggtggagcggcggcgctggatttccgagcggcgtttcctccacgcactgaactactgcatgttgttgcccgggccggaggcccagcagctggccacctacatcggctggctgctgcaccgcacttggggcggtatcgtcgccggggtgctgttcgtgctgccgtcgctgctgatcctgatcgtcctgtcctggctctacatcgccttcggcgacgtgccgctggtggccgggatcttctacggcatcaagccggcggtgaccgccatcgtgctgcaggcggcccatcgcatcggctcgcgtgccctgaagaacaactggctgtgggccatcgccggcgcctcgttcgtggccatcttcgccctcaatctaccgttcccgctgatcgtgctgggagcgtcgctgatcggttacctgggcgggcgttacgcgccggccaagttcagtgtcggcggcggccatgcggcggccgacaagtcttacggcccggcgctgatcgacgacgacaccccgccaccggcccatgcgcgctttcgctggtcgcgcctggtgctgatcctgctggtgggcgctgccctgtggctgctgccgatgggcctgctcaccgcgctgttcggctgggacggcagcctgacgcagatgggctggttcttcaccaaggccgcgctgctcaccatcggcggcgcctacgcggtgctgccctacgtctaccagggcgcggtcggccattatggctggctgacgccgacgcagatgatcgacggcctggccctgggcgaaaccacgccggggccgctgatcatggtggtggccttcgtcggcttcgtcggcgcctacgtgcagccggtgttcggtggcgactcggctttcgtcagcggcgcgctggcggcctgcctggtcacctggttcaccttcctgccgtcgttcctgttcatcctcgccggcgggccgctggtggagtcgacccacggcgagctgaagttcaccgcgccgctgaccggtatcaccgcggcggtggtcggggtgatcctcaacctggcgctgttcttcggttaccacgtgctctggccgcagggcttttccggcagtttcgactggccttcggcgctgatcgccctgggcgcggccgtggccctgctgcgcttcaagcgcggggtgatccaggtcttgctgggttgtgccctggtcgggctggcggtgcatctgctgcgttga

SEQ ID NO: 349356 - DNA, 921 bp, Pseudomonas aeruginosa
atggcgttgcctacggccaatgctgccgagcgcatgcgcgcctggcgagcgttgaagggggcgggggccgcggtgctgcgcgatggggtgtacctgctgccggaccggccggcttgtcgagagatcctgtcggcggtggagcgcgacattctcgacagcgagggttatgtctgcctgttgccggtatgcgacccgcagggtgagcgcttcatcccgctgttcgcgcgttcggaggactacgccaagctgcgtgcagaggtagaggcacagctcgcgcaaatgactcccgacaccgcgcttgcggtcatgcgccaggctcgaaaactgcgcaaggccttcgcccagatccaggacatcgacttcttccccggggtggaccaggagcaaaccgacgcccggttgcgcgagttggaggtcgcgatcagtcgcgcgctgtcccgggacgagccctgcagtcatgagcaggagatcgagcgactgtctctggcggagttcaaggggcgggtctgggccacgcgtcaccggccctgggtcgaccgcttggccagtgcctggctgatccggcgcttcatcgaccccacggcacgcatcctctggctgccgtctgcggacgactgtcctgacgaggccttgggcttcgacttcgacggtgcgcgcttcagccacgtcggcaaccgcgtcaccttcgagaccctgcaggccagcttcgccctggaggcacccggtctgcggcgcatggcagcactggtgcattacctcgacataggcggtgcccagcctgccgaggccgccggtgtggaacgggtgctcgccggcctgcgggccagcctggaacacgacgatcaactgctggatgccgcctgcgccatcttcgatggcttgttggtggcctttggcaaagaaggacagaacgatgagtga

SEQ ID NO: 349357 - DNA, 555 bp, Pseudomonas aeruginosa
atgcagggcgagcatgacgacctgcatcgccctggtgcgctcgacgcccatctatggctggagccaggtaatgctcgtctggtcgctgcacaaattgccggcgacctgtcggtcgccgatcctgcaaatgcggcccgctatcaggaaaacctcaaagcgttcgagcagcgtcttaccgcgctggatgacgtactcaaggagcggctcaagccattggccggcaagcccttctttgttttccatgaggctttcgactacttcgaggaggcctatggcttgaagcatgcaggtgtgtttgcgatcagtgccgaagttccgcccggagccaggaaggttgccaacatgcgcaagcgtctggagttggcaggcgccagttgtgtgttcagcgagccgcccatgcagccccgtcttgcgcaggcgctgagtgagggcttgcccgtgcgactagctttgctggatgcgcttgggtttgacgtcaaggtcgacgcaaatggctatgaacgcctgctgatggcgttgggcaacgatctagccgattgcctggaacggttgtaa

SEQ ID NO: 349358 - DNA, 186 bp, Pseudomonas aeruginosa
atgaaaatcctggcactgctaccgctgctcgcgctggccgcttgcgggcagggcgacgatggcgtcgtgctacggcaagacgattcgactgagcgcttctactccggctgcgcccggcccggcgagtttctccgtcctaccgacttgcccgcgatcccgccaagtttcgacgaggacgcgcaatga

SEQ ID NO: 349359 - DNA, 252 bp, Pseudomonas aeruginosa
atgctgtacgccatcgacttccatgccgggggagcccgccggcatcccaggaacagcgatgcccacgagatcatcgcgcttggtgagctcgatgacctgagccgccggcacatgaccttcgacgaacttgccgtcaatcactgcggtgtggcaagacgccaaccgcggcgcaacgcccagactttgcttcactgccgtcatgttgctttcgacatggtcgacgactttgaagccattcgcttcgaggtgtga

SEQ ID NO: 349360 - DNA, 423 bp, Pseudomonas aeruginosa
atgatggtctccgccgcttggggcggcctcatccccggcatggtgatcatcgccactcatgtccgaatggtgacctgcctcaggtgcggagccaccctcgctatcagtagccgcggcatcgtgatggccaggctctccggcatcacctgttccatgatggtcttcgccaccgccgctattgccatgatggccaggcttgttgtcgccgtgctgaccttcatgattgtgcatttgcgtttccccaccaccatgctgatggccgccactggatgcgacgagtgcttggtattgcttggcatccatcgtcggcaattggtcaaggaaggcaaccattccccagatgtactcatcgcccatgctcttgccccacgcaggcatacccgttgccttgatgccatgcttgatcacccagaacgctgctga

SEQ ID NO: 349361 - DNA, 504 bp, Pseudomonas aeruginosa
atgtatggcttctcgttgaccatctatctgctgacggggtttctgggcatcgatcttcctctgacgggctattccgggcatctctgggccaccttgctgggctacggcagcctcggcgccacgctggaaatgctgctgggcggagtattcatcgtcattggtctgatgctgttgatccgcggctgggttcaggtctactacgccagcctggagggccagttggccacccaaggcgtctacagtctggtccgtcacccgcagtacacagggatcatgctggccgttttcggtcagatcatccattggccaacgatcatcaccttgctgttggttccggtgatcgtctttgcctatgttcacctggccaggcgggaagaatcagtgttgacggcgcggttcggcgaggcctatcaagcctatcgccggcacctaccgatgttctttccacgccggcaggagtgggggcggtttctccacgcactgttctttccccatcccaaatag

SEQ ID NO: 349362 - DNA, 906 bp, Pseudomonas aeruginosa
atgcctctgacattcctactacgcggtgcagctaggctcgggctgctagtcggcgtcaccattcttgccgcctgcggcgatgcagcggtcaccctggaacatgtacacgggctggcgttcagcccggatggtcaacagctgtccattcccagtcaccatggtctggccgtctacagccaagggcgctggagcaaggcacccggacctgcacacgactatatgggctattcggtgacgcgccaggcgatctacagcagcggccacccggcccgcggcagcggtctggtcaatccgttcggagtgatcaagagcagcgatggagggcgcacgtggcagcaactgggcctacaaggcgagtcggacttccacctgctggccagcggttacgatagcgcaaccctatatgtctacaacacccgtccgaattcgcggatgagcgccccgggcttgtattacagccgcaacgatggagccaattggcagcgcgcatccgcgcagggaattggcgaggcgccgaccgcactggcggtgcatccgagcgaccaccggctggtcgcggtggcgaccggagcgggcctgtacctgtcgcgcgatgcgggtcaacgcttcagggcggtcgtcgaaggcgaacaggtagtgagcgtcaccttcagtcttgatggcagcagcctatggttcggtagctacggcgacgcggccaagctatccaggctggatctgaagacgcgcgagattaccccgctcggcgtgcctgagctggatgaggacgctatcgcctatcttgcacagaacccagtccagccaaaggaatgggcgacggcgaccttcaaacgtgacgtctatctatcaaaggacgccggcacgacctggagcgcgatcgccaaagccggtcagactctggagtga

SEQ ID NO: 349363 - DNA, 357 bp, Pseudomonas aeruginosa
atgaagaactacaccctcctaggtgctctgactctggtcctcggccaaccggtctttgccgccgaaatgcctgccatgcccatggacaagatgcccatgaaagaaatgcagatggagcaatcgggggctatggcaaccgcccaggcttccggcaccgtcaaggccatcgatagtcagaaaggcagtgtaaccatcgcccatggccccgtgcctgccgtgaagtggccggcgatgaccatgggtttcaaggcgacgcccgagcaactggctcaagtgcaggtcggccaacaggtgatgttcgagttcaagagcgaaggtatgacggcgacgctcctgtcgatcaagccgatgcagtaa

SEQ ID NO: 349364 - DNA, 3162 bp, Pseudomonas aeruginosa
atgatcgccaagctgatccgctggtcggtggccaaccgcttcttggtgctgctggccaccctgttcgccgtcggctggggtgtctggtcggtgcagaacaccgccatcgacgcgctgccggacctctccgatgtgcaggtgatcatccgcacgcccttcccggggcaggcgccgcagatcgtcgagaaccaggtgacctatccactggccaccaccatgctctcggtgccgggtgcgaaaacggtgcgcggttattccttcttcggcgacagcttcgtctacgtgctcttcgagaacggcaccgacctgtactgggcgcgttcgcgggtactggaataccttagccaggtacaggcccgtctgcctgcgggagccacgcccgccctggggccggacgccaccggggtgggctggatctatcagtacgccctggtcgaccgcagcggcacgcatgacctggcgcagttgcgggcgttgcaggactggttcctcaagttcgaactgaagaccctggccaatgtcgccgaggtggccaccatcggtggcatggtcaagcagtaccaggtgctgctcgatccgatcaaactggccagccgcggtatcacccagcagcaggtcgccgaggcgatctccaaggccaaccaggaaaccggcggtgcggtgctggaactggccgagaccgagttcatggtgcgcgcctcgggttacctgcagacgctgaatgactttcgcgccatccccctgcgcctggacagtggcggcgtgccggtgacgcttggcgaggtggcgcacatccaactcggcccggaaatgcgtcgcggcatcgccgaactcgacggcgagggcgaggtagtcggcggcgtggtgatcctgcgcagcggcaagaatgctcgcgaggccatcgccgcggtcaagaccaagcttgacgaactgggcaagagcctgccctcgggggtggagatcgttaccacctatgatcgcagcaagctgatcgatcgtgccgtagaaaacctcagtcacaagctgatcgaggagttcatcgtagtcgccctggtttgtgcgctgtttctctggcacctgcgctcatccctggtggctatcgtctcgctgccggtcggggtgctgatcgcctttatcgtcatgcagcagcaggggatcaacgccaacatcatgtccctcggcggcatcgccatcgccatcggcgccatggtcgacgccgcggtggtgatgatcgagaacgcgcacaagaagatcgaggcttggcgcgaggaacacccgggcgaggacctcaagggcgaacatcactggcacgtgatcaccgaggcggcggtggaggtcggcccggcactattcttctgcctgctgatcatcaccctgtcgttcatcccggttttcaccctggaggcccaggaaggccgcctgttcggtccgctggccttcaccaagacctacgccatggcggccgccgccggcctgtcggtgaccctggtgccggtgctgatgggctactggattcgcgggcggattcccaacgaggaacagaacccgctgaaccgctggctgatccgcatctatcagccggccttggacgcggtactacggcggccgaaaatcaccctgctggtcgcgttgctgattcttctcagtgcgctctggccgatgagccgtctcggtggcgagttcctcccgccgctggacgagggcgacctgctctatatgcccaccgcgctgccggggctgtccgcgcagaaggcggcgcaactgctgcagcagaccgaccgcctgatcaagacggtgccggaagtcgcccatgtgttcggcaaggccggccgtgccgaaaccgccaccgaccccgcaccgctggagatgttcgaaaccaccattcagttcaagccgcgcgagcagtggcgaccggggatgaccccggagaagctggtggaggaattggaccgtaccgtgcaggtgccagggctggccaacctatggattccgccgatccgcaaccgcatcgacatgctcgccaccggcatcaagagcccgatcggcgtcaaagtcgccggcagcaacctggcgcaaatcgacgagatgacccaggcagtcgagcgggtcgccaaactcgtgcccggcgtcagttccgctctggccgagcgcctgaccggtgggcgctatgtggatgtgcagatcgaccgcgaagcagcggcgcgctatggcttgaatatcgccgatgtgcaggcgatcgtcgccggcgccatcggcggggcgaacatcggcgagaccatcgagggcctggcgcgcttcccgatcagcctgcgttacccgcgcgagtggcgcgattcactggcagggctgcgtgagctgccgatttataccccccagggcagccagatcacccttggcaccgtggcgcaggtcaagatcagcgatggtccacccatgttgaaaagcgagaatgcgcgtctgtctggctgggtctacatcgacgtgcgtggccgcgatctggcttcagtagtgggtgacctgcgccaggccattaatgatcaggtcaaactacagccgggcatgagcctgagctactccgggcagttcgagtttctcgaacgcgccaatgcccggctcaagctggtggtgccggccaccctggtgatcattttcgtcttgctctacctgacgttcgctcgcttcagcgaagccctgctgatcatggccacacttcccttcgcactggtcggcggcatctggttcctctacctgctcggctataaccagtcggtggccaccggggtcggctttatcgccctggccggggtcgccgccgagttcggcgtgatcatgctgctgtacctgaagaacgcctggaacgaacggcaagacgccggccgcaccgacgaaagtgcgcttatcgaggcaatccgcgaaggcgccgtgcagcgtgtgcggcccaaggcgatgaccgtggcggtgatcatcgccggcctgctgccgatcctgctggacagcggcaccggcagcgaggtgatgagccgcatcgccgcgcccatggtcggcggcatggtcaccgcgccgttgttgtcgttgttcgtcctgccggcggcctatcggctgatgcgtcgccgccagacctctgaattcatccccaaccaagcagaaggaaaactcgcatga

SEQ ID NO: 349365 - DNA, 1482 bp, Pseudomonas aeruginosa
atgaagactcgaatctggaaaggcgcgttgctgacgggcttggcgctcgccattggtgcagcgggcggctactggttcgctcagcccctggtggaggccggggccagcatggccaatgcccaggagtcctccgcaccggacgagcgcgaagtgctctattggtacgaccccatgtacccgcagcagaaatttgaccaacccggcaagtctcccttcatggacatggagttggtgccgcgctacgccggcgaggcgagtgacagtgccgcggtcagcatcgacccaagcgtcgtccagaacctgggcatgcgcctagcgactgtcacccgtgaacactcggtcactgagttggaagtggtcggcaacctggccttcaatagccgcgatgtcgccgtggtgcaggcacgcagcgggggcttcgtcgagcgcgtgtatcggcgcgcgcccgaggatctgctggttgctggggccccgttggctgacctgctggtacctgaatgggcggctgttcaagaagagttcctggccttgcgcgaggtcggtgaaagagcattgttggacgcagcccggcagcgcctacggctggctgggatgccgcagtcattgatcgagcgagtcgagcgtagtggcaaggtccaggccctctggacggtcactagcccgattgccggcgtgctgcaggagctcaatgtccgcgaaggcatgaccctggcagccggccaacccttggccacagtcaacggcctgagcagtgtctggctagacgtggcagtgcctgaggccgaagccggtggcgtgcagctcggccagccggtggaggcatacctgcctgctttccccggtgaagtgctggcgggcaaggtgagcgccttcctgccgcaggccaacctggatagccgcacgctgcgcgtgcgggtcgaactggataacccggcgggccgtctgcggccaggcatgaccgccaaggttcggctgagtcgcccgagcgaacagaacgcattgtacgtgccgaatgaagcggtgatccgtaccggccggcgtgccctggtgatgctagtcgaaggcgagggtcgttatcgaccggttgaggtccgtcttggacaggaaaggactgacaaggcggaaattgtcgagggcctggaggaaggtcagcaggtagtcgcctccggacagttcctgctcgattccgaggccagcctgcgcggggtactcgcccaggacctcgcatcacccgacgctcagccgatgcaggccctgcatgaggcggaaggcaaggtggtcgagatcgacaacgactcggtcaccctggcccatggtccgttcaagaccctcggcatgcctggaatgaccatgacctttccgttggcagatccgactctgctggagggcgtacaggcaggggactcggtacacgttggcgtgcgcgaaacggacgacggcctgttgatcgagcggctggataagctggaggtgcaaccatga

SEQ ID NO: 349366 - DNA, 1257 bp, Pseudomonas aeruginosa
atgagtttccgacgctattgcggaggacgcctttcgctggccgccctcacgctgtgcgccctggccgtgcccggcctggccgccgcccttaccctggacgaagccctgcgcctggcggagcgcgaggcaccgtcactggctgcccaggctgccaaccaagatgccgccatgcaggccgccattcccgccggtgaattaccggaccccaagcttgccctaggtatccagaactttcccatcgagggcgatgcccgtggcagcctcacgcgcgacttcatgaccatgcagatggtcggggtcatgcaagaagttcccaaccgagccaagcgccgtgcccgtgtcgaggctgcccaggcgggcatcgacagcgccgatgcactggagcgggtcgaacgcctcaaggtgcgccgtgaaactgcgcttgcctggatcggcggcttcgcggtcgagcagaaactgcaactgttccagactctgtacgacgagaatcgcctgctggccaaggccgtacaggccaacttggccggcggccgtggccaggcggctgacagtttggcgcccaagcaggaagcagcactgctcgccgagcaggaagatgaactagaacgcaaccgcacgcaggcccgcgcggccctgcgccgctgggtcgggccggtggcggtcgagccgctgtccggctcttggccgagctggcgagtcgatgacctgcatttccgccacagtttggatcgtcaccctgagctgcaggccttcacgccgatgacacaggaggcagaggcccaggtgcgtctagccgaagcggacaagaagcccgactggagctgggagctggcctaccaaaaacgtggcgaggcctttggcgacatggtctccgtgcagttcaccttcgacctacccctgttcaccgccagccggcaggacccgaagatcgccgccaagcgcgccgaagtgctgcgcctggaagccgagcgcgaagccatgacacgggagcacgcgcaagcgctggccgacgatctggccgaacaccgccgcctggagcgcgccgtggagcgcagccgacaaaccctggtaccgctggccgaggagaaggtacgcctggccatggcggactaccgcgccggccgtggcgagttaatggcgctagtggccgcgcggcgcgaactcatcgaggcccgcctgaaacacatcgaccttgaacagcaacgtgcacagaccagtgcccgcctgtatttcgcctatggagaaagtagccaatga

SEQ ID NO: 349367 - DNA, 243 bp, Pseudomonas aeruginosa
atgacctgcgataaatccaccatgattcgggttggcataggtgccggcatcattctgctggctgcctatgtcctgttcccggcttttcaaacctggattgcggcgaacgcgctgatcttcctgctactgctctgtccgctgtcaatgctgttctgcatgcgcggcatgcacaaaggaccacccgctagcgatgacacgcagaaggtaaagccgatcgagcgtgatccgactgacgcgccgtga

SEQ ID NO: 349368 - DNA, 345 bp, Pseudomonas aeruginosa
atgatccgctattacgaacgcatcgagctggtcccagcttctcggcgcacccggtctggctatcgcgactacctggaaagggatgtacaggttttgcgctttatccaccacgcccgagaactgggcttctcattgacgcaggtgcgcgccttgctggcgttatggcgggatcgccaacgccctagcagcgaagttcaagtcatagcccaccactacatcgacgcgctgaacgcacgcattgtcttgctccaggcactgcgcgacagtctgagctacctggccgagcattgcgacgaccttgagcaaccaccggggccgattctggatgatctgcccccccactag

SEQ ID NO: 349369 - DNA, 2457 bp, Pseudomonas aeruginosa
atgacccgcgcattccccgaaaccactgctgctgcgcacgccggccctgtccagcaatggacgtttggcgtagaaggcatgacctgtgcctcctgcgtggcacggatcgagacggcattgactcaagtacccagggtttccgccgccagggtcaatctggccagcgaagcggttatggtagaagccgatgccgatttggctcccctgctagaggcggtcgaaggcgcgggttaccgcgtgaaggaagagcaactggacctggccatcggcggtatgacctgcgcttcctgcgtcggccgggtcgagaaggccctgctgaaggtgccgggcgtgctggcggccacggtgaatctggccagcgaggcggcccgggtccgggtggtgtccggtgcggtagcgccggcggcgctgatccaggcggttgcggccgccgggtacgaggccggtgtgccggcagccaaagaggccgccgccgcgccgccgcctcgcgactggtggccggtggcactggccgccgtgctgtccctgccgctggtggtgcagatgctcgccgtgttgctgggtgcgcgctggagcctgccgggctggatacaactgctgttggccacgccggtgcagttctggctgggggcacgtttctatcgggccggttggcgagcattacgcgccggcagcggcaatatggacctgctggtggcgctcggtaccagtgccggctacgggctgtcggtctatctgttggcgacgcatgccggccccggcgtcccgcacctctatttcgaggcttccgcggtggtgatcaccctggtcctgctcggcaagtggctggaagcgcgtgccaagcgccacaccggagacgccattcgagcactgcaggcactacggccggacaccgcctgggtacgccgtgagggggtggactgtcaggtatcggtgagtaccttggccgtcggtgatttgctggtggtacggccgggcgagcgggttcccgccgatggtctggtacgcgacggacgcagccatctcgacgagtcgctgctgaccggtgagagcctgccggtggcgaaagctgaaggcgatgcggtgaccggcggcgcaatcaacggcgaaggactgttgctggtcgagaccacggcggtgggcgcggaaagtacgctggcccgcatcatccgcctggtcgaaaacgctcaagcggccaaggcgccgatccagcgcctggtggatcggattagcgccgtcttcgtccccgtggtgttggtgattgctgccatgaccctggtgatcggctggtggctcaccggcgaggtggccggcccactgatcaacgcggtggcggtgctggtcatcgcttgcccttgcgcgctgggcctggccacgccgacggtgatcatggtcggcaccggcgtcggtgcgcgccacggcatcctaatcaaggacgcggaagccttggagatcgcccaccgggtcagcgtggtggctttcgacaagaccggcacgctgacccagggcaagccaagggtgaccgcgctggaagtggcgaatggcgatagcgcgcgcctgctgcagcaggccgcctcggcgcaggccggcagcgaacacccgctggcgcaggcgctgctggacaaggccaagcaggacggcacggatttattgcccgcatccaaggtcacggcgttgccggggcgcggtctggcggccttggtcgcagggcgagagctgcgcctgggcagcacacgactgatgcaggagctcggcgttgacctgtcaccgctggcggcgtccgcagcaacgctggcccgggccggcaacagcgtgtcctggctcgccgacgtgactggacagccactgctgttgggcctgatcgccttcggtgatgtgctgaagccgagtgcccgccaggccgtggcgcggctgcgcggactgggcatacggaccgtgatgatcagcggcgacaaccgcggtgcggctgagagcgtggcggctatgctcggcctcgacgaggtgcgcgccgaggtgttgcccggcgacaaggccgcggaggtgcaggcgctgaagaccggtggcgcagtggtagccatggtcggcgacggcatcaacgacgctccggcgctggcggcggcggatgttggcattgccatgtcgaccggtaccgatgtagccatgcacaccgccggcatcaccctgatgcgcggtgatccggcgctggtggcggatgccttggctctctcccgccatacctacggacggattctgaagagcctgttttgggccttcgtctacaacctggtcggcattccactggccgccttcggcctgttgagcccggtggtggccggtgcggcgatggcattatccagcgtatcggtagtcacttacgcgctgctgctcaagcgttggcggccggcaccgctagagctggacggactcgttggctcagcgagaaggaggcatccatga

SEQ ID NO: 349370 - DNA, 363 bp, Pseudomonas aeruginosa
atgatcgagattccgccggcgtcttttcacattaccccctacggcgaagtggatgctgtggccctggaaaggctgcgagaggacttcgacacctcccaacttctgcgattggttgaccgactggatgccagcctggccgatctgggtggaatcgtggccgttcgtgatgagttgctgaagcttcacgcaatggctcttactctcgtagagggctcggcactgacagtgcctattgagaatgcctgcatctggtcggaggcagagtcgctacaccaggatcttgagagcctctctgagtgggcgcgatcggcccaagctgggatcgcccccttgctcggtcttgcgcccgattatgtgttgtag

SEQ ID NO: 349371 - DNA, 1149 bp, Pseudomonas aeruginosa
  misc_feature (1073)..(1108): n is a, c, g, or t
atgtcttacgtcaacccgcgccacgaaggccggctgttgctcatgccgctgctgcgtgacgccttcgcgagcctgcaagtccataaagccccgccaggctctgtcgcgttggcgctcgaaggggctgattccaagatcatttttcagaccgatgaaatcggtggcgggaatgcccgcgatctattcaacttcccatttttgtttcacgcgagtggcgatccttggcacgaagcgaatgattatttgctaagcctgatgcatgataaggcaccgatgaatcgtcgcaccgatgatgttcggcgtcgtgccagtaaactgcttgattacctcctgttctgtgaggataaaaatttagattggctggacttttctggtgcccgcccggcacatcgaccgagctacaaatatttctactacctgatgaacgaaggatgccgcagtaatgcggtaataaatcagtacaccagcgcagtatattatttttataagtacgtttccgagcaatggcatgaaatcgacatggggcgtgtcgatacgatcaggcaggtgcggttaatcgtgtatggcgctaaaggcgcgaaagtaatagctgcggaaaaacgcagccaaacaaggcggacaccgcctgttagttcagtgccattggggttcgtgcgggaagatggcgatgacctccggccgctttcaaatattgagttaggtgtatttctggacaccataaaaaacgaaaaacaatggtcaacaattgagcggttgattctgctgacttcgttaatgactggcgcacgcaagcaaaccgttctgaccatgcgcctgaagcatctgaaaggttttactgaagacaaactgttgccagaaggcgcttataaactccatgtcgggccgcgtaccggcattgataccaagttcgacaagccacaagaactctatttcccaaagcagcttgccgaagaactaatcacgcttgcccacagtccgatgatgaagaggcgacgtgaaaagctccgtgcgcagattgaggctgatcatcccggcctgtcaatcagcgaagacgatatgtacctgtttctctnnnnnnnnnnnnnnnnnnnnnnnnnnnnnnnnnnnngcgttacacggttgtcaagtcgccgcaaacaggtcaagtaa

SEQ ID NO: 349372 - DNA, 894 bp, Pseudomonas aeruginosa
gtgagctcttgtgaaaagtcctgtggttgcggttctactgcggaagccattgaagcagcggccatatcttcgagtgaaggaagctgggtcagcagtttttctgtgcccaaaatggattgcccttccgaagagcggatgattcggctcgcactcaatggcttgcctgaacttcactcgttgtcctttgatttagccggcaggcaagtacgcgcatttcatgatgggtcggttgatcagattgccagcaagctggagtcacttggcctgggcgcaacactgctaggcactcaaccagccagccaggagtccgtctcggccaacagtgctagtgaagagctaactgcttcgaaagaggccagtacgctgaaaatcctgctcggcatcaatggcgcgatgtttgtcaccgagatgaccgctggtttaatcgctcagtcggctggcctggttgccgactctttggacatgtttgctgatgctgccgtttatggattggctctatacgcggtcggccgcagcgcgcagttgcaagtgcgcgcagcccatctggcgggcttccttcaaatcgtattggctctgggtgtactcggagaagtgattcggcgcttcttctacggtagtgagcctgagtcgatgctgatgttgggggtaggtctagtcgcactggtggcaaacgtcagctgccttttgctgatctatggccaccgcgaaggtggtgctcacatgaaagcgagctggatcttttcagcaaacgacgtgctcgcgaacatcggtgtaatcactgcaggggcattggttgcctggacaggctcaccctacccagatctggtcattggcactgtagtaggactgttcgtgctgaacggtgcgcgccgcatactggccttgaaggcctga

SEQ ID NO: 349373 - DNA, 432 bp, Pseudomonas aeruginosa
atgagccttcaaccttcctccggcagctggaatctgctgctgctcgcctggttagtagctttggtgtcgactctctccgcgctgttcatcggcgaggtaatgggtcaggcaccttgcgtgctgtgctggttccagcgtgcctttatgttccctctggcggtggttctggctatcgcctgctaccgctcagacttcgccatttggcgttatgccttgccgctggccgctattggcgcggtgttggccttcgcccacacgctgctctacgccggactgattccccagccgattcagccttgcacggctaccggcccgtcctgctcaggagccgagatgaccatattcggcggcgtgccgttgccagtgctggctctgctcgcattcatcctgatcaccgttctactcatcatcatccgccggagaaccatctaa

SEQ ID NO: 349374 - DNA, 684 bp, Pseudomonas aeruginosa
atgaaccgccgccccctggtcctgatcatcagtgtggtgatcctagctgtcttcgctgccgccgcttacctgtacgcgccatccaaatcgtcccagacatcgcagcagccccaggcaaccgcgccagcacaagccgcaacggaagccacctcagacagcagcaacctggtccgtttccactcgccggtgttcggcccagctaaagccccggtgaccattgtcgagttcttcgatccgtcttgtgaggcatgccgggccttctacccgcatgtgaagaaaatcctcgccgagaaccccgccgaagtgcgcttggtgctgcgctatgtgctgttccaccaagtatccgaggaggtggcgcgcctgctggaggcctcgcgtaaacagaacctgtatccgcaggtgttggaagcggtactagaagcccagccgggctggcacgacgaccccaaggcccaagaggcctgggtcgtcgccgaacgagtcggtctggatgtggagaaggctcgtgcggacatgaatagtcctggtgtcgacgccgtactgaagcaggatatgcaagatgttaaggccgtgggcgttcagggcacgccgactttcttcgtcaatggccagccgttggatgagttcggcctagagccgctgcgccagctggtgagcagcgaagtcgccaaggtaaggaagtga

SEQ ID NO: 349375 - DNA, 462 bp, Pseudomonas aeruginosa
atgggcgtgttagaaaaccgaattccgccgcccttggttgcaaccatcattggagtgctgatgggggcttcctatcgctacctgccaggctttgagctgacgcttggctggcgcctagccgccgctctgccggtgctgttactcgggctcggcgtatgtcttgctggtgtattgtcatttcatcgtgctcgcaccacggtcaacccgctacgtccggagagcgcctccgctctggtcgatggtggcatctaccagtacacccgcaacccaatgtatctgggctttgccaccgccctggtggcttggtcgctgctgctggcctcgccactcacactgctcggtgtggtcgtcttcgtgctgtacatgaaccgcttccagattgttcccgaggaacgggcactaacgatgctgttcggtgtggatttcgcccgttactgctcgcaggtgaggcgctggctctaa

SEQ ID NO: 349376 - DNA, 504 bp, Pseudomonas aeruginosa
atgaaagcatccaaactcgccgccctcgctttggcggctgtacttttcccagccttagcttttgcgcagcaggacgctaacgccgccaagccgactcagcagtctatgagcatcgagcaatttgaccaggagatggcgaaggcgcaggaaaacctgaagaacatgcaggagcagatgagcctaatccagaaggcggccgatcctgcgcagcgccagaaattgatgcaacagcaccaagtcatgatgcagcatggaatgcaaatgatgaacgggatgtggggcgacggaatgatggattgctgcggaggcggcaagatgggtgggcaaatgatggggggcggccacatgatgggctggggccaaatgggcagccactactcccagatgtcgcctgaacagatgaggcaacatcaatacatgatggacagatacatgggtatgcaacagatgatgatggatcagatgatgcagcatcagcagcacatgggcactccgcctcgctaa

SEQ ID NO: 349377 - DNA, 2613 bp, Pseudomonas aeruginosa
gtgacgatcattcaggaaattcacgcatggtctaaggggctgcctgcttggcagcaagatgcgatcgctcggctatatcaagatcgtacgcttggtgcggctgacttggatgatctctacgcgttggccaaggccgaagtggggatcgctgatccagatgaccggaagcccagggtgctcgaagatgctcagatagctccgccggccgatccaacccgagttgtacagctagcagcgatcaaggatatccagaatgttaacgccctagcgaacggtggcagcgttccgattgcagtggcaggtctgacggtcatttacggggaaaatggcgctgggaagtcgggctactccagagtatttaagcatgcgtgccgtgcgagagaccggcgtgagcccatactgcctaacgcaaacttggatcccaagactgccggcgttgcccaggcagtgttcgaggctgtaatcgacggtacggctactgaccttgcttggcagtatggaatagcggcgcctgaaccgctttcggacatttccatcttcgacacccactgcgcccgtgcttacatcgataaccatggcgacttcgcttacgccccatacggactggatatcttagaggggttagcaggcgcgtgtaacaagcttaaattgcgtgcaacgcaagaaaagacagcgaatgctccaagtgatgccgcgtacgccgtacttgcgaaagagcagtccgtggtggccactgcgctacagggtatcccgaccaggacaaaacccgagcatatcgatgctttagccacgctcagcgaggcagagcaggatcggctgctcttattgacacaaaccctagctgaagcagatccgaagcaaaaagcccaaacgctgcgtcagaaggcgacgcgtttctcaggattaaaagatcgaatcgcagcagcaattgcgttggtcagcgatgaaaaaatcaaccaactcagagagctaattaaaaagtcgaatgcggccaaagccgcagcagagctagctgctacggagttcaagcagacgccaggtcagcttgttggcacaggtggcgatgagtggaaggccctgtttgaggcggctcgaaatttcgcagggcttagtcatccggatcatgagttcccggctattccagaagacgccgcatgccccctttgccagaaccgacttggggaagaaggctcgtcgcgactagttaagtttgacgccttcattaagcaagctgccgaaaagactgcgaaagaagcccgtgaaactgccgccactgcctacagagcgattcagaacgccgccttggatgtaatgtttcgcgatgctttggttgaggagcttacggaaattgatccggagctctctgcggcatgtacatcaatgcaggagtgcctgcacacccgtcagaaattagtactgcaagccgctgcggctgagatccagtgggaggaggttctggagctgcaggccgatccgcaactgggcttaaagcacattattgaaggcctacaacgccaagccgctgcgctagaggcaacggccgatgagaaggtccgggctgaaatggcgacagagaagcgagagcttgatgcacgagtaaggttggccgaggttaaggacgctgtactggaggcaattgctaagcatgaggcctgtagcaaacttcaggcatgcattgagagtttagacgcacgtgccatctccagaaaatctaccgacctttcgcgcactacggccagccaggaacttgcggacgctctgaacgaagagctcaagcgccttaaggtgcatcaccttcaagtcgtgatgaagcctgagtctcctggaggcaagacccagttcaagctgattttgcaactaccaggagggggcgccccggcagccattcttagcgagggagagcagcgcgctattgccattgcctctttccttgcggagatcaggcttggtaagggacgtggcggaattgtgctggatgatccggtttcatcgttagatcaccgccgtcgttgggaggtagcggaacgtttagctattgagtcgctgactcgacaagtaatcgtcttcacccacgacatctacttcctctgcattctggagcagaaggttgaggagtttggggggactctgactaagaactacattcgtcgaaccgcgcaaggttatggggtgcactcgcacgacctgccatttgacgtggtgggtacaaaagaccgcctgggcagactgcgccaagcgctggttgaagttcgtagagcacagaaagacggggacgacgacgagcatcgtcgcctgacagctgcatgctatggtcgactgcgcctggcttgggagcggtgtatcgaggaagttctgttgaacggagcagtccagcggttcggcgagggtgtatcaacacagcgtctgaagtctgttgttgtgaccgatgaagattaccgagagatcgatatcggcatgagcaagtgctccaagttcgagcatgacgcggcaacggccgtcggaaggctccccactccagaacctgatgaactagcacaggatatcgagagattggcgacatggagagctgctttggaaaagcgcttgaaagatacagccaaagcgagaggctga

SEQ ID NO: 349378 - DNA, 270 bp, Pseudomonas aeruginosa
atgacagggaaaatcatcatgcacaaaaccaaaatgctgctgctctgcagcctgcttacctgcaccagcgcccaggccggcacctatgaatggacgcccggctggggtatgggcgtcagtgaacatctggtggacgacggtaacggcaacgagttgatcatctcctgcccggactacgaggaagatggctatgtccgcgcctacgccagcatcggtggccggcagtacagctccgaagagggcagcggcttcgacgtgaaagaagggtga

SEQ ID NO: 349379 - DNA, 1395 bp, Pseudomonas aeruginosa
atgtatctgcccctgctttttcaccgtttgaagagggtcgacgccaaggcaaagtttgtcttgatcgccttcatccagcgctatggggggcgtggcgcagtgcctgccagtagcctccgccgcgcgaatgatctgggtctgccacagcgagagttagggcgtgagctagctcaactggtacgcgaggggtatctgcttgaagaggctgtgaccggccagcaggctgggcgccccaatcggacctattcaatcagtagccacgtgatggagctcgtgctgaggtcagataaaaggacaacggcccatgtcgatttgatcaagcatgtcatcgaggggcctgatgttcttgctatcaggccgaacgacaatggcgctcaatcaggtccgcgattggtgtggatcgacggcaaggcagtgccgaaaagaagcaaccggctaagcctatccaatcggctacttctagcggtgttgctcgctcattcagatgatttcggcatcgtcagggaccttggcaacgtggatctatgcagtttggttgggcttgaggctacaagcctgaaacagcgaattcgcaagctgattgatctgggattcatccggcggcatgtgcctggtattgctagctcggtattctcgaaaaagctaaagagcatctacttcctaaacctcaaccatccacagttaggtgggggagagagcaatctggtgctgattcaccagtctgacatccgttcgggggacggacgtgatgagtatgtgcgtggaatagtgggtgacattcggggtggggggcaattgggatgccggaccccttctgcggtcattagcctactcacgcatgctccaatggccgtgtttagtcagttggaactcaagctttgcgagtgggcattggagcatttggcttctgggcagatcgatgcccagaatgtttcgacagccctgcatcatgagatcgatggcttcttccgtgcagtcgatgttcctgttcccgcatctccagacgagacactgcgagagaggacgcagcgggtcagcctgatcgaggctgcacacgggagccgaaacgacgtagttaatcacttctgctacctgacacgcttgctagctgatgagtgttgggagcgctatgccgcaggtggaaagatacctttttcatgcgaggacttggtcctcatccccacacacttgccgttggaacgacggtgcttcgtgtttgtcgtgcgaaaaggggcagttggggatttccagcagcattgcgtaatgacggaaagccaaggagaactttcgttgatcggggtcagactcgaaacggaaatcgctccagagttgcgttttgaaagtggcctgcaagtgagggccgcctgcgagcctatcacccagccccaagggtga

SEQ ID NO: 349380 - DNA, 903 bp, Pseudomonas aeruginosa
atggggcgcaagctcacacaaggcatggagtggctaaagccaaacgacccagagcagttacggtgggcagcgacctacttggccgctcgcgggcttcttgaaaagcatgaacatccagccaaccgcccatttggccagcagctaacacatgaggatttggtgagaattggccgccgccttcaggaaaaacgggcgctaattcaggacatgaaagccgcctggcgccagaggcaataccgcgagagcaagaatggccgtaaaacatgctcattcacgctggacgcaacgaccaagacaaagctgaaggaactggcaggaggcggcagcgagtccgcaatcttggaaaaccttatcaacaaggctcacaaggccaagcttcgcatggagcagaagcctggcgggggggcgaagcaaacattacaaatggatcgtcatcagacgcttgaagacattctcgccttgatgaccggaggcacccccgggccggatgactcagatgtgtcgccccaaactctacacgaagcatcaatcgacgcttcccactatctggggagaccaccgctacttgccgaaaccgcaggcagtcctaatggaaagagtgcagagccatctctagggcctgcagcaatacaggccaatgaaaccgctctcaaccagggaggagccaatagcccatttcctgatttaccccatgacagccaagcgccagctgcaacggaagacgagatccggcctgagtatgccgcttcggaagactcaatcccaacgctgaacgatgcccagcctcttactcaaagtgatgcccaactgcccacgatgagagtcaggccaaaaaagagaaaaatgttcatcctgcccagcactcatttaccggaggcgcgggacacagatcaaagcgattaa

SEQ ID NO: 349381 - DNA, 813 bp, Pseudomonas aeruginosa
atgaaatccgatgatgtcagcgctagccaatctgtcgcctcggtgaatccactacagcgtgcgttgatcgagaaaaccggccatgacaatggcttcgagcatgtgctgcccgcgcctggcaatgccgtgacactggcttcggcgcgccaccgaagcagtgcggcagtggtgccgatggccggcggctttgaggtgcgcttccagtcggcctcgcctgcactggtgcaggagttgttgcgcaacttcaagctctgctcgggtggcgatggcatgttccgcgtgcccaccctagccgatctggcggcattgctgcgccgtgcagccagcctgtcacaggcactgccgaatcaggcggtgcgggattaccacacagccgtcgcgcaggtactggcggacttgcctgccgaaaaccggtgcacagaggtcgaacgtctggtgcgccagcgcgtggggcaagatcgttatcgcgatgccttgctggcctactggggcggtgcctgtgcggtgaccggcgtcaccgtgactgagacgcttcgcgccagtcatgccaagccctgggcggaatgcacagacgataccgaacggctggatgccttcaatggctttctgctagtggccaacctcgatgcgctgtttgaccgttttttaattagctttgacggtaccggacgtctgctgatcagcgtcggccttgctcagggcgatttggataagcttggaattcatcagggaatggctctgcgctggttggctgtggagcaccagtattacttgcgatggcatcgagagcgcttttttctgagaggtttatga

SEQ ID NO: 349382 - DNA, 705 bp, Pseudomonas aeruginosa
atgcctgacttcttccgcttccccgccacccctcacctcgcctggctggccaaggacggcatgccgcgcgatgacaaggtgttttctaccaccgaggcacaggcgctgctcgctggcaatgtggtggtagaggaaaagctcgacggagccaacctgggcctgtcgctggcatctgatggcacgttgcgcgctcagaaccgtggccagtatctggacggcccccatgccgggcagttcgctcgtttacccgcctggctaacccagcacgaaatcggcttacgcaccgtacttcgaccggagctgatactgttcggcgaatggtgtgccgcacgccattctctggactacggcacgctgccggactggtttctgctgttcgacgtgtacgaccgcagcaccggacgattctggagtaccgtccgacgcgatgcattggcagcagaagcagggctggccaccgtgccgcgtgtgctgacaggccatgcgaccctggaatcgctgaaacaactggtgctggatgtgccgagccgctatcgcgccggattgccgttggaaggcgtggtggtgcggcgtgaatcgactgactggtgtgagactcgcgccaagctggtgcgccccgacttcacccaggccatcgatactcattggcgcaagcgcgccatagagtggaaccgggtggattggatggcagtgggcaagaaatga

SEQ ID NO: 349383 - DNA, 1398 bp, Pseudomonas aeruginosa
atgctgacacacctgcacatcaaaaacttcaaagcttggaaagacacaggcccaatccctctcgctccgctgactgtgatcttcggtgccaacagtgcaggcaaaagcagcctcggtcatctactgctgacactgcaacaaacagcacgatcaacagatcgcaaacgctcattgcatttgggcgatgcatcgtccttgattgacctggggactttcgctgactgtctgcacgggcatgacttgcagcagatgttgtccttcgagttgggttggagcctgcccaaacccctggaagtgcttgatcccttatcgccggatagccgctatcgcggcgatcacatgcagttggatgtggcgttgaaggcaaataaggcccagcagcctgaagtgcaagcactgcgctatgacctgtcatccggtagtgacgaagcactggatgtatcgctgactcgcgatgaaaaacggaagctccacctcagctctagcacttataccttcaagatggcggatggccgcaaatggccactggaagagcccgaaaagttctatcgactatccgacatcagcatggctcgctacaagaacgcaggttttctagcagattttgcattggcaactgaagccatgctggagcgtatctcttacctcggccctttgcgcgatcatccacaacgaatctatcaatggtctggagacacgccgacaagcgtaggacaaaggggcgagtatgcagtagccgccattcttgccgcgcagggagaaggacgaaagatcaacaggaaagccggctcccacaccaaaggctttgccgagttcattgccacatggctgaaagacctgggggtaattcataacttcgcggtgcgcccggtcgcggcaggacgcaaggaatatgaagttttagttaaaacccattcaaaagcgcccgaggtgaagatcacggatgtcggctttggagtctcacagattcttccggcactcgtacaagctttttattgcccgccgcactctaccgtctggatggaacagcccgaaattcacctgcatccacaagttcaggcagagttggctgacgtattcatctcagctactcaagcacgtgagaatggaaaggcgcggaatgtacagctgatcgtggaaagccattccgagcacttcctgaatcgcctgcagcgccgtgtggccgagggtatgatcccgtctgatgacgtggcagtgtacttctgtcgtcgcgcaggctcagccaccgaactggaaccgctgcgactcaatatgtttggtgaaatcgagaactggccggagaatttctttggcgatgagatggccgatattgccgggcgcactctggctgccatgcagcgcaaaaaagaaatcaatgaacaaggtggcacgcaatga

SEQ ID NO: 349384 - DNA, 288 bp, Pseudomonas aeruginosa
atgagcaagttcaatcccggcgacttggccatgatcgttggctgcatggcgaacccagaagacatcgggaaggttgttgagctctaccagtacgtgctgagaaacgaggctttcatagtctctggccattacgggctatctggcgacgaaggctggattgtcactgccgacaacgtaatcgatacgacgggagttcagggctttgtccttgtcaacgagcgccaccttatgccgctgaagggagacttccagcccgagcagcagaaggcgaaggaggaggccgtatga

SEQ ID NO: 349385 - DNA, 213 bp, Pseudomonas aeruginosa
atgatctgctgcaagaccctgtcgttcagtctcgattgcccgcaattcctgctgataggcgtcatgccgttgcttggcgatgccgatcaggtttggatgctcaagcagaccatcctgccggaacggagtagcggcggagacattgaggcggcgagtcaattggcggcgcacgtgtttcagcaagcgagcgggctcctcacgcagtgcttgtag

SEQ ID NO: 349386 - DNA, 4467 bp, Pseudomonas aeruginosa
atgaaacgcacccgcaaaacccaggccacgctgaacctgcctaccctcaagctcgaaggcggactgttcctgcccgaccaactggaaaaggccgcccatggccgcgccagcgcacagtttgaggtcgactatggcacccccaagggcgtcaagctcaaggacgaatacagccgcgccttccagatcgcctgcgcccagtggcagcactttgccgcgcagatggaacgcgccgacctcgatgccatgcagctcaccaccgccttcattgacgaactgctgcgtcacgccttcggctacacctccctgcaacctgcgcaagcgcagccggtgggcgaactgcactacccggttagccttatggccggccacttccccgtgctggtcgccccgcacaccctgggactggacgaggccgatgcacggtttgccgtgcagggcggcggcagccgcaagaaggccccgtttcaggccatgcaggaattgctcaacgccagcgaaccgttgcaatggggcatcgtcagcaacggcaaacaactgcgcctgctacgcgatgccgcctcgctcactcgccccagctttctcgaagtcgatctggctgacctgctgagtggccagcgctatgccgaattcgccaacgtttggcgcttactgcacgccagtcgcgcgccgcagttactccccccacccactgggagaggggccgggggtgagggcacctgcatctgggaacaatggcgtaacgaaggccagcaggaaggcacccgcgtgcgcgatggcctgcgcaatggcgtcgaacaagccctgttgaccttcggcacgggcttcctgcaacaccccgccaaccagtccctgcgcaccgcgctggacaatggcacgctgagcaaggacgcgtacttccagcaattgttgcgcctgatctaccggcttatcttcgtcttcaccgtggaagagcgtggcgtgctgcatccgcaggacgatagtccggatgccctggctgcccgccgctcctatgccgaaggctacgccctggcccgcctgcgcgagctctgcctcaagcgccgtgcccgcacccggcatgacgatcaatggcaagccatacgcatcgtctttcgcggcctggcccagggcgagccacgcctggctctgcctgcattgggcggcttgtttgcccccgagcaatgccccgacctggatatcgccagcctagataacgctcacctgctcgccgccctgcaacacctgcgctgggcggtggtggcccagggaaaaggcagcagcctgaccccggtagactaccgcaacatggggccggaagagctgggcagcgtctacgaaagcctgctggagctggtgcccgaagttgatttaccagcacgcacttttgccttctttgagccggaacaaggcgccgctaaaggcaacgaccggaagaaaagtggcagctactacacccccgacagcctggtgcaggagctgatcaagagcgcgctggagccggtcatcgaacagcgtctagccgccaacccgggaaatcccaccgcagcactgctggccatccgcgtcattgaccctgcctgcggcagcggccatttcctgctagccgccgcccgccgactagcggaaaaactggctcagttgcgcagcctcgaaggcggacaggaaggcgccatccagccacaggactaccgccatgccttgcgcgaagtggtagcccgctgcatctacggcgtggaccgcaaccccatggccatcgagctagcgcgtatggctctgtggctggaaggctacgaggaaggccgaccgctgggttttctcgaccaccatctgcaagtcggcgacgccctgctgggcctgactgatctgcaagtgctggaacaaggcatcgccaaagatgccttcaagcccctcagcggcgacgacaaggacgtgtgcaaggcattggccaaaaccaatgcggtcgctctcaaagacttggagaaaaagcgcaccgcgcacgctttcggccagaccgagctcgtgcaacgacatgacaacggtcttgccgcattgcgcgcgctggaggctttgcccgaagagagtactgaacagatcgccaccaaagcgcaagcctacgagcgttacttgcgcagcgcccgcaccggccggcttgcccaggccgccgacctgatgcttggcgcctacctgctgcccaaaaccgaaggcgacacccaggtaatccccactacggccaccctctacctgatcctgcaaggcggcgaactgcttgccaaccagcagcccgcactggcagccgcccggcaagcctgcgaagaagcccgcgtgttccattggccgctggcctttccacaagtgttcgcgcaaggcggtttcgactgcgtgctgggcaacccgccgtgggaacgcatcaagctgcaagaggaagaattcttcgccacccgtcaccgtgatgtggcggaagcccgaaacaaggccgaacgcgcccaacgcatccagtggctaagcgaaggcatgctggcgcgccacctctatcccgaactggcccatgaaacgcacgaggacgcagccgagcaacgcctgtatagggaattcatcagcgcccgtcgcacggcggaagccgccagccttttcgctcacgtcaaaggcgacgacggtggccgctatccgcttaccggcgtgggcgatgtgaacacctacgcgctatttgccgaaactatcctgcaaattcatgccgacagcggccgcgctgggtttatcgtgcccaccggcatcgccacggacgacagcaccaaggcttatttcggccatatcacccagaaccggcggctggttagcctgtacgacatcgagaaccgcgaggcggtattcccctccgtgcatcgcagctacaagttctgcctgctgactctgggggcggcagaacaggccgaattcgtctgcttcgccagccaagtcagccagcttgccgacccgcgccgctgcttcactctcacgcccgacgaattccgccttatcaatcctaatacactcacctgcccggtatttcgcagcgagcgtgatgcggaactgaccaagaagctctaccgcgccgcaccggtgctgataaatgagagccaagagggtggaaacccctggcgattgtccttccatacaagactttttcatatggccgaggacagccatctgtttcgtgatcgagcagggccagatgttgttccgctctatgaagcaaagatgatccatcagtttgatcaccggtgggctagctacgtagcgggcggtgatagtcgcgaattaaccgaaaccgagaaggaggattcggacgtttcaattaatccgcgatactgggtggaggctggagagcttgattctcgcttggacaacatgaaatggcgaaatggatggctccttggatggcgcgatatttgtagagcaacggactatagaacgttgatttcaagcgtcattcccagagcggccgttggacacaagtacttgttaatgtttccgatggcggctcccgaaagggtggccgcgctactcgcaaacattaacagtcttacttgcgatttcgttgttcggcaaaaagtcggcggtacatcgttgacactatttacgatcaggcagataccagtgttctcgcccaacaaatacaatgatggcgacctcgccttcatcgtcccacgagtgttggaactgacttataccgcccacgatctagccggctgggcgcaggatttgggctacaacgctccacccttcgccttcgaccccgaccgccgtgccatcctgcgcgccgaactcgatgcctattacgccaaactctatggccttacccgcgacgaactgcgctacatcctcgaccccgccgacatgctgggcgaagactaccccagtgaaaccttccgcgtgctcaagaacaaggagctgaaggagttcggcgaatatcgcacccaacggctggtgctagaggcgtgggatgcgttggaagaacagccgccagtcaccattcccgccgtcaaattggcgcgacgtaccgcaccgctgccaatctatgccaaaggtggcacgcctgcttccgaggcagaggattggctagctggcctgatatgcgacgtactcgtgcaagccggagcctgtgacgacaatcgcttgcgacgcattcttggggcgcggctgccagcaggcacccagcatgcagagtttttgcatgattggctggcaccgctaaacacggaacgctggacgcacatttgcagttggcttcgcgccttgctgggcgttgccgtgaccacctccctgtccattcgcaatcctgaagcactggccgaaatcattggcgaccatcgcaccgaatcgttggctcatgccttgatcgaagctcgtagccaacatcaagccaccctggcagaagcactggcaggtgtagcatcggacgtgcagcccgacgaactacgcaaacggagatag

SEQ ID NO: 349387 - DNA, 222 bp, Pseudomonas aeruginosa
atgatgaagcgactagacgactttgaaaccagggagtccgttagcgatgcgccaagctttgaccgtttggagaataccttcggggctgtcatctgccccaggctcggggtagtagagcagatcggacccagccgggtgctctgcgacagttacaaagtgctcaagcaagctgtcgcgctcaccttctgtccctgcactctcaatcgctcgaatcaactctag

SEQ ID NO: 349388 - DNA, 1266 bp, Pseudomonas aeruginosa
atgagcggctatgtgcccaacaacagaaacgagcggcctgcaccaaagcctgaagcttataacggcgacttcgaccgacaaccagcccgtcccctagtagcggacgcgcagccagaaacgccgcgccaaaagcttcagcagtctggctgtgtgtttgccaaatcctgcagcctgcctgacggcgttatcgatcatcggcaacccggcaacttcatccctctggagtcattgaaaacctacggggaatgggcggtgctggctaccgggagcgccattgcggcaaccgggacgccgctgcagttggtgggtggttcttcatccggcactgccttggccacgcgcctgggcggcagtatcgcattgggcctggcagagggcactgcaacggctggcgtaatggccggtactgcgctgggcagcattgccatgcttttgcccaacaacagcctgtccccagacagcgcctactacaccagtgaacagtatgcagcgctcgacatgggacgaacccgcgcgcgcctgaacatcaagcaccttcccgacggttcggtcgatgtctatggtttttacactggcggcaaagccagctgggagaccgttccggttatcgcggcttttccgcgcggcgaccagttcgtcgccgatataggccagggtgtcgaactcatctggacgcccgctgccgacccgaacgaagtgctaggtattccggcgttagagggagcgcctgcgctgccagccgtgtgggtatacccaccgaccgagaagtccgaccagatcctggtcaaccccgtgcatccgcccgagtaccaggatgcgatcatctggttccccagcaccgatattcagccgatctacatcgcgctgagcctgcgcgacgaaccaggcgtagtgacagggcaagggcaggaagtaacaggcatctggttggctgatgctggccgagagttgggggcgccggttccctcgcaaatcgccgaccaattgcgagggaggcggttcaacagcttcgatgacttcaggcgggcattttggactgccgtcggaagtgatccggttttgagcgggcagtttaacgagcgaaatgcgaaagacatggcaaagggcttttctccagttgctccttccactgaacatgcggggaaaaggcgcgcctatgagcttcatcacatcgaagcgatatccgaggggggcgccgtgtacgatgttgacaacttaggcgttacgactccaaaacatcatattggacttcataagaaggggtaa

SEQ ID NO: 349389 - DNA, 498 bp, Pseudomonas aeruginosa
atgtatgtcattttctgggggcatggtgactgggggccggaagacggctataccttcattccacaaggcagccagctgtacttctttgctcgccacaaggaagagatcaacactgaacgaatggacagcatcctgtacgcggtcaaggaagggattgatcggggcgtggagaacatcatcaagaacgatcatttcgaagaccggagcctgcgccgtatcaagcccgaaggcgcacgcatacggaactatcggctgctacctccgtcgggcggtgtctacacgcctgacccgcttgagccaacagtcgccgcagtctgccagatcattaccacggccaagcccgaaggcgagcggcttgaggcgctctttaagcaatatggcaccggccccgccacctatctctggctaccttgcagagctgtcagaggcgtggaggacaatttgtttgttgatggcgtcaactacaagcgcgaggctgattatttcaaggggagttga

SEQ ID NO: 349390 - DNA, 459 bp, Pseudomonas aeruginosa
atggtggatgctgagtatgccgagccgttcgatggcacaagaactgttccggtcgagcctccttaccagaaggcgtatggctttgatccggacgaactggccgagtatctggacgggctagactcggatctttttgtcgccgagctaagcgggtggcccgttggctacgtggctgtttcccatggctggaatcacttcgctgtcattgaggacatagcagtcgatgctcaccacagaggaagcggcattgcccgccgcctaatggatgccgccgttggctgggcacgccgagaaaatcttgcaggtgtgcggctcgagacgcagtcgaacaatgtcaccgcatgccgcttctacaaccgctacggattcaagctgggcggttatgaccgctacctgtacagcgggatacaacccgacaggcaggaggtcgcaatgttctggtatctgctgagtccgtga

SEQ ID NO: 349391 - DNA, 498 bp, Pseudomonas aeruginosa
gtgaaactcccccggcctacttacccttacatccgcacctatgagggttggttgtacttggcggtggtactggatctgttttcgcgccaagtgattggctggtcgatgaagccacggatgtgcagcgacctggccattgatgccctgttgatggcggtgtggcggcgaaagcccaagcaggaagtgatgatccactccgaccagggcagccagttcagcagctcggactggcagagtttcctcaaggccaacaacctgatcagcagcatgagtcgacgcggcaactgccacgacaacgcggtcgcggaaagctttttccagttgctgaagcgggaacgcatccgacggaaaacctacggcacccgcgaagaagcccgcagtgatgtgttcgattacatcgagatgttttataaccccaagcgccggcacagcagcgctatgcagctatcgccagtggagtttgaaaagcgctatttccagagcttggagagtgtctag

SEQ ID NO: 349392 - DNA, 366 bp, Pseudomonas aeruginosa
atggaatttcgtcacctcggtaacgggcagacgtttcctcccatagcacccaacggccggatttacgccgtacctgttacaaaggaaaaccaagtagaaattttttgcctgacatctggaggaattgttggatgcggtctgacggccaactgggctgatatcactggcgcctactacgacgatgagtcttgggaaatcatccttcgcaattacatcggcaggggaatgcgcttccggcggggagtgccctgcggaatcgtcgaagacggccacaaaactctcaaaaccaatatccaagggttcgcaattccagtttgcgtaatgaaccgcatcgcatttgagcagaaaaagctgcacccgacgtga

SEQ ID NO: 349393 - DNA, 345 bp, Pseudomonas aeruginosa
gtgagcaaagtcgaatgccagtgctgtaagaggatgatggttccgaaggtgatcaccagcgctccgctttacctgagcggagttcccctagggggtggtgatcctgagtcatctgtatgccccttctgtctgtcgccgaagtggatgctcaccgagcgccaggctatggccgcaggtagggccaacgctgagttctacggcatcatggctctcgccctagtaaacatcgttgccttcgtccgtttcggcgaactggcgggcgggatagcgctcgcggtgtcagtcgcaaccgttttcatgcgcgacaggatgattcgagccctccgccgtcgccagggacgttaa

SEQ ID NO: 349394 - DNA, 1791 bp, Pseudomonas aeruginosa
ttggcttatttcattcgtggcaagaatgaaagtatccatgatgatcgcggtacaccagtggtgacggggtcgcttgttaaaagtcggcgcgcgttgattgcaaaactggtggagtcctttgttggacggcgtgattcgtcagtcctgaaccgctttgtgcatgccgaattctttgttgactggctaaatggcaatggctacagggaaatattttctagtgcattagatgctcagaaagcatatcgagaatttacggcacatctcaatcatcaagtagcccatcaattgataaagccgcttactgctcgtgcttatcaatggggtgcagtaaagattatcgagttgctgtatccagagaatagtcaccaaatccttgtgggtgcggtcaagatagttgcacgaggaggctccgccgcagccagcgctacccatgtcgagttgtatcgggatgtttgctttgctattgcgcggcaatgtgccaattttgttctcaacaaaaattcatatcccttcgttgtgaatatcagggactacgaagttgttgtgtttccatcaaatgttggtgcggtcggcccgtttaaggagtgcccgtcttcatacagtgcagctgagcggcgtattgcgacggtggaggagtacctagcaggctacgataaggttggccggaagcgctctggaaaaagtttagcagcaagagatctaaaagatgcacagaattctttggatgcggctaacggaaacgaacgccactggcatcggcttgaagtggcaggcttggccgcgaaagcttatgcgtgtcttttcctgatgattacaggggctacgccgactgaatttgcgcagtttagctatgctgatgcacttgaagttgaaaagtcaccgatcaaaaaggagttgtctgctgtaaagtttcgggctggtgggaaatccaccctttacaatatagggcgtgatacggggttgaccttgctgaaagagtatctgaagctccgcgagtggattttgaatggcgcgtcgcatgagcggttattcttcgcgatgccttcagctgctaagcggaccgtatctgattccagcttttccgaaattaacgtaaccaatatggttacgaagttctataggtctaccagtggtgcatttctcgatccgaatgtgccgagactatcgccccgccaaatgcgcaaacacaagagcatcgggatgcatacagccggcgttgcgcttggcacggtagcggcctcgctgaatcacagtgagcagatgaacatttcgacctatgcggaggcgacgcccgagcagatggaggccgagttaggcacgttctggcaggccatgcatcatgctgccaacatcgtgcgcgagcgtagcgagaaagcgacaggagatgagatcgcaacagcggcggggcattgcgatgggttcaatcagccgatccctgtgcgcgacctggaagccattgctatcgagccgaactgtcgcacgcaatatggctgcttgtactgcgaacactatttattacacagcgatgaagaagactttcacaaacttcttagcttgcagtatgtgataaatgccgtgcgtagagtggctccagatgccgcacatgctgaagccttatataaggatttgtcccttcgagtcgagttcatacttggcgcacttggcgagcgttctgattcggtaaaacagacggtcgagacagtgaaggccagggtgttcgagtatggtgagttgacgccgttttgggaaagccgcttgagccactatgaaaaaatgggggtggtattttga

SEQ ID NO: 349395 - DNA, 816 bp, Pseudomonas aeruginosa
atgacgccgaacccccgccattgggcccgcgagctgtggcagcgctcccgcgatcgcggcttgcagacccacatcgatgtattggtcgatgccaccgggctggacgactatcccttgctcgccgagcatgcgcggcaaagcgatcctccagcgctgttcaaattgctggagcaaaccccggaggccgccctggccgacgagggcccgctgctgctgcgcctggaagacggccacgcggcctggctggacgaactgctcgaacgcatcgactgccgccgccacctgatgctcctgttcagcccctggccgttgccgcgcctgggcgagcacctgcgcagctgcacccaggccgagtggaaccagggccgttccagcggcgtactgcgtttctacgagccgggcctgttcatggccgtcagcgacatgctcgatccccggcagagccgttacctgcatgccccggtttccagctggcactggctggaccgcgacggccggccgagggcgctggccggtcattaccaggcccacgagacgccgccgctgcaagcggccctccgcctggaagcgcaccaggtcgctgccttgcgcgcctggagcgaggccgaagcctaccgccgcgaatacttcgtgctgccccgcgagcatggcctgggcagccaggaaagcctgctccagcatctggtccaggcgcacctggccgccgaccgccagggcttgcaggacttcgaccagcgcgatgccttcgtcgcccaatggctacgcgaacagacccccggccccggcttttccccggcgggaacgagtcgcgcatga

SEQ ID NO: 349396 - DNA, 264 bp, Pseudomonas aeruginosa
gtgctggcaggcgttcatcacgggctgaccaacaaggtcgagccgggcgcgccgatcgaaggcaactcctacgagcagatggagccgagcctgccgaacaacctgcgcgacgccctgcgagagctggacgaaagcgagatcatggcgaagtacatcgacccgaagtacatcgacatcttcgtcgcctgtaaggaaagcgagctggaggagttcgagcactcgatctccgacctcgagtacaactggtacctgcataccgtctga

SEQ ID NO: 349397 - DNA, 342 bp, Pseudomonas aeruginosa; identical to SEQ ID NO: 324664

SEQ ID NO: 349398 - DNA, 291 bp, Pseudomonas aeruginosa
gtggcgctgcgtagccaggtcaaccagttgttcagccagagtcggggctcggccggcagccgcagcatcctgggcatgctgcgcgaagagggcgtgaccatcggccgtttccgagtgcgtaggttgatgcgtgagctgggcctggtcagcaagcaaccgggctcgcacgcctacaaacaggccacggttgagcggccggatatcccgaatcggctgaaccgcgaattcgcgaccgagcatcccaatcaggtgtggtgtggcgacatcagtgtgccgcagcaagcggcgtaa

SEQ ID NO: 349399 - DNA, 189 bp, Pseudomonas aeruginosa
atgcgtaaccacaaagggcaattcgcaagcgagaaacaagccatggcagccgacctggaaggcttcatcgctgattggaagcactgggcgctcgccgcctttcgccgcggcgaccgcgaggatggcatgcgctgcaagcgcgaactcgacgcatgccgtaaacggcttgccgaactcatcgcctgctaa

SEQ ID NO: 349400 - DNA, 807 bp, Pseudomonas aeruginosa
gtggatatcgcattgcacggcggcgcctggcacgagtcactgggaaagttgctcgaagcgctggaccggccgttcttctggcggatcctggcgcagaccctcggccagttcgcccccgtcgacaactgggcggccctgatattcagcgattccagtcccttgattctttccttcatggaggaggagagagaagaagtcgagccggacccgctgatcagtcgatatataaccggactttatctgcaagatcctttctaccaggtatccaggaactgtcggcgcggcgggctttttcatcttgcggatatcgtctccgaagatttcgaaacgaccgaatattacaatacgtactttgcgcattatgtggtgacggacgaagttcaatataacgtcccgctggatggtgaaagaaccctatgcctgtcgttgggcagcgagagccgcttcggtgccgagcagatcgcgctgttcgagctgcttcgcccgtgggtcatcgcgctgatgaaaaaacgcatccacttcgaggatgcggtcagggaggaggcgaaaccgatcgcagcggcggaggtggaagtccagccctggagagggttgatatcgccgctgactgcgcgggagtcggatgtcatccggctgatgctggatggatactcgaacaaggaaatagcggatcggctgacgctgtcgatcgccactatcaaggtgcatcgccggcacatctacgcgaagctgaacgtgaagtcccactccgagatattcgcgctgttgatcaacccgcccgcgccgcggctcgccgacgcacgctag

SEQ ID NO: 349401 - DNA, 1089 bp, Pseudomonas aeruginosa
atgcgcggcgccgacaccttcaccgaaggcctgttcactctcaagaagctggacgacttcgtgccagccgatcacccgctgcgggtcatccgcacgatggtcaacaaggcactggccgagatgggcgatctgttcgcccagatgtacgaagaggacgtcaagggcggccgccccagcatcgcgccagagaagctgcttcgggccatgctggtgcaggtgctgtactcgatccgctcggagcgccagctcatggagcagacgcaatacaacctgctgtttcgctggttcattggcctgtcgatggacgactcggtgtgggtgcccacggtgttcaccaagaaccgcgagcgtctgatcgaacacgatgccgtggtggccttcttcaacgccgtgctcaagcaggctgacaagaagcggtggctgtccaaggagcacttcagcgtggatggcaccctgattcaagcgtgggcgggccacaagagcttcgtgcgcaaagacggcaaggacgacgacgatggcggcgacttccgaggcaagtcacgcagcaacgagacgcacgagtccagcaccgatcccgacagcaggctgtttcgcaaaggcaagacggccagcgagttgcgcttcatgggccacacgctgatggagaaccgcaatggcttgatcgtcaacgccatggtcacgcaacccgatggtcatgccgagcgcgaagcggccaaggccatggtggccgatgtgcgccaggccaaccccgaaggggagatcaccctgggcgccgacaagggctacgacgcagccgagttcatcaaggcgctgcaagacatgaaggtcacgccgcatgtggcgcagaacaaatccaaccgcagctcagcggtacccgatgaggtcgcggccaccgagggctacggcatctcgatgcaaaagcgcaagctcatcgagcagggctttggctgggccaagctcattggcccgatccgccaggtgatggtgcgcggtatcaagaaggttgatcagatcttcatgatggccatggccgcctacaacctcgtgcgcatgcgcaccttgggacaagtccgcctggaggtcgcgtga

SEQ ID NO: 349402 - DNA, 1446 bp, Pseudomonas aeruginosa
atggatgttttggatattgctacgtttggcgaagttgcagcagaagatgataacgcaatactagattattttgttgaaactgcctctgtgaatcaggtggttgagggtaacaaatttttaatccttggtcgaaaaggcgctggaaagactgcactatttagatatttcaatgaagcaccatcttctgactctgtttctttagccctgaatttacggggctatccatggtcgctgcatgctaaacgtgctgatggtgattcggcttctgctgaacaatatgaggcgagttggcgatttttaatagctactgagtttgctcagcttgttgtttcacggatgactagtacatcaaagtggacggagcaggctaaaagtctaattgagttttttactgttaactatggtggggttaatgttaagctggatgatgttctgcgccctagggctcttcggttgtctaaagcttcgtttgaacctacggttttaggttgtaaacttggttctattgcacttgagcgccaaaatagtgctggtttttctaaagaattaaatgctcttactgatttaatttttgaagctgcattctatatttttaaaagagaaaggtttaatagggttcttcttcattttgatgagcttgaccaaggtatggttgagtttgaccaacaacgacagttgttggttattgggctgattttagcttgtcggaaggttaattctgattctgagaagtctggtgttaagcttaaatcaatagtctatctgcgctcagatatgtgggatgatcttatattttcagacaagaataaaattacaagaacgaataagtgggaaattgattggacgaatcaggatcttaataagcttgtagatttgcgcattaggaagtatatccctaatgggagttggggttccgtgtgcgacgataaactgatgcgggggcggcaggttaagtttgctcatattgtagcgcgtacttttaagcgtccgcgtgatgttattagtttcttaaattccgttttggagcgtgttcgggaacgggctcctgtcgcagatggggataggttgataactaataaagatgtggttgcttctcgtccatattactctcggatattaaagtctgagttggatgacgaaattaagcctcattggaaatcatgggatgagtgtctgagggtcatttctggtattggtcttgttagttttactaaagatacatttgttgaaagatatgaaaaaaccaagttggtcgagttttattcggctgatgaggctcttaagtttctgtatgagttctcagttattggctattatcgtgtgcgatcgggctatggcgggtctgaatatgtatttaaatatgaggagggcgcgggctgggatgagggggctattatgtataaggttcatttgggattgaaagagtttgctggtttgaccgagtaa

SEQ ID NO: 349403 - DNA, 1068 bp, Pseudomonas aeruginosa
atgctttgtacaatgttagtgccaactgagtataggtttgccattccagacggtggttgctttatattttattatcaagaaaaactagtggcactagagattgagcaaagaccatcagcaaaaataatctcttataagtcgactgacatttcatggatgagccaaggtaatcagcacaagattactgccgtgatcaatggggaagaggaggagatagcgagaatatacagcaatagtgaaaaccagataaatggatactgtcagccaagcacttataccgtattcagggtttcatttgaaataaaagatgtttcttatcttaatcctggtgagaaattagaaggcttaaagttatgggtcggggaatgtataaataaattcatagatgaatacttatacatatctcatgataataacttagaaagaatcaggatgtcaaaagtccctttgattagcatttatatatcgaaaaactacattctaactgaggataaaatttattcagatccaaaacctcacactgctgttctgaattgggagcctatacaaggttcagggcacctaagacctatgctcacaatggattcacttggcaccttgcagtcgaggcttattgagagtgaaattccccctcatattcaatttctttttgaagcaaagaggcaggcgttcggatattctcagttcgatttatcaatagtatcatctcaaacggccgtagaggttttcatatcatcccaactacgaaggtactgcaagagcagggaaatagatagattggaagtaatcatacgaaagcagaaaaaagctatcagtattgatgattttcttctgcaggggataagtaagataatctcaaagatttccgatatttcaaactgtaaaattagagaaactcccgaatatatcaattggaatgagaaggtctaccagctcagaaatagcattgtgcatgcagggaaaagagggtttagtagcgatcaggctaggctggctttcacttattcctgtgaatttatcgaggcaatagaaaaattaatcccttgcgggtatgatttcaaaaaataa

SEQ ID NO: 349404 - DNA, 264 bp, Pseudomonas aeruginosa; identical to SEQ ID NO: 336017

SEQ ID NO: 349405 - DNA, 324 bp, Pseudomonas aeruginosa
atgagcattgagcgaaaggacacttcgcggggctttggccggtaccagttcacggaccgctatggcgttccctgctcgctgcagaagagcagcctcgcgctcgaggatgccatctggttcggcgtggatgatgcgcagcctcaggtgatggctcgcgaagctgggctgataggcgtgcgcactcgggagtccactgggtgggtgccattcccgattcctgagcaggttttgctgcatacccgcatgcatttggcccgggagcaggttcaggagttgctgccgatcctgcaacatttcgccgagactggggagcttccggaatga

SEQ ID NO: 349406 - DNA, 996 bp, Pseudomonas aeruginosa
atggcttgcgaaaaacagaaatatgtcggccgggatgtggtcgtcgaaatcgcgatgttgtgtggtgaccaactcccagttgaaaccgattgggagcggtttggttccatgcgtaccaaagagtggaaccttgcttgggacacggctgatgccacggattccgacaatatcggatacctgcgcgagaacctggctacgttccagactctagaagtgtctggggacggtgttctgaaaaacagcggggccggcgcagaaatgctgaaaagagtgcaaaagcatgtcgcaaatccgatcgcgactggtgggcagcctaccgcgtggtttcgatacacgttcccggacctgactttcaccagctttatgctgatcaccagcttcagtcgtagcgcgccgtatgatgatgttgccacctacagcttcgaggcttcggcgaccgcttcggacttcggcctgatcgtcgaggacacccctgacgcagatgctccggacccgaccagcattcaggtggtgccggagaccctctcgcttaccgttggcgaaggcttcaacttcgagggcgtcgttctgcctgttggcgctccgcaaggcctgcgctggacttccagtgcgccgaccgtggctgcggtgaacgcggttaccggcgaggtgagcgcgctgtcggccggcgccgccacgatcaccgctgcttccagcgtcgccccgggcgtcaccgataccgcaactgtcacggttgtcccgctggtgcagggcatcactgtctcgccgacctccgtctcgatcgccgaaggcgccacccagcaactgaccgccgctgtatccccgaccggtgcggctcctggcctggtctacgaaagcgcggcgccggccattgccaccgtgaactcgagcggcctggttaccggcgttgatgtgggtaccaccacggtgaaaatcaccagtgcggcacgtccctcggtcagcgtgaccgttccggtaaccatcactgcaccgtga

SEQ ID NO: 349407 - DNA, 2067 bp, Pseudomonas aeruginosa
atgcaatccgaactaaaatcactatcaaaaatattctctgaaacaatatttagaataccagactatcaacgcggatactcatgggaggaaaaacacctaaaagatttctggaacgatatagagcaactaccagagaatagaaatcactacacgggcgttctaactcttgaatctgtctcaaaatccagctatgaaaactgggaggatgacaaatggattattgagtcaaagaaatacaccccactttacattgtagatggccaacaacgcatcaccactgcaattattttacttcaatgcattctagaaagaaccgaagacagcgaaagaataaattacactgaaaaaagcgaaataaagaaaaaatatatattcgaatcaaaagacggcggaatatctagatcttatctattcggatatgaaaaagacaacccaagctatgaatacctcaagcaagaaatatttgaagaaccttcagtagtacactcaataaaagaagagaccatatacacaaaaaatctctccaatgcaaaagaatacctaaccaaaaaggtgaaagaactaaccgcaaatgaggttgagaaagtctttacaaagctaactcaacatcttcactttaatatattttatatagaaaaagacctagacgtctttgttacctttgagacaatgaacaatagagggaagcctttatcacacttagaactcctgaaaaataggctaatatacctctccacaaaattcgaagatgacactagggagagtatatacttaagaaaagcgataaatgaaagctggaaatcaatctatcattacctaggaaaaattgaacgacccggttttaccgacgaccaatacttgaaagcccattacgccttgtacttcggagcacttaccaaagaaaaaaaagacgaagaagagttcaaacgaatagcaagaaatctaaacaaccatagcacatactatggagacaccctgctagaccaaatattctcccccaaacgagtaaatgcaacagcttctgaagaaaagctaaccataaaagaaatatatgattactcccaaagcataaagtctttagtcaagacgtatcatgacgcagcacatcctgagtcatctaactggacccctgctgagaaaaaggctctagaacggattaatagactagaccggcaccagctttttgtagtctgcgtagcagcactatattcttacagaaaaagcaaaagccgagaacagctattaataacgattgaaaaatacggctttctaacaaccctcagcggttactatttcaatgtaaatggcagaatcgataacattggaatagcagttgcaattataggaaagaagatcacagcagaacaagcggaaaaaaaatacaaagacgctccagaaaaactaactgagtccactgactttaaagactctattcggcgaataggaaaagaggctagcgcatactacgggtggaagctaacaagatacttcatgttcgagtacgaacaagaattaaaacgactatccaaaacaagtagagaacttttagactggtcttacgagcaaaaaccagaatactacagcctcgaccacaaaacaattgagcatattttccctcaaaaagcagccgacccttactggaaagaaaaattctccaagtacacattaaaagaaaaaaactctcttagaaattctcttggaaatttactaccggtctcccacgcaaaaaacgcatcactcagcaataattctttcgacgcaaagaaaggctctgagactaaccctgtcggatacagatatggttgcctctccgaaatacaggtcgctcactctgaggaatggaatgctatagaaatactacgcagaggaatatatttgcttgacttcatggagtctcgatgggggctgaaaattgggaccccgcaacaaaaggccgaaatacttgggcttgaatttgttctcgagagagaaggtctaacgattcaagaaattattaaaaccaaacctactcccccaaaaccgcctagaagccggaaaaaacctccagaagaagcgagccaagtctaa

SEQ ID NO: 349408 - DNA, 804 bp, Pseudomonas aeruginosa
atggaagtatgtaagctgtgccgaaacgagcgtgaacttcgcagtagtcacttaatgccaaagtcggcatatcggcaggtgcgagacccggaagaactcggaggaggttccccgctgcgattccatccagacgaaaatgaagcgtttcgtaccgataggcaggttgtagcaagaatgctctgtggtgattgcgagcaattattcagtgctaggggggagagcgtagtgtcaaggttgtgggctacaagagaaggtttccctttgctggataagctttcaaagtgccgttctcgtctggaacttggagaggttggtttcttttacccgccggattgtgtatcgcaagaggtttcctttgctctatattattttgcggcaagcatagtctggagatccaatcattgggattggggttgccgaggttctccacacaagaattccctcggcaaattgtacgaagaatcatttaggagttttctgctttcggaagagtcgagtatccagaatgccaggcttcttgttaccttaaacctgaatcctgacctgaatgcattgttttcttttccatctttcaatagggcggaaggcgtagggtttcacaactttaacgtactgggactctctttttcgtttgttgtaggtaagagtccgccgtcaactataatgcgtgctttcggtagatttggtgtgccgacattggttgtttcggcggatgctcttcatcgaaaagattttcatcatattgcacaagccattcgtgacatcgatgtaaggggcaagcgaggactcaccagcatggagtga

SEQ ID NO: 349409 - DNA, 801 bp, Pseudomonas aeruginosa; identical to SEQ ID NO: 329068

SEQ ID NO: 349410 - DNA, 468 bp, Pseudomonas aeruginosa
atgaaacgggaggaattcgagaaacgcatggccggcgtattcgacctgaccacctatgttgacgcccagggcgacatccgatattcggacagccacacacaggccgcttgggatggctgcctgttggtgatggagttattcgagccaaagccatcagccaggcaaggagctgaccttcgggccatgtttgaagaaacgaacatgggaaggtttcctcgccgatctttcgagagggacaagttcggaggctatgtggatcgcagcgcagagttcgcatggaagtcgctactgtcgacgctcggccacgccgaacggcttcaggccctggagcgtctgaggctgcgcatcgacgcccacatgttcatcagagaggacgggaaactgctcggatacggcgtaaccgtccctgagatgcgtgagttccgggaactccttatcccgttcaatggcgaaatcaagatcaagtaa

SEQ ID NO: 349411 - DNA, 276 bp, Pseudomonas aeruginosa
gtgcctgacatgagagaagagtttgaagcgtggcaccatgccgagttcggctactgcgttcccgaagaagaagatcctttggctatcggtgaatgcgccaagcgctggaggatatggcaagccagccgcgcggctctgagggtggagttgccgacgcaacaaggaacgaaccggtctgaatggctgcaaacctggaacaacggatacaacgaatgtcaccagcgcgtgacagaagccctccagcaagccggaatcgaggtgaagcagaatggatga

SEQ ID NO: 349412 - DNA, 516 bp, Pseudomonas aeruginosa
atgtcctactccgatcccaggcattgccaccatcagcgcgtaacacaatggctcgctgcgatcaggcagcacgccgcatggctgtatgccgctgatgagcagtacatgtacctagtgggggaggcaaacgaactctatcagtgcggggtgataggactgcaagacaggcacgatatggtcacagacgccctcggcatgtactcctgggcgatcgagcacggcatcacgcgcgagacgcactactgctcggactgctgctacgacgtgctcgacggcggcgtcgtcgtcgggagcgtggacgacgagggcatctaccacgggcccgcacccgcacgacagcggctgggctacctcggccgggatcccctggacgggataacatccttgcgcctgggccaggcgcttgagcgtgccggcattgtgcgcggcctcgtgatcgaactcgacgccggcggcacgctgcaactcgccgagcagatcccggatgacttccgaccatggcgctggccaccatag

SEQ ID NO: 349413 - DNA, 1023 bp, Pseudomonas aeruginosa
atgcccctgggtcagcagcagccgtaccccactgtcgtcgaggatatgcgccaggcgctcctctggcgccgccgggtccaacggcaggtaggcgccgccggccttgaggatcgccagcaagccgaccagcatgtccagcgaacgctccagcgccagcccgaccggcacgtccgcgccaacgccacgggcgatcaggcagtgcgccaggcgattggcccgcgcattcagttcgccgtagctcaaccgttgttcgtcgaggatcagcgcaaccgcctgtggccgttgccgcacctgctcctcgaaacgctgctgcaaggtgccctgcaccgcgcactcgcgctgggccgggttccattcggagagggtctgccggcgctccggcgcatccagcagcggcaactcgccgagccgctgtcgtgggttggcgacgatgccgcgcaacaggttgcgccaatggccggccaagcgttccacggtggaggcgtcgaacagatcggtggcatagtcgaaggaggcccagatgccgttttcgtcttcctgaatatccagcgtcaggtcgaactgcgcagtctggccgtcccaggccaggccttccagacgcaggtcctccaactgaacctcgggcgtcaccgagcgtatctcgctctgatggttgaacagcacctggaacagtgggttatggctggcattgcgctccggctgcaaggcttccaccagttgctcgaacggcaggtcctggtgcgcctgggcctccagcgcgcgttggcgggcctgtgccagcagctcgtcgaagcccatccgaccgtccaggtcggccttgagcacctgggtgttgacgaagaagccgatcagccgctcggtctccacgcggttgcgattggcgatcggcacgccgacacggatatccgcctgcccgctgtagcgatacaacagcgcctggaacgaggccagcaacagcatgaaactactggcgccttcacgctgggccaaggctctcacggcctcgaccagttcccgcgatag

SEQ ID NO: 349414 - DNA, 1341 bp, Pseudomonas aeruginosa
atgaacaggcaatccgctgcggcggtgatcgacgctgcccgctttaaccgtactcactggctgatcctcggctgggggtgtttcatcatgctgttcgacggctacgacatggtcatctatggctcggtggtgccacgcctgatgcaggagtggcagctgagcccggtgcaggccggcaccctcggcagttgcgcgctgttcggcatgctcttcggcggcaccctgctggcgccgctggcggaccgtttcggccggcgccgcctggtgatcgccaccaccctgctggcgagcctcgccgccttcctcaccgggcacgcccgcgacccgctggaactgggcgccggacgcttcttcaccggcctggcactgggcgcgctggtgcccagcgcgatcaacctgatcagcgaattcgccccggccgggcggcgcagcaccctggtcacggtgatgtcggccttctactcggtgggcgcggtgctctcggcgctactggcgatcgccatgatccccgcctggggctggcaatcggtgttctacgtggcggtgctgccggtactggcggtgccgctgatgttgcgctggttgccggagtcggcggcgttcctcgaactcaagggccgccgcgccgaactggacgcgctgctgcgcaaggtcgatcccgactaccggcccggcgccgagcgggcgaacgctgtcgcggccgaagcgccgagcggacgggtcgcccagttgttcgaggggcgccaggcagtgggcaccctgctgctgtgggtggccttcgccatgtgcatgctgatgagctacgggctcaacacctggttgccgaaactgatggccggcggcggctacgccctcggttcgagcctggcgttcctcgtcaccctgaatgtcggggcgaccctcggtgcgttgttcggcggctggctggccgaccgcctcggcgccggccgcaccctggtgctgttcttcgccctggccgcggcctccctggcggccctcggcctggggccaggcccctggctgctcaacggcctgctggtggtggccggcgccaccaccatcggcaccctggcggtgatccatgcctacgccgcgcagttctatccggcctgggtgcgctccaccggggtcggctgggccgccggcgtcggccgcctcggcgccatcgccgggccgatgctcggcggcagcctgctggccctggagctgccgttccagcagaacttcctggccttcgccgcgcccggcgtgatcggcgcgctggcgatcgcctgcatccacctgcggccgcgcgtgccggcggaagcgtccgtcgacgcgacggcgaagaaacccctgtga

SEQ ID NO: 349415 - DNA, 813 bp, Pseudomonas aeruginosa
atgcaggtggatgaacagcgcttcggcggtatcggccggttgtacggtcgcgaggggctgcaacgcctggccgatagccacgtcgcggtggtcggcatcggcggggtcggttcctgggcggcggaagcgctggcccgcagcggcgtcggcgagatttccctgttcgacctcgacgatgtctgcgtgaccaacaccaaccgccaggtgcatgccatcgaaggctcggtgggcaaggccaaggtcgaggtgatggcggcgcgcatccgggccatcaacccggcctgccgggtccacgcggtggccgatttcgtcacccgcgagaccatggccgagtacatcgtcgacttcgactacctgatcgactgcatcgacagcgtggccgccaaggccgcgctgatcgcctggtgcaagcggcgcaagatcccggtgatcaccaccggcggcgccggtggccaggtcgacccgacgcagatccaggtcgccgacctgaacaagaccttcaacgacccgctggcggccaaggtgcgttccaccctgcgccgcgactacaacttctcgcgcacgccggggcgcacctacagcgtgccctgcgtgttctccagcgagcagctgcgctacccgaagccggacggcacggtgtgccagtcgaagagtttcgtcggcgaaggggtgaagctggactgcgccggcggcttcggcgcggtgatgatggtcaccgccaccttcggcatggtcgccgccgcccgcgccgtcgagcgcctggcggaaggccgcgcgctgcggccgtcgcggcgcacgccggggaacgcctga

SEQ ID NO: 349416 - DNA, 1944 bp, Pseudomonas aeruginosa
atggataacgcagccattccaacgacaagccatgccagaccacgcctctgggtggaaacgctgtggctgctggattctctgactgcccagcaacctttgcgtgagattcccttgcggcgtgggctcaacctgattgtgtctccgccgggaacgggcagtgctgggcacggtgtcggcaaaacagcattctgtcagttgttgcgcttcgtactggacgatcctctctggtcagatggttcgagcttgcgcgacgaattgctgcaaagtcgcgaggtaaaggaaggtgcggtcgccgcccgtgtgcatgtaggtggtgaaacctggactgtcctcaaaccgtggcttcaccagaaacactaccgggcatcgcgaaccgccgactggcggcaattggcggccaatgatgccgaaaacgagttcactgcctaccaagccgctctacgccagcatctggtcgacatcctgcccattcaggaactaccaacatcgaagcaatccatcgaatggcaccagattctggcctggtgctctcgtgaccagaacgcgcgctaccacaactattaccagtggcgtgcggatggagtcagattcagcctgccagcgaagtcacctgcggccctcatgcagatcgtgctgggcctgctgcacgacgctacgacactgcgcgacctggatagcgccgccaaggcgatggaggatcaaaaatcacagctacaagcactgcgtgaggagcccgctcgcttgctgaaacacgtgcgccgccaattgactcgccgcctcaatgtctccgccgctactccgttccggcaggatggtctgcttgagcatccaaacctgatcggcatcgccaagcaacggcatgacgcctatcagcaggaattgcgggcaatcgagactgaacgacagggtcttgcagcagatcatcaagcatgggtggaaaggcgggcaccactaaaaagcgtcatggatcttctcgccaacgagattgagcaagtggaggcattgattgctggcgatatccagcgagtagaagagttgcaaaacgaggcttcgtcattgcaacagcggttgccaacacgctgtgatgcaggaaaccgcctgctcaaggattgtagctatgtgatcgagcgcatcgaacagacgcaaattgaccggaagcagcgcatagccctgcgtcaacgctccaaagagtctcttgaaagcgaactgccgcccctgcgtagccgactgaatgaattgaaagtcgagatggcacctatcgccgcacaactggcagcaatcgaccgacagaataccgaactggattcgagatacgcacagtccttgtctgcggatcagcttctcagcgaggccatagaagactacgaacactacgaaagtgtcgcatctggcaaatcacagtcgaccgacatcgaagcagtggagcgcaagcttgaagcgacccagcgccgccatgaacaacttcaaatacagcttgagaaagaacgtgatgcagtgaaggggcgtcgccgtgtcatcagcgactccatgcaggctgttgccaaatcgttaccatctttccggtggggcgttttcaacgatgaggataagcaccgcaatcacccctttcagatggggccgatgcattcaacaactttcaaggttctggaaattctggctggagatatcgcctgcttgctcgacagcagcacagcacaaagcttacatccaggattcctactacatgactcaccccgcgaggcggaaatgagcgaggccatactatggtctctgcttgggcatgtcgcatcgcgtggaagtgattcgttccagtacatcgtcaccacatccaccgaacccactgaggttttcaagacttttgagcgtctcagactttcatccgatagcgaggacggccttcttcttcgcagacgtctggggggcgatcagcgatcactaacgtga

SEQ ID NO: 349417 - DNA, 1398 bp, Pseudomonas aeruginosa; identical to SEQ ID NO: 349383

SEQ ID NO: 349418 - DNA, 1107 bp, Pseudomonas aeruginosa
atgcctttgatttcgggttacctatcccacgcgcttcagaaagcctatatatcccagcagacggccatcacctatggtcgcaaccttgggtacacctgcgagtacctgacgaaccgccgtgagtttcgtgattgcgagcgtgactcggcgttcttggaaatccgcacccacgtgatcgaggagtacttcgctcacctgcgcgaggacgaggagctttccaagaagacggtgcgcaaccgggattcgtctttgatggcgtttttcaatgattctctatgccggggagtggacgacgcacccgcgcctcgtaccgcgcctaacccctacactgccggctacctgtccccccgtcccaacaagagcttggtagtggcttgttccctgaatgatctcagagagctcatcctggctacgcagagtgagcgtgagcgctgcttgctccagttcatgtacgacgcaggcgtgcgccgctcagaagtcccgcgagtgaccctcaaggccattgatgatgcccttcgattccaggacacgttgttcatctcgcctggtgtttcagaaccggtaaacgcggactactgcccgctgcatattgatggaagcaaaggccctgcggactcatttaagccccgccagacgttggtcagccgcgccacgctgctgcgcatcaagaagtaccatgcttcgccgctgtacaaaatgactaagcgtcaattcaagggggctgagaacacccctgctttcctgaatgcggaagggggtgagtacacccctcgctcgatctccaagctcttggagcgcacatccgagcgagcgctgaacctgctgaaaatcgacaggatgatctctccccacaagttgaggcacgggaatgcttatgccctgttgagaacgccagacattggtagtgattaccttgaccggctagtgagcgtgcagaagacgcttggtcactcgcgcctcagcacgtcggaaacctatacccagatcccctacgacctctaccagaagctcgtacgccccggaactgaaaccaagacgaaagcaggcgagatggctgagctttcccagcagacgcgcctgaaaattgatgcgggagatatgaaatga

SEQ ID NO: 349419 - DNA, 2349 bp, Pseudomonas aeruginosa
atgagtcggttgactagcgctcaggcagacgccgtcattgagtcatttgtggcccgcgccactgatgatcgggagtcgttgctgaaggtatgtctgagcaggggggacgagttggcggtggctcctaaatacctcatcgaacagactaatctgaacccaggtacgatctcaaagcgcgtctcaagctttgagccgatcttcgaggcgatgcgcgccgaaggaattatcgtacctggccatccgtctggcgcctgcgattggcgccgtaggctgcttgcctggtacgaaggcatgtctatggaggagaagctggcgattccagtggctgccaataccatcagggatcgtggcttcatgagcgagattcctgaattggctggcttcaaatcagccagggcgagcttcgaactggtgcggatcacgtttgaggagattctcgatgatcttcgcaagcttggtgttcttgaccctaactatcaaaccgtcgagcagcgtatcgcctcgaagacggtagtcgaaaagactgagtcattgcgagacggcttcaacgctttgcgctcagtccgcatccatcgcctgtccgacctcgtaagcccggaaccggagcgccccttccagcacctgctgcacctcttcagtgcttcatcaatgaagagcagtagtgcgtcagggcagtcgaatttcattgaggctttcaaaaacttccgagcctatctcaaggatgccaactacacaggcttggaggacattagggagctcgtaaccccgtattccctccccaagttcaggggatatctccaggaaaagatcttggagcgttcgctgtcgaccagccacagcagttcgatgatgagctctgctcggaaaatgatggcgcgcgcagtccaaatcgagggtctcgggctgagcagctacgtcgcagctacaggcttcgatgctgagcgtgaaactgaccagtacaagccttatccccaggctgtccgaaaccgtatttcgcaggtcattgagcaagaaattgatgaaaccaatcgcttggcccaggcttacgttccaagccaggtaggggaagatccgctgaacgctgacggaagagtacgccgaggctttaacactctggataacgcacggtggatttttgagaacaaactcaactgcaagcccctaaacttcgaatccgtagataaaaacgacctttatcaacgggcgtttatgtcgattatctcggcttcgccaatttcgatcttcgaggtttataaaagctggggcgtgcagtatcaggttgatggtcgagtcattgcgccgtacatcgctcggcttgcccaagttaccgggatgaatgctgactcgctgctgggactggagctggatgatttcattgagcgccatgacttaacggatcggccttgcttgctgtattggaaagagcgttctgaaggcgcgaagatgcttcatctagatatcttccatgcggagatctcttggctgaccacctctcaaggccgtgtggtcaagaaaatctttgacgatgtgaagcacctgacccgtgagattcgcttgagtgcgcctgtcgaagcccagaacaagctcttcatttaccgctcaagctctcccaggaaatacggggttgtagattcctttgagaactcaggtggcaaccagctcaataagaccctggacaagttctctcaggatcacgggctgcttgacgaagatggtaatcctctcaagctctcaccgtcacgtttccgacctagcttcgtaagcgaactgatcgagcgcggcgtctctccacgtgagatccaggttctcctggggcataagagcctaagcaccaccatggcctatctggatcagatggacttcaaccccatggcgcgccgaatgctgaataaggttctccatgaaatgcagcaagacacgttagaggaggctccgaagctgatcccgaccaagactatcgagcccacgcccgaggcgatgccactgcgttctggccttgccacatgcatgaacgtttttgacccacctgctttcatcaaggcgttggcaagctatgaccccagcaagccctgcacgctgttcaacatgtgcctttcatgcagcaacagcatcatcacggtatcgcacctgccggagctcttcgccatgcggcgtgactaccaaaggatgattgaagtcaaccgggtgctcgatacgccctacggagccgtcatcctggacaaccttgatgtgctaaacaaccttctagatcctgagacatcggacttttccgcagaagagctgaccaaggctgagcgcctctctgaaaacctgcaggtcagtgttttgaccgagggagtaacgctatga

SEQ ID NO: 349420 - DNA, 2082 bp, Pseudomonas aeruginosa
atgaaccatgctctgatccctgaactcgctgcgtacaaacagtggcgtacaactgctcacaccctgctgcttgagttgcgcagaaacatcgccgatccgactcctgtgtcgctggaagcactctcttggtaccaggcgctgatggcgttgcctgtcagtaagacatccgtcttgggcgacgccgtctgggacttcaatgacgatcatccgaacgccgccaggaatgtccaaggagccaagctacggctcaattttgactcgtacccattgctcaaccagtcggcggtcttggaggtcaaggtggccctgtattgctggctgaagatgccagcggcaacgcgctcgtttgcctcgccaaggaacatcaaagccaacaccgccatttcatgcatgaaggctggattgagcttcctggatacgatgtcggggcaggcgcgccagctgatgacggatgagttcttcgaggttggacaccatggtctgacgtactttgatgcgggtatgtaccgggaggcagcgctcattcatccctacgcctttggccctgatctcaagaagttctttaccttggtcaggtcgccatttttcgaggagcagattttcgaagagccactgccttacgttcagctggaatcgctcgcctgggccaaggtactcaagcacgtccctgattctgagcgcacataccgtattctgccgaacgatgtgttcgagaaggcttctcgcgaggcgtcgttcgcagtggtcgacttcctaagcactctgggggagcctgtggatgacctggttgcccttacccgccaaaacgctagcggctactcgttagccaacgctcaagagctgtcgcgttacaatttcgagttgtacgtagcgctgaggctgcggagaaaaggctatgactccggtgcgatggcgaatgcactgtccgcagcttttggctgcattccatctacgttccaatctggctctggtcgacatgattttaaggcgaccgaaacgttactcaagctctcagattccaaactggacgatgatttccgtaggtacatcaatttcgtctcgtacagtgcctgctatctcgtggcgcagtacaccggcatgcggccctcagagctctccgagatcctagtcgagtcgtgcatggagcaagagagcgactactggttgctgatcagcaacgtgatcaagcatcgccaaggcttggccaagctgttcgacgacaagtggatcgcgattccgattgtgcgtgacgccatccgtgccgcttgcctcatcgctaaggtaaagcagaatccttacctgttctccaatgtggatactgtcgcgcaggacgccgaaccaaactcaatgtcctcgcttggaatcactcaccagttcagagctttcttcgaggatattctgacggacgaggagttcgagtcgctggaattctcgccttacacgttgcgacacaccctggcttaccagatggccagggctgagcttgggctcccattcatctctcaccagctaaagcacttcggtgaccttatcggtggtgctggccagaacaaggcgttcagtgcggtgacgcttgggtacggagcgatcgctgagatcttgtccaagggtgggcgttcatctagcaagacgccgacgcaaatggcagaggaggagtacatccagagctactgcgatcccgacggaaactacgccggccccaatgcggagagccacaaggcgcggatgaaaaaggtgttcagcgggtacatggcggctggctacaccaaagagcaaatcatcgcccagatggccaagaagcgcatggcgatcatcaacgtgggacaaggcttctgttatggcggtcaacgtgaggtatttgacgagtctctgccctgcatcggatcgctgcgttgcaatccgaatcggtgcaaaaacgccgtggtcaccaaggctcacgctcctaaatggcgggagatctatgtgcagaacagcttggccttgagctctccgaactcagcaggctctgaggaggagttgcgagcggcgatggaggaagccaagggtgtgttggagcatctgggtgaggaggtcgaggtatga

SEQ ID NO: 349421 - DNA, 507 bp, Pseudomonas aeruginosa
atgacagtccaggcgtttgatgccaagaataagctcgactacgaccggaacactgagctgctggctcaggggcttatgcagattgcctctgatccgaaactgaagccgacgatggcggagctgagccgcatcacaggcattcatcgcaacactatccgacagcgcgacttcccggcgcagcggcttgaggcgatcaaggacaaccgccgcattgcagtgctcgctcagagggtcaaggctgagaagaagcaggatcccaagacgattctgatgcaacgccttgaaaagagtcgattggaagtgctttattggttcaataggtatcaggattctgagaactcttgtgccacgctcgacaagagattggacactgtccgcgagtctagggactactacctccagctcgcagatgagctgcgtcagaagatcaaagagcaagatactgaaattttgaaattgcgtgacgcactggatttggtcagcgcgaaccttgaggaaccgaaatga

SEQ ID NO: 349422 - DNA, 834 bp, Pseudomonas aeruginosa
atgaagatgtaccacgatttgctggccgacgtgctagagaatggcgtcgagaaaggcgatcgcaccggcaccggcacgctgagtgtcttcggtcgccagttccgccacaacctggaggatggcttcccgctcctcaccaccaagaagctgcatttcaagagcatcatcaacgagatgatctggttcctgaatggtgacacgaataccaaatggctgaaggagcatggtgtcagcatctgggatgagtgggcaactgaagacggtgacctcggcccgatctacggcaagcagtggacggcctggcctacccaggacggcaaggccatcaatcaaatcgactacgtcgttcatacgctcaagactaacccaaacagtcgtcggattctcttccatggatggaacgtcgagtaccttcctgatgaatcggtgagtccacaagagaatgcccggaatgggaagatggcattgccaccatgccatttgctctatcagttctatgtagccaacaataagttgtcggcgcatctatacattcggtcgtcagacttattgctcggaaatccctataacctagcaggggttagttttttaactcatatgttggcgcagcagtgcgatttgggagttggcgaggttgtagttacaatgggtgatgcgcatatttacttgaatcatattgagcaagttaacctgcaactgactcgtgatccgcgccctctgcctaagttgcagttcaagcgcaagccggacagcatttacgattacaagtttgaggactttgagattgtgggctatgacccacatcctcatattcctgctcctgtatcgatctaa

SEQ ID NO: 349423 - DNA, 1197 bp, Pseudomonas aeruginosa
atgtacctcacgatcatgaagccacaagcgcttcagcaaatcgctgtcttagcccgtggattatggatcgttgaaggccctgaaggcttcgtgctggtaatcaaggcagggaaagagctgatcttggccgctcagcaaaggcgtgaattgaagctttaccttgcgccatacaaggcaggcgaaacgacggggcttacgcttctcacagcctgctttgatgacccacaaagtccgctattgatcaaaaccccactcatccctggtgaccctctcacagaggcactgcagagcttccctgacgaattcagtgtgtgctttttcgacgagcacaaccgcgagctgttcagttgtaaggcccaggcgaagcttggtcagctccgcaaggagctcggtacactcagccccattggagcagatcactggcccaagatgtatgagcaggcggaaagatggttcagcctcacgacctatgaggacgacgctcgtgccacaacggtgttcctgcaggaagatctgttcccctcggactatttgatcaccgacctgacccgccaggactttcgaggctcccaaggcttctccaatacgcagttagagcgcactgagccgggcacgtttcaggagttggacatcatctatcttctccagcgcgcatacacctccgagcggatcatccatggccccttgaaggtttccgatggcgaggagctggctgacgtagtggtgatgggcgatgaagtgactttgctgctgcaggcgaaggacagtcccaatacgccagcaatgatgaacacaacgcttgagagaaagcgaaagaaggccataagtcagttgaagaacggcctgcagcaactacgtggcgccatctcaacgatcaggcgagaaggcaatccagccttagcgcttgtggacggcacgcccttggacattgatcttgctgcacgccccctggtgggagttgtcgtggtcagagagctttttatcgacaactacgatgaatacagcgccatgattttgaaattcatggatgaggtcggaattcgcgtcctagccttcgattacaacgagttcgaggtcatgacccgccactgcccttcggaagatgcactgctgtcagcgttcttgcagatttccaaatgcgctgaggaaaggcgtatctatccccggctgcgcttcacggatctgccgccgcgctaa

SEQ ID NO: 349424 - DNA, 735 bp, Pseudomonas aeruginosa
atgaagcttcatatactgtctgatctgcattgtgagttcgccgatttcgtcccccctgtggtggactgtgacgtggtcgtattagccggtgacatccacgtgaagtccaggggggccatgtgggccagcctgaccttcagcacgcctgtcatatatgccatgggcaatcatgagcactacagcgggaatatagatcgaacccacagcaagctgcttgacgctgctgaggcgcacgtccacgtattggaaaatcaggttttagaacaccgtgacgtgcagtttctctgcgctacgggttggacgagcctggccgcgaccggagacccagtagctgcttcttggtgcgctcgtaactcactgaatgactttcgcgcaatccgtgtcggtgaacagtatcggcgtttgcgccctgatgatctgatcgcgagaaatcgagagacgaaggagtggttggagggccagctatcgctgccattcaacggtaagcgtgtagttgtgactcactatccgccccttatgaagttcgtgagtgaccaaggagccgatcctcacttgcgagcagcctatggaaacaattgggatggcctgatggatttcaagatcgatctatggatctttggccatacccacgaagctgtggatgaggtggttaatggcgttcggtttgtgagtaatcctcgtggttatcccaccgaagaaactggctttcggccagacctagttgtcagtgtatga

SEQ ID NO: 349425 - DNA, 318 bp, Pseudomonas aeruginosa
atgagttgtctgaattcccaggactggatggttgagggcgtaatacgactgcccagtctggtgtcagctaagttggcgatcgcgcaggcccatgattggggtgcactagtggacgcgtacctggtagatgcagctgaagttggcgatcgtttcgttgcgtatgtgtatggcgatctttcagggcaactggctgatgggatgacaattgtcacaccccctagtgaggtgatagcggaggtcgaaggcatggcgttattgcggacagtgtcaggcaacgatcattacgtcatggtcagccgattgcctgccgccgcttga

SEQ ID NO: 349426 - DNA, 630 bp, Pseudomonas aeruginosa
atgaagaccaatgccgttatctttgacgccttcggaacgctggtcgagattcagcagccgacacatccgtttcgacagttgcttcgagaggggcgacgccaaggccgcttgcctcgcgctgatgacattcgagcgatcatgacccgttgcctttccctaagcgaggctgcgctgtactttggtatcaaaatctcgccctcccagcttgcatttctcgaccaatgcctggaggaggaactggcaagcattcggccttatccagacgcggttgaggccgttgggctactgcaagctgcagggctgagactggctgtgtgttcaaacctgaccatgccttacggccccgtagtggaaaggattttcccgcaccttggggcctatggtttcagctatcgcattggtgttatgaaaccgcaagcgaccatctaccagcacatctgcgatctacttgatgttcggccaggaaatgagctcagtagtcagaggcggattgtcatgattggcgactcagaaaggtgtgatcgggatgggcctggccaggttggtatcaagggttatctgttgcgcaggaatggaggcggggcttccaatctttcccattttgcacaatcagtgctgagtgataggtag

SEQ ID NO: 349427 - DNA, 306 bp, Pseudomonas aeruginosa
gtgaccgacaaagacctctacggcgggttgatccgcctgcatatcctgcaccacgctgccgaggctcccatcttcgggctggccgtcatcgaggagctgagccaccacggttacaagctcagcgcgggcacgctgtatccgatgctgcacggtttggagaagaagggttatctgtgctcgcaccatgaacgcactgggcgccgcgagcgacgcatgtatgagattaccgatgaaggccgagccgcgctggcagatgccaaggtgaaggttagggagttgttcggcgagttaatcgaaggacgctga

SEQ ID NO: 349428 - DNA, 642 bp, Pseudomonas aeruginosa
atggaaggtcagcagactccaaggcgtcgcgaaagcgctgccattgccctccggctatttgcattgtctggatcatcatctccgtctccaccctgtcattccctatgccttgctttgcatgaccgctatggctcaagcctgagcagcggtcatcatattcgctttaccgaatatctgacaaagcgtatattcgattttccatatgcatcgagtccagtcatgacccctgctatcaaagttcttttcgtgtgcgttgccaactcagtccgctcccagcttgcagaggcgttactgcggcacaccgacccgcgcttcgaggccttcagcgcaggatcccaaccgtctgagattgatccgcgcacgattcaggcattggaggcagttggagtcgatacagcgggcctgcgaagcaagtccatcagcgagtttcaagctgatcgattcgattacgtcatcactctttgcgataagtccgccagcgagtgcctatcaatgcccagtgcaggtgaagtcattgcctgggatttttctgacccagtaacgagcgatgatcccggcgcatttcgccacacgctccacgacatccatgagcgcatcaagctcttcgttttggtcaagaccaaacacctggaggatctatga

SEQ ID NO: 349429 - DNA, 357 bp, Pseudomonas aeruginosa
atgacagaacccatgaaccccaccacgttattcaagtgcttggcggatgacacccgagccaaaatttccctgcttgtcgtgagcgaaggcgagctgtgtgtctgcgagctgacggcggcactcgacctgagccagccgaagatttctcgtcatttggccctgctgcgttctgctggtttgttgatggatcgtcggcaaggtcagtgggtgtactaccgcctgaaccccgacttgcctgcgtgggtaactgcggttttgaaagaagtcgtagacgccaatcagcattggctggaaaccgaggctaaacgcctgtgcggtatgaacgaccgccctatcaatcagggcgtgtgcagctga

SEQ ID NO: 349430 - DNA, 1284 bp, Pseudomonas aeruginosa
atgctgattgccgtattgatctttatcgccactatcgtgctcgtcatctggcaacccaaggggctcggggtaggttggagcgcgacgttgggtgccatcgtggcgctgctggcaggcgtcgttaccctggctgacataccagaggtttggcgcattgtctggaatgccaccgggacgtttatcgcagtcatcatcattagcctgctgcttgatgaagcaggctttttcaagtgggctgcgttgcatgtagcgcggtggggtgctggaagcactcgtaagttgtttgcgttcatcgtcttgctgggcgcagctgtgtcggcactgttcgccaatgacggagcagcgttaatcctcacacccattgtgatcgcgatgttgctggcgttgcgtttttctcctgctgctacgttggcattcgtcatggcagccggttttatcgccgatacggcgagcttaccgctggtggtttccaacctggtcaacatcgtttctgccgactacttcgatatcggcttcaacgaatatgcttcgatcatggtgccggtaaacatcgtcagcgtggcagcgacattagccatgctgctgtggtttttccgcaaagatttaccaaagacctatgacctcgaccaactggacaacccggacgaggcaattcacgaccgcgccactttcgtagccggctggtgggtgctggcactactcctgatcggattctttgtcattgagccgctgggtgtgccaatcagcgccattgctacggtctgcgcattcgtcctctatgtcatcgcggctcgtggtcatgccatcaacacaagcaaggtgctcaaggaggctccatggcaagtggtgattttttccctgggtatgtatctggtcgtttatggccttaagaacgcgggcctgactgatcacatcgcccagattctgaacgtattcgccggttatggcgtctggggggcatccctgggtactgggatgctaacggcattgctgtcgtcgatcatgaacaacatgcccacggttctggtgggtgccttatccattcatgccgccgaagtggatggcgtcgttcagcaagcgatggtgtacgccaacatcattggctgcgacctaggcccgaagatcaccccaattggcagtttggccacgctgttgtggctacatgtgctggccaagaaggacatcaagatcagttggggttactacttcaagactgggatcgtgctgaccttgcctatcctcgtcgccaccttgtctgccctggcattgcgcctcagtttctga

SEQ ID NO: 349431 - DNA, 714 bp, Pseudomonas aeruginosa
atgcaagacacattgccgaacgtccacgccgacctgatcgacattccttcgttggagcaactggcacctcgtacgccttcgcttcataagcctcgaattctgcttttgtacggatcgacgcgagagcgctctttcagccggctggtgactcaggaagcagcgcgcttgttggaagagtttggcgccgaaaccaagatctttgacccgtcaggtctcccgctgccggatgacgctcccgatacacatcccaaggtcgctgagctgcgcgagctgatgcaatggtctgaggggcaggtgtggtgctcccctgagcgtcacggctccatgagtgcggtattcaaagcccaaattgactgggttccgctggcgatgggcgctgtacgacctacccaaggcaaaacccttgctgtgatgcaggtctgtggtggttctcaatccttcaacgtggttaaccaactacgggtacttggccgatggatgcggatgtttaccatccctaaccagtcttccgtggccaaggcgttcaccgagttcgatgaagcaggccgtatgaagccgtcctcgtactacgaccgactggtggacgtgatggaggagttgatgaaattcaccctgctgttgcgggatcgccaggattatctggttgatcggtactccgagcgtaaagagtccgccgaagacctgtccaagcgcgtcaaccagcgctccatctaa

SEQ ID NO: 349432 - DNA, 126 bp, Pseudomonas aeruginosa
atgagccagatcacgatctaccacaaccccgaatgcggcacctctcgcaacaccttggaattgatccgcaatagcggggaagaaccgacagttacgggcactcacgcatcaggcaatttctggtag

SEQ ID NO: 349433 - DNA, 534 bp, Pseudomonas aeruginosa
atgcaactcataactgaaattgttcaccccgagctcacatcaaagcagggcagagtattccgtcgacatgcagcacgcggcatcgtgatgcggcatgagcagatcctgttgctgtttaccgagcgctataacgacttcagctttcctggcggcggccttgacggtgacgaggacattgtcacaggcttgaagcgtgagcttgaggaagagactggcgcccgtgaaatacaggtgctccagcactacggttacattgaggagtaccggccctactggaagccacagtacgatctgatgcacatgacctcgcatttttatcaatgcgaagtagcgccccagctagagcccgtgagaatggaaagccacgaaatcgcgaatggtatgcggcctgtctggatcaacctgcatgaggccataacgcataatgaagccgtgatgcagcgtcaggagtcatcgatggggcagtcaattcagcgcgaaacgttcatgctgaaaaaagttgtgtccgagttgatgccgccaatcagcctttga

SEQ ID NO: 349434 - DNA, 1203 bp, Pseudomonas aeruginosa
atgactcatagtagagctcccgcagaaacccctagagcagccgcgattctggctcgcttcctatcgtcggaatccgctggcggtcttgtactgatgggcgcagcactcgcggccctaatcgtggcgaactcgcctctctcgcaaggttattttgccgccttgcacagtgtctggttgggcatgtctgtggagcattgggtcaatgatggcctcatggccatcttcttcctgatggtcggcctagagatcaaaagagaggttctggcaggtgggctttccacttggggccagcgcgccctgccggggtttggtgctttaggtggcatggttgtgcctgcgctgatctacatcgcaatcaactggggtaattctgagactttgaaggggtgggctatcccagccgctaccgacatcgcattcgccttgggcgtcttgtcgttgctggggaagcgagtccctacgtcgctgaaggtcttcctcgccgccttggcgatcattgacgacctgggtgctgtagtcatcattgcctttttctacacctctggtctttccatgccgatgttgctggcatcgctcgcaaccctggccattctgatcgcaatgaatcgattgggcgtcagacgattgttcccgtatctgctggtaggtggtgtgctgtggttcttcgtgctgcaatcgggagtgcacgccacccttgcaggtgtcgctgtagcgctgtgtgttccaatgggtaagcctgaagaagaagcccggtctccactgctgttcctagaagaaaagctgcatatgtgggtagcgttcgctgtggtgccgatttttggcttcgccaatgcgggtgtttcattggccggtatttcgatggaaaacctagtcgatccggttccgctgggtgtagcgctcggtctgttggtgggcaagcaagttggcattttcctattagctgctctggccattcgtatgggcttggccaaactgccggaaggcagcaattgggcacagctttacggcgttgcgctcttgtgtggcatcggcttcaccatgagcctgttcatcggaaacctggcgtttgctggatcagctcacctgatcgacgaagtaaaagtcggtgtgttgatcggttcgaccttagctgcaatcggtggagtcctgattttgcgacgcagcgctgggcccgccattgtcgccgccacggtctctaaataa

SEQ ID NO: 349435 - DNA, 531 bp, Pseudomonas aeruginosa
atgagctacgcggacatcccagctggcaacgccatccccgatgacttcttcaccgttatagagattcctgcaaaccactcgccgatcaagtacgaggtggacaagccaagtgggcagatctttgtcgaccgcttcctcagcacaccgatgttctatccagccaactacggatttatcccgaacacgctgagcgacgatggtgatccgctggacgtcctggtggtttgcccttatcccgtctcacctggtgttgtcatccgtagtcgcccggttggtgtgatgtacatgactgacgaagccggagcggatgccaaggtgatcgcagtgcctcacgagaaacttagctcattgtacaccgacgtgaatgagtgctcagacctacctgcgttactcctcgcacagatccagcacttcttcgaaaactacaaagcattggagccgggtaagtgggtgaagatggggcgttgggggagcgcggatgaggcgcgggaagagattcgcaagtcggtagcggcgtatatccccaaatag

SEQ ID NO: 349436 - DNA, 354 bp, Pseudomonas aeruginosa
atgaaaggctatatggtcgttttcttcacccaacaaaaccgtcgttatcagggaaagatgctaggcgaatggatcgtcgacgtggctaaagaaatggggttgcgaggcgccacgctctgcaccggaatcgaagggtttgggcacacaggaaaactgcattcatcgcacttttttgagctggcggatcaacccacggagattcgcttggccatcacggaagatgaggcagaacgattgttcaaacgattggactctgaggaaatatcggtgtttttcacgaagacgccagtcgagatgggcacccttggaaaaatgccctccagctcaacaccctccacaacttcggagctatga

SEQ ID NO: 349437 - DNA, 345 bp, Pseudomonas aeruginosa
atgctgatcgaacttgatttaaacaccaacgacgcagaagcgcttttgcgccactgcagtgagcaccggccaaactgcggggactttcgagaagacgctcgcctaagcgaagcaatggaaacgcttgcaattgcgatcaaggatgccatgaaccccatggaggcgaaggaggccttagatcatcaactgctggatgcggcgattaggttgttcggcgctaaatcgaccgctattgagtggctttcgaaaccaatgccagcactgggcctacaacgtccgatagatgttcccctcgaagaagcgttgtcgctcattgggcgactggagcatggcttcggcgcgtga

SEQ ID NO: 349438 - DNA, 714 bp, Pseudomonas aeruginosa
atgacctacattaacctgcccagtaatcagcaagctgcaatcagcgacgtcgacgagacggtgcttcgggcagcagtgcgcaagtgcctggatgaagagcgcatggggccgattcatggccttgggcttagtgattgtggcccttacgtgggtgccaagcttaatgcgtttcaacaagcgatcgccgagtacagcaaggccagggcccatgccaagcgcgaacgcactcggcaagatgcgctgtatgccggcaatgacctcattcacgctttgcagcagatgaaagggcggctcgaaactgagcgtaaagagggtgagttgttctttattgatgatcagattaggccgcctttccatctcagtaagcgactatcggtgcaagtgtcgtttcgctggcgagagtcgccgtctgcggactggaagcacgggcatctgacattcgtctacgacttctctcctcagcccagctacaccttgccagtgcccaagcgcaaacccagcgccgctcaggtagagagcgaacttgaagacagtcggtaccgagaatgggagcgtttgaaggcccaggcgctcttttctatgagagagttcttccgcgatggcggcgatggggatgctgtaccagaagtgttcgcggtgaggcctagtccctacggcggtggcttgaataacttcagctgcaatttctggcagtccgaaaggccggccccataa

SEQ ID NO: 349439 - DNA, 3228 bp, Pseudomonas aeruginosa
atggaaaaggaacaatcggctagcaagatcgctggccctaagccgcaagacttcctgcgagcgaggcgtccggaacagttctcagattctgtgaagttacaagagtcgaccatcgaccgctccatgctggagtaccattttgagactctgaataatcgaagccaagagcttgagttcgagatcttcgtacggaaactgtgcgaacgggaaatttgtccgaacctggttgctcagactggcccgactgcgggtggagacggaaaaaccgataccgagacctaccctgtttccagccagatcgcctttttctgggggctaaacgagaccccggagtccgagcgatgggcattcggtgtcagcacccagaaagattggagggcaaaatgcaggaaggacgtcgagagcgtcatgtcgacagggcgtggctacgtccagatcttctgtgtcaccagccgtttcatcaagaacagctccagagcggagctgcaagacgagctttccaaaaagtatgacgtcaaggtcactatccttgatcgaacctggctgcttgataaaacgctacaacccaagaatcagcatcttgccatcgattacttaggtctcacaggcaatattgagagcaagattcagattggcccgttcgatgctgacaagcaaatccagctaactgcgatcgagcgccagatcgagcagatcgaagaccctggtcatttgacgctctctcaggtcgatctctacaccaagcgcgccatcatctacaaagagctggaacgggatgcggttgccgtcgagcatcagttcaatatcgctgtgcggacggcgaaaaagtttggtacccagaggcagcatttcgatgccctttaccaactgacctgggccgcgtactggtggctggaaaatgcggaactctttgaggaaacgtttgagaaagcactcggcgtggctcaagagaccgaaaacgtggaggtgtgggagaaagtcgtaacgttgttcaatttgatggtcactagtcatcgagacggtaagtgcacgctcgatgtggactccctagaaaccactattagagagagattgaactcgatagccgctaacgcggatatggtcagcggggcattgcaagccaagacctctttggcgcttctagatctgctgattgcggaaaatgaggagcaagccaacaacaccttccggtctttgagcgaaatcgctgatagtgctcataagctgattggctaccctatggctcgtttcgtcaatttgctcgaagcactcgatgtggccttcggagatctcaaggcctacgaagatctcatggataagctcattgatgatgccggtgcgcgggaaaacagccggattaaggcagataagtacctgaggcgaggagcgctgagtagcgataaaaaggactactacagggcgatcaagtgcttcggattatccctgtatgggctgtatagcagtgaaagcaaggcagaagtcttcgctgccctgtatatgttgtcgcatgcatacgacaagcagggcctgctttgggctgcgcgaggagcagcgttgatggcagcctacgtggtaaccactgacgcactgaaggaacagcgaagcagtgctaagcaagctgctatttaccaacgactcatgtggattgaaggtcagctaggtcgcgtgggccagtctttgacctggtatcacttagctcaactgatctctcaaacgctggatgaaagtccgtggacagaaaatcagaaaatgaattatgaggttctgattggtaagctatttctcaacgccaattttacagacgttgaaagaatcgcctggctgccggacaaattgaatcaactggatctagggctcagtgcagatgcgctattagtttgcttaggtcatgaagataaagcggggcctgaggatgagccaattgatcttaactttatgaacatgtggcgcagtattgatatgggagccccggtggccccactcgacctgtatctggatcgctggacgaccataagctcatatatcctcggttgtaaggtgtctgtgtcttttccggtgaaatctccatgcattgagttagcgcagcaattgctggctgtactggagagcttctgcgcaccgatgatggcagaccatgcagcggctacagtgcccgccgtgaatattgatgtcctgctggaagatgaggacgacttcatactgcggcacagcttcgacaccgctgcgcaggtaacctctgcagaaatcctctgctcgcctttcagcatcgccaatttgaccgatgaacaacgaggcacgatccggcaattttacagtgaattctgccttcactttgtgtccaccatctgtcctcaaattggctggtcgaaattcgaagagatgcttcgagacgacaaagccctggaacgagcagtcgtcttcaactgcaatattggattggacagctatttcatggggcgtgatgccgtccctggcatcgggtctcatcaggaagctacccttgaattgcacaagccaacacggcgtgtgacttggtttgagcaccacaatatagagcccatggattggcggcctaagtctgatgtgcctgaagagcgtccaaaacatccgtttcagttttcaacaatgaagcatcgagagctaaaagttgtttctctcatccaagagagcctgtggaatcaagccggctggaaggggctgggctttcaaacatgcgaaggcgaaattccagtgttgatgttcggcttcgagaatgccgctgttgggcataagatattcgaaaatatcgcgaaaaccatcggggataaagatcccaataatgcactgcgcatcgcattgatacgaggcattagcaggcagaacccagcgcattatcgcgtggccgtcacaagtaatcttgatcgttctgatgatgggtcttcgaggatccaaacggcactctctaggcttcatactatgaccccgaactcttctgagaatattgaaagatttttgaaagattacgaagtgcacaagaagtgtcatattgctacggtgaacacgaaagggaagcttgttagccatctaataacttctggcgtaattgtcattcatgcctgggagatcgatgaaaacgaccaggagatttcggcaattcagcctgaggacgatatctttgtgccggcaggcgtggaaaacgctccaatcagccgtgcgctggcgaagattcgttcatttgagacccggtaa

SEQ ID NO: 349440 - DNA, 981 bp, Pseudomonas aeruginosa
atgtacaacccgacgccgttcaacctactcagctcgctggattccatttcagctgccaggctgtcctcctacagacgttttttcatcccggcgtccgactcagaactgtacggcctgtattgctggaacgaggttctatccacgaatttcatgcgcttaacaggcatcgtcgaagtagcgttgagaaatcgcttccacctcgctcttagccagtatgcgatggcccagcattcttccagaatcatcggcagcgctgatgccaacaattggtacgaagtattgagattgagcggcaaaagctgggagaaggtgcaggccgtcactcacgacaggtactggaacaaggctcaaaagcgacacacctacaccccgaaactccacccggtcagccccaatcaagtgattgcgaatatgacgttcggcttctgggcaccactgctggatctcaacctgtcttgggacacgatcatcccgacgatctttcctcaccatcgctacgcgagtaacgctggtcactggaacaacaagacgaacgtaggcaccgtctacgcccgccttgagaccgtcaggtcgctgcgcaaccgggtcgcccatttcgagccgctgtggaaaatcccggacatcaaagaagagaagaaagaagccaagggggtaacggtcaatgtcgagtatccggcgcccactactgaggtcgaagtgctggccagactgaacatgctctatcgccgaatcacccagacgctccattggctttcgagcgacagagccagtgaccatgttcagtcagaatttcatcaaaagaccttgtacctgatgacccaggaggccttggacggcttcaagcgcgggtacacccactcggacgtcaagctcagcagcatgaccaaatcctggggcatgaaactggtactcaagggtggcaaaccaatccagatctcgcaccagcaaaaagtgattggaaatttctatcccactcactga

SEQ ID NO: 349441 - DNA, 546 bp, Pseudomonas aeruginosa
atgttgaatcctaccgaaatccgcccaatcctcaagcagtgggtcgcgaaagcgatgtcccatgaagagagtgacgtcttcatcgaggagctgtgcttcatcgataaggccagacgcgccgatctcgttcatgccaacggcaagctgaccgctttcgaaatcaagtcccatgctgacacgttgactcgctgggagggccagcagcaggcctatatggcgtgctttgacgaagtctggctatgctgccattcaaagcacttggtgaaggctcttgagtcatgtctgccgcatgttggcgtactcgtcgtcgatgactattccggcatggcgatgattcgaaaggcgaagcccaacaagctccaggataaattccaccttacgggatttttgtggcgtagtgagttggatgcactcgctaaccagcatggggtgccaacgaaaagtcgcgacctcataaaagaagtgcgccgccagctcagcgacgcccttcccatgaatgtgatcaggtcacatgtattggtcagcctgaaacaacgttatcgttag

SEQ ID NO: 349442 - DNA, 1065 bp, Pseudomonas aeruginosa
atgcagtacgtggcttgtttacgagttggtcagaatgacgttaaggcgctgataaatctggaagaccacaggcgggaagtcgtggctccgctgttggacatgcgaggtgacgacgacagacaccttcaaacattcctagcgagttggactgagcatccttttttcctagacgcttcaagaataacgaaggacgttggtgaagaattcattactaccaatgacctgcacaatcctcatggcgcgtttgagaacaaacggcgcttcttctccgatgtggcaggcatcaaccagaacgttataccggtggtctcctgggttgatgacgaccctcaacgagcagtcatccaaagtgctctcgctcttcagggcgatttcccacatatagccatcagggttacctgtccggaaaaccccaccgcgacttcgtggaacagattgctatcaatcctggatgctcttgacagcccggacactgcgacggtgattttggacttcggcgccacaactccggccaatactgcctcagggtcggatttcaatgtatccctgcgccaactcaacagctatcagatacggaatctggttctgatgagcacctcctttcctatcgataagccagcctcaaatacctcccgttcctccgcctgttacgacgttgcatggcaaggaagggtcgacaccaccggcatagagtcagatatcgtctacggggattatgcggccaccaacccaaccgcctcaatggaatacatacgaggcatgcctgtacttcctttcgcctgctattacaccccaacggaatggtggcagcgacgcaaaggctcggataaggaatttgtgcgatacattgaaatcgcccaagagatcagaggcttaccgggttatcacggcgacgacttctgctgggccactcgtgagtacagcagaattgtcgccacatctaccggctacgggaacaacggaacatggaatggatacaggatcaatcagcatatctgcgccatgatccagtccatcgtagatactgacggcttcgatgacctcgacgccgatgacttactctaa

SEQ ID NO: 349443 - DNA, 1059 bp, Pseudomonas aeruginosa
atgcgcctagatcagatgccataccactcaaggcccaccctggccgtgcttccattccgacaattcgggatcggatggacgtggcaactgcgggcactcaagctttttcccgagtcccaactgtcctggaagcgttacttctacgataacggcagtggccatgcgagggcggctgttttcacctcctacgaggaggccatggaagctgcagacgaattcaacagccgcaccaatgaactggtggctcaggcggtaccggatcctgtgcttcaaaactcaaccaccctgaaagtcgagaaagcactgacggcggcgcgccgcatccagggagaagaggagctcatggagcgcgaggcaatcaagcggaacgcccatctgccccggctctccgcgcaagagctgaaattgcacaatacgatggagagcttgcggcaaccgctccacgaggaacttaagcgtgcgccttatctagaaatagttgccttgccgagattcaacacgtgccttcgccgtgtcgatgatcagacatgggagcagatcggagccctgcctcccaaacgctcgcagatctgtctgcgcgaagtgacagccaaagggtttggtctttcgggagccgaccactggggaagaaccaaagcgcagatacgcgcacttttactcccccgagcgaaccagctgctgcaattagcaagcgtcaagcaaatgctcgcagaggcgaggatgcgcggccagagggtactggtctgtggtggcttcgtgttctggtatgaggacgacggggtgccacggtgggtgctgaaaaacacgggtggcgagtccagcagcgaagaggggaacactttgtggcacgagggcacgatcctatccaagaaccatggccgcatcgtcgtgctcccctatatcaaggagaacggagaaaaggttcaagggcacacgaagaatgcaccgcacgatggtaaggcgctgccccggcaccctgaccagtatgtcaccctcccttttgagatcctggatggtgacctcatgatcggactgtttggtgaactccattatgagtaa

SEQ ID NO: 349444 - DNA, 231 bp, Pseudomonas aeruginosa
atgcgaatcatccgtctgaaagaagtcatcgacacaactggtttgtctcggtcaaccctgtacaagtacatcggggaagcccggtttccgtcgccggtctcgttaggcgataggtcggtcggatttgtcgaaagcgaggtgcacgattggatcttggcaagaattgaggagcgggatctggctgaaggcgcacccacgcgttcaaccggccgtctgtgcgtggcctgctag

SEQ ID NO: 349445 - DNA, 1302 bp, Pseudomonas aeruginosa
atgtctttcctgcgtttacttcgggtcgcttgcgagaggctttcgcctgaagagcggctggttctggcctcgttcgcaatgcattttgagggctgtggtcccgtgcagatgacccagcgagagttgtccgggcgcttagggatttctatgcgtgtcgttgcgcgggcagtttcgaggttgtcggctgaggcacatcttgttgttgataaggtgtctgtgggtagaggtcgcccttcaagcacgtatgagttatcagcgatgatgcaggctcgcttgaatgatgggcgtggagaaagttatccactagtttgtgagcaggctattaaaaatctcctctctgccaagaatgagcaaagcggtaagggctacggtggtactgctccgggaaaaagtgttggcttcaagaaacccccaagcagaagtgatatcgatcagcctagtgctagcgctagatggcttctggctgtgctgttcagttattcggatgagcttggtgtcgtgcgtggcacaacgacgtccgagcttcggcgagcaaccggaatgggcagggtgaaacttaaatcgcagttgcaaggtcttgtggataggggtgtgataagaaattgcattccgggagcatcgaacacgttatttgttggaaccaaggtcagtacgacctactttcttaacttgaatcacccgttccttgggctcgatagagatgctagtgcgattttggcactcaaggagggcggttgcgatcgtcgcgaccttgtgtgtgtaactgccccacctatcgtggagcgatttcttcgcgggatcgagggtcaagccttcgaagttttctgcttgcgggtggacgaatacgcatcatttttgctaaccaatcactgggcggagctttcaaatccaaggtgtcctgaattaactaaactggtagagggtatggtctcggctgattttcagaggcctgatggaaacgcagccgatggagcgggtgtagatgaggccacttgggcaatggtggttgagcatattggttggttggcgctatatcgcgcaggatggatccgagaactagttatacgcatgccttcgggtggggttgataagacgcgcattcagattagtcctgctccgaagatggatgatgaaattcaggttactgtgcttctaatggagcgctcccctgtaccccaagtcaattgcttgcttttcaactttttccctcccccttgtgtttgtagtttgtatggagaagaggctgaaattcctgttgatgagcgatatgactttggcttgctgactcggccaaagggttag

SEQ ID NO: 349446 - DNA, 624 bp, Pseudomonas aeruginosa
atgctcgaccaactcgaaacgctcatagtgaaaaccacgaaaccgggtacgcaaccgggtataaaaaaacggaaattgcccaatgcagctctgctgatccaaagtatccgcaagcttgagacgatggctgaggggttgaagctcatcggcagagcgagaaacaatctcaggcaaaagcggtacagggcatcggcaaaagggagggccacatgctctttcaccttgccgcgcgacaccaaggccaagctaaagggcctggcaaaaagcgctggaactaccgaaacagcgatcatagaaagcctgatcgaagaagctcagcaatcgagccaagatcggaaagaggaaaagcggcgctgggctctggagaaaacaatcacccgcaactcaagcaagcttgcgcaagagctgaacaaaatcagactcgacgcgaccacgagacacctagacacctgcttgaaacgactgtcaggctggcaggtatatcttaacgagcaggcacccgagctttcctctgagcaggagtccgaagctaacaagattgccgagaagcgaatgcgcgagatccaggaggcaatcagggccatcgtagcgaagcatgaaatgatgagcccaaggaacatctga

SEQ ID NO: 349447 - DNA, 309 bp, Pseudomonas aeruginosa
gtgggaatcgagaccgagaaactcgtcatccagctcgtgggccacggccagccagagcttggcgaaggcgctggccgctacccggaccttgctatcgccgagcagctgcggatcaatgccggcttcggccagcacagcggccacccgttgcgggtgcaggccatgcagtgccgtctggacaaaataaacggctaccgagtctttctcttgcatggccctcgctcatggctaattggccgcctgaagtggcaaaaaatatcaggcaagccggtcattttcggcataggtagtgtcgttggccatctctag

SEQ ID NO: 349448 - DNA, 1185 bp, Pseudomonas aeruginosa
atgtctacccctgaagtctatatcgtcagcgctgtccgaactgcaatcggctcctttggtggcgtgctcaaggaagtgccgctgtcgcagctggccaccacagcggtcagcgcagctttacagcgcagtggttgcgccgccgagcgagttggtcatgtggtgatgggcaatgtgatacccactgaggctcgcgatgcctatctcggccgggtggcggccatgcaggccgggattcccaaggaaaccccggccttcaacgtcaatcgcctgtgtggctctggcctgcaggctattgtttcggcggcgcagagcctgctgttgggcgattgcgatatcgccattggtgccggcgccgagtctatgagtcgtggtgcctacctgttgcccggggcgcgctggggcgggcggatgggtgatatgcaggccgtcgactacatgctcggcatcctgcatgaccccttccatcgcattcatatgggcatcactgcggagaacattgccgagcgcctcggtatcagccgcgaagctcaggacgcccttgccctgcaaagccagcagcgcgccgcccgcgccattgccgaggggcgcttcgccgggcagatcgtgccggtagaggtgaaaacccgcaaaggtgtgcagttgtttgaggtggacgagcatgtgcgcggcgagacttcgctggaacaactggcggcgatgaagactgcgttcaaggcgggtggcactgtcaccgccggcaatgcttcggggcttaatgacggcgctgccgcgctgctgatggccagcggagcggcggtcaaaagcgacaaccttcgcccgctggcccgcctggtgagttatgcgcatgccggggtcgaccctgaactgatgggcctggggccgattccagctacccgcctggccctgcaacgtgccggcctgagcgtggccgacctggatgttatcgagtccaacgaagccttcgccgcccaggcttgtgccgtagcgcgcgagctggacttcgacccggccaaggtcaaccccaatggctcgggcatttccctcggccacccggtgggtgccagcggcgcgatcatcgccaccaaggccatccacgagttgcaccgcattcagggccgctatgccctggcgaccatgtgcatcggcggcggccagggtatcgccgtcgttttcgagcgtgtctga

SEQ ID NO: 349449 - DNA, 309 bp, Pseudomonas aeruginosa
atgacaatgagcattcagcgcgccgacgtgatcggcggcggaattatgggcagtggcatcgctcaggtttacgccgtggccgggctgtcggtgctgctggtggatattttcgcggccgtgttgctcaaggccgtagtcggcatcggcagcagcctcgtccgtcaactgaataaggctcggcagcagcgctgcgctgtcctggggagttcaatgcacaggtggcggcggggcgcctgggacgcaagagcagccatgacttttatcgctatgactgatggccgggttgcgcagggctatcagtatggctag

SEQ ID NO: 349450 - DNA, 678 bp, Pseudomonas aeruginosa
atggctagcaacctgccgcagccggccgctgcgctgggcgtagaacccattgcggcggcgccctcgcgtattgagcagatccgcggcaaggcgctggagctgttctccgagcgcggttttgcccaggtcggtatgcgcgagttggccctgcatgtagggatcacagcgggctcgctgtaccaccacttcgttagcaaggagcagctgctgttcgagttgcttgaggagttctatgaggaccttcacgagctggtcgaactgagtgagacgggtacgcccatgcagcgcttgcaggccttgctgcagagccatatcgccctacatgagcgctgccggctgcatgcgcggatggccgaacaggagttgcgctgtctgtcgccggcgcaccagcagcagattcggcaactgcgcagcagctacgaagacaagttgctgttgcacgtgcaggcgctcggcgttcgcgcgcccacgactttgctgcgagcctgcgtgcaagggctgctggcctggttgaattgcgtgccgaactggagcgcggactgtggcttgcccgccgggcagaaacaggcgttggtcaatgccatggccctgggcgccttggccgctgtactcaaacagccaggcgatgatgcttgtggcgtgccgctgtggcccgctgcggccgcccggcaacactga

SEQ ID NO: 349451 - DNA, 1779 bp, Pseudomonas aeruginosa
atggctgactacaaagctcccctgcgcgatatgcgcttcgtactcaatgaagtgtttgaagtttccaagctgtgggcccagttgccggccctggctgaagtggttgatgaagacactgcagcggccattctcgaagaagccggcaaggtcaccggcggcgtgatcgccccgctgaaccgcagcggcgacgaagaaggttgctcctgggccaatggctcggtgaaaaccccagcgggcttcccggatgcctacaaaacctacgccgaaggcggctgggttggtgttggtggtgatccggtattcggcggcatgggcatgcccaaggcgatctcggcccaggtcgaggaaatggtcaactcggccaacctgtcgttcggcctgtacccgatgctgaccgctggtgcctgcctgtcgatcaatgcccacgccagcgaagagctgaaagaaaaatacctgccgaacatgtattccggcgtctgggcgggctccatgtgcctgaccgaaccgcatgccggcaccgacctgggcattatccgcaccaaggccgagccgcaggctgatggcagcttcaagatttccggcaccaagatctttatcaccggcggtgagcacgacctgaccgagaacatcatccatctggtactggccaagctgccggacgccccagcgggcccgaaaggcatctcgctgttcctagtgccgaagtttatggtcaacgccgacggttccctgggcgagcagaacagcctgtcctgcggctcgatcgagcacaagatgggcatcaaggcttcggccacctgcgtaatgaacttcgacggcgccactggctggatcgtcgatgcgccgaacaagggcctcgccgcgatgttcaccatgatgaactacgagcgtctgggcgttggcattcagggcttgtccctgggcgaacgcagctaccagaacgccgtggaatacgcccgcgaccgtatccagagccgcgcgccgaccggcccggtggctaaagacaaagctgctgacccgatcatcgtgcacccggacgtgcgtcgcatgctgctgaccatgaaagcgctgaacgaaggcggccgtgccttctccagctacgtggccatgcagctcgacaccgccaagttcagcgaagacgccgccacccgcaagcgcgcggaagagctggttgctttgctgacgccggtggccaaggccttcctcaccgatatggcgctggaaaccaccacccatggccagcagatcttcggcggccacggctatatccgcgagtggggccaggagcagctgatccgcgactgccgtatcacccagatctatgagggtaccaacggtatccaggccctcgatctggtcggccgtaaagtggtcggcagcggcggtgcgttctacaagcacttcgccgaagagatcaaagcctttaccgattccgccgacagcagcctggccgagtttatcgagccgctgaaaggcgccatcgccaacctggaactgatgaccgccgacctgctggagcgcgccaaggccaacccgaacgaagtcggtgccgcctcggtcgagtacctgcaggtgtttggctacaccgcctacgcctacatgtgggccctgatggcacgcaccgcgttggccaagcaggatcaggacgagttctacgtgagcaaactgggcaccgcgcgcttcttcttcgctcgcctgctgccgcgtatccactcgctgactgcttcggttaaagccggtagcgaaagcctgtacttgctcgacgctgcgcagttctaa

SEQ ID NO: 349452 - DNA, 1011 bp, Pseudomonas aeruginosa
atgcccacatccgctacccataccatctttgccgaaagcttcttccgcttgaatgcagagctgttcgccccgttcttggccgaggccggcctggacgagcggattctacatgcccccgatgtggagattcccgcggcgaagtatgccgagttctgggagattctcgggcgtcgggtggattcgtcgatcggcctgcgcatcggtatacagaccgttagcaccacccttggcacatatggtcaagcagtacgcagtgcgccaaccatgctcttggcactgcgctgcttgagccatttcgtcgtggtgttttcccaggctatccgggtggatgtcgagatcggcgagcggcaggtgattttgtcgtatcaggttaccgatccgacaatagtgcggcgccgccaggactccgagttcaccattggctttttcctcagcctgttgcgggagatcagccagaacccgcaattgaccccggaacggctcgactttgagcatgatacgccggctgatctgtcgctgcaccgtgaggtgctggcgtgcccgctgcacttcaaacagccagataatcgtctgtattttccgcgtgccctgttggacatgccggtacgcaccgccgacccgcgtctgttccaggccctggaaccctttctcgaacagcagcggcaggtcagggcgtcggccaatgatctgctcacccaactgacccggcatattgccagcagcctgagcagtggcggggccagcctggaaatggtggcgcagagcatgggcatggggccgcgcactctgcagcgacgcttggccgagtaccaggtggagttccgcctgctggtcgaggaggtgcgtcgttcactggccgaggcctatgtggcagaggacgaatacagtctcaccgacattgccttgttgcttggctatgccgaatgcagttcattcagccgcgccttccgccgctggacccacgtctccccgcagcaataccgcctgcaagccaaggctaatcacacctag

SEQ ID NO: 349453 - DNA, 1458 bp, Pseudomonas aeruginosa
atggccgagcatgaggacggcgccaagggcgtcagccgccgtaattttttgcgtggcgccggagtgggtgcggttgccgtcgctggggtaggggttatgacccatgccacggctgcgacgggcgatagctgcaagacggcgggttgcgactatgacgtagtggtgatcggcggtggcttcgccggtgtcacggctgcgcgcgacagccgcaagaatggctacaagaccctgttgttggaagcccgtaatcgcctgggcgggcgtaccttcacctccgagttcgacggccacaaggtcgaaatgggcggcacttggattcaccaagcgcagcccttcgtctgggccgagaaagaacgctacggtctggagctgcaagaaactccagtcagcaccgcggcgctgaccaacgaagagtatgtggtcaaggtcggtaacacgacccacaagctggccggcgagcagttgctgccgctgctggcagctttcgatgccttctatagcgaagcgcgccaggtctgggaccgcccctatgacgcgcagcacacctggaacgaaatcctccagcgtgacaagcgcaccgccgcgcaacgcctggatgagctcaagctcagtccgctgcagcgggtggcggtcgacagctttgtcagcgcgacgtcgcatgccccgctggaccagacctcctacgtcgacatgctgcgctattgggcgctggccggctggaacctgcagggtttcaacgatgctgttgtacgttacaaactcaaggacggcaccatcggcctgatcaacaagatgatcgaggacggcaagccgcaagtgcgcctgtcgaccccagtgaagaagatcgaggacaagggcgatcacacggtgatcaccacccagagtggcgagaggatagtggccgctagcgtgattatcgcgttgccgatgaacgtgctgcccaatgtcgagttttctccggcgctggatcctgccctgatcgaagccggcaagcagaagcacagcggtgctgggatcaagttctatatcaaggccaagggcggctttaccaagatggcgaagatcaacgccatggccgagtccagctacccggtgagcctggtgatggcgcactacgtaagcggcgaccacacccttttcgtcgccttcggcaacgacccgaacaagatcgatatctacgacacccaggctgttcaaacgattctggaaccgctcttcccgggcatccaggtcgagggcacctatggctacgagtggaccctggatccttacagcctgggtacttacgccagctacaaacctgagtggttcgagaagtactacgcgcatttccagaaggatcgcggccgcattctctttggccagggcgaccacggcgagggctggcgcggcagcattgacggcgccatcggcgccggcactagggcggccctgcgcgccaaggagctgctcggatga

SEQ ID NO: 349454 - DNA, 393 bp, Pseudomonas aeruginosa
atgaagctgcacaacttcacttatttgctgaccgctctcggcttgctgggcgtgatcaatctgtccgcacaggccgctgagagctgcgacccggtggccggccagaagattttcgaaacccgctgcagcgcctgtcattcgctcagtgagcacaaggtcgggccacagctcggtggtgtgttcggccgtaaggtcggttccgctgcgggcttcggctacaccccggccctgcagcaggccggttttacctgggatgcggaaaagctcgatgccttcttcgcgggccccatgacgttccttcccggcactgctatggccttcggtggcttgcgcaaggctgaggaacgccagtcccttacctgttacctgcgtcaaaaaggaggaaaatcatga

SEQ ID NO: 349455 - DNA, 384 bp, Pseudomonas aeruginosa
atgagcatcactctcttcatcaaacccaagtgcctgctgaccgtagctgtcgcgttgctactgctggttgatccgagtctgatcttccgttggctgggtctgccgctgggggttgacggcatgctgcttggccgcctgcttggcgctacctatttggcggttggcttgggcttctggtttatccacagtctcgaagacctgccccggcgcgactcgctgttgatggtcggctgcgacttggtgtgcaccggtctcgtcgttcaggcgctgctggccggggcgatgaacccgcttggctggggcctggcggcggtctacctgggctctgcgctgggtttcggctggtgcgccagccaggctgccggcaagccggcctacgcctga

SEQ ID NO: 349456 - DNA, 1380 bp, Pseudomonas aeruginosa
atgggagagcaatacaagagtattgatttcaacaagtccctgctgtgcagcgccctggtggcgttgttcagtgtttccagcgcccaggcggcgacctcggccgacctggccaagctcggtaacgagctgaccccgttcggcgcagagaaagctgccaatgccaacggcagcatcccggcctgggaaggcggtttgacccaagctccgagcggctggcagccgggccacggcgacccctacggtgccgacaagccgctgtattccatcgatgcgaaaaatctcgcgcaataccaggcgcagctgccggctggccaggtggcgctgatcaagacctacccgggctaccgtctggacgtctacccgacacgccgtagctgtagcttcccggcagaagtcgcccagcgcaccaaagagttcgccgctcagagcaagatcggtagcgacggctggagcctggagcaggccgctggcgcctcgattcccttcccggttccacagaacggcatcgaggtgatgtggaactacaagctgcgctacatgggcaaggggcggcgcgctcagatctcgatgctgatgcgcgagaagggtggggcgctgactgaactcaagcagtgggcccacgagtattacccctacaacgacccggcggtgaagagcccggccgataccgacgacttcgaagccaagatgctctacgacgtgctgtcgccggcatcgcgcgctggcgagatgtatctggtgcacggctacctggataaaccgcaggactcctggatctacttcccaggccagcgccgcgtgcgtcgggcgccgtcttttgcctatgacaatccgattgccggcaccgacagcctgtacttcgtcgaccagatcaacatgttcaccggtgcgctggatcgctacgactttaagcttctcggcaagcaagaaatggtgatgccgtacaactcctacaagttgatcgacaagagtaacaagttcgaggacctgatcggccaggactacctcaaccgcgacgtgcagcgctatgagcagcaccgcgtgtgggtggttgaggccacggtgaaagccgacaagcgccactcctttgccaagcgtgtgttctacatcgacgaggacagctgggcgctgttgcacgtcgacatgtacgacgccaagggcaacctctggcgcgtgcaggaaggcagcatctgggccaacccgcagacccagtcctgcacaggcttcgagtactcgatgtacgacctggtcgcacgtcgttacctagtcgacggcttcacccaggaaggtgaggtgctcgacataaccgccggcatcgaaggccgggtcagcgacaagatgttcaacgccaatgaactgcgccgccgcggcgaacgctaa

SEQ ID NO: 349457 - DNA, 1854 bp, Pseudomonas aeruginosa
atgcataacaacaataaagccgcggcccaagccgcgtcgggcttcgttcgtgtgaataatcgtctggccctggcggtgatggccgcctccagcctgatctggatggagcctagccacgccatgcgctttggctctgaggacggtatctccggcagtttcgactccaccctgacctatggcatgtccacccgtctgcagtcgcccgactgccatatcatcggtggcgatagcggtggctgtaacgatggcgctgacactgagctgagcaactattacaacctgaccaagggcaatggttacgccaactccgacatcaactacagcaactccgacgatggcaacctcaactacaacaaacacgatgtgttctcccacgtagttaagggtacccacgagctgagcttggcgttcggcgacggctggagcgccctcggtcgggtcagttgggccaaggacttcaagatggacaacacccggcgcaccgagctggatggcccgggcgatcgcgaagccaccgaacgcctcgatctgctcgacctgtgggtggccaagagcttcgaccttggcgagatgccggccaaggtcaaggttggcaaccaggtgatcagctggggtgaagagatcttcatgcccggtggcatcaaccagatcaacgccctcagcctgccgaagtaccatacccctggcacccagctgaaagaggtgtttatcccggcgccgatggcttcgttcaatatcggcctgagcgacacgctaagcctggaggcgtattaccagttcaagtggaatgcctatggcatcgacccggcgggtacctattattccggctccgatgtggtgggcgagggtaatcgaccgatctactaccccaccaattatgtcgacggcttttacggtgccggcttctgtgctgcaaacatgcctaacggacgttgtggcgagccgctgatcagcggccttgacgacgctaccctggtggccaacggtctggcgattcctttcgccggcgaacgcgatgccaaggatgacggccagtatggagtcgccctgcgctggaatgtggaggagatcgagaccgagttcggcttcttctatcagcgttatcacgacaagctgccctttgtcggctacaccgccacgtccaacccggacctgctgctggtcgacaactacttcatcaactatggcgaggacaaggatctgtttggcctgtccatgaacaccatggttggcccggttgccgtgggtgcggagttgtcttaccgaccgaacgacagcgttgccattgacccgacggtgcccttcggcgcggcgttcagcggacaattcaacgagttcagcgtgttcgacaccggagtccacaatggcttcgtcgaagagaagaaatggcaggcccatgtgaatgccatctacaccttctcggccaacgataccctgggcttcattccgagcagcctgggcgcctccgatggctacctgctggccgaggcggtggtcacccactaccaggacctggatacctcggggcaaacgccgtacttcctgccggattactcgctgccggataaaacctcctggggctatgtggccgaacttggcatcaactacccgaacgtgttcggcagtggcatcactgtgaccccgcaactggacttctaccacgacgtcaacggcactgcgccgaacgcgttgcctttcgtcgaagggcgcaaatcgctgactagttcgctgctatttaactaccgcgatcgctggaagggtggtttgcagtgggtgcagtactggggtggcggggataacaacctgatggctgaccgcgatttcttgagtggcaacatttcttactcgttctga

SEQ ID NO: 349458 - DNA, 2361 bp, Pseudomonas aeruginosa
atgctcgcttctctggtgctcggtctcgagcgcttctttttccgttatcgcctgtcgaccttggcggtactggccctggtgacgctggtgatggccggctttgcctcgcagttgcgcatgtctgccggtttcgacaagcagctgccgcagcagcacgaattcatcaagaccttcaaccagtaccgcgatgtgctgttcggtgccaaccgcgtcatcgtggtgctgcatgccaaggacggcgatatctggaacaaggaagcgctgaccaaactctacgacctgacccagaccctgttcttcatgcccggcgtcgaccgccgtacggtgacctcgctgtggacccccaatacccgcgcggtgcagatcaccgaagagggtatgaaggccgaggatgtgatcggcggtgacgtcacggtcggcacccttaacgatcaggcgattgttggcattcgcgaccgcaccatagtcggcggttttgtcggcagcctggtggccaacgattattccggcgccatggtggtggcggaactctccgaccctgacccgcagacaggcaagcgcctggattatctggagttcagtcagcgcctggaagacgacatccgcgccaagtacgccgacagtcattacgaagtgcagatcatcggtttcgccaagcagatgggcgatatcggtgccggcgcaaccagcgtgatgggctttttcgccttggccttcctgctgaccttggccgcggtgtattggtacacgcgctcgtgggtactgacattcctgccgctgtgctgctcgctggtgtcggtggtctggcagttcggcaccatcaccttgctcggttttggcctcgatccgttggccattctggtgcccttcctggtgttcgccatcggcgtgtcgcatggcgtgcagcaggtcaactatatctccaaggaagtctgcaacggcgccgatgcgatgaccgccgcgcgccgcagcttcggcggcctgttgattcccggcacgctcgcactgatcaccgccttcgtcggctttgccaccttggtgctggtgccgattccgatgattcgcgagctggcgattaccgcttcggtcggcgtggcttacaagatcgtcaccaacctgatcatgctgccggtgctggccagctacttcagcttcgaccaggcctacgtcacccgcgtcggtcgcctgcaagcctggcgcgactgcgtgatgagcaagctggggcgtttggccgagacccgcaacgcggcggtcggcacattgctgtgcctgctgctgctcggggtcgctgtctggcagagccagggccggcatgtaggccatgttttaccgggggcgccggagctgcacagcgattcgcgctacaacctggatgtgcaaagcgtggtcgggcacttcggtctcggcctggacctgttcaccgtggtggtggagacgccgcagaacggctgctaccaacacgaagtgatggcctacaccgaccgcctgacctggtacctggccaatgtgcctggcgtactctcggcgcaatcgctgccggcgctgaccaagttatcggcttcgggcgtcaacgagggcaatccgaagtgggcggcactgccggtcgatgaactgagccttggcgaggccgtgcgccaagtgcctgaagggctgcgcctgtacaacgccgactgcacgctattgccgatcaacctgtacctggccgaccacaaggccagtaccttgaaagccgtggtcaacgcggtacagcaataccgtaccgaacatcccatggacggcgttaccgtgcgcctggcgagcggtaacgccggcgtgcaggccgccaccaacgagatcgtcgagacgtccgagctgccaatgatgctctacgtctacctgaccatcgtgttactggtgcttctggtctaccgcgattggcgcgcgatggtcgcctgctgtgtgccactgaccctggccaccttcctcggctactggttcatgaaggagctggacatcggtctgaccgttgccaccttgccggtgatggtgctggccgtcggcatcggtgtggattatgccttctatatctataaccgcctgcaactgcatctggccgaaggccaggacatcgtcaacgccttcaagctggcattgcgtgaagtcggggtggcgaccattttcacggccatcaccctgtccatcggcgtggccacctggtcgttctcggcgctgaagttccaggccgacatgggcttgctgctgacctttatgtttatggtcaacatgctgatggccattaccctgctgccagccatcgcggtgatgctggatgtgctgattccgcgccgggggccagtccgtgcgccccttatcgcgcactga

SEQ ID NO: 349459 - DNA, 960 bp, Pseudomonas aeruginosa
atgacccagaaagacttcacccccctgcgtttgctgctggcgtgcgccttgctggcgtgcgccagcgtgaccctgcatggccacgcggccgaggcgaccccgagcatgcgcctggaacaggtgcagcacgcaccgctggtggccgtaggcaaaagcggttcgcgcctggttgctgtcggcgaccatggcgtggtcgtgctttccgaagatggtcagcactggcggcaggcccagtcggtgccggttgacggcctgttcaccgcactgagctttgtcaatgcccgcaacggctggctcgtcggtcatagtggcatgctcttgcgtaccgaggatggcggcgaaaactggatcttgcagccgcctctggaagaccagccggtgctgctctcggtgtggttcgagaattccctccatggcatcgtcactggtgcttacggctatatcagcgagacccacgacggcggccagagctggcagcgcctgacagtgagcgaggagggcgacgacttccacctcaatcatattttcgccggcccgcagggcagcttgtttatcgccgccgagggtggcaacgcttatcgctcgcaggataacggcgcgacctggcaagcgctggataccggtgccagtggctcgctgtggagcggcaccacattgcgcgacggtcgcgtgcttctggtgggcatgagcgggcgggtgctgctcagtgaagacgctggcgattcctggcgtgaactggacagcgggagccaggaggcgatcaccgccgtgacccaactggtcgatgaccgcgtggtgctggtcggtaatggtggtctggtgagcgtcgctgatcccgagttgcagcgctttcgagcccaggtgcgtgccgaccgcttgaacgtcgccgcgctggcgacgctgggcgctggtcaattagcgctattcagcacgcaaggcgtgctgaaacaggacttgtaa

SEQ ID NO: 349460 - DNA, 477 bp, Pseudomonas aeruginosa
atggctgatagcgtgccgatcgcgagaaaggacctaccacctggtggcctgatggatgcccgcaacagtatcgcttcgctggcaggctggactgtccacgccagacttgcagaggccgatcaggttcaccaggcacgtcaggcccgcttgaagttcctcaaggaaggcgaactgcccagcggtgtgctgcgcgaggaaatcgatacctcctggcggcgcagtctcgggcatgggctgaactgcctggaaggcgagatgctggactcgcagcaggatcatgacctgcaacagctgctcgcgaagaaccgcctgctgatcaacgccgcggcgccggagatggaatacctggtgagccagcacggcaaaaacggattagtaatactgggtgacgctcaggccaatgtactggtggttgaaggccagaccgagctcctcaacactgggcgacttcctctcccagcggctggaccgtactaa

SEQ ID NO: 349461 - DNA, 324 bp, Pseudomonas aeruginosa
atgaagcacctgaagccgatcaacaacaaagcacaaatactcgaacaggccgcccaggaagatcgtatcgaagaggtactggcgatgagcacggtggtcggctgcgcatcgaccaccgatccgggctgggaaatcgacgccttcggtggcgtcagctcgctctgtcagccgatggaagctgacctgtatggctgctccgacccgtgctggtggccagcccaggtgcccgacatgatgaacacctacccggactggaacaaggatgctgtcagctcgaatgacagctggcgcaacctcgacaccgtattcccgaaagacaagtag

SEQ ID NO: 349462 - DNA, 1125 bp, Pseudomonas aeruginosa
atgtcgttcaagcactccggcagcctggctgccgcattcgccatgctggccacatcctggtccgtggcggcgttggctgaaactggcccggccttgcagtccggccacgaatacatggtcgcggtcaactacccgaacaacctgcacctggtcgatgtccagaccgacaaattgtacaaaacctgtccactgccggatgccttcggtcccggcaccgcactggtcgcaccagaccataagaccgcgtacatcctcaataaccactatggggatatctacggtgtcgacctggacagctgcaagttggtgttccatgccgcgctggcgcagaagcctgacgagcgcacgcgcgcgctgttctcgattgccatcagtcccgatggcaaggaaatctacagcgtcgtcaatccgaccaagctggcgtccgatcactatgaagtgcaaacaccgcagctgcaggtgtatgccgccgatggcgggctggcggccaaaccgctgcgcagcttcccggcaccgcgccaggtgatggtgatgcaaaccggtgctgacggcgcgctgtatatggccggcgcagatatttacaaggtcgatgtgaataccggcaaattcaccgtggcgatacccgcgcgcaactggaaacgcccgctctacagcccgccggatgtgctttacgcctggccgcagcagacccctacgggtgatttcaccacgctctacacggcggttaagttcaaggacgagaagcaggacatggcgactgccgagttcgtttacggcttcatgaacatcgacctggccaccggcaagggagaggcggtggattttgccccgctgacggaaatctacttctccgccatgcgctcgccgaaggatccgaacctgatttacggggtgctcaaccgcctgaccaagtacgacatcaagcagcaaaagctgctggaagtgggtgagttggatcactcctactactgcgtcgcgctgaacaaggcggggagcaaggtgtacctgagcggtacctttaacgatgtggcggtatatgacgccgattccttgaagaagctctccagtatcaagctgcctggcggcgatatggcgctcgccacttcgcaaatcttcacccgttga

SEQ ID NO: 349463 - DNA, 1698 bp, Pseudomonas aeruginosa
atgagtcacttcagctacacctgcggacccaaggacaagaacctgctcgccatgaccattggcgaggcttttgacaacactgttgcgcgctttccagagcgcgaggcactggtggttcgccatcagcaactgcgttacacctgggcgcaactggccgacgcggtcgatcgctatgcgcgcggcctgctggcgctcaggcttaagcccggcgaccgcctgggtatatgggcacccaattgcgcagagtggtgcatcgtgcagttcgccagcgccaaggtcggggtggtattggtcaatatcaatccggcttaccgtaccagcgagctggaatacgcactcaaacagtccggttgcaagtggttgatttgtgccagggccttcaagacctcggattaccacgccatgctcagcgggctattgcccgaactggcgcagtacctgcccggagagttgaccagtagccggctaccggagttgcgcggtgtggtgagcctggcggccgagccaccctcagattttttgtcctggtacgagctgggtgcgcttggcacagcagtagcgcctgagcagttactaacgtgccagagcgagctgcactttgatcaaccgatcaacatccagtacacctccggcaccaccggttttcccaagggcgccacgctcagtcactacaacatcctcaataacggctacatggctggcgtgagcttgaagctgaccgagcatgaccgtctggttattcccgtgccgctttatcattgtttcggcatggtgctgggcaacctctgctgcctgacgcacggctccaccatgatctaccccggcgatgcctttgacccattggtcaccctggcgactgtcgcggaagaaaaggccaccgcactgtatggcgtgccaaccatgtttattgccgaactggaccacccacaacgcagctcgttcgacctgtccagtttgcgcaccgggatcatggccggcgctacctgtccggtcgaggtgatgcggcgggtgatcagcgacatgcacatgaaggaagtgcagatcgcctatggcatgaccgaaaccagccctgtgtctctgcaaaccagcgccgatgacgagctggaaatacgggtggccacggtcggccgcacccagccgcagctggaaagcaagatagtcgacgaggccggtaacttggtggtccatggccagatcggtgaactctgcacccgcggctacagcgtgatgatcggctactggggcaaccccaaggccaccgccgaagcgatcgaccaggacggttggatgcgcaccggcgacctcgcgataatggatgagcagggctacgtgagcatcgtcgggcgcagcaaggacatgattatccgcggcggtgagaacatctatccgcgcgagttggaagagttcttcttctcccccccggcggtcgccgacgtgcaggtgatcggcattcccgaccagaagtatggcgaggaggtcgtcgcctggatcaagtttcaccccgcccacagtgctactgccgatgagctgcgcagctggtgcaaggagcgcattgcgcactttaaaacgccgcgccacttcaggtttgtcgacagctttccgatgaccgtgaccggcaagatccagaaattccgtatgcgcgaaatcagcatcgaggaactgctgccagcgccagtcgatggcagcgtaactcggtag

SEQ ID NO: 349464 - DNA, 1638 bp, Pseudomonas aeruginosa
atgttgggcttgatgcaagatcaaccgctgctgatttcgtcggtcctcgagcatgcgctgtcggcgcatccgtggagcgaaatttcctcgcgcacagtcgaagggccaatgcaccactgcacctatgccgacatagggcggcgtgccaaacaactggccaatgccttgacctcgctagatgtgcagccgggtgacaggatcgggaccttggcctggaacggctaccggcatatggagctgtatttcggtgtgtcgggcatgggtgcgatcctgcacacgatcaacccgcggctgttccctgagcagatcgaattcattgccaatcatgccgaagatcaatacctgttcttcgacctctcgttcgccgcgttggtggagcagctggccccgcagatgaagagcgtcaaagccttcatcgcgctgacggatcgtagtcggatgccggccatcgaggtgcctaacctgttgtgctacgaggacctgatcgacggtcagagtagtgagttcgcctggccggtcctcgatgaaagggcggcttcgtcgatgtgctacacctcgggcaccacaggcaaccctaagggtgtgctgttttcgcaccgatccacgatcctgcattcgctggcgctgtgtacatcggatggctttggcctgtcgtcggcggactcggcgttgctcgtcgtgccgatgttccatgtcaatgcctggggcatgccttatgccggggccatgtgcggcgccaagctggtcttgccagggccggcactggatggcgagagtatctacgagctgatgcgcactgaagaggtgaccctggccctgggtgtgccaacggtgtggatgatgctgcagcaacatgtcgaagcccggggcctggatccagccaaagagttgtgtctgaatcgggtggtgattggcggggctgcggcgccgagggccttggtcgagacctttgaaacccgttttgatacgcgggtgctgcacgtctggggcatgaccgaaatgtcaccgctgggcaccgtctgtacccgcttgcccaagcaccgcactgccaggctggatgagctgcttgacctgcaggccaagcaagggcgggcgttattcggtgtgtccatgaaagtcatcgatgcagatggctctgagttaccccatgacggcaaggcctccggccatctgctggttaaggggccgtggatcgttagtcagtacttccggggagaaggggggcgcatcctcgatgacgccggttggttcgataccggtgatatcgccaccatcgaccctgatggctacatgcagatcaccgatcgcgccaaggatgtcatcaagtccggtggtgagtggatttcctcgatcgacttggagaacgctgcaatcggtcatccagcggttgcggaggcagccgttatcggtataccccacgccaagtggcaggagcggccgctactggtcgtggtactgaaatccggtaaggcagccagcaaggaagagctgctgggcttccttgaaacacgtgtggcgaagtggtggttgccggacgatgtggcttatgtcgacgaactaccgcatacggctacgggcaaactgcaaaaaatgaagttgcgcgagcagtttcgtgactatcgattagccgagggctaa

SEQ ID NO: 349465 - DNA, 2145 bp, Pseudomonas aeruginosa
atgctgttcagtcgtctctccatacaatggaaaatcactttgcttgccgggctgtgcttgcttggcatcgtcgtaatgctggtgggaatttccctgtatcgcatggagcacaatactgcactgatcaaaagcgccaacaccgagatgctcaaggactccgcagcgcagcgcatgcagggccaaggggaaattcaggcgttggctgtgcagcgttatttcatggatgcctacagcacgggcctgaacttttcccggcaagtactgcgtgagcgcgagcaagcgcaaaagcatgcgagcaacggcctggatctgcgtgcggaactcaccactcaggtgcgcgccactctgcaaaataaccctgagctgctgagcctttatctggtgttcgagcctgatgcgctagacggtcaggacaatgcattcgtagataagagcgaactgggcagtaatgaaaaaggccgtttttcatcctactgggcgcaaaccgactcaggtgatgtcagttctttcgctgtgaccgaggctttgatcagcgataccacaccgatgctcgacggctcgccctacaacaactggtacaactgtccgcgacagagcctgaaaccctgtgcgttcaatccgacattcgatgagaccaccggacagaaactgctgatcactacgttgaccttcccgttggtagagaacggcaagctgctcgcggtattggggatggacatcagtctggccaacttgcaacagctgagtctgagcgccgaccagaacctgtatgggggccagggcgatatcagcattatcagtccagccggcttgcttgctggctatagccgtgatgccacacgtttgggggagcgtctggacaaggtttactccgatcagggtgccgcgctggtacgtttgcaggcagggggtaagtcgcagacggttgaacatgatggacagctgcgcatattcaataccttcaagccaatcccagaagccgcaccgtggggcgtgttgctagaagtcccgaaaaaaaccctattggcgccggcgttggaactgcaagctgatctcgaccagcgcaatgccagtggtgctctgctcgaatcctttctcggcggtctggcggcgattgtcggcttgctactgatttggttgacggcccgtggggttactaggccaatcctgggtgtggcgcttatgttgaagaacatcgccagcggtgagggcgatctgacccagcgattggcgtacagcaagcaggatgaactgggcgagttggccggctggttcaaccgtttcctcgacaaactgcagccgatcatcgccgatgttaaacgttcggtgctcgatgcccgcggcacggctgaccagtcctcggcgattgccgctcagaccagcgccggcatgcagcagcagtgccgcgaaatcgatcaggtcgccaccgcttcgcaggaaatgagtgcgacggcgcaggatgttgcacgtaacgcggcccaggcggcagaagcggcaaatggtgccgatcacgccagccgtgaggggttgggcgtgatcgacaagactacctcggccatcgacctcttagcccgcgacatgagccacgccatggctcaggtcgaagggttggccgccaatagcgagcagattggctcggtactcgaggtgattcgcagtatcgccgagcagacgaatctgctggctctcaatgccgctatcgaggccgcgcgagccggtgaggccggacggggttttgcagtggtcgccgatgaagtgcgcaacctggccaagcgcacgcaggactcggtcggagaaatccaaggggtgatcgagcgattgcaaagcggcacccgtgaagtggtcgacacgatgcacaacaaccatcgccaggcccagggcagtgtcgatcaggttgagctggcggtagtcgcgctgcagcgcattggtcaggccgtgtcggtgatcaccgacatgaacctgcaaatcgccagcgcagcggaacagcaaagcgccgtggccgaagagctcaatcgcaacgtatcagccattcgcgacgtgaccgagtcgctttccgttcaggccgaggagtccgcatcggtcagccagtcgctgaacagcctggctaatcagcagcagggcttgatgaatcagttccgcgtgtaa

SEQ ID NO: 349466 - DNA, 408 bp, Pseudomonas aeruginosa
atgacgaccaaacgtccaaaagagttcttaactcccacgccccaagaaatcctaaacgccataacgctctggcagagcatgcacggggcccccaacgggcaaatcacgcgggtcgcaaggatggagcgggaattcacgacagtcttcgggggcagcttcggcaccatctcgattgatcaattgccgcaggcgatagatgtactgtgcaacgtcatcgccaacctggacatgcttagtcacaggtcggcgaccaagagactggaactgatcatggagcatctggttacgacaatcggcaaagggtcaggtcgtgcaggcttcgccgatgcagaagccctgacaagcgcgctacaactcgcgcggctggagcccgacttcccttacacgtacccaggctgggctaaatga

SEQ ID NO: 349467 - DNA, 465 bp, Pseudomonas aeruginosa
atgatcaccacgacacaaaccacacctgcaggcggcaagcttcagctcaagatgaacatggaatcgctgcaactccgcgtggaactgaagtcactgctccagttgttcggtgcacaaacgtccctggcagagcttgccatcacagagtttgggggcgaactccgtgttgaggaggcgcaggaagctgggggctcgctctactacttgccgctacgactgactccagacttcattgatcacatcctggatcaactttgcccgaatagcaggcccgcagccattgagtgcctgaacaagtatcgctctgcatggagcagggccgatcaagacaccgcacagatgctggagaaaaatgctgatctgcgaagagcactgcggctgtccaagaaacaagatcagatggcccacactcttaggaaaatgctctcctcgcttcaaaaaaaccgccaaccggcgctcaactaa

SEQ ID NO: 349468 - DNA, 1317 bp, Pseudomonas aeruginosa
gtgttccgcctgcaggcgcgcgcggccgccgccgaagagcttctcccgcagggtgccgggagcgtaggcggtcttgtagctgccgcgtgcctgcaactcgggcaccaccaggtcgatgaagtcggcgtagctctccggctccacggtgcgggtcaggttgaagccgtccaggccggtatcggcgatccagccttcgaggtcgtcggcgacctggcgcgggtcgcctaccagggtcacgtagcggccgcccagggccaactggtcgaggagcttgcgcacggtggagtcggtgcgcgccacggtgaggttcttcaccaccgactcgatggcgttgttcttctcgtagcggatcggctcgtcgagtccgtagcgcgacaggtcgatgccgctggagctggcgaagtgcgccaggccggcctcggggctggcgtagcggcggtactcggcatgcttgtcgcgggcctcggccgcggtggcggcgacgatcacgttgatgcccatgaagatcctgatgtcctcggcgcgacggccggcgccgaccaccgccgcgcggatgcgctgcaccaactggcgggtggcctcgcgggtctgtccggagacaaacacgcattcggcgtggcgcgcggcgaaggccaggccacgctccgaggagccggcctggaacagcaccggggtgcgctgtggagagggctcggcgaggtggtagccctcgacctggtagaactcgccatggtggcggatcttgtggatcttctccggccgcgcgtagacccgtcgctggcggtcggcgagcaccgcgtcgtcttcccagctgccctcccagagcttgtagaggacctccaggtactcgtcggcgcggtcgtagcggcggtcgtgctcgatctgcgcggactggcccatggccttggccgcgctttccaggtagccggtgacgatgttccagccgatccgcccgtcgctcaaatggtcgagggtcgagagccgccgggcgaacgggtagggcgcctcgtaggtgaggttggcggtgacgccgaaacccaggtgctcggtgaccccggccatggccgagaccagcatcagcgggtcgttcaccggcaactggacggcttcgcgggcggtcacctcgatgccgccctggtagacgtcgtagacgccgaggatatcggcgatgaacaggccgtcgaacaggccgcgctccagcagccgggccagctcggtccagtggcgcagtttgcggtagtcgctggagcggtcgcgtgggtgggtccagaggccgtggttgatatggccgacgcaattcatgctgaaggcgtttag

SEQ ID NO: 349469 - DNA, 981 bp, Pseudomonas aeruginosa
  misc_feature (234)..(234): n is a, c, g, or t
atgagccagatgagcttttccgactttgagtacgccggcaagcgcaagcagacccgccgagagcgcttcctcgccgaaatggatcaggtggtgccctgggcaggcctgctggagctgatcgaaccgttctaccccaaggccggcggcggtagaaaaccctatcctctggaaaccatgctgcgcatccatctgttgcagaactggttctccctgagcgacccggccatggaagangcgctctacgaaatcacgcccatgcgccagttcgcactcctgacgctgagcgcgccaatccccgaagacaccacgatcatgaacttccggcacttgctggagaagcatcagctcgcaccggcaatccttgcggtcatcaatggttatctgcaggaaaaaggcctgtcgctgcgccaaggcaccatcgtcgatgccaccattattcatgcccccagctcgaccaaaaataaagaaggcaagcgtgatcccgagatgcaccagaccaagaaaggcggtcagtatttcttcgggatgaaggcgcacatcggtgccgatgtcgagtccggcctggtgcatcacgtccatggcaccgctgccaatgtggccgatgtcacgcaggtggctgaactgctgcatggcgaagaaaacgccgtgtatgcagatgccggttacaccggtgtcgaaaggcgcgaagagcatgaaaatcggggggtgatctggcagattgcagcgcgtcgcagcacctattccaagctgaaccagcgcagcgtactgtacaaagccaagcgcaagatcgagttctgcaaggctcagacacgggccaaggtcgagcatccgtttcgcgtgatcaagcggcagtttggttacgtgaaagtacgttttcgtgggctgatgaaaaacacggctcagttgaccacgctgttcgccctggcaaacctgtggagggttcgaaaacagctcatgggtatgggtgaggttcgcgtttaa

SEQ ID NO: 349470 - DNA, 933 bp, Pseudomonas aeruginosa
  misc_feature (917)..(926): n is a, c, g, or t
gtgaatagctttttcaataaatacattgaggctggaaagtcacttgctgagtctcgcggactagattgggatctggcggcagacctcgaaggcaacattatcaagacagcgcgctgggatctcgcaaagctatgcggacttccctcccccccatatttctggcactcatacctggggcctgactcaaatgcactggatttattcaacggctaccgtgcacgccaaggtctcgaaccagttgccactgaaatcctttccaaaccgtggcgcgatttctaccaagcagtgctgcttaacgaactcttggttaagcgcaacaaaccggggcatgcacttaacaatattgggcgtgcgctacgtattcttgcaacctgtgctgcggccgaaactccatggcagctttctcccgatacaattcagttatcgtacaacgtggcactcagcctgggcagttcagggaagttggcttccaatgtctgtatggttatacgtaatctaatagacgccctgcatatttcggatcgatcacctctggcaagattttgcgaaccatatccagagcaagtagatctagataagaatgtttcaaagttgcgtaaaggtaacaatacgtaccgagcaacggagaaggtacggacagagctgtctgaaagaaagtctgcggctcgcctacctgatgaaaaggcgttctgggaacttgtccggatagtgtttacggaaaaaccccgaactttctcagatgcaatgcgcttcaatcagatcaagatccaaattgcttgtggattccggattggtgaaaacactttactgcctctggattggaagcggtcgcatgactacatcgccgctgatggtagacctgctggcgagttaggtggtatttctcgagcactatcaattcggcattttgctgaaannnnnnnnnngatatag

SEQ ID NO: 349471 - DNA, 465 bp, Pseudomonas aeruginosa
gtgaaactctggctgttgcgccacggcgaggccgaaccgcacgccagccgggattccgagcggcgcctgaccgcccatggacgcaaggaggtgctgcagagcgccgcgcggctggccgggttgccgctggacgggattctcgccagcccctacgtgcgcgcccagcagaccgccgagctggtgcgcgaggcactgggcctggtcgagccggtcggcaccgcgccctggttgacccccgacgacgatccgcgcgaggtgctcggtttcctcgacgagcgcagcgagcgcaatctcctgctggtcagccaccagcccctggtcggggcgctgggcggtctgctggtgcatggcaaccggcgcgatccattgccgatgagcactgcctcgctggccgagctggaaggcgacttcgccgccgccgggctgatgaccctggtctcgctgcatcacccgcggcacggctag

SEQ ID NO: 349472 - DNA, 5115 bp, Pseudomonas aeruginosa
atgaatgtttttgacctcgatgcggatctactgagccgttatgaggcttttgctcgatcgttcactatgatccgtgcgcaggatattagcgcgcaggttgaagatatctaccggagtggcaggttctggcctgagccgttgattggggttaatccgcatttcgagaccgggcgtgcgctggttgatctagctgaagagggtgtggtcgatccagatttgcccaaagtttttgccttcggcgcagatcgttcgccgattagtctgcaccgccaccaggaccagtcgctgtcgaaggcgctgcaggggcgcaactacatcgtcaccaccggcacaggatcgggcaagtcgctgtgcttcttcgtaccaatcattgaccgcatccttaaggccaaacgcgccggagccgcgccgcgcacgcgcgcaatagttatctatccgatgaacgcgctggcgaattcgcagcgtgaggagctggagaagttcatcgaaggctgcggcattgatccccacctcaaaccaacctttgagcgctacaccggccaggaaagcgacactgagcgcaagcggatcgcggcggcgaagcccgacatcatcctgaccaacttcatgatgctcgagctactgatgacccggcaggatggcctcgaccaagaagtcatcactaacatgcaggggctggagttcctcgtactggacgagttgcacacttatcgtgggcggcagggtgctgacgtcgcgatgttggtgcggcgcgtacgcgagcgcctgggcgcgaaggacatgctgtgcatcggtacctcggcgactatggcctcgggcgacgaggacgcggggcgcagggcggtggcgaaagtcggcaccattctgttcggtagttcggtgcacgaggacgacgtgattaccgagagtctgtcgcgttgtaccgagggggtggctaggcccgaggcgctcaaggcggcagtgctccagcccgagtcggtcccgactgactatgaggcatttcgccgtgatccgttggcggtgtggatcgagatgcacatcggtctcgatgaggaagagtcacgccgccgccgcaggccgcagacgctgaccgaggcggccgcaactctggcgacgcatactggcctcgatgcagcactctgccgccaggcgctggaagtgcgcctcatcgtgatgagcgagtgcaaggacgagcgcgatcaggcattcatggctttcaagctgcatcgtttcctctcgggggcgggccacgcccatgccaccttgcagcctgccggaaagcgtcgcgtcgcgctcgccgctgagaaatatgaccgagaggatcgtgctgcgcggctctacccagtgtttttctgtcgcgagtgtgggcatgaggtccattcggtttcgattgacgacgagggagttgtcgtcgctcgcccgatcgaccaaaccccgcgcgacggcgtcgacagcgaggggtggcagcacggtttcctagtgccagacgccgatggttcccttacgttctcgggctcaattgaagactatcccgacgactggttggaagtgaccaagtccggcgatccgcgcctcaagtccagccatcgtggcaagcacgacgggcgcttgatgctgctcggtgcggacgggcgcggcgatatggacggggtacgcgcctggttcttcccgggaaagttccgcttctgtccgcattgccgcaaccagcccccgccgcaggcgcgcgacttcaacaagctggcgggcctctcggccgaaggtcgcagctctgcgacaacgctcatcacagccactgcgcttgactggatggagcgcggccaggtgcccgtcgagaaagcacggcgcaagctgttggggttcactgacaatcgtcaggacgcggcgttgcagtcgggtcattttaacgacttcatcttcgtcactctgctgcggggggcgatgctgcgcgccgtgcgcgctgctggagacgaggggttaagacacgagcagttcggtgatgcgctccgacgcgcgctcggcttcaatccggaggacaagggccgccgcgcggcctggatgctggatccggacccaaagggcttcgccgcgctcgacgaggcgaagaccgcaatcaaccgcgtgctggcccatcgcatgtggaacgacctgcggcgaggctggcgcttcactaatccgaaccttgaccagctcgaccttatccacattgagtatcccggcgttgctatgctggccgaggacgaagaaagctgctgcggcaaggatcaggagagcctgaccgatgctcagagccggggcttcgcgatcctctcggcgattccggccgagatgcgcctggcgatgtttcgcgatcttttcgacacgatgcgccagggactggcggtcgcggtcgatgcgctcgatcctgtagagctggagcaggttgcccagaaatcgcggagcgtgctcaaagatccctgggcgataagtgccgaggagcagtacaaggatctcaacttcctcaacaccctggtggttgggttggcggcgggcaagcatgaccgtgttgtgcgcgtctcggctcgcagcgggctggcacacaggctagtcaagctgtcgggaatgaagattcccctcgctgatcgcgagcctttgctggaggcgatgctggcggctgctgcaaaacatcaggtagtgcgtcagttctcggtcggatccttggcgggctggcggctcgcgcccagtgcggtgcgactgcggccaggtgcggggaagcccgataacggtaagggcaacgctttcttcgcaggcctctatgccgatgtcgcagctaggctcggaacaccgggcgacctgccgatggccttcgaagcgcgtgagcataccgcccaggttgattcgttactgcgtgaactgcgcgaatgtcgcttccgcttcggcgccaacgacatggtccgcatggccgagatgtcgggcgaggcacgcgtgattaatgagaagcgcgatttcctaccgctgctttactgctcgccgacgatggagctaggcgtcgacatctcgcagctcaacgtcgtttacttgcgcaatgctccgccgacaccggctaattacgctcagcgggcaggtcgcgctgggcgcagcgggcaggcggctctcgtcgtgacctactgcgcggcgcagagccctcacgaccagtattatttcgagcgacggatcgatctcgttgccggtatcgtcaaagctccggcgatcgacctcgtcaatgctgatctgctttctgcccacgtacatgccgagtggttggctgcggcgaaggagtcgttgggtaagtcgatccccgataatctcgacatggatgccgagggccttccggttaggcccgggactctcgccgccttcgctagggcgacgatggacatcgaggcgcaggcgcgggcgggcaagatcgttgcctcagctttgccggtagaaggtgcgccacagatcggcaatccagtctcgttcgtcgccaacttgtggggcaatagtgcaaaggaatttgacgccgccttccggcgctggcgagaactctatcgctccgcctgcctggatcgcgacgaagcacatcgtattggccagcgtaccggcctcggcgcacaggagcggcgcgaggctcgggcacgttatgtaggtgcggacaaacaggtggaactgctggcgacgggcgtatcctcccaaagctcggacttctatgtttaccgttatcttgcgacggaagggttcctcccgggttacaacttcccgcgcctgccgctctatgccttcatcgatgccgacaagtcctctacggtgttgcagcgcccgcgtttccttgcgatcgcggagtttgggccgaatagcctcgtttaccacgaaggcaaggcttatcgctgcaaccgcgcaaagctgccggccggctcgcgcaacgaggacaatacacttgtcacgcgcactatgaagtgctgccaatcctgcggcgcagcgcacgaaagcgagacgctagagcgttgcgtggtctgtaatgatcctctaaccgacgaggggcggctctccaaactctatcgaatcgagaacgttgatgccgtccccggcgcgaggatcacggccaacgacgaggatcggcagcggcgtgggtttgacttgcgcacgatctttcagtgggacacccagcggcaagaagacctgctgctcaaggctgatgaaagcccgctagctatgctgtcctatggcccgcaaacgaagctctcacgtgtgaatttgggcttgcgacggcgtaaggagaaggcgcataccggcttcgacatcgacacgttgactggccgctggctcaatgacccagatgcagacgacgaacagggcgaagatcccaaggcagcacgtcgccagtcgattgtcccggttgtggaggataccaagaacgctctgctggtgcgttttgaccagggcctagggctatctacagcgcagatggcaacacttcagcacgcgctgattcgtgccatcgaggccgagcacgtcctggaaaccggagaactgttgggagagccgctgcccacccgagaggatcgcaaggcaatcctgctctacgaggctactgagggcggggcaggcgtgctcaagcggctgatggatggtccggaacgttggcagcgcatcgccgaagtagctctgggccttatgcatcttgagcagggggaggatggtgacctacacgatactgaagatgcctgcgtcgcagggtgttaccgctgtctgctgtcctactacaaccagcccgaccacgagatgatcgaccgtgaggacgataaggtacgagaagtgatcgagcgcatggtgcgctgcgagcgtgatcgtccggccaatactgccccgagcgaagacgatccttggctggttgcgatcgcccgctggaaggcgcccttaccacggtctgagatcgtcgccggcactccctggccgctttgctggccggatctactggtcatggctgtcgtcggaaccccgccgcccgaactcgtcatccgctgtgcggcgattgggcgtgacctcatcgaactgccggaattgcccggcgaaacaatgccgcccgcgttggcggcggcgcttggagtgcctgtatga

SEQ ID NO: 349473 - DNA, 2799 bp, Pseudomonas aeruginosa
atgaattcccccctcacgaccggccagtttcagaccggcgacctcgttaaggcccgcgaacgtgagtggatcgtgctcggtaagccgggcgaggggctgatgcgggtgcggccgctgtccggttcggaagaggatgccatcgtcatcgccaccgcgctggagcgaacccctgtccagcctgcaacctttgatcctcctagttccgatcagctcgacacacaggatgcggcgcgaatgttggccgatgcgctgcgcctttcgctgcgacgcggggcaggaccgttccgaagcgcggcgcacctcggcgtcgagccgcgtgcctatcagttggttccactgctcatggcgatgcgcctcgaggtgaagcgtctgttgatcgccgacgatgtgggtatcggcaagaccatcgaggcgggcatgatccttcgcgaaatgctagatcgtagcgagattgagcgcttcgccgtcctgtgcccgccgcacctagtcgaccagtgggtaggggaactggctgagaagttcgacatagatgccgttgctgttacttccagtcgcgctcgttcactagagcgtggccttgcgcccggtgatacgattttcgcggtacatcccttcaccgttgtcagcctcgactacatcaaggcagatagccgtcgtgccagcttcgcacagacctgccctgaattcgtcatcgtcgatgaggcacacacctgcgttggtggcaatgagagcggcacccaccagcgcttcgccttgcttgaatcgctggccgagaaggccgggcggcatctgctgctgcttacggcaactccacacagcggtaaccaggatgcctatgcgcgcctgctcagcctattgcattcagatcttaacggcggtcccgatgtgcccgatgccaacgccgtcgagcgctatcgtcgccgcctcgcccagcacttcgtgcagcgccgccgccccgacattgctgacaagtggggggaagctcgcgccttcgccattccgatgaagaaagacgcaccctatgcgctcactggaaacttccagaacttccaggaggacgtgttggaatattgcgtcggcgttgccactcgcgtcgacggtgaaaaggcgcgccgcctggctttctggggcacgctggcactgatgcgctgtgtgggctcctcacccgccgccgcgctcagcgcgctgcgcaacagactcggtggaatggcccagcaggacgcgctcgaacccatcctatttgacagtgatgagggcgacttcgccgacactgatctcgagcccgccaccgccctcgataccgaggaagtcgcagaactgcgtaccttgattaccaaggcggaaagattggtcgacagcttcgacaaggatcccaaggtgcttgagctgatccgctgggtcacatacctgacaaaggagaagggtgcacgtccagtagtattctgtcgtttcatcaacactgccgaggcagtcggtgcggcgcttcaatcagtatttaagaagcacaaggttgaagtcgtcaccggtcgcctcacgcccgaggaacgccgcctgcgcgtcgaggcgctggaagactaccctgaccgcatcctcgtcgctaccgactgcctttctgagggtattaacctgcagcggctgtccaacgcagtggtccactacgaccttaactggaatcccacccgccaccagcagcgcgacgggcgggtcgaccgcttcggccagcaggcgacggaagtctggtcggtgatgatgttcggcgagaactcaatcattgatggcgccgtaatcaaggtcatcaaagaaaagatggagcgcatccagaaggaaaccggtgtcgtcgtcccggtgcccgaggattccgccagtgtctccaacgcactgatgcaggccatgcttctccattccagcagacctcgtgcgcaaggcatgttcgacttcggtgatgctgccgtaaagctcgacgaccaatggaggaatgccgaggaggacgcccgccgcagtcagacgcgctatgcccagtccgcgctcaagcccgaggaggttctccccgaatggcatcgtctacgcgcccttctcggcgggcctgaggaagtgagccgtttcacccgccgcgcgttgttgcgtatcgacaagcctcttggcgagcagggcccgtactggcgcgtccactacgatgacatgccccagcagttgcgcgagcggctcgcggcacgcagactcaccggcacccgcttgatcggattcgaggacaacctgccgcccgaggttgcccatgtcggccgcacccacccgctcgtagcgctactggccgaaaccatggccgagggcgccctcgatcccgcctcggtcgagggcaaggtcgcgctcggtcgcgccggggcctggcgcacgcgcgcggtggattcgctcaccaccgtcctgctgctgcgcctgcgcttcaagctgaccacaagtggccgccgcactctattggctgaggaagccactgcgctcgcctttggtcccgccgctaccgatgccttcgtactgggcgcggatgcgctcgcgctgcttgaggctgacgccagcggcaatatcgagacttctgtcatcgcccgccagatcgacgcggcgcttgcccgtctcgatggttaccaatccgccatcgctgcctacgccagtacgcgtgcagctcagctgtccgaggatcacgaccgcgtgaaggctgcaacccgtggcgaaggtgccaccaccgaagtggagcctgtactgcctgccgacgtcatcggcctctatgtcctcgtgccggaggcgaactga

SEQ ID NO: 349474 - DNA, 3858 bp, Pseudomonas aeruginosa
atgagccgcttttcccgtgccgccgagcttggcctcgacgccgtcaccatccagggcggcttgatcgcccccgagcaggtgcagaagatggccgctgcctcctccacggcgaagctcgccgccagctatgattgtccccgcggcaccagcctgaacgatgaggttgcgcgctacttccgcatcggccaggcgctctggtcagactatgagcggattgagcacaagaccgtcacgcacaccgctcagttcgtgcacgatctgctttcgcagtgttttggtttcgacgaccttgccggcccggtggatcatgttgaggtcaaccgtcgctaccgtcttgcctgggaagccagggcgggccgtgttcccatcgttgtggctgcgcctgccataggccgtgaaccgttcaacttgtccgcacctgagttcggcgatggtgcgggcggtagtcgcttcaaacgtagtcccgtctcattgctgcaagactggctcaacagcgccgaccaggcactgtgggggctcgtctttgcgggcgataaagtgcgcctgatgcgcgacaacgccagcctcacccgccctgcatggatcgaggcagatctcggcgctatctttcgtgaggagatgtttgccgactttaccgcctggtggctgctcacccacgccacccgtttcggtacggcaggggcaccgacgtctgattgcgctttggaggagtggcgcagcgcagggctgaagcagggtgaggccgcccgcgccgacctctacaagaatgttaggcaggctttggccgaactcggccagggtgtggtcgaggcgaatcccgacttgcgcaggaggctggtcgataaaaccgagctcaccgcgttcttcgaggagctgctgcgcaccgcctaccgactgatcttcctagctgtcgccgaggaccgcgacctgcttcaccacggccgtgtcagcctggaggctcgtgcgctctatcgtgacagctattccttcggcttctggcgcgaacgcgcacggcgtcgggtagcgcgcgatacacatcacgacgcgtgggaggcgatgaaaatcaccctcgccagtctggcggacggtcaggatctgctcggccttcccgcgctaggtggcctgttcgccaccgagtctacaccgatgatgaacggcgcgaagatcagcaatcgtcgttttctgaatgcgctgttctacctcggcttcattatgcgcaatggcgccacgcaccgtatcaactggcgcgatcttaagacggaggagctgggcagcgtctacgagggcctgctggaaattaccccacggctgggcaccaatgatgtcttcgacctcgacgacagcgcgcatggcaatgcccgcaaaaccagtgggagctattacacacccgacagtttggtggagaagctgctcgatagcgcactcgatccggtactccagaaggccgagaacgaggccgacacgcccgcgcgaaagatcgctgcgatcctcgacctcaaggtgatcgacccagcctgcggatcgggccacttccttctaggtgccgcccgccgaatggctgaccgggtggctaagttgcgcaacgaggacgccggcaaggaggaaacccaggcggccctgcgtgatgtcgtcagccgctgcatccacggcgtcgatcgcaacccgatggcggtggagctcgccaaagtggcgctatggattgagagcgtctcgccaggcaagccgctcggcttcctcgacggcaatatccgctgcggcgacgcgctactgggagtgttcgaccttgacgcgctggaacagggcatccccgacgaggcatacaagccgctggcgggggataaccaggacgcggccaagtactacctcagggtcaaccgtgacgccagggccgggcagggcgcgttcgacttcgctggtggtggtggggctatgcctccggcgaagctggcggccaacctaagcgtgatccgtaaaatgcccgaggacaccgtgggccaggtggagaaaaagcgcgaagcctacgtgacctggcgcggcgacccggcgcgacaggcgactcacgtcgcctgcgacctctacgtcgccgctttcctgctacctaagatcaaggttcctgacagtaatagcgagggactggtgccgacgacgaccgacgtgcgctggcaactggcgggacagcagatcaacagccaactctacgccgccacgctgaaagtgtccgaagacgcgcgcctgctgcactggccgctggcatttccggacgtgatgatcgagcggggtggcttcgacgtggtgctgggcaatccgccgtgggacacgatgagccctgacgtgaaggagttcttctcgggttatgaacccgagatccgtttcatgtctcccgacgatcagaagcagcgtctcgatgagttactgcagaacgctgagctcgcgacagtttgggaggaagagcaaagtcgtctttatcgaacagccaattttttacgaaatagcaatcgcttcacgctcttcgcaaagggcaatctcggcaaaggcgacttcaacgtttaccgaatgttcgtcgagtttgcattccgcggcgtgaaacccggcggcgtggcagcgcagatcgtgccggaaaacttctacaacggtgccaacgccgcggcactgcgtcagtttgtttttgagcggatgcgcctactaacgcttattactctagagaatacacggcgcgtctggttcgacatccatgcatcgcagaagttttgtatgtatgcagcggcatctgggggggcaacaacaacgattccggcagcattcggcatcaacagcgaggccaagctggcagaattaagcgcgctactgccgttccagattccgctgtcgctggttcatgagcttagccctgcggctctcgccgtgcctgagttcgctgatccgcgcgacgtgtcaatcgtgcggaaacttcacgagcgcctaccttcttttggggcacctacaccggaggggcatgatcgtgtctatatgcgcgaaatcgatatggggaatgatcgagattccttcagcgaggatgctgacgcaatccctctgttcgaagggcgtatggtggaggcgtttgattaccgcgcgaaaggctatgtaggggggcgtggacgaaaatcagagtgggctgacttggcttttggacatccctccaaggctatacggccacaatggtttgttctcgaggagaacgtgccagaaaagctttctgagcgctggcacgactacagaattggtttttgcgatgtggccagcccctcgaattcgcgcactctagtcgccgcgatgatccctcctgacactctgtgcggccataaagtgccgacgctttccttctcccccccagctgatgagctttcgcttctttggctaggcctcgccaattccttcgctttagattttttggctcgccagaaagtcgctttgacgatgtcctatacgatcgtagacagctttccgctgccaaggcgataccaaaatactgcagttgagcaggcgattgcttcgcgcgcggcaaggttgagctgtagcggcaaggagatggcggcactctgggcaagacttcccagtacctggtccaatttgcctcctgctgatgatccgggaacacggcgattgttgcgtgcagagctcgacgtcttggtcgctcgcgacttcttcggtctaacccgtgacgagatgcgttacctactcgacccctcatcggtccttgggcctgattgcgggattgagaccttcggcgctctcaaacgtgcagagatgcgtagcgagcagtccttcaccactttcgacctgattatggaggcttgggatgcgcttgatgtccctcgctga

SEQ ID NO: 349475 - DNA, 153 bp, Pseudomonas aeruginosa
atgcgcttgatgtccctcgctgatctcacggtaaccagccgctccttcaccgccgtcgcgttggtcgaggattgtgtccaacgctttttcctcgcgctctacgacaagctttttgccacggaccttcgcccgcgcttggaaggttatcgatga

SEQ ID NO: 349476 - DNA, 792 bp, Pseudomonas aeruginosa
atgacccccaccgctttgcgccggtccatcccgcatccgattctgcgcaccgaacttgaacaggccgcctggaaccatggttatcgccgagccaatggcgaggcggatgggtggctgtggttccgctcggacgaaggcgtgcccggcgaggtggcactggcctgcggagccggcgatgacggcgcgccctggttcctcgcagtggagcatgccggggtggcgcaagtccttacttccgagttgcctgaggcggtctccggccctgccccagcgtcgtgcaaaggagtgttcgccttcgctcggcaagccgagatgcgccgcgcactgagccgcgccttccatctagcccgcagcttgccaaccttccccttcacccagtttgaggccgaggttgctgagctgggtgataccgagatagaccgtatcgtgcgtcagcgcgttgggcagggcttcttccgcgctgcgctaatcgattactggggcgcatgcccgcttactggcgtaagcgatcctgcgcttttgcgcgccagccacatcgtcccctgggccgaatgcgaaagtgacgccgagcgcctcgatgtgttcaacggcttgctcttgtgtgcccactgggacgcggccttcgactcggggctggtaagcttttctgatgacggctcggtgatcgctagtccaaacctcagcgccaaggctgaggccgttctgaatctttccaacgtatcgccccttcatcttgaggccccgcaccgcttccagatggcgcgtcatcgcaagaagtttggcttcgagtag

SEQ ID NO: 349477 - DNA, 1383 bp, Pseudomonas aeruginosa
atgaaacagtggcaacgcaatatccttattttggccatcggtggcggggttctggcttttgcgctgagccaggtgttaccgagctttcgcaccgccagcagcggcatgacgatcgataccaacgacgccgcactgatcaagcgcggtgaatacattgcccgcaccgccgactgcgtggcctgccataccacgttgggcggcaagccgttcgccggtggcctgccgatgttgacgcctctgggcgccatctactccaccaacatcacgcccgaccgggaaaccggcattggcgagtacaccttcgacgacttcctgaacgccaccaagcacggcgtacgcaaggacaacagcgcgctttatccagccatgccctatccctcgtacggcatcatgccggatgaggacatcgccgcgatgtacgcgtacttcatgtcggccgtagagcctgtcaaccagcccaacaaagcaagcgaactaccgcctgtgctcaactggcgctggccgctggcctactggcaggccctgtttgccgccgagcgcgatttcgtgccggagacgaacgacccgatgctcactcgcggccagtatttgatcgaagggccgggccactgtggctcgtgccataccgaacgcggcatcggcttccaggaagtggcgctgtccgacgccggctcggatgaattcctcagtggcgccatcatcgatggctggcgcgccaagagcctgcgcggcgagcatcgcggcctaggtacctggagcaccgcagagctggctgatttcttcaagaccggccgtaccggcaccaccgcagccttcggtgctatggccgaggtggtcgagcacagcacgcagtacatgaccgatgacgacatccaggccatggcggcttacctgaaaacgctcagccccgcgccaggtaaggaaatcgacctcccgccgaagcaggatttcaccacccagaaactgctggatggcgtctacgactcgcgcggcgcgctgctgtacgtcgagtattgccaggtttgccatcgcgccgatggcaaaggcgtgccccgaatcttcccagcgctggacggtaacagcgcggtgtattcacgctatccggactccgtattacagatcactctcagcggcggtcgtatgcccgacacgccccatgaccgcatggccttttccatgccggcattcaacacgctcgccgatgccgatatcgctgaagtcgttaattttatccgcaacagctggaccaaccaggcgagtgaggtgacggttggcgatgtcgtcgccatgcgccatttcctgagcaaaaaacctcgcgttggaaccgacctaccgcccgacctgagcgtgacccacacggagcaaggagttcatggtgaataa

SEQ ID NO: 349478 - DNA, 954 bp, Pseudomonas aeruginosa
  misc_feature (769)..(769): n is a, c, g, or t
atggtgaataaactgttcttgagcattcttgctcggcgcggcatcagccatgcgcgccgcggcgccctcccgctaacggccgcagccatcattgccgccacgacgagcgcttgctccgagccggagccaacacaacgcaatgccgcccagtacgatctggtcaccctggacgatgccaaccagaaaatcggccgctataccattccgcaggacactgcgattgtcgatgagccgaacgccgatcagatcttttatggcaagcgcctgctcaatgaaaccaagcgcctgctgccggagcatgtcggcgccgccatgaactgcaacagctgtcatattgcgcaaggcaagattccgctaggcgacccgtacatcaacagctttaacttttacccgcgcgtcatgccacgggccggcaaggaagttgatctggtgggccgcatcaatggctgcttccagcgctcgatgaacggtaagccagtgcctcgcgattccgaggaaatgaaggcgatggttgcctatatggagtggctggcgcagagcacgcccaaggatcagctggtcgatatccgcaatgccggcgtcatagacgagagcttggtgcccgacccggagcacggcgaacagatctattacgcccagtgcgctacctgtcacggcgacaatggcgagggtatcaaggacagccgcggcgatatcgtctttccgccactgtggggcgaagagtctttcaacatcggcgccggcatggcgcgaacctataaagcggccnctttcgtcaaatacaacatgccgatgggcattcaaaccaagggcctgtggggtcatggtaatgtgctgtccgaccaagacgccgtggatgtcgccgaattcttcactcacaagccgagacctgactttgtcggcaaggttaacgattggcccaacaggccaagacctaaggatgctcgctattaa

SEQ ID NO: 349479 - DNA, 1260 bp, Pseudomonas aeruginosa
atgatcctagataccaaagctcatgtgttttggctggacttggcaagcggtgccaggtcaacaatcctgatgctatcgccctatctaactgggccgcttgctgaggaaatcctcagtacctctgaacggagcagggtttatacccggtttgacgctgaactatttgcctccagagcttcgagcctagctgttctccagcagctgatagaagccggacaccagctctttcaccttgatgcgttgcacgccaaggttgtgattgcaccaaaggaattcgctactgtcgggagtcagaatgtaacatcgaacggtcaaaagaatttggaactaagcggctacttctcggacgccgagtcagtagcccgagtgcacagcttaatagaaccatggctaggaaaagctgtgccgatcacgttgcagatgatcaaggaaatggaggtgcttcttcctcctttgatggaagtctacgacgccttccacgttgcttgcgtagttgcgcagaagaagattagcaggtcagccgccagcggtctaaggcgcgcagagctggaaaaggtagagcgtactcaagcggagttgaagtccgaaataatgcgtgcgcttgaggcggctccgatttcagaggaatgggatcttggaatcgtacattttcgtgaggctggacaaacatcacttttcagttcaagccgagatctaattacttggacggtcgctggacgttcggtagccttggaaagactgtctaggtatttgtgcatcacagatgctggtgaagtcggatgggcacgtgtagcccaaacccgtatatccatggttggtcgaggtatcgatttcagagaaaaaattattgccgagcgtccaacttggcgagtcgaagttgattcaagaaaagactacctagatggcctgccaaaagacgcaaatctcataattacggttaagcaatatggccgcaagctttgtgttattcctatgcggttcgctttatcgtcatacaagacgtttgcaccacgccgcgttagtcaatcagatggtgcggagtcggcggaatgtcaaaacgcacgggcttggatcagagagcaccgagtaagctttgaacagcaggtgatttaccgtatcacccggacattcaaatacgggtcgaatctattgggagaggacgccacattcttcggcaaaccagagagtgaacacgtcatcagagttgcgctgatcaggggtaatccagttctgtttgtgaaaagcggctctcggccttga

SEQ ID NO: 349480 - DNA, 1323 bp, Pseudomonas aeruginosa
atggtgaaggtgccgattaacgcccgcctgtccctggatgaaatcatccagatactcaacgactcccatagccaagcagtactctgcgagggccgcttcgccgcagcgctacatagccgccgcggagagatgcctcgacttagcttgatcatttctctggatgatgatgcaggagatgtcagctacgcgtccgtgctgcagcgtggcactgatgaagcgatgcactgtgatcctgtggacgacgccctggcggtgctgcactacacctccggcagctccggcgtgcttaaggcagccatgctctcgtacggcaaccgcaaggcactgatccgcaagagcatcgccagccccacgcggcgagccgctcctggcgacgtaatggcgcatgtcgggccaatcacccatgccagcggcatgcaaatcatgccgctgctggcgctgggagcatgcaatctgctgctggaacgctatgaggaccgtctgctgctggagaccatccaacgcgaacgggtgacacgtttgtttctagtgcctgcgatgatcaaccgcctggtcaacgtgcccgaggtcgaccgctacgacctctccagcctacgcctggtcatgtacggtgccgcgcccatggcacctgcccaagtcaagcgcgccatcgaggtgttcgggccaatactcgctcagggttatggcgcgggagaaacctgctcgctagtcaccgtgctgaccgagcaagaccacttgattgagggcgatgaccataaccgccttgcgtcctgcggacgctgctacttcgagacagaccttcgcgtggtgaacgagcagttcgaggacgttaagcctggcgagatcggcgagatcgtggtcaagggcccggacatcatgcagggctattggcaagcgccggagctcactgctgaagtgatgcgcgatggctactacctcaccggcgacctggccaaagtagacgagcgcggctacgtgttcatcgtcgaccgcaagaaggaaatgatcatttccggtggattcaacatctacccgaccgaagtggagcaagtgctctataccctgccacagattttcgaggctgcggtagtcggcgtgcccgacgaacaatggggcgaggctatacgcgcagtagtcgtactcaagccgggagaaagcctgaccgccgagcaaattatcgagcattgcggacgcagcctggccggcttcaagaagccgcgggccgtggacttcgtcagcgagctaccgaagaacccgaatggcaaagtcgtgcgccgcgtgattcgcgaagcgtactggcagaacagtgagcgacggatctga

SEQ ID NO: 349481 - DNA, 1161 bp, Pseudomonas aeruginosa
atgatcaagccaagcgaaaaagccacccgcataatcgagggtatccaggcgtacgtccgcgatgaattgaccccgctcgccgagcgtgaaggcatcatctggggagagcctgtcgccaagccggtgctgcgcgatgtatggcgtcgctcctgcgaactgggtttctacaatgtgatgctgcccgaagcgcttggcggtgccggcctcagcgtggctgaactgtgtgcggtcaaggaagcagcagtactcacaggctcgccgctggctccgcacatactgggtgagttatccggcccaccgcgcatcggtcatctgttccgcgtcgcaagcgaacatcagattgaggctttcctccgtcccgtgtgccgagctgagaaagcggtgtgtttcgcccttacagaggccgaggctggctccgatgccagcgcgattagcacatcggcacgacgcgaaggcgattactacgtacttaacggtgccaagcgctacatctccggagcgccttacgccgacctcgcggtgctgctcgcagtgaccgaaccgggtcgcggtccacagggcatttcggcgttcttcattgacctgagtgccgagggcgtaagtatcgaaagcgactactcggtgatgtccggtggtggtgcccacggcaatatcgtgctggaagaggtacgcgtgccggtagaaaaccgcatcggggatgaaggcgcaggcttcaaactggcgatggggcgtatcaccctaaatcgcctactgcactgtccgaccatgctcggtatggcgggcctcgcactgaacctgtcgctcgatcattcccgtacccgcaaacagttcggtcagcctatcgccatgttccaagccatcaatcacatgctcgccgacatggccaccgaactgtatgccgcgcgcagcatgatgtacgccactgcagccaacaatgacgctggcggcgacatcaaagtgcaggcgccgatgtgcaagctgttcgcctcggaaatcgccttccgcattgtcgataaggcggtgcagatccacggcggtacgggacttatcaagggccacccagtggagttcctctttcgtgccacgcgcatgatgcgcgtgctcaccggcaccagtgaaatccagcgtaacaccatcgccaaaggcatcctgatgccctga

SEQ ID NO: 349482 - DNA, 1299 bp, Pseudomonas aeruginosa
atgatccaagaagtcactgccttccgtcctcgtaccgcctggactatcgccttcctgctggcctttatgatgctggtcaacttcctcgacaaggtcgtcattggcctggtcggggtaccgatgaccaaagaattgggcctaacacctaccgagttcggtttgatcggcggcgctctgcactggctgtttgctgtgtccgcagtagttggcggattccttgccaaccgtcggccaacccgcaccctgcttttgggcatgggactgttttgggcggtgatccagctacctatgctgtttgccagctcgctgtggatgattgttgcctgccgggtgctgctcggcgtcggcgaaggaccagcctccccggttgccactcacgcgctgtataagtggttccctgatgatcgccgcagtctgccggtagccctactccactcaggtagcgccatgggcctgctggtggcgggcgcaatgatcccgtggatcagcctgaactatggctggcgtgtcaactttgcggtgctggcggccatcggtgcggtttggtgtgtgctatggctgctgcttggccgtgaaggtactctcgatagcctgcgagccggtcaaagtcccgcggacagccaccgcataccttaccgccgcctgctcaccgacagcagtgtgctgggcaactatgtttgccacttcgctgccaattggtcgctggcactgaccctgacttgggtacccagttatctggaaattggtctcggcctggacccgctgaagacggggcacatgttcgtgctgttcgtggtggtgaccacaccgctcagccttttcatggcctggctgtcacagcgcttactaagtagtggcataccttcgcgcctcgctaggggggccttcgtttcggtatgcctgatagccggaggattgttctcggcagcactgatgctgcaggagctatcggtcaccgtacgcatcatcagtctgaccttgagtggtggtctggcgctggttatgtactcggtaggaccggccatgctcggcgaatttactcccagcggtcagcgcggtggcattctcgctatcggcaacgcagtcgcctcgctggctggcctgtcggcgccagtgatcaccggtctgctggtgcaaggtgctggagctgaccaccctgaaggctacgcacaaggcttcctggtctgcggtggggtgatggtcgtagcaggtcttatcggtctaatgagtatgaatccacagcgttcgcgcgaacgcctgtctcaagagctcgtgcccgacgccagctcaagggcttga

SEQ ID NO: 349483 - DNA, 969 bp, Pseudomonas aeruginosa
atgaccctcaagcagctccgctacctgattgccattgctgaggcaggcagcttttccgccgctgcgaggcgggcttacatagcccagccggcgctgagccggcagatcggcctgctagaaagtgagttggggttgcagttgttggagcggcaacacgacggtgtggccctcacagacgctggtcgtcagctttatgaagtagctcgttcggtggtgcagaagctggactccgtgaaggacgagctgacctcgactcgcggtgaccccaaggggctggtctctatttcgatccccgctactgcgtcggcgttgcttctaccggaaatcatcgcgcgggctgcggagaaattccccagtatcagcctccgagtgtgtgatggcctcacccgcgaaggggggcaggcaatcgagttgggtaaggttgatttcggtgttgtgcccaatgctgaggagcttgagcatgtggcagccgagcctatctttaccgaggagctgtactgggtcgggccgagaagcgcggagggtgatgcacctataagcctggccgaggcagctgccacacggcttgtcatggcaccgcgtgcgttgcacctgcgtcgacgtattgagcaggccgccatggaggcgggggtggtgttgaatgtggcatacgagcagcagtcagcaccgggtatcgccagcctggttcgcagcgggctggcggcaaccatcagtaactggccgccgctggaagagctgcttgagcctactgctgcgcggctgattgtcgagccgcgcatcactcgtaccgtctccattacctactcagtgcacaaacccttgtcattcgccgcctcctgcatgcgcgatctagtgcgcacgatattactcgacgctgtccagaatggccgctggcgcggcagtttgatcgagcgtgaagtggacgacgatattcaagcccttgagctggcgtcgggcacgagctcttga

SEQ ID NO: 349484 - DNA, 384 bp, Pseudomonas aeruginosa
atgcccgtgcacacacaccgcaaaccattgagccagctattgctcggtggcgacgagcccgacccgcgcttcaccctggccaacgaacgcaccttcctggcctggatccgcacggccctggcactgctcggcggaggcatcgccgtagagactttcgccggccaggccttcgagccactgttgcggctgtgcatcaccctcagcctgctggcgctgtgcatcctggtcagcgcgggcgcctgcctgcgctggctcgcggtagagcgcgccctgcgccatcgccgcgccctgcccctgcccgtgctggtcccgctgctggccttcggctgctgtctggcggcactgatcctggtcggcctgttctggccacgctggcatgcctga

SEQ ID NO: 349485 - DNA, 315 bp, Pseudomonas aeruginosa
atgcctgactgcttgagcgaccccggcctgcaagccgaacgcacggagctagcctggcgccgcacacaactgtcgttgctggtgatcgcctgcctggcactgcgcggccaagaacaggcagtgacgctgctcgccctgggctgcgccgcgttgctctggctcggccagcgccgtcgctaccggcgcagcctggccatgctgcgcgacgaacgcggtcgcgcccggctgtgcgcggtgcttggcactagcctggcgctgctggccatggcgctgctggcaatactcggcgccctgctgaggggcaccccactctga

SEQ ID NO: 349486 - DNA, 1389 bp, Pseudomonas aeruginosa
atgacgctgactaggaagactcgctgggctctcgcgctcggcagcggcgcgctgctcgccgccggcatcgctacccacagcgtgctgcaacaggcgcgggagaccgcccaggcctatctgttcggctacccgctggtgatcatggagctgaccaagcagcaccagaagctgctcggcaccaccgccatcaacggtttccgccatagccggcgcttccctgacgccagcttcaacagcgtggtgtcgccgaacgtcgacaccctctacagcatcgtccacttcgatctgcgccgggagccggtggtgatgagcatccccgacaccatggggcactactacatgatgccgatcatggatgcctggaccaacgtggtgagcagccccggcacccgtaccatcggcaccggcgccagagacttcctagtggtcggcccgacctggcagggcgaggtgccggccggcatgcagccgatccgtgtccccacgcagatggcctggatgatcggccgcatcaagagcgccgggcctcaggactacgccgaggtccacgcactgcagcagcgttttcagctgatgccgctgagcgcctggcaaggacaggctagcgccgagggaccggcggcgatggtcgagctgccgccactcgaccgcagtaaaggcccggaccgccagttagccgagtgggaccgcgcaaccttcttccgcaccttctgccagctgctgcgcgacaacccgccgcgccctgaagacgcgccaatgcttgagcgcatccgcgccaccggcctgctcaccgaagactgccaaccagagcagtcgcctctgcagcgcctgggcagcgcactcggctaccgcaaggtagtcgctcggctcgacgacagccagcagttgctcggcaagcgcaccaccttcaacggctggcgcatcggctacgaactcggcgaatacggcacccgctaccagcagcgcgcgctggtggccaagctcggcctcggcgccaacagccccgaggatgccatctacccgaacctgcacagcgactcgcagggccgcccgctgagcggcgaacaccgctacgtgctgcacttcgcccaggaccagctgccaccggcgcgggcgttctggtcgctgacgctgtacaacgacgcgcagttcctctccgccaacccgctgaaccgctacgccctcggcgaccgtgacgatctgcactacaacgccgacggctcgctggatctgtacatccagcatgagcaaccgaccgacaccaaccagcgccgcaactggctaccggcaccggagggtcgcttcaatctgttcctgcgcctgtactggccgcagccagaagtgcttgagcggcgctggctgccgccggccatccagctcacgcaataa

SEQ ID NO: 349487 - DNA, 1965 bp, Pseudomonas aeruginosa
atgcccttctttcgcttcagcgccctgaccctggcgctcatcgccctcggcgcccaggccgaacagccggtcgcggccaagcccgccaccgagatcacccagcaacgcaaccaggcctggttgcagcgcctgccattcgaagaccgggcagatttcgacagcgcccgccgcgggctgatcgagccattcaccggagtggtcgagaatgccgagggtaagcccgtgtggaaccgcatggcctacaacttcctcgatggcaacgacgccccggccagcgtcaatccgagcctgtggcgcatcgcccagctgaacaacctcgccggcctgttcgaggtgcgcgagcgggtgtaccaggtgcgtggtctggacctgtcgaacatgaccatcatcgagggcgatagcggcctcatccttatcgacccgctgatcagcaccgagaccgctcgcgccggcctcgagctgtactacaagcaccgctcacgcaagccggtgttggcggtgatctacagccactcccacgttgaccactttggcggcgtgcgcggggtgatcgacgaggccgacgtcaaggccggtaaggtcaaggtgatcgccccggaaggcttctacgagcatgctgtcagtgaaaacgtgctggccggcccggcgatgatgcgtcgtgcgcagtacatgtacggtgcgttgctgccgcgtggcgagcgcggccaggttgactccggcctcggcaagggcaccccgaccaacgcgacggtgacgttgatcgcacccagtgaggtgatcgccaagccgctggagacccgcaccatcgatggcgtcgagatcgagttccagcttacccccggcaccgaggcgccggctgagatgaacatgtacttcccgcagttcaagaccctgtgcatggccgagaacgccacccacacccagcacaacgtgctgaccctgcgcggcgctttggtgcgcgactcgaaggtatgggcacagtacctggacgaggctctggtgcgctacggcgacaagaccgaggtgttgttcgcccagcatcactggccgacctggggcggcgtgcagattcgcgagtacctggctgaccagcgcgatatgtacgccttcctcgacagccagacgctacgtctgatcaaccaggggctgacttcgaccgagatcgccgagaagctcgacacgctcccgccgcgcctggccaacaagtggtacagccgagactactacggttcgctcagccacaacgtgcgcgcggtgtaccagcgttacatgggcttctacgacggcaacccggccaacctcgacccgctgccgccagaagctgccgggcagcgctatgtggtggccatgggtggcgccgacgcggtactgaccagcgcgcgccaggcattcgactccggggactaccgctgggcagcgcagttgctcaaccacctggtgtttgcggcgcctgacaacgcggtagcgcgtgggctgcaggccgataccctggagcagctcggctaccagagcgagaacgccacctggcgcaatatctacctgagcggcgcccaggagctgcgccagggtgtggccgaggcccgctcgcgtaacggcgcgccggatatgattcgggcgctaacgccgagcatgttcttcgactacctggcggtgcgtatcgatgctatgaaggcggccgaggaatatctactgatcaactggcgcttcaccgacctcggcgaggattacgccctgaccttgcgcaacggcgtgctgacccaccgcaagggctcgcggcatgcccaggcggacatcaacctgagcatgaccaaggcgttgctcgaccgcatcgcgctgaaggaaaccggtttcctcaaggaggccaccatcggcggcatcgagatcgagggcgggcggctgaaactgctcaagctgctcggcgggatggacgagccgaacccgcagttcaacctcgtcactccctga

SEQ ID NO: 349488 - DNA, 1344 bp, Pseudomonas aeruginosa
atgactgccttcaagacgcttcccctcgcacttggcctgctggctgcctgcaccctggtacaggccaaggaaaacgacccgacacgcttggatagcgtgctgacgcctgtgggcgccgagcgcgccggcaataccgacggcagcatcccggcctgggacggtggcatgaaagcgggtattgcgccgatcagcgccaacggcgactacagtgacccgttcgccgacgagcagccgctgtacgtgatcacgaatgccaacctggcccagtacagggatcagctgagtcccggccagcaggccctgttcgcccgttacgcggactaccgcatggccgtctacccgacacaccgcagcgccacgctgccccaggcgtacctcgatgaaagccgggcgaacctcgccaaggtgagactgacggatgaaggcaacggcctggatggctaccacttcggtgtgccgttcccccagccgaccgaaggtcttgaggtcatgtggaaccacctcacgcgctaccgtggcggttccattcgccgacagttctcctcggccaccgttcaggaacgaggcgactacacggttgtcagttcgcacggtctaaccgtattccgagagaacatcagcgacctcgacccgagtgagaacctgctgctgctcaatcgcgtgcgcaccaccgcgccatcgcgctacgccggcgaggtaacgctggtgcacgagccgctgaacctggtagcgggggttcgctcggcctggcaatacaaccctggccagcgtcgtgtccggcgggcaccgacggtggcttatgacagcagcgcgcgctacagcttcggccaggtagtggccgacagcgtcgatggctacaacggcgcccctgatcgctacgactggcagttgcagggcaagcgggaaatgctgattccctacaacgcttaccgcgtggccagcaaacagacgccttacagcgagctgttgaggcccggttacctcaacccggaacacacacgctacgagaagcaccgagtgtggatcgtcgaggccaccatcaagccgggtgtgcgccatgtgtatgccaagcgtcgcttttacctcgacgaggacacctggcagatcgtcgcctcagacatctatgacagccgtggcgagctgtggcgcagttacgaatcgcacatcgccatgctgcacgacatccagctgccgctcacggtggccgaagcgacctacgacgtgatctccggacgctatgcggtcaactacctgaccaacgaagtcaccgtcagggcgcagtacggcgagaccctgtcgaagaccgagttcacccccgcacagttgaagcgcctgggcaaatag

SEQ ID NO: 349489 - DNA, 1878 bp, Pseudomonas aeruginosa
atgagccacttcatcgcgtgtcactcgacacctcgacatcgtttcatccctgccgcgctggcgctgggtatcaccctggccggccattcttcgctgtcggcggcggccacctggcaactggacgatgactggagcctgaccagcaacagcactctgtcgttgggtaccagctggtctctgcagaacgccgacaagcacctgttgaacaaggcggacgcggccagcatcggcaaggtgggcgccggcaccaactacaacggtgacgacggcaagctcaatttcgacaagggcgacaccatttcgaccctgttcaagggcctgaccgacttcgacctgaacgacgggtcccagggtgccttcattcgcttcaagtactggtatgaccatgccatggcgaccggcaacggcgacttccggcgtttcgacgactccggctggcaacgcctggcgcgcttccagggcttcgaggtgctcgacgcctacctgtggaaggacttcgagctggccgagcggccgctcagcatcaaggtcggcaagcatgtgttgagctggggcgaggcgctgttcctgcagaacggggtcaacgccatcaatccgctggacgtctcggcgttcaaccgtcccggcaccgagctcaaggaaggcctgctgccggtggaaatgttgtccttcaactacgacctggccgaccgcctcagcgtcgagggcttctggcaatacaacttccgtccctcggtgctcgaggggtgcggcaccttcttcagcgccaacgacgcgctgcaggagggctgccaatacgacaagctgatcgcgggcggcctctccaccaccgatatctccagcatcgagaatgcgaccagtgcgccgcccggcatggggccggccaccgagcgctatctgcggcgcacctccaccgactgggccgatgataccggccagtacggcctggccatgcactacctgatcgagtcgctcaatgacgccgacctcgggctgtactacatgaactaccacagccgcacgccgctgctgtccggggtaatcgcgcgccaggcgcccaacgcgggcggcaacccgggtcccaatctcaacacaggcgattacttcaccgtgtacccggagaacatacgcctgttcggcgccagcatcagcggcgtggtgggcactaccgcggtgttcggcgagctgacctaccggccgaacatgccgctgggctacaactccgccgacctgatcaacctgcttgccgggcagcgcaacagcgccatcatgcccatgacccccgatgaactggccgccgcccgtggcagccgggtagacggctatgtgcgcaaggaggtctggcagttcagcctgggcgccgccgacagcttctccaacgtgctcggtgcccagcgcctggcctgggccgcggaactcggcggtaactggatcggtgggctggacccgcaggacctgcgcctcggccgcgccggggccttcggccgcacaccgacctctgacggcaccgcctgttcgacgccggccgcacagaatcccgccggccttacgaacaccgaacttgccgcagcaacgaactgcaacacccacggtgtaatgaccgcgttctcctggggctaccgactgcgcatgggactgagctacgaaggcgtgattccggccacggtggtcactccttccgtcaactggcgccatgacgtggagggctatggccccaacttccaggaaggacagcaggctctgggcctggcgctgaccttcgactaccgcaacgagtactcgctcgaactggcctacaacagcttcttcggctcgaacgagttttccctcatcgatgaccgcgactatgcctcggtcactgtcaaagcgagcttctga

SEQ ID NO: 349490 - DNA, 1338 bp, Pseudomonas aeruginosa
atgatcccaagtgttgcctccgccccaaccacgcccgttctctgctgtagcgggtttttgctgggcaccgtgttgtccgtcctgggtgccttgcaaccggcgttagcagctgaccccgtccactcagacatcatgcagggatttccacctgccttggagatgcgtgtgaacaaagccaatgccttcctgccgccctatctgcgctggtccatgcgccactcccgtgaagtgtcgccgacgcgtagcattccccgcgcgcaaagcccgctggcattgccgactggtacctcacaggatctcggctcgctcacgttcatggcgggcgaggagtcgttaacactcgatgcctacctcgaagaaactgtgaccgacggcctgctcgtgctgcatcgcggcgagctcgtgtttgagcggtacttcgagggtatggactcgcgtcagccacatatctgggcgtccatgactaagtcggtgaccggcctgctcgccgcgcaattcatcgccgaaggcaagctcgacccacacgccaggcttgcccagtacgtgcccgagctgagtggcacgcccttcggcgaggccacggtgcagcaaaacctcgatatgcaggtaggggtcaactacccggaaaacgtgccgccggacctcggtctgttcgctgccaccgggctgattccgcgcaagccagacatgcctgctgatatctactcctttctgctggtggcaaaggtggcggaaacagtctcgccacagcccctgttcttctatcagaacggttcacccgaggcgctggcttgggcgctgcggcgtatctccgggcagaactggagccaactggtggaggcacgcatctggtcgcgcttcgcccaagaggatgcctatgtccaggtggatgagttgggcaccgagatggccagtggcggcctcagcagcaatctgcgcgatacggcgcgcttcgccgagttggttcgccgtgaactgggacgtaatctcgccgcagacagtttcaaccaggctgttcgcagcctgctggaggcaggagacccggagttgttcgccagtggcaacctggctcctgggcgtcccggctacgcctaccacaactactggctgcagaagaatgatggcgatggttcgctggaggccagcgggcgttttggccagaagatctacatcaaccccaagcgtgaagtagtcatcgtcaagctgtcggcgactcccgatcaggctcgcagatcgaccagcgcggatggcccggccaaggcagcgtccagggcgattgactctcccgttaccttcaacaacatggtcagtgcattgctgaacgccatgccgcagtaa

SEQ ID NO: 349491 - DNA, 675 bp, Pseudomonas aeruginosa
atggacgatgccgctgccccggcgcagatcgacccgcaccaaccgcccgccttcctctccacggccgctgagaagcaggttgtgggcatccaggcggaacagccgctcgggacgctcgatgggcagctccagggtccagagcaagctgccgtcggcagacaccgagctgagcagcagctcgctacgctcggccaggctgcgccggtgcagcaccagccagttgccgtcgactcgccagggacggcgcgccaacctggaatcgccgcccggcagcgccgaggcatagcgacggtacaacgcctcctcgcgcgtctgctcgtcgcgccggcgacggtactcggcatccgccgccgcctccaggtcggcgacccgttcccgccaggcatcgtgcgcggcaatccagcgtcgccgttcctggcggtaggcgtcacgcgccgcaaggaacgcacgggtactgggaaaacgctccacgcgctcgtcgaactcttccggcggctgcggctcggacggcagcgacggatgctgacgctgccgctcggacggtcgatcgagcagccgctgcggctcttcggcagcggctggatcgggcagcaggccagcctgcaggaaggccgcgtcgagcagcggacgcagtcgattctccgccggcgaccgccaatccagggtgcccagtga

SEQ ID NO: 349492 - DNA, 777 bp, Pseudomonas aeruginosa
atgcaggctaccattggcggcgatacgccccttggaactgttcgcctcatcggctaccagcttcaggccgcgttcagcgatcagtgtgccagcgtcgttttccaggcgggtcacaccgatatcgatggcgcccttgctgccgatggagccactacggttgtccaggacgaatgcctggatatccagacctccggcaccggagacaatcccctcgaggctgttgtccagggcctgcgcgatacgcaaggtcagggctccgccgctgagcaggcgtcccccctggttgttcaacgcggaggtggcaagagtgaacgcgcggtcgctggagatttccccaccgctgttgtccaccacgccgagttggcgcaggagcaaagtgccaggcgtggcgatcaggccttgagcgcgattgaccaggcttcccttgttcagatcgagcgtaatgccggtatcgctgaccaggttgcccctgtcatgctggtccagcccttggagatccgcatcgatcgcacccttggcggcgatccggcccgcctggctgttgtctacccgagcggcgaccagggtgagtcccgcatcgctgccgatactggctttccggctgttattcaggttgccggtacgaatctccacggcccccttgccactgatcgcaccggcctggctgttgtcgaggctggcgctgctcaagctaagtccagcgtcgctcgccagtctgccgccctgattgttcagggcgccctggctggtcactgccaatgcccctgcgctggatag

SEQ ID NO: 349493 - DNA, 402 bp, Pseudomonas aeruginosa
gtgcaggaccagatcacactcaagcagtttctgcgcacctcaccgcaatggctgatcgtgcgctttatcaatcgccagggcctgagcagccaggttttcaagcaattgcgcgattgccgttacgaatactggccgacactcgccgacatggccgcagcgcgcagcctaagcgtcgccagcttacgtcgccagttgcagcgtgaaggcttctccttccaggaactaaaggatgaggtgcgccgcagcatcgccttcgagcgcctgcgtaatacggacctgagcatcggggagattgccgaacaggctgggtttcaggaggccagcgcctttcaccgagcgttcaagcagtggaccggggaaagccctggtcactacaggaccaagtggcaagacaagggataa

SEQ ID NO: 349494 - DNA, 261 bp, Pseudomonas aeruginosa
atgcgctacattcgcggatcgagcggctatgggatcacttatcggcatgtgagagctgatcgtttcagcgacggcgccttcattcatacgtcggccatcatcgacattcaccgggagggcccattctgggtgctgcacaccctgagcggcagcttctgcgtgattctcagcttcaatatcttgagaggagcccaatcgctggatgactaccttcagcgactgctaaccatgccccacccagagccatggcagctacattaa

SEQ ID NO: 349495 - DNA, 540 bp, Pseudomonas aeruginosa
gtgaaggacagcgtctggttcacctacaaggcccgcattcaggccaataaccgcttagattggctggattttcactcgcagatgctgttggtgtggtatgcaatactcagcgcgacactaggcgtactgaccattcgctacgaacatctcctcggcccaaacaccgacataatggccaccgtactctccatcgctttacttggtttctcactcgccgtgacaaaccgcgatttccgagtacgcgccatgctgatgcgcaaaaactacctgcagctgcaggccctataccgtgagctttccctgggcacggccccaaccccgctgcaaacgaagcagtatgacgagctgctagctgagtgtgagaatcacagagaaatcgacgaccgcatcgcacgcgtatttgcaactgggcttaccagtcgcaaaccgactgcgtttgaaaactgctatgccatttcctggctcggcgctcgcctgattattaccgtcgccctatacgtacttccccttgccgtgggtttgctgacctggatgtgctga

SEQ ID NO: 349496 - DNA, 897 bp, Pseudomonas aeruginosa
atgggtgtagatgtttcaattttgatgccggtctataatgaagttttgcatcttgaagaggcactccaaagtatttctgagcagggtgaaaagctttctattgaggtcgtctgtgttgatgatttttctacggatgggacgtggcagttgatggagcagctgcggaataaatataattttctcaagaatgccttcaattttgcctatgagaggtctagtggaggtgttgtggtgttgttggctggtgacgataaacttgtacctaacaccttgagagcgcgagtagatccagtactggatcaagatgagaactttattactctctgtaaatatagaactttttcaaaaactaagtacctagatggaatggtttttcctaaggatagagagttaggttctctttcgggggggacaatagctttcaatagaagatttgctgagagagtctttcctattccgcctgttcttggaaatgaggatatgtggattaagtgtcacgccacctatgctgaagacgtgaatgttatccatgttccagttgtttctctgttatatcgtttgcatgataataattctttaaagagagatgttgggttttctaaaaaaaacgaaatgatttcgaagagatccattgtttatagtgtttatctagagagatacaggggagagctctcggtagcggtctccgcttcgttggctaagctcgctgctttagaaactcttcgtgcaaatcgatccattctcagcattctcttcttcaagaatattcctcttgtcgataagcttcgagctattgtttatgcttcgccgttgctccattggattgcatcttccttgaggagattcggacattcataccccgcttcagcagctccgaaaccaccttgcttccaatga

SEQ ID NO: 349497 - DNA, 948 bp, Pseudomonas aeruginosa
atgttcgcagcagccaaccagacccacttcagcctcgccatcgacggcctcgccatcgacctgcaggtgctctccttcagcggccgcgaagccatcagccagccgttcgccttcgacctggagctggtcggcgaacgccccgtgccggacctcgaaagcctgctgcacaaacccgccttccttaccctcgggcccgccggcaacggtatccacggcctggtgcgcagcgccggacagggcgactcgggcaagcgcctgacccgctaccgcatcaccctcgtcccgcaactggcctacctcacccagcgcaccaaccagcgcatcttccagcacctcacggtgccgcagatcgtcggtcgggtgctggaggaacacggcatcctcgccgacgcctaccgcttccagctcggcacccgctaccccgagcgcgaatactgcgtgcagtacgacgagagcgacctgcagttcgtccagcgcctgtgctgcgaggagggcatccattttcatttccagcacagcgccacggcgcacctgctggtgttcggcgacgaccagacggtgttcccgcggctcgcgccggtggcctaccagcaggactccggcctggtcgccgaccggccggcggtcaagcgcttcggcgtacgcctggaaacccgcaccagccgcgtcacccgccgcgactacgacttcgagaaaccgcgcctgacgctggaaagcgccgcccgcggcgaagcccggccggacctcgaggactacgactatcccggtcgcttcgtcgaccgcgagcgcggaaagcacctggccaggcgcgccctcgaacggcagcgcagcgactaccgcctggccgagggccgcagcgaccaaccgttgctgctcagcggccacttcctgccgctggccgccatccccaggcgggctggaacgacctctggctgctcaccgaggtga

SEQ ID NO: 349498 - DNA, 759 bp, Pseudomonas aeruginosa
ttgagccttacagatcgagaaaaacaagagctgctggatgcgctgggccgtcttaccccggcgcaacaacaatgggtcaagtccgccatccattcgttcggcgctgcttgcaccttcaggcgcgccccgaactctgatgtggtcactgatgcggtgctggcatctctcggggaccggctgctgagccaccacgccgggagccgtcaggccctgagcaaagaccgcttcgagtttgctttcgagtcggcgctgaatgaatcaggcatccccgccgagctggtgaagagccgaaccaaccgcgggcatgatattaacattcgcggcgttccggtgagcctcaagaccgaagcggcagcgaccattaaagatgacgccatccatgtcagcaaatggatggagctgggccggggcgaatggaagctgccgctgctgcttgaactgttccttgagcacatgcagagctatgaccgcattttcaccctgcgccgcctgaaggaccaaggggcgaccatccgttatgagctggtcgagattccgaaggcgctgctgctggagtcggccaactgtgaactggaggtctgcaccaacagccgccagaacccgcagcccggttacggctacgttcgggatgcggctgggcagctcaagtactctctttatttcgacggcggcaccgagcgcaagctgcaaatcaagcatctgcgcaaggacctttgcagggtgcatgcgtcgtgggagtttgaaaccgggggaatgtag

SEQ ID NO: 349499 - DNA, 291 bp, Pseudomonas aeruginosa
atggcaactcgcaaccgtcgcgcccccaagaacgaccagcccgaagaaatccaagaggcagccccggaagtgcaggccgaggaagtccagcaggaggaagcccccgcccctgtggtcaaggcccgcaatgcctccaccgtcgaaagccccgtcaagcgcgtctgggccatcgccgactcgatgcccgacgccaagcggaaggatgtcatcgccgcctgcgttgaagaaggcatcgccttctttacggcgcggacgcagtaccagaaatggaagcaaaatcaggcgacctga

SEQ ID NO: 349500 - DNA, 474 bp, Pseudomonas aeruginosa
atggttgccgctaagaacgacggccccgacctgccgccgctgacgcaggacctgcggcacacaccagccgaagccatccacaacctgttcggagctgtcttcttccaagcgttgcaggagcaggacggggaatgggtggaatcgcccgattacctgctgatcgccgagcttgcggggatcgacctagacctagccgagcgggtgcgccggatgtttcttgccggccagatcaagccgggagccttcgccgggctggccccctccaagccgccagaggcccagcggtggggcagtgcgcccaagtcctcgacgaccatccgccccgttgagatggttcgggccatcgccgcgaccatgcctgatgctaggccgagcgaggttatccgcgcctgcattgcagcggggatcaacccggccaccgccgccacccaagtcagcaagtatcgaaaggcgcttgctgagtcgaacaattga

SEQ ID NO: 349501 - DNA, 417 bp, Pseudomonas aeruginosa
atgaccgaagctcagacccatttagccgcgctgtccgactggatcaaagccagcagcgccccgcgtaaaactccgctcggcggggataccgaagtcgggccgttcgccgtccttgttccgctggccgccgaccaagcgcccgcgccgaccttcgaccccgaagccctgcccctgtgggtactgcaagcgcaggcacccgccgacctcccggccatcgacaccagcgccccggccagccaagaccacaaggcgcagcgcctcgggcatatcgtctggatggtgcaggaggggcgctttccgggcatccagctaatcgacctgaccgaccccggcgaaacgctacaggcggcgcttgaccgagaagcccccggcctcgacctcgaccaaaccgccgccgtcttcctgcctcgctggtga

SEQ ID NO: 349502 - DNA, 696 bp, Pseudomonas aeruginosa
atgaacatcgaatccgcatacctcgtcaaagaccctgccgctaccagcttcctcgacaccgcccagatcgacaccggcctgtccgccatgctgggcgaccccaaggcgctcgatgccagcgtcgccccggacgttcagagcgcccatatcaccctgcgcgaagcggccaagaagattgcggcgctggtcggcgacccgacccggacggaggtgcagaagcatcacgccgccaagcagcttgccgacaaggtgacgaaccaccttgagaagtccaaggcctccattgagcagcaggcggagaagctgaaggcgtcggccctggctcaagctgacctgcacctcggcccccgctccgagagcggcgtcctgcacagcgagattcgtagctgggtacgcgagcaggccaagaccccggaagggctgctgcaagtgaagcaggcgatggcggacaacgacgatgttgccgctgtcctctggcactccccgtccttcctcgtcgggctggcccccagcgtccatgaagggctgcgactcgaagccctgcaatcgcgcaagccggacctgtacgcgaacctgagcaatagcgtcggcctcgccaagctggcgggcaagtatgaagccgccatccgcaaggttgggcccagcttctatacgcccagcctcgcggagcaggccagcaaacgagtggaaatctag

SEQ ID NO: 349503 - DNA, 606 bp, Pseudomonas aeruginosa
atgaaaacaccgccttggaagctgacgccggaagagctggcgaagcaacaggccgaagctgccgccgcccccgccgagtccggcatcgccaaagatgccaaaaccgggcatttcgccaagggcaacgcgggccgtccgaagggatcacgcaacaaagtgaccctcgccatcgaaaacatgatggaaggcgaagccgaagccatcacccgccattgcatcgaccttgccaagcgcggcgatccgaccgccatgcgccttgtcatggaccgcatcgcacccgttcgcaagggtcgcccgattcccaagctggagaagcgcgacggcgaaaccagcatcgaggcgctgctacgcgcagtgctggacggcgagattgcccccgaggaaggcaaggaggttgtcggcctcatcgaaagcgccgcccgtgtggctgctacccaagtccttgccgacatgcgccagcgccagatggaggccatccaaaaagcaaccgactccggcggggttcccggcggcgtcatgttggttcccatgctgggcggactggatgactgggaaagcgccgtcctcaagcagcagcaccacctcaagctcaccgttaaggagtaa

SEQ ID NO: 349504 - DNA, 201 bp, Pseudomonas aeruginosa
atgaccgagaaggcattcctacgcgcaactgacgtttgcgtcctcctgaacatctccctcccttgcttctacaagtggctccagaagggccgctttccgaaaggcatcaagctcggcccgaactgcgtcgcatggaagcgcgagactgtggatgcgtggatcgctgaacgcgaagctgcatccctgaccgctgcgaactga

SEQ ID NO: 349505 - DNA, 1938 bp, Pseudomonas aeruginosa
atgaagaacaatattccgctggagctgcggcagctcccgcaatgggcctgcgcacgcgcagacaaagcgcccctcgatccgaagacgggaaggctggcagacccgaccgatccggccacatgggggacgttcgagcaggccgaagcctatgccgaccagtacggcttgcgcgtcggtttcatgctgtcggctgatgaccccttctgcgtcatcgacttggacgacaagcctaccaagcccgcgaccgaagaacagaaggcgcggcacctaaagattctggaagccttccagtcctacaccgaacggagcagcagcggcaccggctaccacatcgtcgtgcgtggcgcggttccctctggcgtccatcgggacaacgtggaggtctattccgacaagcgtttcatgatcttcaccggcgacgtagtgcgcccgctcccggttgccgactaccagcccatgctggaagtgctgcacgcggagatgaacaagccgcaagcggccccggttgtggatgtgccgccgctcctgcaagtcagcgatgaagaagtgctggcaaaggcgcgggcaacgtatggccgccgcttcgagtcgctttggaacggcaactggcagcagcttggaatcggtgacggttcgcagtcgcccgccgatctggagcttgccggaaagctggccgagttcaccagcgacgacgaacaggtaaagcgcctgttcttggcttcggcgctgggccagcgcgacaaggcaaccaagcgcccggactacctcgacaagctcacgctacccaaggcccgccgcatcggcgacagcgaacgtgcgctgatggagcatggtcgccgggttgcacaagtcatcatcgccaagtgggaagcgacaaagaaggcgctcgcggcaaacctgctggagccgttcgccgagttcatccagaagaaggtttcggtgctcaagctggttcgcggcatcctcggcgaaggcggcttgtcggtcctctacggtgcccccggtgcgggtaagtcgttcctcgcgctggacctcggttacgccgtcgccacggggcaaccatggatggggagggacacccggcaggggccggttatttacgcggctggcgagggtgtgtcggggctacggatgcgcggcaaggccatcgccaaggtgaagcattgcgacgcgcctaacatcttcttcctgccgcactccctgagcacgccggacgaaggcgagaagatggcaatggtgctcgatcaggtaacggcccgctgcggcgtcccgcccgccttgctcatcatcgacaccctgagccgcttcttcggcgaaggcgacgacgagaactcagccaaggacatgaagcggtttgtcggtgccatcagcgccctcatggcgaagtgcccgacgctgcacgtcatgatcgtccatcactccggcaaggacgcggacaaggggatgcgcggatcgtcggccctgcaaggtgcagccgatacggtcatccagtgccgcaaggatggcgacgcacaccgcgccgttgtcgagaagcagaaagacgggcaggacaacatcccgctgccgttcgccctcgatcaagtggagcttggcgaagacgaggacggggagccgattacctcctgtgtggtcgtccatgaccatgacggcaaggcccgcccgctcaccggctggactgcaaccgccgtcaaggtgctacgccagctcatgcaatcgggcatggcgactggcggcaacctcgccaccgagattcccctgatcgcctatcacaaccattggtaccaagagcgcccggccgacaagaaggacacggtgcgcaagaacgcccgccgtcagctcgagaccctgcgcgagaagaagctgctcgagtggaacggcggcgaaagccccatccgcctgctgccgaccttcaacggcgtcaccatcgaactcgaataa

SEQ ID NO: 349506 - DNA, 528 bp, Pseudomonas aeruginosa
atgcacaagcaaatcacccgccaagacctgttcgccgcttccgctctgcaagggctgctggcgtctggacggcacaccgacctgagcccggagcaagtcgccaaggaggccatcgcctatgcagaggcactgcataaggcaaccacaaccccggcagcaccgaaaccgattacgggcgagcacttcgtcaagcttgccgacgcgcagatggtgcagacgggccggagcgaatacctggagctgaccctagagattgcagacggcccgcatcggggactgcgcattcttgaccgtgttcatctgcatgatcctgatgtagtcgtgcagcagaacgcactggcccggcttgcggcgtactgcttcgcaaccggacaggttcagtggcaggggcaaacggaatggctgggcattcccttcttcgcaacgctcagccagagcaagggcgcgcactacatcaatgcaatcagccgctcggacaagcaagcctcgtcgaactggcgcaaggagctggtggagctgctggactag

SEQ ID NO: 349507 - DNA, 885 bp, Pseudomonas aeruginosa
atgaagcgagatttcgacctctttgaagaggacacccagaccctagcagaacagcttccggctaacccccggaaccgctgcgaaattgtagtgggcgatgcccgccgaatcctgcacgagatgcccgaggggcactttgattgcgttgtgacctcgcctccgtactgggggctgagggactacggcatcgacgggcagatcggggcggaaaccactgttgatgagtatatagcagaccttgtgcggttgttccgagaggttcggcgcacccttgccgacgatggcaccttgtggctgaacatcggcgacagctacacctccgggggccgcacttggcgcgatgctgacgcgaagaacaaggggcgggcgatggactaccgcgccccgacgcccgagggcttgaagccgaaagacctgatcggcgttccttggcggctggcgtttgccttgcaggcggacggttggtatctgcgcacagacatcatctggaataagcccaactgccagcccgagagcgtgaaggatcgcccgacccgctcgcatgagtatgtgttcctgttttccaagtcggagaagtattactacgactgggaagcgatcatggagccggcagcggacccgaaaaagaagtcgaagaaccgccgcaccgtctggaacatcaacaccgagccttaccccggcagccactttgctgtctatccgcgcgcactggttcgcctctgcgtagcggcagggtcccgcgagaatggccgggtccttgacccgttcttcgggtcagggactaccggcgttgtctgcaatgagcttggcagacagtgcgttggcattgagctgaacgaggaatacgcagagctggcgcgggagcgcttgctgcgcggccgctag

SEQ ID NO: 349508 - DNA, 1242 bp, Pseudomonas aeruginosa
atggctagtacaaggctgaccgctgctgcggttgagaagctgaccccacctgcaacaggcaggcgagaagtatatgacgctgaggtgccgggcttgaccctgcgcatatcggcgtccggcgtgaagagctggagcttcacctatcggatgcactccaagtcccgccgcctgacgctgggcgagtaccccggcgtttcgttgaagctggcccgcgaccgggcaagggaagcccgcgcatcggtgcagcggggcggcgaccctgtggaggacaagaaggaagaagagcgcgagcgccagctaaacggcttcgaggcgtgcgccaatgacttcatcaagaagtactgcaagcccaagctcaagacatggaagcagatcgagcgggcctttgaacgcttcgccatccccgccttcaaggatcgccccgtccgcgacattcgacgccgcgacatcgtggagctgctagataaggtgtccgccaagacgccgggccagtccaaccatctgcgggcgtacctctccaagatgttcaagtggctgatcgaacgggaagtcatcgagatcaacccggtgacaggcgttgcccgccgctggaagtcccagccccgtagccgcatcctcaatgagaccgagcttgtcgccctgtggcacgcgacggagcgcatgggcggggccttcggtgcctgtacccggttcctgatgaccacaggagttcgccgggacgaggcttccttcctgcgctgggacgagctggacggggactttgcagccctcccggcctcccggatgaagggcgggcgcgacttcaaggtggcgctgtcctcgactgcccgaggcattgcggaggggatgcccaagctgggcgagttcatcttcacgaccaatggccgcagccccatctctggctggagcaaggcgaagaccaagctagacgagtacatggcggaggagctgggtgagccggtagccgactggcggctgcatgacttgcggcgcaccctcgccagcggccttgccatgctgggcgtccgggcggaagtcatcaagcgggtgctgggtcatgccgcgaacgccaacgacgtgaccgctgttcattacctctggcacaactatgatgccgaggcccttgaggcggtggagtcttgggcggcctacctcgccaagctgacgagcccagaagtgcttgattcaggcgatgtttcggtggcccttgagagcgtcgaatcttataatggtgagttatga

SEQ ID NO: 349509 - DNA, 189 bp, Pseudomonas aeruginosa
atggctcccgcccttctaatgaaaggttccacgtgcccggagcagtggagccaaatgcaaagtctgtcttgcctttcattgcagcatctcgcctcaatcgaaaatgaacagtatacagtgtggccgtatacagttcaaaagcagataaagcccaatttccactattcaaaattgggttatgaatcttaa

SEQ ID NO: 349510 - DNA, 285 bp, Pseudomonas aeruginosa
gtggtgctggaggccggcgccgaactgaccctgaagggcggtggcagcttcctcaagctcgacgccagcggtgtgaccctctccggggccaacgtccgggtcaactccggcggcagcccgggcagcggcagcggcgcggcgccgctgttgccggggccgctgcggcaggccgacagcgacaaggccggcgccctcctcaccccggcccagatcaatactctgaagcgcaacgcgcccttctgcgaagagtgcgagaagtgcaaggacggtgcctgtgacctctga

SEQ ID NO: 349511 - DNA, 378 bp, Pseudomonas aeruginosa
atgacctctcccctcccaacgcctacgtggcaggagcttcgccagttcatcgaatccttcatccaggagcgcctccagggcaagctggacaaactccatcccgacgaagacgacaagcgccagacattgctggccacccaccggcgggaggcctggctggcagatgccgcccggcgggttggccagttgcagttggtgacccacacgctcaagccgatccatcccgacgcccgcggcagcaacctgcacagcctgccgcaagcacccgggcaaccgggcctcgccggttcccatgagctaggtgacaggctggtcagcgatgtggtgggcaatgccgcggcgctggacgtattcaagtttcttagtctccagtattag

SEQ ID NO: 349512 - DNA, 987 bp, Pseudomonas aeruginosa
gtgtcgagcaaggatgaaaataagaagaattcgctgatggatctggcgactctggacgattttgcacgtatcaatccagcctcaattatggcgatgagtaactcgttgcactttcataccctggagcatacgtttagagaggcggcccagaccgcaaaaaacgctggcgatgtcgctgcttttagggcattcaacgtcttggcggttgtctgtagctaccacttcaatcccagtagaccagataccttctctccccagatcatttttaagggcaagcggacgcttattccgagtgattacctaggcgaacaacagggaattcttgtccagatagccgagcagattgaccatccattgcttcgggctcggatcgctgatagctgttggcacgtcaaccgaagactccatgctgtcgccgcacttgccgcgagttcgtatttgaatgcggtagagctctttttcaaaagagagctgctcgatcaatacgagtcagattttgcggttccattcaaggtagttgatctcattgatcgggcgtttgctatttacgccttagctggcaagcagaaagagatcccggagagtgccaaggatgtgctgaaactggcctatgaaacagccaaggacaatgagtgccttgtcgccttcgtgaagttgtcatccattgcccagacctgtgggttacttgagtggcaagacattgctggcgcagcagaagcgatagcgaacgccacgaaagataagctgtatgccgatgccgttaagagggtgtggctccaagcggctcgtgcttatctcaagatggacgacaaggaatctgctgttagatgcagggtgaatgcggtcgagcagacgctgcgaatgcgggacgcagtcagctccgccatggcaaaagcctcatggacacgcagcgctattggtgaactccgtgcaattggcggtatggcggtaagagtcgagagcctcaagatagaactccagcagtag

SEQ ID NO: 349513 - DNA, 672 bp, Pseudomonas aeruginosa
gtgggtgtcggtcgggtatgcgaacaagcccagggcagttgcgttctgttcgctgccgcccggggtgaccgactgctggatctcggtgtaggcggtgtccgccgcgccactggccgggaatccccattccagaccgatcttccatggtccgctggtggtacgcaggaacgccagcgccggcggcgcaccggtcttgccgctgagttgggtcaggatcgaactcttccagaccgacgtgatgtcgaaggccgacaccgcgcgcacccgcgccagatagccacctgcgtagatgccggtcacatcgacgctggtggtgccggcacgcggcaggcggatccagttgccgctatccttcttccactcgacgtcgtatgccaccgccccttctacagcaggccaggcgatggtcatcgtgctgaccgccaacccctgatcgaactggtagtgcgaggtcagcgtgacgctcgccggcggcgccaccgtggtgatcgggataacgctgatcggccggctctccaacttggcgccagtgtcgatcgccgagaatttcccgggctcgtactgcagcgcagtgatctcgaagacaccccgctccggctggctgactttcatcacacggtagagcggcaccgccaggtcgtcggcatcgagggtccagaccaattccggtag

SEQ ID NO: 349514 - DNA, 924 bp, Pseudomonas aeruginosa
atgaaaagaacagatttgcaggccgggcatgggcagatgcctcttgatctcggcgttgaggttcagcgtgacgtaaacggaattgagatgggggtcctagaaaacggcgtcccatttcttactcaacgcggcctggcactggtggttggtatagcgcgcagcgtgctgcagacaattacgcaggaatgggaagatcattacgaggacgacgttctcggaaaggaccgtatctcaaccattaagcagatgcttttcgagcgcggatataccgagcgaaaactctatatagaaaccattaaagatggaacgccacactattcatatccagatatagtatgtatggcgatattagagtattacgcgttcgagacccggtctccaaaccagcaagctagcgataactacaggcattttgccacctatggcctgcaacggtttatctatgactcccttggctatacgccggcggacaaatggaagtatcacaatgatcgggtatccattctcaacaacagcgctcctatcggtcatttcacgattttctctgaaatcaatggcttggcggttgacctgatcaatgctgatctcccggtgaacgacaagacgatcccagacatcagcgttggcctcgcctggggtaagtactggagagaaaatgatctaggagtgaggttcggcgccaggactgaatacgaacacaacttccccagctactacccgcaagctgctagcaaccctcaaaagccgtttgcatatcctgacgcagccctccccacgttcagaaactggttccgggaggaatacctccctacgaagttccccaagtacatccttaccaaggccaaggtcttgcgaggaggcacagaagaagcgacggccattgctaatatgtacacgcagataaaattgcctggacgagactag

SEQ ID NO: 349515 - DNA, 1392 bp, Pseudomonas aeruginosa
gtggccaccgacggtggtttcgagccagttgcggcggagaagacccatgccgcgaagcccagcaaggggctgaagccgtaccgcacggcagcagagtgcatcgattggagcgacctcggccagtcgatccgcaaccggaagaagccgctggcggaggccacgatgcgccgcatcgcgaagggcatcgagaaagaagtgctccagcgcgccaagcccttcatcgtgccgatcgcgaactggtcgcgcgaagccgtgcatccggtggaccagccgctgaacaccatcactgcctggccgaagggtggcgctttctccgttgccaccccgacgctgatccaagttggctacggcgagcgcgacggacaggcaccgcgcgtccttgaactggatgaaccgctcggcaccgtggtcgccggcggcatcaagcacgccgtagcagccgcccacctggtcaagttccgcttcgacgccaccggcgcaccggttgaccagccgatgccgacgatcaccagcggcggcgagtgcaagcgcccggccggcgcggcgcacgccctcggcatggccagcgcggttctggtcggcgtcggcggccgcgccggccaaaccgagccgcgttcggtcgccgagccgatgtacaccatcaccgcgaaagctgcctgcggagtggccaccgcgttcatggtccaggccaacggcggctacaacaacacccacagtcgcccggccgatgccccgatcagcaccatcaccaacaagggcagccagcagcaactcgccacggcacacctggtaacgctgcggaagggatcgcatggcgccccggtggacggaccgctgggcacgcaaaccggcacggaccaccacggcctggtcgccgcccacctgctgcatctgcgcggcaactgcgacgcgcgcgccgccgacgagccgctgcacacggtcagcgccggcggcacgcaccacggtctggtcaccgcggaaatggtcgccagcagcctgaccccggagcagctcgacggcgctgtgtgggtggcggcgttcctgatgaagtaccacggcatgggcgagaacatccgcccgatggacgagccggtcagcaccgtaaccaccaaggaccgcttggcgctggtcacggtctggatcagcggcagcccctacgtgatcgtcgacatccggctgcggatgctcaaaccgcgtgagttgtaccgcgcccagggcttccccgacagctacatcatcgagcggggccacaacgggcaacggttcactctgtcccagcaggtccacatgtgcggcaacagcgtgagcccgaacactatggccgcatacgcccgggcgaacgacccatggaagcgtcggctacgcccgagaccgcagcaggtagcggcatga

SEQ ID NO: 349516 - DNA, 1299 bp, Pseudomonas aeruginosa
  misc_feature (207)..(207): n is a, c, g, or t
gtggccaccgacggcggtttcgcgccagtggcggcggagaagacccatgccgcgaagcccggcaaggggctgaagccgtaccgcacggcagcagagtgcatcgattggagcgacctcggtcagtcgatccgcaaccggaagaagccgctggcggaggccaccatgcgccgcatcgcgaagggtatcgagaaagaagtgctccagcgngccaagcccttcatcgtgccgatcgcgaactggtcgcgcgaagccgtgcatccggtcgatcaaccgctgaacaccatcacagcatggcccaagggtggcgcattctcgatcgccaccccgtcgctgatccaagtcggctacggcgagcgcgacggccaggcgccccgcgtccccgggctcgacaagcccctcggcacggtggtcgccggcggcatcaagcacgcggtcgctgccgctcacctggtcaagttccgcttcgacgccaccggcgccccggtcgaccagccgatgccgacgatcacaagcggcggtgagtgcaaacgcccggccggagcggcgcacgccctgggcatggccagcgcggttctggtgggtgccggaggccccagctacgccggtaagcccgtctcggtcgaccagcccatgggcaccgttgtagccgaaaaccatcgcgccatcgccactgccttcctcgcccaaatgaacggcggctacaacacgaccttcagccggccggccgacgcgccgatgagcacggtcacgaacagcggcagccagcagcagctagtcacggctagccttctgcatctgcgcggcaactgcgacgcacgcgccgccgacgagccgctgcacacggtcagcgccggcggcacgcaccacggtctggtcaccgcggaaatggtcgccagcagcctgacgccggagcaattggacggcgcgctgtgggtgtcggcgttcctgatgcgctaccactcgaccggcgggcagtgggcgaagctggacgatccgctgacaacgatcaccaccaaggaccgcttggcgctggtcacggtctggatcagcggtagcccctacgtgatcgtcgacatccgcctgcgaatgctgaaaccgcgtgagttgtatcgcgcccagggcttccccgacagctacatcatcgagcggggccacaacgggcagcggttcactctatcccagcaggtccacatgtgcggcaacagcgtgagcccgaacacgatggccgcatacgcccgggcaaacgacccatggaagcggcggctacggccgacgccgcaacaggcggtggcggcatga

SEQ ID NO: 349517 - DNA, 474 bp, Pseudomonas aeruginosa
atgcggcgcaatacgctgatcgtcctgctggcgctggtggcggcgctggccggaaccttcgcctggctgcagcgcgagcgcgcagccgaggtacctgccttgccggcggcagagcgctggctgccggaactggacaacgcgacgctgagtggcctgcacatgcagtttgccgacggttcgccggatatccgggtcgagcggcgtgcgggcgcgtgggtcctgccggccaaggccgactatccggccgaccggctacgcttgtcggcgctgctcgaggcgttggcagaggcgcgcaaggtcgaggcgaagagcgccaacccgaagaaccacgcgctgcttggcctggcggagcgtggcgaggggcaggcgctacgcctgagcctgcagcggcagtccagcgagcctctggtgctgctggtaggcaaggatgcgcagcatggcggtagcttcgtacgacgactgggcgatccgtag

SEQ ID NO: 349518 - DNA, 1275 bp, Pseudomonas aeruginosa
atggcagccaaagtcctgctggtcgaagacgaccgcgcactacgcgaagccctcagcgacaccctgctgctgggcggtcacgagttcgtcgccgtggactcggcggaggcggcgctgccggtcctggcccgcgaagccttcagcctggtgatcagcgacgtgaacatgccgggcatggacgggcaccagttgctcggcctgatccgtacacgctacccgcacctgccggtgttgctgatgaccgcctacggcgcggtcgatcgcgccgtcgaggcgatgcgccagggcgccgccgactacctggtcaagccgttcgaggcgcgggcgctgctcgacctggtggcacgccatgcgctgggccagttgccgggcagcgaggaggatggtccggtggccctggagccggccagccggcagttgctggaactggccgcgcgggtcgcgcgcagcgattccaccgtgctgatctccggcgagtccgggaccggcaaggaagtcctggcgaactatatccaccagcaatcgccgcgtgccggcaagccgttcatcgcgatcaactgcgcggcgatcccggacaacatgctcgaggccaccctgttcggccacgagaaaggttccttcaccggcgccattgccgcccagcccggcaagttcgagctggccgacggcggcaccattcttctcgacgagatatcggaaatgcccctcggcctgcaggccaagctgttgcgcgtattgcaggagcgcgaggtggagcgggtcggtgcgcgcaaaccgatcaacctggatatccgcgtgcttgccacgaccaaccgcgacctcgcggcggaagtcacggcggggcgtttccgcgaggacctctactatcgcctgtcggtcttcccgctggcctggcggccgctgcgcgaacgccctgcggacatcctgccgctggccgagcgtctgctgcgcaagcacagccgcaagatgaacctcggcgcggtggcgctcggccccgaggccgcccagtgcctggtccggcatgcctggccgggcaacgtacgggaactcgacaacgccatccagcgtgcgttgatcctgcaacagggcggcctgatccagcccgccgacctgtgcctcaccgcgccgatcggcatgccgctcgcggccccggtgccggtgcccatgccggcaatgccaccggccaccccgccgagcgtcgagattccgtcgccggccgcaggccaggacgctagcggcgcgctgggcgacgacctgcgccgccgcgaattctag

SEQ ID NO: 349519 - DNA, 1017 bp, Pseudomonas aeruginosa
atgagtgagaatcgtctcgccgccaaactgaccaaggtcgacaaggccgccatcctgctcctgtcgctcggcgagaccgacgcggcgcaggtgctgcggcacatggggccgaaagaggtgcagcgggtcggcgtggccatggcgtcgatgcgcaacgtgcaccgcgaacaggtcgagcaggtgatgggcgagttcgtcgaagtggtcggcgaccagaccagcctcggcgtcggtgccgacggctacatccgcaagatgctcacccaggccctcggcgaggacaaggccaacaacctgatcgaccgcatcctcctcggcggcagcaccagcggcctggacagcctgaagtggatggagccgcgtgccgtggccgacgtgatccgttacgaacacccgcagatccaggccatcgtggtcgcctacctcgatcccgaccaggccgccgaggtgctcagccatttcgaccacaaggtgcgcctggatatcgtcctgcgcgtctcctcgctgaacaccgtgcagccctcggcgctgaaggaactcaacctgatcctggagaagcagttcgccggcaattccaacgccacccgcaccaccatgggcggggtcaagcgcgcggcggacatcatgaactacctcgacagctccatcgaaggccagctgatggattcgatccgcgaggtcgacgaagacctgtccggacagatcgaggacctgatgttcgtcttcgacaacctcgccgacgtcgacgaccgtggcatccaggcgctgctccgggaagtctcctcggacgtactggtgctggcgctcaagggctccgacgaggcgatccgcgagaaggtcttcaagaacatgtccaagcgtgccgccgagctgctgcgcgacgacctggaggccaaggggccggtacgggtcagcgaagtggaaggtgcgcagaaggaaatcctcaccattgcccggcgcatggccgagtccggcgatatcgtgctgggcggcaagggtggcgaggagatgatctga

SEQ ID NO: 349520 - DNA, 3753 bp, Pseudomonas aeruginosa
atgaaatggataaccgcgctcgatctggaccagtgggctgatactctgcctgcccgtgtcgatttccctgggatggtaggcgacctgatccgagcctcggtggccaacatctctgatttccgcttccctagcggtgataaaggtcaagttcgtggctttgacggtgtgctcgatgccgaaagcaactacgctctcgttcccgacggcgagtctgtgtgggagtttggtgtcaccgaaggcggcgcggccaaggcgaatggtgactacacaaagcgcaccgaaaagctcgacgcagaagtgcgcaaacgtacgacttttgtgtttgtctcgccaaggacctgggatagcagcacgggcaggaagcgcgaggactgggtcgaagaaaagcgcgcgctcaacgagtggaaagacgtcctgtacatcgacggctcgatgctcgaggactggctggcggaccgctccgccgtggcggccaggtacgccaagtatcacctcaagaaaatgccgctgatcggagcgcagagctccaccgacttctgggacgagttctcaacaaagttcgttcccgagctggcagataaggtgctgctggccggccgcgaggatcaagccaggcagctcgtccagcaattgagcgccggccccggaaagctgctctacgcggccgatgcgccggacgaggtagtggcattcgccatcgcggcaatccgaaacgccgatccggcggtgaggttgttcatcgaagccaagacactcgtggtcgactcggaagacgcggcgcgccagctcgcccacaggaagggactcgttttcctcctccgaggccaggcgcgcaacctggctggcctgatgatgcagagcggccccaccgtggtgagcgctggtgctgacgagcggcggcccgatcatgtgaagctcaaccgtccgagcagctcccagttggccgaggctttcgtagccatggcctttacgcaacaggaaggctacgaccttgcgcggaagtgcggccgcagcctttcagttctggctcggctgctgcccagcggcaatgccgcgaagcctgaatggcttgagagcgctgagtccttgataccggcaatgctcgccggcgcttggcacgcacctaccaagtcagacaccgacgtcctgcgtgcgttggcgcagaccgacgactacgagaacgtcgaagctccactccgcaggctagcgaggctacaggacccgcccgtggaccgggttggtgacgtgtggtcgatgcgcgcgtcggtcgatgcattcgtgcacctgggctacttgctgggacccaagcatctagagcgcttcaaggaagcggccatcgcggtgttctccgaggtcagcgagccgcccaaggcgcatgaggtcttcaggctcgaggctgagcgcgaggcgatccacagcgggtggctcaaggatgggctcatgacgacgctgctgcacatggcagtgctgcacgagcaggcctactttaccgtcacgggcagtacgccgaccgaattcgtgaacggtatcgtacgcgcactgcctggcctgtccaaggatcaccggctgctagcggcccttcaggaccaactggttcttctagcagaggctgcccctgtccctttccttgaggccctcgagcaactgctcgagggcgacgcctcgggcatcaaacccatttttgaagagttcgatgggttcatcacatcgcgcgcctaccactatggcgtgctgtgggcgctggaagtgattgcgtgggaccccagcctccttctgcgcgcgtcgatgtgcctggctcgcctggccgctatcgacccaggtgggtcagacagcaaccgccccatcaacagccttcgcgccattttcctgccgtggtcgccgaacacctcggccaatgctgcgcagcggaccggggtgttgacgcacgtcgtgggcaccgttcccgagatttcctggcagttgctgaccaagctgctcccaaaaccccacgactcgtccagcctcacgcaaaagccgaagttccgtgaatacggcgatgggaagccggaagtcctgacgtacggactagtgtgggagagccaggccgcagtcattaggcttgcgctcgcccgagttggtcacgaccccacacgctgggccacgctcatcgacgcgctcaaccagttcccggagtcagccttccctgaaaccgtcgaggcgttgcgcgtcgaactggcgaccccgcacgaaggaacctttcagatttggaaccacctccgaaaggaggtgaatcggcacaagacgttcgcaggcaccgattgggcgcttcgagaccagcccctgaccctcctcgacgaactagtctccttctacgcccccaagagtccggtgctgctcgtttcctggctcttcgatgattggatgccggacgtgccgggtaggggggctgacgccgacgatccgatggcgagcattgaggccgcgcgcgcaaaggccatggctgaggtctatgcggcgggaggcattggtggactagttgagctggctggaaaagtacagctccctcagcatgtcgcctacgccgccaggacactgcctcttggcaaagaagagctgctggggctgctccatgctgcgttgcaggcaggggaggcgctcgctgggttcgccgatgtcgtgctggccgaggccgtcgagcgcttcggcgcggaaggtgaagacagcgtgcgcagggagctgcagagccacggcttcgagccagatcgcacagcccggttgctgatgaacctgcccgagggcaagagcacgtggacctatgtcgccacgtttggcgaacccgttgaggacgcctactggcgtggcaagcattcctactctatcaacggcagtgcggacgagttgctcgaaggggtagacaactaccgatgccgaggccggttcattgctgcgttggacgccgctagcaggcggctcaaggacataccgacagccctattgatggaattgctgaggagcgcgatccccgaaattaatgcgagggacagcgcatgggggaacatgcagtatagccttgagtgcagcttcgacgagctgcggctccgcactgacgtgccgctggatgacattgcacaactcgagttcgcctacctgcccttgttccgcatgcgggagaagcctctcctgctgcaccgcatgttgatcgagcaacccagcctcttcgtcgaagttgtggccgtcgtctacaaacccgagcacggcgaagctgagcctcttgatgaaggcgcaaggcgcttggcaacgtctgcttacgaactgcttgaaggccttcattcgctgccgggtcaagccggcgacaacattgatggagagaagctccttgcgtggtgcatggaagtgcgcgaactggcgacgaaggcagaccggttgtcgatggcggagcagcgggtcgggcaagtgctcgctcgcgccccggccgaccccgaggatggcgcatggcctcatgaggccgtgcgtgtagccattgagaagatggcttccgaccgcctcgaacgtgggttatccctcgcacgtgtgaaccaacgaggagtctattcaaagtccataggcgaaggagggactcaggaacgtgaactggcagcacaatgccttcggtgggcggaagctgtacctaagttccctcgtaccgtggctatgctcaggcggattgctgagaactggacaaagtatgcggagcgcgcggacgtcgaagccgcagaagaggctctgaagtggtga

SEQ ID NO: 349521 - DNA, 753 bp, Pseudomonas aeruginosa
gtgaactgtcttatttgcggcgcgagtcctacgatcaagtcgcacttgattccgcgcgtgatggccgtagaagtccaagttgggaacgcgcatgccgtcgtgtcgccatcaagcccgggttatcgcgagagccagtcaggtcgtacggacacgagcatcctctgcggcccctgtgattcgtccattggccgtttcgaagggagcactgcaaaggcgttcgaatctttacggaatgctggggtaagtgtgcgagatggagcgttggtcagtgctgagcaggcgcctgacgtcacgttgcggttctacgcagcgctgctctggaaatacgcagtcgcgcgccgggaccttggtcgaatcgacctcggcccgtacaagaacgagctgcagaaggttgcttttgagggcgctccgatccccgacttcttcgatgctgcgctcatgcgtcttcggctcaaccccaacgacaccagcgtcttcgcctatcgagctccaaagccggatcgcaaggatggcctcaacatgtatcgggtactggttggcggggtgctggctttcgtcaaagtcgaccggcgcccctggggcaatacgccgttgaaggacatcgcgcttggcagcgcgaccaacacccgcgcattggtgttggccgcccaagggttcgaggagttcaagacaccgcaacacttggcgcatagcgacagccgtttgtcggcgttcctcgacaggcaggatacccgcgctgctcagaaggcgtga

SEQ ID NO: 349522 - DNA, 1113 bp, Pseudomonas aeruginosa
atgccgattgtaaaaaccctttccgctgtctccctgttctccggcgctggcggcatggacgttggctttgcgagcgctggcatacgtccggtttttgcaaacgaacttgacgatgctgcaagcaggacgtatgccttgaaccatggcgagcacatccagcaaggcagcattctggaccactttgaaagcctgaaccggcatcgtggtgtcgacgtggtgttcggtggaccgccctgtcaggggttttctgtggcagggaaaatggacccgaacgacgagcgtagcggtctgatccgtacctttttcgatgttgtagatcttgttgagccgcacgggtttgtgtgtgagaacgttaaggcacttgcagtccttacccgctgggctggtgtccgacatgagttaatggtgagatccagtaaacaccatttttcggcgatggtagtgctgaactctagtgactatggtgttcctcaaaatcgagaaagaatgtttttggtgggagttcgaaaaggtggcttcattaaatctgacgagcaacttcaccaaatattgcaagatgagctattaaagtatagaaggcctgccccagtagtagcagatttgattagaaagctggggcctgctggctcgcctggaaattcgcgtgtatgtaatgcgaaaatcacttatgcctccaatccagttctgcgcaaatccccatatgctgggatgatgtttaatggtgccgggcggcctcttaacccagtaggccactcatgcactcttccagcctcaatgggaggtaataagacgccgattgttgatgaagaatatatattcaacggtggtgtgaactatattgaagaatatcatcggcatctcatgaatggcgggcttcctaaaaagggggaggccccgaagcgtcttcgtcgacttacggttgatgagtgcttggcaatacagacgtttccctctaaatacttgcttgccggttcacaaagtgctgcgttcaagcaaataggcaacgcagttccttgcctaatggctcaagctgtgggagccagtgttaagcgaattctggatatggatagccaaatgaattcaaaatccggacgacttcagatgtatgcttga

SEQ ID NO: 349523 - DNA, 1626 bp, Pseudomonas aeruginosa
atgcctagcgaagaagctattcgggcgctgagaaccttactgctcccaattatcccagcagatgatcgggaaaaaatatgtgccaaagagcttgaggactaccttataggtcaaggggttctcaaagacgactttaacgactgggcgataataagtcttgaatcatgggcggagagcaacgcaccctccgaccaactcaaagcagccattcagaaaatattgctcaaagcaggtgactcatcaccgggtgcgttatctcagcagtatttttcgattcatcaaaagttgcaaggcgagcattttttctcccatgcagaagctcggtggtttttaagccattcattcatgatgctggacttatctaagaaagacaggctcacagcagctcaaattgcaagaatgctgaacgtcagggatagcagggcaagattcaaccgccaaaccacgcaaacgtttctcgaaaagcttcaggctgaccctgcacttaccattgagcaggtgaaacaggtttttgaatcagactcagaacaggaagcatctttttttgccgatgctagcttagaagaagctgccgacatggtagctgtggccgcacattcactaggctatgcagacaacctcgcagagagtctattacagctagcttcagaagaagagcttgagaagtatgctccgtacctacagattcttcactaccaatgcacgctcgcagaatatttcgaccatgcgctgacggatctctatgaattcaagccgagaggcggttcggctctgtggttattcggcgcttatccagaagctctgagccgagctggcaatccattcttgaataacgccaaatcagtagagcgagctgatgcaggctgggttcgaatgaaaaagaaagcggagcgccccggaactgccgcacttgaaaaaatcttgtcaaacctcgaaatgatggggttcgctccgcggcgagaactagcgaggctaatccgcctctggctgcaccggatcatccgattgactgagccgcttgctgacttgttgccagattcattcacaaacgctgagtggagtaaaatattaacagcagtcggccaagcaaacactgccacatacggaatactagagcaacgaaccatcgatgcgctgagctggtcccaatatggcgcaacatggcgctccagaggaattggggcgtctgtgaatgctactaacatcagcaatcggagacttggcgattgcgactatcaaaatacagatgatcgtcgagttgttgcttttgaaagccatggaggctcactgaccgatatatacgtcaaagagcacatccgcaccctcagaaaaagcctactgctgcggaagcaagagttagaggggatcgcagaaataggggagtgggatattgaaatcacattcgtagcccacaagctattgctcaatgagtacgaaaatgatcaaataattcaaattcacggcgccaatgtaactcttaaattcactacttttggcgagttgattgattcttggcaggcaggtgcacctgattatactgtaatggatgatctagtcattcgtccattacagcagaagcaaacaccaatcgaggcccggcgcaagctttcagcgctggtagcttga

SEQ ID NO: 349524 - DNA, 669 bp, Pseudomonas aeruginosa
atggcgttgatcaactgtgaagaatgcgaccgcatggccagcgaccaggcagcggcctgcccgcattgcggggcccccattgccaagcagcccgccccagctcaggcgcaattcagcgccccgatcagccgcagcgtcgggttctggttgggcgtgggtattctcctgttcccgatcatcttcgtctggttcctgctgcgacaggggcacagcaccaccagccgggtaatcggttttgcctggctggcactgatcctgttcggcatggcgaatagtgatcgcagcactacccagccgtcagccgctgctagcagccacagccagccggaaaggatgctagctccggctgagtcgctgcaggagtacagcgcccagcagatcgcgcaggcctacgaccgcaacaccgtggcggcagaccagcagttcaagggcaagcgcttcaaggtcaccggggtggtggattccatcaataccgatctgttcggcgacccctacgtcaccctgcgcggtggggtgaaccagttcatggagcctgaattcgaactggacaaggcacatgccaattatgctgccggtcttcagtccggaatgcgcatcaccatgacttgtcgtgggcgtggagatgtggcgaaaacccccatgtcggacgagtgcgtaccgtcgaactga

SEQ ID NO: 349525 - DNA, 1296 bp, Pseudomonas aeruginosa
atgagttctgattggcctttaaaagagcttgaacttattgctaatgaggtaacggttggctacgtaggtccaatggcttctgagtatgttgagaatggagtgccgttccttcgctcgctgaatgttgagccattccggatcaatgccactgagataaagtacgttacgcctgagtttcataagcaaatcaaaaagtcggctcttcgtcctggggacgttgccatcgttcgtactggaaagcctggtacgtgtgcggtcattccagattggttacctgacgctaactgttctgatttggtgattgtgcggtgtggggagaaaatccgcccgcgttttctgtgttactgggttaactcagtagcagctcatcacatcagctcacacacagttggcgcggtgcaacagcatttcaatgttggggccgccaagaagatgaaggtggctgttcctgatatctccacgcaagatgcggttgttgaggttctgggcagtattgacgatcgcatcaccctgctacgcgaaaccaacgccaccctggaagccattgcccaggcgctgttcaaatcctggttcgtcgatttcgaccccgtgcgcgccaaggccgaaggccgccagccggaaggcatggacgccaccaccgccgccctgttccccgatagttttgaagattccgaactgggtctcgtgccgaaggggtggacagttcgtagcttggattccattgctgactacttgaatggcttggctttgcagaaattcccgcctctcgaagatgcatggctaccagtcattaagatcgcccagctgagaaagggagatacggttggtgccgaccgtgcgggccgagacatcaaaccggagtacgtcattcagaatggcgacgtgcttttctcatggtcaggtagtcttgaggtcgtgatctggtgcggcggcgagggggctttgaatcagcacctgttcaaagtgacctccgcagagtttccgaaatggttctattacctgtggacacgccagcacttgcctgcgtttcagcatattgctgccagtaaggcaacgaccatgggacacattcagcgcaagcatctaactgaagctaaagtggtagtgccatcggctgaggtaattcagatgctcggcgcacaggtcgagcctttgttggatcgttggcttgctaatgctgagcaagcccaaaccctcatccaactccgcgacaccctcttaccccgcttgatctccggccagctacgtctgcctgaagcacaggctgtgctgaacgatatggatattgccccatga

SEQ ID NO: 349526 - DNA, 1188 bp, Pseudomonas aeruginosa
atgaaaaaactgatagggatcaccctagtcgcgctagccatcacaggctgcaaatctgaaatcgacaacgcagagaccgtcatcagaaatgggcttatctataaatacggtgaaactgacccattcaccggactggtgctaaacactccagcaggcatccccggcatatctgcgctttgcaactcccaagtcgagaaaggtcgctacagcggaaaaagcgagtgtttctacaactctcagaaggtgtacgaagttgagttctcggcaggcagcaaggacggaacagagaccgtattcgatgcagaaactggaaagacgaaatccgtcaagaactggaaaaataatcgtctacacgggacagcagaggaatacttcaacggaacccagacaagccgaaaagaatacaaagatggcctacaagacggagatgaggtcggctggtcgggagacggccaaacgaaactgaccgaaatcacttggagcaacggaaaagagctaaatggatttaaaacttacttcgacaccagctccaacacaggcatcaacaacccatccggaagatataactacctgaacggaaaactgcacggacaacaaatcacctacagcagaacaaatagcggaaaacagtacacgcatatcgagaaaaacttccagaacggaaaacaagacggcacattcaaaagatacatcagcatcccgaacacagacgtcattcagcaggatcttgaaatcctctataaaaatgacgacaccgtatctggatggtttagacagtacagcaaagtagacgggagactcatacaagaaatcaaactgattcgagcccccaatgatgagggcaaaggtttttacgatgattatcccggcaccttagtaccagacgggctcatcaagaagtacaattccttgcttgacacaactacaggcgaagagctctgggtcaacgggataaaagttgaccaccaacctcaaccccaagaaagccaagaatcaagtactcgtatacgagatgaggagacttcgcgcgaggagtatctcgccgatagtacacaagcatattcatctgagagctgtctggattcttggatcaccgcctatcgaaaagaagttggtgatgacgccatgatcgtgagcgagcaaatagatgagtggaaggtttggtgtagcgaagggaagctgccttaa

SEQ ID NO: 349527 - DNA, 348 bp, Pseudomonas aeruginosa; identical to SEQ ID NO: 326769

SEQ ID NO: 349528 - DNA, 552 bp, Pseudomonas aeruginosa
atgtctcgttactatgcgaacagctacgagaacctgcgcaccatctttggttactacgacaagaagaataaggagttcgtactacccagcaatcacttcgcctttgagtaccaaatggcgatgcccatgactgtggcgaaccagttgattgctgacttgctgttgagcgaagaaccgctgtttggcgggactggctcctacgcggagaagcagaaagagcgtgtcaaaggcggcgagctacaaattgaagatgtgcgtgttgacaccgagcagcgagtaaaaaacgggtcaattagctatcgcccgacgctgctgggagggtgtaccaaggtaggccgctgtgattcctttatgctgggtgactacaccgaatgtttgtcttgtgagggcgcaatcatcaagcctgccaagttgaatgcggcaattgaggaagcgacgaatgagttgggtaactacgcagagtgctctggagaatatcaagttgtgaagggtgaaattgatcgtttaacggccttcaaagctcgcctgatcgacatggtggatcttcaatga

SEQ ID NO: 349529 - DNA, 390 bp, Pseudomonas aeruginosa
atggcagccgcagtagtcttcttcgaccgccttgcgcgcctgctccagatcgttgaagtgagcgagcagggcgccgccgaactcggggtactcctcgatgaagcaggcaacgtcgtgagcgctctcgagaccctcgtactcaccgaggcggtagccgtcgaagccctcgaagtcgtggatggcgtattcctccgcaccctcgaccggcgaggccgccagcatggcactgacctgcgcctggatgtcgtccagctccagggtggcatcgatccagacgccatgcaggtgaccggcgttgtaggcggccaggtcggccacatagatcctgctttcttcgctcatggctttcgctccttcgtcttcagggttctgcgcttgcgctgcgcatga

SEQ ID NO: 349530 - DNA, 798 bp, Pseudomonas aeruginosa; identical to SEQ ID NO: 333605

SEQ ID NO: 349531 - DNA, 492 bp, Pseudomonas aeruginosa
atgggcggcgacggccaggtttccctgggcaacaccgtgatgaaaggcaacgccaagaaggtccggcgcctgtatcacggtcaggtactggccggtttcgccggcgccaccgccgatgccttcaccctgttcgagcgcttcgagcagcaactggagaaacaccaggggcacctggtccgcgccgccgtcgaactggccaaggactggcgcaccgaccgctccctgagccgcctcgaagccatgctcgcggtcgccaacaaggatgcctcgctgatcatcaccggcaacggcgacgtggtcgaacccgaacacggcctgatcgccatgggctccggcggcggcttcgcccaggccgcggccctggccctgctgcagcacaacgccgagctgagcgctcgggaagtcgccgagaccgcgctgaacatcgccggctcgatctgcgtcttcaccaaccagaacctgaccatcgaggagctggacagcgccgtctga

SEQ ID NO: 349532 - DNA, 309 bp, Pseudomonas aeruginosa
atgagtcggcactacttcgacaccgttcacaagggctttcccatcaccgtcgtactgggctgggaccggccggcaaattacttcttcctattcatcgaaaagccggccgagctgatcgacgataccgcgaaggtcgagagcgacccgttcaaccactacctggactactaccgagtggtcctgcgccatttccacatcgacgtgcccgaaagcatgttcaccgaagtccaacaggactgcgagggcaacgttggcaaccgtgtagtcaagcatcaggccgacggctcgttcaccgaacagacgttctga

SEQ ID NO: 349533 - DNA, 2487 bp, Pseudomonas aeruginosa
gtgtctaaaggaaagaaatccgccatcccaagcgacaaactagatgcacttgatgagattataaaatcacacagctctagagacataaacgaggccgagacacggcataaaattatagatttcataattcacgacttcctaaactggcctaaaaacagggtttcagtagaagaatatatatcaccaggctttgccgactacgttttaaagaagaacaatggtgacgacttactattcatcgaagccaagcgtgcaggagttttctttgagttaccaattgcaaactcccccacagagaaatcttcttatatatcaattagaaaacttacttccgacccaaatatcaaagccgcaatggagcaagtgcgaacgtattgctttgatacgggatgcgagtacgcctgcataactaatggactagaatggatattttttaaaacatttgaaaaaggcaaacgctgggaaactctgcaagccttcgtagttcgctcacttgagttctttaagcttgagtacaccaaggctattaactctctttcattcactgcaatcattgacaactcgtcactaccaatattactaagcagcaccctacccaaagatagaactattttcttcccaaaagaaaagataccatcttactcccacaccattaccgcaaacaggctcgcctcaaagctacgtccgattataaataggtattttggagtcataaaagactcagacaccgagttcatggaaagatgctatgtttcccagagagaatatcaaggtacatctgatggaatgaggtctttgattcaggactctttatctccttactttcagtcctatggagttcaacagcttgaagatacgggaaagggtgggcggttaggcgggcgactaacaaaaaatataaaagaaaacagaagaggggaagttttagtcttattcggcggcaaaggagcaggaaagtctactttcatcaaaagattacttcaccatcacgctcctcgatggctacgagagcactcagcgatcgccattattgacctactcaacgttcctgaagatatcgaagtcatacgaaaaaccatttggagcaatctggtatcacaacttgatttagaaaatctcctgaatgcagaaagagaaactctaataaccgagctattctcggatcgattcgaggttgccaaaagacaggacttatcgggcctcccccaaaaatccgaaagctacaacataaaactaaacaccttagtagcgacttggaaagccgacttagggtattgtgcagagcgtctagtagaaagattagcgactcaagaacgaggggctataattgtcattgacaatactgaccaatactcttcaaacgtgcaagatttttgtttttcctccgcccaagaaatatcagaccgcttaaaaagcgtaactcttatttctatgcgagaagaaagattctacgattcaaaaattcatggcgtgctcgacgcttttcagaactccggatttcatatcagctcaccgaagcccgcagaagttttcaaaaagcggctggactacaccgtatcaatacttctagatgaaaacaaaatatctaatgaaaaccttggtgactatgacgcaaacttcacaacagacagctcacgttacctgaagatattgagccgagaattttcaaactatcagtctccactaaaccagttcttgagcgcttgcgctcatggagacatacgcttatcactagacttatttagaagcttccttctttcaggctacaccaatgtagaggaaatgatctcctatggcacttggacatttaaaatacatcaagtcatcaaaccagtaatgattccgaatcgatacttctatgatgagtcggttagtgacataccaaatatctaccaaataagatcgtcaaggcatggctctcatttcacctcactccgaattttaagaaaaatatctaaaggtgtagaccccacagcacctcaatatacaaacatcgcagaactcagagcgtattttgctgagatctttggcatgatagatgacttcgaacagaatctagatgttttattaaaacatggatttattgagtcgaataaccgactagactcctattctgactccgtcgatagtataaagatcactagctacgggctatacatgcttaacgatctagcctattactttacatacctagacttaatctgcaccgactgcggaatatttaacgaaacaacgagcaactatttgactgaggccgcaaaaacagaatacaaccacttccttaaaggcaatagattagaacgagtaaaagtcagacttgagcgagtcaaagaattcttagaatacataagatccgaagagctaagagaaaaagaactttactccctaggcatgcccgacgaagaaatgttcacatccaaagccatgctaagctttacaaaagaaagcacaaaagttatgagaagtgcaaaacgccagaaattctga

SEQ ID NO: 349534 - DNA, 600 bp, Pseudomonas aeruginosa
atgagttcactgctgttcttcacggattcagagaatgccatagtggccaccgatacccttgtggccgaaccgagtggagctccgctcggcttctccagcaaggccattgcccttccccacctgaacatgatcatcgccggtaccggcctggccgcactgttcaatcactgggttggcctcatgaatgaccagcacgtcgccctcgatatagatgcagttgatccgcatgtaaccgaggttcttcagcaggtctggggcgaaatgcagagccagctctccaccccacttaaccagacggcaactatttatcactttgggtggtccgacaattccagagagattcatgcgtatgcttaccgttcagaagagaatttccgctctgagaagctgagctacggacttggcgtgaagccgcctcttcccagctatgaaggcctcgatctcactgtactccctcggaaggtggaggaagtcatgcgcaggcaaatcgcgcaggagatggcaaaaccaaaagacatcgcagttcagatcggcggatgggttcaagtggcgcacttaaccaaggaggggatcgttctctaccgaggagaggatatctga

SEQ ID NO: 349535 - DNA, 837 bp, Pseudomonas aeruginosa
atgacgcctctagaccagaagatttgtgatcttgcccatcctgatcgcagtgcatccgaagttgcgaagcttgcaggatgtgagcgcagccatgtttatcgctgcattgagaggtacggcctaacgctgaagcagcgaacgaaacctgctcctcggccaagcttgaagcagcagattcttgaccttgcaggcgcgggtcggacttctgcagagatcgcagccctgcttggatgcagtgataaacatgtgcagaacactctgcgcactcacaatgctgaccgactgtctcgcggcggcaggtttggcgagctgaaccatagctatcaggctggcaggattgttgatctggacggctatgcgctggtccaggctccgccagaccatccccaagcaaggaagactggcttgatgttccagcaccgactgattgcggaacagaagattggtcgatacctgcttccgtcagaagtcgttgaccatattgacgggcttcatctgcataacgacccagagaatctgcgagtctttgattcgaatgctgatcacctgcgtgccacgatttcgggactgcggccaaattggtctgaagaaggctttgcgaagatgcagataccttcacacctgcgaccagcatatccacgcgtcgatagctaccgtcagcgcagagaacgcggtgatgtccgcttgctacaaattctcctcgctgcgtcacgactcggaatagagtcgccgcaccttttgggtacgcaccaccacttagagcaagctcaaatcgattattcacagccgaccacgatagaacgtgcattggccgatcgatttcctgaatgggcatag

SEQ ID NO: 349536 - DNA, 207 bp, Pseudomonas aeruginosa
atgctgtcaaagcaggttcagttgaatattgatatcggcaccgagacgctacgattgatgaaaaccattgaccgtccgagcgagcagcagcaagaaatcatgaaggggcttcgggagtcggtcgacgcctatggggaggcagcagcttcgctaacccccgtattaaaagctatgggcatggacgagaccgccgatggagaaaattga

SEQ ID NO: 349537 - DNA, 630 bp, Pseudomonas aeruginosa
atggaaaacgacgagaaaaaatgcccgttctgcgccgaggtcatcaaagctgaagcagtaaaatgcaagcactgcggttcaatgttgagcgcagggcctgccaccggtaagcctaccaagaaggggctcggtccattgggtgggatagtgatagctgttttggggggaggggctttatttctcggatatggcgtttatgtaggttcgacgccggaaggcatggctcgcagtcaggcacgtgctgccattgatcaatgccataaggatctggatcgatgggcgagaggaagccgagagtggcggcttatttacgacacctgcgagatgctggaccgcgaacttcgctccggagacctttctaggtaccgcagtaggcagtctggcgagccgagcctgcaggcgtatccttcggcgaagggagccaagatggttctgcagattggtcagcaatcggctccgcttaagtcggcagcaccgttgcgtgatgctccggatattaccgcggcgatcacccgtagagccctggttggtgagcgtttaatcgtgcgcgagatcaaggacggatgggtccaggtgtctgcgaatcccgctcgcaaagagtgggtgatgcctgagttactggactggtag

SEQ ID NO: 349538 - DNA, 852 bp, Pseudomonas aeruginosa
  misc_feature (9)..(18): n is a, c, g, or t
gtgccgccnnnnnnnnnncagcttgacctgcatcggcagcggcatgtcgccgatttcgtcgaggaacagggtgccgccgttggccagctcgaagcgtccggcacgactggtgatggcaccggtgaaggcgcccttctcgtggccgaacagttcgctttccagcagttccgccgggatcgccccgcagttcaccgggacgaagggcccctcgcggcgcttggaatggtaatgcaggttgcgcgccaccacttccttgccggtgccggactcgccgaggatcagcacgctggcatcggtatcggcgacctgctgcatcatctgccgcacctgctggatcgcccggctggtgccgaccaggctgcggaacaggttcggctcgcgggagcggccgcgctcgcgggcctggtcgtacatctcgcggtagacctgggcgcgatgcagggaatcgagcagcttgttgtagctgggcggcatctccaggctggcgagcacccggcggcgcagctcctccggccagtcggccggggccggctcgccgatcagcaggatcggcaggtactcgtcccaactggccagttgcttcagcagctctaccgccccgcccttcgactcgacgctgccgagcagcacgcacagggcttcgcgactgttgctcaggcccgccgctacctctcgccaatcctcgctgttgcaggtcagctgatcttcgccgaggaagttgagaatgactgccaggtcgcgactgcgatcgagattgtcgtcaatcagcaagagtttggtttcgcgccacattttgatcagctgccttgcatcgaatgggtctcgctcgacccgaaagagggctgggactaa

SEQ ID NO: 349539 - DNA, 270 bp, Pseudomonas aeruginosa
atgtgtgcgttcacgtatcaggtcaaggtgagtagcacggggaaggcataccaagaaagagtttgccttaactgcgtacgtatccagaaagagtgcggtcatgacgtcccgagccgtttttacaaggcgctcggagtcctttccgctcaaagtcgcggatacatcctaaatgccaagtggagccttgaccgaaccagctgtgagacggggataaagcacaagacaaaggccctgattaagcatgaccgggttcttgaggggggggcatga

SEQ ID NO: 349540 - DNA, 204 bp, Pseudomonas aeruginosa
atgacccgcatgattaaaggcaaagaagctgtagcgctggtgcaaggtgatgtgatcattgctagcaatggggaacagcggaccgtagatgttacttgccacctgaaagaaggctttttcgtcagctacgtgggtggcggaagcgaccgcttcggtgctttagacctgatcgacttcccgtttgcacaacctgagcgttgctaa

SEQ ID NO: 349541 - DNA, 216 bp, Pseudomonas aeruginosa
atgtgcccgagtgacaccccgcaagtcgatgccgaggcgcaggccctgcgcactgatcacgagcggctgcggcagcgcctggcggcggcgcatcgtgccgggcgcggttgccacctgagcgcccgcgaggtgcagctgctcggcctcggcgtcctgggcgagtggtggggcgctgacgccgcgtatctggagcgccggccgcgcttcgacgggtag

SEQ ID NO: 349542 - DNA, 279 bp, Pseudomonas aeruginosa
atggaaaccgagtggacgctcgccgagcgtattgcgctgatggagccgagcaatctatcgccggtggttgcgcgcttggtgcgagcctataggctaaagctgtcccatgctttggacgacggcgtgctcgatacccagcagctgagtcacgcgtcgggctggctggaggcgctgttggctgccgagctgatcgacttctccttgtggcggtcgctgagcgccgaggctgtagcgctgcggaaggctgcagtgccttcgcagatgcccgctagttggtag

SEQ ID NO: 349543 - DNA, 1293 bp, Pseudomonas aeruginosa
atggttttttctgaagatttgagaataggagcttatgcaaggttcttgctgcaagccctggtttgccacgagtcaacgttcttgtcgacatccttcaaagtaaaaacggtcgcaaagcagctctgtttgacagagcgtctggtcagggaggcggcgcaggagcttgcagatgtcggcctgttagtgagcaggcggcgggccgatcaggtaggtcgcccagtgcaggaatatgaatcgtcgcaattgctatgcgatctagttactcaggctgggcagggcgaagcagtccatcgggatctgattgtgcggctgtttagcgagcccgagatttatgcactcgggccattttccgcagttatgggtgacgcctgcgaggaggacgacaagcctgcgcgaaagctgattcgaaaggatggtcgcccagccgctcctggagccaaagggcgcttggctgcgtcaacgcgcgtgatgttggcggcacttttgagttttgccgatcactgtggcgttgtgacaggaattagcgaaacgagattgcgggcaatgactggcttgaatgctctttcgctcaagcatcaggtgaagcgtctggttagccttgggttcatccggactcatgtgcccggggtgtcgagtggcatttttgtcggagcgaaggtccctacgatttactacttgaaccttgatcatccgcaacttggtgcaacgcgaggagcacgtgggctggttgtgcatgtgaccctgggtcccgggaaattcaacaggctcgcaacaggcataccctcgtcagaggctttgacggcattaggtgcgcctgctctggatatgctgtaccacaagcttgcagggcacacatctcgcctgctgtcggctgtttgggcaagggcggatgatgcatgcagtgaggtaaaagctgctgtcgccgatgatattgatggcgaggtaggcgccctctgggtcggtaattcagcgaaagataagggctactactgggctgagatgcaggaaaatttccacgcaacagcatgcgagtgggcagatggcctccacaggcggctgcttcgatggaaggtatgggaagggtataagccgcagctagtaaggcttattccagcgccggacagaaaggatggactcaccatcacttcattggttgtctatcccgcgccacggagtgccgcaacctgcctcgttgtctgggataagtacgatggacgtgtcgattactacgggcatgagactgaccttgatctggcattgcgctgtgaggtcgggctattaaccgaggcctag

SEQ ID NO: 349544 - DNA, 159 bp, Pseudomonas aeruginosa
atgaaaaaggaaccgaaaggagcaaaaaacaggatagtcatcgccaaagatgagaagaacgttctgacctgcaccagcgaagggttcgaatatacgccagacatcgtcaagaacgtctacggaagagcagccgacccgcactggaagactggttcctga

SEQ ID NO: 349545 - DNA, 165 bp, Pseudomonas aeruginosa
gtgctggaggccttcccgcgcaagatctacttcttcccgcgcaatggccgggtcctggtgaagtccctggtggagctgaagaacgacaccgtgctgcagcgtgaacgcgactaccgccgccgtatcgatcgcaacgcggacggcggccccatcgacctgttctga

SEQ ID NO: 349546 - DNA, 681 bp, Pseudomonas aeruginosa
atgaacagggtgagatggctggatgctcagtggccctcatcgattcgagcggtaggcaagaagctcatcgacatgccatttaccgaggagagcatggatggcttcgttattgagcgaatccgggatgatttcatcgaggggcgctacatcgagaagtacaactaccaagaggtgatctccagcccttttggtggtgaggaggtgcttaatcgggttggataccggacgacggaattcaccctattcaattcacccccgcatatcgagctaagaaactatcagcgcagtctcaaagagctgatcagtcgtctgcttgaggcctgcaatttcaacctggtagtgactccccccacagtcaatttgattgagtgggtttcggccctacagggcaatctggatcaggaggttaccgtcaactcgctccaggtctcggacgttgaaataggcgagggagtaacgggtaaaatactgctcaagggagtgaaagatgtacgcgaagccaccgatctcctattgtcaggccgaaagcatgtactagaaaaagtccaagtgaaattttcagatctgcacaagacggtcaccatccagctatctagcagtggcaccgcgaagctaccagcagtgctaccaagcgatctattacgtcagctgcgcgtgtcctttcctcgcagtattggctga

SEQ ID NO: 349547 - DNA, 1128 bp, Pseudomonas aeruginosa
atgagcaagaacgcgcttcagtactgtgcgacggataaggaaatctacgatgccttgatgtcagccaagcagaaaatcaacgagaaggttctgctcgagcttgcgaaggacagagggattttctattcgccgaaggattgccgggatgacctcgtaagcgccatctcgctcctccctcacgactatcatgatctgaacacgctactggaacagcgtgagcataccggtcgacaggagaagctaacttcggtgacgttgcctacagcactgaccgtggaagggatcagggaggtactccgggaatacattgaggagtcacctgaggacgaaagggttacccagcagatcaaggacggcagccaattggttgcgcacatcaagtattcggatgtcgactacggcaaaactcggctcgtccagcgtacgccaaaagaggctgctatcgagttccacgtctctgcagacaagacggtcattcggatgcctgccaatgaccgtgtgaaggccatgtactccaaaattaaggacaagctggataccaaggccaaggtcgagattccctccattcgtatcgagctcggcgagtttcagtcccctgctctgcggacagagttctttacatctttgatcagtaatctcaaaggcttcactctcaagaatgtcaccagcgtaaaggttgagcgccttcctcaggagctagaagaggacgagctcgacttggacgatgaccaagacgcagaggaggctaaacaggaggccttggccctggtcaaaaatgtcgctttgaagggcgagacattgcttgcgtcggaggagtaccagagcctgactcggaaaggcttcttcatcacatcaatcatctggcgctcggtactgaacaaggcaccacagcccatggtggaatttgaggccgccttcgaggatcccgtgcaaggaaaaggcttcaagtactttgtccgaggtgcctaccggatcgtcgagctccagtacaccaagacgatccggccggtcagtgccgaggacaaggaactttacctgggtgtcatcgaggaaacggctgcgaaagtcataacagaactcagggcgcacgctgaaacgggcgctgaagcgcaaggagagccggcatga

SEQ ID NO: 349548 - DNA, 978 bp, Pseudomonas aeruginosa
atggccgagacgataaatatcgcgaagatggcggagaagctgtccaaagggatcttcactgagttcctgtgggggcgtatggagcacaccaacatcaattggccgtgcgaaaatcaggaaacacacgaggtcaaaactcacccctctgatgttgtcttttggtacgacgagccgtactcgcagtcacgcacctatgtgaattgtgatctcaagagctacgcgaagggcaccatcaaaactcagaccattcgagatgcaatcgagagcttagccaagagtttgcgatgtgcggaaatcagccaagacttcagcgatacctacatccatccgaatgtctcggcaaatatccaagggatgcttttcgtctacaaccacgataacgagtacgacaaagagttcgccaagatccttgaaaaggtgaagtgcgatgacctggatattccgaaaggctccaagatcgttgtgctcggccctgaagatatttactggctgaacaacgttcatcacgagattatccaccttcgcggtggggtaggcctgctgccggagcgggatcactgcaagttttactatccccatctcgttcgaaaaaagaacgttcagctcgagaatgcgaaagcagcgaccttggatatgctgactgccccctggatcatcatgtcttacgtgaatccgaagaaagggagcaggaaaggcttcgtggtctttatgcgcaagaggggtattactacggatgaatttctttacctcattgagtacctgatgcactaccaggtgatcgaggcggaaacagaggtcacaattcgactagttgaccctcacctcaatgcttcggccaatttcgccaaggccaaagaccagtacatctctgactatcagggcggagatgaccttcgacagattctagatgctattgatttcggcaagcttgagcatgtacgcacaaccttttgtgaactggagctgtcccggcaatga

SEQ ID NO: 349549 - DNA, 450 bp, Pseudomonas aeruginosa
ttgttgggggccgatctcattcccaaacccacgacccgtgaaataccgctattcgtaaccggacacagccgccagtcgctcgattggatcgcgcgcgaaagccatggatggatcaactatccacgcccaccgaaaatacagcgactgatcgtggaggattggcgacaggaaatattgaaacagtgtggtcccacctacaagccgttcttgcagtcgctttatatcgaccttgacgaacacccgtccacgccgccctcgcatatccatcttggattccgcctgggacgtgaccaccttcgggccttactggatacgcttgaggaaatcggtgtggaccacgtcatcctgaacctcaagtacggtaaacgccccgcagcagaggttatcgaggaacttggcaagcacatcatcccgcacttcgacacacagacgtccgatagcccggcctga

SEQ ID NO: 349550 - DNA, 969 bp, Pseudomonas aeruginosa
atgaacacccgtaagctcaacacccacctctcccagtccgacatagccctgcagatcgaattgctcgtaaaggctatcgaacatagcgactcacctgcatttcggatcacgcacaaacgctcgggctataaacgtgtcgagcagaccaggctctcccagtacctcacccgcgtgcagcagatgtgcaacctgttcgatgatcatgttccatacgactacagcgagcatctgttagcgttccgggaagcctgtgacgacgtcggtcttcagcgctcacccagtggtcctgtctgcatgggtgagacggggacgtactggctcagtcatgaacagagcatgaacgtcctgaccgaacggatccgtgaactgacacgagagcagtggtatcggcgtaggaagtgggaccggcagcagttggccaagcagcaggatagggaaatcaccgagtacacggatgcgatgatgagccgatactcgcgtaccgcgatcatcaggttgaacctgtactactggtctgaggcacaagccaggctacgtatcgaacaagtgttcaatcacttggatgccctgattaccaagcaccaccgccatccgatcttcgagcatcttatcggatacatctacgccgttgagcagggggatcgaaatgacggcaggggttaccacatccatgcagcctacttcttcaatggcaacatagtgtgccgggatgtctgtaaggcaactaggattggcaagctgtgggaggagatcactcgtcgtcagggctatgcccacagctgcaaccatgataaggaacagtacggcgacaagctaggcatcggccagatccatagggaggatcagtcgaagcggcctaatacccacgaggcaatgaggtacctggtcaaggacgatcagcacctgcgcttgaagcctgcgggggctcgctgtctgcgcaaggggactcttagtcgttctcgtcggtga

SEQ ID NO: 349551 - DNA, 1332 bp, Pseudomonas aeruginosa
atgcgtgtaggttgtgcgccagtacatttgccgctctctatattgctttcgctcttgatctctgcgctggttatagttaggtctgagtgggggatatgctttattggtgggtttatagttggaggtttatggaatagttatcttctagttggcatagctccttgggggatatggtttgcggtaattgcttggttggtttcttgtatccttattgggttgtacttttattttgttagacttgttgctctaaatgtccggccgcagttaggttgcgtgattattcctgttgggtgggtggtattggtttattgctcaaatttttatgggtaccctttggcgattatgcctgcgctagtaatttcgaataatgacttggtgcgctttatttcggctgccgggttctatttgggtgagtttcttgtcgcgttttatttgttttcttttgtgatctatttttctatcgcaagagtggctggggtatatatttttctaattgttatgctcgtgaatcttgtttttccaatacgtgtccccagtgctgtagatgtgcggaacattgctgtagttcaaccagctatacgctatgagagatatattgaggctggtcgtagtttatatcaaaggaaagagatcgagtctgcggttgataggctgacatatagtgcgattttgactggtgctgatatggtggtttggccagaatcagcaaacggcttggctaacattaatctaccgcaccgtttgtctattttggaagggttgatagcaaaaggtaatagtgagttaattgtgacgggtatggaatacggtccggataataaaaaatttaactcggctttcttatttgcgtcaggaagaatgcagcgcacgagaaagagtattaccgctccagttgcagagagtaacctccgcggtggcgaagcagtggtgtttgattctagaatagggaaggtgggagtggcgatatgttttgaaggcctgtttgactcgcactatcgtaatcttgttaatggtggggcggatcttttatttgtcttaacggatgattcttccttagccttttctagcttgccagagatacatgctgcctatgcggtgctctactcaatgatatacggaaggccactcttgttttctagtaatagaacagtatcgtttgttactgataacagagggcgaactacttatcaggactcaagaggcaatgtgcctcgtgtgaatctgtggaagatgtcctcggctaaatttgatagagatctgttagttactaaccagatggggctgttgctattctttataggggtggttcttgtcggtattaggcgtgtctag

SEQ ID NO: 349552 - DNA, 1224 bp, Pseudomonas aeruginosa
atgaggatttttaggggcttagtggctgggctgttaattgcaggtgggttgtcggagttttcttactcagcagaaagagtcagtcgggaattggccgatggtatcgtaggtggggctgctgtagatatccagaatgttgagccaaataccagtctggtgagagatcagttgtatattaatggagtagttacgcaccaactggctccagggtatgtcaaggtggttcaggatacaggtaatggaaagaactggaccagtgttgtaacgactattcctactgggaagccaaacgaacagcgaggctggtggacttcaagtgttaactacccattaactaactcgcgcggaaatctaacagtaagggtgtgtaatagaaataacggtgagggtgagtctgagagtgctccatgcactattgttccaagtggagattctgtcatccagaatatcggtttagaccctagggttagagttgcaaaggtctggttccacttactgagagataataatgagttttctaccgtgactgaaggtagaacgtctgcgctagtggactggatcgctaatggagatagagctatcgtggaaccgggaggggcgcctgagaaagcttacaatgcagactacgttgcagccagctgtcctgtgaataatagatggcaatatcggttctataatttagacgtggtagatgcatctgggtgggaaccgaaaagcacgaattatactagattttggccaatcgattacggtccggcagatggcacttggtccacaaaacttccgccggcttttactaactacacaagagctatagacccatatggagagtatcttcatgtgtatatagttaatcaaatgtataggcggtctaatgggtctggaaggatactaggtcgggctaacatgtcttatggattcacgccgaatcctacaatcattgcagtggaagatgagtggtttaattccatgtcgtttcgagatgccgcccggcttatcgtacacgagtttggacatgaagttggtaagctggagcatattcaggactatgaccctaacaatgtagaaaaattctgtagagggacccctgacagtaaaactatgtgtgcaattattggaggcgccacaggtgctggcgactcgtttgatatgccaagcggctactattgccatgctgtaatgtcttcaatgtctgaaggtaataggaggcttggttctcgatag

SEQ ID NO: 349553 - DNA, 618 bp, Pseudomonas aeruginosa
atgagattaacaaaagagcggttgtttttgatgtttatgcttttcccgtttggcgtatcagctgaagaggtcacggttgagcggataaatgaactcgcggaagcagctgagttcatatgtcaagatggacctgcgcagcagatcagtattctaaaaaggcaggctgatctgggtgccctcgaaaaaagtgaagatgaactaaagcgcaaggaattaagtgttagagtttcaaagtatgatccgggggaactaagtcgggctattgaacttgaagttgtccagaaaaaatcggatggcgttggtaaaaaattgaatttgattatggctttaggtgggctggatccggtctatactgatgctctgcttcgggaaatttataataaggcggacgagattgctataaactcactgtcgtctgatatttcttctgtttatcaggctgaggctgttaatagtaattctattgatgtgcgcggagcggtaattgaggtgctggccttatctgggagcgaatctctggatgatcttttggcaagcgaggctttatctaaatctcctaatgctcaaagagctaaatcaatattggaggagcggagtaatcgctctccaaaaaaatga

SEQ ID NO: 349554 - DNA, 951 bp, Pseudomonas aeruginosa
atgttgggcaacggcaccggcaaggcccgtgctaatgatcgagggcaagccggtaagcaggtgcaggaatggcggctgctattcctttcaacaggggaaaaaacattagcacaacacatggccgaggccagcaaggaactcaaggccggcatggaagtgcgaatgctggccgtgccggcggacgcaggccaggggctgggcctgttcgaggaactgcacggattcggcgatgccgccgagctttccgacgcgctaaaggccagggtgggaaaatggtacggcacgccggcccacgccttcctgtcggccctctgtgaaccgggtaagcgcctggcctacattgctgtcgttcgcaagacactggaacgtttcatgcgcgatgccttgccgcccactgccagcggacaggctcaacgggcggcggcgcggttcggtctggccgccgccgctggcgagctagccacagccctgaacgttaccggatggccggatggggtggccctacaagctgcgcgcgcttgtttggagtcctggctcgctgaacgcgggggcgcaggcaacctagagggggatgcgattgtgcgcaccctgcgcaacatcgtggagcgttatggcgaaagtcggtttacccgctgggaaaacttcgacgccaaagtagatgagcacgcacctcgaacgatggatagattgggttttcgccgtacagaaactcacgggggagccggtcctaagtttgctgtcaccacttattacttcctacccaactcctggcgcgacctagtgttcaagggaatagcgctacgaagtgtaaacaaggaacttgtggggcgcggaatacttattcctgggaaagatggaaaagcagcacaagtagtggctcttccgggcttgggaaacacacgaacttacgtggtgagcaataaagtcctttttgcagaagaagcagcgtaa

SEQ ID NO: 349555 - DNA, 1824 bp, Pseudomonas aeruginosa
atgaaagggaaaaggcacccaaccttcgcccaggtcaagcatgcagccctgcaagatattgcgcacgttctcgcacagtggctgcccaaagggcagacggtagatggaggcaaggagtacaccgcgcccaaccctacccgcgctgacaagcgtgccggctcgctcaaggtcaacttggccaagggcacttggtccgacttcgccacaggtgacaagggtggggatctcatcgacctggtgcgctatttggatggcggaaccgatattgaggcgtgcaacaagctagcggacttcttgcgcgtttcggcaagcagcagctccggtccgacagctccggtcaaacaggtacaggaatgggagcctgttctaccggcaccagaggaagccgcccacaagataccgccaaagcatcgccagcacggcgcaccctccaaagtctgggtgtacagggacagcgaaggggctgtcttgatggtgctctatcgctttgacgtaaaagatgagaccggtcagccggataaggttttctcaccgttgacgtggtgccgccgcgctagcgatggtgtatgcgcgtggcgatggaaaggtttaagcgagccgcgaccacttctcaggctcgacgaaatagcacgccgaccggacgctcctgtcgtggtatgcgaaggggagaaggcagcagacgccgctggggagttgctacccgatcacgttgccacctgctggcccaacggagcgaactcatggaagaaggcggacttctcgtcgctcgccgggcgtgacgttctactctggcccgacaacgacgctctcggcctcacctgcatggatgcagtgaccgagcatctgcgacaggtcggtgccgcctcggtacgtcggttggcactgaaggtgtttcagcaacgaccggggatcagtggtgagcgcccgacttttacggctggcggcgagtggtccgagggggacgatgccgccgacgcgctcgccaagggatggactgccgctcacctggccgagttgggacggaccggcgagttgttcatgctggagccttctgagccacagcaatcgacgaccaccaccaaagcgaagcccttgaaggtgatcacgcgcaacagcggcgcggagaagcccgctccagcgccgaacggcttccgcgtgacagatgacggagtgttctatgtgggggatgacgatcaaccccgctcggtatgctcacgcctggatatccttgcacgcacgcgcgacgacaaagggcataactggggcctgctagtggagttcgacgacccagacggtgatcgcaagcgctggaacatcccgcaacgcagcatggcaggagacttcggcaaagaggtgcttggtccattggtggatatgggattacgcctggcccccgtgcggacggctcgtaacgcccgcaacgatctacagagctacttgcagagctacgacagcagcgaacgggctcgcctggtcacgcgccttggatggcatggggatgcctatctgctaccagatcaacaggtagggcggagtgctgaacacctgcacttctacgaagccggagcccagctcccccccattagccaggcaggcaccctggagcagtggcagcagcagataggtgcgctgtgcgtgggcaacaaccgcttagcattcgtggtgtctgtagcctttgcaggcccgctactgcaactgctggggcatgagtcaggcggcttccatctgtacggcgacagctcggggggggaaaaccacacacttgcaggtggccgcctcggtctggggcgggccgcgcctggtgcgttcctggcgctccactga

SEQ ID NO: 349556 - DNA, 258 bp, Pseudomonas aeruginosa
atgaaccgcctacccagtactaagaccgcagcggttcccttcaccgatgggcttttctcggtatgccccggcgcagatgtgagcgatgcactagagcacgcttccaacattctgggctgcatgcacgaattgactataacggtcagcgaaagcgagcgaccgggagtggaagtgttcgccatccagtatctcaacgaaatggcgaaggcgctggtggattccgctgtacaaggaatgctggcgcgagggaggggctga

SEQ ID NO: 349557 - DNA, 228 bp, Pseudomonas aeruginosa
atgaaaagccatgcccttgttaccgagttcgaacgcgcctcgattcagctcatgaggggaagcgatgtgcttagccaagttggggctgctcttcgcgcggtcctcaaagccagcgatacggatcgcgaagccctggccagcatcacccagacctacatagacgattgggcggaaatcctctacgccgaggcgaatcacttcgatcaagtgtcggagtcccacaaatga

SEQ ID NO: 349558 - DNA, 261 bp, Pseudomonas aeruginosa
atgaccacccgcaatccgtccaaagcatgcgccgccgcccaccgggcaatggctctcgcagcccttcgcagtaattcgtcgctctccgtccgcctggcccgctacaaccatcaccgagccatccagcgctccattgaagccaggcacgacgcctgcggctggctggagaatcttgagggagacacctgggccgatgcttgcgaagaaatctccgcctccctgaaggccggttgcctggtagctgtagggggtgctcaatga

SEQ ID NO: 349559 - DNA, 1236 bp, Pseudomonas aeruginosa
atgaagcgcagcgagatcaaacgccgcccactggcggataccgccctggccagtctggagccggagaaagcggtttaccgggagcacgatgggcagggcctttacttccgggtgaagcccaatggggccaagttatgggaactacgctacaagaagccagatgggaagtggtcatggctcggcctgggcagttacccggatgtcagcggatcggccgccaggcagaaggcagccgaactgcgcgctgacgccgccgaaggtaagagcccactcgccaccaaacagacccgtaaagcttccgagctgaaggcagccaacagcaccttcgaggctctggcccgtgagtggatatcagttcgcctacctggctgggctgacaacaccgccaagcgcaccattggagctttggagctgcatgccttcccagtgttcggcaagcggtcatacaccgagatactgcctatcgaatggatggagttcttcaaaagcatggagcggaagggcatcatcgagcagatgggccgggtgcgccgatcctgcaaggagatttatgacttggcccgcgtcacagggcgcgcggtacacaacccgctcgacggtctaaatcgctttcttcagagcaagccagcagagaactacgcccacgtcacagccaaggagctgcctgcactcctgcgggccgtctctgcctacccacacgctcatgatatccggctcggactgcgactactgatgctcaccggggtacgccccagcgaactgcgcgaatccagatgggaagagttcgaccgtgatgccggcctctggcacatccccgccgaccgcatgaagaagcgccgcccccatacagtgccactgtctcgccaggccctcgaagccctggagcaactgcaccagatgaccggcatctatccgctgctattccctgggcgcaacgaccgcaccaaaccccgcagcaacatggcattcaacatggctcttcggcgtatggggtacgaaggccgccagaccggccacggattccgacacatagcctccaccacacttcgcgaacatggattcgccaaggaacatgtcgaggcacagctatctcattctgaggatggagtagccggggtatacaacaaagcaatctacatcgagcaacgccgaactatgatgcagtggtatgccgactacctggacgaactggaacgtgggaatgtggttcctctaaatctcggcagagccggctag

SEQ ID NO: 349560 - DNA, 204 bp, Pseudomonas aeruginosa; identical to SEQ ID NO: 349540

SEQ ID NO: 349561 - DNA, 213 bp, Pseudomonas aeruginosa
atgacgcccagcgaaatcattgacgcccttggcgggacattccgcgttgcggagctgtgcgaggtgaagccgccgtcggtaagcgagtggagaaggcgcggcatcccgcgcgcacgaatgatgtttctccgaattgctcgaccggaagcgttcgcatggatggatgagaaggctaagggccaggaaatcagggtagaaggcgccgccgactga

SEQ ID NO: 349562 - DNA, 618 bp, Pseudomonas aeruginosa
atgaggatcaccgccgatcaactcgaccgcgctaccgggtgtggtgctgctactgcaacgacttgggtcgagcacatcaacggcgccatggcccggttcgagatcaacacgcccgagcgtgcggcgatgtttctcgcccaggtcgggcacgaaagccagagcctcaagcgcctagtcgagaacctgaactactccgccgaggggctgctcaagacctggccgccgcggttcacgccggccgaggcgaagcagtacgcccgccagccagagcgcatcgccaaccgcgtctatgccaacaggatgggcaatgggtcgccggatacgggcgatgggtatcgataccgtggtcgtggcctgatcatgatcaccggccacgacaactacgccgaagctgcccgcgccatggcgctgccactagtggcgcaaccagagttgcttgagcaacggacctgggctgccatcgcgtcggcatggtggtggaagtcgaggggtttaaacgaactggccgaccagggtcgcttcgagcggatcaccctcaagatcaacagtggctacaacggcgcagatgaccgtgcggctcgcctcgagtgggcgcgtgctgcgctggctggtgcgtga

SEQ ID NO: 349563 - DNA, 342 bp, Pseudomonas aeruginosa
atgaacgaccgcacactactcgaactggcggcgcgggcggcggggatcaaggcgcgctggttccgagtaaaccaatggcgacgagtcggtggccataagatgcaaacagggcaggaagatgtttttggaactcatcatagcaagccttggaacccgcttaccgacgacggcgacgcgctgaggctggcagtgacgctgggcattcagctgcatttcgagggcggcgagaaagacgatgcggtatgggcgaacgaaaccatgctttggactgacggagatcgaccatctgccacccgccgcgccatcgtccgcgctgctgccgagatcggcaagtcgatgtaa

SEQ ID NO: 349564 - DNA, 195 bp, Pseudomonas aeruginosa
atggctaatcaatacctcagacccgaacagatggtagagcctggctactactggtggttgccagaatatctgagcactagcccagagaagcaagagaactggcagataatctgctggcatcctttagatacgtccagggagcgtgtcggggtattcgtcggaccgctgattccgccaacggagatcaagccatga

SEQ ID NO: 349565 - DNA, 1101 bp, Pseudomonas aeruginosa
gtgagcaaggaactgaacaaggcaccggtagagcaggcaggcggggatgagcgcgcggcgtttgaagcatggcttgcgcaggctatgtcgaagaaattcgaacctgagtttgacctagcgaagtacgaggactcaggcgagtacagatacagcccggccgccgcttactggaaggcatggcaagcccgcgccgccctggcgcaaccctccccagcgcagactcaaccctctccggccccaaccctgcgtgccgccattgatgtagccaacgaccggttcgaagtgcctgtagcgaagtgggggaccgacctggtaggggaagaggagcggccggaggtagcagaagtcgcgttcgtcctgcgcaacatcggcgctatggacgctgaagacatcgacggcgacaacgttgatctgcgcttcgaggatgccgaaggccgcgatacagggtgcgacgtttccatcgtcgagtacgccgagaaagccgctgacctattcgaacagcacgaccgcatcgtcggggagctgcgagcggatcgcgattcgtgggcagagcaggcagagcagcgcctcgcggactgggatgaaatgcgtaaagagcgcgacgccgccctggccgaagtcgagcgcctgcgccagttcgagcgcatctgcgaagggctgccgcaagacgccatcgatggtggctggaccgtgcaaggcattcgcggctatgccaagcacttggaggatcaactgaaagtcgccctggccagggtcgcggagcttgagtccaagctggcggagctggagaagcaggagccggtggctctcgccaatcgcggaattcatgccttctgggtgaagtggacggaggccgctgccggcctgtatggccccggcatcaagctctacgcgcacccggtcgcacaggctcagcacagcgtgccggagggcgtaaccatcgagcgcgatgtggccgggacaatccacatcaaggtaggcgacttcgacttcatccagttgcagtaccaacgcccgtacaccgacaacgcttcaacttggaaactggcggaacgcattgcgtctctgctcgccgccgcgcccggcaaggaggggttgtga

SEQ ID NO: 349566 - DNA, 825 bp, Pseudomonas aeruginosa
atgagcaacatcaaatacacgaacgacgggaagaaggttcttgtccttggaaaactcaacgctgagcaatcgattgttcaagaaatattcgttagcgagggccaggaaattccgagcggcgagaacttcgttgtcaagagtctgcacgacaagccggttgagtcgtggaaggaaaagaatctgcgtgatttggagcagcgatacgagaagcaaaagaaagaccttgagcttcaggtaagccagcaacatcagcggctgagtattgccagggacaaagccaagcatcatgccaatgcgctgttcaaattcgtcgagaactctgatgaaggttcgcttgatctgctgaagaaggtcatgtctgggcaggtaactcacatcttcgtttctggttactcccccgaaatattcgagtgggatggaggcaagggggtttatgaggaagaacgcgactacaaccgagtcgaagtgaaaggcatcaagctcatttcgctgtacggctattcagatggtgaccttgagtatcggcttcaccactatcgcgacggcagcggaggaagtcagcaaatcttcccgacgtgtagctacgaggaagctctgaagatggctcaggcggaatgtgatgagcaatctgcaatgtacttggcggacaagcgaggatcgttttctttgactgcgtggcaaaagatcgaaggcatcgttatcccgcaggctgttgtcgaaaaatacgaagaagaagcagacatgcagcggcgcaagcgtatcgacatcctcaaaaaagaactagcagaccttgaggcgaaagcgccggccaaacccaaatcctaa

SEQ ID NO: 349567 - DNA, 1377 bp, Pseudomonas aeruginosa
atgcttagaaggctatacattgaaaattttaagtcttgggagaatcttgatatagacttcagctctgtaactgggatatttggtccaaatagctcgggaaagagcaccattattcaatttctacttttactaaaacagacaaaaaatgcaacggatagaggtctagttttagattttggaagctttgatgactatgtaagcctaggcggctttcaagatgttgcgcacaaacacaatatcgagaaagaaattctatggaatattaaatgggatttgcccaaaaaaataacaataaatgatgctctagggaagcgtacggatgtactggcaacagataaaagtttaagtatttggagttgtataagctatcaaaaaaagcagattacatgccatcatcttgagtactcttttggggattataatttttatatgagtccgaagagaaaggcagccacggagtatgagttagtagctggctctgaaaatccagactccaagttcagatttaagagggtgaaggctagggcttgggctctaccaggccccattaaaacgcacttattccccgatcaagctaagacgtactttcagaattcggatttccttagtgtattcgaaacggagtacgaaagtttgatggataaaatattttatcttggacctttaagagagccaccgaagcgcgactatgcgtggtctggagcaagcccgttggatgtggggcgtaggggcgagcaaacagttgcagcaattctctcagccactctccggaacgaaaggagaaatcttggcggaagaacgcactataagtcctttcaagagatgattgcttattggcttaaagagcttggcttaattagtgaattctcaatatcggagattggagaggactctaacctatatagagcatatgttaaaaaagaccagtatagtacgcctgctctattgacggatgtaggctttggtgtttcgcaggttctgccggcaattgttcttttgtattacgttccagagggtagtgtggtactgatggagcagcctgagatacatctacatcccgctgttcaaagtaaatttgcagatctaatattaaaagtttcagaaacgcgtcgcttgcaaattattgtcgaaagtcatagcgagcatatactaaggagattgcagcgtagagttgctgaggctgaggctagcaataaggatatagcgttattcttctgcgaccaggaaaaaggtacttcaaggctttcaaagttgaaactaaatgagtatggagagatcgagaattggcctgaaaatttctttggagatgaaatgggcgaggtctctgcggtgcgaaaagcggctttgaaaagaaaaatactggcatctaaacaatga

SEQ ID NO: 349568 - DNA, 408 bp, Pseudomonas aeruginosa
atgaacccgacagatctaccccgtattactggtgtggcggtaaccagtttggtctgcaaaatggccgaagtcgtgggagtgcactacgacgtgaactccttggtggtggaggttcgcgaccttgaatctgatgtgcattggcaaatcgccttccctggtgtcgaaggtttccgtgttcttgatgaaggggacctgggagaattctgggggcacgttcccggcctggtcatcgaggtgaccgctggcggctggtgggaacaggagtgctcaaggagcgggtttgtcggccaatggaccaaagacgttcgagagtactttgtaggtggccagaacgcctgcgtgagcgtgctctcatggagcgagccagctataacgaaagatgttcttaatagtcgccacttctgttga

SEQ ID NO: 349569 - DNA, 1911 bp, Pseudomonas aeruginosa
gtgagccagaccatcgacgcgatggtgcaggcggatccgcaactggcgtggctgaaggaggccgagcagcgcggggatgtggactggcgcatggtgcaggaggtgcacgatagctggaagtacagcaactcggggttaggggctgcgccgtcactggccattgccatcgttgcagttgcttacctcggcccggtgtatggcgcaatggccagcaacctcgccattggcaccatcaacaatggcggtgaccttggcaaggggctgcaacaggccaccagtgctgacagtctgaaagggtacgccatcgcagcggccacggcttatctcgtcagcccgcagttggacaaggctttcggcgtatccagtgacaacatcaacaaagtcaccaaaggattcaagctcagcacagttgagggaatcggtggatttgctgcctacagcattgcccaaggctttgctcaatcggtcatgcagcaggccgcctatggcggcagctacatcgacaacctcggtaatgccatggcaggtcaggcgcgcaacctgggaatggcggtaggtttcaatttcattggcgactcggtcaaataccctgatggcagcccgccgaaaatcatggctcacgccctgatgggaggtctgctggccgaagcctccggcagtgacttcaagactggagcggcggccgctggtgccaacgaggccatgatcaacctccttgggaaaatggtaggtggcgatcaaaacctcgaactgatggcctcgcaactcgttggcgtagccgcggcaagtgcggtcaatggcgatgtgagtctgggcgccgagatcgccaaaagcgggacggcgtacaaccggcagctacacccagatgaaatcaaattcgcatcggatgtggagcgcgtcaaacgttatgcccaggaaaatgggctgagcgaggacaccgcccgcaaagagcttctcagcacggccgccatgatggtggacaatggctggaaccaggccttggccggcacagacatcaacgctgcccgggctgctcagtatctgcgtacggagctgggcacaggcccggacagcaatctcttccaggtgacccaggctgactactacaacgagcgggtggggctgacggcgctattcaagaacaaggaggccctgaccagcgttctggaaaacatagccctagcgaatcccgcgagctatacgagggaccccgcgaaccgtgcggaagtgctgaatgccaaaggtgaaggtagccaagcgggctttgggctggcactggaagggatcgtcagcgcgccttcaaaaactgccttgtggttgatgggtgcgctaacctgttcaagctgtgcggagcgggatatccagaacgcttggaactcggttgcctcgttacctgaagacatccgtatgaaaggctatctggatgccttgcacaccatgcaaggccagggtgccagcgtggtgcgggacaacgccgcgagttcgactgcattgggagttgaggttgggctggccattgatggagggttggcaggggcaggcaagggcgtcgttacggatggtccgaaaggaatacttacactgaaagattttcctgatgtctctaccaagataagccagaagcagcttcgccatattgctggaacacagcagcttgaggcacggggaggcggtggtttcttaaacagtgtctctgatgctcaaaaagtgcttgatgcctaccataccggccaagtgaaaatcctagggagaaatgctcagggattcccagtagtcaagtttgagggcgttactggaactaacgttaatctcggtgttggtataactgatcaggcaaccaatgtatttattatcaagggcacaaagagtccaagtattgtccctacaaatccaaactggagtcccaaatga

SEQ ID NO: 349570 - DNA, 663 bp, Pseudomonas aeruginosa
atgccgctgcaggcgccgctggccaagtacatgcgccgcggcaccgatctggagacgttctaccaggtgcgcagttggaaggatgagcacgaattcgagaagggcagcgtgatccagctacgcgaggccgacatcaatcaggaaatctacggagtgccggagtggttctgcgccctgcagagtgccctgctgaacgagtcggccacgctgttccggcgtaagtactacaacaacgggagccacgccggcttcatcctctacatgaccgacgccgcacaaaacgaggaagacatcgacgcgctgcgcacggcgctgaagaccgcgaaggggcctggcaatttccgcaacctgttcgtttacgcaccgaacgggaagaaagagggcctgcagatcattccagtcagcgaggtcgcggccaaggacgaattcggctcgatcaagaatatcagccgcgacgaccagcttgccggtctgcggatctatccgcaactgatgggggtggtgccgcagaacgcgggtgggttcggatccatcagcgacgcggcagcggtctgggctagcctggaactcgagccaatgcaggcgcgcctgcagcaggtcaatgagctgatcggggaggaggtcgtgaggttctcgaagttcgaggcgccaggcggccagtag

SEQ ID NO: 349571 - DNA, 759 bp, Pseudomonas aeruginosa
atgtcggttgcctgtgctgcaaacgttgaaagcagagcggccggtggtgacttggtagggcttgcacctgcgaaagctggccgcgtcgtctattacgccggagaagaccccaagccagcgctgattgggcgaattcattctattggcaaacatcttgggcacgaagctcgcgaagccgtcatagaaaacctcatggtcataccgatcatgggaaaactaatggacgtgatgaacgaaagtaagcgggccgaggtaatcgagcaatgcgaaggcgctcgactaatcgttctggacacgttgagccgtattcatacccttgatgagaacagcaacggcgagatggctcagcttgtcgctaagcttgaggaaattgcgaccattactaaagcgtcagtgctttatctgcaccatgtcagcaaaggcagcgctcgcgacgggcaggccgatcagcagcaggcagtacgtggtgcctcggctcttgtcgataatcccagatggtgcgggttcgtcgcgaaaatgactgacaaagaagcgcagaaccatacggaccgcgcctatgaccgacagcctatcggggaagaccgccggaagttctttgtccgttttggtgtcagcaaacagaactatgccgaaattgacgacgatcgttggtatcaacgtcatgacggcggcgtgttgctgccggtggagttgttggacgccaagcaagagggtgcggatcggacccgaggcaagggccatgccgcagccgcatattag

SEQ ID NO: 349572 - DNA, 327 bp, Pseudomonas aeruginosa; identical to SEQ ID NO: 17381

SEQ ID NO: 349573 - DNA, 1644 bp, Pseudomonas aeruginosa
atgcgacgttcaaccgtttacgcacttgtcggcgcggtgctcttgctttctgcaactagtgcgatggctgccggggtcgatttggcgcagagcaacacgtctatgaacagccttctgcggctgattcagaacgcttcaaaccaatgggcaccgcgcctgcatgattacgccttgtggctcttgggatgccttgccgtcatccagttagtttggacttttgctcctttggtcatgcgcggggctgaactgggcgacatcctccatgaactggtgaaattcatcctcgtgatagggttcttctatgcgatgctcgatcacgcgaccgagtggggcggggccatcgtcaacagcttccggcaggccggggcgcacgcggcagggttgggtagtgcggaactgatgccgggggatatgttctcaactgctgtggacttttcacggcaggtgctgacggcaggtgtgtcgatgttcagcccaatcacatcggttgtagttgccgtatctgcattgatcgtcctgatgtgtttcacgtttatagcggctctggtgttcgtgacgctcgtagaggcctacgtcatcatcaatgccgccgtcctgttcatgggtttcggtggctctcaatggacacgcgaatatgcactggctcccattcgctatgccgttgcggtaggtgccaagctgtttgtcctgactctgattgtgggtctgatcatgcaggtttccgcagaatggtcggcagcctacaccatcgacgaagcgtcgttgatgaccttggtcggcctgtctttggtgtgcgcctacctgaccaaaaccatccctgaactgatcggcggcatgattaacggcacgtcgatgggcggcggctctgcaattgggggcatggccgcagccggtgcagccggtgcggcggccgcaatcgcaactgttgcaacagctggggcagcagccccagctgctggagcactaggggccgcgggaactggcggaggcgctgccagtgcagcgggtggtggactggcctccgcattgaacgccagcatggcaggcggcagtaccgcagggggcatcggtggtgcgacgggcgtcggcagcgctggaattggcgcaagcacaggagggggcagcggtgcgaccgcaaaggccgcaggttctcgcgtcgggggtggtgccgcgtcaggatcggcgaatccagtgtcggcggccgcttcgcctgctagccaagcatcaggcagcggcttgaagcaagccgccaaacaggccggaaaagctgcgaagggtggtgacgacgatatgggtcagcaagccgtcgcgcagcaacggcagatgacaccaaaagaagggactggcggcaacggcaaggctgttgcgcagggcgccgaggtggccacacgggcgcttggcgtgctgggcgctatcagcgtacccggcatggaaagctcccacgggctttcgcttgggggcaccggatctccccctccagtccccggcggtgacagtccaacgcctgatgacggcgctgagccgactgcacaagcggaatccaacattattcgtccggcatcggacaccactagcaccggagacgtcggcgcgctcaatgtgcccggcatggcttctagtgttaactctcaatcggagacgtaa

SEQ ID NO: 349574 - DNA, 183 bp, Pseudomonas aeruginosa; identical to SEQ ID NO: 17383

SEQ ID NO: 349575 - DNA, 792 bp, Pseudomonas aeruginosa; identical to SEQ ID NO: 310734

SEQ ID NO: 349576 - DNA, 225 bp, Pseudomonas aeruginosa
atgaagacagctcaccgcatcagcgcattggccaatcaactcaacgaactgcaagcctgcctcggtcgagccagtgggcggcctagcaagagcgttatggaagcccagcgcattgcggccgagctggcttctttactcgaagagtggcaccttgaaacgttgcacatccctgaaacagagcgtgacctctatcgcgtacagaatccctattacgcggcccactga

SEQ ID NO: 349577 - DNA, 183 bp, Pseudomonas aeruginosa; identical to SEQ ID NO: 37009

SEQ ID NO: 349578 - DNA, 516 bp, Pseudomonas aeruginosa
atggccatgccgcgcaagctcaagaacatgaacctcttcaacgacggcggtagctaccagggcgtcgtgaagtcctgcaccctgcccccgctggcccgcaagatggaggccttccgcgggggcggcatgaacggcccggtcaaggccgacctcggcttcgacgatgacggcatccagttcgagtggaccctcggcggcctggatctgacagccctcaagcagtacggcgcagtcagtgccagcggcgtcatgctgcgcttcgccggctcattccagcaagacgataccggcgaagtcacgcccgtcgaaatcgtcgttcgcggccggcacgagaccatcgaaatgggtgacgcccagcccggcgaagacaccgagcacaagatcaccaccacctgcagctactacaagctcgtcgtcaacggcgaggaagtcatcgagatcgacttgctgaacttcgtcgagaaggtcaacggcaaggacctgctcgaggcacagcgcaaggccatcggcctgtaa

SEQ ID NO: 349579 - DNA, 510 bp, Pseudomonas aeruginosa
atgcaaggtcgcaaggtcgaagctgccgccggtcttctgtgccttgagcgcggcatcggcgatctcttcggcgatgacgcagccggcggtacgcgcgaagcggtcgggcatgaccaggtcgtgtgcgagcacgtagtcggcgatgtccagggcgccggcgtaatcgccggcatcgatgcgccagagcatgacggtggtgatcacctcgtcctgggcgcccttgccggcctgcagcacgccggaaatgtacggctggtaggccggcagcaactcgaccttgagcgctgccttgccttcgccggattggatgttcttcaggcggctgcgatcctgatacagctgggcgagctgcagctcataggcgttcgcgccttccatgccctggtgcggggcagtggccgccgcctcttgagcggcggtcacgcgcaggaagtgcgccttggcgggactgaaggccatgtcatctactccgcgacttcgatgttctcgaccaggcagccgaggccgtag

SEQ ID NO: 349580 - DNA, 435 bp, Pseudomonas aeruginosa
atgtcgcactttttcggcacgaaccccatcgccttctacgacacagcgatcaacaccgatatccccgacgacgcagtcgagatcaccgcagacgagcacgcggacctgctcgcggctcaggcacgtggcaaacgcatcgcggtcggcaaagacgggcggccgatcctgctggacccaccagctcccacacgggacgaacgggagagcttcgagcgcatctggcgcgacgcacggttgcgcgaaacagactcactggttgcccggcaccgcgatgagatcgaggccggggacgtgcccacgctcgacgccgagaaatacagcgcactacagacctaccggcgcgcactccgggactggccggaagctggagagtttccgctcgtagaacaccggccgagagcgccggaatggctggcaggcgaactggcgtcctga

SEQ ID NO: 349581 - DNA, 252 bp, Pseudomonas aeruginosa
atgcaagcgaatcaaccccaaggcggcgacgccaaggctagcacagccacgtcagccacccgcactcgtccagcgatggccagcaagcggctggcccttccgagcacctgcgacatctgcggcaacgcgcgttccaccggcaaacaccagcgctgcagccggattcgccaacaggccaaggcggtcgagtgggccagctacatggccaacctggcggccaagaaagcgcagggagggcgtcggcatgcttaa

SEQ ID NO: 349582 - DNA, 369 bp, Pseudomonas aeruginosa; identical to SEQ ID NO: 334839

SEQ ID NO: 349583 - DNA, 369 bp, Pseudomonas aeruginosa
gtgatctcggcccgcgtgatttcgatcgcgctggcctgcctggtgctggtcggcctcggcaccgccggcggtgtctggatcggagcgcggcactaccggccgcagttggatgccgcacggtcggatctggtcgcctgccgtgcctcccggggagagttggagtccgcagtggcggagcaggtccggcaggttgccgcgctccgcctggccggcgagcagcgcgcccgggatgccgcgcaagctgtggatcggggacgacagcaggccgccgagcagtatgccggagcccagcgcctgctacgtgaacgaaccgccggcgagcagtgtgcggccgccgaggcggtcattgatcaggagttgggtctatga

SEQ ID NO: 349584 - DNA, 354 bp, Pseudomonas aeruginosa
atgcaacccctcccccacgactatctgcagttgatccacgacttccaggccaggcagcaggagaacgaggtagccggcatcacagcgttgaaacgcctgctcccgatcgcacagcgcgacagcggccagagcggcgtgatcggtcggttcctgctcggcctgtacaacggccaggctcaccgcttcgacctcaccgagctgcgcggcctcgacccagcgctgttcgatgcctgcctgtccgtgctgcgcatggactacgccccgaaacaggaagtgcatgagtacttcgaggacggtgacgcgatctggcaggacctgcgcaaacgctgggctgcagcatcgctgccggcatag

SEQ ID NO: 349585 - DNA, 345 bp, Pseudomonas aeruginosa
atgtgcaatttccagcgaggcacatatgagtgccgtggagatggctacttatgggatgcagataacgacggctgggaccctgatgatgagtcttggccttgtccgggctgcaacacattggagtatctgaccatcgccaaggaagaatcggagagttgcagcttcttcgttgactgcggcgacggtggaaccggcgaggacatctggcgccgtaagctcaactgggctctaggtgcaaaccctgaagaaactgcgcgcgtactgaagattctcggaccaatccactgtctcgttcatgataagacatcgcccgatggcttcatcgtgagcatcaacaacgtctga

SEQ ID NO: 349586 - DNA, 687 bp, Pseudomonas aeruginosa
atgaaagaacgtccgatcctgttcaacgaccagatggtccgcgccattatcgagggacggaagactgtcactcgacgggtgatgaagtaccagccgcacgaagacgcgagcgtcacggtgggaaactataacgtcaccattgtggaccgccacggcgagcaacagccagggcctgaagccttcggcgcatggtggagcgatggggagcgcgggtgtatctgcccccacggcgagcccggcgatcggctgtgggtgcgtgagacgtggaccgatgtcaacctctgcggcgcaccggcgctggcatatcgggcggacgaggatatccgcgatcttatggaggagccggggtttctggatgatcgcggcgccttcaactacgacgacccgcgcgtcaagccgtatccattcgcctgctggtacgccgatctcgatcaggcgcgctggcgcccaagcattcacatgcctcgctgggcctcccgcatcctgctggagatcaccgccgttcgcgtcgagcggctgcatgacctcagcgacccaggcgcgctggctgagggggtctcgcatagtgaaatgcactcgggggacagcctggtcgacgttttcgcgcgcctgtggaaatccatcggcggagattgggatgccaacccctgggtctgggtcgtcgagttcaagcgggtgacgccgtga

SEQ ID NO: 349587 - DNA, 231 bp, Pseudomonas aeruginosa
atgaacatctacgaatgcgaacgccttgcgcgtgatcttggctacgatagagcgaagttcacggcaatcttcccggccggcccattcgaatgccagtggctggacgcctacatgggaatcttcaaggtcgacgctgacgggatgcgtgacggcttcgtcatggtcaaggaaatggctgagatgttcccgaacttggaatgcattgacctgcgcgtcgaagacgacgtctaa

SEQ ID NO: 349588 - DNA, 444 bp, Pseudomonas aeruginosa
atgaccgacaccaacaagctgaaggaacttgcagcccagtaccttgcaaatccatctggtactgctggcgaagactcggaattccgagccgccgccaaccctcaagccatcctcgggctgattgccgagattgagcggctgaacgctctgctaaaggcggaaaagtacgcctacaaggacaagcagaaacactacgagtggctggaggaggacttgaaggagtgcgcaagcgccctccccggcacctactacatggaccctccagacggcggcaatgtcagcattcccgagcagattcggcgcatggcgaaggatgctgcgcggtatcggtggctgcgtggagcttcacacttcgatacaccgcagcaccaagcattctgcaaggcctatggggatgcgctggattacgagatcgacgcagccatagaaggagcaacgcaatga

SEQ ID NO: 349589 - DNA, 1041 bp, Pseudomonas aeruginosa
atgatcgactggattgcggccatgatcgaactgcaccacgcgcctttgagcagtggggcggtggtctgtatcgaggctgacggcacggttgcttgggaaaccccgcgcaagatgctggtccgtggctcccatgactcgacgatccatattcggagcgtaggcggggacgggcagggcaacgcgactcatctgtacatcgacggcaacccaagcaagtggttgcaaggacataaccttgttggttcctgtgatctcgttgccctcgtctgggatgcttttcaacgcctctgcgccctggtgggccttgagccgactgactttgagcgtcagaaggtcagggcagggcagtaccgcgtcactcgcgtcgattacaaccgaatgttcgaacttccaagccgggccgatgttcgagcctggctgcgtgcgggcgagttcaagtgtaagtcacgccatggtcgcccggtaaataatcgcgggactctaactttcggcaaaggctcaagtcattggtcgattgtttgttactgcaaggccgatgaaataacttccggtggctcgcacaagttgccagaagagttccatcagtaccctgaaatctatcagtggatagataacaagctccgcgttgaacttcggttgcgctccaagaaactcaaggcgctgagccttgaatatgcctctcaactaacccccacggttctttggaagctctaccgtgacttcattggggaactagatatgtcagagcaaatagaacttaactcggagcagttgctgtcgctgccgaataaaattcgtggaacttatgttctttggaagcaggggcatgatttgaaatcgatgcttccaaatggaacttattatcgtcatagaactgcgctcatggagcatggaatagatatcaatattcgttgtgatcgccgcgacgatagcaatgttgtgccgatgattagaattcttgaggctaaacctgcggcgattccgaacttcttctttgaaagggggctgattcataaatcggcccgacaggtggctgtatga

SEQ ID NO: 349590 - DNA, 1188 bp, Pseudomonas aeruginosa
atgtttgttctccgcaccggtttgcagggtaatagtaagactctcaacacaattaaagaggtcgacaataaagccgcgaaagaggggaggacggtctactatcacaatattcgtgagttcaaggcggatcatccggcgatcaatgcggaatgggtcgagttcgacaatccgcaagagtggttcaagcttccgcccaacgctattatcgtgatcgatgaagcgcagtcgttctttcgtgtgcgcccgcagggttccaaggttcctgagtatgccagtgccctggagacgatgcggcactccgggcatgaggttcatgcgatcacgcaaagcccgatgttgatcgatgcgcatatgcgcgaactctgtaactgccatatccattatcaccggggtaacggtggaaagatcgttaagcggtgggagtttcagaaagttcagacggacgtgaataagaagtatgacttcgcggatggtgaatcgacccggatcaccatcgataagacgtatttcggctgttataagtccgttgcggatggggctgagcatcacttcaagttcaagccgcctcgggcgttgttcgtgcttgtcggtgcagccctggttatcggttatcttggctatggcgtctatgagcgtcgtatggcgacgcatgagcctgccgaatccgttcctgcggtttcttcgtcgagcgttgcgcctgcggcctctgcgggcgttcctgatgtcgatcaggtgcgtcacgtgactgccggtgagtatctggcgatgcgcaagcctcgggtgcctgatgtgcccagctcggcgccgatctatgacgaactgacgcggccggtggcgtatccgaagccgttctgtctgtcgtcacgtgatgagttccttgtgcataagaatcgtaagcgcatggtgaccggttatcgtgatggccggttgtacggttgccgttgcaacagccagcaaggcacgcgcctggatatctcgttcgaagcctgcatggcgtacgtcgagcacggtgcgttcgatccggcaattcctgaccgcttacctgcggctgtcggcgtggccgggccgggcgaggcacgagccggtacggcggcgccgatggccgcgaactcgtcgattgttgcgccggagagtgctggcacccgcgtgacggtggtgaattctggcaagcctgggctgctgtggtga

SEQ ID NO: 349591 - DNA, 1443 bp, Pseudomonas aeruginosa
atgcgctatatattgtttttgcttgctttttctttttggccgcaggttgcaagtgctgagatattttggtggcaggtcaatggtattgaaagtttgcgcgataagtcgttcgattcgcccggtgaggggtgttcggcggtgctggcttactttcagtctcagggaggtcagtacagttattcgtttaagtttttgaggcgtaattctgatgttgagtttagctgttctctgaatcgttttgacaatggcgaaccatttggtgaagttggtgcttctataggtcggtatggcgattcttgccctcaagacacgaagtatgtttctgaaactggcgagtgtaagggggaggatgattcctgcaaggaaacttttggcaaagagatttatacggattttcaggttggcactgtaaaagacggtcattttactgatcctaaatcgcctccggcttctctctgtgaagactcttgcctatatacgtctcctgcaactactggctccggaaatggttatcgcatggggcagaattttgaggtttttgttcggtattcgtatttgggcaatggttcgtcttgtgagcagggcgaaacgcctaaccctccatctgatcgctcgcccagtggttcaactgatgaaaattgtaagccggttgaagacgctgagggacgtaagaaactgagctgtcttaagacggatagttatcagaatcctggcaatctgaactgcggtatggctaacggtcagcttgtttgcgttcctgggaaaccttcgccgaataagagcgacacaaccacaaaaacggatattacggagactacgaaccctgatggttccaaggacacgacgacaaccactgaaactacagtcacgacgtgttctggcatgaattcttgcaatacgaccactaccactagtacgaccaacaataagacgaattctgatggcacagacggcggaagctctacggagtgcaagggtccaggctgtaaacagtcaggggagggcgctggtggcgactctgagggcgaagagaaagaggatgagaaagagtcaaaggtttcgggggatgaatcgtgcgatgcggtgattgcgtgcgagggcgatgcgatccagtgcgcgatgcttaagcaggaaaagaaacagacgtgcgcctgggactatgaaaaggccaaggggacaatcgaatctgagattgccaagcctgagtatcagttaactgagacaaccattaatacaggtgagctattcaatgccggtattagtgcaagtcgctggttgccgtccgcttgccctgcgccgaaagttatctcgctgagttccggtcctagtcagacgtttagctgggagcctgagtgtcaaatggcttcgtcgttagcgccgattattgttggtctggcgtcgttgttcttcgcggtttatgtcggacgttccataggaggttga

SEQ ID NO: 349592 - DNA, 207 bp, Pseudomonas aeruginosa
atgcaaaagatgaaacaactgatggttcgtggcggctttgttctcggctcgctgggtctgctggctggtcaggcgatggcggaagttccggctgatgctactgcggcgctggccgatgctaaggccgatggtgttgccattggcggcgtcgttctgggcgtgatcatcgcgattgcggcgtttaagtacatccgccgcgcactctaa

SEQ ID NO: 349593 - DNA, 270 bp, Pseudomonas aeruginosa
atgagcaagttcaaggcgggcgacctagcgctcgtaatcaaccacaccttccctccggtgatcgggacctgcgtcgaactgataagccgccacctggttagtccggttgatcgttcgaacccgatggaccctggggtctacgagaccccagatggagagccggcatgggtggttgacgatcagaaaagcatcgtttgggagaagtggctcatgccgcttcggggcgacttccagcccgagcagcagaaggcgaagggggtggaggcatga

SEQ ID NO: 349594 - DNA, 810 bp, Pseudomonas aeruginosa
atggcgtggtactcaaccggaaccgtggcggtgaccgcaaatagcccgaccgttactggtaccggcacacagttctcgtccaatgcccgagtcggcgacgcatttcgcggacccgatggacgttggtacgaggtcacaaacgtcgccagttcgacggtcatctcgatcaagcccaactaccagggcagcacggccagcggccaggcctatgcggtggcgccgatgctgggctacgacaaggacctgtcggatcgattcaacctgatcgccaaccagtggggggcaaccctggcggggatcaagccctgggcgctttctgcaaatgcggcggcagcgcggggggatctcggcctcggcagtgcggcggtacgggaggcgctcggtagttcgggcgcgctgtactctcgagacagcattctgggcgccgtttcgcagtcgagcggcgtaccgaccggtgcggtgattgatcgcgggagtaacgcgaacggggagtatgtgcggttcgcggatgggacgcagatttgttggacgaacactctcaccttcaccgctggggtcacgtcggtcggtgcgaactggtcgtacccggcgagctttagttcctcgtaccccatcgctggggctgtctccgcttctggtgctggtggagactatgactctggcgtgtcggcgagaaaccagggagcgacctacttcaatccatccgcgggtacggctggggtggggttcttctgcatatcgtcggcatcattcacatcaggcgctcagactaggaataacagggtcgtcgccatcgggaggtggttctga

SEQ ID NO: 349595 - DNA, 1662 bp, Pseudomonas aeruginosa
atggatgaatgcaagccaatgaaacgctccgcctcgttaattgcttttctgctcctatcagcctccctgcacgccgctgaacaccctcaaaagtctcttgccgcgagatcagcggtagagctagcgccattccagtggtcttggatggatcctgtctcatacgatgaagcaggtcttcaaaaaacggcggccaaaaaagatccgcttcgaccattcttcttagcgttcagacttcttgtggagcacgaaaaaaccggggaagaaaaaagtctgaccagtgcaaagagagtactggacttcatgcttgatgaatatcagccagcaactagagaggcagatgggactcgatggttctatggctttgactatgaccgaggcatcaaggcgccttggtggtcaggaatggatggcttcttcggaccaatgacactgtttgcagggtggcaagccactggtgaagagcgctatcgagaagccgcattgaaaagcgcgaaactcatgattcgacagccaaccgaaggcggatctctttggagagatggtgactcctgctggatttcagaatactcctggaatgggataactagggataaagagtaccatgtgctaaatggccacctttgggggcttcaggcgctctatatgctagcagaagcatctggtgataaagccctaaacgaagcataccaatgcgcgcgcaagggtacgcttgacagactcccggagttctataactcgacaggaagttggacttggtaccagcttgtcccaaaggttataaacccaacacactataacatattagaaaccgcacagttcagagcgctgcatgcaataaccagagacaacgcttataaagacccggaacagcgcagaatcgcggcatttcaaaaagcatatcctctatacttaatcgaaacaaaaaaaggacttgaaatacagttctcaatgatgggggcgccaaatgcttactggacagatacttacccggttacagtaagctgtactgttggaaacaaaaccgtaagccaaaccaacaaagacgcctacagcaccaaaccaattcatgaacggatgatattacgacttccagtcaataaagttccgaaaaagtgctcagtatccgtgaaaagcagcatggatatcgccatgtacactcaaagtaagttcaaaacgatcaaatcaccagttgaagattttgtaaaattcacaccattaccatctatgcaagcctcaagtcttcaagaaggaattatacacatcaccacagagaaaggtgataccgcaaagcccggtgagggaagagtcatgtttgatgtaaaccgagatctatcagagtcagaaatgattggcatggtaatacatacaactgaggactctcagctaggaattgttcttgatggcgcaaacgaaaaacgggcaagcagctactaccccgtaataaagtcaggaaaagacaatatagtaatcttcaacaagcttggatttgataaaggctcagagctagaaggccacatagctaaaattatgcttaggttctatacaaaacctaacgaaagggacagagacatagaaatcaaggaagtatcagttatcagaaatactgcaaaccttgaagatttcttaagacgcaaccagtcagcaaatttccatcagcagtaa

SEQ ID NO: 349596 - DNA, 618 bp, Pseudomonas aeruginosa
atgcgaggaatcgcggtgcatcaacagcagggtcggttccgcaggcgcttcggcgagcgcgacgtcctcttcgagccgatgcaccggccagcgatagcccagcggcagcgccaggctcgacagcagcggcaccccgtcgagcaggtcgccttcacgccgatacggcggatcgtcgggctcggccaggtagaggcgcgtttcgctccattcgaagtgggccaactcggcttgccacgccggccgatactcgccccgctgccgcaggtagtcgacgaagaccccggcgatacgggtgaacaggggggtatggcttctctcctcgcgatagaactcgcgcaccaggccatgccactgctgctcgccaagcagcccgcgcaagcgcgggaagccgctggcaaggaggccttcgatggcgttgtagaacagctcgcggtagacccgcaggcgacgttcttcgatgtccggcggcggcgcattgccaagcgggtcgcgcaggtgccgggcgaggctgaactgctgttggcgcaggcgctcatccatgacggcgtccctcgtcgcgttgccattggcggatctgctccacttccagcagcagttcgcccagcggcggatagttga

SEQ ID NO: 349597 - DNA, 717 bp, Pseudomonas aeruginosa
gtgatccacactgtgaagtactggacccgaagcaccgtaggcccattgagacactttatcttggtaaacgttgtatccgatgaagaagactctgtcttcgtcttcgtcggtcaatgcccgctcgactacgaatcgccacatcactggagtgctatcgtcttcagcaagcaagtcatcaacggcgttgcgcttgaagaaacccttcttgtcagggttttctgggtcatctcggaaaaaacggcatggaacactgccaatgcggaaggtgacgtccatgccagggtttgccaaactcaaccaactgtatctgcggctcagacactgctcaatgagcaggtttcgggaccgtccgaaaacggttgcctcccgggtataggagtcgtcataaggcgaatccatttcacgcagagtgttgaagcggatgtcgagcaggagttcggcaatttttgccaggcgctcgtcagtcaggtcagggaaaaacgaagatgggtgtcggctgctcatgagggttcctggcaaaaacggatttttgtcaaccaaagaatctggcaaatttctacttttgtcaaccaggtgagcggagtcagaacacctctgcgacgtggtattgactctcggtctcgaaaacgccgacaaccatttctccacgatcctgtcgcacgagtgcgatggcttcgtcgatctcatcgaagcagagcgctgctgctggacctttga

SEQ ID NO: 349598 - DNA, 1869 bp, Pseudomonas aeruginosa
atgaacaataacaatagcctgctacgtcacctcgcctggctggtggtggcgatcgtgggcgccgcggccctgggcgtcgtcgccctgcgtcgtggcgaagcgatcaacgccttgtggatcgtggtggcggcggtggccatctacctggtcgcctaccgttactacagcctgttcatcgccagcaaggtgatgcaactggaccccaaccgcgccactcccgcggtactcaacaacgatggcctggactacgtcccgaccaacaagcacatcctcttcggccaccacttcgccgccatcgccggcgccggtccgctggtcggtccggtccttgccgcgcagatgggctacctgcccggcaccctctggctgatcgccggcgtagtcctcgccggcgcggtgcaggacttcatggtcctgttcatctccagccgccgcaacggccgctcgctgggtgagctggtgcgcgaggaaatgggccaggtggccgggaccatcgcgctgttcggcgccttcctgatcatgatcatcatcctcgcggtgctcgcgctgatcgtggtgaaggctctggccgacagcccctggggcatgttcaccgtcctcgcgaccattcccatcgcgctgttcatgggcgtctacatgcgcttcatccgccccggccggatcggcgagatctcgatcatcggggtgttcctcctgctcggttcgatctggctcggcgggcaggtcgcggccagtccggaatgggcgccgcatttcaccttcagtggaatccagatcacctggatgctgatcggctacggcgccgtcgcctcggtactgccggtgtggctgctgctggcgccgcgcgactacctgtcgaccttcctcaagatcggcaccatcatcggcctggcgatcggcatcctgatcgtcatgccggaactgaagatgccggccctgacccagttcaccgacggcaccggcccggtctggaaaggcagcctgttcccgttcctgttcatcaccatcgcctgcggcgcggtgtccggcttccacgcgctgatctcctcggggaccacgccgaagctgctcaaccgcgagcccgacgcccgctacatcggctacggcggcatgctgatggagtccttcgtggcgatcatggcgatggtcgccgcctcggtgatcgagccgggcatctacttcgccatgaacagcccgccggcggtggtcggcgccgacgtcaacgcggtggccgcgaccgtcagcagctggggcttcgccatcacgccggagcaactcacccagaccgcccaggacatcggcgagaccaccatcctggcccgtgccggcggcgcgccgaccctggcggtggggatcgcgcacatcctccaccaggtgctgccgggcgagaacaccatggccttctggtaccacttcgcgatcctcttcgaggccttgttcatcctcaccgcggtggacgccggcacccgtgccgggcgcttcatgctgcaggacctgctgggcaacttcgtgccggcgctgaagaagaccgagtcgtggaccgccaacatcatcggcaccggcggctgcgtggcgctgtggggctggctgctgtaccagggcgtggtcgacccgctgggcgggatcaataccctgtggccgctgttcggcatttccaaccagatgctcgccggcatcgcgctgatgctcgccaccgtggtcctgatcaagatgaagcgccagcagtatgtctgggtcaccatcctgccggcggcctggttgctgatctgcaccaccaccgcgggcctgatcaagatcttcgacagcaacccggcggtcggcttcgtcgctcttggcgagaagtacgccaccgcgctggatgccggctag

SEQ ID NO: 349599 - DNA, 198 bp, Pseudomonas aeruginosa
gtgctggcgccggccaaggatatcggccagatgcagcacgtggtgctgaacgcctacatcaacgccggtctgaccgtgctgttcctgctggtggtcttcagcgtactgttctacgccatcaaggtcggcatcgcggcctggggcaagagcgagcggaccgacaaggaaaccccgttcgagcccatccccgacgcctga

SEQ ID NO: 349600 - DNA, 906 bp, Pseudomonas aeruginosa
atgtcaccgccccgtgggggaggtgcatgccccattgctttggagcatcaccatgtccctcgatctcgaaaccgttcccgtaaccgctgtgcagggcgacctgctcgaagcggcatcttctcctctcacactcagcctgcaggatttcgtatcggagttcggcgacgagttgctcgattcgctgaaccgcgccaatcctccggtctacaccggtcaggtgcgggtgcatcggcaaatgatcctcgccgcactcaagcgcaagctgttcccggcgcaagccgatgtggtccatgccgtcaccgagctgttggtcgaccgcggcgaacgcgccgcgatcgtcaatggcgagatgggttgcggcaagacgaccgtcggcatcgccacggccgccgtgctcaacgccgaaggctaccgccgcaccctggtgctctcgccaccccacctggtctacaagtggcggcgcgaaatccaggagacggtggccggtgccaaggtctgggtgctcaatggcccggacacgctggtcaagctgctgaaactgcgcgagcagttgggcgtgccggcccagggccaggagttcttcgtcctgggccgagtgcggatgcggatggggttccactggaaacctgtcttcgttcgacggcgcacgcctcacggcgacgtgggggcctgcccggattgcgggcatgtcatcaccgatctcgacggcgagccgatcaacccggtcgaactcgaagccgaagagtcccgccgcaagtgcagccactgccgtgcaccgctgtggtccttgatccgtcccagaggcctgtccgccagcgaccagtcctcgaccgtgctcaaggcactgaagcgtattccaaccatcggggaagtcaccgcgcagaagctgatgcagaagttcggtga

SEQ ID NO: 349601 - DNA, 624 bp, Pseudomonas aeruginosa
atgccggggatgtcgccggcagcgtggagatcgccggtatccagcgtggcctgccgagtaccgcgaacttcgagcggcaccgctatcggctggccgacggcgccctgctcggcgagcgcagctcggcgcagcgcgggttctggctgcgcgccttcatcgccgtgcagccgttgcatttcgcccagtaccagtggctcgggccgggctggtccgccgcgttgcgcggcctgcacctggcgatgggcctcggcgcctgcctgctctgcgccagcggcctgtacctgtggctgcaacgacgcgcctcggcgccggacgcccgcgtacggctcttgcagcgccttagcgagggtttctgtgccggcctggtggcggcggccgcgttgctcctgctggggctgcaactcgtgccctcggagctactcgccggaccctggccggggcggctgttccttgtcctgtgggccgccgctggcctggcggcgttgctgctgccgggcgactggccgctggcgcgcgggttgctcggcgtcgccgggctggcctgcctggcggccgccgtcgcgcacctggcgccctggctcatgcgcggccggctgccggccctgggccccgacctcaccctga

SEQ ID NO: 349602 - DNA, 783 bp, Pseudomonas aeruginosa
gtgcaaatcgatcaagcaatccaggtcaaggagcgccagatcgagctactgaaagagcgcaggcagatcctgatccagcaggccgtaaccagtggcctgaaccccgatgtgcccatgcgcgactccggtatcgaatggattggtgagattccggcgcattggcgacttatggccaaccgtgccctgttccgtgagcgtgtcgagcctgggcaggaggagttgcccttgctgtcggtttccatccactccggtgtttccgaggaagaaatcgccgaggaggataacgtccgtggtcgagtcaagatcgaagacaagaccaagtacaaccgggttcgccctggcgacatcgctttcaatatgatgcgggcctggcaaggggcgattggtgcggtacgagtggagggcatggtcagccctgcctacaccattgcggtgccccgcccatgcctcgatccccgatacttcgagcaccagtatcgtacccccggctttatccagcagatggaccgttactccaagggcattaccgacttccgcaagagactttactgggacggattcaagcaactgatcactctggttccgcctcttgaggaacagcaggccatcgtcgagtttatcgagcggtccatgctcaagcagaatgctgcagtgacgctgctggaacaacaaatcagtaaactcaaggaatacaaagccaccctgatcaatagcgccgtgaccggcaagatcaaggtgccgggcgtggtggagcccgaggcacaggacatggaggtggtctga

SEQ ID NO: 349603 - DNA, 561 bp, Pseudomonas aeruginosa; identical to SEQ ID NO: 323905

SEQ ID NO: 349604 - DNA, 2031 bp, Pseudomonas aeruginosa
atgcggctgttcttgtgcgagaagccctcccagggcaaagacattggccggattctcggcgccacgcagcgcggtgaaggctgcctcaacggttccggcgtcacggtcacctggtgcatcggccatctcgtggaggcggcgccgcccgaggcctacgacgagcagctcaaacgatggtccgttgagcagttgcccatcattccccagcactggcgggtcgaggtcaaaccgaagaccgccacgcaattcaaggtcgtcaaggcgctcttggcgaaggcgactcacctggttatcgccaccgatgccgaccgcgagggcgaattgatcgcccgcgagatcgtggagctttgcggctaccgcggccccatcgaacgcctgtggctgtcggcgctcaacgatgcgtccattcgggcggcactgggcaagctgcggccttcggccgagacgctttcgatgtaccactcggcgctggcgcgctcccgtgcggattggctcgtgggcatgaacctgagccggctgttcacggtgctggggcgacaggcgggttacgacggcgtgctgtcggtcggccgcgtacagaccccgacgctcaagctcgttgtggaccgcgaccgcgagatcgcgcgcttcgtgtccgtaccatactgggccatcgccgtgtccctgttcgcaggcggttcgactttcgccgcgcaatgggttccacccgatgcgtgcaccgacgacgcaggccgctgcctgcggcagccggtcgcacagcagaccatgcagcagatccgcgctgcgggcagtgcccacgtcgtgtcggtggagactgagcgtgtccgcgaaggcccgccgctgccgttcgacctgggcaccttgcaggaagtgtgttccaagcagcttgggctggacgtgcaggaaaccttggagattgcccaagccctgtacgagacgcacaaggccacgacgtacccccgctcggactccggctacctgcccgagagcatgtttgccgaagtgcccaccgttctcgacagcctgctcaagaccgatccctcgctgcgctcgatcatgggccagctcgaccgctcgcagcgctcgcgcgcctggaacgatggcaaggtcacggcgcaccacggcatcatcccgacgctcgaaccggcgaagctctccgccatgagcgagaaggaactggccgtgtacaggctcatccggtcgcattacctggcgcagttcctccctcaccacgagttcgaccgcactgtggccaagttttcgtgcggggggcagaacctggcggccacgggcaagcaggttgtcatcccgggttggcgccaggtgctcgccgagccgcaggccgaagacggtgatggcgagggcgatactgcggtccgcgcccaggtgctgcccgcgctgccgaaactgtatgagggcctggcatgccaggtggccgacgtcgatctcaaggcactcaagacgctgccgcccaaaccgtacacgcaaggcgagttggtcaagtccatgaaaggcgtcgccaagctggtgtccgatccccgcctgaagcagaagctcaaggatacggttggcatcggcaccgaagcgacgcgggccaacatcatcggcggcctgatcgctcgcggctacctcgtgaagaaggggcgcgccatccgcgcctcggatgcggctttcactttgatcgatgccgtgcctgcggcgattgccgaccctggcaccaccgccgtctgggaacaggcgctcgacatgatcgaggccggacagctcaccctggacgtgttcatcggcaagcaggccgcgtggatttcgcagttgattgcgcagtacggcagcgcctccctgtccatcaaggttccccaagggccggcatgcccgcagtgcggcgcacccacgcgccagcgcagcggcaagagcggcccgttctggtcgtgcagccgctacccggactgcaaaggcacgctgccagtcgaatccggcagctccaagcgcggcgcctcgcgcccgcgccgtagcggccgcaaaggctcctga

SEQ ID NO: 349605 - DNA, 132 bp, Pseudomonas aeruginosa; identical to SEQ ID NO: 328159

SEQ ID NO: 349606 - DNA, 399 bp, Pseudomonas aeruginosa; identical to SEQ ID NO: 269206

SEQ ID NO: 349607 - DNA, 492 bp, Pseudomonas aeruginosa
gtgcgctatcgccagcactgcacccgggtactctgcgccgacgccgagcgttcggtgttcttcgacgcctatgtcagcggcgaccgtggcctaaccctggattgcggttcgcggatcgagggcatcggccggccgcgggtcgaggcgtccttcctgccggaagtgatcgacgcgatggtcaaggtgccggacgcctggtcgctggcggccatgcattacctggcccgacgcctggggcggcgggtcggcggctccagcggaaccaacctgatcggcgccctggtggccgcacggcaaatggtcgcggccggcgagaagggttcgctggtggcgattctctgcgacggcggcgaacgctatgcgaccacctattacgatccggtctggctggccaggcagggctatgcgctggaacccctggtcgaggcgctggctgcctgcatcgagcggggcgtggcgttgcccgacgggctgctggtggctggactttga

SEQ ID NO: 349608 - DNA, 171 bp, Pseudomonas aeruginosa
atgctgttcctctttagttgccttatcttgaccagggatacgttcaatggcttcaaggaggcggtacccgcgctgtgccaaatgctcgcgaccttcggtaacgcgaaactcggggggatcttcgccacggtccttgcgcttataggcccacactacagcctgcacgaatag

SEQ ID NO: 349609 - DNA, 747 bp, Pseudomonas aeruginosa
atggctttgccggctgccttgcacggcgaagcggccaaaacctcaggcagagcggacgagatgctcgaggatcgccgccgccaccagcaggaacaccaccccgcaggccgcgtccagccagggcaccgcgcgcaacaggcgggtctgcagggggtaagggtcaggctgagcaggccgaaccagcaggcgcccatgccgaacagcagcgccgccaccgccagtttgccgccgagcgacatctgcgcgggaatcaggctgccgagcaaggcgatgaagaacaccagcgccttgggattgaacagattggtcgccactccgcgcagccagggccccaggggcgacggcggcagtgccccgtcgagccggcccggctggccgtcgccgcgccgcagccaggcgcgcagcgcgccgacgccgagccaggccaggtacagcgcgccgagcgcctgcaggatggcgaacagcacaggcgtacggctgagcagcagcgacacgccggtcagcaccagggtggtatgcaggagaatcccgcaggccagccccagcgcgctggccaggccggcccgccgcccctggtgcagggacgtgcgcaccaccagggcgacatcgggaccggggctgaccagggctatggcgaacaccgccgccagggtcagcaagacagacaattcctgcatggctactccacgaaaaagggatcggaaaggaaaacgcgaatcagcgctggcgcaggcgcgccggcggtaa

SEQ ID NO: 349610 - DNA, 408 bp, Pseudomonas aeruginosa
atgagtgacgcaaagatggggcgaatgatggaccgcatcgcgctaggtggattggccgaggcttatgcccacttcttcgcgcactgtggcgaccatcgccgagccatgcagatgacctgcaaggctgcaattcgagcgggttacaagccttgcgcctgctgggttagtgccgccgcgctagcagctagacaacacacccatagcatcgcgttcaccaaaggcgattcgccctcctacctaatcatcatggttggccgggttggaatcgactatgagttggatcctatgtttagcccaaccattggaacacctggctggaaactgattgagggtgaggccgccgaccagtatcaagcttgggggctatcccgcgaggcggacgaaatcgagtatgagatagctagctga

SEQ ID NO: 349611 - DNA, 591 bp, Pseudomonas aeruginosa
atgcgttctgttgtgtgtgtgggagcggtttttgtcctggccatcctgggcggatgtgcaaatttggggggagcaaatccgggagctgtcgttgttgaccactacgctgggacaactgatctctcgggctacccgggtatgggggtagggatggggcgtttgctctacggtcccgccggcgcacgcgatgcaatcagctaccaacctctagatgttcgccaatgcaacaagcagatgactgcgtgtgctttaggaatcatgaatctcaccagccgaatagagatcgtctcggttggtactgatgcagcaaaagtaaaagttgacctacagtaccaaattggatccgaagggcggcggagttggggggggactgagttcgttacaaaggtgagcgttccggacatcatcaacgatcaaggggctgtctctcgcattgcagagattagctacggagaggtgcggcatattcagttgccatacggcgtcgactttgctctttgtgtctctgccccaggcgtgacgaacctggattatcgcccctgttctagccgcctaaaagtcttggatccgactggtactgtggctttctaa

SEQ ID NO: 349612 - DNA, 840 bp, Pseudomonas aeruginosa
atgaacacctcggccctcgataccccgctcccggcccgtcccgcccgccgccgtctccagcgccgccggcgcggccctggctggctcctggtcagcccctcggtggcgctgctgctgttgtggatgatcgtgcccctgggcatgaccctgtatttctcgctgatccgctacaacctgctgtatcccggcgagaatgccttcgtcggcctggagaacttcaccttcttcgtcaccgacgccggcttcctgcccggcgcgctgaacaccctgctgctggtgggcagcgtgctggcgatcagcgtggcgttcggcgtgctcatcgccgcgctgctggaggccggcgaattcttcggccgcggcgcggtgcgggtgttgctgatctcgccgttcttcatcatgccgacggtgagcgcgctgctctggaagaacctgatcttccacccggtctcgggcatcctcgccgccgtctggcgcctgttcggcgccgagccggtggattggctggcgcactatccgctgctgtcgatcatcctcatcgtctcctggcaatggctgcccttcgccatcctgatcctgatgaccgccatgcagtccctcgaccaggagcagaagatcgagacgatcttcctgctctcggtgttcgccgagatcttcaccaccaccagcggcggccccggctacgaatcgaccaacctcgcctacctgatctacaaccaggcgctgctgcagttcgatgtcggcatggcctcggccgggggcctgatcgcggtgctgatcgccaatatcgccgccatcgtgctggtgcggatgatcggcaagaaccttaccgagcgcagctga

SEQ ID NO: 349613 - DNA, 201 bp, Pseudomonas aeruginosa
  misc_feature (150)..(159): n is a, c, g, or t
atgaaacgcccgctgatcttcctttccgccgtgctgctcggcgcatccctgcaagggtgcgggggcggcgatgaaaagcaggccgccgcgcctgcgctgccggccgattcctgcaccggccatgaactcgaagtggccttgccgccggcnnnnnnnnnntttttttttaatgatacggcgaccaccgagatctacacctaa

SEQ ID NO: 349614 - DNA, 1176 bp, Pseudomonas aeruginosa
atgggcctgggtcagcagcaactggacgccgctgtcggcgagcatgtaggccaggcgttcgctggggtagtccgggtccagcggcacgtaggcgccgcccgccttgacgatcgccagcagaccgaccagcagttgcggcgaacgctcggcgcagatcgctacccgcacgtccgggccgacgcccttgtcgcgcaggtagtgggccaggcggttggcccgggcgtgcagttcggcgtagccgaggctgccgccgtcccactccagggcgacgcgttcggcggactgcaccagttgccgctccagcagctccggcagccaggcgcgcgccggctcgcagggcgcgctgccccattcggcgaggtgcgccgcctgctcggcgtcgaccagggcgatatcgccaaggcagcgctgcgggtcttccgcgacctggcgcagcagctccaggtattgcgcggcgaaacgccggatgctggcctcgtcgaagaggtccgcggcgtagtcgaaattcagggtcaggcgaccgcgagcgtcctcctcgctctgcagttgcaggtcgaacttggcttcgcggctgtgccagggcagctcgtcggcgagcaggccgggcagccggcgcaacgccgacaggtcgcgctgctggtggttgaacagcacctggaacaactggccgccctggccgcaggctgcgagcacctggtcgaacggcaggtcctggttggcctgggcgccgagggtcgcctcgcgagcctcgccgagcaacgcggcgaacggctggcgcgcccggggcgtgccgcgcaggaccagggtgttgatgaagaagccgaccagcccctgggtctccaggcgctggcggttggcgctgggcacgccgatgcggatctcgccctgcccgctgtggcgatgcagcagcgcctggaacgccgccagcagccacatgaagacactcgcctcatggtccagcgcggcctcgcggatagcccgcgccagggcttcgtcgacccgcaggctgtagcgcgcggcgggcgacgcctggcgcgccgtgcgcggatggtcggtggccagttccagcaccggcgccgcgtcgcccaggcgttcccgccagtaggccagttggcgggcgccctcgcccgcgtccagccactgccgttgccaggcggcgaattcggcgtagtgtag

SEQ ID NO: 349615 - DNA, 2619 bp, Pseudomonas aeruginosa
atgcgacaaccactcaaaacaatgctgagacggctggtcagcgtggccgtgatcggcctgtatctcaacagcatgaccttcaacgcttgggccgacgcggtgacagctggatcttcggccggacagtctgttggccaacaggtacttcaggcgttcgatggcggggacgcctcggttactcttcaggacctgttccctgaagctggagacactgcctcgcttgagagcgtctacggcgacgatgtgaagacgatcgatctcggcctgcgggcgaatactcgtcttcaatcggaaaagtcctctgaaggtgaggcgtaccgtaccttgatcgacagcggcaaccgcatgtcggtagatctgtccaatgacccgatgcttaaacaggctgataaagttcgctcgcctgacttcatggacgggttcaagcaaaacttcgcagattgcacctctaccgatgtgtttgagaacgtgacaaagaacgcccatgttgccaactacaaaacgtgtgagcgcgtagttgatcaaggtgggaacgttgagttccagcatgactacaaggtaggtgtgatcgagtacgtttcggggcagccaaactttcaatcgtgcgggacaggttgcttgtatatctgggttggcactgtgggggacaactactggagcggccagtgtaagatctatgaggagtacactcgattccgagtgatagcaaaagatgcgattatctcggctaccgtcgatagagctgtgttcgatgactacttcgaaattcgctttaacgatcaaattctatggacacacacacctggggtcttcccgccagaaacccccggaccttgcgagcgtggaacaagttggaacgtaacgccaaacgcggtaattactgacaagttcggtagtaatgatgatgtcatcacgttcaaaacccgcacctctgtgaccggcggtggtgagggttacgcccgcataaagatcatctatgaccctgctaaggcgtttgtcgataatggttgggggcctgaagagcgcctgcctatgttcgacatgatcagggatgggttctgcaccgacgctcagatgtcgtgcacgtcgatgccggaggtggacgcaaacggctgcacggaaactaacggtgttcggatctgccgttctgacatgccgccatccccgcacccgagcatcgatcctctttgcaagaaggcccaggttagcgccgagtgctcctattacaagggggacatggattgctacacggacgcccagggcgtacagcggtgcccctcaaatgatgggggtaacctgaacacctgcgcccagtacgagaagaatcccagctgtggctttatctctcaaggctgtattgacggggccaaaggcgagacaggctcttgctatgccttcgaggagatatgggactgcgggtatgacaccagctacgacaccatcgtaaatactggcgcgcagatcgaatgccctggtggcgcgcgctgcatgggcagtgagtgcttcgactcgtccaacacgaaaagtggcgatttcgcctatgccgtagcgatgctccaggtcgctcagtttgctgagcacgacttggactgtggaggagatggtaccgatatcaaccaggccaatgattgcaaggtcttcaaaggcgaggacatggagtgcaagaaggcgctcggaggctatgtcgactgctgcgaagctccagaaagcgtgtccatcttcgattatgtgaacctgacgatgaacaccctcaagatgaccagttcgctcgaggcattgagcagaacaggaagtctctttgcgccggggtactgggctgcgggaagtaacgcagtgatggctgctgggacatcggtggttaaggggcagtgggggtcaatcgtggatgctgcgacaggtgcgttcgagaagacactgagcggtaccatcgagaagacagccttgagcaagttacaaacatggctcatgcaacaggcatatgacgccatggtagacatgggagcgacggcagccgcgaatgcagtgtttgtacctgctgaaggcggagggatgatgcttggccctcaagctgcaatggcagtaaatataatcggttttgtctacacggcttacgtgattgcggatttgctgatcaacatcatttgggagtgtgagccaaaggagttcgagttaggggcaaagaaagagaccagacaatgccattttgtaggtagttactgcgcctccgaagtgcttggatcatgcgttgaaaaacgagagtcctattgctgttttggttcggttgttgcgcggatcatccaagagtccgcccgtgagcaactagggttgggctggggggatgtgaaaacgccgacgtgcgagggaattacacctgaccagatggccaagatggattgggcgcgtgttgatttgtccgagtggattggcatgttgaatctggcggggagattgcccacagcatccactgtatccctcgaggatgtaacgggtagcggcagcagcctgggtcagtttaccgaaggaaccaaccgtctgaacacgctagatcgcaatctggagcgcttagaaggttttgacgtagatgcggtgaagaagcaatatgaacttgatctgaagtga

SEQ ID NO: 349616 - DNA, 198 bp, Pseudomonas aeruginosa
atgaccgcagcaaccgcattattctgccaagaacttaaagaactgatggtcgagtctggacgggtgttcaaagtccccgaccagatcgccagaactgtttcgtcctccgatccggatacccggttcgtaaaatcatgggcggtgattcatcgcttgatcccgagtgatggccaggtcttagtagtgtctgaggcatga

SEQ ID NO: 349617 - DNA, 132 bp, Pseudomonas aeruginosa
atggacccgatggatatgcttcttctggcaattggaggcgtgatcggtactttgaccttagctggtgtcattggctgggttgtagccgtccgcctcgacaaaaaatacggcacgaacattaaggcccactga

SEQ ID NO: 349618 - DNA, 417 bp, Pseudomonas aeruginosa
atggaaaatactgcgattgcgttgcccatgctggatctgtttggggaacaagtaattattcagcgacgctcgtttgagcggagaccacggagaaagacgaaccatacggaagtctttcaacttggttttctcgacattctggaaatgtcggacgctgagttggaggccctgcgagcacgagacgaaatcaccgacgaatacgttgagtggttgcgggaatacctactgaaaatcactctgagacagatcattcattctcaggtcagtgagcagaattggcgcgatgcaatggactggatactatcggatgaagtttatccgttcagtttccgggtttgttgtgaagcaatgatgtgcgacttcgaagatgttcgcgctgctacattgaaaatcgcagccaaagagttatttaaataa

SEQ ID NO: 349619 - DNA, 1815 bp, Pseudomonas aeruginosa
atgagcaaacaatccctagtcggcactctgccgatctacgcacagcaccttgccgagctaactggcgtcaaggtgcatgttgagggcctccaggctaagacagatggaaaaaacgtatttgtcccctttacggaggacgatctgccgttgtccttcgggtacatcgcacatgaatgctcccatgtccgcaacacagacatgggctgctttcgcgactcaagcccgacacccttccgcaagaatcttctgaacattcttgaggacatccgcattgagcgattgagcatggatcagtaccccggtactgagtcggacattcgctacctgaaccgcaaggttctgcttgagccattccggcctgagcacgtggatgactgcccggcgcttcatgtgattcacaacgggattctctacggcggttactggctactccaggaacctcagcttgaggttccagcaaaagcctatctggcccgtatggaggcccttcttggggccggccttacggatcagatcctgaccctggtgaagacgaccctgaagtgcgagagcacaacagaggttctcgctctggtggatgcaattatcgacctgctgccctcgcaagaggatgagcagaaagatgagcaaccgcagcccaagcaaggctcagatggggctcctcaggagtcgcaagagtcgggtggaggcgatcagcagcaggagccaaagcaaaatggtggtgcgggttcaggtggtgaaggcaaagaggaggggcaacccgaatcaaagcaagaaacatctgatggaggccagtccggctccgagtcgcaagaccaatcccaaccaagtagcggcagcaatgccggcgacggtggacaagaaagcacgccgtccagcaatggcagcggcaaaccttccccagaagccagcaacctgcgcgagcaggccaagggtgcaaccgaagccgacctgaaagggttgatctcggaagtaggcgacaaagcgggagagttgctaggccgtaaggcggtgcgcgacggaaatccactccgaccgttctccctggatgggaggggaaagaaccgatccgatgaagcgagcctccgtcgtgtgcaactgggcattgaacagtcggccggtctgcggcagtgcctgaatggactgttacaggcgcaggtcgattgccgtgttcgattgaagcgacagggtaagcgtatcgacacaggtcgtatcgccatgatgaaaggcggcgaaacgagggtgtttagaagtaagtctcgagcagagcgtcagtctgcatcgatccaggttcttctcgacaagtcggggagtatgaagtctgcgatcgatcaggcagaggccgcagtctacgcggtgttaagcgcactggagggactcccgctggtgaccaccggcgcgatgtcgtttcccaacagagcgagcgatggcgttgaacgctgtgcactgatcaagagcccgaaagagcgactgataagggcagtaagcgaaggtggctttggtgcgatgtcggagggcggtactcctcttgcgcaagcactatggccggctgctgttgaggttcttcgtgcaaaaggcgagaagaaaatacttttcgtcataacggatggggagccgaactccggcactgctcgtgcagcgaaagagtttattcagcggtgtgaggtaagcggcatcgaagtgattggacttggttttgggggagccaacgagctcatcctaaaagcattgttcagcaaataccgcgctgttgggcaggttgcaaatctcaagaactcgctctttgagcttgttcgtgaagcattagcggcctga

SEQ ID NO: 349620 - DNA, 1200 bp, Pseudomonas aeruginosa
atgtccatccaacagaatgaaattaaaatcctcgaccaactactgctggtcgatctttccggaatccatctgtggactgctcggaaaaagcttaaacctgaaatgctggaagggaagattcctcctgctattttggcttcactcggctcgatgcgtgttatcgaccccgagaagctgaaaccgtttgagaagatcaagcggcaggctacaaaggtggtggaagagtgtggtgtgcggtttctgggtggctacgcggtttcccaggacaagatccaggaggttgttgaccgactggaatcgctcaaatcgcaattctacgacttgaaaaacaactttctccctaactacgaacgctggatcactgagtggatcgacaagggctgggagaagcaagaatggcgtgatgctatccgcacctcggtgacaccgaaggcgcaggtagacgcggggatgcattttgggtacgcggcatgccgtgtttcccctgatggcgacaagcacctctcgaatacgctgggtacgcaggttcgtggtttgtcagatcagctgtacgctgagacggcagatacagccgagcgcttgcttgaaacaggcttggccactcgtggccatgtcacacaaacgacgctgaacactgttcggaagatcaacgccaagcttcgcggcctgatgttcctgtccagtgaggtcaaagccctaaccgaacacattgaggaggtcctagcggctctccccaagtccggagtggtcaatggctctcagtacaacagcgttgtagccctggtctcggccctctctgatgaggactcgatcaagcggctgatcaaaaacctgaacattgccaacgttcatgaagatgcatcgatggccttcgttccggcactgccttcagttgaaaccgaggtcgccgccggcgttgaaacagacgcgcctacagccgttgagatctcggctgcggccgagattgtcggggctattgctgtacctgctgctgtagtacccgcggatgccgtaacgatgatcgaggaggagctgagcgcaagcctagctactccgagttgtcacaacagcatcaacgaagtaccagcagctcccgaggttgttgagccagatgaatccgttccactggagcagtctgaagaacccctcgtaatcaatccgtccgaacccgacatgcccttcggcaccttctggttttga

SEQ ID NO: 349621 - DNA, 969 bp, Pseudomonas aeruginosa
atgcaattcaatgcacaagttgagatgaaagagttcggcttcaataccaacgcgaaagcgcctggttttgcagaaggacaccagtggatgcatcacgtcgcgccgaagaagaagtatttcttccgcgagatgctggtcaagccgttcatgagctggctctacgccccttttggggatagctgcatgctcctcggtccaactggatcgggtaagtcttcgctcgtagagcaagtcactgcccatcttaattggccctgcatcaccgtttcggcgcatagccggatggaaatgccggagctcactggctacaacctgcctgtcactgatccggtaagcggagacctgaacacgaaatttgtggatggaccgctgacgcaagcaatgcgtaatggctttgtgttcgtgctcgatgagtacgatacgcttgacccggcagtaacagtaggtctgcacgcagtcatggaggggagacccttggtgattgcggaaaacaacggtgaggttgtaaagcctcatgccaacttccggtttgtcgcgtgcggcaatacggcgggacaaggtgatgcatcgggagtacatgctggcaccatgcagcagaacctggcatcgctggatcgcttccgagtgtttgaggttccatacctcgaagcagataacgaggttgcaactttgctgtctgctttgccaatgcttccggaagatatggcgagaaacatggtgaaggttgcgaattccattcgtaatcaacatcaagggttagggggtaattacctaagcgtcacgatgtccactcggacattgcttcgttgggggcgtatctcttgcgggtacactcaccagggcgcagctaatccgcttcagctttctctggatgaatcactgctcaatcgctgcgattcagttcagaaaactgcaattcgtaagatcgcccaaagtgtctttggtggcgattggaaagttgctgtgtaa

SEQ ID NO: 349622 - DNA, 1041 bp, Pseudomonas aeruginosa
  misc_feature (164)..(164): n is a, c, g, or t
atgggtggcaatgctctcgcctcgttcggcgcaacacgatgctcgcgtgttgtcgccatgcgcgtcctgaatgacttccagctgcgttttgcggagatcaccggacacttcagaagatctgtacgggtcgagcccattgcggcatatcgcgataagcctgattntggcgacctagatgtgttggtcgatagccaggtcttcgagtccatgtcgccccagtccgtagtcgaggccttgagcacctcttacggggctgtcttgccctgggtgaagaacggccccgttctcagtgtggggctgccgctgccggacgatggtcagtgcctacaactcgacttgatcagcacgcctgcggctgagttcgatttcagcctgagctatttcagttggaatgacctgggcaacttggttgggcgggttgcccacaagatgggactgaagtttgggcacgatggcctgtggctgccgatgcgtgatggcacgaatctacacgacgaactgctggtgacccgcgaatttgggcgcgccttgtctttcctcggctttgacgcggagcggtggaaggagggctttgaccgcctagatgacatctaccagttcgtagccagtggtgagcgtttcaacccggacatctacccgctggagcacaggaaccacgcggctcgtgtgcgagacaagaaacgcccggtctacatgggtttcctgcgttggattgaggctcagtcgacgctgcatcgttatccttggcagcaggacaagtccgtctatcttcacgaagtgatgagtgcgttccccgggcttcaggctgaacacgaccgcagtcttgggagactggcgcaggccaaggcaatcagggcctgtttcaacggacaggtggtggccgaggtcactggcttggctggaaagtcgctgggtgcattcatggcgcacttcaaacgtgagcagggcgacgacgtggatagcttgccgttgttgtccacggagcagatgcgcgagctgatcagtagggtttttaagcagtacgaaaatactcactcataa

SEQ ID NO: 349623 - DNA, 240 bp, Pseudomonas aeruginosa
atgagctgcaagcaggcgactttcgccaatgagcaagagcgagccatccgtattgaagggcagttccacacgctgacagaccgcgtgatcactgccggttgcggcaacaagtacagcgaagaagaagtcggggctatacgtattagaatggctgtgctttcgagccagtatttcgatctgaccggccttattcgccctgttgccgatccccctggaagggtgatggcgtcacgggcctga

SEQ ID NO: 349624 - DNA, 381 bp, Pseudomonas aeruginosa
atgccacgcaccatcgagagcatcgtcgaaaaccacagagtagcagcagagcgccgcgccgctggtaagccagtgtgggatcgcacaatcgatatcaaggcgatcctgcatgaggatcagtcgaacatctccaatgagcacgcggcgcaggtggccaatcgcattggtgcgctgatccgcagccgagttccagctgactggttggattgggactctgctgccctggacgaagatttgacccatatcgttgagggcatggaggcactgaagccggacagctatgacggcgaagagaatgtcactccgctggacgacctcaacagcatgctggaccagctctacgactgggctgacggtaagcgcgtttggctgggccactga

SEQ ID NO: 349625 - DNA, 279 bp, Pseudomonas aeruginosa
atgactaagcaaaccaactacgagccgttcgcgatgatcattcaccgggggctcgctgagcgcagcgtaaagggggcgttggatcggcaccccgagcacaacaccccttgctaccttgtacgtatgtgcgaggagttgacctgcgcaatccgtgatgccggcaaccagggagtgactctggccgagattgttcgattggaaagaacctgcaccggcactgattaccttcacaagctcgcgctgcgttgctatcggctcgcgcaccgcgccgctgcttaa

SEQ ID NO: 349626 - DNA, 195 bp, Pseudomonas aeruginosa
atgcagcttgaagtgacggaaaacttgaaggaagcgctgggcaagtacaggattgcccgcaaggcatacgttgagcttggccctgagtcatgcactgtgaaggcccaccggttgagtcatgactatcaaagtgctcttgaggttcttgcctaccaggtactgctcgaagctgagcttcagggcatcaaggtttag

SEQ ID NO: 349627 - DNA, 393 bp, Pseudomonas aeruginosa
atgtattacgcagtgggcggtgatggcatgccgatgggtatgctcatcatcactaaaacggacaggccaaaaatcaagcggatggatgcagtttacgtgttcgagcccttccgaggctctggtgtagcagggatgctgctggaggaagcacgcggtggctgcgacctgcactcgtactcagcgccttcggcagtggagtggcacgtgaagaatggattccggaacctcgggcttaatgagtctgaagggacgttcgaaatgtttacggggaactacaagccggtatacagcttctcctacgccatgccgatccccactgactatgacaggaacgccattcagcagcttgaagaaacggagcagcacatgttgttaggccgtcccgccgaatag

SEQ ID NO: 349628 - DNA, 135 bp, Pseudomonas aeruginosa
atgaatcatgtcaccgtcgagtcgatctttatgaaaagctcgaattttgactttggatttagcgataccgtttttcttcatgcggtttcccctaaattttcgaccttgtatgagctactgtcgccttcgctctag

SEQ ID NO: 349629 - DNA, 252 bp, Pseudomonas aeruginosa
atggctgctatgcaggcattcaaactccctggctacggggaggataccaagactcttgcattcattgtcggcggccatatccacataatgggcgagaaaagtggctttacgtatgcgatggattccacacgcctccagggcaatcgtgactatgatcttggaaaccgtactggtggtcaggagctgatcgatttcttgaataaggaagtgattgtacctaccaaactttacaactactgcaaaggcatctga

SEQ ID NO: 349630 - DNA, 546 bp, Pseudomonas aeruginosa
atgaagtctcgcgagagtttaaagctccgcttcacgacagacgtgcgcacattggacacctgccggctcgatctggcgtcaggggtgacggcggaggtctttggcgatcctgagaatgccagttacgaatggcgtcttgtgcatgctaacgggctggtagaacagcactccgattgcggctatggagttccggcaatcgccatgcgggatgccctggtgacattctacgggacgccgcagtttggaggggatattgtggacctccgcgctgaaggtgagcggaatccccgtcattgggatgaggtggagaaatccgtcaccaaccccgccgacaccagcaacccggtagccttgatcgaggccgcagaaaacgaacttgacgcgttgcgccgcgacgccgaacgctatcgcgtgctgcgcgaacattgggtgcggatcgagagcggcaccactgttcatcgtgcccgtggcttggacctttggtgcgatgagcgccgttcggccccaaatgattcagtccagagtttagggaagcagcggccatga

SEQ ID NO: 349631 - DNA, 222 bp, Pseudomonas aeruginosa
atgattgccaccaactccgcaaccactcgacagctgacgaagcctgttcctgacaactgttcggatcgctatgcctccggctgggcatacgctgactggcacatcagcaagggtggcaacctggatgctgatgcccccggcaactggcatgaagagaaagcaaacggcttctgggatcgcctcactgcggaacgcgaagccgtggccaagccggcgaactaa

SEQ ID NO: 349632 - DNA, 306 bp, Pseudomonas aeruginosa
atggaaatgaaatctcgcaccacatccggcgccatcgtcaatgccaaccccttggctgattcccccgcctccgtgagcctgcctgatccagctgctgagcgtggcgttggacaggtggagcccgcgcatcttctgcgcaagcagattgagcgcgtgattcgtgaatacggtgctgatccagcggaagccgcactggccgtctgcgtcatcctcgacgggaacctgggcttggctgaacacggttacttcgacgacgacgaaaccgtgctcaacgcgatcctggcagccgagccggctgacgactga

SEQ ID NO: 349633 - DNA, 1131 bp, Pseudomonas aeruginosa
atgagcaacaaggttgttacgagtgccttatcgcgctatgcgccactccgctatgaggctactcgcccattcgcaatgaccctcgggccacgatttcatgcacgcgccaagctgggcttcaaagagcgttcacgcttcctcctgcacgagctgttgcccgctgtacggcaggccttggaagccctaggacggccgacaggtcctggacctggccaagcagagctggggaatgtacaggtcttcggcggttaccttgctggtggtcgcattgtcttcgatttccacaagcgcttaacgatggcgctgcttgaaaccgacgtagaagcagtccccttatctgcgattccgcgtccagcagactctgtctatctgcatttcggtgccgggtctggcgtgagcatcgaaggcgatgtcatcgaaggagctttcgtgacctggtcggagggccttggcgagccgcgtaggctcattgtggactttgtgaaggatgggcagttctcagaccgacttttctggcttcaggagtctggagaaccgatggttggatgttcggttgatatgtcagagccggggttgggagttattgccgccttggaaaactcggtacgagaaatcgaggaacggaacaaggctgtttttgagcagctcgcagaagctgagcgccagctggaacgcaagtatggcgaagtggtgtccattcctagccctgttagccgcatcggacaaaatctacctctcctgaaacgaggacttgcgctggtagtcaattgcctgctttaccttcgcgtggccccagaggaccgcagtgatgaatgggatgatcgtgcagacgcatgcttggttgaccaggcgactaatgctgagaagcctggcacccgtagaaccgcagagcgaaccctcttgaatcagggctatgtcaagattcgctatgtaggacaccaattcgcctcaaccgcagcaggccaaggattgggcgaaatcggacgcagcgtggccacgcacttccgcagaggacattttcggagccagccttacggccccgagcgctcattgcgcaaggtgatatttattccgccagtagtggtgaaccctggccaaagtgaattaccaggccggatctacgaggtatag

SEQ ID NO: 349634 - DNA, 345 bp, Pseudomonas aeruginosa
ttgtcacgcttcgccttcttcaagattgtcgccacccaggacaatggtgagctggaagacatccacgggtatgccctgttcgactgggagaatcatggcgttgtgggatacgacgagggccttcagagctactttgccaatctggacggaagctggggaataggcagttccccaggtgagatccccaccgtcgcggacttacagcgcaagctgtgcgaggctttccagggaactgagcttccgttcaaggaagaaggcctacggatgctcgcggatggcgttgaggcctcgccaatcatcctctcgcccctagaggcttcccttcctaaccaggcccggcgctga

SEQ ID NO: 349635 - DNA, 237 bp, Pseudomonas aeruginosa
atgcagtgcccgctatgccctgaaattcccccggcttaccttgaggagttctgccaggactgggtccagcgtaagttgggtcccgaggaagagccttacctatggactatcggcagcacgtggctgtggtataagaacgaagaatggcggcgggacgggggagttctaatagacatcgacgaagtacgggggctgttgaaggcgtccggcggcgagttcaaaagccatacggagtag

SEQ ID NO: 349636 - DNA, 192 bp, Pseudomonas aeruginosa
atggcagagaaaacattcaaccagtggctgtacgaggatggccgtgaccaagccctccaagacgtttatttcgaagaccagattggccccggtagtgagtacctggagtgggctgagtcggtctacaaagcaatgcaacgccccccgagcgggaacgaatcaccttcccgcatctggcccttcaccaagtaa

SEQ ID NO: 349637 - DNA, 225 bp, Pseudomonas aeruginosa
atgagcgatcaggtaaacgtcgagccgaccgcgaaagttatcgacgacattgctgaagagttggaattgaaggtgcgtgagctgcgccgcattgctgtggagcttcgagaaaccggtaatttcgattgtgccggcgaggctgctgcaacggtggcaaccctgacccggaacatgcgcctcgacctgctagtgatgcgcccgctccgtcagttcggacataagtga

SEQ ID NO: 349638 - DNA, 219 bp, Pseudomonas aeruginosa
atgcgcagcaaggatcaagaatttacagtcggtaagggacagcaaatttgggacgggaagtcccactacccggacctcgttcggttggttgttccgaaggatcaagctcttgctctggcccaacgtattctgcgcgagcttgagcacgcgaagcccgagcaaacccatttgggcgaaatagcccttttcggccagctcgaagaatttgacgacgagtaa

SEQ ID NO: 349639 - DNA, 306 bp, Pseudomonas aeruginosa
atgaacattgaaaacccctttggttttccagcagacaagccaactcccgattactgggatggtcaggccgattttcttcaagcccaagcgttcatgatcgcagagcgctacatcggttcgcttcgcgacgatccagagcgccgcttgttggcaattggtcagatgcaaggctttctggccgcgctcagcgagacgctgcctgcggccaccttcaaccactatctggagcaaatgcagaagcttgatgcgccgggtgatgaggctgaaggctttctaaaccactttgcgccgcgagcgcccgattaa

SEQ ID NO: 349640 - DNA, 255 bp, Pseudomonas aeruginosa
atgtttgaagtcgcgtttgaagaaatgaccgccacggtcttcgtcgaagagggcgcggctggcatggcttacatgtacggagcagcggatgtgcagcccggcgagaacaagcttcgctgcgcagaagggcttgcgttgattcgcaagctggatcggctccaggcaggcgtaccgaagcatctacacaaaaaatggtgcgctttgcgcaaccagatttgttttgcgttcgggcctgaaatggaggcggcgatttag

SEQ ID NO: 349641 - DNA, 810 bp, Pseudomonas aeruginosa
atgagagacacattctcgaaacgtcatggcttcgcttctgtcgaagaagcagaaatcaccgtccgcgaagacgcaccgcaggcgttgcaggagtacctcatccagctcgtttacgagtgcggtctgaagccgtcagacctacgtcaaattatctgccaggccctgaaggtactgcccgacaaacagaactggagcgagcggccgaatatccacgaagagaacgttcagctgctcgacaactgcaaatggtacaaggtgtatgacgtgatcgagcgcgtcgccgaatacctcggccagaggaactaccagggcgacatctacgagtacttcaatgatgagttgaacgaattcttcgttgagcatggcattggctggaagctggtcgacggccgggtggaggtgagaggcccagagtcgttcgaagtggtcctgaggtcggccaaggaggcggagctacaagccgggcacctgaccgccagcaaggagttgcatcaggcaatctccgacctctcgcgacggccagcacctgattctacgggggcgatacagcacgcattggcttcgctggagtgtgtcgccaggcaggtcaccggtgatcaccaagcgactcttggcaagatcatgaatgaccatcgcatgctcatcccagctcccctggacctggccgtgatcaagacctgggcctatgcgtcggagtttggacggcatctccaagagggtcgggaaccatcctttgaggaagctgaactggtcgttggcctgtgcgcctcgatcagcaactatctgatcaaaaaagcgaactcgcagtga

SEQ ID NO: 349642 - DNA, 471 bp, Pseudomonas aeruginosa
atgaagtttatttttgccgcagcgatggtcttgatcgctacatcgacgcaagcaactgaggttgccaaagttgacccgctggtcattgaaaccatcgttcctaagatggcttcggataacgcagtgtggcgggtaaaggtgactgctggctacatagtgaagccaggcgtcagtaaaaatatggacgtgatgagttttgatatcccttcgggtgaatgtcggtctggcgtgtcgaaaatcgtttcgatgcagggattcgacgcgaaggttactcagaagttgtgcgccggtaaggtcgatggtcagagcgtgattcttggctggctggtggctgacaaggtagaccaagaaccgatgtcgcaaatcgatctggcgagtctcaattacggcgagcgaatgtactttaggttcgatggctccgaactgaccgctgaagcgtccatttatcgcgttgaagccaagaagctctga

SEQ ID NO: 349643 - DNA, 231 bp, Pseudomonas aeruginosa
atggaacacaaactggattggactgagaccggcagcgggaacatgggctcgatcacccccacctgcgcatgcggctggactggctctcccgagtacaactacaacgacgaccagatgaccagcgcacagcgccagtggaagcaccacatgcgcgaagtcggccagctgcgagtcggccaaccggcaccgatttacgctggcggacatgaagttcaccagagcaccgactga

SEQ ID NO: 349644 - DNA, 222 bp, Pseudomonas aeruginosa
atggaccttcgctatcttgcatgggttttcaaggggaccctggtggtgactctgttgtatgtcattgcgtgcctggtcatctggatgctcctcgggtctcaaaagggctggatcgcgttggttatgtcggtggcaacctggctgatgttcttctcaatacatgccaaagatcaccgagtggagcaacgctattacaacgaacaccgtgaccgctttttatga

SEQ ID NO: 349645 - DNA, 246 bp, Pseudomonas aeruginosa
atgaccctacaccttgacgaagccctactggaaagcgcactgacggcagccgtagaccgctgcattcacatcgacgctctccaggagcgtaacaatgccatccgtagagcggcagtcgaggaaggctaccgcctcggcttggaagaagctggcaagctgcgcgatttgctcgaacggcttcatcctcacgtccgtggttgcgattcggccctctgggacgagttccacgcagcactcaagtgttaa

SEQ ID NO: 349646 - DNA, 180 bp, Pseudomonas aeruginosa
atgaacgcgcagcaacttctggctaatcgccgggcctacatccagtacaactacggcaacggccaccctcttaccgtggcggccgagcggggagagattgaagggttccgctcggccggcacccacatcaccgaaatgatggatgcagttgtcgtgtccatcatcgatgctcaggactga

SEQ ID NO: 349647 - DNA, 291 bp, Pseudomonas aeruginosa
atgaacggtttggaagaccgcgtaatacaaaaagtagtggttcaggctcaaaacggtcagacccttaaattttttgttaaagccatcctgcttaccccagacaacaagtcgtttgcgcttgtagatgagaaaggcgatctacgcgcagcgagcgcacaaagcaatgagaacaactcgttcacgttgctgtacttctctggtgtgtggattgacggagaccaagtgtggactttggacattctcaccaaggataaaaaaatgttgatcggcaagctgatcagcatcgggtag

SEQ ID NO: 349648 - DNA, 201 bp, Pseudomonas aeruginosa
atggcacgcacacggctccaccttatttgcggcaactgtggttgcaacgacatgtggtcataccgcattgcccccgaaggcaaagacattgatggcgagctgttccccgccgtgtacctatcctgccggaactgcgccacgctgcacgacctggcggatacggccaagaactccaaccccagccagaagctaagcagttaa

SEQ ID NO: 349649 - DNA, 207 bp, Pseudomonas aeruginosa
gtggcactcacgaaattcgatcacggcgtactgtacgccgcagcacagatagtgcgtctgcacgatgagccccaggtggccgcagacgtgctcaaacaagccggcctggccaacgttgattgcagcaagctcgatgactacgacaaagagtcgctgcgtgtaatcaacaccatccccggcgtggccctgaccggcctggatgattag

SEQ ID NO: 349650 - DNA, 246 bp, Pseudomonas aeruginosa
atgaagctcagccgaggaaaagttgccgaaatggtctggtggacagggctggcagtgtccctagcgggctgcctgctaatgctcgcccaggtactttttgaagcggttccagtgggccagcgctggcctgcgcacaccctgatgctgggtgccgtgctggttgcctttgccaaggtcattgagagccacacgcgatcaagcgcaagccgcgttgtacgcgatgcgcttaccaaggccaaacgatag

SEQ ID NO: 349651 - DNA, 645 bp, Pseudomonas aeruginosa
atgagtgaagcgtttgaaactccttggggccttgctctgacggttgaagaactggcacccggcatccagaaggtaaccacagagagccatggaggctatcgcctttcccacgcgcggcgcacagagatgcttgagcgaatgggcttcgatcatgagtggtatgaggaagacgatgaggggctgatcgtccagggtgttttcgcagccgaactgggtgtcgaaaacggtgaagacctgttgagtcaggtttaccccgaggtgctggctcacctacgcgagcaggctccaggcaaactgcaagcgtttgtgattgcaagtgatacggccttgcaaggaacagcagatgcctctgtccctgcaagggatcgcttggcatttaagctggccgctatggttactccagagcctgattctgcccacaacctggagtggctggtacaggaagccatggcccatgccaaattcgtgcgggtagaggaaagagccggcgcagcgattttcatattccgcgacaggagcatcctcgtcgctttgcagagcgggatggtttacggcgtgcctactggctcgcccgagaacgtggagaagttgatcgtatggctggagggccaaggaatcaccgaacgtatccgtagcacgcactga

SEQ ID NO: 349652 - DNA, 204 bp, Pseudomonas aeruginosa
atgactctccggtgggccgccttagaagtgctctttggcctcgccatcgcgggacttggcgtctatggcctgatgacctacaagccgattccaaatgatgccccctttgcatcgccaatcccgttcacggccgttttttgggctgggatcatgatcggcgtcgggctcattgtgtggggacacttcaaggccaatcgagagtag

SEQ ID NO: 349653 - DNA, 537 bp, Pseudomonas aeruginosa
atgagcactccgcaaccgtttggctgggtcgttaattgccctaaggaaatggagccggtagaggcgttcactcgcgataaggcttcggcggaaaaataccgggccgctggctggacagtgattgaagtattcaccgaagccctgcgcacccagctttccgaagccaaccaggcctactatcgacttatcgagcacgccaatgaaaccgaacagtacctcgacgaagctgccgaggtgcttgccgatattgccaagagcgaccaggcctaccgcgaatgcacagataagagcagcccgactgggcagcggattgccgcagtgctcagctacgtcgcccagttccagccagagcctcactccgaggatgagggcgagccgaccgagtggagcatgaatccgtgcaagcaggggcatcgtgacgtgggtgcagccggtggggtagcgcactgctgccaatgcggcgagaagatcgaggcggcaacgacccaggcagctttcgagcagtggaacgctacccacccggcagtaccgaattag

SEQ ID NO: 349654 - DNA, 213 bp, Pseudomonas aeruginosa
gtgatcgcgccgatcactcaaggcggggacttcgcccgttacgctggctttgccgtgacgctgagcggtgcgggcactgaaacgcaaggggtaatcctctgcaaccagattcgctcggttgatatggaggctcggggcgcgaagcgtatcgaggtcgcccctgatgttgtaatcgaagatgccctggcccgcgtccaggcgctgtttgagtaa

SEQ ID NO: 349655 - DNA, 255 bp, Pseudomonas aeruginosa
atggaagtcaaagttcaacagtggggtaatagcgcagcgattcgcctgcctgccgccgtgctcaagcaaatgagcatcgacgtgggcaatgtgctgaacctcgatttcacggccgatgcgatgactctgaagccggcgaaggccaagccgcactacaagctcgctgagctgatggctcagtgcgacctgaaggcgccggagcctgccgagctgtccgcctggaacgcaatgcagccggtggggcgtgaagcgtga

SEQ ID NO: 349656 - DNA, 804 bp, Pseudomonas aeruginosa
atgatctacctctatctcgcgcttttactggtcccagccggagcgatttttgtctggggtaagctcgtgtcacggttttcggtaaagacgtggatcgtctatcggaacactggaatcatcggtgggcctgtacatgagatggcgcacgcgattgcatgcctgctcttcggtctgcgaatcaggaagcttgcgttattcgcaccggacgcaatcaccgggcagcttggttacgtcgagttttcctacagcccgttttctctgcgcaacgcgattggtctcctcatccagggtatagcgcctttgttggtcgggggcgcattcgccgttctctccctcggtacatcattcgaacagagccttcccaaccagggactggtgccgttggttgtatggatcgcgactgtggccacaggttctgttaccgcgatcgtcgacttgggtacagactcattgcaggggtttgctcttgcgttgctcatcctggttgtttctatgcacgccattccaagcactgctgatatcgccctgggtctcaagggctttaccatcatctcggtcgctttcggcggtttgatcttcttgctccagatgatccccttccagggagaaggcgttgcaatggagttcatcatcgaggccgcgggtctggtggcgcgctatctcgagatcggcatgtggcacgcactcaaaggtgcagtgacggtggtaaccctatctgtagtcgcgagcgtagtgctgatcctgatcccggcttttttcttccagctcaaatccttctgggaaggagcccgtggtcatgtttaa

SEQ ID NO: 349657 - DNA, 1467 bp, Pseudomonas aeruginosa
atgaagtcgacagcagaacagattccgatcatcgaataccaaggtaatcacctggtggtgaaggcctatgccgggtgcggcaaaacgaccactcttgttgactatgccaaccaccatagccatttgcggatgctctatctggcttacaaccgtgctattcgggacgaaggcgcggagaagtttccgaagaacgtagtgtgcaagacctcccaccagttggcgtggccgcagttcggccgacactatcagcacaagctcgggaatatccgtctgacggatgctgccgggctcctcaaaacacggaattggggagatgttcgagacgctattgccgtgctcaatgcctacctttcaagcgctgacgaagaaatcagtgaggcgcattattttgccgcgctcaacgaggaagaggccgcggagcacggaactgatcaccttgaccggacgataaattctgctcagaaactctgggacgcgatgatcgataccgagagcaagttcccctgtcagcatgacgcatatctgaagctcttccagctcagtaatccccagctgccttatgacgtgatccttttcgatgaggctcaggacagtaaccccgtgacagccgccctggtcgctggtcagaaggcaaggaagatatttgtcggcgacaaatggcaacagatctaccgttggcgaggagctgagaacgcgcttgatacgcagatattgctgggcgcggcgtcgatgttcttgaccaactctttccggttcgggccgatgattgctggcgtagcgaatgcaatcctcagacaacaaggggaaacacgtcccctggttgggtatggtgcccgcgacagagttacgacatcactgccccctggctgtaaccattacaccgtgctcaaccgcacggtgataggcgtgatcatgacagccattgatgctgtatctgacggccaagttgtctactggaacggggggatagaggcataccaaatctccgacctcgaggatgtttaccttctgaagattggccgcaaggatgagatccgcaacaaacgcctcttcggacagttcagcgactttggagggtttgctgaagcggctgaggagtcgaaggatgctgagatgaatcggatgctcaggatactcaaggagcacaacgacattccgaagttgattgcagctctacgccgtagttcaacagatgaccctcttgacgccgatgtgattgtgagcacctgccaccgctcaaaggggctggaatgggatgtggtggtgttggaagaagatttcccggacattttcgacgaagagaaaatcacccccgatcagcggattgacgagctgaacttgctctatgtcgcagccacaagggcaaagaaggtgctggtgatcaatagcatcacccaggtcgtgatccagaagagtcatgctgaggctaagcgggagagggaagcagcagcgggacagcgttcatga

SEQ ID NO: 349658 - DNA, 285 bp, Pseudomonas aeruginosa
atgtccaaactgccacacataaagaaaccatgccgtgactgcccgtttcgcaaagacacactgcccggctggcttggaaaaaagcggatgaccgaaatcctggccgcagagtcgttcgtctgccacaaaaagacagacatgcagtgcgccgagcacatgctcatcaatggccaagccaatgcctttgtgcgcctcgcggatcgactcggcatgcagctggatctgactggcagagagcaggtttttgacagcagggcagcctgcataaagcaccacaccagttga

SEQ ID NO: 349659 - DNA, 198 bp, Pseudomonas aeruginosa
atgaaacagcaggatgaatacactgaagaagaccgaatttatggcgcctggctcggcctgcggaatcggatcaacaagatcgactatgggcaagctactgaggacttccccggccagcgcagcgacctctatcggcagatggaagctcttgaatcgaaataccgggggctcaccggggagtccattaagcaaggttag

SEQ ID NO: 349660 - DNA, 153 bp, Pseudomonas aeruginosa
atgcgccttcaagagcttttcaagattgcccagcaagccggcaatgcgccggaaggcgtagtgcctgacaagcgcgaggcgttggcctacatggacgtgatgtcttccgagtaccgcaagcaggcggcgaagcttactcgctattcccgctag

SEQ ID NO: 349661 - DNA, 309 bp, Pseudomonas aeruginosa
gtggaatcggtacatgagactctgaatcctaatggccctgaccagcaagacgagttcacagaatggatgcgaggccccgaggctcgctttgttggtgccaagcgcctgccggatggaacgtatgctggcgtgcttccgctcatgttcacctacgccatttgcctgggtgttacccacgaagcggcctaccataaacggtactgctacgaggacgcgtcggtatgcttccacgagtaccgcaaactggcatccttcgacgatgagcccaaggggtgggtcgctaggcgtccgctgacccaagagaactga

SEQ ID NO: 349662 - DNA, 261 bp, Pseudomonas aeruginosa
atgcatgtgaatgacgacgaatgtcacgccgctggcgtggacccagccgaggtcgcccgcatcgcgcgcggcctgtcgcgctatgcccgcgaggccgaacgcttgggcctagtcattttcggcggctctaccggctcgctgcgtttcaatgatggcggcgacggcgcgctgatcctagccagccttgatggagactatgacggcggtgacggagcctgcggtcctggtgctgacggcctgatgcgtggcgaatatgcctga

SEQ ID NO: 349663 - DNA, 1491 bp, Pseudomonas aeruginosa
atgcagctccgaccctaccaacaacagcaggactttgagcttcgtaaaggcataagccttggcgcgatcattcagatgctgatgagtcctacaggctccggtaagacggaggtggccaagcacatcattgccggtgcgcaggcgaagaaccggagggcctggtttatcgtcgacagcgtgaagctgcttgatcagacgcttgagcggttccacagagatggtttggtcgccggtgcaattcagtcagaccatccctgcactgactaccgaaagcccatccaggtcgcaacgatccagagcttgcgtccgcggctggattacatgctcaaccaccacaaaccacaccttgttctcattgacgaggcgcatgtcatccacgaagcccacatcgagctgatcacgtggtgccggcggaacaaggtgccagttatcgggctcagtgctaccccatggcggcgaggcctgggacgcatctttgacaggctggtcaactgcatctcgctttccgagctgacagaccaaggcttccttgtaccgacgcagtgttatgcgccttccgtgccttcgctgaagggggtcagcacgaagccgaatggcgactggatcgaggatgagcttgccgaggtcatgggtgaggccaagctgcttggtgacgtggtatcgcactggaaagaactgggtgaaaaccgcaaaacaatggttttcgcctgcaacgtccagcactccaagaggctcgctgctgagtttcaaaaagctgggattgccgcagcccatatcgatgggtatatgttgtcgaatgagaccgaagagatcttgcgccagtacaaggcgggcaggataagggtattggtctcagtggctatgctgatcaagggctttgacgacccttcgaccagttgcttagtgatagcgcggcctaccaagtccctgatgcttcactaccagatgattggtcgtgggctcaggctctcacctgaaacaggaaaagtcgactgcattatcatcgaccactcggggaacctgttgcttaacgggaagccaacggacgaggttcccgatgccatggacaacggggaaggggaacgtcttgaccgccggcctcaggacataggcgatcaggagaagaaaaccaagccatgcccgaagtgcagctttgttttcagcggactgctctgtccgaagtgcggcaacgaaatcgtaatcccggatggggtggcggtggctacgggcaaactcgtgaagctagacgatcgacgtaaagtgctcgggccgaccagtaaactgcataccttctgtgagctgcttgggtacgcccgcgagaccggcaagaaagacgggtgggcgcagtacgcgtaccaggcatacatgaaagagctgccagatcgcgcatggatcggtaccgtgcagcccagaacaccgagcgaagacatgaaaagctgggtgaagggctataacgtccgtcgtgccaaaagcaaacgccgattcgggtga

SEQ ID NO: 349664 - DNA, 207 bp, Pseudomonas aeruginosa
atgacctggcaggcgctgccacctctcaaaactggagaacaccaacacttcatggtgttcgattggctcacggcttccggcaagagaatttttcgccccgccgcggcaatcacaagttccgtcctaactcctgaaaccctgaccgacttcagtaaacaagtcctcaccgcccatttgtcgaaacaccccaacgaaaccccttactaa

SEQ ID NO: 349665 - DNA, 1002 bp, Pseudomonas aeruginosa
atgccaatccgtcacatcattgttcatcagatcgaaaaaaaacccgatggcactcccgcggtgctgcatgcccgccatacagagctggaggcttcgcaggccatcgaaaacatgctcgccgacctcaacgagagctacaacgccaagcagggcaaggcctggggtctgttccacgcggagtccggcgcttatccgttcagccgatggctgaaggagtacatcgagggcggtcaaaacttcacatccttcagtcatacggccgtggagcacctgcaaaagctgatggaagaatcgaatctctccactggcggccacgttctgttcgcccactaccagcaaggcatgaccgactacctgaccattgccctgttgcaccatagtgacggcgtggcggtaaccgatgagttgaacgtgacgccggccaagcacctggatctcggccagttgcatctggccgctcgtatcaatatttccgagtggcgcaacaacgccaactccaagcagtacatctcctttatcaaggggaagaacggtcgcaaggtctctgactacttccgtgatttcatcggttgccaagagggggtagatgcccccggtgaaacccgcaccttgcttaaggctttcagcgatttcgtcgagagcgaggatctgcctgaggagcaggcgcgggagaaaaccaatactctggttggctacgccaccagccaagcgaagttgggggagccgataacgctggaggcgctgtccgagctgatcgatgaagatcgaccaaaggcgttctacgatcacatccgcaaccgcgactacggactgtcacctgagattccggcggataaacgcaccctcaacgaattccgccgcttcaccggccgcgctgaaggtctgtcgatcagcttcgaggcccacctgctgggctccacaatcaactacgacgagaatgccggcacgcttactattcgcaatctgcccactcagttgagtgatcagctcaagcgcggctag

SEQ ID NO: 349666 - DNA, 936 bp, Pseudomonas aeruginosa
atggatcaaagccttgaagtcctggagcgaatgctgcaagcaagcatcaaagagcaacgtgcagctcgtcgctggaagaacttcttccagctcgcgacccttggggtagttgtgactgcttttgtggtgagcgggagagcagacctcgatagcgtcggcgccgctgtacccgtagcagcgaaaatcaaggtgaggggagtgattgcagatggggaagaagcgagcgctgagaacttgaaacatagccttggcaaggcctttgaaaatgagaacacgaaagctgtgattttggagatcaacagcccaggcggaagtcccgtgcaggcaggccatgtttacgatgaagttcgtcgcttgcgagcacttcatccagacacgaaggtttatgccgtcatcacagatctaggggcttccgggggctattacgtcgcgagcgcagccgacgaaatatttgcggacaaggccagcttagttggatcgatcggtgtaaccgctgcgagctttggttacgtcgagctcatgcaaaagcttgggatcgaacgccgctcatatacgtccggcgaacacaaggctttcctagatcaattccagcctcaaaatcctgaagagacgaagttctgggaaggggttctcaaaaccacccacaaccaatttattcgctcggttgaggctgggcggggggagcgtttgaaagcgaaggagaatcccgacctgtactcggggctgatttggactggcgagcaagcggtagcactagggctggttgatcgcctgggtgattcggagtacgtggctcgtgaagtcgtaggtgtgaacaagatcgttgacttcacccgcaaaaagaatccgctggaccgccttgccagtaagatcggcgcggcgcttgccgaacatctctcattgcagcttgggctcgacggcctgagcttgcgctag

SEQ ID NO: 349667 - DNA, 531 bp, Pseudomonas aeruginosa
atgcaacgaaccatacccagctgtaccttcctatcgcgtagcgaggctgaggcatactctccaggccctgacagccatctgatatcgatttctgatggccctgaagatcaggcccacatcgacgaagcctgctggaagagcgtgagctaccaccacttcattgatgctggctttgacgaggaagtcatcgaaatatatgggcctgatttcgagcagaattacgccgactacctgctgagcagcaaggctgacgtactgagggtgcgcattcaggaaattgccgccctgggggagtttatcgttgtcaattgtcacgccggccgatcccgcagcgccgcggttgctttgtatatcagcaaacatcatggctaccaactgcataaggcgaccccagacgcaaaccagtgcgtctaccggatgttggccaacgatgtccggttgatggcagcctaccgtgcggcaagcaccccagttgaaccagaagccccgagactaagccttgtttcggcaatcaaatcgctgttctcatga

SEQ ID NO: 349668 - DNA, 735 bp, Pseudomonas aeruginosa
atgcttccgaaactgcgtgatgcagccatggataaccctaccaaggagaatgtgagtgcgtacttctgggctcagcgaatcatgctcgacaaggctgagcgattctcgcgccactccgtcgacgtaatccgtaacgatccattcctcgatgaggatatgcgctatcccgcttccaacgcggcctccgacgcgctggcaactgcggccggcaagcagaaagaaaccctgttgaagatgatcgccggcagctctgcgctgatgttcttctacaacggtaacgactgcattctttgcgagcaggccttggccgcggtctcagctctcgagttcaggtacgggtttactgtcatgcctgtctcaatggacggggctcctctcccaggaggcaagtatccaaacacacagtacgacactgggcttgcagagcagctaggcattatcacctcgccggcactggccctagtcatccctccgcatgacgtgaagatcgtgagcttcagcaccgtttcaatggagacggcaactactcgaattctcatggcggcgaacgaagcggggctgatttccgaccaggaatacaacgcgacatctcgccttaacaccatgggtttgatagacgccacaaagctggctgacgccccgcccgatgcaacaaagaaccctaacgaattcgtgaatcggatgcgcgaagaagctcgccgcgcctttcagaaagacaatggaggtggacagtga

SEQ ID NO: 349669 - DNA, 1404 bp, Pseudomonas aeruginosa
gtgaaaatcaaacctatcgctcttgccgtagcactgtttgtggtgtcctttggggcttacgcgaacatccagcagcaggtcaatgagatgttcagcggcatgatcaacgtcaccagcccaggggcttacaaaaccgccactcgcggcgttgtaaccggcggatctgttgttcttcggaatcgaatctccactgccaatctcatcagcattacccctccaagcgcaaaaggcggctgcgggggcatcaacctttacagcggctcgttctccttcatcaacggtgaagagttcgtagcgcttatgaggaacgtggcgtcgaatgcttctggcattgtttccggctttgcttttgagctggccctcgatgcgatggatgcccagacaggtggtgtggtccgcaacctggccaacaagatccaggcgctcaatcagatgttttccaacagctgccagctggcgagcgggttggtcacgaatgccaaaaaggcatacgaagaaagtaccgacttcaagtccgcaatgactgccttcggctccaacgtctcaactgacttctttaccgcgaaatccaccaaagaagactcaccggcgaaccggatcgtggcctccggtaaagctgttcagtgcgagaacacagggaacgttctgtggtgcgccatgaagaaatctggccttcagtcgcaaatcctgttcggcagcgatgagaacgcggaattcatcatgtcgatggtcggcagctataacgtgtcgctcgccaacgacgacaatggggggaagaacttcgctgcgcatcccatgccgaagctgatcaccggcgaaggtctgaagattctggttgaaggctcaaccaacctcgatgtcaaagtttaccagtgcgaccaggatgactctgactgctcagacccgaagatccgtactctcaccagcttcaagggcctcgaaacccgaatcctcgaggatcttcaaaacaacggaatcctggagcgctttgccaacggcactgcaaccgccgctgacgggaaccgtattgcctacctcgcatcaagccgcgtgggcgtgaatctgataaggatcgcccagaaagccggggctcagtccgggtatgactatctaaatcagttcgccaagaagattgccgcggatgcgtcgatgagccttatttatcagttgcttgggcacactgagaaggggttgacgagcctgaacatggcggatgctgggaaagtgatcgaggatctgcgggctacaaagggagaactcatggacgagtaccgctcgtacattgaggacgccatgcagggtaaagatgccgatggccaggctgaaaaaatgctccagatggctcctgtgtttgatagcggaaccctgccgcagggagccgccaacgacaacgcaggtgcgtaa

SEQ ID NO: 349670 - DNA, 3162 bp, Pseudomonas aeruginosa
atggagttcactatctacacgacgggcagcgccgagttccttgagatcatgctcaatgcctgcgcaatgatcacaggaagcggtgatgcagaaggccttgcccgtattggggcgctattagggctctttctgttggcgttccaagcggttttcaataaccaggccattaccttcggaaaggcgggtcttatgctcgccctctacatgatgttctacggaccgacagccaccactgttatcgaggatacggtgtcttcgcaggtgcgggtggtggacaacgtgcctcttggccctgcctttgtcggctcagtcatctcaacggtggcctatggcatcacaagaaccgcggagcaggcattctctactccaagcatgaccgactacgggctgttctcaagcctgagcacattgtcgaaggtgcgcgatgcgcttcggaatccgatggctctggacggcttccaaaactaccgaaaagcggatgggtgggatctgcctcgaaccgtgaacgagtatctggccttctgctctctgaaccctgtggctttgagaacggacaagacgctgaccgagttgtaccgatcgcctggttgggcacaggtgatgtcaaatcagaacccatcgatgttcgtctacgtctatgacggtagtggtgccggcactttgaaaagttgtgcagaggcccggtcgttcctcaatgcccatctgcagaacgtctacacggatgtgctagaggacattctccagaaagggtttagcgaagaagttaagaccaatcgcatgaccagcggtgtccaggtgcaagctgctaccgaccaagctattcagagtctcgcactgagtagcaagtcggctcaggactacgttctgacgtcgctgatcgctccgatcttcaacagctcccgtgttgatgccttgaaccattggcatgagaaacgagccgctatggctcttcgcgaagcgctcaaccagcaagagattcaatgggcggggaagggagacagctttaaacactacatgaggccgatgattgccttcttcgagggcatgctctatgcaatgacgccgtttatggctttcgctttgctcctgggcgggcccgggctttcaatcctagggaagtacctggtgctgccactggcggtcggcctatggatgccgctgttgagtatcgtgaatgcctttactctttggtacgcaggctctcagatcgacgcggtattcagcggatacgatcccacgggtcctggtttcgcaatgcttcagctcttggacattgacaaggcgatcggcaaggcgcttggcataggtggtctgctcgcagcatcggtgcccccattggcactattcatcgtttccggctctgccatggttgccaatagcgtcatgagccaaatgacggcgggcgacaaattcaagtccgaagacgttactcctcgatctcaggagagcgctcctgttctaagcactaatgcctctttcacatccgaccagattagtgccggtgtgagcagaacgggatcgccgcagcttgcggagacaataaccggcgaccaagcggcgagtgcagtccttcagagtgcccagacagcctcgcaaacggccacaagccagtatcagagcagcctctccgcagcaggccagcagttggcctcaacttctaccggtcgtgaagcaatgacgcaaatgggcgagagcatcaaagctagcgatgcactcaagcaaagctcttcctataaccaggcagttgaaaatcttcgcagttccggtttctccgagtcgtcgatcaacttggcaacggcagcctcagcattgggcggccaagctggcctgcacgggatcatggccagcctcaaaaccggcgacggcaagtcactttcggaaatgagcggtacagagcgtaagactgctgaaaaatcgctatcgcaattaagctcctctgtggaaagtgcgaacacccgcgatctgacctttgctacaggcgacgccttccgcaattcgtcgttggcacaaagcagtgttagcaatacggatcagataaatcagagccgcagcgacgctctacaggcacaaaaaacgtacagccaggcagccactcagcaagacaccataagggcaagccaaggccttaatctccgcgatgcagcgatcaagtcgctatcgagaggtgggctatctcgagtggaggcgggcttggaacttcaacgcatggctggcgcaacagagcaagggaaaaatctctttgctgaggcctttaatagtcagagcatcaaggatatgtcgtcgaacacggacgagcagcgagcgatggcagcaatcagggcaatgaaccagcaaggcagacttggcgatttggttatgagccaattcaacccatttgacttcaatctggcgcagggggatgccaccagtcttgcaaacatttcagacaaggccggagcagcaacggccggaaacgcaggcctgcaaggcgagttcaattcaagatggcggggtaatagtgatgtctacgccggtgcacatgatatgaacacttcagcgaaagaagcagctgaagagcagggggccgagcttgtcggaaaccgatataccgagaacagtctggccccccagtttgcgtatgctcgcaatagcatggatgtgagagaggcagctgattcagaggccgcacagcagttggcgaccttcgggaagaactatgatgacaaaggcttaatgatcaaggccgcatcggctgttcaaagcattcagtcaggaggaaaaacgctggcgaacttccttgctggtaacgagaatacccaattcagcagtgacgtttccgaagggcaacatctgggcctaacagatagccaagcagcactccgagcagccagccgagcgggcatgcctacggactctgatatctatcagtgggcctcctaccacacctactcggaagccatggtcgcgtcgggcggggacgaagactatgcgaagggcgtccatgcctcattgacctaccaggcaacaggaagtgatggaacatctgctgaccggccggttgttgaaaccgtagcggcgggcaaccgtcacaatcccctgcccaaaaacttcaaaccagcagctattgaaaatgccgaacaacccaaaccagcaagcagaccgaggagaccgtcaatcgaataa

SEQ ID NO: 349671 - DNA, 1035 bp, Pseudomonas aeruginosa
atgcgagttaagatcaatgcatcgatgatacaaatgggtctacgctggctaacatctggcttgcgagatttcaatgtaattctcgccgagcagcgattgactcaggccgacttggtttggctctcatccttgagcacgaaccagcgacagttaagcgctgtcgatgccctccccgtttccctctaccgtgttcactacaataccttgaaggttggtaggggctacctggacgatgaggagttcagggagatcggtaacaaaatggtaatgttcatggagttttgccatttctcccgcgtcaacgggacaagccctattctggctgtaggccttgacgatgtggcgtatcgggtcttcgaggcaggtagcttcgattcccgcatgatgttggtaagccgcggcggattctcgattggcactaggtgcaaccttaggaagctgaggatgaatctgtcttcaccaactgatcagttgagggacgtgaccacagtattgcttggcgaccttcggcacttcctgaagcccggcgtgaatggcataggtcgagtcaaggactatccatctacgatgcccctcaatgttgtcgcgacagaactgcttcagcaaaaactccaacccatgctggtttcgcaatggacaggcttgaatgcagacgaagtagtacggataaagcgttccttgctacgggatacacccctcgtcgggtcccagagcggacggatacaggcaccgaacaagacgttggctgaaaagccgcttcacagcctgctctacctcaccgtgtacaggctgctcgccgacaatccccttcggcggacaaatgctcgggcggtggttgcggcccatcgtgagtacgtagatctgtgtaaagccgtgggcgttgaggccagcgatatgatctctccctccaatgggtaccagctcagcaatgcaatgaaaaccggagacatcactctgactccgtgcagcaagtgcaaggagatcaatgctcgttacgcgctcaagcccggccgatgcatctggtgcaaccactga

SEQ ID NO: 349672 - DNA, 687 bp, Pseudomonas aeruginosa
atgctaaaagcaagccagcagacactcagaaaaataatatcgctgctgacgataaaaaagaccaagccggtaaagagccaaactctcgcccagttgccagctggatacggggggccaatgtttaaagtctggtttggttcgttgattgcaacatctgcaagcattgctgtcttcgtctcgatggacgtaacggctaatgaattctcgttaaaaggaacgatgtgggagcgagcatcaatggcttccgtatgcaagccggatcccctactcttatattccctggctctaaatgagtccagatcctctgccggtgaaggtatggttgcgccccatccatttgctcttcgtaatgcacctagtggcgccctatatcctaatacctacaaggatgccaaggctgtcctaggcaaatacattgctgaagacatcctcactgatataggcataatgcaaataaactaccgttggaacggtaagcgagtagagcgcccggagcttcttcttgatcctgaggtgaatatccgcataggcgctcagattctttgcgagtcaattgcgcagtaccccgccgacatgcaacttgctatcggcgggtaccatactcgaaacccaaggcgtgaacttgacgcacgccagtacgcgagtaatgtgctcagcatctggcgttcactacagcgtttgaagtaa

SEQ ID NO: 349673 - DNA, 981 bp, Pseudomonas aeruginosa
atgggtaacgccttaggtctagatattggttacagcaacgtgattggcgtttttggcagtggagaggggcatccggagtcgatcattcgtccctcgcaggccgcccccttgagcgttctgcctggggactcagggttacgtgctggtgaagtgatcgttgacgttgatggagcgccttgggtggcatttgccgcgccaggccgcgtccaggatggacgagagctgcacgaggactacacgtcatcgcacgcttatcaggccctatttaaaggggctttgctgcatgctgctggtgataaagacgtgattgactgcttagtaaccggccttcctgtctcccaggctcgcgataagggctatgtacaagctctggtaaagcgcatgactgggacacatcgtattacgccaaagcgagaggttaccgttaagcgagtagaggttgttgctcagccgatcggaactctgacggagatctactgcaactccaatgcatcggaagttatcgaagagtcagtttcgatcattatcgacccagggttcttcagtgtcgactgggttgtattcgaccatcgcgagctggtcgtcagttccagcaacagcagcctcaaggcgatgtctgttgtacttgaagcgtgtaacgaagagatcgcgaaggatcatggcggtatacccggcgtagagaagatcgagcacgcgcttcagtcgggtaagtcatacatcctgatttatggccgcaaggtggagcttgctgagtatctagagcgtgctgctgaacgtgttattccgtccgttttcactgagattagacaagggcttcgattcttgaaggggcgtgctatcgactgcgtgatcctggggggtggcggagcatcattgtatgagccattcgctagaaaagagtttcccgatgcgttggtagtcagacccgttaacagcgtgaagagcaatgctgaaggtttctggcatatcgcacgctcttaa

SEQ ID NO: 349674 - DNA, 1245 bp, Pseudomonas aeruginosa
atgcagcgcctccaagccttcaaatacgaactgatgccgaccggcgaacagcagcgccagatgcgccgctttgccggctcctgccggttcgtgttcaaccgggcgctggcgttgcagcagaccaaccgcgaggctggcgggaaattcattggctatgtggcgatggccaagcaactgacggcttggcgcaactgcgccgaaacagcctggctgaaggatgcccctgtccatccgctgcaacacgccctcaaagacctggaaagcgcttacaaaaacttcttcgagaagcgcgccgacttcccgcgtttcaagaggaaggggcaaggcggcagcttccgctaccccgaccccaagcagatcaagctcgatcaggccaacggtcggattttcctgcccaagctcggctggttgcgctaccgcaacagccgcgaagcgctgggcgagctacgcaatgtcacggtcagcctaagtggtggcaaatggttcgtgtccatccagactcggcgcgaggttaaggttccgctgccgcaaggcggcgcaatcggcatcgacatgggcatcacccgttttgccaccctctctgatggcgggttctacgccccgctcaacagtttcaagcggcatgaaatggccttgcgcaaagcgcagcaggccataagccgcaagaccaagttcagccgcaactggaagaaggcgaaagcccgcgtccagcgtatccattcccgcatcggcaatgcccgccgcgactatctgcacaagacctcaaccgcgatcagccaaaaccacgcgatggtgtgtatcgaggacttgcaggtgcggaacatgtccaagtcggcggcaggcacaaccaaaacaccgggaaagaatgttcgggccaagtctggcctgaacaaagccatcctcgatcagggctggttcgagttccgccgccagttggattacaagctggcatggagcggcgggcatctgatcgccgtaccgccgcagaacacgagccgcacctgcccgtgctgcggtcatgtatcagcggacaaccggcagacgcaacagcgattcgcgtgtgtcgaatgcggcttcgaggaaaacgccgatgtcgtcggcgcgatcaatgttttaagggcggggcacgcccggttagcctgtgaagtgagcggtgcggtaatgccgccagcagcaggaacccaccgaagcgactcatcccggcttgatgccgggatgagcgccgtaggaatcccccgactttag

SEQ ID NO: 349675 - DNA, 204 bp, Pseudomonas aeruginosa
atgcacgggaacggacagctggaactgctgcttggatcaatcggcgcattgagtgctgggttagtaattgtctggctgacgtactgtgcaacgaggtatgtgctcagcgatttgaaagacgactacgcgaaactgcgggcagagacaaaaaccttggcgggcatatcggcgggagctagggaggggctggcgaatgatgtttga

SEQ ID NO: 349676 - DNA, 189 bp, Pseudomonas aeruginosa
atgattcttgatgagcttaaatgtcagccgcaagcagagcagaaaaaggtgctgtcgcgtctgcgtgaatattttggggctggcgtccaaaaactggacacctcttttgaggggatggagcaagtctatctgctgagcaacccaagcaccgggaggtattggctgtcactgaggcgtcatgctcaataa

SEQ ID NO: 349677 - DNA, 213 bp, Pseudomonas aeruginosa
atgagccgagaaacctacgaagccaacatcgccttcatcgaccagacggtaaagcgcctggagcgtaatgaagtgagcatcgacgagctggaaactcttgctcgcgaatttgcagatgcccgtaagttctgcgccgatcggcttacccgcattgagggcgttgtccaagcaaccttaagcgcggaagaaggacaggccggtgagcgcacctga

SEQ ID NO: 349678 - DNA, 1395 bp, Pseudomonas aeruginosa
gtgagcgcacctgatccgatagagcagcacctcaccctcagcgcataccttgctcagatccagaaggctatccgaaccgcggtgcccgacagcagttgggtcgtcgcagagctgagtgacttcaagcgccgcccgaacgggcactgctacatggacatcatggagtcgcgtgaggggaccgaggtcgcgaaggcgcggtgcactatgttcgccaacgtcgccggcagggtgcttggtgagtggcagaaagcaacaggaggcctgcctcaagcaggaatgaatgttctgctgaaagtgagggcggatttttcccctcagtttgggttctccctgatggtcaccgccatagacccgagttacacgctgggagacatgcaggccaagatccagaagatcgttgcctccctgaaggaacggcactggttcgacctgcaacgggggcttccccctccagggggcttctggcgtgtggcggttgtggctccgcacgaggcagctgggttggccgattttcggcgtgatgcagagcaattggctgcggccgaggtgtgcgccttcgagtatttctcggcgacgttccaagggcgagatgcctcagacagcatccgctctgcattgcgtgcggttcatgagcgacatcaacagcagccatttgacgccgtatgcatcatccgcggggggggagcgaaaagcgatctggcctggctcaacgacgcgaaccttgcagcttgggtctgccggttgcctgtcccggtgttcaccggcattgggcacgagatcgacgaatgcgtgctagacctcgtggcacaccgccgattcgacacaccatcaaaggtcatcgggttcatcaaaacggcgctcatgtctgaggcctcaagtgttcgggctcaggtcgagcgggccaacggcatgatcttgcgcctggttactgggcaatccccgcatctggatcgttcctggagcaccttcagccggcgggtgatggaaatgctccatcgggagcagcggcatctgttgcaacagcaaagcagcctcgacaaaggcagggacctactcatcagcaagcagcgtatggctctccagctcgcgcaggatcgattttcaaggctcggggctggtctgtgtgtagctgagcgccaaagggggctatttgcggcctcgagagtggcttccctgagtcgagcgctgattgccagggaaatttcacgcctggagcttgcatgcactgtctacgacaggacaaatccgcttgcattgctcggaagaggttttgccttagtccgcggccctggtggggagataatcagcagtgcccagcaggcccgcgattcaagaaagctcaatctggctttcgctgatgggcacatcactgcggcagtggaaggagggcaatga

SEQ ID NO: 349679 - DNA, 345 bp, Pseudomonas aeruginosa
atgggaaaaaatatgcttctcgcactccccctactactcatcgccatggtgagcagtccggctgtcattgccgacaacgggacgttgcccgaatgtgcagtgaatgccgctcaagcgagcgatgtggagctggcgctgtttcaagctctcatgcactacgaactgggggagccaccaagggcagtcccatgtacgttctacgagcgttcagctgccgcgctctcatcgtcgctgtcgagccaaaagggtgatcgctgggcggccgtaagtctgtttcttcgcggccgggttgtcactgacgacccagcagtgaagcgcgttcgcgccttctacgagaacaagtag

SEQ ID NO: 349680 - DNA, 246 bp, Pseudomonas aeruginosa
atgaaccatgaacaggcagtgcagctctatcgcgccgcgattgacccactcgcctccctcgaagaaggcaaagagtggtgggcggcagtgaaatcagagctggaggcagttatcgcagccaaatcggtgtctgccggcgctcgcgtcattgaatggtggcatcacgactggtcgtccgttcaggaccggcccgccgatgccgcacgacgtatcaggttccaagccaagcaccttaagatcaagtag

SEQ ID NO: 349681 - DNA, 315 bp, Pseudomonas aeruginosa
gtgtccaagcgcttccttccgagcagccccgggctttactgggcgcaactcttcgacggtgaagaggtcgagttggctctgttgagggtcaagctctaccaggacgcgacaatcaaggacggcgtgatcgtcgagcacgtggagaaacagggctggcaattcgaaatgcctgccctggccaataacgtgatcgtttcccccgtacagatgcgctaccgcgagttttacggcctgaccggggatcagcagccccaggtaaagatccgctggatggggccgcttcggaggccgagtttcaaagagtgggccgagtag

SEQ ID NO: 349682 - DNA, 171 bp, Pseudomonas aeruginosa
atgatgttcttgagagagatttgggcggaacttcgccggcaggaagcagccaagcagcaggctaggtctgaggcctacgacaaggcacctggacgccactgggccttcttgggtttggcttatgctctttgcattggggctgtgttcgttaccatctggctcgcgaagtag

SEQ ID NO: 349683 - DNA, 231 bp, Pseudomonas aeruginosa
atggctagccgccgcgaaccctatacaccgtgcaagctgtatatcgactacgcggacggtctggccgctggcgactacatcctcacctccggtgggtcggcctacctggtgcaggctactcggcccagcccgagcaaacctgagcgcctgtatctggactgcctccgctggccatccgaacagattcccgaggaagccaggtgctaccagctaaactggtaccggcggtga

SEQ ID NO: 349684 - DNA, 216 bp, Pseudomonas aeruginosa
atggccatcaacgaagaaattcaggcggtactcagcaaccccggtaccagtgactggctgaagtgcagtttggagaaggcgatccaccgcgattgcgtggatgccgccaatgatgccgagctgctccacgatctgttgattcggtggtgcgatgaggccttgaatgcagactcagcattgctccaagccgatcacggaaggcgcatccgttcgtga

SEQ ID NO: 349685 - DNA, 252 bp, Pseudomonas aeruginosa
atgccctcttcggaactgccgccattccagccggtgacgctcgatgagttgcgtcgcatttggtcagcgcatgacgatcctgacatacgccgcctggcgctcgaggtagctcgatatcggcgtgtgctggcagaggtcgataagctctataagaccgtacaccagtcctggcgcacccaggtcggcggcgatctagtggccctacacctcatgaagcagatcatgtatcacgaacggatgcgccttccgtga

SEQ ID NO: 349686 - DNA, 930 bp, Pseudomonas aeruginosa; identical to SEQ ID NO: 269214

SEQ ID NO: 349687 - DNA, 240 bp, Pseudomonas aeruginosa; identical to SEQ ID NO: 269213

SEQ ID NO: 349688 - DNA, 411 bp, Pseudomonas aeruginosa
atgcgggtcgtgttggataccaacatcctgttcagcgccctgatctcgccacatggcgcgcccgatgcgatctaccgtgcctggcgggcggcgcgtttcgaggtggtgacctcgcggatgcaactcgatgaaattcgtcgagccagccgctatcccaagcttcaggccatcctacagcccgccaaggtgggcgccatgatcaataacctgcaacgggctgtggtactggagcgcctgaccatcgaggtcgaagccgatgatccggatgactcgtttttgctggccatggccttggcgggcgatgcggactacctgataaccggtgatcgccgcgccggcctgctgcaacgcgggcacatcgaacgcacgcggatcgtcacgcccgccgtgttctgcgtcgaggtgctgtga

SEQ ID NO: 349689 - DNA, 456 bp, Pseudomonas aeruginosa
atgccggtcggttttctgactcaagagcaacgcgacggttttggccgctatgttgattcgcccagccgtgaagagctggaacgttacttccacctgagcgatgaagaccgtgaagccatccaggtgctgcggggtaaccataaccgtctgggttatgccgttctgctgaccaccgtccgcttcgttggcgttctgccggacaagcccgccgccgtgccggtggaagtcctgcaggtgctttgccgacaactggcgattccagaccccgactgcctccagcgctatagcgatcatcgccgctggatacatgccaccgatattcagaaccgctttggctatcgtcatttcaccgatccgggcatcggctttcgcttgagccgctggctgtatgccctctgctggacgggcaccgaccggccgggagtgctgtttgagcgagctgtgggatgcaaataa

SEQ ID NO: 349690 - DNA, 780 bp, Pseudomonas aeruginosa
atgcagatgttcgatgtcgatctgttctcttccgctggcgtccaggagttgcctgccaatgttgatagcaggactgagaagactctggccgagaagattgccaaggaaggcggcgagtacgactggctcaagcccctgaacgacttgcggaactacatcaaggcccgtcacttcgatccgagcgctcgatgctggctggcacgcaaggttgatatggaaacagggacggtaaaaatcgctccgaatgcgtactcgccagcattcaccaaagagctgctgggaatcatgctcactatccagctcgacgaatttgaggccgcccagaaggccggcatcaagccgcgctttacgcttctggacatccagcaactgctggcagtggaggcgctttggggccgctatggataccagaagccgtttaccgccatgagagtgttcctggaggtctacgagcaaggtgttcgctatgaagtcccagatatctcagcgctgccaaagtacaccgaggcagatctgcgataccccgaggtcgaggtgccgttctgtgatgatcagtaccaggggatgttcaacggcctacgcagcatttcccatgcggctgccgatgccgagttcttgaccacaacacgcaattgtgggatgcaaataaagtttcatcctaacggggacgatttgctgggctggctgggaagctcactgcccgacctgtacctaaagtctcatcctaatgcctcgcagcggccttcaaatggtcggaaaaccccggagccatgcgaataa

SEQ ID NO: 349691 - DNA, 1119 bp, Pseudomonas aeruginosa
atgcacccgacaatctcccgcgcacaccagttcgacgaccaagtagttatcccggcactgggccagcaactcaccctgcttgggttcgaacctgagcctccggtgctggccgagggcacttatttcgatgccccggcagtggatctggacagctatgaccacgttatagtctgcgtgtctggcaaggacagcatcgcttgcctgctgacactgattgagcagggggtggatctgcgtcgtgtcgagctctggcaccaccgcgttgatggcgcggaggggagcacactcatggactgggcattcaatgacagcttcatcgagaagttcgcagccgcattcaacttgccggtctatttttcttggttgcagggtgggatcgagggcgaaatgctcaagatggatgcctactccaagcctcacatggtcgagactccaggcggagttatttgcttggaccgtgataccagccggactctgccagcgacccgccgccggtttcctcagcaaagcgccagcctgacaacgcgctggtgtagttccgcggccaagatcgacgtgggccgcagagccatcaccaaccaggaccgttttctcggtaccaagaccttgttcgtcactggtgagcgccgtgctgagtcgagcaatcgcagtaagtacaaccagttggaacctcacgccgtcgatcggcgaaaaggccgcctcggccggcacgttgatgcttggcgacccgtgctgcactacagcgaagaacaggtgtgggagctgcttgctcgccaccgagtagaggcaccagtcccctaccgcttggggtgggggcgtttcagctgcatgacgtgcatttacaactcaccgaaggtctgggccaccatccgcaagtacttccctgagcgggtaacccctatagctgggtacgaagaagagttcggctgcactatcagccggcagaagatcaacgtggtggatctgtcggccacagcggaagcattcgatatcattgatctggacgcacttgcccaggcgcgccagcgcgagtacgtgctgccgatcttcacgccagagggcaaagcctggcagttgccagcaggtgcgttcgtgaccgagggttgcgggtcggtgtag

SEQ ID NO: 349692 - DNA, 201 bp, Pseudomonas aeruginosa
atgctgcacattgagcgcaagcaaggccaggtggtttgcattgggacagagatcagaatcatcgtcaccaagacctcaagtggtttggtgaagctgtcattcgaagctcctactgacatcaagatctaccgagaagagcttctgcacagatccaagggtagccagacggaaaccgcccaccacctgtctaagtccaactga

SEQ ID NO: 349693 - DNA, 909 bp, Pseudomonas aeruginosa
atgactgatttgccacggctcacctcgttccgccaactcgacgactttctgaagaaggctggctatccgcgcgacgagcagatgacgcgcaataacatctacattgctccactcgactggttccatatcgaacagggcttcaacctccggccgatcgatccggagcatgctgagggtttcgcaaaatcctacgagcagggccagtacgttcccccagtcgtagcagaactcgggatagtcgaaggcaaacctcgattgatcatccgtgaggggcaccaccgagtaaccggtgccaggatcgcggtagaacgcggtgcaaccctccccggccttgtcgtcaccgaattcaagggtaacaaagctgacgcgatcacattgatgatcaagtcgagcgaggccaaagggcttaccccattgcagcgtgcagagggttacaagcgcctgtccgggcagaacttctccgatgcacagatcgcagagcggatgggtaagagcgtgagccacgtcacccgtgcactggtacttgctaacgcagaggaaaatgtaaagaaactcgtcgaggatggactcgtaactgcatcaaccgcgactgatgttctcgttgagcttcgcgggacagcctccgatccgtacgaaaagcttttgacgatgatcgagaaggcaaaagctgcgggccggcctcgagcaacaggaaaggacgcctcaaaggcactgggcaaattcaaggtcacgccgaaagaggcagtgagtgccttcggtgctttgcaagggctgaccgggagtttgcgccagcaagtggagaccggaggcgatgctcagcatgagctgaagctcagcccagacgcagccgcaacattgctgaagatcctggagaaatacgaggctagccaaaacccgcctgaggcctga

SEQ ID NO: 349694 - DNA, 267 bp, Pseudomonas aeruginosa
atgagtaccgagacgaccactcaacagcagcgcgacgagctgctgcacctgctggaaagttcgttccgcgcgctggccaaggccgacgacgtacgcacctaccgtttcgacattggctatgcccagggcatgctcgatgcgatggacattctgcgcgttgccgacacggggctattcagcgctgacgaaatggccgagctgtacgagcgcaagcgggtgattggcaacgaaacggtaaagcggatcgagggtgacatatctaattag

SEQ ID NO: 349695 - DNA, 246 bp, Pseudomonas aeruginosa
atgatcaagcagaccccgagccctgacgttctggccgaagcgcgccgccaggcgaatgcacgcattgcagcgatgcgcgcagcgccgaccttgagagaggccgacgatttgcacagcgaagccctggtagagctgtgctatgcgcgcggccgtggcgagctggatttagccacgcataaccaattggcccgcgcgacgatatgggccttttgggagctagagaacccggacgacagcccgaactga

SEQ ID NO: 349696 - DNA, 129 bp, Pseudomonas aeruginosa
atggagaagaacgacgcagtagacgtcctgattgccgcgatgaccgacgcgaaggtgctgacgaaccaactatcccctctggatctgcggaccgccgctgctgaagcgctagggcaggcctcggcctga

SEQ ID NO: 349697 - DNA, 507 bp, Pseudomonas aeruginosa
atgcctatcgccccccacactctcgccgttatcttcgcccaggtcgcccattgccttgaacggcacgacctcgccctggaaacgttggacgcctacaaagaagacgccaccgctggccggctcaccgtggagcgcctgcgtggttttctccaagggttgagcgccgccggggcgctcccatacgaggactattgcgaagtcgacgcgatgcttgaagttggcgctgtgggtacgggtactgggctagatccgcgcactgctcttctagccatgcacgtcgacttgatccggggtctcgacactgacctaggggtacggagggccgcaagccgtgcgatgggctacctacaggcactcctcgacattcaaagcatcaactcggacagctacagggcgcaccgagaagaaatccagaagttggagcaggagcgacttgaggaacttacctcgttgcgcctaccaacggcagcccatgttggggcatccacggcgaagaggagtcagtga

SEQ ID NO: 349698 - DNA, 558 bp, Pseudomonas aeruginosa
atgactcacgttgccccctccgtacctcagcacttggcagagctttaccaagagctgaacgcatcgagagcaaccctgctggccttgattgaggcagaaggttccggcgtccatcgacggacgctggatcagcttgaccgcatgattgcggagatttttttcccgctgggattcgttgtttacggcgaaaaagagacagaggcctcggacaatccagcaactgccacgccggtcgggtatgcgtggagagtgacagggagcgatggcgacatcaggtcgctccggtgtgaagaaacggggcaggaaatgtccatttcgattgagcgcgccatcgcggatttcgctttggtgcctgctctgctgcctgaaggctatctccccgatctagatctcacgccaggccaactggaggagaaatactcgcagcgaggcaaggatcaccctttcttggccaattaccagtggctccaagcagtgcgcaacaaccagacccaattgggatactggcagtgggtgctggatcaactgttggccttacaccaacgctcgcttccctaa

SEQ ID NO: 349699 - DNA, 771 bp, Pseudomonas aeruginosa
atgagcgttcatccaattgcaactcagcaaccgatctacaagacgccagcttcatgggttgagcgcgcgccgcgaattgtagttgttggggccggtggcaatggcagtgaggtggtcgatgcgctggccagcttccaccatgcgctccgctccctcggccatccagaggggctggatgtcacggtcattgatgatgcagtcgtgcgcgagccgaacctcgtacgtcagcgtttctggccgtgtgacttgggccaattcaaagcaatcagcttggtgaatcgctacaacctcatgctgggtacgtcctgggaggccctgcccttccgatttccaagcagcgagacgatagaagcgatgcgcaccgccgacttgatcatttcggctgttgacctttcctcggcgcggcgtgcgattgccagtagctcagtgctttccaagcactgcatgtggcttgaccttggcaacgaggcccgacatgggcaggttgtgttcggggctgcacatatagccgggcggggcctctatcccaacgtcatggacgcttaccccgaaatcgaaacgcttgaagatgacacccaaaagtcctgctcggttgcggaagccatacggtcgcaggactgtttggtcaaccgtgcagtcacgactgccggaatgagcattgtgtgggaactgctgcgcacaggtgaaaccgataagcactggatcaccgttgatttggcgaccggctgtcaaaacgcatttccgttccctgctgttccgcaatgcgcctaa

SEQ ID NO: 349700 - DNA, 702 bp, Pseudomonas aeruginosa
atgctgagtgaaaaagtttcgagcaaggccatgctgatacaccaccacagccagaccggtgtagtcaccatcaccagtcacagtgtcattgcgctggaggatggtaagggcggcttcacgctgggtgctgggagagcattcagttcctacgacaagtccgaactggtggctctgctgttggatgaggatgcgggagcagagtttctccctgaacactacttgttcagttcgcgcactgtcttggcctggtatcgccgccctggtttgcacgatatcccccttctcggggagcggctacgcgcaccgttgccgggcttgattttcatcgctgcggccaatcaatccttccgttgctttgcattcaaggggaccaagcggccgacgccggagacacaactcttctatgccccgttggggaatgtgtacaaaggcggaaccttctgtactggcagtggaaatgttcctcgcgatattcgacgtgagaatatcccggcctgggagaacttcgtgctggaaagcgacaacacccacagcggcacggttgagccggtagcagggtgccgctcgtttgaggacttgaaggagttctatcgagcactgagcaaaaaagggtcgaagcgattcccagcctcgaaactggtttcagcagggtcatacagcgctccgctaacgctagcgcaagctatcaaaggagatgcgtga

SEQ ID NO: 349701 - DNA, 894 bp, Pseudomonas aeruginosa
atgggggagttggagcgctcgttgatcgaccgtatcaagctgcccacagccgtcaaggaggcctactccttcggaatccaggacggtcatttcattctggagtcgagctgcttcgcttccttctcgtttcaagcgccagcaagcttggaactgcgagtgcttcttttcaaaacactcgacgcgatgacgcgccatctgctgccgttccacacgccaatgaccttcctgggaccgcatagctacctcaaccatgggctttcggaggctttcgaggaactggctccgcgtttggcaacccactctagagaggaactgtgcgcctttctgctggatgattcggtcgagcatgatgattacatcgccgaatatctctactgccatggccaagacgaggattctgtaaacagcctgcttgacgccatctatgagatggacgagttgaaaaagatagctggagccacccttagccagggagatcggttggagatcgaggaactgtccgatcaggcacgccaaatctgtgagcgtgacgatgcacacgccccgctgatccaggtgctgcgggatgccttgcagcactgcctggaacaggacgccagtgggttgctcaaggagttcaatccccatgatttgccaggcacagccggtgatggggtgtctcttttcgagagcattctggtttgcctgactagggattttccaaatctagagcagagtagctatgacggttttgaaggcatcgtcagcggctgtggcttccctgcaatcgggttaccgctaagttctgatcagttgcgaaccgtcaccctgccagttctagacgcgctatccctgaccctaggtctgttgcagcgaatcgccgacgctttagaggaatgcggtaatgctgagtga

SEQ ID NO: 349702 - DNA, 207 bp, Pseudomonas aeruginosa
atgtctacgagttccgagatggcggattcggcgcaaaaggttgacccgcttgaagtcctgaaagcgtgggagcgtggcgaactgaatcgccacctcccgtccggtaccgaacctgattgtttagaccaccagcagagacaaaggctatggaagttgcttacctcccccggcaatcccggcactatcaacttccaacttccgcgctga

SEQ ID NO: 349703 - DNA, 213 bp, Pseudomonas aeruginosa
atggcacttgttgaaatctctctcgcccgcgtcttccgttacgccgggcgtgacctccccgacccgcagcccgaaatgcctgtggctgacgtgctgaaacactatgcccgtcagttcccaaagctcaatggagcgaaaattatcgaccccattgtggagaatgacagctatgtctacgagttccgagatggcggattcggcgcaaaaggttga

SEQ ID NO: 349704 - DNA, 456 bp, Pseudomonas aeruginosa
atgcaacccacatttctttccgtaatggctgctgcattggcgggcactcaacaccgcgtcaatgtggcaatcgaaaccgcctccgctgatgcgctgaaagtgatggttaccgccgacctcggcccgacacctgagaaggcgtcggaacacgaagtgcagcttcgcgccgcgatgtgccgcccgcttgtcctggtagggagcgctgttgagatcgagggggcgctgatgaagcgcctgacacagcacgtccaggccctgaacgagggaatgagcctgctggatgaaatccgttccattggtgcgaccgtgcaggcgaaggcttccacgccagctactgagcagcctgcaacccctgacctcgatggcgatgatgctgatgcttcgcaggcaggtggtgaatcgagcgcggacagcagcgtggttgaacccaatctggatctcgccgcctctttctag

SEQ ID NO: 349705 - DNA, 1761 bp, Pseudomonas aeruginosa
gtgaatcagcaagtagcccaagtcctccccctagaccgtatccgccgcaacccgcaaatcgacccgcgtaaaggccggaagaagtccgcttatgagcaactggtgcgttcgatcagtgccaagggcatcatccagccgattctggtcaggccagtaagcgatgacccgaactacgaccatgaggtggtcgcaggcaaccggcgctggacagcggcccacgatgcgggcttgatcgaggttcccgccctgatccgcgctatgagcgatcaggaggcgcggttgatcgctgcgctggagaaccaggtgcgggctgacctgacgccaatcgaagaagcccagcatgccgtaattttgctggaggacatggccaacgaccacttggcggtgatgaaggccttggattggtctagaaccaagctcgacagccgcctgctgctcgcccatgcctgtgatgcggtggccgatgccctgctggaggagcagatcaagattggccacgctgaattgctgtgtcgtctccccgcccccgatcaggcgggcattctgtcgaagatcatcgagaagaactattccgtcgagcagaccagggcgcgcctgctggagttgactcgggacgtctcgactgcacgttttgacaccacggaatgccggagctgcatccacaactcgggtgcgaatgccgatttgttcgaggcaagccttggggcgtctcgctgccagaactctgtctgctggaaccggaaaaccgagcagctaatttctgttcggttgatcgaggcgcaggaggagcacgcggtggttcatagcgagctgaatctcgcgaaggactcatacgtgaagctcgtcgcacggggcgaggatggtgtgggagagcaacaggcagcggcgtgcgctacctgtgcaagcttcggcgcagtggtcatggtgtcgagggggcgcgaaggcgacgtgatcggcggtatgtgcttcaacaagccttgccacaaggagaaaaccgccgcctacaaaacagccctggccaccgtaacgaacacagcaccagccaccgttgccgggggcgctgttggagcagccccggccaagccgaaggccgcaagcgcaaagcccacccaggtgaagaagtcgctacgccgtgaagccttcgacctttacgcccgcatgagcaagcaagtcgtgctcaatgaccgctcgctagcgttggctgtggccatcgtcagcatgtatttcgagatgcgcagcgacctcaagagcgagctgcgggcacagatggaaaaggccatgggtgtcacaagcgccctgatgaccacggctcgcgccgatgccgagattcggcttgcgcaactcggggaggaaaagctcctcacgttcatgggcagcatggctgctgcctcgctattccgcacggatagcgctgacgcattcgagaaatccgtgtcgggtgctcagtcgctcaagttcatggagtacgcgaacgtcgatccggccaaagggttcgtgatgaacgagagctacctcaaggcccaggttaaggcgggcatcatcgaagattgcaagcgttcaggctttgccgccgcctacaacgaggcgaagggagacaaggcatttgaaggactggccagcggcaaggcaagcgttctgatcgacgccatcctcgcgttcaaagagttcaactggttgggttatttgccgcctgcgttacaactatcggcacagggtgggaagaaccccgccccacagcaacctgaatcgaccgaagcctaa

SEQ ID NO: 349706 - DNA, 342 bp, Pseudomonas aeruginosa
gtgggactggacgatagggagtacatgcaggagcgagcgaggcaacgcgcccgcgaagggaatcagacagaccgctcagagaacgatccggtaaaggatgcctactacaacccaaaagatttccgtcgcgagcggcttcgcatcaaagttccgaactggggaggggaaagagaggggggcgaatccagtagcccaggcgttggaactttgtactcggtcttcctggtagggatcgtggtgggattctttatcacctgcctgctgggcttgcttcgattcgagcttttcgcctggggactccagatgatgcagccgcttgcgatgctgttcttggaaatctag

SEQ ID NO: 349707 - DNA, 669 bp, Pseudomonas aeruginosa
atgcaagaattagatttctggtacaactgcattggccgctacctggcacccgatgttgagcctgcggcgtccaccaagatcggcgtccagacccgcatgaaaaagggcattgcgagcaacacgctcggcgcaggtattgatgcgttctatatcgccagcccggacaagagcgttatcatcggcaaggtcgaaatgccgaatatgcccggcctgtctttcgtgccgagcgaagacggcagcggcgagaagtacattgcgcaatggctggtcaatgatgcgccgctggatgcggcgtggatgatcggggtcatcggcaacgcaaacccgaacgccagcatgaaacgctctcagcccccggcgctctgccgattttgcgcagccggtgcgacgtttgagtttgacctgagcattgtgcggcaggccgtgacgatcatgggcgatttggactggaagaaagacgtagcgccggcgctgcatacctttcagtcgcgccagcaggccaacgttgcgggtaacgccgccaaggtcgagtcggataacaagacactgcaaaaggctttcgccaaagcgccagcgctcaaagatgctttgctggcgctgtgccgactgccgctaaagcctcgttcaggcgaatatgaagtgctgtcgtggtataaccgcgtccgctga

SEQ ID NO: 349708 - DNA, 1101 bp, Pseudomonas aeruginosa
atggcaactcactatgtactcgaaggcgaaatcaaagcagagcagccgctggctacgtgcagcgcggcgctgaaagaagcggaaggcggcaagggtaagccaatccctgtgccccacatgcagaccccggaaggcaaccgtctgtatttcccggctaccgggattcgcggcaagctgcgccgcgctttgcgtgatgtgctgcgtgagaacgaaatcaaacgcactggcaacgacaagccgctgtcgctcgaccagcactatctgctcaccctcggcggcatcaagggttccgaggaaaccgacaaggcatcggtggatcaagaatcgcagtggcgtgagcgcaacgtcctgctgagtctgtttggtgctggcgatgcaggctacatgggcatggttcatggccggctggccgttggcaacgcgatctgtgaatcggtcagcgtgccgcatgtgttcagcggcgtgcgcagtgacgacctgtaccgcgaccgcagccaaattgagttcttgtcgcaggcagatattagcgccctggtagcacagtcgcagggcaaccgcgatgcctcgggcatcaagaaggaaatagccgtactcgacaaagcccgcaaagctgcacgcgccgcgaaagagggtgatcgtgtcgatgaactgagtgccaaaatcgaacagctcgaaactgacatgaagaacgtcaaggctgaaaccggggcgaaaatgtctatcggtatgccgctcgacggctggcaagccattccggctggtgcggtgatgcgccatcgtttcatgctgaacaacgccaaaccgaccgagctgggtgcactgcttgcggcgctggatcatttcagcgcactgcctaccctcggcgctcacctcgccgcaggatgcggcctcgtatctgcccgctgggagctgtttaaagtcgttccgggcgaaggcaagacctcgttgggcgtactggttcttgagccgttcgctggcgctgtgaccatcgaagcgccagccgacagcgaagtattcgccgcccgcaaagcgttccaagactacttggctggggatcaattcaacttgtcgattccgagtgctgccgcatgcaaagcctga

SEQ ID NO: 349709 - DNA, 555 bp, Pseudomonas aeruginosa
atgcaaagcctgacgcactacatcgacctcgcgccccacaatggcaacgcattctttgagcttcatgggcgcattgtgacgggagcacacctgagcgcccaagatgggaagccggtcgcgattgattggccgggctggaaaaacgtaccgggcgggtttggccctgtggtgcgcctgcttggtgagccttcggccatcgaacactgcctgtcggttatttccccgctggttgaggctgagttggtagatgtgtggggtgaagtgaaaacggtgccagataatgctgcctggtcgcacggctatcgccgtcaccgcaaacccgacaagtgctcacccactcaccagcgccggctggagcgtcgtgcgctggcgcggggtgaagtgtatgagcagccggcttatggcgaatggctgaaagccagtcatcggctgcccatgcagagccgatccacggggcagcacttttacatcttcatcaagcgtgtaagcgctgctgatctgcgttcggcggagccctgcggctatggcttcggcgcggtcgtccctcaattttaa

SEQ ID NO: 349710 - DNA, 2214 bp, Pseudomonas aeruginosa
atgagcgatttagaaaaaaagctgctccaagtcgtggataacgtgctcgggccgaacggcaaaatggtgcgtgggaagtgcgagcaaggtaagcgcacgttccgctacaacaacaagcagcacgaatacgcaaaagccgttgctcgcggcttttgccggtattcacctgccgagcgagcggcggcggtcaacatgctgcaagccgccacggggacgggcaaaacactcggctacctggtgccggcattcgcttactctgctattacgggtgagcgtgtgattgtttcgacgtacacgaaggcattgcagcagcagattttgaaaaacgacgcgcctcgggcgcaagcttgggtgcaagatgaactgggcgtcagcgtgagttttgcgcgccgggtcgggcgcgccaactacctttccatgcaagcatgccagtatcagaaagcgcttcttgccgatgctggcgcagccgaagccgccgattttgtggctggtgttatcgcgtggctgcaaggtgatgcgcaacagttgccgacgctcgatgactacttggccgaactgggggagggtgcaagcctgcctgacggcttggatagcaagctgctgtgcctgtcgagtgaatcaccggaagtcgaaaacgaggcttacgcgatcgcgatgcaagagacgcatgccgtcgacgtggcgatcgtcaaccacgcgctagtgatgatggacgccatgctttggactgcactgctcaatcctgggcgccaagctagcgtactgatctgcgacgaggctgaccgcttgactgacgctgccgagtccgtgctgggcgctgacgtgtccatgcaccagttcagccgattgacgcaggaagtggccgaggcattcagcctgccgggcatcactgatcatgtcggcaacctgtacagcgcggtgatggctgtcgatcccggccacgcgaaaatggccacattgccgcaagaggttgaacagcgcatcgctggcgttctgagcgtgctcaagcctcacgtcgagaaactggcttcgatcctcgcttcgccgcaaagcgagctgggcgattctgtacacaagaaggcactgatcgccaacttctgtgacagctacaacagccttgatgccgtacagaaggctgcgcgctcacaaggcaacaccagcatcatcagttggtcgccggtgcgccactacccatcattgcgagtgggccagcctgagccagcgcgcattttgacccgcttgcttgcaaaagcagactggtgggatgaagacgatggccgcgtactgcctgagcgcagctacctgaaaggtgctctgtttacgtctgcgacactggcaacgccggggcgcacattgccggctgctttcgatgccttcgcccacacggtcggcgtcattcgtcactgcaaagcaggtatggacacgccgattcacaacgtcaccgctgatctgtatcgcgtattcgatgcgccagccgacttcggtgaaatgttcttcgtcttgcctgctccagatgcgccgttgccaaccggcgaagtaagcgaagatcaggattatgtttccgtctcaaaccctgaatggctggcgtacaccggggcaatgattcgtgaggcagctagcgcgggcggcaaaacgctggtgctgacgctcagtcatgcggatacgaaaagcctgggcctgattctcgccgacgtgccgggcctgatcgtcgccaagcagggcgactctatgagcacgctgaaacagcgttatgtcgaaaccgaaaacgccgtgatgatatcaccgggcgcttgggaagggcttgacctgccgggtgacgtgcagaacctcgttatcacgcgcctgcccttcggctcccttaatggcttccgcctgagcctgaaagaagcggtgctgcgtcaccgtggctacagcgaagacaagatcaccgccatcaagtttgccgacctcggtgccgaggcgcgccgccgcctcgtacagggcttgggccgtgggattcgtcagcgcgatgaccgcgtagaggtctggattgctgactcgcgctttccgtacccagagtctttttcttcgtcacttgacgatgctttgatggttcggcggcagcgggtgctggccacgtttgccggctgcatcccgcaacgctttgaagacagcttcaacgcggctcgcttgttcttgaccagcggtaaagtccacacaccggagcttgtctga

SEQ ID NO: 349711 - DNA, 681 bp, Pseudomonas aeruginosa
atggcaattgatttcaagctagtaatcaagctcgcaacgccattcgtgatgagccgaccgcgcaccacgctcgacggactgctgtcggctgccgtgtttcgtgaaacggggctcatggggggcgacacaataccccacatcccgcttgagcgtgaggacggcatctttaaagggagttgcgcgtttgtgtcgggtgggtacacccacgccacggtacagcgcattatgaacctgcgcggccttgcagatatgaccgatgagcactttgcgcctaactccaagggcaaggttaaacgttaccttggcgtggacattaagcgcggcccgtacaaagccaacatgagcagttacgccggcattgacgccaagaccgtgattttctttggaaaaggtgatcctgatcgcgtggttgagctgatcaagaacaatattcctggcctcggtcgccgggccaatgctggcgctggcgaaatcatcgacgtgagctgggtgaaggtatcggctgaccgtgattgctcctggatcatgcccagcggctcgccggccaggccgttaccgctcgacgtgtggaaccgcattagcggccaccgcaaaatgccggtcgctgatctgactgtgcgggtgccgtattggtcgggtgaggctgtccaggcggtctacccgatggacacggcggcgtaa

SEQ ID NO: 349712 - DNA, 339 bp, Pseudomonas aeruginosa
atgcagctattcaacccgatccacaaggcagaactgatctctatcgttgaagaggcgtcagcaaaaacagcgaagaacgcgggcgttgtctcagagttggtgttcccgcacatctacttcgttctcagcaagcgcctcagcgtagtagacggagcgccagcggctgtggatcgcaaaaacgaagctctgctggctgctctcgctgaagcccaaaaagcgcttcaagattgcgtgtcggtaatgaacaacgatctgggagggttaaaactgattcagccggagcttgaaggcgcgcgccaagccttggcggcagttgaagcggtgtttattggtcagtaa

SEQ ID NO: 349713 - DNA, 258 bp, Pseudomonas aeruginosa
atggctgacggcttgaaggccctgggcgtgaaggccgagccgaccccggatggcatcgtcatcgagggtggtgcgttcggtggcggcgaagtctgggcgcacggcgaccaccgtatcgccatgtccttcagcgtcgcttcgctgcgcgccagcgggccgatccgcatccacgactgcgccaacgtcgccacctccttccccaacttcctcgccctgtgtgcccagaccggtatccgggtcgccgtggagaacaattga

SEQ ID NO: 349714 - DNA, 1377 bp, Pseudomonas aeruginosa
atgtttgccagcgacctacgtgttgaaaatatacggagggcggatgctacctatgcaaatggagacggtatcctaattcgcggggggtttaccagcgtcaccttgattcgtccaattgtgcgaaatgttgtgcttgcgcctggtgctggaatttcaggaatggttggcgtgtccggtattgccgtatttggaaatagcgacggaattggatatccgcgcacagtcacaattgttgacccatatatagaaaatataagcagcgaagacccatcctatcaggatgatatggacggtatccgtgttttcgggccacacgcagttactccaggtgtaaatgctatagacagcacgtttagtattacgcgcggggtctttaggaactgctatggtcgcagcatcaaatcccaaatgacaaccggccaggttattggtggtaagtttattagaacaactggccctgcgtctggagtaggtaatgaggagatttcattccaacagggtgccggctatgtcgaggacgttgtgtgcctttactacggcggtaacgtgccgagcacggttataaacggcggtgaaggaactgtagagcgcaaaaggccatcccttaaagtaaagggtgtatatgtagctaaccactctagcccagcaattccgcaggttatacagacgttctctccgggggtgagtaccggcctggtatccgttgaggatgttgaggtgcaaggtccagttgaccggctagtagaatatctggtgaacggtgatcttaatgcgctaaaggtcgctaacgtgagcgtagacgggctcaccactgagctgatcagagcaaagagcagtggttcatccactccgcttggcgcaaaggtgtacgcagaaaactgtataaataccggatcattacggccaattctcacccatcgcgtagccggaaatgctgtggttgtagagctaagcgaatacggatgcgtcggatttaccagaaatggatctgctgatacatcactggtgaatccggggagtgttatgcgtccatatgcaatcgcaggcgaagggcagtctgtcggcggcagcatgcgtgttcagtctgtaagcatccccgctggcgctgtaggtcagattcaggggcatggcgtgaataatggtgtctgctttgcgattatatctataaacagaagcgcatcatctcagggggctgtatctatatcagcaactggagttgtagcgctagcggtaggctctgatatctctgttggaaccacgtcagagccagccagcggtctttttagggtatgggctcaagcttctggggcaggaacaattaacataagaaatggagatacatcgaccagagctgttactgtcgtaagttttggttaa

SEQ ID NO: 349715 - DNA, 345 bp, Pseudomonas aeruginosa
  misc_feature (275)..(284): n is a, c, g, or t
atgcatggcatcaagggggtatccatgacgaatacgtcgaccctgacgctcgatggcgtctctttccagctgccggacggcagccttctgttttccgatctcgacgaaaccttcgacacccggcacaccgggctggtgggacgcaacggcgtcggcaagtcgctgctcgcgcgcctgctcgccggacacttgcagccgtccagcggcagcgtccggcgccaggggcgcgtgcgctacctggcgcagcagctcgaaccggccgactacccgaccgnnnnnnnnnntcgccgatctggccggcgtccgcccatggctggaggcgctggcgcggatcgaggcgggtag

SEQ ID NO: 349716 - DNA, 243 bp, Pseudomonas aeruginosa; identical to SEQ ID NO: 345946

SEQ ID NO: 349717 - DNA, 699 bp, Pseudomonas aeruginosa; identical to SEQ ID NO: 345553

SEQ ID NO: 349718 - DNA, 1704 bp, Pseudomonas aeruginosa
atgaacgacacaattcaactcagcggcttggctcgccagctcgtcctgcatgaacttctcgatgaaaaggccgcccaacaggcccaatcgcaggcccagcgcaacaagttgtcgctggtaacctatctggtacagagcaagctagtgaaagggcaggccttgatcgaactggctgcggatcaattcggtatcgcctactgcgacctgaacagccttgagcgggacagtctgcccaaggatctgatcagcgagaagctggtgcgccagcatcgagtagttccgttgtggcgacgtggcaacaagctgttcgtcggcatctccgatccagccaaccaccaggcgattaacgatgtgcagttcagcacaggcctgactactgaagccatcctggtcgaggatgacaagctcggcatcatcatcgagaaactattcgaaaatgccactgacagccttgcaggactggacgacgtggatctggaaggcctggatgtcggttccggtgcgggcgcaagccaggatgatgattccagtgcagagacagacgacgccccggtggtgcgtttcgtcaacaaaatgttgttggatgcgatcagaggcggctcctccgacctgcatttcgagccctatgaaaagatttaccgcgtacgtttccgcaccgatggcatgctccatgaagtagccaagccgccgatccagttggccagccgtatttccgcgcgactcaaggtgatggccggcctggatatctccgaacggcgcaagccgcaggacgggcggatcaagatgcgcgtgtcgaagaccaagtccatcgacttccgcgtcaacaccctgccgaccctgtggggcgagaagatcgtgatgcgtatcctcgattcctccagcgcgcagatgggcatcgacgccctcggctacgaggaagaccagaaggaactctacctggctgcgctcaagcagccgcagggcatgatcctggtcaccgggcccaccggctcgggcaagacggtctccctgtacaccggcctgaacatcctcaacaccaccgacatcaacatctccactgccgaagacccggtggagatcaacttggaaggcatcaaccaggtcaacgtcaatccgcgccagggtatggacttctcccaggcgctgcgcgccttcctgcgccaggacccggacgtgatcatggtcggcgagattcgcgacctggagacggccgagatcgccatcaaggcggcgcagaccgggcatatggtgatgtccaccctgcacaccaacagcgccgccgagaccctgacccgcctgctgaacatgggcgtgccagcgttcaacctggcgacctcggtgaacctgatcatcgcccagcgacttgcgcgaaaactctgctcgcactgcaagaaagagcatgaggtaccgaaggaaacactcctccatgaaggcttccccgaggatcggatcggcaccttcaagctgtattcaccagtaggctgcgaccattgcaagaacggttacaagggccgtgtcggtatttatgaagtggttaaaaacaccccggccctgcagcggattatcatggaggaaggcaactccatcgagatcgccgagcaagcccgcaaagaaggcttcaacgatctgcgcacctcaggcctgctgaaagccatgcaggggatcaccagcctggaggaagtcaaccgcgtgaccaaggactaa

SEQ ID NO: 349719 - DNA, 612 bp, Pseudomonas aeruginosa
atgacccaaccctggatactaggcctcacgggcggtatcggcagcggcaagagcgcagccgccgagcatttcatttccctcggcgtccacctggtggacgccgaccatgctgcccgctgggtggtggagccggggcgtccggccctggcgaagatcgtcgaacacttcggcgacggcatcctcctgcccgatggccagctcgaccgagccgccttgcgcgagcggatcttccaggcgccggaggaacggcgctggctggagcaattgctgcacccgctgatcggcgcggagatcgtccagtacctggccagggccgaatcgccctatgccatcctggtctcgccgctgctggtggagtccggccagcgccagatgacccaccgcgtgctggtggtggataccccggaacatctgcaactacagcgcaccatgcttcgcgacaaggtctccgaggagcaggtgcgctcgatcctccaggcccaggcccggcgcgacgagcgcttgaagcacgccgacgacgtgctggtcaacgacggcgacctgtcccacctgcagcgtgaagtcgaacgactgcacgccttctacctgaccttgcgaggaggccgagcatga

SEQ ID NO: 349720 - DNA, 201 bp, Pseudomonas aeruginosa; identical to SEQ ID NO: 345933

SEQ ID NO: 349721 - DNA, 210 bp, Pseudomonas aeruginosa; identical to SEQ ID NO: 345934

SEQ ID NO: 349722 - DNA, 471 bp, Pseudomonas aeruginosa
gtgaaacgattgcattgggttctgctgggcatgctgctgcccggcctggcgctggccgtggagaagggctccactctggagccctggacgttgcaggaccagttcgaaaaggcgcactcgctggacgactccacccgggtcctgctggtggcgcgggacatggacggctcgaagctggtcaaggcggcgctggcggaacgcccaaagggctacctggaggcgcgccacgcgctgttcctggcggacatcagccgcatgccggcgctgatttcccggcttttcgcggtgccggccatgcgtgactacagttatccggtgctgctcgatcgcgacgcggccatcgcttctcgctatgcctcggacgagggcaaggtcctctgggtcaggctggagcagcgccgcgtgttggaaacccgccagttggattcgccggtggccctgcgcatcgctctggaacaactgcagccgtga

SEQ ID NO: 349723 - DNA, 426 bp, Pseudomonas aeruginosa; identical to SEQ ID NO: 345936

SEQ ID NO: 349724 - DNA, 450 bp, Pseudomonas aeruginosa; identical to SEQ ID NO: 345938

SEQ ID NO: 349725 - DNA, 1308 bp, Pseudomonas aeruginosa; identical to SEQ ID NO: 345940

SEQ ID NO: 349726 - DNA, 1626 bp, Pseudomonas aeruginosa
atgttgtcgtcctgccttgccaatgccgccccggatgcggggcaggcgctgcgtgacgtggaaagccgacgcctgaacctgcccgcgccggtggaactggacgccgagcgccccagccccgaggacggcgtatcacgggctgccgaagagggcggcccgacggtgctgatcaagcgcttccaactcagcggcaacaggcagttcgacgatcgacgcctgctggcgctcctgcacgacctgccgggccaggaactcaatctgagccaattgcacgccgccgccgcccgcatcggcgatttctatcaggaaaagggatatgtgctggcgcgcgccttcctcccggcacaggaaatccaggatggaacggtacgcatcgaagtgctcgagggacgctacggcaggatcgaactgcacaacacgtcccgaacgctggaccgcgttctactccgccccttgagcgcactcgaacgagataccgcggtccagggctcggagctggagcgtgcgcttctgctcctgagcgacattcccggcctccaggccaaaggcaccctgctgccgggccaggcgcagggaaccacggacttgcgcgtcgaggcccgccccggcccgctggtcggcggcaggctggaggcagacaaccatggcggccgctacatgggggaatatcgcctgggaaccaccctcgacttcaacagcccgctgcgactgggcgaccaggcgagactgagcctgctgggcagcgaccggcaccaacgctactaccgtgcagcctatcaactgccccttggttcccgaggcacgcgcatcggactggcccacgccgagacgacctatcgactggtacgcgatttctcgcgcctggatgcccatggccgggccattaccgacagtctgttcgtcagccagcccctgctgcgtagccgtagcttaagcctgtccacccagttgcaatatgaaaacaagcgacttcgcgatgaccaggagcgtaccgggaggcatagccgcaaggagatccgcctgtggaccgccagcatcagcggaaacgcccaggaccgcttgttcggcggtggacagagcggcttctcgctggcctatgcccacggccagctcgccatcgactccgccgaagagcggctgctggaccgctacaccatcggtaccgccggcagcttcgacaagatcatgctcaacgccgtacgcctgcagcacctgggcgaccgcctgcagttgttcgcccaactcaacgcccagtggagcggcggcaacctcgacagcgcggaacagttcgacatgggcggcccctacggcgttcgggcgttccccttgggcagctacaagggctacggcgacgaaggctggcaagccagtgcggagctgcgctacagcctggctccgggctggcagctgagttcgttcgtcgaccagggcgcggtgaaattcctcaagcaccccaacaccacggaaggcaatcgcaaccgcatggccgccgtcggcagcggcgcaacctggtacggaacggatcaccaggtcagcctgaccgccgcctggcccctgagccaggaaaacaacatcgagcccgagcgcactccccggctgtggttgcaagcgacccgctacttctga

SEQ ID NO: 349727 - DNA, 4254 bp, Pseudomonas aeruginosa; identical to SEQ ID NO: 345941

SEQ ID NO: 349728 - DNA, 126 bp, Pseudomonas aeruginosa; identical to SEQ ID NO: 326417

SEQ ID NO: 349729 - DNA, 906 bp, Pseudomonas aeruginosa; identical to SEQ ID NO: 331516

SEQ ID NO: 349730 - DNA, 288 bp, Pseudomonas aeruginosa
gtgagtgagccaatcaaaatcccggcgtacatcgaccagccgccccacgtaatgttttggcgcttggatgaggtcatgccgatcggcatcggcttggttgcaggcgttcttctggcgcaactgattctctgcactgttgtgggtctcttgctcgctcgcttctaccgccgcttttgcgacaaccgccctgacggctatctactccacgccatctactggcactggggagctattagccgcaagagtgtgcgatccatgcccaattcctacgagagggagttcgtctga

SEQ ID NO: 349731 - DNA, 642 bp, Pseudomonas aeruginosa
atgctttttaagtcgcttagcaactcgttcgatggtatgcgcggagaaaaccagtttttgcgcattgcagttgcaggccttgtattgagcaacctgctggtatcttgctctgctctcaacaaggatgaagtggttaccgtgataccgcctaccttgaccgagaccgcctgggtcagcaaaacgcaaagttccggggagtacgccgatgcgtgggctctttacatcgcgatgatgttaggcaacgtcaccccgcataatgcctctgttgtaaaggatgctctggggcctatcctcgataaatcgatctatcaagatacgatgaaggtgctcgatactcagattcatcagatccgccaggatcgtgtgaccctgcgcttcgaaccgcagaaagtgctccgcgacaatctcaacgagaacaaattctatgttaccggccgctccgtgagtgaagggcccgccggcgacaaaaagcgtagcaatcgaacctatgagttcgagcttatgatcaaggactacaagcctgtcttgagctgggttagtacgaattctggcgatgctcgaactcaagacgtggttgatcgcgagaacaacaaggcggagaagaaagcagagcgcgagaagagaaagaatcagcagcactaa

SEQ ID NO: 349732 - DNA, 1038 bp, Pseudomonas aeruginosa
atgtcacttccagttcccctccatttcttcaagctagcggtgctcgtaatggctatggctgccgtaatgccagctattgcccaggagcagatccatgtaccgggtctgaacatgccagttgctgccagtactcagcctcaagtggctgccaagcctactccttctccagagaacgccccggaacgacaggacgagcctcaaaaggaacgcaagccacgcctggttgctgtcactccgggctctgctgaaaaccccagcgtgccggccagcgttgtgaagaagcctcctgttccgcccgtcgagtctcgtcaagatgtggtcgtttcaagcggcacaaacaccctgattccgatcagcaggggccaaatcaaccgcctcgttacgccgttcgacaaccctcatatccagactgtaagtgaggctgaaatctcaacaagcggtaacgtcatctacgtcacaactcaggatgagaagccggtgaccatgtttgtcacccctgaggacgatgagtctgttgccatctccctgacgttgctgccgcagggcgtgcctcccatccaggcgaacctgatcctggcgaaaaacgtacaagggctggcgagtggcatgccaatcacgtcgtcgacgaactacagcggccaggcacggaagtgggagcgatctcagccgtatatggacactcttcgctcccttatgcgcgagatggcgttaggcaagctgccgcgtggatacagctttggtgcgcttactagcggcaacaagatccctgcctgtgcgcagccaagcctcagcttcgatttcagcaagtcgcagttgatcgaaggccatgacttcagagtcttcgtggccaccgccgagaacgtgtcggccagaactgttgagttcgatcacggctcctgtacgcaccctcaccgagctgctgttagcgcatggccagatgaggtgcttgaacctggtcagaagacggaggtgtttatcgtcacgcgggttccgaccgaagtaccacaaagctccactcgtccaagcctgttgcagtaa

SEQ ID NO: 349733 - DNA, 327 bp, Pseudomonas aeruginosa
atggctggcttcatgcagggcgtcgcgagtgctttcaacgtgcagcaggtgccaaccatcaacgtcacccgagctggtgataacaacaacgacactgtaaggccggtgtaccagcaggctatggatagcaacgcacttcagtcggccggctttagtggtgcaggaacggcgcttgaacgaatcgccgacttctacctcgagatggcggagaacattttccctgttattgaaatcgacgcaatgcgtgatgtcgattttattgtcacgaaaggaatgtctgtcaagttcaatgtagcgactctaaaagttaatgatatgaattattga

SEQ ID NO: 349734 - DNA, 7335 bp, Pseudomonas aeruginosa
atgaatcatagaaaatttagtagcagcatgaggttgatacgctcattgggcatgatgttcataactttcatgctcgccagcatagcgaaggcggaattggtacaggtggaatacctatcatccaacggccaacgaacagtatctgcatcgaaagagatattcatcaaccctaaaggtgacttaagcgtctatttaagcgcaggtgtagaccgaaccctgaaagcccggctactgacctcaagtggctctgtagttgcagaaactaagagtggtttgttgggtgcaaatgacaaaattattgttaataacgtttcatactacggtgccgttttaaaactgcccgctcccaagtctggaaattatactcttatagctgagattttgaattctgacggcagtgccgtcctgcaaagcgacagctacaatctccaggtcgacgtaacctccccagttatcggaggggaaatagtacgtactaatggtggctacaactatcccattagcgtgttagcaccgctagcgtggggtgaagacgccggcggcacagttacagtttcagggctagctgatcaaagttcggggatagataaagttgagttcttcgcaatagactcaggcggggtacgaagaacgtttcagagccttgttaatatcgaagcagccagtgcaactgcaaagattactgaaatcacaaacggtagcttaacgccttacgatagacaaatttataccatgggctttcgcgtattcgataaagcaggtaactacaccgacaaaagtttgcccatagctatagaccgaaaggttcctgaatatttgcgtatagaggtatttgacttaaagacaaatagctggattgcatatacgccaaagatgacggtctattcaaatccggtaaagattagatatgtccgcaagaagcttgatcatactagtttcaatggcacactgtttgggtggggggacagtatctacaatagtcaggacgctgaatttttatatttcactaccgatttggagtatccaaaaaattctacaaactattttgtacttcagaacaaagcagggctggcaaccgttcagtactattccaatttcatctttacgttagcccctggggttgaaggcggtcctgtaccaaccggaattacgtatcaaatccaagggagagagtggacgaaaagcgacacaatacgagagtcgaagccatttacagtctcgcttgtaaagatttcaactgaacctagagggtataatcaaatagctggcgtcaatggtgtgacatgtgctattcctgctgggcaaactgaatgcacaatgaatcctaatattaacatctccactggtcgtggatatgttccttatccatatttcgtatctaaggatgaccgcacctttgcaaactatggcgggtatttatatacgtattgggatttcaattcgccaaaggtgtcgggtattgttgttgatttttctaagcgtgaagttgtagcgactgtagtcgatgacgatcgcatgctcaattggcagcattatatgtgggatacacaagagtttagaatgactcttgaggctggcgggaaaaagacaattgtacctcctttttctattattgaccttgactataaaacaaaacaggttcggtttaagcttggaaaaattcaaaatggctattaccgagtaggtgtcgaggcgcaggatacatacggcaatatcggcagcgcattcattagtgataatacgttcatagatagtaatgcacctaccattaacattgcatccaagcccgttattgcaagtcttgatgagatactaatcaccattacagatgatgtggacccggcaccagctatacagaggatagctctcaagggtgggccaacctcaacttcaatagacttggcctggcgtgctgtctcgtctggcaagtatcttctggagtatccgattatttttccttcggagagtgaggctgagacatactccctagaagtcatcgcttcagacaaatatggtaatgtcgcaaaccagagtaagagtttttcttataaaccacgaactgtcggtattattaaacatccggatggtgtggtccgtatcccagccgtgaatcatgtgttcaatcgaaatgacggtactgatgttatcgatagtgctccccttactctaaatgatggctcggttgttgccggaacttatgacttgatagcctcgttgcgaggagattccgtaggtagtttgttggtgtccggtgtacttattgagccaggggcaactgtcgttgttggtaagataaacttttccaacactcagggtagaattagtatccctgttaaatcaggttcggagggtgcatctggagctaacaatctaattctatctacttcggccccgaatgctccaattatttcagccaatattcaaacctggatgccctctccaattgtttcactaacagctggaccaattgtgcagtcgatgactgatgtccttgtaaaaattgaagtcccttcttcttctatttgtaaaattacatcttctgaggtttatgcaagagcatcagatgcattgcttagtcccgcgtgtttcttggagtggttagaagttccgagtggacttaaagttgtcttggatgaaaaaaatggacgttctacatctgttttacagggccgtactttggaacctggtgtgaacagagtcaaatactcgatttcaatatttaatcaaggaaaagagaaggtactccttcaccaagaggaaaaagaatttgtagtccaaccagcaactggctcatcatcgttccaacagtccttgagtgaacggtcggttacacgagctcttgaaaacgtttccttgacgatggcgcagcgctctggcccggcgtgtttgatcactggtgatgaggcagcggcaaagagtgcaggtatgagcggcggtgcattgaggtgcttgattgagttctctgtgagcccgaaagacctcagcattaaagctcttgatcctcttgaattgaccggtgttttcacccgttccgggcagcatccgatccgctggacggctagcgtctacgacaccaccgggaaaaagatcaccctcgaagaggggcaatcggtcattcaggtaatagagccgcctgtaacaacgaaactgacggtcagcgtcaacgaaagctcatcggtggacgcaactcccatagaggacttcccggcagcgtgggagaagaaaacctattcagttctgtcgagcccgtcccagggctctgtagtagcgacccctaccgggttcacctataccccgaacactggatacgttggccccgatgagttcaggtaccgcgtgcaggacgtgtctgggatgaaggctgaagcgactgcggttgtgaatgtcgcgaagttcaactacgcccctacctggacgggagtatccattcaggcccgtgaaggacaagtgagtgaccaggttgagccggaagtgcatgacatcaatctctgggatagccatacgttcaagatactcacgaacccggtgcacgggaccgtccgagtgttccatggccgtatggagtacacccctaatccaggtttctatggcgaagattcgttcactttccgcgccacggatcaggaagggctaagcgtagaaggagaggggactgtcactgttgctcagttcaattttgcaccaacaggtatcaccccttcgactgtgaaaatgtatgcaggaattggtgggactgccgagcttaaggtgatcgacccgaacaactggggctcgcacacgttgcaagtcgtcaaacagccagcacatggccatgtgacggtggagggaatgagcatcacctataagaccgatggccaggctgaaacgtcagtacagattcgtgccattgaccaggagggtctttatgtcgaccaagacgttgtcctgaagcttttgccggcctgggagatgttcaaagaccgcgatgttcagcctacctcggcagccccgagcatcccggccgtgaagcaccaaatgacgacccgtttgggggcctatgcgctccagattcccgaccaggaagtgattcaggctctcggtagcgagatcatcgccatcgtcacgcctgactcgaaagttggggtgacactggagcatcgtgagctttctcaaggcacgggtatgcgtctggtacctacaaaaaggacttccgaactgctggaggcccgcttaggaggcctggatgttggggtccatggcaagtctctggtctatctaagtcgagccgatatgaccggccctgtctattccgttccggtgtctgtatgggctccggagggcgaactgacggctgatacttgggagattctgcaagcgtccggtcgcgctcaaatcagcttcagcccaagcaatggggcatgcagcatcttgaccagcgaagcagtcgcgaggccgaagaatgctcttcaggatcgtgcttgctacgttacttggactaaaacacccgatgaatggcgcaacgccagtaccttagccaacctagtgatggatgccggcggaagttctttgggaacccaaactatcgaggctaccgcctatgtatttgactctagtggtgtgaagtacaaggttgcgagcttcactcgtgacatgaagatccttccggttgctgaccagattcgctttggcctgaagccagcaccggcagaggcctatcagaaggtgcagcaactttccctatcgctccatcaaatggatggccctgtctgtgatgcaacagcgaacgaaggcattgcgaaaaagacagctcagcaatggtcgagccgcccatcgtgccttatccgttggatgcagatgccagaaggtctggcccagcaacgcaacaccgtcacgccagtcgtagaaggagcaatgagcctgcttggagcgaacaacatttcttggaaggcatccatgtttacgccgagcggtcaggaaatcgatattggctacggagagcacaccgtaaacgtggtcgagccgccggcagtcgagatcgatatgccggcaagtagcctggtgaaagagggactgtattcggtctcacaactcggcggctatgttggtagcgcatcagtgactgcaatcgctgcttccctggatgtgacgatcagtcgggcggatgctgtgatcgaacggtccacggttccgagttacggtcgcgcccagcggtttacgcgctacatcgagggggtagaagcgcccctgtggagcgtaacgccgtactcggttgacgttggatacaccgcgttgcctgagatgaggtcgaccaaaactgtttctctcctggcggtcccccacgacaaaattctgcctgtcattctcaacgacgagagaaccgtcttagataccgtcagcctaccaatccgcgtgggtatcaaagacacccgctacatggaggatgcatatcgcctgagcagtatgggcgactgggatattcgtctgctttcgacaactgccggagtgaactatgagccgatgacaaactgggagcccatcgatgaaaacggggaggctgagttcgaggtcgatctgcaatcgctgacgaacaaagcggttcgcatcattgctgaagcgcgtgttcgctcccctgtgccggaatacgagttgattcgggagtcgggctcgccgatggtgctctctgtcctcaacggcgcatctcttgatggttctatccaggcactgcgggttgtcggcccagctcctctacgcagcagcttctacgcagtcactaacgatcgctaccagtcaggagaccttggtggcgtgcgctgggaaatgagcaaagacggtggtgagacatgggaggacgttgagggcaatccgaagctgccgcaacggctcagcatggtctttccgcggggtacatacctgctgagggcagagctgacgaatcgccatagcggcgcaaaatccatgacccctaccgttgaggttgttgcctatgtcgttcccgctgcacgccttaaaggtcctgcaaacgtgtttattggtgatagcggtacgttcacactcactgacctcaaaggtaatgcgctcgatacgaccggaatggttgtggaatggtcggaggatcgcggtaaaacctgggcgtctggggaggcctcttaccggctgagccgtaactccggtgatcgtgtgtatctcacggccaggctgaaatactcagactcaccagaagacaagcgcgtctacaaaaccctccgcgcaggtgttgcgtttcgacctgttcgacctccccgtgtccagatcatcgggccacgccgtcctgaggtaggaaaggaggctacctgggtcgctaatctgatgatgccgtatccgaaaatggatttgacgatggatggtgagttcatcttgcctgacggaacagtcgtcgactcgactgaggtgaagtacacccctactcgggaggacatggagaaagaagagagttacatcagcgtccgatcgtggatcaatggctatgaggatcgaggcggttcagggctaactcagcaccgtcttatcttctggtcgtacgactggcccgaatggaagatcaacaccaaatattcagccaagtacgcgccggcagacttgaccatgactgttcgctctctaggcttgttccgagagttcgagggcttgaccatcgagtgggatatcccaccctacgccggcctcgaaatgatcaaggactccagccagactagtcgtatcgttcgcctgactgagccggggagctacacattcggcgctcatatcaccgactcacggggcaactacagttatgccgaaacagagatggaacttttggagccaattccgtgggatgtgaagctgtcctggagtggggataacgatgcgaatcgtgccccgctgggcgttctgatccgaccatcaatcacaggcggtcacccaaaggatcagatactcagcaaaacgttcagtctcaacggggagacgctgtcaagctcaggggactatgggcgagcgacactagaaaaagagggcgtttatacggcgaaactggatgtcgtcagcgcaatggggcacacagcaacaggtgaggtcgacatctcggtagcaaggaataagccaccggtctgcaagctggagcgcgtgatcggtcgaacctcctggctggcgaaggccgtttgtactgatgaagatggccgcatggccaagaacctttggttcatcaatggtgagcagcaggctctcagctcaaacagcatctctgtgccaatgtggcgttatccagatggcgagccggtaattacgctggtgggtatcgataactccggagcggaatcgcctccagtctccaacaagtga

SEQ ID NO: 349735 - DNA, 345 bp, Pseudomonas aeruginosa
atgcgcgtcaacaaagcaaccctccaaacgatggccatcgcagcggcaatggtggtcgccggtaccgcgctcgcgggtactggcggcgatacgttcgatagcgtctggattaccttgaccgaatggatgcaaggtaccctcggccgcattctgatcggtctgatgatcctcaccggcatcggcgcgggtgttctgcgccaatcgctcatgccgttcgttaccggcgttggcggcggtgttggcctctatgctgcgccggatgttatcgagtcggtaatgtcggcaactatcccagcagcagctgtagccacaaacgctctccaagccctgcctgtgggcttctga

SEQ ID NO: 349736 - DNA, 714 bp, Pseudomonas aeruginosa
atgttcaaaccaaccagaatcatttttgctatggcgctgctggcattgactggcagcgcagtagcagcgagcccagtggacaagaaagcagacaaggttgtgatgcttcctgcgtctgcaatgctggcgatcgagaagaacggcaaattcgccatcatcagcgataccggccgattcatcatccagggaacggtctatgacgtgtgggcgaagaaggaactgaagacgatcgaggatgctcggatcgccgcccactacatcccagtggataagaccaacctcggtttcaaggatctcgcccctctcacaatcggcagtggtgagaaagcaatcactatgttctccgaccctgcgtgtgggttctgtaaagagatcattcaagaagcccgctcatctcttcccgaggggtatcgactcgacgtgctgatgttgccgctgctcagccaacagagcgcggtgcgcaccaaagaactcctctgcgcaaaagacaaggttgctgcgtggaaagctggcgcttccggcgacatgaaaactcctctcgagcagctcccaaccgcgcagtgtgatctggatgtgatctcgaagcgccggatgacagctcagtttcttggcgctcgaaatgtccctttcctcattcgtgatgacggcttgacccgagaaggcaagcctgaagaaggcctgcgcgcctgggttgaatcggatcgcaccctctaa

SEQ ID NO: 349737 - DNA, 2466 bp, Pseudomonas aeruginosa
atgctcaaagcgcttatccgctcaacacctcggctctcgaagctgatcaacggtctcgcctacgagccgaatctttacctgttccagctggaagggaaccgcctaggattcgcatttttgtgttccccactctccggctcaaacggtgatgaaggcgaccgtctgaaggctggcttgacggtcgactggcctgagaagacaacaatccagttcagcctgatctgcactgaaaacatcaatgagatgaagacgggattccttcgtctgcgtcgggctttccgtgagtccggtcgcactgaccttcccgcggaaactcaggcgttgttggagaaggtgacgaacgcacgggccgagtatttcagcgaccgaaccatgcgcccagtcgactcgatctcaggtgtacgcattcgtgaacagagcttggtcgtatccgtcacagttccgatcgctaatgcgttgcctacccagacagaggcgaatgcggcgaaggagctcttcgacggactgcgaacctcgctggatagctgcaatctggcagccgtgccgcttaccaacgattcctaccgggaaatcttctcttcgatcctgaaccaggggccatcggcgtcgtggcgtgaagatccggacatgagggcggagacagacaagcctctgaatgagcagatcctcgactacaaccgcagtctcgacgtgaagaaagaccaccttcagatcggagatgactgcttcgtaaaaacgctgtcgcccaagcgcttccctgatgtcatgtggcagggtgatgcctcgcagtacctcgcagacattctgtcccagcgcggcggaatccggggtaactgcatcatcaacatgaccctctatttccctcctcagctggaaacaaaggacaagctgtcgaagcgccgccaatgggccattaaccagagcttcggcccgatggtgcatttcgtacccgttctacggaagacgaaggaagcttatgacacgttgtttgaagagctcgataaagggcttcccaacgtacaggcgacaatgaccctcgttgtattcggcaggaatagggaagacctcattcaggctgcgtcgaatgcgaagagccattttgcgacgcagggcttcagcctcatggaggacaagttctgtgtgctgccagtgttcgtgaacgccttgcctatgtgtgctgatcccgatgcgatgagggagctgttccggttcaagacattgagcctcacccaggcattgcctttgctgccgatctacggcgattggaagggcacgggaacccaggtggcccctttcatttcccgaaacggtcagccggtaagcttcaacctttttgactcggacaccaattacaacgcgatgatcgcggcccagtcgggttccggaaagtcgtttgcgactaactatctcatcacgtcatatctgagcattggagcaaaggtatgggtcatcgacgtaggcctgtcatatctgaagctgtctgaggcgtacaagggcgactttgcacgctttgaccaggagtcgaatctctgtctcaaccctttcgagctgattgaagactacagtgaggaagaggatgtcctggttgggctgctctctgctatggctgccccaacagtgcccctgatcgacttccagaccgctgggctaaagagacacctcacacagtgctgggaggagctggggaaagcgatgatcgtcgacaacatcgctgattctctacttaaggacccagatgcgcgtattcaggacattggccaccagctcttcgcattcacctccaaagggcagtacggccgtttctttaacggtaagaacaacctcaacttcaaaaatcccttcaccgtacttgagcttgaggaactgaagggccgccagcaccttcagcaagttgtgctccttcagctgatctaccaaatccagcaggacatgtaccttggtgagcgtgaccgcccgaaaattgtgatcattgatgaagcctggtcgctgctttcccagggcaacgttggtgagttcattgaacacggctaccgtcgattccggaaatatggaggtagtgccattgtcattacccagggcgtcaatgacctctatcagaacaaggttggacaggccattgctgaaaactccgctttcacccttctgctcggacaaaaggccgaggctattgatgctatccaggaaaacaagcgcctgccgctaggagagggtgggtaccgcatcctgaagactgttaagtcgtacaaggggcattactccgagatattcatgcttaccccccgcggtgccggtatcgtgcgcctcacagtggacccatactcgatcctcctttactcgaccgcacctgaggatgtgcaagcgatccgaaactacacgctcgccggcgttccgcaggatgaggcgattctgcgcgtgctcagtgacagaggtatcgagtacagctcaaatccggcggaagtggcgtaa

SEQ ID NO: 349738 - DNA, 573 bp, Pseudomonas aeruginosa
atggcgctgtggaatcccttcagcattgaggccaaggtgcgaagggcaatggcgaaggctgagcgagatcgagtttcaaagcgactctcagcagcctttctcgttaaaggcctgctcttttcggcattggttgccggcagtgttgtgctgctggcatcccgttattcgatcgctatcgctagccaggactctctgtgcctgcccccctacaggttatggatcatcgataagacacaggaagacctggtgcgaggggaaatatatgcctttcactccaaaggcctgagtccgatttttcctgacggcacgatcatcgtgaaagtgctggaggggatgcctggtgatcacgccaaggtgacgctcgatgaaacaaccattaatggcgtgtccgtagccaaagggctccaggtggccagccagcatggcattgatccccagaagtacattcgggaaggggtaataggcgagggccgttactggttcttcgggcgcacggcagactcgttcgactcccgctactggggctcagcggcgacagaccaaatcatcgggaaggcgtatccaatatggtga

SEQ ID NO: 349739 - DNA, 1242 bp, Pseudomonas aeruginosa
atggtgaagaagcaactggccatgtgcattggactggccttcggctgcacgatggccatcgccggcgatgaccttggcattcgcaagtacgacatcaaagagtttgatcctgccctcctcgagcaggtcatggaaatcagccgaaatgcgaaagccgcacgcgatgaggtaagcggccgtgatgacatgagttgggtcagcgagatggccaaaaaggccaccgttcaaggcagtgatgaagaggtccagcagaacgaatcggggctcgccagcgcagatggctccgatggcgagaagaaacatcccctgggcgatggaaaccgcactctaattttcgtgtcgtggtcaatgggtgcgaccgccctcaaagacatactgctgtcctttgacggtcagcctggtgtcggcatcgtttttcgaggcatccctgatggtatgtcgatgggcgatgcggtggccaaaatgcatctcctcactcaagagacgcaaagcactgtcagtgttctgctcgatcctctcgcattccagcgtcatagcgtttcagccgtccccaccgttgctcttgaagctccgaatgatgctttgatcgctaaggctactgggtcgtcctctgtcagctacatcaagggggcggttaaggatggtaagcgtggggatctaggcaccattggttccacacaggaaatcatcgagccagacctcatggaggttgcgaagcagcgcatcgcagagctggacaccgacgcgatgaagaagcgagcaatcgctcggttttgggataaccacaaagggcacccattgccgccggtaacggtgagtgcgacacgcctcgtggacgcatctgtcatcattcccaatgacattctcgacagccaaggaaacgttgttcagaaggcggggagggtcaatccactcgacgtcatgccgtttgaccagaaactggtcgtgattgacccgacgcagccttggcaggttgccctggcaaagcgtgaatatgcagaccatggggcgaatctgaccgtcactgtaatggcgactcagattcccactgcctctggttgggaccttttcaacagtgtgcaggacagcctggatgcgcccctttacctgttgcctcctgacatggctgagcgcttccaaatctttcgagccccatctgtcgtaacagccgacaccagaaactttatcgtccgcgaggttgctcaaacagcattcgaggaggccgctcatgagggtcaataa

SEQ ID NO: 349740 - DNA, 1053 bp, Pseudomonas aeruginosa
atgagggtcaataagctagtagccaccgcaattctggtgattgcaggtatgtcctccctgccagggatagctgctgatacctcatcctccggagaggttatgtgcgaggactccggcctttttggaccgaagttgttcaccgacatctgctgggcgtgcctcttcccaattcgcatttctggtgtgcaaatcaccccaggcacagcccctgcgaaggctacaaaaaaggtcttttgcatctgccaggaaggctcgtcctcgatctacaagcccggaatcatcactgcaatgtgggagccggcacggatggttgagactgttcgcaagccaggctgctcgccaaccctaggtggtgtaacactgcccctcggaaacaagcgcagctatggccggcttcggcaggacaacagtacccagacaggccaggctgccggctcgttctaccacgcgcatctatatgcattcccgctacttcaaattctcgatctctacacgcctaccaaatgcaacccggacggctatctcgacctcgacatcatttctttcactgaaatcgatccgacttggaacaacgggacattggctttcttccagcaccctgagtccgcggctgtagcgaacccaatcgccattgcggcctgtgctgctgagtccgccctggtgaccgcccggaaggagcctctggaatcgctttggtggtgtaccgggacgtgggggagtatctatccacttgccggcgtgacagtggcgcaagatgccaaccggactacagcattgctggctgcacgagtgatcgctcagcagcaccgcagaggcctcgcccggcgcacgatgggggatgagaacgtgtgtaaagcgggcatctacccgacgattccgaaaagccagtatcgagtaacccagttctggccaaagtcacagaacagccgagcaatgtggctcggagagcccccacagacttgggaaggtgggcctggccggcatgttcctggtactgggaatgatgccatgtacatgttctggcgatggactgactgctgctcgaagctctag

SEQ ID NO: 349741 - DNA, 591 bp, Pseudomonas aeruginosa
atgctccgcctatgccttagtggcgaatacaaggtgttcgccaacgcgatctatcgtggcaagacaagggaagagtcgacacaggttgaccacatcatcgtgtcgcgctacgggatatttgtcctggaaacgaagtgtttcaaggggaagatcattacctacccggaagcacctgaaagctggttgcagatcgttggtcgcaggaaatatcgcatccaaaacccgcttatgcagaattacgcccacgtgaaggcagttcagaaggtcaccggggtccattcccaaaaaatccacagctacgcagtgatggcggggcaggccagcttcacctatggaatgcctgagcgtgtttatggcatctggggcgtgattcgtaaaattcagtcctacaaggccccggttttcacacggggccatgtggtgtcaatttgccgggcgctgagcgagcgtagaatcaagggggggtattgggcggcaagacggcatgtcgaaaagctgaagcgccgaggcgaggatggatctacaacgtgcggtgaagatagatcccaagaggaacccctatcgcccccccaacaagaacagcagtcgtga

SEQ ID NO: 349742 - DNA, 687 bp, Pseudomonas aeruginosa
atggcgaccgctcaaccacaaccgacgaaataccaatactccaagccatctctcaaaggaaagatgatactgaacacggagcaggctaagttcttcgccggcaaccgtttcgatagcctcatgacggctcttttcatcatcgacgtaacctcccgcaagctggcgaagaacctcaagacgtttgaccacaaagccgtggttgacgcggtctcaaagaagatcgagcgcatggaagtagccgtccgtgacgagtccgatcggatggacgcgcttttaaagagtttgggaatcaaagagcttgctggatacagctctccactcactcgtgagttcgaaatcaccagcccagaaatcaagcggatgagcaatctgctccaagcatttgaccatctgattaccaaggtcgataccgcatggctgcacgaaagaatcgacagctcggaagctgaagaatttcgcgcaacgaagagcaatcagatggctcggctgatccgctcattggtaggcctaggccagagtgctcgcgcaaaggcatatgccagcaaggttgcagagcttcaggaagatatcgaaaaagcagaagccaaagcgaacgtcgagaaggaggagcgcgaggccgcaggtcacattgagcctgatggcaatgcggaccctctcgatacgcttcctgaagaagctgttgcttga

SEQ ID NO: 349743 - DNA, 318 bp, Pseudomonas aeruginosa
atggcatctacaaccctcaaagttaaagtgctgaccgcgtttggcttcctcgctgtgatgttgggagctgtatatgcaccgcagtttgctaagcagattttaccctttgcattctgtgtgttcctcgcagtggtacttctgaacgctgagcagatcgttctcggcgtttctcggtatctgcgcagatgcctgaaggcctcgtacccccaggcaactaagacccctcaagttgcagctagcgccagttggtgtgacagcatcgattatgacaactactacattccttcctacctgcgtcgtcagggagaagagcaatga

SEQ ID NO: 349744 - DNA, 624 bp, Pseudomonas aeruginosa
atgatccgtgttgacttcgatgttccgagctacctccgactgcaacaagggctctgcattgtctctgaccgcctcgcgcataagctgccgctcgagccggagcatcagaagacgacgcagactctcgagactcttgtgatcaacaagctatatcggccgcaagatcgcaatcaggttgcacctatcgagagtcaagaatcggacgagatcaagggagagttcatcccccgcgactcacaacccgagtaccaagaaacagcgtcaatagtcgaaaccgccgaaggcggtgatgaccatggcgcgcgtgctactgagatcaattttcagggtgtggctggcaagtccgtgatcggtgaataccgcgggtctggatttgcgccgtatcggttccgcaaaaagaacggaaagtcgttctttcttcggatcggtgagcacctggtttgggggattgagcttagcgctcagctccgccagtccggcgcgcaacaaggtgacgttatctccctgacctttcttgggaaaacccccgtgaaagtactcaaagatatcaacgtgaacggcaagaaagaacaggactgggtagaggtctaccgcaactcctgggaaatcaagaccgtgaaatag

SEQ ID NO: 349745 - DNA, 1116 bp, Pseudomonas aeruginosa
atgtccaaagactcagaaggcaattacgccccagagaagcaagatgtgttggtagccgctgatggccgctggcatgacatttacgcaagccttgcacctgcattggtgccggcacacaaaaaagcagggcgtggggttccatgtccggtgcatggtggggaagacgggtttaagattttccgtaagacggctggatcgtcgagcggtgggatctgccgtacctgcggcgtcaaggctgatggcatagccttgctaatgtgggtcaaccattggagttttcaccatgctttgcaggaggttggtgcattgctccgggtcaaagacccttacgggcgcaccgctgatggctttgtcccaagcgttgtaatccgtaaggagcgaactccggccaagccagaggcttcagacgattggttgcgtgaagctatgcgcaacctgtggaaggggactgttcctctcacagatccatcagctgaaccagcaaggctctatcttcgctcccgaggcattcttgcttgggatcgaccagagctgagccgctacgttcgctttcatccggaattgacctataaggacaaggccggcaagcgttctaagcatccaggcatagtgtgtgcgctcatcgatcctgaaggccaggccgtgaccatcaaccgtcactacctgaccatgaagggtgagaaggccgatctcgctgagccgaaaaaaatgtttccaatccccagcaaccgcaagcttcccggttgtgcggtacctacatcgcatccaggagaaatcttggatgtgtgtgaaggattggaaacagctctgtcagtggaaacggcaatgggtcttccagtatggcccttggtgaattcctacctgttggagagctttgtaccaccagcctgcaccaaagcagtccgaatttgggctgacaaggaccgcaaggagggcggccaaaaagcggcatccgccttaaaaaaacgtctgtgggaaatggggatcaaggcgcaaataatgttgccggacatgcccatccctgacggctccaaaggtgtcgattggaatgacgttcttcgtgaacgaggttctctcggcttcctcggccacgaggtctatcgcgcacagcgatag

SEQ ID NO: 349746 - DNA, 1449 bp, Pseudomonas aeruginosa
atgggtcatgggtctttgcggatgtatacgaggcaaacccatgactcaggaaaccgtcggcttcgccgcgctcggtattcaccccaatgtgctcgcggcaatcgtcgccgtaggctacgaagagccttcgcctatccaggctcaatcgattccgctgatcctcgaaggccacgacatgatcggccaggcgcagaccggtaccggcaagaccgccgcgttcgccctgccgctgctgtcgcgcatcgacccgagccgccgcgagccgcagatgctggtgctggtgccgacccgcgagctggccctgcaggtcgccaccgcctgcgaaacctattccaagcaattgccgggcgtcggcgtggtcgccgtctacggcggcgcgcccatggggccgcagctgaaggccctgcgccagggcgcacagatcctcgtcgctacccccggccgcctgtgcgaccacctgcgccgcgacgagaagctgctggccaccgtccagcgcctggtgctcgacgaagccgacgagatgctcaagctcggcttcatggacgacctggaagtgatcttcgaggcgcttcccgaatcgcgccagaccgtgctcttctcggcgaccctgccggcgtccatccgtggcatcgccgagcgccacctgaagcagcccaagcacgtcaagatcgccgccaagacccagaccgtggcgcgcatcgagcaggtccacctgatggtccatgccgaccagaaggccggttcgatccagcgcctgctggaagtcgagcagttcgacgcgctgatcgccttcgtccgcaccaagcaggccaccctcgactacgccgaattgctcgagcgccagggctaccgcgccgccgcgctcaacggcgacatgccgcaggcccagcgcgagcgggtcatcgagtcgctgaaggacggttcgctggacatcgtcatcgccaccgacgttgccgcccggggcctggacgtaccgcgcatcacccacgtgctgaacatcgacatgccctacgaccccgagtcctacgtgcaccgcatcggccgtaccggccgtgccggccgggaagggcgcgcgctgttgctggtgactccgcgcgagcggcgcatgctgcaggtgatcgagcgggtcaccgggcagaaggtcggcgaagtccgcctgccggatgccgagaccgtgctggaggcccgcctggcgcgcctggccgcgagcctgacgcccttgctcgacagcgccgtcgagcagcgcggcgcggtgcgcgacgagctgtgccgtcgcctcggctgcgatgccgagaccctggccgccgcattgctggcacgcctgaccgtcggcaaggcgctggacctggagtcggtgcgccgcgaacagccgctgaccccatcggcaccgcgcgagcgtgccgaccgtggcgaacgcggcgagcgcggcgagcaccgccgcctgggtga

SEQ ID NO: 349747 - DNA, 603 bp, Pseudomonas aeruginosa
atggtggcgattatgaagaagcttcccgaactcatcctcgaacgcagccgtgccttgccggaaggtggcgtgcttgcaccgaaagaattcctgggcgtgggttcacgtgctgccatcgaccaagcgttctctcgtttggccaaggctgggaagctattgcgcatctgccgcggtacgtatgtagtgcctgtgaaaagtcgattcggcacccgcgcgccgtctgcggagaaaatcgtccaggctctcgccgagaagaacaatgaaactgtgacctcgactggtgccagagcggcgaacgccctcggtctaacgcagcaggtgcccgttcgtgagatgttcctcacgagtggccggcctcggaccctgaagcttggcaaaaccgagattcaggtgaagcatgcgcctcgttggatgctcgggggggccgccgccggcgaagcagttcgtgctcttgcctggttgggtgagagtcacgcctactcggcaatcaagcaactgcacaacaagctgcctgcctccgaatgggccatgctgctcgcgcgtcgctctaccctgccctcatggatggccacgctccttggcaaggaggctttgaatgcctga

SEQ ID NO: 349748 - DNA, 1014 bp, Pseudomonas aeruginosa
atgcctgatttcttcgaactcagtgcaggtgaccaaggagatgtgttggaaacagctgcgcagacgcttggccggccggcctatgtcctggagaaagacatctacgtcgtgtgggttctggggaggattttttctgccccaattggtgatcacatcaccttcaaaggcggcacttccttgtcgaaggtctatcgcctgatcgatcgcttctcagaggatctggacctgacgtacgacgtacgccaaatgcttcagagagcggagtccgaaattccggaaagcagctctcaggcccgccgctggacagaggaagtacgcaagcaattaccaatttggatcgagcaggttgtcgctcccctgcttgaggaagcgatcgccgctgccggcatcaaattggatctgcaacaggaaggtgacaagctttacctccactaccctccccgcacgccggcgagctcatacatccaaccacgagtcctgctagagttcggggccaggtccacaggggaaccacattcgaggcaccccgtaacttgcgatctggtccaggcggggctagagggtgtcagcttccccgaagcgaaccccgttgtgatggatgttgcccgcaccttctgggagaaggctacggcagcccatgtgtactgcatgcaagagcatctcaagtctgagcggtttgcccggcactggcacgacttggtctcgatcgccaacaacccggagttcgccgccgtagtgtcccagcgtgacatcgcaaggaacgtcgctgagcacaagtcgtggttctttagggagaaagcagcagatagctctgttgtgaattaccaccaggctgtagcaggaaatctgctgctcgtacctaccggccgcgccctttcaaacctggaagaggactacctcagcatgatagctggcggcatgttcgagacgacgcccccctctttcaccgatctgatatcagcatgcaccgaactagaaaagcgcctgaacgcagctgctgacaacaaaagctag

SEQ ID NO: 349749 - DNA, 963 bp, Pseudomonas aeruginosa
atgactgaagcaattgtctccgcttacgagcgcttggtcgaaaccgtcggtgctttcaacgagaagtggcccgcattggttgtcggcgggatgatatggcgcatcccgctgcttactgaacagaggacaccatcgcaaatcaacgtccagctactgacaggaactgatgcgatcaaggccgctgtagcggcgctacacgaatttgagcgcgatctcgatcaagctccaggtactgtgctgcgtttgccggggttctttatcctctccggatcgatactcgaagagggtagggcggtgaatcgctgcaagagcgagctggtggaagcgatcgaggctgagcgagtgtttcgcaacgttgccgtcagccgtcgctctcacatcatgcgccaggccctggggaaaaatttctctctaaaccagctaaagcgaggcatccaagttttcgatgcggccccaagacagatcacattcacctgggccggtcacacctcaggtaaagagcgtgtcactgtcggccacgtccgtgaggcgctgttggccgaggcccatgaaagatctatggccaccggcgagccggtgatgagtagcccccagtggatcgatctgcgcagtattgcaaacatggctgaaactgatgtgttggatgtgccaaaacccatcgctccgcatccgcgggccatgctttggttttccgatagcagtcgctacgacgctatgctgcacgcaaatctcccgtttttcgtgctgcgcgggaacagcccacccaaggtcgttggcctcaaggactttgaccgcacagcgcgaacggccaaacgaccggacactaaatcgagagagccggcgctacctggaggccgttttttcgtcgcggaagattcgtcgtcgtcgacaggcgctcccgcggccggctccatcgcgggcgtagaatctacctacgccgaatcgctgagccgcaaagtttag

SEQ ID NO: 349750 - DNA, 1503 bp, Pseudomonas aeruginosa
atgaacttcacccacgagcaggggccggcgattaattcgttggcccgtatcgtcaagttggtggcttttgctgggactggtaagaccaccacgcttgttggctatgccaaggctcggcctcaatgccgtttgctctacctctgctacaacaaaagcgtcgagattgctgccaagcaaaaatttccgccgaacgtgacgtgtaaaacagcccatggcttggcttatgccgcgatcggatcgaagtacaggcacaagctcacaggcaacctgcgcctgactgacatcgcaagaattatcggctcacagaactgggaattggtgcgcagcgtacaagagacgctgaacaactatttggccagcgcggatgaagacatcgagctatctcactgtcccgtcaacaagctcaaaacggagcgaatgaaacgcgccgccggcagcatcgtagaaggagccaagcagctttggttgcaaatgtgcgatatccaaaacgaggccgcgaacattactcacgatggctatctaaagctttgggccctctcgaaaccaaatctgcgtgatcgttacgatatcgctctcggagatgaggcgcaggatatcaacccggtgattgctggcgtgcttgcgcagcaggctgcgtatggaatgggggtagtcgtctgtggtgatggtcaccagatgctataccgtttcaggggggcagtagatgctctaaatgcagcctggctcgacaaagcggaagtccactacctcactcaatcgtttcggttcgggcctgctgttgcgcatgtcgccaacatggttctcgcgttcaagggagaatctcgccagctggctgggcttggcggtgagactcgtgtttctaaagcactacctggcgaccttgagcatcggaccgtactttgcagaacggtggttggagtgatcgagacggcgctggccaacgtagagacaggtgcaaagatctactgggttggagggatcgagggttacaacctccaggatcttgaagacctacatgcgctatcgaaggggtggcgcgaccgagtgaaggggaaaaagctcctccaggaatatcctgattacgctctctacaagcagattgccgatgaaagccaagaccctgagatgaaccgctcgatcaagataatagagcagtacagcgcggatctcccggagttgtttgccaagctgcggcgcaatgcggtaaccgacgaacttgaagccaccatcaccctcagcaccgcgcatcgttcgaagggcttggagtgggatgcggtgcaactggctgaggatttcaccttcgatccattcaatccagagaacgaggaagaaccgtggattgatgagatgaacctcctctacgtcgcttgtacccgcgccatgcgagttcttgctgtcaactcgacgatgttggagatcatgaaagagttcgtcgaccggcgtgacggccgaaagccaaatacaccgatggttttcaggaagaaacaggtggctgccgcgtag

SEQ ID NO: 349751 - DNA, 867 bp, Pseudomonas aeruginosa
atgtccaatctacccaaacctaccaagcctgaaccgaagccgctccgggtcacgaaatccaatacgctgattaccgcgtcgtaccggctgactcttaacgagcagcggttgatcctcgctgcgattagcaagctcgatccaagaaggcccatgcctaagaaggtgtcagtatcggccgcggactattcggacatctacggcgtccagctcagacatgcctatgagcaaatgaaggtggccgctgatgagctgtacgagcgcgacatcaagacctttgatggaactgggatggagcggaagcgctgggttgatcgggccaagtatctggatggtgaaggtcgcgttgagttgtcgttcaccattcatgtcatgccctatctcacgatgctgtacagcaaagtgaccagctatgatctacgacgggtagcctgcctggactcgagccattcgttccgcctgttcgagatgctgatgcagtttcggaagacaggatgggcctacatcgaggttgaagccttgcgggtcgctcttggcttgtcggatgcctatcaacgattcaataacctccgtcagagagtcattgacccggcagttgaggagctgaagaccaagagcaacctagacgtcagctacgagttgaggagggaagggcggaaggtgatcgcaatcaaattcaccttctgtgacctcgcacagctccctcttaatctggaacttgaccctgaggatcttcccccgcttcctgagtatgaccctgctgaggaaagcgaatggctggttactaagccgttaggtgagttggctgaagctcaagaagccggacttctgttcgctgtttcggcagaggatgaagagcaacccgattag

SEQ ID NO: 349752 - DNA, 480 bp, Pseudomonas aeruginosa
atgaatactgctgctttcgcgagcgtcgcagcttatctgctcgccatggctgttacagcaccggagccggtaggccttactgtaggcgttacgacgatcgtagacgttcagcagcactacaccatcattgacaggatcggcacctcctacaccggaggcccggtactgaacctttcagagtgggagatcaacatcgatggtgtcactgacattcagttggccttcaatgctgaagggatactggacgtcgcgacagtgaaagctgacaagcttcacttggacgaggtcttgaatggcttgagcaaccagctgcaaatcagcgctgaccaatccagccttggctttgagaatgtgactttcatgtctggcaccatagaagtggttgtagagtcgcatcccctggatcctcaattcaccgtcaactacatcagcgccggcttcaagcacgcacgaatccaagctcagagacagtacgcctag

SEQ ID NO: 349753 - DNA, 1134 bp, Pseudomonas aeruginosa
atgcagcagtcaagcgagcaatttgaagaagatacggtcaactacactgacttcgacaccctcctctaccctccccagttcgcggccgactgcttcggccttacaacccgtcgcctcaaagatattgaagacgaaaacggaatcgagattaggcgagttccgcgaggaaccgtcacctcgagggcttatacgcttcgtgatatttttgacatcgcagcgctccggcgagcgaaaggctacgcaaagggactcccgcggcaaattgttatctcaactttcgtgcagaaaggcgggactggaaagaccacaacctcagtcaattttgctgtattccttcagcttgcaggtttgagggtgctttgcgtcgacaatgatcctcagggcgactcgtccagcgtgtttggttacgacccagacctcgcactatcagatctcgaagcaatgggaataccagctgatcgttacgtcgctggccactttggtagcctcttgagtcccgatctccgggttagatgttttgatccgctgactttcgaggaagtcgtcaaaaagccattcggtgaaaacggtccacacctgatcccagctgatgcgtacctggaggacctagcagtcgcactcgacgccgagaacaatatggacttctggtatgcagggtggcttgaaagagcgcgtagcggagaagtcccaggtgtcgatatctcctcttatgatgtgattcttttcgacaatgcgcctaccgcctccaggctcaccaaaaactctattgtcgccagtgactttgtgctctgccccgtgcggatggacaagttttcctttagagcactgatgcgtctaaacgagtggatggtccgctttgcgaaagcgtatcgccgctcaccagcgattctcgccattcctacgatgttcatccggaatcgcaagcgcatcctccacaacctagttgtactgaacgaccttttccctggtcgggtatcggaagagaagctctattactctgaggattatgggaaagctcttgatcaagggattccactgttggtgtggaagggagcttcggccaagaccatcgactctatgcgcagtgttttcggggaggcgttgaagcgaatacgcgagctggccgctcagtag

SEQ ID NO: 349754 - DNA, 1017 bp, Pseudomonas aeruginosa
atggccaagtcggaggatttcccaggtcaaaaaaagacccagcctcttcgggtcactggtgttcgcccaccagctgagattgctgagccgaatctcaaagtttccgttgcagaaatgctcgccgcacaacgagcacaacaggagggtagcgctccaagttcaaccatggccatcgctccagcacctggccataacgatgagccactccccgcgagcgacacaggcgtcctggctgaaataaaggttgattcaattcgggtttctccctttcaacctcgtttgaccttcagcgaagcagcgattgaggatctggcgaactcaatcgcgtccgttgggctggtgaagccgttgacggttcgcccgattggagaaggagtttatgaactgattggaggcgagcgccgctggcgtgctcaccaattgctgggtagggaaactgttaccgtctatattcgctccgttacggacgcaatggcgaaaatactggcgttgactgacaatgaaggccaggaagcgctgaccgagtatgaacgcggtcgctcttatgccgcgatcatgcgagcaggtgaagaaagttcgattcgtgctcttgcgcgcagagtaggggtaaaccactcgatagttagcagatgccttcttctgatggaactcccggaggaggtacgagagatactggacaagagtcccgggcttatcggtggtaaatgggcgaaagacttcattgagttcagtcgtacagagccgaagttgcttctgcaagcggtgacttctatgcgcgatcatcaatggacgcaggagtatgctctgcggtggttggcgaaggaggttgcagcgcgcgatcagcggaaaacaccgagcaagttcaccgacaaggaaatcagcgggattgggagagttcgtgttgatgggaaaaaggtcgagcttcgatgcgagaaaaatgtcgacgcaaagcgcttagcggaacagttttcggactttttgaagacgatagaccgctcactgatatcaaaggaatga

SEQ ID NO: 349755 - DNA, 465 bp, Pseudomonas aeruginosa
atgttcggcttatcgttcctggataaaacatggaacgagaagctgctaatgcaaagctatgatttggagtttcacgattacgcgcagttattcccgctgatcgttggtgacgactacgaagcgctgctggaagacatcgataccaacgggcaacttgccccgatagttctccatgagggcaagatccttgatggacgtaaccgatatcgcgtttgtcaggatctgctgatagaaccccaaacagtcgaatacacaggagatgatgccctaggctatgtcctatctctgaacctctatcgacggcagctcaccgtggcacagcgagctttgatcgctgccgaactgtcctcgctccgcgggagtagcgccatcgctgttgacgtggataaggcagccggccaggagttggaagccgcaaagatggctattgaggaggcagccaaagtcctgggttgttgccgctga

SEQ ID NO: 349756 - DNA, 453 bp, Pseudomonas aeruginosa
atgcttgttgctgaagtcctgcgcgaccaggggtattcagcctaccgtgcgcgcttacaaacattgttggaaatacctgagtctgccagcgacttcgaaattcataccagaatcagtcacggcttttccgcagcacgattgatgaggctcaccgaggagggagtggtctctccgggagagcgagaccagattatcccgctgcgcaccctgaaaaaccggatcgagcgcgatcagcccctcaccgtagaggaaagcgaccgtctcttccgatcggcgcacatcatggcgatggctgaggccatctttgatgacgccggcaaggccaagcgatggctcgccaagccgaaggaacgtttctctggcttgacgcctatgcaactgctcacgactcagcaaggcacctgccaggttgaagagatgctgctgcaaatcgccgaaggctttgccctgtga

SEQ ID NO: 349757 - DNA, 1839 bp, Pseudomonas aeruginosa
atgtcactccagctccctatttttgttaaagtcccgttctgtcatgggcagcatcgctttaaaatattcaaaggccagcgctggggagttgtcgatcacctcctacttcaagaagttgttaaggccccacgctctgcaatacagctatctgagtcctctggattaccgcgcaggttaataattgagatcatgatcccctttatgcgggttggctggatacagatatctcagcaagacaaatcttatatctttcaagccacgccccgcgggatggctgtcgcctccagtgaagaattacctattgataaagagccaatgctctcttttcgtcagttcattatcgatccaattacgggaagttgctatcgggttgggggaaggcagcaaaattttcaaatttacggttggcgaaggacggaagagttagttcgtgaaaagaaagagcggttgatcgaattggccttttcgaagcctcattcaaatccagagctttccgatattttcgaatgtgtgacggaaaccgacgaagatgtggttggctacgaagagtacgcctttcagaagccatatagtcagacagtgaaatatgtaattgcagcagttgacgaggaaaataatgtttctggcatcccgcccgaaatatccacgattttgcgcgaacagatactgaaagcggcggatgtaaaacgcgaacaaatccagcttttgaaagacgtaaagccatctctcaatacattgaaatacgatttcaaggttctagccaagacctatcctgcccacttattagtggctggcgactatgaactggtgctcggagccaactcccatgcagcccacctaattaacgcaatcaacagtgcgcactcgcgactaataatacactcgacctttataaatccaactaatttcagaagggttttcgatgcccttatttcggctgctagacgttcagtgcaaatagatattttgtggggccaggtagagccagagctagcaggcgcaaagaaggcttatcaagatacgatttcagcacttcacgacataaatgacgaaattagaaggctcggcttggcagaggtttttgtaattcacactgacccaacaggctcccatgcaaaaataatcattcaagacgatgcttctggctcattctgcgcaacgataggctcctgcaactggctcgccagcgggtttaaccgatttgaagcgtcagtattggtgcatcaagtaaacattgttcaagagctcatgggcatagtaagccagttagccaaaggacttaccaaaatctctaacagtctaagtcgtgaacttgcgattctgtcgaattatcttaggaggcaagctagtacttcatctattcctacagatattcaccagtctcaagtccagattgtcctaaagggagagcaccatgcattcttaagaaaggcaagggacgaagcaagagatgacatattcgtttgcagccatagaattagtcacgtttcagatcgtccaatattttcgccgctcaaggcatctgtcggtgaaacaaaagacattcaggcaaaagtcttctacggtgcggccagtggaggcatgcgccgagaggaagtaactaagcttgcagagaacattgagccctttggaatttctttggaaaaagttgatcacccaacaattcatgcaaagatattggcttgggactgcagtgatgtcgtcatcactagtctcaattggctatcggcctctgctaccggggacgactacgatgaaattgggatctacctgaagagcgagaatatcgccaaaataataaccagcgaattttataaagatctcaagaaggaagtttaa

SEQ ID NO: 349758 - DNA, 3636 bp, Pseudomonas aeruginosa
atggaagctaatagttttttagatttctacgatgtgcatgaagagtttcttgttgcagcagaccctgcaactggaaggccttacttggctagggcagagaaagacggctgccctttgcttataaagttctggcccagaagcatagatatggatgacgaagatctagaagatatctggctacatgagcttagacaattgcataggcttaagggctacccaggagtcggtgattatgtgtcttccatagtcgactctggtagagacgataaaggattttatctggttctagatgcttctgggcgcgttccactatcatgcattaccaagagcgctggcgctctatcactacgcacccactggcttaaacggctgagaaacccaacgacaagaatattattctggaataacgtagtaagaatagtaaaggctattgagcttttgcacgcacaagggttattacaccggcatttagacagcaactcaattctctcgtcgggagatataaacagtgaggcaatagactttcagcttacaggcttcgagtggtcagtcagggtccacactatgtcctctgctcctgccagaggagaagttctatcacttgggggcagcttttgttcttttgcaaccgactggtccgatttggggttccttcttgtagatttgcttggaattgacgttagcgttctagaaaacccagcccggcctgttgatgtaattgtagaaaaaactggcctcacgctgagcgaaacccatctaataaaagccttgattgggtgggcaccaattaaggctaatactccccaagaaataatgagctcaaagctaatagaaagctcaattgaaaaaataatcgaggcgctaacagctgtctcgtctcacagggcaagcccatgccgactagctattaatctgaaatatgatgcgcatgcaaaaggctccttgcactcactaaaaagtgctgtgcaaataaaatacaaggaaaagtatgacgtaactctttctgattcagatcatgaagagataaagaaatttgtggtgcaggacctatctgactcccccgttgccatactctctcaaaatcatagtgggaacgaagagcagttactcattcaagggaaggagctgatatataggctcgataggttccagctcggccatgatgagcctgtctttacatgggattttgcattttgccaaaaagcatatataagccttcctggctggctgaatggttcatccaaaaccttggagcttaactctagcaacatcgaagttcactcggtggccgaggccagacagctgtatagatctactccaaatgacttgcaagggcgctcttgggaagaggtaatcaatagacttgatgaagatgacagcacgtttacgcccgcacaattagcatttatggagggcttggccgcttgtcatttgaccgaagtatcatatgcaagagccgaaatatatcctgttgatatactagaatctagtttaattgacagcggggaatggcggatcaccgtgacgagctgtaagaacgaagattcagaagcgctttctaaatctcttgtacttgatgctccagctgtacgactagagaaagttctaagcagaaatgatggcgacatcgagacactgaattggagtttagtgagcagttctctgcttgcgaaagaggataacggtgaggttattctaacctatcaggactgctctgccgatgaagatggtcagctaacctatgtcttcacctcgacccaagccataccgtattataaacaatatttcatagccccaaactcactgcaggcatcatttcgacaactctcccgtcgcgccagggcacttgacaccttaggaactcacgtggagttgattgaatccatatccaatcctcagaagagtgcgtacaagacacaagattcagttattgaagatagttccttcaagatgctggacggatcgaagcaggatgctctgcagaatattctaaaaataatgccgctattcctagtacaaggtccgccgggcgtggggaaaacgcatctggtgacaactcttgtaaagcagatttttgagaaagagccagatagtagggttctactttccgcccaaagccacgcaactgttcagcacctttaccacgaaatagagaagactgaactctccagctccaaaagcgacacattaattattcgatgcagcaagcaagataacgatgatgattcagcgctatctgatgctgatgcaaaagcaaaagatttcttggaaaaacttatttccagcaaactatttgaaaactctacatctcatcgcttgaagacaagaatcttggagatgtctcagggacatagatcaaatcgttacaccctggttaatcaacttcttaggtctgccaacatggtcttttcaaccacaaactctgagcaaatagagcggatgataaaggaccgcgcccaatttgattggtcaataatggaggaaacaggaaaggctactggtgttgagttgcttagcccgcttttactctcccaccgaagattgatgataggtgatcataaacaattgccaccatatcgatctacggaaatgaaaaatattttacttgacccttctagactgaaagctgtgttgcaagagtctgagcaagtgcagaaccctaaggtcaagggagagacctgtaagagtctactggagaatggagagtttgatgaaagcagattaattgaaattggttccaatgcatccaaaaacctgatgctttttgagtcattagtcaccaatgagcagagagagtcggacgcatacgagaaagtattcggctccattgcaaatagaacacctgttggcagtatgctttcagtccagcacagaatgcacccttatattgcggatctagtgtcagaagtcttctacaataaaaagctgactacacaccctgagagagaatctttcttcttggcagcagacacctgtaagccgttctttttttcttcaccagaacatctaaagcaggctgcaccaatagtctggattgacatgccggacttacaagccactaaaggcatgaaaaagggagatgaccttcctcgctggcagaattcgctagaatgcgaagcagtagttaagattctaaaaagaattcgccgaagtaatgaagctgccaagttgccaacgcttgcggttctgtcaccctatgcggagcaagtcaaaagaatagaaagagccataataaaaaaagacctccgcagtagatttctttcaaacttggatctttttgctaagcccgatgaccattctagcttctgcagtacagtagatgcgttccagggaggagaggctgatgccgtcataatttcgcttgtaagaaacaatgacaaaggaacgttaagaagcgcactgggttttttagtagatgaaaggagaatgaatgttttattaagccggtgtcgccaccaactgatcctcattggttcgtatgagttcattaagagctgggctgaaaagctatccggaaggatcgagcctaaaaaccaggatggtgattttttagtgcgacttcttaatacacttgaggagtataaggcgagcaacaagatgaccatcattccttgggatgaattgcaagattcttga

SEQ ID NO: 349759 - DNA, 2307 bp, Pseudomonas aeruginosa
atgaatgataacttccaagcttatgtcgctgctgcgcggcggatagcggtggatcgaaagatcatttgggagttggcgccgggtacggacgggcgactttcgcctgcagaggcttgggaactcaattcgttttgtggaacgcctccgccaccgagactattgctctcagatctaggaacggatagcacgagcctggagccgctgaataaacggcgaactgaaaatgcaatgaaagtcattgagaagatggcgctatctgaaggttggcaaaatttgattaaagccgcagtgcttgatcaaatctttgtgcagggcaataaggcgggccatgcgctatcaggtgtcgcacgacccttgcgggtaattgccacttgtgccggtgacgctgaaccttgggagcttacagtcgaccacattaccctggctcgcgaagtggcggccgaagtgcaagcgtcggggcaactagccctgctagtcgatcaggtcacacgtaatatcattgaccaccatcatcttgctgacagatgcccactacagcctgcatcagcacggcgaaatagatcaaaggcgacgccaggtcagaggcgcgcagatccgcgccaggatcttgcacaacgaaagaacgtcgagaaattaccggagccgcgcgcgttctgggagctggttcgcattgtcttcactgtgcagccgaagagttttttagatgagcttcggtttgctcaggtgaaaatactcatactgtgcggactgcgtattggcgaagtttgcatgatgcctatggactggaaacgtaggcgtgaatacgtagatgcgtgtgggaagcctgcaggaggctcaggaggcatttcagtatcgctaatgctccgatacttttccgaaaagcgttcactagaagataacgatggcaccctcctctatcctgaggttcagcatatccccgccctttttgagtcccatcttcaggaggcgctagaccgcgttgcacgtttgacggaccctcttcgcaggagattgagatcccagttttatactggtcgtttacttcctgagtttgagtcagaccagttagtaatggtcgttgagctttacccctatttatcaggcaacccgttcatttatctggatcctcttgaggctgagctcacggccaagtacaagcagtcttttgatgtcgatgttttacaagagattcatgcgcggcagcttgagcttgcttgtcaaggggcggagatacgtaacgaagtgcggatttacttcgcaaagatccggcggggacgtgaaaaggatttgccttttcgcacgaaaggcggtcaccccctcctccgcagtgattatgcaaacggatactttcgaattgatgaactggaggcactgatacgctcggtgatgcctaccaagctttcagatactgaaggctttcgctccactgctggtgatattcaaagctatgaattgttgttcttggcacctaaacgctcgcttggagaagaacgcaacggtgggatttgtgatgttctgcggtactgttttgttgggcgcgtcactaccgaagatctaatgattaacctcggtgatcgttcaggaatgggaaagtccatcttcgcacgctatggcgaaagtgaggaggatcaacagctatcggtggacacgcacgcgttccgtcacctacaaaatactgagcttttccggctgggaatcgcggacactatcattacgaaaagatttggccgaaaaagtgtagcgcagagctacgaatacgaccaccgcagcctttctgaagagctcgccgctatcgacttaccgaaagtggcggaaaccactctcggccccaaagcccagcaagtttatcgcatgatttcctctggtaaggttaaggggccgctggtaggagagtttttacgcattcaacatgagcaagatgacgatgctgcgttttcctttctggctgcggaagcagatgggtttcacacgacgccttacgggttctgcgttaacagtttcactgtcgacccatgccccaagcatctagagtgctacaacggttgtcgacacctatcaactacggagcttcccgcacaccgcattaatctcgagcggttgcgggagcagttgaaaacagcagtcgttactattgaggctcgccccagccaaagcattggtcgttcaaatcaactgatgcatgcgaagacacgcttggataacttacaaaaggcgcttgactccctgccggggacacagccttttgacggtggcgcggatctgtcacaggcaatcagtccggtacaacggagcttattcgatgattaa

SEQ ID NO: 349760 - DNA, 1545 bp, Pseudomonas aeruginosa
atgaagaaaaataccgtacagagtattcaggtttcagcagaagcttcgatggagatgcaagcgcttcctcagcttccatctatcattcgctatcttgatgactttgctgatgaatggcgcgttatccgaaacactgatgctgataagtgggaaatacacgcggacggtatcgaggcgtcctttgacttctgcgaatttccgcagcgatatagactgcttgtaaagcattgggcggcatggacaatgacacgcctagctgtagctacagcacgcatatacatgcactcgctaaaaccattgtttgataaagaaaactctgacccgctatacgagctactttcacgtcacccaatggagcttcgggattactggctagggaccttgcacactggttacagccacttcaccttgagggccgtgaagtcacttctggcctttttatgcgaaatgtctcttgggcgcttagcgccaggctatgcagattttgttggagcattcaaattgcctcagcaggacaaatatgcagctgtgcgcactggagacgtttttcttggggccgatgaggaagcagccatcgtcgactttctggatgaaataaataccctagtacgcacttctcctttgcaggtcgacgagcagacgcttcggagtagttgcattctgtgtatctcataccagtacgccatgcgcccgctccagatcgccaagattcggttgtcggatgttcgtgtctatccaggatctggtgtggatggccccgccatacacctcacgtttctacgggccaaacagcgttcgaacggtaagcgtctgccaatgctccggaaaatcaaacgcgaatgggcatttatattcgccgaactctatcagcgccgcttggcaacccctcacggccaagtcgagactcttgcgttgctggactccctgttcggattgacacctcaatcagttagcaacctccttatcaaaacaacggaagctattactgatattccccgccctgcaaatcatcttcgtcatagcgcagcgcaacggttagtcgacgcgggtgcctctcaggtcgaactggcggaatttatggggcactcatacgccgatacagggctggtctacttcgacgcgtcaccagcgcaggccgatagagtcaacaaagcgctggcgctctcgcctatctataccaatatcgcggatgtggcgcgcacccgaaccatcgataaaaacaaactcttacacttgtcgccggatcaccaaattggagcggtgccgcatggaatccctattgctgggattggtgcctgtaatctggggcagtccctctgcagtaagaatcctgttctgtcctgctattcatgtcgtcgatttatggcagtgacagatacggctattcatcgcgaggtcttagacagcctgagacctgtggtccggttcttctatgacgagtcccgtggtgagattgcgtcgcctgcatacatgcaactacgcaaaaccctggagtcaattcaagcagtaatagcggacctagatgagtcaaatcctcatgaatga

SEQ ID NO: 349761 - DNA, 1224 bp, Pseudomonas aeruginosa
atgactcgtgttcggcttcgagatccttgtatcccaccttcgctcacgggctgggtgctcgtcgatgatcaaggcttgccgcggtactgggctactgtctgggcggcgttacatggtgccgcactgcaagagtcaaccttatcggcgcatctctctgtcattgagtcgttctaccgctcagtcaaactgcaactgaatgaagattgcctggatcggttgatcgcagatctatgcttcgacaagctagaacgatgcctcgaagggttttttatcagcttgcgcaatcgcagtgcacaaaatggcgcagatcattctggtgattggcgcactgccattgctttcgtcagaaactgtgttgaacggcttgctcgtggcagcacaacaacaccactagatgaagtacattcacggctgctgcgattggagcggctttatagctcgctgagtcttcgccgcaagcgtcggcctgagatagctcgggctctaccagctgcggtcatcgaggatatctacgaacttatccagccagactctccgcgtaatccttttcgtacggaggctctgcgctggcggaatttcgctttggttttgttaatgctgcaccaaggccttcggcgcagcgaaacgctcgtgttggccgccgatgccatcaaagagtccttggcatttcagaccgagggccttcgttgttggatggatgtagtcgaaaatccttatgagcactcagattcccgcgcagatgctccttcgattaagaacgctaactccgtacggcaaattcctgtctccgactccattatgtccgttgtagagacgtacacagctaactatcgtggcagaccccagcacagctttctgttttcatcgcaagaaggaacaccgctttcaaaacgctccgtcaacgccatcttttcagtgctctcggagcatctttctaaggacgcagtacgagagctatgcgaacggcgaaaatcaacgtccgtgaccccacatgccttacgccatacctgtgccgttgtccgcttaacgcatctaatcgacgctggagtagaaatggatctcgcgcttcagaaacttcgagtttttttcggttggtcgcgcccttccctaatgccacaccactacgctcgcgcgtactttgaggatcgcctcgctacggtgtggcatgactccttcgatcttcatgttgatgctctgcggcggctttccggtagggatgattga

SEQ ID NO: 349762 - DNA, 195 bp, Pseudomonas aeruginosa
atggttctgaagttcggaaagtatctgacacttttctcgtataacggcatgcctgtctacgtcggcgaccaatgcatcacccgcagatcaatggtctggtggtggccgataaattggattgccgtcttcataggcgcaccgatcgtcatctggcggctctggtgtctttcccgaaggagaaagtccaatggctga

SEQ ID NO: 349763 - DNA, 738 bp, Pseudomonas aeruginosa
atggctgaagaactgaagcctgtcctgtggctagagctcgacgggagtgcgactgggctgccttaccctccggaaatgtggtgggctctctgctcgtctcgaatccactatgaacagcctgcttacagaggaaagaaccccatcttccagctggtagccgtcccagtaggccatgtgctggtcagcgctgcggagcttgagtctctgctcagggacaagacgaggctcgacgcaatcgaggacaactgctgggacgtgcgctacgacagcagttcgaatgccgatgccggcgacagtagcatcagtatagagatcgttgggcactaccagagtgcaccgcacatccgggtgctgggcgagagctacaccgagaacctgcgcgcagcaatagatcaagcaatgaccgccgaagcatacccccctgagcggccagaatacgacgatcacgggagaccgttgcgcggactgctgagcgagagcgccgagcatggaacgctctaccatgcgcgcgatgacgccagcaaagagcgggacaggctcagggcggagaacgaggcgctgcggggagcgctacaggccgttcaagctgaagtcgacgggaatctccgcccacttacccgcgatctcgtgaacatggtcagcggcttgaataacggcagtcacccgaatgacatctacgaccactgcgacgagatcgaaagggccatcggagcagccctggaaggagccaagccatga

SEQ ID NO: 349764 - DNA, 771 bp, Pseudomonas aeruginosa
atgaaaatccgcagtctccgcgccctcgcaaaaatgagggcgtattccgcagacccacaaatggtcactctgtcgccgaaggcgctcaacatcccctccggcgtagatccgcttgaatgccagtctgaagcaatccacgacttcatccagagaaatcgctggctccatgagaactgcatcatcggcctgcacgggagcgacaatcagctactggaaccaggcgaagttctcatgagtggtactcgctcgtctttgatgcgatgcctattgcgctgggaggcactgcgtatcctccctgtgtgggtagatggtttcgacagccttcctgaagatgagcgcgctactcgcgccagacagctcgaatgccttgaccgggcccgccaccaatgcctttcggtggatagctggtatcagaatgaccaagagctttatgaaaacgcccgtgcagtcatccgtactggtcactgggcactggaaaacctccccccacttgacgggctggagtggccagccggagatatcttcgatctgaaaaaccctagcctgcctgctgagtacgttgagactgggtacctggaagggatattttccatgattgagcgaaaggaccggtttcatggggccggcgggagcattccggcagacgaattgtttggtattgcactcatgagccccaagtctggatacgagttgctggtgaagctgcatatacagattgagacaaaccgtgctgaagcggcctatgcccgccgtcagcgggcgattgcctga

SEQ ID NO: 349765 - DNA, 1245 bp, Pseudomonas aeruginosa
atgctcaaccgtcgatatccggtattgatctctgggaaacgttactcgccggagttccagaccgacaagcagtatgcaaaaaactggaagatcgttttggagagagcctacggcacacatgcaatttgccagtgcccaagtagcggttcccggaagctctcgatcaagcgacgtgaagatagcgatggttttcacctggcgcgattcgctggaacaggtcatgagcactcaaacgattgccggtactacgcgccggccccggagcgttccggcatgcaagggtatgccgttggcgtagtcgaggagggcgaagatggcagcattcgtgtgcgcctggctcgaggcattcgagtccaggcccctcggtccgaggaaagcgatgggccctcggtgacaagatcgccaggaaagagcaagccggctatgacgttgcttggacttctccacctgctttggtctgagtcccgactctctacctggtatccagccatggagggtaagcgcaatagcggtatcgtgaactacgcgcttctacaggctgctgaacgtgtggccgccagccgaatgaaattgaacgaagtgctgctgctggcggcgcaaagagacagcaagggagcggctcgcaatcaggcgatcaccaagtctgcaatcacgcgggatctgcgactcgttgcgatatcgccgctggcgcgctacaacccggagcgccattctggagacatcggcaggttacctctgtccggccccttcgggatgcccatcctgcatttgccaccggcagtctgggcaaccgccgcccgcaaattcgagagagagctttccgcctggaggcgcggaagtcgagttatcgccatcgctcaggttacgccgcggaagggcgagtcgttgtcacagggagatgtcgttgagctggccctgatgcaggtcagtgagcgctggattcccgtcgattcagattacgaaggggtgattgaggccaagctccacgccgccggccgcagcttcgataaacctcttcgctacgacgccgatgaaagtgaggttttccctgatttctggcttttggacgctggcaaggactaccccctggaggtgttcggcatgaacactcccgcttacctggaacggaaggcagttaaaacggcttggtacaaccgggagtatggcggggaagggtggtggtcgtgggacgccgcagctgacccgaaaggaaagaatatccctcctttcccgcccagggcctga

SEQ ID NO: 349766 - DNA, 261 bp, Pseudomonas aeruginosa
atggccaccgaatcgatgctggataccgagggtagggcgctgagagtcggcgcgatgtactgctgtgtcagccagcgcaacggttacaccgactacgggctgcttgtccgctattgcggcaaagaccccgagtcgggtcgtgagctgtttgccgatgcggatacatgggaggaatgcttgatccatggcgaaggcctggcacctcagatgtgcccggcagtcgatccaactactcagggctggccgaaactggccgcatga

SEQ ID NO: 349767 - DNA, 834 bp, Pseudomonas aeruginosa
atgggccctttcgccgtggatgaacaggatcgggcgtggcgagatctccttgatgtaggtgaggatcggcatgttcatgaacgacagcggcgtggtcatcgtccaggcgttaccggagttgactgcccgcgggtggtagccacggggtgtcatgtagtagtcgtggtagtcgacgaggaactgtgcctcaccacccttcagttcgttgtagggcggctgataggcgggggtaccgctttccgcgtccttccagcgctgctggcccagttgttccagcgttcgcgtgcgctgttcgagggtcacgctgtcgttgtagcccttggacatgacccgcgtcatgtcgtacatggtgctggtcaccaccgccttgacgcgcttgtccacggccaccgcgttcagcgccatgccaccccagccgcagatgccgatgacgccgatgcgctcgcgattcacttccggcaacaaactgatgaaatccactgccgcgctgaagtcttcggtattgatatccggcgaagcgacgttgcgtggctgaccgccgctctcaccggtatacgatgggtcgaacgccagcgtgacgaatccgcgttcggccatggtttgcgcatacagtccggaggactgctccttgaccgcgccgaacggaccgccgatcacgattgccggcagccgatcgccgccacggttcttcggcaggtacaggtcagctgccagggtgatgccgtagcgattggcgaaggtgaccttgcgatgttcgacctttgcgctcaggggaaaggtcttgtcccactcctgggtcaattgcagctgcatgttggttcctccggtgtttga

SEQ ID NO: 349768 - DNA, 330 bp, Pseudomonas aeruginosa
gtgatccagggcatcaagcgcatcgtcgccatcgaaggcgagccctctcccaactgccccagcagcaactccaccttcacctacgatgaccagggtctactcaccagcaaacgcgacaacaacggcaacctgaccacctaccagtacaacgcccgtggcctggagacctcgcgcaccgaggccgccggcactgcgcaggcgcgcaccatcacaaccgactggcacccgaccctgttcctcccggtgcaggtcagcgagcccggtcggatcacccgctaccagtacgacgccgagggacgcaagaccggcgagaccgtcaccacccgctga

SEQ ID NO: 349769 - DNA, 570 bp, Pseudomonas aeruginosa
atggaaatcaaggctgttccagtcttcgcccggcactttcgcaacggtcgccgccggctcctgcttttccagttcggccagcttggccagggcggcgtctcgctgttgctcaaccttttggtagtgccgagtagcccatgccaacgcggtgtcggcttcatgcttttggcgcagcagcgccccaacgacgcgctcgcactcatcagttcggctcatcgcaacaagtccggcactcggctccgcccacatccattcccgccctacagcgccgccctcatggccgcgctccttgaacgtggcgaacgctatcggatcggcataggccaccacctccggcagttccgcctctttccctggggtgacatcgacctcgcacacccgctgggcgtcgggatctatcacgtagtcgcagcacgcctcgaacgccgcgcgctcatctccatctccccgtttttccggttcaagagcgctccgcaatggagtaccgaccaggcccctggccgcgaggtagttcgccgcgcgctccacgagattactgtccggagcgtgtcgcttcagggcactggctag

SEQ ID NO: 349770 - DNA, 609 bp, Pseudomonas aeruginosa
atgaaacacgaaatactcgagaagaacgtcggcctgctggcgctatgcatggccgtggccgtgagcatcggcggcctgacccagatcgtgccgctgttcttccaggacgtgaccaacaccccggtcgaaggcatgaagccctataccgcgctgcaactggaaggccgcgacatctatatccgcgaaggctgcgtcggctgccactcgcagatgatccgtccgttccgcgccgaaaccgaacgctacggccactactcggtggccggcgagagcgtctgggaccaccccttcctgtggggttccaagcgtaccggtccggacctggcccgcgtcggtagccgctactctgacgactggcaccgcgcacacctgttcaacccgcgcaacgtggtgcccgagtcgaagatgccggcctacccgtggctggtggagaacaagctcgacggcaaggacatcgagaagaagctcgaagtgatgcgcaccctcggcgtgccctataccgacgaagacatcaagggcgccaaggactcgctgaaaggcaagaccgaaatggatgccgtggtcgcctacctgcaggtgctcggcacctcgatcaagaacaaacggtga

SEQ ID NO: 349771 - DNA, 450 bp, Pseudomonas aeruginosa
atgcctaggcaagggcgagtggttttaccgaattatccgcttcacgtggtccagcggggacacaatcggcaagtggtattcgccgaggacgaggactaccagcgttacctctccgatctacgggacctcaaggatgcctttggtatcaaggtctacgcattttgcctgatgaccaaccatgtccatctgctcttggcgcctagtgattcgctgtctggcttggcgcaactgatgaaaacgctggcggcgcgcacgacacgatatcggaatcgcttggagggccgttccggaacgttgtgggaaagtcgctataaatcgagtgtcgtacagagcgatgcctacctgctggcgtgttgccggtacatcgaactgaaccctgttcgggcgcggatggtggacgatgtggcggcctatccctggtcaagttatgggcgcgggcggattggttga

SEQ ID NO: 349772 - DNA, 225 bp, Pseudomonas aeruginosa
atggccgtagccgaaggagtgctgaccttcatgcgcagcgagaaggataactcgcagtgcacctgctgcaacggcccgcacatcttctgccgctacttcgatggaatgtctgacttcgatgacatcactctaaaagcacggttccgaaacgatcttgaagggcgaaccttccgcctggtgcttgaactgctgcctgcgggcggcccaggcaaggagggggtgtga

SEQ ID NO: 349773 - DNA, 1137 bp, Pseudomonas aeruginosa
atggataagttgctcaagctgtggcacagcaccggtctgtatcacctggagcccggccagttgctgatgatcgtggtgtgccttgccctgatctatctggcgattcgcaaggggttcgagccgttgttgctgatcccgatcggcttcgggggcctgctcgccaacattccggtcgccaacatggccgagggtgccggtatcctgcacctgctctacgaagtgggtttgccgaccagcgtgttccccctgctgatcttcatgggcgtgggggcgatgacggacttcggtcctatgctggccaaccctaagaccctgctgctcggtgcggcagcgcagttcggtatcttcgccaccttgctcggtgcgttggggctggcagcgatggggattccgggtatggagttcagcatgcgcgaggcggcttcgatcgccatcatcggcggtgcggacggcccgacctcgatcttcgttaccgccaagctcgcaccgcacctgctgggtccgattgccgtggcggcctactcgtacatggcgctggttccgttgattcagccgccgatcatgcgagcactgaccaccaaggaagagcgcgccatcgtgatgacgcagctgcgccatgtcggtcaggcggaaaagatcgtcttcccgctgatgcttgccctgatgattggcatgttattgccggatgccgctccgctggtgggcatgttcgccttcggtaacctgctgcgtgaatgtggggtggtcgatcgactggctgatacctcgcgtaatgcgctgatcaacatcgtcaccatcggcttgggtttgaccgtcggctccaagctgtctgccgaagccttcctgcagatgaagaccctgggaattctggtactcggcatggttgcgttttgtggcggaacggccgccggtgtgctgatggctaaagtgatgaacatgttcagcacgaacaagatcaacccactgattggttcggcaggcgtatcggccgtacccatggctgcgagggtgtcgaacaaggtggggctcgaggcgaatccacagaacttcttgctcatgcatgcaatgggaccgaacgtggcgggggtcatcggctccgctgttgctgcgggcattttgctgagtttcgtagggtga

SEQ ID NO: 349774 - DNA, 1782 bp, Pseudomonas aeruginosa
atgacatctgccaaacagccgctcggcatcaccgatgtggtgctacgtgatgcccatcaatccatcctggccacccgtgtccgtcttgaagacatgctgccgatcgccggtaagctcgatcaggtgggcttctggtcggttgaatcctggggtggggcgactttcgatgcctgtattcgctatctcggtgaagacccttgggagcgcattcgagaactgaagaaggcgatgcctaacacccggcagcaaatgctgctgcgtgggcagaacctgctgggctatcggcattacgccgatgacgtggtcgaaaaatttgtcgagcgcgcggcgatcaacggcgttgacgtatttcgtgtgttcgatgctatgaacgatccgcgcaacctggagaccgctctgcgagcggtcaagcagcagggcaagcacgcacagggcgcgatttcctacaccactagccctgtacataccctggagatgtgggtcgatctggccaagcagatcgaggacatgggcgccgattcggtggcgatcaaggacatggccggcatcctcacgccttacatggcctttgagctggtttcgcgcttgaaggccagcctgtccattccgatccacatgcaatgtcacgctacggcgggcctgtcgacggcagccatccttaaagccgttgaggctggcatcgacaacgtagacaccgctatctcgtcgctctcgatgacttacgggcattcgccgaccgaatcggtggtggcgattttccagggcaccgagcgcgacaccgggctcgatctggaactgctggaagaaatcgccgcctatttccgcgaggtacgcaagaaatacgcgaaattcgaaggcacgctcaggggcgttgattcacgcatcctcgtcgcgcaggtgcctggcggcatgctgaccaatatggaaggccaactgaaggagcagggcgcgctcgacaaatttgaccaggtattggccgagatcccccgcgtccgcgaagacctcggcttcatcccgctggtgacaccaacttcgcagatcgttggcacacaggctgtcattaacgtgctcaccggcgagcgcttcaagtccatcaccaaggagaccgccggcatcctcaagggcgagtacggctccgcgccggctcccttcaataccgaactgcagcaacgcgtgctcggcggcgcgcaagtcatcacctgccgccccgccgacctgctacagccggaaatggacaagctgaccgccgagctgaaaggcctggctcaggagaaaggcatcaagctggccaaggacgagatcgatgacgtcctcacctatgcgctgttcccccagatcggcctcaagtttctcgagaaccgcggcaacgccgccgccttcgagccgatgccgaccggcaacgagcaggcgccacgcgaagcgggcgtatccgagctttacaccgtcgaggtcaacggcaagtcgtacgtggtacaggtcaacgaaggtggcgacatcgagggactcaagccgatcggtgacgcttctggcgcaacagctgcaaccgcttctgcaccggccgctggcactggtgagcctcagctggcaccgctggcaggcaatatcttcaaggtgctcgtacagcccggtcagtcggttcaggagggcgatctggtgatcatcctcgaagccatgaaaatggaaactgaaatccgtgcattcaaggccggcaccgtctcgggtgtaaacgtcaaggtcggcgacgcggtgtcggtgggcgatagcctgctgaccatcgcttaa

SEQ ID NO: 349775 - DNA, 2553 bp, Pseudomonas aeruginosa
ttgccgctgaacgccgaacagaccgcaggcctgatcgaactattgaagaacccgccagccggcgaagaagccttcctggtcgacctgatcaccaaccgcgtccctgccggtgtcgacgaagctgcctacgtcaaggcaggctttctctccgccatcgccaaaggcgaagccacctctccactgatcaacaagcaacgcgccgttgaactgctgggcaccatgcagggcggctacaacatcgccaccctggtcgagctgctggatgatgccgagctgtccgcggtgaccgccgagcaactcaagcacaccctgctgatgttcgacgccttccacgacgtcgccgaaaaagccaaggccggcaatgccaacgccaaggccgtactgcagtcctgggctgatggcgagtggttccagaaccgcccggcgctggctgaaaagatcagcctgtccgtgttcaaggtcaccggcgaaaccaacaccgatgatctgtcaccagctccagacgcctggtcgcgccccgacatcccactgcatgccttagccatgctgaaaatggcccgcgacggcatcaacccggacgttcccggctcggtaggcccgatcaagcagatggaagcactgaaggccaagggcttcccggtcgcctacgtcggcgacgtggtcggcaccggctcttcgcgcaagtccgccaccaactcggtgctgtggttcttcggcgacgacatcccgaacgtgccgaacaagcgcgcgggtggcttctgcttcggcaccaagatcgccccgatcttctacaacaccatggaagacgccggcgccctgcctatcgagttcgattgctccaacctggccatgggcgacgtcatcgacgtgtatccatacaagggcgaagtgcgccgccacggtagcgacgagctggtcaccacctttgagctgaagaccgacgtactgctggacgaagtccgcgctggcggtcgtattccgctgatcatcggtcgtggccttaccgacaaggcgcgcgccgaactgggccttggtccggccaacctgttcaagatgccgatcgccccggctgacagcggcaagggtttcaccctggcgcagaagatggtcggtcgcgcttgcggcctgccggaaggcacgggcgtgcgcccaggcacctactgcgagccgaagatgactaccgtcggctcccaggacaccactggcccgatgacccgcgacgagctgaaagacctggcgtgcctgggcttctctgcagatctggtgatgcagtccttctgccatactgcggcctatccgaagccaatcgacgtcaacacccaccacaccctgcctgacttcatcaagaaccgtggcggtgtctctctgcgcccgggcgacggcatcatccacagctggctgaaccgcatgctgctaccggacaccgtcggcaccggtggcgactcgcacacccgcttcccgatgggcatctccttcccggccggttccggtctggtagccttcgctgccgccactggcgtcatgccgctggacatgccggaatccgtactggtgcgcttcaagggcgaaatgcaaccgggcatcaccctgcgtgacctggtccatgccatcccctactacgccattcaagaaggcatgctgaccgtcgagaagaagggcaagaagaacatcttctccggccgcatcctggaaatcgaaggtctgaacaacctgaccgttgaacaagccttcgaactgtccgacgcctctgccgaacgttccgctgccggctgtaccatcaagctccccgaagacgcaatcgccgagtacctgcgctccaacatcaccctgctgcgctggatgatcagcgaaggctacggcgatgcccgcaccctggagcgtcgtgcccaggcgatggaagcgtggctggccaagccgagcctgctggaagccgacaaggacgccgaatacgccgccgtgatcgagatcgatctggccgacgtgaaagagccagtcctctgcgccccgaacgacccggacgacgcccgcctgctctccagcgttgctggcgagcagatcgacgaagtgttcatcggttcgtgcatgaccaacatcggtcacttccgcgctgccggtaagctgctggacaaggtcaagggtggcattccgacccgtctgtggctggctccgccgaccaagatggacgctcaccaattgaccgaagaaggctactacggcatctacggcaaggccggtgcgcgcatggaaatgccaggctgctcgctgtgcatgggcaaccaggcacgtgtccagaccggttcgaccgtggtctctacctcgacccgtaacttcccgaaccgcctgggtgatgccaccaacgtgtacctggcgtctgccgagctggctgcagtcgcctcgattaccggcaagctgccgaccgtcgaggagtacatgcagtacgcgaaacagatcgacaccatgtctgccgatgtctaccgctacctgagcttcgaccagatcgccgagttccgcgagtctgcggccaaggccaagatcgacgtggtagctgtttaa

SEQ ID NO: 349776 - DNA, 2346 bp, Pseudomonas aeruginosa
atgagccgcccgacccgtttccagcctgcctctcgttaccagccctatcacggtcccgctggtggctggggcgcgctgcgcagcgtggcgcaatcatggctgggcagcggcaacgcgctgaagaacattcgcaccttgctgaaaaccaaccagaacggcggcttcgattgccccggctgcgcctggggagattcgccccatgacgatacggtgaagttttgcgagaacggcgccaaggcggtgaactgggaggcgaccaaaagacgtgtcgacgcccaattcttcgcccgttacagcgtcagccaattgcgcgagcaaagcgactactggctcgagtaccagggtcgtctgacccagcccatgcgctacgacgccgacactgatcattacctgccgatcggctgggatgcggccttcgccctgatcggcgagcagctgaacaggctggaaacgcctcatcaggcggagttctatacctccggacgggccagtaacgaagccgcgtttctttatcagctgttcggtcgcgcgttcggcaccaacaattttcccgactgctcgaacatgtgccatgaggccagcggcgtcgcgctcggcggcagcatcggtgtcggcaaaggcacggttaccttcgatgatttcgcccatgccgacgccatcttcttgctgggccagaatcccggcaccaatcatccgcgcatgctcgaaccgcttcgcgaggcagtgcagcgcggcgctcaggtcgtttgtttcaatcccttgaaagagcgtggactggagcgttttcagcatccgcagaagccattcgagatgctcggcaaccaggatgcaccgaccaataccgcctattttcgtcccaacctcggcggcgatctggcagcgttgcgcggaatggcgaagtttcttcttcaatgggagcgcgacgcccagcagcaaggcaccgacgcggtattcgaccatgccttcattggcgagcacacacgggggctcgatgactatctgaacgtcatcgacgctacgccctggtcgctgatcgaggggcaatccgggctgtcgcgcgccgatatcgaacaggccgcgcggatgtaccgccacgcagagcgagcaatcgtctgctgggccatgggcatcacccagcatcgccattcagtggcaaccatccaggagatcgccaacctcttgctgctgcgcggcaaccttggcaaaccgggcgctggcgcctgcccggtgcgcggtcacagcaatgttcagggcgaccgcaccatgggcatcaatgagcggccgccagcggcgttgctggatgccatcgagcagcgcttttcgttcagcgtgccacgtgcacatggccacaacacggtcgaagcgatcaacgccatgcttgccggccaggcgaaggtgttcatcggattgggcggcaatttcgctcaggcgacgcccgactcgccccgcacccacgaagcgctgcgcaattgcgaactgacggtacagatcagcaccaaactcaaccgcagccatctgaccattggcaaacaggcgcttattctgccctgcctcggccgcaccgacatcgacctgcaggccagcggcccgcaagccgtgacggtcgaagactcgttcagcatggttcacgcctcctggggccagttgcagccgctatcgccacagatgcgctcggagccggcgatcgtcgctggcatcgccgcagccacactcggtaagcatccgatggattggcactggttagtggaagattacgcacgcattcgggaactgatcgaagcaaccatccccggcttcgccgacttcaatgccaaactcaagcagcccggcggtttctacctgggcaacgcagccgcacgccgaacctggaatactgcgagcggtcgtgctcagttcaagcaccacccgctgcccctggacttggtgccggcagaggccagccgcgacggccaaacgccggaccttatcttgcagacgctgcgttcgcacgatcagtacaacaccacgctgtatgggctgaatgatcgctatcgcggagtcaaaggcatgcgcgaggttgtgttcgtcaacccaagcgatcttcaacggctcgggttcgagaacggagaagtcgttgatctgatctcgctctgggacgacggcatcgagcggaaggtgcgcggatttacccttctcgcctacgacacccccttgggccaggccgccgcctattacccggagaccaatccactggtgccgctaggaagcttcggtgaaggaagccatacacctacatccaagttcgtcgccatcaaggtgataaaaaacggaaaacagacggagcgggatttgctagcgcatgcatga

SEQ ID NO: 349777 - DNA, 801 bp, Pseudomonas aeruginosa
atgcgcttgcgcgggttggaagatgagctgggcctgcatctggtgacgcgcagtcagcgtttcgagggctttaccccggagggtgagcgcattctggcctgggcccgtagcctgcttgcggcgcaggacggtctttacgccgaggctgcttcatgccgcgggcaactggtgggcagtctgcgcttgggcgtggtaccgctggcgggtttcaatccgatgcaattggtaactctgtttgccgagcgacatcccagcctgcacttccagctgttcgccctgagcagcgatcaaattctggagaggttgaaccggaaccagctcgacctgggcatctcctatctcgagcgtctcgaccaggcacatttcgccagcctgccgctgggtgaaacacggatggggttgctgcacgatcggcgtcacttttgctttccaggggcctctgtcacgtgggaagcgctggcgacgctgccgctcggcatgttgtcgagcggcatgcatttccggcaatcaatcgatcacgcgttgcgcagtcgcggcctgaatcccgcgcctaaactggaaaccgacgcggtgcatcatctgctgcagggcgtcagtgcaggcttgtgctgcgcggtgatgccgctggacagcgggctcgttgaattggcggaccatctgaccctgacgcctatcgatgatgccagcacgcttgccccgcttggactgatctttcgcctcgatgccccacgctcggtgctcggcgaagcctgtttcgccgaagccgaggccatgctctgcgctgtcgacacgccggattga

SEQ ID NO: 349778 - DNA, 942 bp, Pseudomonas aeruginosa
atggcgaccagctcatggtgggcttcggccctttgcgaatccgtgaacaatgtaaagcctctcgccgtgacctgcggcggggaagaactggttctgttccgcaacgctgaagggcaggtcttcgccctggaagatcgctgtccgcaccggcgggtgccgttatcgctaggctgcgtcgtgggttccgggctgcagtgtggctatcacggctggacgttcgatggagccagcggcgcctgtaccgctatcccgaacctgagcgccagcgaacgcgtcccgcagcgccatgcggcgcgcgcctttgtggcaagagaaagtaacggtttcgtgcatgtatgggtgggcgacggcgagccggacgccaccttgccaagcgccgattattcccctacggggcgtgagtacacgggaagcgccgtcgtcagcatgactcacgatgagtacctcgccgtgatgctggatggccccaactgcctgttgggcttcgacgcagtgcaaataacggatttcttcctgggcgatccgcaactggtgaacgaccgtctcgtgctcgacaggggcgcggtctggtcgagtcagatcttgccgtcgcagttcgtggctgactacccgctgatcgttcgcacggcggttccgctgcgtggcggcaccatccgggtggacctgctgagccaggatgaaacgccgctcagcacgcttttcatcggtgcaagcgcaaaccgacgaggcaccaccagcctctgttggcgcggcttccagcacacgaccagcatggcgggcgcgccgttgcgctggcgcgccttacggactgcaggcagagcgccgttcagcgtgaatgccacgatcgatggctcggccatcgccgcgttattggtcgcaccctcgcgtgacttacatgagttgcgtcagcagatagtcgttgaacaacgcctcgccgtctga

SEQ ID NO: 349779 - DNA, 1044 bp, Pseudomonas aeruginosa
atgcacgccgccacgcctctttccgatgcacagccgcaagccgctgcgcgccggattcgcaaagactggacaccgactaactatgacctgcgcgatacctggttcccggtatcccacagccgcgatgtcaccgagcggcccatccgccggatcatccattcccagagctattacctctggcgaaaggacggtcggccatttgcggccgagtttcatcccgagcggctgcatgccgagcgcgcatcgttcactgaattcacaggcggtataggctactacccggttgtcgagcgttacggttacatctgggcctggtatggcaatcctgatgcggccgattgtttgctgctgccgcacatcccgtttctgccggttgatggcagtcttcctggttacacccagcgcacggttcgtttcgatgccagttctgccttgtcggtggaaaacctcatcgacctgacccacgccgactttctacatgccaataccatcggcgacggaatatcggaatcggacgtggtggaagtggagtggacctcggaaaccgtgacccgtacccgcacggtcgcgcagaagtccgtcgcgccagtgatgcgttgggtcggcggcgtgcgagcgaaataccaggatttccgcgccgtgctgcatattcatctgcgcagcaacgtgtgtatctcctatccgcgctttcgtccgggttacgacgtgcccaacctgcagccattcctgccggtgggcaaacaccgctcgcgctgcgacgtgaccttcaacaccacggcggcaccggcaccgttccgctatctaatgccgcgcatcaattacatcatccagccgcaggacaactccgtggtgcgtccgcagaaccagcgttatttcgaaccgggtgaacgcatcgacctgcattcgcgcttcgatgcgcccggcacgcgttatcgctttcagatggaacaactggccgaacgtcagcgcaagggcgatttttcctatggatccgatgccgaaccgggtcgggacatcacccaattgctgggtatggacggctga

SEQ ID NO: 349780 - DNA, 780 bp, Pseudomonas aeruginosa
atggatttgggaatcgcagggcgcagcgcaattatctgcgcttcgtctcgtggcctcggcaaggcctgcgcgctggcgttagcgcaggaaggttgccgcgtattgatcaacggtcgcgatgccgagcagttgaagcgcacggctgcggaagtcgagaccactacaggtcacaggccgcttgtcgtgcgcggcgacctgaataccgacgaaggccgagcagccctgatcgccgcatgtcccgcgcccgacatcctgatcaccaacaacggcggccccgcgccggggaggatcgaagattgggaccatgcggtctggctgcaggccatcgaggcaaacatgttgtcggcgatcatgctgatccagggcgtggtcggtggcatgcgcgagcggcgcttcggacggatcatcaacatcacctcggccatggtgaagtcgccgcgcctgcccttgggactttctaccgcctctcgggcagggctgacggcgttttccaaggcgttgtccagcgaagtggtgcgcgacaacgtgaccatcaacaacctgctacctgaacgcatcgaaaccgaccgcttgcgctacatgaccgagcagctggccaagcacagaaaggtgagcctggaagatgcccgcaccgagatgctcaggcccgtagcggcgcggcggttcggcaagccggaagaattcgccgcggcttgtgccttcctttgctctgttcaggcgagctacatctcggggcaaaatcttcaagtggatggcggcagctacgacggcttgatctga

SEQ ID NO: 349781 - DNA, 426 bp, Pseudomonas aeruginosa
gtgatcgaacgaatggaccacttcacgatcgtgacggatcagctgcaggcaacgcgcgagttctatattgacctgctcgggttgaccgaaggcccgcgcccgccttttccggtggctggcttgtggctctatgccaacggccacccgctgctgcacgtggtgcaggtgcagcgaatgccagagccccgccgcggcgtgctcgaccacatggcgttttgggccgaagggctgcggcagacatggcaactgctcgaagatcgcggcatcgaatttcgtgtcatcagagcgccgggggcggtccgtacctggcagctgtttttcctggacccaaatggcgtggaagtggagctggacttcgcggctgaggaaacgcctcccgaagactggaaagcccgcttgccgccgcgtcagatcaagccgtcgtag

SEQ ID NO: 349782 - DNA, 1194 bp, Pseudomonas aeruginosa
gtgaccctgtcggcgtcatctgacggagcgcttgctgagccctttccctacttcaagctgtgggtcctggtgctgtgccagatcggcatgcactcatgcctgaccgggatgcgcatggccgcgccactgcagctgctgcaacgcgatatggatgtctgggcggtcggcgtggtgatggcgatgtttgcgaccgcgccggtattcctcgccctgaccgcgggtcgtatggcggaccgacacggctatcaccgcccgacacgcatcgccgcgagcctgtcctttgccggcgcggtgatcgccagttcgacgagtcattacctgtggctttgtctggctgccgcactctgtggcggcggctccagtttcgggttgatcgcgcttcagcgcacggcggcgcgtctggccagtaacgcaggcgagcgcatgaaggtattcggttggatcgctatcgcgccggccctggccagcctgatcggacctctgggaacgggactgctgatcgatcattacggttttcgcattgcgtttgcggccttggcgatactgcccctcggtacgctactgctatcgcagtgggtgcctcgcgaacagatggccgccccggtatcgcgcgagcagcgacgccctgcatgggatctgctgtgcgagccgtcgtttcgccgattgttattcatcaactggctggtgtcggccagctgggatgtgcattccttcgccttgccgattctgggcagtgcccggggcatgagcgcctcggtgatcggcgcgatcctcgccgcctacgccgtcacctcgacactggtgcggctgctgttgataccgctactggccaatcgtctgtcgcagcgctcgatcatcttgagtgccctgctgctcaccgcagcggtgtacgccatctacccctggctcggccccgcctgggcgatggccctgggaaccgccacgctgggtgttgcgctgggcactattcagcctgcgttgatgacacaactgcaccatgtgacccccagtgcgcgtcacggcgaagggctggcggtgcgctcggtatttatcaattgttccggagcctgcatgccgctgctgttcggcgtgctgggcgcggcgctcggtgccgcatcgctgttctggttgatgagtggcgtgctgctggctgggagctggcaggcgcgtcggctaggcgctgccgggggttag

SEQ ID NO: 349783 - DNA, 2241 bp, Pseudomonas aeruginosa
atgaacgagtcaacgctgcacggcctgcgtgtggtcagtctggggtcgggtatcgcgagtgctgcggcgggcttgcagctgtacgaagcgggtgccgaggtgtttctggtcgaaccgcccgacaacccggctcggcgcgaggaagcgctgttcgccgtgctcaatcggggcaagcgcagtgtcacgctggatatcaacgtgccggatgggcagcagcggctcgaacggctgctggccgcggccgacgtgcttattcacgaattcactcccaagcaggccgcgacgctggggctcgacgatgcacagctggcgcagcgatttcctgcgttgatcgtttcggccattaccggctggccgaagaagcatccactggctggggcagtgccacgtgaaacgctggtgctggcacgcctgggcctgctcgacgaacagccgggccaccgccctgggccggtcttcgtgcgcatgccctttgccaattggctggcaagctggctgtgtgtggtgggcgtgatggcgcggttgatcgcgcgtgatcgtgatggccgtggcggcgccgcgcacaccagtctggctcaggccgcgctggtcccgatgaccatgcactggagccgcgcgcaaacaccgacgccggtattcgccaaggggctggacaagcacattccgatcccgctgcaccagtgcgccgacggccgctggattcatgtgcattactcgccggataaagccccattgatggccaatgccatggcagaactgggcgaggcggaagtcgcccggctcaatgcgcaatggccgccgagccacgtggcgccgaatttcggagccaaccgggccatcatcgccacgcggcccgctcatgagtgggtcgagcatttctggcagcacgatgtttcggcgcagattgccgcgcccttcggcgacatctatttcgacgagcaggcgcgactgaacgggtatgtggtcgaagtggaagacgccacgctcggcaagacgctgcaaccggggccagcctggatgatcaccccaccggcacgcatcggccgttccgcacctcagcccggcgcggacaatgacagcgactttaaggactcgccaacgctgcgtctggttccgggcactgggcgtcagggcgagccgttgcctcctttgcatggtctcaaggtgctcgacttgggcgcctatctggctgggccgttcgcctgcatgatgctggccgatctgggcgcggaggtgatcaaggtcgaggccccgaccggcgatgccatgcgccgactggagcgcattttcagtggaactcagcgcggcaagctgggcgtcgcgctaaaactcggcgatgagctgagtcaaccggcggtcgaggcgctggtgcgctgggccgatgtggtccatcacaacatgcgcctgccggcggcgcgcaagctgaaggtcgattacgacagtctcaagcggatcaatccgcaactcatttattgccacgtcagcgcttacggacccaccggaccacgtgccgattggcccggcttcgaccagttgatgcaagcctcctgcggttgggaagtggagcagggcggtgccggccaaccgccgatgtggctgcgttttggcgttggtgatttctttgcgggactttcttcgttgtacgttctgctgttggggctttaccagcgcgcgcggaccggtgaagggcagatggtgaacgcgtcgttgcttggcgcgaccttgctcaccatgagcgaagcggtgggccgtgaggacggcagggtcacgcccatcgcgcatctggacgccagccagaccggcctttgcgacacgcaccggctgtattgctgcaatgacggttggatcgccgtggcggcgctggagcccgaagaagcgcagcgtttccgtgcgctggccggagcggaccctgaaacgtatttcgtcgggcggacacagtccgatgcgctgtcatccttgagcgcacaaggcgtgcccgccgaagccgttctcgaggcgcagctcgaccccttcctcgacaaccccgaccacgccgcggctggcttgcatacccactatcaacatgcggtgtacggcgagctgcaacagattggcgcgttctgggatttcggtgatctgccgttgtcgctggatcgtccgccgcccgccctcggccagcacagccgcgatgtactcggcgggcttggcttggaaaacagcgaactggaacgtctggccgcggccggtgtggttcggctgtaa

SEQ ID NO: 349784 - DNA, 738 bp, Pseudomonas aeruginosa
atgaacgaattggatttcagcggcaagacggtgctggtcgtcggtggctccagcggcatcggtaacggtatcgcgcagaacttccgtcaacgcggcgccgaggtgcacgtctggggcactcgtccgagcgcgcaggattacgccgactcggcggattcgcatcttgaagggctgcactacgcgcaggtcgatgtctccaatgccaacctgatcgaggcggcgatcgtgccgttcactcgactcgacgtgctggttcaggcgcaaggtacggtgctgtacgaccgtcaggaatttctcaccgacggcttcaagaaagtagtcgatatcaacctcaccagcctgatggtttgcgcgcagaagttcttcgaactgttgaaggaatcacgaggcgcaatgctcatcgtcagctcggccgccgccttccattcgacccgcggcaatccggcctacaacgcctccaagaccggcgctttcggtttgacgcgcacgctcggcgaggcttgggcgcgtgagggaatccgtgtcaacggcatcgcgccgggcctggtggaaaccaagctcacgcgcatcaccacggaacaccccaaacgtctcgaaggtgcgcttcgtggtatcccgctgggccgcctcggcaccccgcaggacatggccaacgttgcgctgttcctggcttcgccgctggctggctacatgctgggtcagaccctgttggtcgacggcggcatgctgctcgcttga

SEQ ID NO: 349785 - DNA, 1302 bp, Pseudomonas aeruginosa
atggcctgggatttcgaaaccgatccggactttcaaacggaactggactggatcgaccgcttcgtccgcgaagaggtcgagccgctggaacatgtactgggcagcccctggaacatccacgatgcgctgttcaaacaactggtgcgtccactacaggcgcaggtcaaggcgcgcaaactctgggcctgtcatcttggtccggagctgggcgggccgggatacggccaggtacgcctggccctgatcaacgaaattctcggccgcgcactgttcgcgcctatcgtgttcggctgtcacgcgccggattcgggcaacggcgaaattctcgcccactacggcagtgaggagcagaagcgcaaatacctcgaacctttgctcgataacgagattgtctcctgcttcgccatgaccgaaccccagggcggggccgaccctagcgtgttcaccaccgaggccgtacgcgacggcgatgactggctgatcagcggcgagaagtggttcggctccaatgcccgctatgcggcgttcttcatcgtcatggcggtgaccgacaagagcgtttcggtgcacaagggcaccaccatgttcatcgtgccggcgaatgcgccgggcgtgaccatcgtgcgcaacgtcggcatagcggatgatccggaggcgacgcacgcctacctgcgtttcgacaaggtgcgggcatcgtccgccgacctgctcggcaagcccggcgaagccttcgtcgttgcccaggtgcgactcggtggtggtcgcgtgcatcacgccatgcgcgttatcgggcaagcgcaaagagcgcttgatgcattgtgcgagcgcgccctgtcgcgcaccacccaaggcggcctgctggccgaaaaacagatggtgcaggaaaagattgccgactcctggatcgaactggagcagttccggttgctggtgatgcgcaccgcctggcgcatcgacaagtaccaggactatctgcgcgtgcgtaaagacatcgctgcagtaaaggcagccatgcccaaggtgctgcatgacattgccgcccgcgcgctgcatgtgcatggctcgatcggcgtatccgaagagatgccgttcgccgggtacatcctgcgctccttccagatggggctggcggacgggccgaccgaggtgcacaaggtgacggtggccagacagctgctgcgcgactatcagccaagcgacagcctgtttcccagctaccatcgcccgactgcggcggcactggcgcgtgaaaaatatgctgaagcgctggcgacgctggaacaaagcggagagcagcgttga

SEQ ID NO: 349786 - DNA, 1050 bp, Pseudomonas aeruginosa
ttgagcggcggggctgactggcatgagctggtcgatctcgcccgcttgggcgcctggatggatgagcgggagctcgcgtccgggccgctggaaaacgccgtgcgactgaccggcggcacccagaatctgttgctgcgctttcggcgaggcgagcgtgaattcgtgctgcgtcggccatcggcggcgctacgagaagtaggcggcaagaccatcgcgcgcgaagctcgcatgctaaaagcgctggcgggcagtcgggtgccgcatgcgggcttggtcgccgcctgcgatgacgaggccgttctgggcgcgaagttctacctgatggaaccggtggatggcttcaaccccaattccgcggccggcttgccgctgccccacgccgccgaccgcgacatgcgtcggcgcatggggctggccatggtcgatacgctgctctgccttcatgagctggactatcgagccatcggcctcgacggcttcgggcgccccgacggtttccatcaacgacaagtcgcgcgctggctgcatcagctcgaaagcgtcgccggctatgccggttggccgggcgcagacagtcttcccggactcgaccggctggcgcgctggctgaatgacaactgcccgcaacggttcagccccagcatcctgcatggcgactatcacctgtccaatgtgatgttcagccgcgaggggccggcgctcagcgcgatcgtcgattgggagctggctaccattggcgatcctctgcttgatctggcctggctggtggtgacatggccggacgccagcggccatggcgccggcacgatcgaggtgcatccctgggacggctttcccgcagcggatgaattggtggcgcgctacgtggtgggcagctcccgaagcttcgaagcctttacctggtatctgatactggcggctttcaagcttggcatatttctcgaagtcagttacgcccgggcctgcgcgggcaaagtgtcgatagaacacggcagaaaacaccatgcctcggcgctacggcttttcgagaaggcgttagggatggtctga

SEQ ID NO: 349787 - DNA, 681 bp, Pseudomonas aeruginosa
atgcatccgccacgcgagaccgaagccttttcccgaaaacgcgccactctggagcgtctacttgcggaggcgcgcagaatctttgcggaaaagggcctcgctggtgcgaggctagaggaaattgcgagcgcggcaggcgtcacgcgccaattgatctatcaatacttcagcaataaggagactctgttcaccagcgtgctggacgaaagcacggcgcaaattataaaggacctgctatcaatggaccttgatcagttgccgccacgccaggcgctgacagctctactggaatacctttttgatcaatacggcgcggatcctgagttgcgatcactcgcacaggagagctttcgcctccatgagcatgggacgcacaaccagaatcgcttcggcgccatagctgcaccgcttatagagctgatcgaacgaatcctcaaacgcggcgttaaaagcggagattttctgcctgacgtagacgcgcgtatgttctgcggtgcctccatgttactgaccaccctctggttcaccagtcgccacatcacttccaccgcaacgggatttgacaccaatacacccgcaggtttgaaagcgtggcgcagctacgcgatcgatttcgtgcttagcgccgtgttggcaacgaatcgaccctcgttgagtcgacccaaggttaacgctggctag

SEQ ID NO: 349788 - DNA, 222 bp, Pseudomonas aeruginosa
atgagcctgcacacaacccaataccaagtaatcgccgaccgcagccgttgctgcggttacggactctgcgctgcggtctgtccggaaatctacaaactagacgatgacggcattgtctatctaaccatcgaccgcgtgccgccggagttggaagaaggcgctcgcgagggcgccgcagcctgccccgccgaagcgatttggctggaggcgatcacagactga

SEQ ID NO: 349789 - DNA, 1275 bp, Pseudomonas aeruginosa
atgagccagtttgaacaactcgacatcgtcgcggcctatcacgccgtaagcgacacttacctcggcaccgatgtagacattcacgcgctgtgccgccagtaccgccataacgaaccggtgatgaagggcgatttcgtcgatacctatttgaaggtgccgacaaacgctggcgccaaagcggccaaggcgacggtgacagtgttcaagcacaaggacatcatggccatcatgcgcgacgccgaaacctacaccaatggtttcatcgccgaagggctaggcgcgttcttcgacggtctgatcatccttgccatggatggcgagcagcaccgccggacccgggcgctgctgcaaccggtgttcatgccagagacggtcaacaagtggcgtccggaaatcgaccgggttatccgcgaggactatttgcaaccgatggtggcggataagcaagccaacctgatggacttcgcactggatttcccgatacgcgtgatgtatgccctgatgggctttccaaccagcgacacggaaaaatacaagacgtacgctacttgggcgttagccatggtggcgggcaatcagatcgacccggaaaaagccaagatctacggcccactggctggtcaggcggccaagcacctttatgatggaatcaaggaggtcgtcgttgcacggcgagcccaaggcacccaagagacagacctgatcagtcgcctgatcaacgccgaagccgaaggccgctcactggacgaccatgagatcacaacattcgtccgctcgctgaccccggcagctggggaaaccaccactcgcacgttcagctgcatcatgaccaacctgatgcaacgtcccgaactagtggagcggatacgcaacgaccgcagcctcatcggcaaactcatcgacgaggggatccgccacgagcctatctcgaccttcaaggttcgccagacctcgaaggaagtggaaattggcgggatcatcgtgccgaaaggcggcatggttcagtgcatgaccatatccggcaaccgcgacgaggacgtcttcgagaacccggacgagtttgacatcgaccgcaaagtaaagccgtcattcggcttcggcttcggcccgcatatgtgtatcgggcagttcgtcgccaaggtggagctgaactgcgcgatcaacgcaatgctcgatctgtttccaaacatgcgcctggacccatccaagccagcacccagaatttccggtggacagctgcgtggtacccgcgacatccatgtgctgtgggattga

SEQ ID NO: 349790 - DNA, 759 bp, Pseudomonas aeruginosa
atgcaattgaataacaagcgcgtcatcgttacgggtggcgcacgaggaattggcgccgcggtagtcgcggcttttgtaaacgaaggcgcccatgtggcgagtctcgacttaagcgaaagcgccccgcaggaggcaatcgagggcaatggctgggctcgttcgcatatctgcgatgtctcggatacggaatcggtaaaaagggcctttgcttgggctgccgcacagttgggcgggctggacgtattggtcaatgctgccggaattgcgcctaacgccactgcagatgaaatcaccttggatgagtgggaaaaagtgttcgcggtgaatgctcgcggcacctttctgaccaatcgcgcagcctacgagcatatgcaccaaggtggggggaggatcatcaacttcgcctcggccgctggcgtgggcgggcagccaggcaaggcgcattacgcagcaagcaagggcgcggtattggcatggacacgcactgtcgcccgcgagtggggtccgtacggcattaccgttaacgccatcgcgccggcgatatggacgccgatgtacgacgccactcgctccagcatgagtgatacacagctcgaacagcacgatgcattcatggccagtctgatcccgttgggaggtcggcttggcgatgccgcgcaagacttggcacccgttctggtttttcttgccggcgaaggctcgcgcttcgtaacaggccagactctaatgatcgacggcggaatgttgatgctgagctaa

SEQ ID NO: 349791 - DNA, 357 bp, Pseudomonas aeruginosa
atgaacaagaacatgttgatcttttgcggtctggctatctgtctgcctgtaacggcaatggctgatgggctcgatctggacaagcagctgaacggtctcgacatcgagaccgaggtggtcggttccagcggaggagggagtgctggcacggccactaccagcacaacgcagatgctgcaaatcactaacaatgctgatgtcagcgttacgtgcgaattgcagccgagacctgctgaagctcaaagcgatgcaccgccacccaccaccatagagccgggcgaacagaccagcctcgccgtgccgggtaaatacaccggtgcacccctgcaagctaagttggtctgcgagcctcaataa

SEQ ID NO: 349792 - DNA, 510 bp, Pseudomonas aeruginosa
atggcgctgaccatgcaccagtcatctgtattttatttcacccgtttgctgaacaatctcttgagcatcctcgccaaggcgcaggcccacatggacgaaacgggaaccgatccgaaagatctgctcgaagcccggttggccgacgacatgttcaacctcagccagcagattcagatggcctgtttgcatcccatgctgtttgtcgcaggcatcacgggcaagcctgccgaactccaaaaagatgaggatcgcagcttcgccgagctgcgctcgcggattagcgaaaccatttccgtgctggaaagcattcgccccgaagatctcaacggtagcgaagaccaagaaatcgtgctggccacaccgcgagccgaccttccgttcactggccagggcagcctgcagatattttcgttgccgaactttttcttccacgtcgtcaccgcctacgacattctccggcaccgcggcgtaccgctaggcaagatggacttcctaggcggcctcaaataa

SEQ ID NO: 349793 - DNA, 1368 bp, Pseudomonas aeruginosa
atgaaactccaactcgctctttgcgccgccctcagcggcatcacgactttttccattgccgcagtcagccctgaagaagccaagcaattgggcaacgaactcacccccttcggggcgaccaaagctggtaatgccgaaggcaccattccagcgtacgaaggcggactgaccaccgcccctgccgacttcaagcctgacagcggcttctgggccgaccctttcaaggacgagaaaccgctgttccgaatcgatgcgtccaacgccgatcaatatgccgacaagctcagcaatggccagaaacacctgctcaggaagaatccgcaaacctggtacatggacgtgtatccgagccatcgcacggcggcgtatccgaaagaagtgctggaagcgaccgtgcgcaacgccaccatctgcaagtcatacaacgatggtctgtccatcgagccggcatgccgtggaggtttacccttcccgataccgaaaacgggcaacgaagtaatgtggaaccagctgctgcgctacaagaacgggccaacggcgaccactaccacgtcctccaacagctgggtcgttgacgccaacggcaccatcaccaaggctgccgaacaggccactttcgaggagtttccctactaccagacagatcgcgatgatcgcgacccgcagatgtatgcgcgggtctattcgctgaacaagcaaccggcacgtcgtgcgggcgaggtaacgggaattaacgactatcttgatccgaccaagaagccgcgccgcgcctggagctacacgccaggccagcgccgcgtcaagctcgcgcctgaatttgcctatgacacgcctgtggcaagccagggtggcgtgacattgttcgacgagttgcagatgttcgcgggcatgcaggaccgcttcgatttcaagctggtgggcaagagggaaatgttcattccttacaacgcgtataaattcaacttcgaagccgaccagatggaccagttcagcgatcatcacgccaatccgaagtacgaacgctgggagctgcatcgcgtctacgtggtggaagccacactcaagcctggcatgcgtcacgtctatagcaagcggcactactacctggacgaagacaccttcggggcgggcctgtacgacgcctgggaccaggacggcaacctctaccgttcgatgttcctgagcggcgtccagctgtatgacaagcagattccatacgccgtgaagaacgtcatctacgacttcaacaagggcatgtacggcgtgatcaacgacgggctcaagggcggcttcaagattcccaaggaagcgctacctgagcggcagatgaatgccgaggccattgtcagccgcatcacccagcgctga

SEQ ID NO: 349794 - DNA, 375 bp, Pseudomonas aeruginosa
atgccgagactggaaccgggaatggcgcggattcgcatcaaggacctgcgcctgcgtacctacatcggcatcaaggaagacgaaattctcaacaaacaggatgtgttgatcaacctgacgatcctttatgcagcagacgatgcgatacgcgataacaacatcgaacaggctctcaactaccgcaccattaccaaggcgatcatccggcacgtcgaggaaaaccgcttcgcactgctggagcgcctgacacaggacgtgttggatctggctatggcgccgcaggcggtgcgctacgcagtggtggaaatcgacaagccacatgctttgcgctttgccgaatcagtgtcgatcacgctggccgggcatcgcgattga

SEQ ID NO: 349795 - DNA, 558 bp, Pseudomonas aeruginosa
atgaacgagaacatgatgcaacactatctcgggatcatcgaaggagtcggtgagaacccaaatcgagaaggtctgctggatacgcccaagcgcgcggccaaggccatgcaatacctctgtcatggctatggccagatcctggagcaaatcgtcaacggcgcactgttcgagtcggacaacgacgagatggtgatcgtccgcgacatcgaactctattcactctgcgaacaccatatgctgcccttcatcggcaaggcgcatgtcgcctacattcctaccggtaaggtgctcggcctgtcgaaagtggcgcggatcgtcgacatgtacgcccgccgcctgcagatccaggaaaacctgaccaagcagatcgccgacgcgatcatgcaggtcaccaacgccgcgggcgtaggcgtagtcattgaagcccagcacatgtgcatgatgatgcgcggtgtggagaagcagaactcggtaatgacctcatcggtgatgctcggcggtttccgcgactcctacaacacacgccaggaattcctgcagctcattcgaggccgctga

SEQ ID NO: 349796 - DNA, 699 bp, Pseudomonas aeruginosa
gtgaaccgctccgtacgcacaacacgtcagccaggcaaaccgttaccgctgattgacctggccaatggcgaggccgatcagcctgcgcggaccagagttgcagcagcccacgagcagcttcggacagtcgcgctgcagttgttcgtcgagcacggtttccaagcagtcagcctgcgccagttggccacggcgctcggcatgcaggccggctcgctgtacaaccatatggaaagcaagcagaccctgcttttcgagctgatcgaggagcacgaaacggatctgctggacctgctggaagccgaagatccctgcgacgcggatggactgacccggctgcgcacttatgtcgacctgcacatccgttacaacctgcgacacccacaccgagtaatgctggctcgtctggagtcgcgttgcctggccgccgaacaacgtgcttcgatcgaggcgactcgacagacccatctccagcatctggagagcattctgcgccagctaccggcgccaccggggaccacggcaggctacaaaaccgtcgtcgcgcgcggcctggtgtcgatactcgatgatgcaccgagctggtgttcaccgaataacccccatgtgctcgaggatttgatagcaacgctgacgcggatggtggttggcggcctgtcgtgttccagctcgcagccaccacgcctggctcggtcggcctga

SEQ ID NO: 349797 - DNA, 1182 bp, Pseudomonas aeruginosa
atgcaagacgtcgtaatcgttgccgcaacgcgcactgcaatcggcgctttccaaggcgcactggccaatgtcagcgcgacggaactgggcagcacggtgatccgtgcgctgctggaaaagaccggcatcaacccggccaccgtcgatgaagtaatcatgggacaggtgcttaccgccggctgcgggcagaacccggcgcggcaggcggcgatcaatgccggcctgccctatagcgtgccggccatgacggtgaacaaactctgcggatccggcctgaaaaccgtacatctagccgcccaggcgattcgctgtggtgacgccgagatagttatcgccggcggcatggaaaatatgagcctggccccctatgtactgcccaaggcccgtaccggcctgcgcatggggcatgctcaactggccgattcgctgctgcaggacggactgcttgatgcctttcacgactatcacatgggcgtcaccgcggaaaacctggtggcatgctacaagctgagccgcgaagagcaggacgccttcgccgcacaatcccagcagcgggctgccgcagccatcgagagtggtcgcttcaaggcggaaatcacgccggtgaccatcccgcagcgcaagggcgagcccctgctgttcgacaccgatgagcagccccgcgtaggcaccactaccgatacattggccaagctcaggccagccttcaacaagaacggcagcgtaaccgccggcaacgcctccacgctcaacgacggcgcggcagcggtgctgatgatgagcgctaccaaggccaaggagctgggcctgccgatcctggccaccatcaaaggttatgccagcactggcgtggatccggcaatcatggggatcggtccggttagcgcaagccgcaagtgcctggacaagtccggctggacactcgaagaagtcgaacttatcgaggcgaacgaagccttcgccgcacaggcactatcggtcggtaaggaactggcctgggacagcgacaaggtcaacgtcaatggcggcgccatcgctctgggacacccgatcggcgcatctggttgtcgcgtactggttaccctgctccatgaaatgataagccgcgacgcgaaaaagggcctggccacactttgcatcggtggcgggcagggtattgcactaacgctgcagcgaggctga

SEQ ID NO: 349798 - DNA, 903 bp, Pseudomonas aeruginosa
atgaccctgcccaaacatgttcgcctggtggaagtcgggccgcgcgatggcctgcagaatgaaaagcagccgatcagcatcgccgacaaagtacgactggtagatgatctcagcgtcgccggcctcggctatatcgaagtcggcagtttcgtctcgcccaaatgggtgccgcaaatggccggctccgccgaggtgttcgcgcagatcagccagaaacccggtgtgacctatgcggctctaacaccgaacctgaaagggttggaagcggccatcgaggcgggtgtcagcgaggtcgcggtgttcgctgccgcgtccgaggcgttctctcagaagaacatcaattgttccatcgacgaaagcctggcgcgcttcgctccgctgatggaggctgcgcgtgagaacggcatccaggtgcgtgggtacgtgtcctgcgtgctgggctgtccttacgagggcgaaatagatccggcacgcgttgcccatgtggcgcgcgagttgttcaccatgggttgctatgaggtttccctgggcgacaccattggcaccggcacaccgggcaagacccgccaactgatcgaaaccgtcagccgcgacgtcccacgcgacaagcttgccgggcacttccacgacacttacggccaggcactggcgaacatctatgccagcctgttggaaggcctgtgcgtattcgacagctcggtcgccggcctcggcggctgcccttatgccaagggcgcaagcggcaacgttgccagcgaggatgtgctttacatgctcaacggcctaggcatcgataccgggatcgatctcgatgcgctggtcgccgcagggcagcgcatcagcgacgtgctgggccgagcgaacggttccacggtcgcgcgagtgcgcagcggtgtgtcgtga

SEQ ID NO: 349799 - DNA, 1935 bp, Pseudomonas aeruginosa
atgagcaaacaacacatcaccaccctgttggtggccaaccgcggtgagatcgcctgccgcgtgatgcgcacggccaaagccatgggcctgaccacggtagcagtccacagcgccatcgatgccaacgcgcgacatgcgcgcgaagccgatatccgcatcgacctcggcggcgccaagccggccgacagttatctgcgcgtggacaagctgatcgaagccgccagggccagcggcgcccaggctatccaccctggctacggcttcctctctgagaatgccgggttcgcccgtgccatcgaagccgccggcttgatcttcctcggtccgcccgcctcggccatcgatgccatgggcagtaagtccgccgccaaggcgctgatggaaaaagccggcgtgccgttggtgcccggttatcacggcgacgcgcaggatgtggaaaccttccgcaccgcatccgagcagatcggctacccggtactgctcaaggccactgcgggcggcggcggcaaaggcatgaaggtcgtcgagcgcgaagccgatctggctgaggccttgcagtccgcccagcgtgaggcgcagtcggcgttcggcgactcgcgcatgctggtggaaaagtacgtactcaagccgcgccatgtggagatccaggtattcgccgatcagcacggcaactgcctgtacctcaacgagcgcgactgctcgatccagcgccgccaccagaaagtggtcgaggaagcgccggccccgggcctgcccgccgaactgcgtcgggccatgggcgaggccgcggtcaaggccgcgcaggccatcggctacgtcggggcgggcacggtggagtttctgctggatgcgcgcggcgagttcttcttcatggagatgaacacccgcctgcaggtcgagcatccggtcaccgaagccatcaccagcctggacctggtcgcctggcaaatccgcatcgcccagggcgagccactgccgatcacccaggatcaggtgccgctgaacggccacgccatcgaggtgcggctgtatgccgaagaccccgacaatgatttcctgccggccaccggcactctcgatctgtatcgcgaaccttccgccggatcgggccgtcgtgtcgacagcggcgtggccgaaggcgacacggtctcgccgttctacgaccccatgctcggcaagctgatcgcctggggcgagaatcgcgaggaagcacgtctgcgactgctggccatgttggatgaaacctatgtcggcggcgtgcgcaccaacctcgccttcctgcgccgggtgatcggccaccccgccttcgctgcggcagaactggacacgggcttcatcctgcgccacgaaaccgagctgatgcgcaagcctggcgaactggacgaggcgttctggcaacgggccgccaagctgttcgtcgagaccgaaccggccctggtacgcagcgatgatttgcattcaccctgggcgaaacgcaatggcctgcgcttcggcatgtcggcgcaaatcagtgtgcatttgatgtgcaacggtgaaagccggactgtgcgtgtcgaaaacagcgcagaagccgttcacaggccgaaggccattcgccagggccgcacgctgtacctggaatggaacggcgagctccaggctgtcacggccttcgaccccatcgccgaagccgaggccagccatcaacagcacggcggcctgaccgcgcccatgaacggcagcatcgttcgcgtgctggtggaagccgggcacagcgtcgaggccggcagcgtattgatcgtgatggaagcgatgaagatggagcacagcatccgagcggcccaggccggcgtggtcaaaagcctgttctgcgcggaaggcgatctggtcagcgaaggcgccgtgctgctggagctggaagaccacgaagcactttctaccggtggacaaggctga

SEQ ID NO: 349800 - DNA, 801 bp, Pseudomonas aeruginosa
atgaccgaattcatcaccgtccaactcgaaaagaatccgcgcggcttcgccaccctctggctgaatcgccccgaaaagaacaacgcattcaacgccgagatgatccatgaactgatcttggcgctcaacgaagtgcagagcgataaatcgctgcgcttcctgttgctgcgcggtcgcggcaagcatttttcggccggcgcggatctggcgtggatgcaagattccgcccgtctcgattacaacgccaacgtgcgcgacgcccatgaactgggcgagctgatgcacaagctctatcacctgaaaatgcccacgctggccgttgtccagggtgcagcgtttggcggtgcgattggtctcattgcctgctgcgacatagccatcgggacggccgatgctcaactgtcgctgtccgaggtgcgcattggtttggcaccagccgtgatcagccccttcgtcgtccaggcgatcggcgaacgcgccacccgtcgttacgccctcaccgccgaacgtttcagcggtgaatgcgcccacgagttgggactgttcgccgaaagctgctcgagcgaacagcttgatgaaaaagtggatgtgtggcttggcaatctgctgcttaacagtcctcaggctatgcgggcgaccaagggcttgcttcatcaggttggcagcggcgcgctcaagccttcgttgcgtacctataccgaaagtgtcatcgctagagtgcgaaccagcccggaaggccaagaagggctacgcgcgttcctcgaaaaacgtcaaccggcctggcaggaacagtattcatga

SEQ ID NO: 349801 - DNA, 1608 bp, Pseudomonas aeruginosa
atgactattctcagtacccaagtaaatccgcgctcgcccgaattcgccgcgaaccgcgaggcgatgctcactcaggtcaatgacctgcgcacccttctcggtcgcgtccatgaaggaggtggtgagaaggcacagctgcgccacacctcacggggcaagctgttgccccgcgaccgcatcgatcgcttgctagaccccggttcgcccttcctcgaggtcggccagctggccgcacacgatgtctatggcgaagaggtgccggccgccggactggtggccggcatcggccgcatcgaaggcgtcgagtgcatgatcgtcgccaacgacgccacggtaaaaggcggcagctactacccgctgacggtgaaaaagcatctgcgcgcacagaccatcgcccagcagaaccgcctgccgtgcatctacctggtggattccggcggcgccaacctgccgcgccaggacgaggtgttcccggaccgcgagcacttcggccggatcttcttcaaccaggccaacatgagcgcccagggcatcccgcagatcgccgtggtcatgggctcctgtaccgccggtggtgcctacgtgccggcaatggcggacgaagccatcatggtgcgcaaccaggcgaccatctttctcgcgggcccgccactggtcaaggccgccaccggcgaagtggtgacggccgaggacctgggcggtgccgatgtgcattgcaagacctccggcgtggccgatcactacgccgagagcgatgaacatgcgctggccatcgcccgccgctgcgtggccaatctcaactggcgcaagcttggtgaagtgaacagtcgtgcaccgattgcccccctgttcgatgccgaggagttgtatggcgtcattcctgccgatgccaagcagcccttcgacgtgcgcgaagtgatcgcccgcctcgttgacggttcgctgttcgacgagttcaaggcgctgtacggcagcacgctggtctgcggcttcgcgcatatccatggctatccgatcgcgatcctggccaacaacggcatcctcttcgccgagtcggcgcagaaaggtgcgcatttcatcgagctggcctgccagcgcggcattccgctgctgttcctgcagaacatcaccggtttcatggtcggccagaagtacgaggccggcggcatcgccaagcatggcgccaagctggtgaccgcggtggcctgcgcgagggtgccgaagttcaccgtgatcatcggcggcagttttggcgcgggcaactatggcatgtgcggccgggcctatgacccgcgctttctgtggatgtggcccaacgcgcggattggcgtaatgggcgcacaacaggctgccggcgtgctggcgcaggtcaagcgcgaacaggccgagcgtagcgggcaaacattttccgccgaggaagaggccaggctgaaacaaccgattctcgagcagtacgagcatcagggccacccctactactccagcgcccggttgtgggatgacggcgtgatcgatccggcacagacccgtgatgtgttggggctggcgctatcggcctccctcaatgccccgatcgagccgacccgctttggcgtgttccggatgtaa

SEQ ID NO: 349802 - DNA, 423 bp, Pseudomonas aeruginosa
atgccccgtatctacagcattaccgaacttgctcgcgagatggaggtgactacccgtgccattcgcttctacgaggaacagggtttgctgctgcccgagcgacgcggccagaagcgcctctattcgcagcgcgaccgcgtgacgctcgagctgatcatgcgcggcaagcgcatcggactgtcgctggccgaatgcaaggaattgatcaacatgtatgacccagccggcggcaacagcatgcaactgagccggttgctggaaacgattgacgacaggcgccagcagctcaagcggcaggtgctggacatccagaaaatgcaggcggaactggacgtcgcggaacaacgctgccggttggcactggcgcaggcctgcggcgtcgcccatgacaccaataatgacaataggagagttggaccatga

SEQ ID NO: 349803 - DNA, 3564 bp, Pseudomonas aeruginosa
gtgagcaaaaccccatcgctggacgacaagtacattcagcagaccggcaaagtcctaatgacgggcatccaggcgctggtgcgtctgccgttaatgcagcgtcagcgcgaccttgagaatgggctcaatactgcaggcttcatctctggctatcgcggctcgccccttggcgggttcgatcaggcgctatggaaggctcgtgaacatctgaaggaacaccacgttcacttccagccaggcgtcaacgaagacctggcggccacctcgctgtggggcacccagcaggtcaacatcttcgaaggcgccaagtacgacggcgtgttcggcatgtggtacggcaagggtccgggcgtcgaccgctgtggcgacgtgttccgtcacgccaatgccgcaggcacctcacgttttggcggtgtgctggcgattgccggtgacgaccacggagccaagtcttcatccctgccgcaccagaccgaacacatcttcaaagccgtcatgatgccggtgctggcaccatctggcgtgcaggaatacctggactacggcatgcatggctgggccatgtcgcgcttttccggttgctgggttgcgctcaaggcggtggccgacaccgtagaaagcgccgccatcgtcgacgtcgatcctcatcgcgtgcagccgatcatccccgacgtgccgatgccggaaggcggcatgaacatccgctggccggacctgccgctggatcaggaaaagcggctattcgagcataaggtttacgccgcgctagcctacgcccgcgccaaccgcctcgaccgtatcgttgtcgattcgtccaaggcgcgcctgggcatcatcacttctggcaaatcgtatctcgacgtgtgccaggcgctaaagattcttggcatcgacgacgcgctcgctcaacaaatcgggctgcgcgtctacaaggtaggaatgatctggccgctcgaggccgaaggcgtgcggcagtttgccgagggcctggaagaaatcgtggtggtcgaagaaaagcgccacatgatcgagtaccagctcaaggaagaactctacaactggcgcgaggatgtgcgccccgtcatcgtcggcaagttcgacgacaagggcgaatgggcacggccacacaccgactggctgctaccggcgatcggcgagctgacgcccgcacagatagcccgcgcgctggcgcggcggattctgcgggtgtaccagggcggtgagttgcaggtccgcctggccgttctggaagcgcaactgtccgccaaaggccatctgctcaacctgatggatcgcgtgccgcattactgttccggttgcccgcataacacatccaccaaggttcccgaaggcagtcgagcgctggcggggatcggttgccattacatggctgcctggatctacccgcaaacccagacgttcagccagatgggcggcgagggagtcgcctgggtcggccaggcacctttcaccgagaccaggcatgtgttcgccaacctcggcgacggtacctatttccactccggcctgctggcgatccgtgcggctgtggccgccaaggtttcgatcacctacaagatcctctacaacgacgccgtagccatgaccggaggccagcctgtcgacggtacgctcagcgtgtcgcagatatcccgtcagttggccgcagaaggcgtgaccaatatcgtggtggtcagcgacgacacggacaaatacgagcacgtaacggatctcgctccgggcgttccggtgtatcgccgggaccgcatggacgacgtgcagaacgagctgcgtgaattcaacggcgtatcggcgatcatctacgatcagacctgcgctgctgagaaacggcgacgtcgcaagcgcggcaaattcccggacccagcgcgccgggtggtgatcaacgaggccgtctgtgaaggctgcggcgactgtagcagcaaatccaactgcatgtccgtggttgcggtggaaaccgaattcgggcgcaagcgcgaaatcgaccagtcttcctgcaacaaggactttacctgtctgtccggcttctgcccgagcttcgtcaccgtcgaaggcggcaccttgcgcaagcccaaggcactggtggaaaagcccgaggaccactgggaactgccacagcccgcgccgctggcgctggatgagccctacagcatcttggtcaccggcgttggtggaactggcgtggtcaccatcggtgccctgctcggcatggccgctttcatcgaaggcaagggcgcgctgaacctcgacatggccggcatggcccagaaaggtggcgcggtgtggtcgcacatccgcattgccgcccgccaggatcagctcttcgccccgcgcatcgccgaaggcgaggccaacctgctgcttggctgcgatctagtggtcagcgccaataccgagacactgtcgaagatgcgccagggcgtgacccacgcggtggtcaacagtgaagaaagcatcaccagcgccttcgtccgtacctttgccctgcaggcggaaagcggcgatctcgaaacacaccctgatcctcgcttccagaccgacgacatggcagcacagattcgcgaagcggtcggcgaaggccaggcgacctttgtagacgccagcaagctcgccaccgcgttgatgggggattccatcgccaccaacacgttcatgctgggttacgcctatcagaaaggttggctgccggtgggcgaagcggctttgatgcaggcgatcgaactgaacggcaccgcggtggagttcaaccgcaatgcctttgtctggggtcgtcgcgcagcggtcgatctgctccgcgtgcaatacaagcttgagtcgggcaagaaccagagccgtgatcgacaactctcgcagacgctggacgaaaccatcgagcggcgtagcagctatctcaccgcctaccagaacacggcactcgccaagcgttatctggatcgcgtggaacaattcagcgccaaggaaacgtcccttgtcggacagcctggcgcgctcacggcagccgtggcccattactactttaaggtcctggcgatcaaggatgaatacgaagtggcacggctgttcagcaatggcgacttcctgaagaaaatcgaagcgacgttcgaaggcgactacaggctgcgctttcacctcgcgccgcctgtgctcaacaaggccgaacctggcgttgagccggccaagaagagctatggcccctggatgctcaagggcttcaggctgctcgccaaactgaaattcgtgcgcaacacctggttcgatccattcggctacacccaggaacgcagggtcgaacgtcattggctgcaaagttacgaagagcttctcgacgagctcctggccaaagtggctacggacaaccttgatctggcggtgcaactggcagagctgcccgatgcggtgcgcggttacggcccggtcaaggaacgttacctctcacatgctaagaacaggaagattcaactcctggagcaattgcgcaccggcacaaggtttcgtgacgcgagccagaccggcacatcgaaacgtatcgacgccgtccagctttga

SEQ ID NO: 349804 - DNA, 543 bp, Pseudomonas aeruginosa
atggcttcaatcttcgatatcccggtgcaatccaatgatggccaatcgcttacactggagcgctacaaaggcaaggtattgctggtcgtcaatgtggcgtccaaatgcgggctgacgccacagtacgaagggcttgaaaagctctacgaagacaagcgcgaacaaggcttggaggtgctggcgttccccgccaataatttcaaggagcaggagccgggcagcgaccaagagatcaaggagttctgtaccttgacctataacgtgcagttcccgcttttcgccaaggtgtctgtcgccggcgaggatcgtcatccgctctatggggaattgaccgccgccaagccagacgctaccggtgaaggtcccatgcgtgagcggctcgccggttatggcatccagaccaacgctgccccggaggtgctctggaacttcgagaagttcgtcatcggtcgcaacggccaggtggtggcgcgtttctcgccggatgtcagcccggatgacccacgcctgcaacagacaatagaagccgaactggccaagtaa

SEQ ID NO: 349805 - DNA, 927 bp, Pseudomonas aeruginosa
atgcgtgcagccatcatttccgagcgcaatgctccaccggtagtaggcgagtttcgcgaacctgagccgcagcaaggctccgtcatgattgacgtcgacaccgccggcttgggcggttgggacgtgctcggcgcttatcgactcggggtcgagtatccctgtgtgattcgtggcgaaggtgtcggtcgcgcggaagacggccgtcgagtgtatttcggcgagcgttcggttttgccgttcggtgcctgggccgagcgcacgctggtaccggctgcggaggtctggaacgttccggacgacgtagatgacaagaccgcgatcagcatgggtatcgccgggaccggcgccatcgtgccgctggagaaggcgcaaatccagaaaggcgaaaaagtgctcgtgctcggcgctaccggcacccttggccagatcgcgctgcagctggctcgtggcatgggcgccggaaaggtcgtgggtgcggcacgctctgccgaggcactgacgcgcttgaagtcgcgcggcatcgccgatgacgtggtgacgttgggcggcgccgatgatgttgcggcactgaaagactcaggcgacggtgggttcgacgtagtgctggatctggtttgcggccaacccatgcttagctctttgaaggctaccaactggggcgcacggatcatgaccattggcaccggggcagggcgcaagctcgatctcgacattgccgatctgctgttccgttcgctgtcgtgcattggcacgggccagcgcccgcccgctgaccgcgagcaaatctggctgcgtctgctgaagatcgcgagggagcaggaaatccagatcgactacgtcgactacacgctcgaccaggccgccgaggcctgggctgcgcaggtgtctggcccgcatgcgaaaatcacggcgagcgttcgccgctga

SEQ ID NO: 349806 - DNA, 780 bp, Pseudomonas aeruginosa
atggatatccacaggatgaatagagcggcaatactcatgttgcttttgattattgccgtgccggctcaagccgggcgcatacaacaagagctgcagacgacccaggaactccgatccttggcctttctgacctgcgcaaatgcgttggtgtatttcaatcagaacggaagcccctatgagttgcgtaacaagcaggactatcagcaacggatgctccgcttgcaaaccctggccaggacattgggcgtgaaggacgttgtaactgcagtccagcgtctggaaacacgcctcgatgataccgacgaattaccccaaaccagcgcggcgctacgctctaccgaaccctcttattcacgtaggctgttgccggttatcgagtcgcacgcacatctacaagccttcctggatgcccattacgcccagctgcagggtgacgagcctctgggtgaacttgaaaaactacacgccatcagccgcgctatgggcgaattgctggtgaactatcagatcgcgtcgttcaatcgtcttggcgccgaaacatggatactgagagacgagaaaacccatcaactcgatcacgaagtaatcgatgcgttcgagcgtttgtcggccggccatccggcacttaccgaggcgcttgagcatgcggcacgcgagtactcgttcgtccgcggcgtgatcctcaaacaggacggcaattgggcgcccaacggggctgaacgctatatgcggtcgacgattaccgaagtcgaccaaatcgccagaggattgctccagtaa

SEQ ID NO: 349807 - DNA, 621 bp, Pseudomonas aeruginosa
atgaatcagcaaccccacaccatgctggacttccccgacctggatgagttagccggcaaccgacatgcgctacgctcgcagcgaacccgcgacctgttactcgagggtatgtatcgcctggcgctggaaaaggatttccgtgagatcaccatacaagagctgctcgaccgaaccggcgtggcgcgctcgacgttctatgctcactttcgcgacaaggaagacctgctggtcgccggttacgaaaaaattggcataccccacacaagagtctgcgaagtatccggtgacagccgggtggtactggacgtctcgagctggctgttcaccgcaaccgagcgtcacgctgagctaaccacctcgttctttagcagcccttcccagggcatcattctcgcgcatctggaaaacatcctgatcattcaggtgcgcgagcactaccgcaagcagggtctctatgattcgaacggcctgcatggcgaggtggcggtacgttgcttcgtgggcgccctgatcgggctatggctgtggtgggtgcgtcatgactaccctagttcggccaacgaaatgacagaagcattcgatagcctgatgaacaacggcacctggcctgccgccgactga

SEQ ID NO: 349808 - DNA, 1287 bp, Pseudomonas aeruginosa
atgactgccgaggtcgatcctgtccccgccgcgccaccgcacattccggtgcatctgattcgagactttgatctgtgggcagagcttactgcccagggcgagaatgcctacgcctgggccgcagcactgcaccagaacaccccgccgatcttctggataccgagcctgggcttcctgccgggcgcctggatacctcgccgctcggaagatttgcgacgcattctgcaagacccggaaacctttagcagcgtgggtctgaccccttacgccatgctgctcggtgaaagctggcggctggcaccgctggaagtcgacccgccggatcacgccaaatatcgcgcactgctcaatccgctattcacgccaaaaaaggtcgatgcgctggagcaggatatccgcgaactggccacgcagctgatcgaagcgttcgcgcagaaaggccgttgcgatttcaacgaagacttcgccaagccgtttccgacgctgatctttctcaagctgatgggatggccactggaagatcgtccgttgtttcagcactggacccaaacgctgatcaaaggctccgacgtgcaggtcgttaccgataacgctcgtacgatcaccgactggatccgcaaacatattgccgagcgtcgggagaatccgggtgacgatttcaccagctacctgctggccagccagatcgatggccgcccgctcaccgacgacgagatgctgggcatcaactttctgatctttatcggtggcctggataccgtcacctccagcatcggtctgttcttccgccacttggcgcgaaatcccgagcagcaggcgcagctgcgcgccaatccggaactgatcccggatgcggtggaggaactgctgcgttcctactccatcgtcaacatgcgtcgcaccgtgactcgcgatgttcagattggcgaagcgaccatgaagaaaggcgacatcgtgatgatcagcaccgagctggccaaccttgatccggaagtctttgacgaagcggacaaggttgatttccagcgcagtacgggcaatgcaccgcacatggcgttttcctatggggttcacctctgcgtcggctcacacctggcgcgtcgcgaattgcgcatcgccctggagctgtggctgaagcttattccgccgtttcgcatcgccgaaggcactcagccgcgtttcaacgcatacggcgtttttggcatggaagatctgcatctgcagtgggataacccaagcgtcgacagcggcgcgagcgaaacgcgggccagcgaggcgagcgcatga

SEQ ID NO: 349809 - DNA, 213 bp, Pseudomonas aeruginosa
atgagaatccgggtcgatagcgaggcctgcgccggtcatgcccgctgcaaccaagtggcgcccgggctctatgaactggatgacaacggctacatcgccaccagcggttttacggtcggcccgggacaggagcaacttgccatgcgcggtgccagagcctgcccggagcgggtcattcatatagtggacgaatcgcctgctggctcgggctga

SEQ ID NO: 349810 - DNA, 1701 bp, Pseudomonas aeruginosa
ttggtcttcgagacccatctgcacaagcgcaacgtccaggcatccagatggagcagaaggcaactaatgagcgaaacctacgattacatcatcatcggcgcggggtctgctggctgcgtgatggccaaccggctatccgccgacccgagcgtttcggtactgctcatcgaaagcggccccgaccataccagtccattgatcgccatgccgcgcgggatcggcaaattgctgatggccggcaacccgcatgtatgggattaccaggcctcgcgcggtgaaggcatggccaccgaattgtggctcaagggtaaagccatcggcggctccagttcggtcaacggcatggtctacgtgcgcggcgcgccggccgattacgatggctgggaagcgcagggttgctacggctggggttgggcggacattggccgacagttcgtcgcgctggaggaccatcagcttggcgcatcccagtggcgtggcgctggcggcccgctcaaggtcaccgtacatccatcgggcgatccgctatgcgaagccatcatcaacgccgccggctcgataggcactgcgcgggttgccgacaccaatcatgtggattcagtcagcaacggtggcttcggttatcagccgcagaccacctggaacgggcaacgcttcagcgcggccaaggcatttctcgatccggtgcgggatcgtccgaacctgaccgtgatgactggcacgcacgtccagcgcattgagttccaggagcgtcgcgcggtcgccgtgcatatagcagggaagggcggcgaacagtcgtttggcgtgcgccgggaagtggtgttgtgcgcgggcgccatcgagtcgccaaagctgttgcagttgtccggcatcgggccggcagaattgttgaagcagcatggcattgcgctcgtgcaagactcaccggacgtaggtcgcaacctgcgtgagcacgtctatatggcggtgcagtatcgggttaccagcggcagcatgaatcattgtttcgcaggcttcggcctgctgcgttcggtggcgcaatatttcttcagcaagaaaggcccaatgacccacgccgcgcacgaagcgggcggtttcgtgaagacccggccgggtctggatcgcccggatgcgcagatcggcgtcagcctgtattccatggatggcgacggcaagacggtgatgatcgacaagcatcccggcctgaccattggcggctatttcatgcatccccagagccagggcgaaatcaccattcagtcggccgatccagccgtgccgccgaagatcgtagccaactacctaaccgccgaggccgatcgggtcgccgccatctcgctactgcgctggattcgccgtctggcggccgagccggcgctcaagccgttcatcgttcaggagctgacgccggggccgcaggtgcaaaacgatgaggaaatcctcgccgcgttccgccggttcgggcagaccgcttttcatgtttccggcacctgtcggatgggcgcggacagcgattcggtgctcgatcccgagctgagggtgcgtggggtcgagggcgtccgtgtcgtcgatacctcgatcatgccgagccttgtctcgggcaacaccaatgcgccggcgatggtcattgccatgcgcgccgccgaaatcatcactggcaccgctgtcactggcataaccaaaggagctgtagcggcatga

SEQ ID NO: 349811 - DNA, 1491 bp, Pseudomonas aeruginosa
atgagcattccatttacgcagctgaacaaactctatatcgatggcgcctgggtttcggcaaacggtccgaccgaagccgtgctcaaccccgccaccgaggaagtgatcggccaagcgccggtgggcgataccgccagtgccgacgccgctattgacgccgcacgtcgtgcgttcgatagcggcccctggccgtggctgagcatggccgagcgtgccggttacatgcgccgtatgcacagtgcactggtggcgcaccgggaggaaatcgccgcgctgatcatcgccgaggtcggctgcgcgcaaggtgttacctatgcgatgcaggtcgatatgccgctggctcatgtgctcaaagccatcgaccagtcgctgcacgacgcgacgcagcagattcctgtggaagcaacgcccaatccgttcaacccgggcgggccgatgatcctcggcagcggcagcatcgagcgcgaaccgatcggcgtggtttcaggcatcaccggctataacttcccgtttttgctcaatctggcgaagatcttcccggcgctgctggcgggcaacacgctggtgctcaagccgtcaccgttcacgccttactcggcactgctgttcggtgaaatcgccgagcaaatcggtttgcccaagggcgtgctcaatattgtcaccggcggagtcgaggttggcagcctgctaagcagcgatccgcgggtggatatggtgtcgttcaccggctccgaagcggtgggtgcgagcatcatgtcccaggctgcgccgacgctgaagcgtgtgcaccttgaactgggcggtaaatctgctttgatcgtgcggcccgacgccgacattcagggcacggccctgggcgccattgccggtctgacggtaaacgccggccagggctgcgccttgcttacgcgcttcctggtgcacaactcgatccgagagcagttcgtacaaatggccaaggctgtggccagccagatgaagattggcaacccggccgacccgagcgtggtaatggggccgctgattcgtgaatcgcagcgggccaaggtcgagcatttcgttgccagtggccgcgattcgggcgccacgctggtatgcggaggcggtcgcccgcagggcttggacaaaggcttcttcagcgatatcaccctgttcgatgacgtgcgcaacgacatgaccatcgcccaggaggaaatcttcgggccagtgggcgtggtcatcggtttcgatagcgatgaagaggccatcgccatcgccaacgattcgcgctatggcctcaatggcgcggtcgccacggccgacgccgcggttgcctaccaaatggcccgacgcatccgcgcgggcagcgtttatatcaacgggggcggcggcaagatgccctatgcgccaatcggcggcttcaagcggtcgggcatcggccgcgagttcggcccggattggctgaaagagttcacccaggaaaaatccatcatttatcccatcgggcgataa

SEQ ID NO: 349812 - DNA, 861 bp, Pseudomonas aeruginosa
atgatcgaagtggccaaacggggagcgctgagcgctacccaagcaatgacgacgctgttgatgctgggcgttacggggagcgcactgggtgcagccatagagctgcccaacccggactttcgtctgcgctgggacaacacggttcgctacaccctcggcatgcgtactgaagggcaggacagccggatcatgcgcaacccgagctacgacgagtctgacggcaaattcgacaaaggcgatatcgtgaccaatcgcctcgacttgttgagcgagatcgatttttcctaccgcagggatatgggcgcgcgagtaagtgcatcggcatggtacgaccatgcctatcgcgacgacgacgttaaaagttacgtccagaacccggacagcagctacgacgacaatcattatagctcggaagtggaccgcttcgttcacggcccttcgggggaaatcctggatgccttcgtatggggcaacttcaggctcggcgagtcgctggtcaacgtcaaggtgggacggcataccaacttctggggcgagggtctgctgttcggcgcgcatgccatttcctattcgcaggccccgacagacggggtcaaggcagtcaccagtcccggtatcgaaatcaaggaagtctttcgtccattgggcaggtatcggccaaggctcaggtcaccgacaagctctctgttgcgggccagtatttctacgaatgggattacacccgcatcccttatggcggtacgtacttcggcgcagccgacccgtttttcgaaggaccggatcgcctgccggtttccgaggggtttgcattacggcgcgagaaatcccggtatggtcgcgataccgccaactggggcgtaa

SEQ ID NO: 349813 - DNA, 795 bp, Pseudomonas aeruginosa
atggccaaatacgacgcccaagctatagattccacggtcggcgtctactaccgcgagttcgacgactaccaaccttggttcgcgcccgaaatcagtacgacgagtccaagctatcgcctggcttatgcgcgcgatgtaaagctgatcggcgttagcttctcgagggtgttcaatacggtttcgttcgctggcgagttgtcctaccgcaaagacggcgccctgaacgccgttgccgtggatgcgaccgatcacgaaggcccgcgcggcgattcgatccacttcatcgccaatgccgtgacgctgatgtcgccaaacttcattgccagaagcgcctctctggtgggtgagttcgcctatagccacctgcgcgacgtgaccagccatgaagagctgtacctcggcgaaggcaacgctaactgcattgatccgcgcatcggcacgccgggctccggcgacaagtcggacaattgttcgacgcgcaactactacgccgtggccgtcaactacacgcctgagtacctgtcggtgttcccatcctgggatctgcgtgtgccagtgaccgtcaactacggcattcatggcaatgcggccacggccggtggcggcaacgagggcgcactgacgtggtcggtcggggcgcaactgacgtatgcgcagcgttacgagttcggtttgcgctatgccgatagcggggcgcaatccaagacgctggctgacggtagtgtcggcggcaacggcccggttggcggcactgaccgtggctggctggccctgacgttcaaaacctccatctaa

SEQ ID NO: 349814 - DNA, 1368 bp, Pseudomonas aeruginosa
atgaaaaaacaaatcgcctttgcctgcgcgctgatgagcgccgccttcaacagtatggcggccgtcaccgccgaagaggcccaggagctgggcaagagcctgacgtctttcggcgcgatccaggccggcaatgccgaaggcagcattccaccgtacgagggtgggctgcgcactagcccggccggacacaaacccgatagcggcttctgggtcgatcctttcaaggacgaaaagcccctgttccgcatcgatgcgagcaatgtcgagcagtacgccgacaagctcagcgaagggcagaaaaccctgatgaaaaaatacccggatacctggtacatggatgtctatccgagtcaccgcaccaccgcctatccgcaggaaatcctcgatgcgacggtgcgcaatgctaccggttgcaccacacaaaatgatggtttggctgtcgatccggtctgccgtggcggcctgccgtttcctattccgaagaccggcaatgaagccatgtggaaccagcaattgcgctacaagatcggccctggctattcgacgacgtcctcgtccaacagctgggtggtggacagcaacggcagtgtcaccaaaaccgccgagtctgtgaccttcgaggaaatgccgtactaccaaattgaccagaccgaccgcgaccccacgatgtatgcccgcgtatgggcgatggacacctatcccgcgcgcagtgccggacagctgatcattcttgccgactacctcgatccgcagaccaaaccgagacgggcctggagctatacgcccggcatgcgtcgcatcaagctggcgccggagttcgcctatgacacgccggtgccgaaccaaggtggcgtgaacctgttcgacgagctgcagatgttctccggcagtcaggaccgcttcgactacaaattggtgggcaggaaagaaatgtacattccgtacaacgcctacaggttctatttcggttgcgaacaacaagagcagttcatgaaaaaccacgccaacccggcctgcgaacggtgggagttgcatcgtgtctgggaggtcgaagccacactcaagccaggccagcgtcacgtctacagcaaacgcacctattacctcgatgaagacaccttcggcatcggtctttacgacgcctgggatcaggccgatgcactgtatcgctcgttattcctcagcggcgtacagatctacgacaagaccattccctataacgtgaaaaacgtcagctacgacttcaacaagaacatgtacgcgctggtcaacgatgcgctgaagggcggctacagattccatgacaaacccaagtccgagcgtgacatgagccccgaagcgatcgtttccatggagacccagcgctga

SEQ ID NO: 349815 - DNA, 1662 bp, Pseudomonas aeruginosa
atgttcaagaccacgttaattgccaattcggcgctgagcctggcggcggttctcgtctgggtcagtcaggcgcaggcggctcaatacgatctcggtaaccccgacctctcgatgcgttgggacaacaccttgcgctacaacctgggtattcgtgccgaaagtcgtgatgacgcattggccaacaacgccacttatgacgaatccgactccaagttcgaccgcggcgatgtggtgaccaatcgcgtcgacctgatgagcgaattcgagttggcctacaagagctaccacggttttcgcatcagcggcgcagcctggtatgaccaggcgtattccgataccgatgtcgaaaccggttcgggcgcggtgtactacccaggcgcgtttcccggtgcgagcgttcctagctatcgcggtggggaatattcgagccataccaagcgttatcaccatggccccagcggcgaactgctggatgccttcgcgtttacccgcttctacgtaggtgacgcccccgtcagcgtgcgggccggtcggcatacggtgtactggggcaacggactcctgatcgcgggacatgcgttgtcgtattcccaggcaccgctggatggccgcaaggcgctcgccaatccgggcaccgaaacacgggaaatcttcctgccgctggctcaggtttcggcccaggcacaggtcaccgaccgactatccgtcgccggccaatatttcttcgagtgggacagtacccgggcgccggaaggcgggacctatctggcctcggccgatgttgcccttgaaggccccaaccagttgccggttgcaccgggtttcgcgcgtcccatcgtcgatccgctggaacccgacgacagcggcaactggggcgtaatggccagttacgggctggacttcatgcattccgaggtcagcgcgtactaccgtgaattcgatgactacacgccgtggggcctacaggtcgggccggatttcgcccgctatgtgtacgccgaaaacaccaagctttacggtctgggctggtcgatggggccggtgctgggcggcgcttcggtaggtatcgatctttcctaccgcaaggatgcgcccttgatatccagtggcatcagcttggcggacaaccagggcgcgcgtggcgacaccctgcatatggtggttaacgggttgtggttgttgccgcgcacggactatttcgacaccggcacgttgatcgccgaaatggcttacagccatctggacaaggtcacccataacgagagtctgttccgcggcgaaggctacggcggctgcgcaacggggcaggacaaggaatggggttgcgccacgcgcaactatgtcggcgcggcgctcagcttcacgccgcagtggctgggtgtgttccccggctggaacctgtccatgcccatgagcgtggattacggcatctccggcaacgccgcgataggtggcggcaacgaaggccgctacacctacaaggtcggcgtgaaggcgctgttcgacgagcgctacgacttcaccctggcttacatcggctatggcagccagcgcaactacgacgatatcgccggcgtcggcgagaccgtcgtcggcggcagcggcgacatcggcctgtccgaccgtaactggctatcgctcacattcagcacggcattctga

SEQ ID NO: 349816 - DNA, 1350 bp, Pseudomonas aeruginosa
atgttcttcaaccgatctgtgaccgggttgctggccgccatgagcgcagcgtcagcattcgcagcgccttatacgcccgctgaccttggcaatgagctgacccgattcggtgcgatagccgcaggcaacgaagcgggcaccatcccgccctatgacggcggcctgaaagtaccggcaggcctgaagcccggcgatggtcaatggccgaatccgttcgagggcgagaagcctaggcttcgggtaacggcagccaacgccgatgaatatgccgagcagctttcatcggggcaaatgaagttgctcaagcagtatcccgacacctattacatggacatctacccgacgcaccgcaccgcggcattcccggaggcatttctggcggccaccgagcgcaatgcgaagagcccggaatgcaaaaccatcaacgatggcctttcgatcaccgaagactgtcggggtggcttgccttttccgctgcccgaaagcggtgagcaggtgatgtggaactacatcctcaactatcagggggtcaacggttgggattggaaccacagcgcctatgtcgtcaaccagggccacgccacgctgactaacaccaatcaatccaccggtgaaaaaccgtattaccagattggcgtggacggtcgtgacccggcgatggcgcagcgcatatggtcgcgcgtcgttgcgccagcacgcaccgcagggcaggcatccggttactgggattacctcgaccccgtggagaactcgcgctacgcctggagctactccaccggccagcgccgagtccgccaggcacccgaattcaactacgacacgcccaactcggcctttggcggcgtggcgttctatgacgagattttcctgttctcgggaaagatggatcgcttcgactggaagctggtcggcaagaaggaaatgttcattccctacagcaattacaagctgaagtggggctgcgacatggataccaaactgatgcccaaccacatcaatcctgactgcgagcgctgggagctgcatcgcgtctgggtggtcgaggcaacccgcaaggagggcgtgcgccacgcgcagagcaaacgccgctactacatcgacgaggacacctttggcgcagcggtttacgacgcctgggacgacagcggcgaaatgttccgggccggcgcccaatacaacatccaggcctacggcattcccaacaatcctcagcaggacgcctactcgctgtacgacttcacccgcagccagtacggcatgttcggcaacggcccgacgcgctatcgcgacaaaccgatcgccgagcgcgaagccaatccacaaaccatagccggcggccagacgcgctga

SEQ ID NO: 349817 - DNA, 801 bp, Pseudomonas aeruginosa
atgagcaatcgactggaaaacaaagtggcgctgatcaccggcgcgggcagcggcatcggccgcgcatgcgctcagatgttcgcgaagcagggcgctcaggtcgtggtgaccgacctctacgccgacgcggccgagcgcgtcgctgaagacatctctcaggcgggaggcaaggcgatagggatgaaggtcgatgtgggccatgaagaagatctggcccagatggtcgaggctgcgatgacaaccttcggccgtctcgacgtgctgttcaacaacgccgtgaacaagaaccccgacaccgcaagagacgtggacttcctcaatttcaacgaggatctgttccacgacaacatgcgcgtcaacgtattgggcggcgtgctcgcctgcaaacacgctctgccacacatgctcgagcaggggcagggctcgatcatcttcacctcgtccaccagctcgattgccggtgaagttgcccagttcagctatggcgcttcgaaggccgcagtgaactggtacgtgcaaacgctggcggcaaccttcggcaagcgcggcgtgcgctgcaacgcaatcctgccgggcgtgattcgcaccgccgccctcgacggctgggccaacgacaagatggtgcagggctttatggatatccagaacgtgccgcgcctcggcctgcccgaagacatcggcgcgatggccgtttacctcgcctcggacgaatcgagctatgtcaacggcgcgctcatgcgagtcgacggcggcatgagctgtaccacgccgatggtgccggtggtacgcgcctatctctga

SEQ ID NO: 349818 - DNA, 447 bp, Pseudomonas aeruginosa
atgggcatgcgacaagaaacgtttatccgcgaattcctcgacgcctggggcgacggcacggccgaatcgcggccgcaggtcgacaggattatttcgatgatggccgaggacgccgtctggcaactgtgggtgccgggcgggcccgtcattcgggggcgcgaggccctccggcgcgagattgaacggcagatgagctacgtcacccacaacaaatgcacgatccgccagatcgtgtcttcggatgacgtggtcatgaccgagcgcgacgactatgccgtgtccagcggcaaaccgatgccgcattcaatggtggccgtctatgagctcgacgagcagggcttgatcaaggcctggcgcgagtatctcgataccgcggatctggccaagaagctcggtgtttcggtcgccgaagtaggcgggtcgagcattcaagcggctgagcgctga

SEQ ID NO: 349819 - DNA, 1380 bp, Pseudomonas aeruginosa
atggatacggcagtaaaagaacaagaaagcgccgctgcaaccagcgaaagcaagttgaaggcattcgtcgagcaactcacgaacgggcgggtcacgagcatgcagcggctggttcgctggcggccggcctggaatctggaagtggacagcaatggccacacgctgcgtttgcacctgcgaggcgagcgcggcggcgacgtcagccctttcccggatctgcgccgcgaggccgatattctcacgctgcttggccagcacggcattcccgtgccgcggattcacgggttctgcgaagacccgccggccatcgtcatggagctggtgcgcgggacgcgcgatctttcagctgcccgcagcgacgaagaacggcgcgatctggctcgccagtatgtgcgggcaatggccgccatgcaccagttgcccgtcgagcccttcgtggcgcagggcatcgaccggccgcagggcgccgaggccatctcgctggcggggttggaagcgtattacccgctctacgaacgcaacaagacccgaccgcaaccgctggtggaattcgctctcggctggctgcgccgcaacgtacccatgcaccgcaccgaggcgcggttcgtgcaatacgactcgggccagtacctgttcgagaacggacagttgaacgcgctctatgatttcgagttcgcgatgatcggtgacccgctggccgacctcgcctcggcgcgcatgcgcgacaactatgaaccgctgggcgacaccttcagtgatctttatcgctactaccaggacgtcacgggcgagcggccggagccggacgtggtgcgcttccacactgccctgttttccaccgtgagtgccatgcagttttcctgcacggtggcgacgccgcaaccgggggacccgcacgatacctacaccgagttcgacatcgccttgcgtcgtgtagtggtgcatgcgctggccgaggcgatgggtgttcccctggaaaccccggcactggacatcgccacgcaagggccgaacacggcattgctgatgatgctcgaggatgccgtcgcgcaggtgaaggtgagtgatgagtttcagcaatccaagctcaagtcggtgagcaagctggtcgagtatctcttcaagggagacgccatgacgttgcgattacaggcattggaacaggcggacgccgaagcgctgctcggccgcacattcgaccattacagcgagatcgacgcggcattggaggacttcgtgcgcagcgccggcccggagtatgacgagcccttgttgaaactgttcatgaaacagatcgagcggcgcgtgctggtgttcggcggcaccgcgattggtggctcggcgagccatatcgatctgccgccgatcgagccccgctga

SEQ ID NO: 349820 - DNA, 825 bp, Pseudomonas aeruginosa
atgtccgagcaagacactctcgccttcacgaaaaaatatggcccttgggccgtcatcgcaggtgcttcccacggtgttggtgccgcgcttgccgaccaggtggctgcaaagggcctgcactgcgtgctggttgcccggcgcgaagaagccctgaccgacctgaagaaccagcttgtcgaccgttatggcgtcgaggtgctggtcgtcacactggacctgacgctggacgatgccgccgaccggctggtggcagcggtggcggacagggaagtcgggctgctgatctataacgccggcggcgatccatacatcacccgcttcctcgacacgccggttgaagactggtgcaaattgctgcacctcaatacccggacgatcatgcgctgctgccatgcgttcggtggccgaatggttgcgcgtggcgccggtggggtcttgctggttggctcccaggctgcgctgggtggcgtgcgcaagctggctatgtacgcggccaccaagtctttcgccatgacgctgggcgaagggctctgggccgaatggaaggggcagggcgtcgatgtgttgaacctgctgatcggcacggtcgatacgccaaccatgcgcgacgcgatggtcaggcaaggaatcgccggcgccctgaccatgcaactggccaaggccgaggacatcgctgcgatcgcgctacgcgaactgcccaacgggccgacgcttatccatcccgacgatctggccgagtcgcccaccgggtcgcattcggggcaggcgcggcgcgaacacgtactgcggattagcgcagagtctgcactctttatcggtgattga

SEQ ID NO: 349821 - DNA, 1251 bp, Pseudomonas aeruginosa
atgaaaaatttcgacaatacggagttcaaacggggctggcggattctcatccttgcaatcgtcggggtggccaccagctcgagttccctgctgttgtacagcttcagctcgatggtgattccgctcgaggaggcgatgggctggccgcgcgccgacctccaggcttcgatcaccgcgctttcgctggggaccatcattgccgcgcaaatggccggctggctaaacctgcgttacggtttgcggctggtcacgctgatctccctggtgacgctggcactcagtatgttcgccttgtcgcgtgcctcgggatcgatctggatgctttatctggggtttttcctggttccgctggccggtttggggaccctgcaggtgacctggtcgcatctggtcaatctctggttcgaggagaaccgaggctttgccctggcgatcatcctgagcggctccgggctggcggcgatcatgcttccgctcatcacgacctgggcgatctcgcgctgggactggcgggcgggtttcattgcgctgggtgcgttgccggtgctgctggcgttgccactgacgctgcgctggttgttgccggtggccaagggccacgcgtcacactcgatgcagagcggcgccgagcgaagccatccgggaatgctgctgcgtgatgcgctgcgttcgtggcgcttctggatctgcaatctttcgatgacgctggtggtgtcctgcgtggttggcatggtgaccaacatcattccgcttttgcgggacaagggcatcgcggcggagcaggccagccagatcttcagcaccttcgggatatcgctgatccttggtcgcctagtggtgggttacctgatcgatcgattgtgggcacctggcgtcgcggctgtggccttgctgatgcccgccttggcctgtctggtgtttctctatgcagatgccagcatctggttgttcgttcttgcaaccctgttggtcggccttggcgcaggtgcggaattcgacatcgccgctttcctgatcgcccgctatttcggtatgcgtgactacggccgcctgttcgccgtgcatctgggcctgatcactgccggggccgctgccgcgcctttgctgttcggcgccctgtatggcgcgagcggcagctataccggcctgctggccttctgctgcatctgctttaccgtggggccattgttgctgcttggattaggcggctacccggtgttcgagcgcgaggcggaggccgcaccggtctag

SEQ ID NO: 349822 - DNA, 933 bp, Pseudomonas aeruginosa
atgaatgtcatcgaatatcgggaatacgagtccccccatgcgggcaatttttccaccgaagccggcttgtccaacaagggctttgaggttcgcgtcgagcatgcacattggtccagctcgggagccgcgctgattcacctgaccgatcactgtctgatcaggctactgctggccgaagctcccgaaaacgcgccgttgtcaaatcgtggcaccctgtcgggcaaccgcggaagctgccagccgctcggccagacgatcttcatcccaccgggaagcgactttcacttcaagcatcgggcttgtcagcaaaaagcggtgatctgcctgttcgaccccgctgccatcgcgccgctcgcggcttaccgctgggactgggaacactgcatcacggacgccatgttgaacctccaaagcaactatctgcaggcctcgctgcgcaggcttggcgaagaggttgcattccccgggtttgccagcgagctccatatcgaatgcctgatgaccggtatcgcgctggaactgcgcaaggaatttcttggcaaacagcgcgatgacgacgaacccggcaagctgagtcgccgtcagctgcagcacttgagggaagctctggacgccgatgcaaacgatatttcgctgcgcaagctggccgatctgtgtgccttgccggaacgaaagctgtcggtttatttcaagaacaccacgggcaagaccctgcgccaatactcggccgaagcacgggtcaaccgggcaatgaggctcctcggcgacccttccctgttgatcaagcagatcgcctacatgaccgggttccagagcgccgccgccttttccgcggcgtttcgaaaagcggtcggctggacgcccgaggagttccgtcgacagcgctcaccaggccaacgcgaggcctggcctgatgagcagaacgccagctag

SEQ ID NO: 349823 - DNA, 381 bp, Pseudomonas aeruginosa
gtgagtaacacgatcgaggacaacaaggcgctggtgcgtcgatatgtacaggccgttatcgacggcgacatggataccttcgaggcgttgcagcatccggatgtcaaatggtggacgttgacccgaggcgacatgagccgcgaagcgttcaataccgcggtacgcagcggcctgctaagtgccgataagcgctcggtggtaatcaccggattgaccgctgaaggcgatcgcgtcgcctatgaagcgcagggcgagatggtgtttgccgaccgcgtctatcgcaacagttaccacaacctgctggtgatccgcgacggactgatcgtcgaaggccgcgaatacatggataccaaggcctccaccgaggcgcgccttgcatag

SEQ ID NO: 349824 - DNA, 1329 bp, Pseudomonas aeruginosa
atggccgtttccgccgctaagccccacacctctctggctatcgactggacagagttccgccagggatggcgggtgctgcttctggcgctgctgggtatcgccacttcggtcgccgtcgcgcccatctatgcgttcggcacgctggtgctgccgttacaggaggcctttggttggtcgcgaggcgaaatccagacggcggcggcctttcagtacggcagttccatcatcgcctttcaggttgccggctggctgaacaaacgctacgggccgcgtcgcgtgaccctttgctcgctgatcgcgctgccgctcgcctacttcgccatggccctcaacaccggccacttgtggcaattgaatctgggctttggtctgctggcgtttgccggggtgggcacgctacacgtgacctggacgcagctgacctgcctctggttcgacaagaaccgcggcctggcgctggcgatcatcctgtgtggcacgggcctggccgccctggtgctgccctcgttgctgagctgggcaatcatccgctgggattggcgcgcctggttctggggcttggcgctgttgccattgctggtgaccttgccgctttcgttgcgctggttgagcgcccgaggggccgtggaacaggcgacacaacgatcatctctccctgcgcagccggacgtcggactgacgggcttctcgcttcgccaggcgttgcactcgcggcgcttctgggtcatcaactgcgcgttgttcctcgcgatcatgggcatgatgggcatgatcatcaacgctgtgccgatgatgcaggacagcggcctttcagcaaccgaggcggccaaggtgttcggtgcgttcggcgtgtcgctgattttcggacggctgttcatcggctatctgatcgaccgggtgtgggcgcctggggtggcctttttcgtcttgctgcttcccggcgtcggctgccttttgttcagcacggttggcgcacatgttcccctgttggtgctcgcctgtgtcttcgccgggctgggcgccggcgccgaaatggatattgcgtcgtatctgatcgcgcgctatttcgggctgcgcgactacagccgggttttcgcctttcagatgagctttggtgcgatcggcagcaccatggctccggcgttcttcggcgcgctgttcgaggcaaccggctcctaccacgcgatgctgatgttctgcatggtcagttttggtatcggtgcgttgctgcttttgacgttggggcgttaccccacccttcccacggctcctggggaagtggcgacagcgaccgttacggatggcgcaataaccgagccggcaacttga

SEQ ID NO: 349825 - DNA, 1731 bp, Pseudomonas aeruginosa
atgaatgacaatccggtggttgaaaaagacgtagtcgtcgtcggctctggcggcagcggcatgacggccgcgatcgtcgccgcaacccagggcctcgacgtactgctggtagaaaagaccgggctgttcggcggcaccaccgcgctttccggcggcggcatctgggtgccgtgcaatacccaggcggccgaggccggtttgaaagatgatccagagcaagccttcgcttacgttcaggaagtggtggggccgacactgcgtaccgatctgctgcgggcttttcttgatgccgcgccgcgcatggtcgattacctgcacgcgcgtacctcggtacgtttcgccgtgcagcgcggttttgccgactggcatccgcaggccaagggcttttccgccgatggccgtttgctttgcccggtggaatatgacggtcgtgagctgggcgaatacttcgaccaattacggcccccgctgactgaattcaacgcgccgggcggcatgatgttcggcattggcgacatgccgcacatcgccaaggtcaccacgtcgttcacctcgttcaaacacatcgccaagttggcggtgcgctttggcgtggatcggctgagctattcgcgcggtacgcggctgaccatgggcaatgccatggctgcccggctgctgcgctcggcgatcgatgccggggtggagctgtggaaagacacgcccatgcgcagcctgatccacgagcatggcgcgatcaaaggcgtggttgtcgagcgcgacggcaaaccggtggaaattcgcacacgccgtggcgtcgtgctggccaccggcggtttttccgccaatccgaacatgcgcaaacagtacattccgtttgccgaacaccatgtgtcgctggtgccggagggcaacaccggtgacggtttgcagcaagcccgcaacgctggcggccgcttcgatggcgaaaacctgagcaatgccggctgggtggtggtctcgctgctgaggaagcccgacggcggaatacgcaaatttccacacctttatatggatcgcggcaagccaggctgcattgcggtcaaccgggacggtaggcgtttcggtaacgaggcggcgaccaacctggtggagcccatgcaccgcaccggctctgtgccggcgcaccttgtatgcgaccacccgttcatcaagaaatacggcctgggcctggtgcgcccgggcggctttgggctgaaagggctgatcgccgccggctatatcctcaccgagccgaccctcgatgcgcttgccgcgcgtatcggtgtcaatcccggcaacctcgccgacaccgtcgcgcgcttcaaccagcaagccgcccggggtgtggatgatgacttcgggcgtggacgggacaaggccgatatgcctctgggcgatcccaaccacacccccaatccctgcctcgggccgattcagcaagggccgttctatgccgtgcagatatttcccggcgattccaccaccacggtcggcctgcgcatagacggcaaggcgcgcgtgctggacgggaacgaccagccgattcccggtctgcacgcggtgggtctggacatgaactcgctatggcggggccgcgcgccgggcaacggcgcgaacaatacgctcagcctgagctttggctatctcgccgggctggccctggctcaggacgatgtcccgcaaccggctatcgagcctgccgcgcagataggcgctgagcagctgaattga

SEQ ID NO: 349826 - DNA, 804 bp, Pseudomonas aeruginosa
atgcaacgtctggcaggcaaagtggcaatcgtaaccggcggcggcggtggtatcggctcggcgaccgcgttgcgcctggcgcgtgaaggcgcgaaagtcgtgtgcgccgatatcaatctggaaacggcgcaacgcgccgccgatgcgctggagggcaacggcctggcgctgcggttcgatgccgccgatgccgacagcatcgaggcgatggtgacccagacggtcgagcacttcggtcggctggacattctgcacaacaacaccgcgatcaccgacccgcagactcacggccaggacctcagtctgctggaaatacccatggaggtatggcgcaaaaccctggacgtgaacctgaccggctacatgctggcctgccggttcgccattccccacatgatcgaagcggggggcgggtcgatcatcaacaccgcctccggctccggcaccaagggcgacctggtgcgaatcgcttacggcaccagcaaggctgcgatcatcaatatgacgcgccacatcgcgacgcaatacggtcgccaaggcgtgcgctgtaacgccattgcaccgggggtcatcgtgacgcctgcaatggaggcgacggccccgcagatccttgcctttgcgagcaagtacgtcctgaccaaacgcctcggcacgcctgaagacatagcggcgctgaccgcttttctcgcgtccgacgagtccggctacatcacaggcgaatgcatcgagatcaatggcggcaagaacagctgtcagccgcattttgccgagctgtatcaacagacccggcagacgtcggactga

SEQ ID NO: 349827 - DNA, 1362 bp, Pseudomonas aeruginosa
atgatttcccgattcgcgttaagcattgtcttgaccggcatttccacatttgcctgcgctgcggtttcgccagaagaggcgccgaaactgggtaatacgctcaccctgttcggggcgataaaagccggaaacgccgaaggcactattccgccctaccaaggcggtttgcggaccgctccagcggacttcgaacccggcaaagcctggaccgatcctttccgggatgaaaaaccgctgtaccggatcaccgcacaaaacgtggatcagtacgccgacaaattgagcgcggggcagcaagccctgctgaaaaaatatccggacacctggtacatggatgtgtacccgagccatcgcaccgctgcctatccggataacgtgctgaaggcaacggttcgcaacgccaccggatgtgaaaccttcaacggaggcttatcgcttgaaaccgattgccggggcggcctgccgtttcccatcgccaagactggtaacgagatgatgtggaaccagctgttgcgctacaaaaacggaccgaccggcgtcctggacgagcacaccagttgggttgtcgactccaacggcaacatcaccaagacggcgcaacagcgcgcctatgaggaatttcctttctatcagacgcatctggaggaccgtgatccggaggtatacggtcgtgcctggtcgatcaacaccgagccggcgcgccgggcgggcgagatgaccggtatttccgattttctggacccgaccgagaaaccgcgtcgcgcctggagctattcgccaggtcagcgccgcgtcaagttggcgccggagttcgcctatgacacgccggtcgcgagccagggcggcatttccctgttcgacgagctgcaaatgtttgccggcaagcaggatcgcttcgatttcaagctgataggacgccaggagatgtacatcccctacaacgcctacaagtggtacttcggaatcgaagcgcccgagcagttcatgaagaatcacgttaacccggcggttgagcgctgggagttgcaccgcgtctatgtggtggaggcgacgctcaagcctggccagcgccacgtgtacagcaagcggcgctattacatggacgaggacaccttcggcgcgggcctgtacgacgcctgggaccaggaaggcaatctgtaccggaccgtgtacatggccggggtgcagatctatgacaaagacattccctacgcgaccaagctggcgatcttcgatttcaacaaaaacatgtatggcgtgctcaacgacttcctgaccggacgcctggagtttgcggaggaggcaccgtccaacagcacgcagaacccggaagccatcgtgtccaagtacacgcagcgctga

SEQ ID NO: 349828 - DNA, 1035 bp, Pseudomonas aeruginosa
  misc_feature (924)..(924): n is a, c, g, or t
atgaagactttttccaagatccccgagcgaggcgatttcgcctatcaaaccctggtagcgccctacaaggtgaccggcgagtcgatgcatggtggccgtggctttttcggcttgcagttgagcaagagcatgccgttcggctcggttcgtgacgaagaagggcatatctattcgttcacccgttcggtcatggcgccaaccggcacgccgaacccgaccaaattcttctatctgtccacccgcatcgacggcaagaacatccgcatggaccaggcacgcatggcggaacgcggcgtgacgccgattccggcgttgtcgctgcaaggcgataccgtccgctggaccaaccagccggatgacgtcggccatccatgggaattgaccgccaacagcgaaaccttcacctggaaagaggacaacctattccagctcgaaggccgcctgctcggcaacggtatgcagtggtacttgccgggcgtcgagtggggcaccttttacgtttcccagatttgggatgtcagcggcgtctgcgaagggcgtccggtcaagggcgcgatcctgctcgaccaggtgtacatggccgagggcggcgcgattcacttcaagaaagacctggtggtgaacaacaagatgcacgtgctgtggtggtcgtttgccacggtctacaaggacggcacctacgatgtcggctcgttcatggttggccatgaccacctcggctacgcgattttccagaacgaaaagggcgaagtgcgtaccaccaccgacatcgaatgcgtaaccaagcacaaggacgggagctactttctggaggctgccaaaatcacgctggacggcagcgaagaatgggaattcctgcccgatccgcgcggcgaaatgatcgacttcgttggcggctttcccgtcactgcacagcaggaaggncgctggcggcgagtgggtgatactcgcgagccggatcactgggtggcctggggtgagtcggaccggcgcaatggcgcggcacgcaatgtccccggcagcgatatcaactaa

SEQ ID NO: 349829 - DNA, 774 bp, Pseudomonas aeruginosa
atgaatctgcagttagcaggcaccgataattttcgtagtctcaaaggcttgccggcccatgacggccggcgcatcgccgagcatacgttgctacggtccgaccagctgcacatgcttgccgccgagggctgggaaaccctcaggacccttggcgtaaagaccgtatgtgacctgcgcagcgagggtgagcgccagcggacgcccaacaatctgcctgttgaacttgagcagctggcacttgaggtcaccggcgacatgcgcgccgacaaaagcgtgtcgagcctgttgactgaaagcccggatcttgcgggcgccgaggccatgatgttcgaggtataccggcgtctgccgggcatgctggcgccgcatctgccgaaactgttcgggttgttcgagacgggtaaggtgcccgtgctggttcattgcgcagcgggcaaggaccgcaccggttttgccgtcgcggttattcttcatgcactcggcgtagcgcggaaagtcattgtcgctgactatcagctgtcggcccgccgaatggtcgacgccagcaacgtccggcgagagctgatgagtacgctggtcagcaacatgatcggcaagccctgtcctgacgaagcggtcgacgcgatcatggatgcccgccccgagtacctgcaaacggcctacgactgcgtggacaagcactatggatcgatggacgcctatatcgagacgtgtgtcggcctggatgcgtcgggcctgaatagtctcagggaccgttatctcaccgctgactga

SEQ ID NO: 349830 - DNA, 411 bp, Pseudomonas aeruginosa
atgacgacgcaactgaatgctgaaagtatccaacgttttatgaagggccaggtctcggcatggaacgcccacgatcgcgaggcctttcttgactgctatcgccaaattgcgcctgagtcgctggtcatcgaatatgccggtcgcactgacacgcgtgatggctggtttatcctcgaagagatgttcgacaagcacaatgcggacatctctctggaagtggtggagaccatctacaacggcaacgacgttgcggctcatcatcgcaattgcctgaataataccgggctggccattgaaagcatcgaaacctaccgtttctcaccaggcaaacttcaggtgtgctatttccttaaaccgccggtgaccgacaacctggatctcacccaatttcggggattcgcctccgcttga

SEQ ID NO: 349831 - DNA, 1197 bp, Pseudomonas aeruginosa
atgaccagtatcgaagagttgcggacaaagcgcccttatcctgctcgccaggggcagcttcctcgccacctgcaagacgtcacaccccaatggttgactagcctgcttcagaaccgctaccccgggatcgcggtgaatgatttcgagcaggtagaggtgcgtaacgggcacaccaccaagctaaggctcgcgctggacctcaatgaggttggccaggccgctggcattccgcgcaacgtttgcctcaagtccaactggtcggaagggttcgagagcggcgagatctgcgagttggaggcacgcttctaccacttcatgcgcgagcgtctgcacacgccggtgccggacagctatttttccgactgggatggcgatggtgggggtcggggcgtcgtcgtgatggaagacctcggaatggcgccaggccagttcggtcacagtacccatcacctcggcgtcgatggcgtggcccaggggctggagtcactggcgatgttgcatgccgcgctgtggggaagttctgaactcaaggcacagagctggctgcccacgtccatggatcacccggtcgactacgatcagtttttacgcatgtacgactacattcggctgaatctgcgcaagcctgagtaccaggccatcctgccgaagtggatgtatgaaacaccggagctgtttgggcatgcctttgacgagttacgcgcttatgaacttgagcaggagacccccatctgcctggtccatggcgattctcaccagggcaacagctttctgcgcgacagcggcgagcgggtctggcttgattggcagcttgtgcgcaaggggcggccatggcgcgatattgcctatttcatgcttggggcgctgacaatcgaggagcggcgggcttcggcctgggatctggtcaaggtctaccgcgagaagctgatcagcttgggcgccgaaggcgtacttggacaggacgccgcctgggaacaatttcgccgctggcccatgtatggcatgcaagcatggctggccaatgtcgatgagtggggccaggacgggcgcatcatggtggagcgattcttcgccgcggcggaagatttcgagaccgtgaaaacgctgaccgccggcaaagcgccacgccgccacgtgaagctgggcgagggcgcgcgccaggttctcccgcagttccggcatttgctggacgattga

SEQ ID NO: 349832 - DNA, 669 bp, Pseudomonas aeruginosa
atgcaaacacagaatcgctcgaagtctgataagcgccaaacaatgagccgaatgcttgccgccgcgcatcaggagttttgtaataagggactggccggcgggcgtattgacgaaatagcccgcaatgctggcgttaccaaacagctgatcttccactattacggatcgaaggaaggcctgtttgtcgcggtgcttgacgaaacctctgacagactcatgaccgggtgggttgatttcgatgtcgagcagctgaccccgacgcaagcgcttcgagccttgctcaaccacatcttcgatcaatatcgcaacgatcccttgctcgccaggttggcgcaggagggcgttcgctatcacgattacaatcaaacgccgcgcaaccgcttcctggaactggcaccggccctggtcgataaggttggcgggatcgttcagcgaggcattgaatgccgtagtttcaagccggacacccagcctcggctactgcttgccaccgcggctctcatcgctaccggctggtttaccaacgcttactccacctcagcgctcgtcggccttgatactgcttccgaggaaggcatggaaacctggcgcaaacactgtgccgatttcattctggctagcatcgtcgcgacgcatggagaagaaccgcgcagcgctcgcgccaattga

SEQ ID NO: 349833 - DNA, 912 bp, Pseudomonas aeruginosa
atggcgaagggcaaagacatatcaatgcgccagctgcgttacttcatggccgcggctgaggcggggcagctttcccaggcagcggtgaaagtgcatgtatcgcaatcggcgatcaccgccgccgttctgcaacttgaacagacattgggcgttcggttgttcgatcggctgccttacggcgtcaccctgaccgcagagggccataagttcgctcagcatgcgggccatattctcgacacgctgcaggacgcgctcagcgaaccgctttttctgagccattcgatccaaggggtgattcgcgtcggggcttcttacacggtgctcggctattttctgccgtcgctgctggcgcggttcaagcggagctatccgcaggtggaaatcgatctggtcgatatggatcggcctgtcatcgaagatgccatcgttgcgggacggctggatatggggctctccatcgtctccaataccgagaacctgcagcgtttcgagcaccaggtgctgattcgctcgcgacgccaattgtggctttccagcgagcatccgctgatgcgggcctcggtcattacactcgaagatgtggcgcgtcacccttacattctgcccaccgtggatgaaggggagagttccacgtatcgctactggaattctcgcagcctggagccgaatgtggcgttccggacgtcttcgatggaaggattgcgagggctggtcgcccatggcttcggcgttacgattctctccgacatgctctatcgggcctggtcgctggaaggcaagaagattgaggcgcggcccctggttgacgccatcccacccatggaactgggcttgatctggcgccgcgagacggagttgccgcaaaccgctgaagcgtttcgccagttcctcatcatggcgtgcgcatcctga

SEQ ID NO: 349834 - DNA, 855 bp, Pseudomonas aeruginosa
atgtttaccgatcattccctggttttaggtagcggcggaatcaccggtatcgcctggatgaccggccttctgcttggcttgagcgaaatgggcgtagacctgcgtgaatgcggcaagatgctagggacatcagccggcgccacagtcgcggcgcagatccgcgaagacagcgacctctgggaactgtacgagcgtcaggtctacacatcgaaacaggttcaggaactcgcgcctcaaatacgactgctgcgattactgcctttggcaatggccatattgccgaagctgaatgctcccatcgagcgcaccaggcgaatcggtcagctggcgctacgagccgaggccgagaatgcacaagccaggcagtccgtcattactgcccggctgcatcctcgacaggactggccagccaagcctcttgccctcgtcgcggtcgacgtgctgactggcgaaaccagaatgttcgaccgacgttccggcgtgggattggccgatgcggtcgccgccagctgcgccgtacccggtatctggccgcccgtcaatatcgacggacggcaatatatggatggcggaatacgaagctcgagtaatgccgatctggccgagcgttcctcaggagtgatcattgtgtcgccccttggcgccaaccgcggaactcctggccgcacgctgtccaggcaaatagcgaaactcgagcagtccgggacgcgcgttcaggttatcggccccgacaggacagcagcagcagcgatgggcaataatccgctgaatccagcgcggcgcgctatcgcagcgcaggccggcagagcgcaaggccatctgatcgcgaccgccttcgagcaatattggcgttga

SEQ ID NO: 349835 - DNA, 1023 bp, Pseudomonas aeruginosa
atgctgatcgatgtccacgctcatttgttgaccgaagggatgttcaaccgccacgaattctggggacctttcatgaaggtccaagggcttacggtggggcactttgcgctcggtaccaagcagcccgccaaagcgtcttcggatgaggaagcgcaggccaaccttcttgcccgaatgacccacgaaagccgacgcaagctgatggctgagcggggcgtcgacaaactcgtcatgtccactccatcccattgcttcatgtactgggcgggcgatttcgcaaacgaatacgcgcgggtctgtaatgacgagttgtctgcgttctgtcgcaaggacccggagcatttcgatttctggtgccacgccaatctggcggacccggaggcggcagcgaaggaaattgatcgcgccgtgcggcagttgggcgcacgcggcgtctgcgtaggcggggccaatttcaatggactgcaagcgtatgacgagcagctattcccggtttgggagaagctctctcagctcgacgtgccgatcatggtgcatggctttaaccagtcgatctactggggcgaaaagcataccgatgacaagttcgaaaccacctcgatcattggcgattgcgtcgatgagacattgttcttctggtatctgatctgcggcggcgcgctggacgtatttcccaacctgaaaacctacattacccacgccggcggcatggcagtgtttcagcttggccggctgagcgagctcaaccgcgccatggcgccggacagccgaaacaagcggcccttgatggaatacatgcctaatttctatttcgatctggacgtgcatgcgccgggcttgcggcgtggggtagcggaagtggtcggagcggatcgcctgctatacggcaccaatttcggcggcgcctacgatcatggcgaccttactcatggcctgggtttgtccgaggaggaacgggagcgcatccgcagcggcaacgccattgagctgctcaagctggacgtctccgtgccggtcgtctga

SEQ ID NO: 349836 - DNA, 990 bp, Pseudomonas aeruginosa
atgccaggcctgatgaatctgttgttgccaattcttgccacgctgatatgggcagccagcacagtggtaaatcgattggccgttggcctgatagacccagcggccatttcgctctaccgctggctcgtcgcaactctggtgataactccattcgtgctggcgagcgcctggaacgcacggcaggttattcggacacattttgtacaactgttcgttcttggttgtctcggcatgtcgctgtatcaatcgctggcttatttcgccgcccacagcgtcaccgccacgtccatgggactaatcctggcaaccatgccgatgctgacaatccttctggctattccgttgctacatgccaggcctacggcgggaatgcttgcaggcgcgctcatatcctttctcggactggcctggttgatcagcactggcgacctgggcacgctccttcgccagggcataggcaaaggcgagttcatgatgctgatggcgtcgttgtcctatgcgctctattgcgttctggtcaaacgctggcagattccattgccgacatgggtatcgctttatgtgcagatactctgcggcaccctggtactggtaccgccttttctactgacgccctcggttgccttgaccgccgacaacctgccattggtgctcttcgccggcctgttcgcctctgccatggcgccagggttatggatgcgcgggctcgtctcgctgggcccggaaaagaccgcggcgctgatgaatctggtgccgctgttcacggctgtgctggcgatcatgctgctcggcgagacgctgcatctctaccacgcgatgggcggcagcctaatcctggtcggcatagccctggggcagatgagccagcgacgcatcactgacccaccacggcctcagacgaccggcacggagacgtccagcttgagcagctcaatggcgttgccgctgcggatgcgctcccgttcctcctcggacaaacccaggccatga

SEQ ID NO: 349837 - DNA, 843 bp, Pseudomonas aeruginosa
atgaacatcgatttgagcaacaaacgcgtcatcgtcacgggtgcttccaggggcatcggcttggccatcgcacgtgcctttgccgccgaaggcgctcgcgttgcaatctgtgcgagatctttggaagccgtagaaacagctggtcgcgagcttgctggcaaggccgctagcgtgattgcacgcgccgtcgatgtaatcgacacagagggagtgaggcgcttcgttgatgaagtagccgaaagctggggcggcgtggatgtactggtgaacaatgccggccagggtcgcagcggcaatatcgatacccttacacctgaggcgattctcgaacatgccaatattctgcagatggggcatttccgtttcgttcaggccgtggtacctcatatgcgtaagcagaactgggggcgaatcgtcgagatcaacgcgctggccgggaccattcccacgcccgacggcatcccatcggtgatcaaccgcgcatcctgcgtcgcgctgtcgaagtcgctggggatgtcgctggcgaaagaaaatatccttgtgaacagcctgaacatgggctggatcgataccgggcagtgggaccgtcattacaaggaaatgggccccggcgtgagccgcgaagagtttgacgagatggtgatgaaagtggtcccggttggccgttacgggaaacccgaggacgtgtccggtatggtgctgttcctatccagtgaatatgcgagcttcatcagtgccgcatcgatcgatatcgccggcggcatgggtggacagattgcatacttccctaccctcaagcgcgattttgccgccgccatcaaggaacgaaacgccgccaagtga

SEQ ID NO: 349838 - DNA, 1659 bp, Pseudomonas aeruginosa
atgaaagaatgccgccgcttcagatctcagccctcgcagctaacccgcatcgccctggcggtcgctgtgctcggtggcgcaggaaatgcctgcgccatcgaaatcgatttaggtaaccctgattaccgtctgcgtttcgacaacaccattcggtacaacctgggcgttcggatggaaagccaggataatcggatcatgaacaccccgacgacggatgagtcggatggcaaattcgacagaggcgatatcgtgacaaatcgtctcgatctgctcaccgaagtcgatttcgcgtacaaatatttgtggggcgctcgtctaagcgcggcagcttggtacgacgatgcctacaaggacggctctgtcgatagcaatatccccggatattcgaccagctatgacaacgaccattacagctcggaagtcgatcgttacgttcacggcccttccggtgagatcctcgatgccttcgtctggaccaatttcgacgtcggtccggtgccggtgaatctcaaaatcggccgccacaccaactattggggcgaagggctgctgttcggcgcgcatgccgtgtcttattcgcaggcacccagcgacggtgtaaaggccgttaccagccccggtatcgagaccaaggaagtgtttctgccggtcggtcaggtttcgatcaaggcccagctgaccgacaacttctcgatcgccgctcagcagttcttcgagtgggacaacacccgcatgccctacggcggcaccttcttcgggccggcggatcccttcttcgagggtccggaccggttcccgctggcccgaggcgtcaacctggaccatagaagcagcaagcgaggccgcgacacggccaactggggcgtgatgggcaagctcaatatcgagcagatcgagtccacgctaggggtttactaccgcgagttcgatgattaccaggcgtggctgacccccgagatcgacatggccggcggatcctaccggctgatctatccaaggagcgtcaagctcgccggtatgagcttttcccgcgtgttcaattcgatcgccgtcggcgcggagctttcctatcgcatggatggcgcactcaacgccaccggcatcgacgcccaggaccatgaaggcccgcgcggcgataccatccactttgtcgccaacgccgtttacggcgtgccacggaacttcattgccaacaacgcgaccctggttggcgagtttgcgtacagccacctggacaaggtgaccaagcacgaagagctctataaaggcgacggatattccggctgtatcgacgccaggaacgccgcgctttccggtggcaaggaagacggttgctccaccgacgattactacgccgtcgctgtcaactacaccccccagtacctgtccatcctgccttcgtgggacctcgaggttcctctgaccatcaactatggcatcaatgggaacgcggcgactgccggcggtggcagtgaaggtgctctggcatggtccatcggtgcgaagatgacctacatccagcgtcacgaattcagccttcgttatgcggacacctcggcacaagagaagaatctgccgaacggtggagttggtggtaacggtgcagtgggtacgacggaccgtggctggctggcgtttacctataaaacctccttctaa

SEQ ID NO: 349839 - DNA, 1359 bp, Pseudomonas aeruginosa
atgaaactcaaggtcgctcttggtctgatgctaagtggcttgtccacactgtcgatggcggcggttcctgccgaggaagccgcaaaactgggtgacacgctcaccccgattggcgccatcgtcgcaggtaacgaagcgggaaccattcccgcctatgacggaggtctgcgcaccccgccggcgggtttcaaacccgacagtggcgcgtgggtcgatcctttcgccgatgaaaaacccttgttccgtattaccgcgcagaacatggaggaacatgcggataagttgagcgatgggcaaaaagaagtcctaaaacgaaatcctgaatattacatggacgtctatcccacccaccgcaccgccgcttatccggaagatgtgctgcaggccacgcttcgcaatgccacggaatgcaacaccaagaaagatggtctggctgtggatgccagctgtcggggcgggattccgtttccaatcccgcaaaccggcaacgaagtaatgtggaaccagctgcttcgttataacgatggcaagtttggtaccacgacggcttcttccaatacctgggtggtggacagcaacggtggagtgaccaagaccgctacgcaatccaccttcgtcgagcggcctttttatcagacggatgtcagcggtcgcgatccggagatgttctatcgggtctactcgcttaccaaggcgccagcgcgcaaggcgggtgagctgaccggattgacggattatctggatcccaccgccaagccccgtcgggcctggagttacacgccggggcaacgccgtgtgaagctggctcccgaatttgcctacgacacccctgtgtcgagcatgggcggtctcgagctcttcgatgagctgttcatgttctccggtgtgcaggatcgtttcgatttcaaactcgtgggcaagaaggagatgtacatcccctacaacacctacaagttctatttcgattgcaaggaccagctgcagaaggcgcatccgaacccgacgtgcgagcgctgggagttgcatcgggtgtgggaggtcgaggcgaccttgaaacccggtatgcgtcacgtctacagcaagcgtacctactatctcgatgaggacacctacggtgccggcctgtatgacgcctgggatcagagtggtcagctgtatcgcgccatgatgctgggcggcgtgcagttctacgaccatgacattccttatatcgtcaagcacgccatttatgacttcaataaaggcatgtacggcgtgatcaatgatggcctggatggcggctatcgagttctgaccgaagcccgttcggagcgcgaactgaatccggaagcgattgtaatgagggaaacccagcgctga

SEQ ID NO: 349840 - DNA, 1140 bp, Pseudomonas aeruginosa
atgacagtcccagtcccgcttgctttgcgaaacactcttccggcacctatgacccgctgcctcgggaagtggctgaatgtgatgttgctggtccttctggtgccatttggcgttgaggcgtccgccgcgaccgagggcatcgataccttgcgtgagccgtccaagccaatcagcgccccggtacccctcattggtatggaccgtgctggcgatgtgctcgtaggcgttgggctgcacggcatgatcaagcgctccaccgatggcggcgcgacttggcagcaagtgcagagccccgtgtccacggacctggttcaggtgcgctttcgcgaccctatgaacggatggatcgtcggtcacgattccgtgctgctgcataccaccgatggtgggctgacctggtccgttcaactcgacggtcgcacggtgcttgcgcgtctcaaggcgttctacggtgagcgtgaggagcatggcgtcgagggggctgccgagatgctccaggaagtggagttcgccatgaacacctcggcgacgcccgatgtgctggcgtcaccgtttctcgacgtcatgttcaatgaggacaagattggctacgtcgtgggtgcgttcgggatgatcctgagaagcacggacgacggtgcaacctgggagccttggatcgagcaaaccgacaatactcgccgtatgcacctgtatggcctggaggaacgcgaaggcgttttctatatcgttggcgaacagggcttgctaatgcgtcaggatcctcagactcaacagttcacaacgatcgagacgccctataacggcacatatttcggtgtgcgtgcgcttccccacctgcttctggcctacggcctgcgcggaaacctgtatgcgagccgggacgatggagagcaatggcagcagatagacaccggcctcaatgcaagtctgatcagcgcagtggattcaggacagcagctgatcatggttagccagagcggcgcgatgatcgcgctcgacaaacaaagtttgagcgtcacacctttgcaggcaccacgcgtgggcgaagtgttcgcagccagcggaacaggacgagatagcgagatggtcgtgacttttttctcgggtgcaaaactcgtcgaaatagccaaggcgaactaa

SEQ ID NO: 349841 - DNA, 2502 bp, Pseudomonas aeruginosa
atggtagaccaaaagtacaacagtggaatgcccgtagttccggatttgcgcgatttcgataagtcgtccggcgggtttttcgagcgggttattttcaataaccgcgtgcttgtgctcgtagtctgcctgctggccaccatcgtacttggttacttcgctgctcgcatagacgtcaatgccagctttgaaaggatgattccgagcagcagcccctatatcaagaattacttcgcctacaaagatcagcttcctggtttgggcaatagcatccgtattgtcgtcgaaaacaagcaaggcgatatttacgacgcggaatatctaaaggtcttacaggaagttaacgataccttgtacctcattcccggcgtagaccgttcctggatgaagtcattgtggatgccgattgttcgctggaaggaagtgaccgaggatggcatcagtggcggggccgtgatgccatcggattatgatggcagcgaagagtcgatccgcagactgcagcgcaatattcagcgtgccggaattattggcagccttatcgctaatgacagccagtcaagcatgattcttgcgcctttgctcgatcaacatccgcaaaccggaaagtctctggattacggtgagttctctgatcagcttgaaaacaagatccgctccttcgagagcgacaagatcagcattcatatcgtcggtttcagtaagctggtcggcgatttgatcgacggcctttacagcgtgatggttttctttgccatctctgtcctgatcgccggcatcttcgtctacctctacatgcgttgcctgcgcagcaccatattgttgatcggcgtagcagtggccggggtcgtatggcttctcggtctgatgcagcttcttggatatgatctcgatccatattcgatcctggtaccgtttctgatcttcgccattggtgtatcccatggcacacagaaaatgaacggtattctccaggacattggccgcggtacgcataagtatgtggcggcgcgctataccttccgccgtctctttctcaccgggcttacggcgctgctttgcaacattgtcggtttcgcggtattggtgattatcgacattccggttatccgcgacctggcgataaccaccagcatcggtgtcgcggtactgatttttactaaactactattgattccggtcgcgctgtcttatatcggcgtgagcaaaaaagcagcgttgatcgctctcgagaaagagcgtgccggagccgaaaaccgcaactggctaggtcatatctggcacggccttgaccgtttcaccgagcggcgctgggccattgcggtgatttcgatatcggttgtcgtcactgtcatctgcagcatcgtcatgctcgatcttaagatcggtgatctggatccaggtgcgccagagctacgcgccgactcgcgctataaccaggacaacgcttacatcaccagccactatggtctgtccagcgaccagttcgtcgtgatcatgaaaaccgatccggacagctgtcggttgtatcagacgctgcagactatggaccggcttgcatggcaactgcgtcagacacccggtgtgcagaccaccagttcgcttgcagagtcgactcgttttgtgacctcaggcatggcggaaggcagcggtaagtggcttaccatcagccgcgaccaggcgatcaccaacgcgtcggtcgatgctgcgatgatttcttcgcctggcatcaccaaccagcaatgctcggttacaccgctgatcgcttatttgaccgatcacaaggccgacacgttgcggcgggtaatggaagtggttgaagcctttgcagccgaatacaacaccgctgccgattcagaacgaccggtcgagttcctgctggccgcaggcaacgctggtatcgaagcggcgacgaacatcgaggtggagaaaggcatcatcaccatgtacctggcggtatatggcgctaccgctttgctctgtctgctgacgttccgcagcattcgcgccaccatcgtcgcgctcattccgctgatcatgaccaccattatctgcaaggcgttgatggtctggctcggtatcggcctgaaagtcgcgaccctgccggtcatcgcggttggcgtgggggtaggcgtggattacgcgctgtatttgctcagtgtgcagattgccgtgcaggaacggggcggctcgcttgcggttgcatatcgtcggtcgctggacttcaccggcagagtggtagctctgatcggcttgactatggcggctggcgtgatcacctgggcctggtcgccaatcaagttccaggccgacatgggcatccttcttacgttcatgttcctttggaacatgcttggcgctttggtgctgatcccagctctgtcgcatttcctgctcaacccaaagaccacttcagcctcaccggaatcgtcggccatgcttgatgcgccggtcgaacaggctactcagaaaaaaaaactaactgacgcggctgccgctcattga

SEQ ID NO: 349842 - DNA, 819 bp, Pseudomonas aeruginosa
atgagcgccgaagtcaatcagcaggcaccgctggttatcaacgagtcagtccgggtagagcggggcgtctcggtcggctgggtcgtattgacccgcccgggccagatcaacgcgatcaacgacagcatccgtcagggtgttcctcaggcgcttcaattgctcgacaacgacccgcaggtgcgggtcattgtcatccgcggtgaaggcgagcgtggattttgcgctggcgccgacattaaggaacgtcgcggtgaagaaacctctctgcaggtgcgccagcggatggagcgttcgcgctggatcgagtcgctcgacggaattgccaagccggtcatcgctgcaatccaaggttattgcatgggtggcgggctggagtttgctttggcttgcgatattcgattcgccgcccccaacgcgatttttgcgcttccggaaaccggcctgggcctgattcctggcggtggcggtactcagcggctttcgcgagtcgtggcgccggggcgcgcactcgatatgctgctgacgggtgaccgtatgaatgctgaccaagcgttccagatcgggctggttagccgcctggctacggataacgcgactctggtcgaggaggtcagagtttttgccgagcgcatcgccagtaagccgccagcggcgtcggccttcgtcaagcaggccgctcgggctgcactggaactggacctgaaaagcggactcaatctcgaactcgacctgtttgcccttctagcgccaacaaaggatgtgcgcgaagcagcgcaagcttttagtgagcgacgcgagccgcgcttcacgggcgagtag

SEQ ID NO: 349843 - DNA, 819 bp, Pseudomonas aeruginosa
atgagtatgggcaagctggcggggcgtgttgcgatcgtcaccggtggtggcaacgggctgggcgccgagtgcgctcgggtgctggccgagcacggcgcttctgtcgcggtagtagatgtcgacggcgacgccgccaaccgagtggcggagttgatatcggcgcaaggcatgccaacccaaggctttcgcgccgatgtctcttccgaggaagacgtcaaggcggtgattgcccaggtaatggagaaatttggtcggatcgatgtactgcacaacaatgcggccgtgctgaacgccgaccaacgccagcgggaccgtgatctggccaacctggatatggaagcgttcgaccgcgctatagcggtaaatctgcgtggctccgtgctctgcaccaaatacgtcattccggtgatgctggagcagggcaaaggctcgatcattttcgccacctccgggttggggatgcagggcgacatgtcgctgactggctatgcgacctccaaagcggcgctgatgatgcttccgcgcctggtcgcgtctcaatacggtaagcaagggatccgtggcaatgcagtgcagatcggcctcgcaccgcagcacgaaatgcccgcgccgctgctggaaatcatgcgtgacaaccattgcacggccgaactgggcacgcctagacagattgccgatgtggtcgcgttcctggcctctgacgaatcctcgttcgtgaccggtacaacgctcgtcgcagacggtggttttagtagccacacgccttccctcgtagccatgcgagccctgtttgaaaagatggggcgaacaggcatgtaa

SEQ ID NO: 349844 - DNA, 1602 bp, Pseudomonas aeruginosa
atgaataataaaaatacagatttcgacgtcatcatcgtcggcggcggcacgaacggcttgtcagcgggctgctatctggggctggaaggcaagaaggtactggtgcttgaagccctggacaaagtcggcggaatggcttcctcgggatacttgatccccgaggcgccccagcatctcgtccatccctgtgcactggacatgatgtcaatgcgggttcacgcccatgttccgaaggaacttaatctcgaacggcacgggttcagatcgatagagctgacgccgggttatgtctacctgcatccggacggtacatcgctaatcttctggcgagaccgtaacagaactgcagcggaaatcagacgctacagcgaagctgacgcagcggcatttctcaaatttatggacgtgatcgacatgttcctggacatcgcgttgccgatgatgcgcgcagacccggccgaactgaatctgggggccaagttcaaggtcataggctctgcgctgaagaaccgcaagctcaaacccgagctgatggcgctgatgaccggctcggctcatcaagccgcccgtgaacgcttcgagcatcccgtgacgatatcggcgatgtgcgcgctgaccgggctcgcgggcgatataagcgccgatggcggcggcatctattacgcgttgctgggcttccttcatcgcttcggcgttggtcgggttatgggggggatgcagaagctgagcaacgccatgcaggcacggcttgaagagctcggtggccaagtattggtcagcgcatcggttgctgagatcgtctcggctggcggtcgggtcaagggcgtgcggttggtcgacggccgcgaattcacggggcgcgcggtgatagccggctgtcatcccaaagtggcgctggaaatggtcagcacgggcgaaattccgtcctatctgttgacgcgtatcgcgatggcaccggccaacgccaaaggctccggtccgttgaaagtggatgtcgctttgagcgggcaaatatcggtgccccggtatgaggcggccagaggcgatggagttgacctacgcaacacctgtctgctgataggtaccgaggaggccgtactggagaactttgcagcctccatacgaggtgaagtgccgacgcttccctacatcactatggcagctcccagcgcggcggacccgtcccaggcacccgcaggtcaggacgttttatacatatatccgccagtgatgccggtcaatcccgtggaaggttgggacgctataagagagcgtgtagccgatcagataatcgatcaggcttcggaatatgtcgaggggctcaagggcaacatcatcggccggcgaatcgaggctgcacctgacttcaccgcgcgtttaaatacggtgaatggctgcgtagtgcatatcgataccaccaccctgcgctccagcaccatgcgtccagcccatggactgggcggcaataccttgccagtggaaggtctttaccttggcagtgccggcatccatccgggcggaggtgtaaacggcatggcggggcgtctcgcggccaagcgcgtagccagatacctggccaaggtaagcaaatacgggagttga

SEQ ID NO: 349845 - DNA, 717 bp, Pseudomonas aeruginosa
atggtcaaacgaacgcccatcccctggcagcgttacgataaggagaataagaacgtgaagagtccggagccggccgagtcaggcaagcgcaacactatgaacaaactgttagctgccgcgcgcaacgagttcggcagcaaagggcttggcggtgcgagggtggaaaccatcgcgaaggaagcgggcgtcactaagcagctggtctatcactactacggctccaaggagagtctgttcgtcgcggtgctcgatgaatcgtctgaaagcatcatgtccgagctggtagcgctggaaatagagcagctgacgccgcccgccgcgctgcgagcgatgcttaaccgattcttcgaccagtactgccacgacccactactcggcgcgctggcactggagggcatccgttaccaccatgcccacgagaccccgcgcaaccggttcttggaaatggctccggggctaattaccaaagtcgatgacatcctccagcgtggcgccgccacgggagaattcaagaaggaaatcaatccaagattgcttcttgccacagcggcgctggtcaccaccggctggttcaccaatcgttattcgatgtcgaccctgaccggactgaataccgcctcacccgagggcatggcaatctggcggcaacattcggcggatttcatcctggcgggtatctcggttgcgcctggatgtgaagtacaggcgccccgatag

SEQ ID NO: 349846 - DNA, 1200 bp, Pseudomonas aeruginosa
atgagcaccgaaaataccgcgatggatctggaaatcgcttactcggcggtatccgaaatgtaccgcggcgcggatctggacatccacgccctcagccgggagatgcgccacaacgctcccgtatacgagggtgatttcgtggctcagtttggcgtaccgacgaacgccggaatgcaacagggcacgcgccctacattcaccctgttccagtacagcgacgggatggctgtcctgcgggacgggaccagtttcaccagcggattcatcgctgaaggactgggcgcgttctttgatggcctgatcattctcgcaatggacggtgagcagcatcgtcgggtccgcgcgctgttgcagccagccttcatgccgcaaacagtgaacaaatggcgcgacaagatcgactacgtgatccgccatcattttctggagcccatggtcgaacacaagcgcgccgatttgatggactttggtctcaactttccgatccgcgagatgtacgccttgatgggcttccctgatggcgatccggagaagtaccgccagtacgcggcctgggcattggctatggtcggtggcaatcagatcgatccggcaaaagcccctgaggcccgtcgccaggcgggcatcgcagtgaaggcgttttatgatgccatcatggaagtcgttctccagcgccgcgccgcaggtagtgaaggcgatgatctgatcggtcagttgctgcgcgccgagcacgagggccggatgctggatgaccacgaggtcaccagctttgtccgttcattgctgccagccgcgggcgaaaccacgacgcgtacctgcagctctgtgatcaccctgatgatgaccactccggggctgatcgaccgcatccgggcggactgcaacctgatacccgcgctgatcgacgagaccgtgcgctatgagcctgtcgccacattcaaggttcgcgagacgtccaaggatgtcgagatcggtggcatgcagattcccaagggttcgttcgttcagtgcatggtcgtgtcggccaaccgtgacgaggatgcgttcgagaaccctgatttgttcgacatcgaccgcaagaccaagccgtcatttggctgggttcggcccgcagatgtgcatcgggcagttcgtagccaagctcgagctgacctgtacgatcaacgcgattctcgacctttttcccaatatccgccgtga

SEQ ID NO: 349847 - DNA, 1032 bp, Pseudomonas aeruginosa
atgagaacctttaacgccattccagaacgcggagacttcggctttcagcagctggtggggccgcacaaggtgaccggtgccgccatggccggtactcgcggtttttttggactgcagctgagcaagagctcgccgttcggttctgtccgtgacgaagagggcaatatctattccttcgtccgatcgctgatggcgccaaacggtacgccgaacccaaccaagttcttatacttgaacaaccatgtggacggtaagaacctgcgcatggatttcgacaagatggcgctgcaggcccttacacccatgccagtccagaccttggaaggcgacaccgtgcgttggacgaaccaaccagcagagcaaggcaatcactgggaaatcaccgccaatagtgaacggttaacctggaaggaagacgggctgtttcagctcgaaggtcgtttgcttaccgggttgcagtggtatctgccgggcgtggagtggggcacgttctacgtatcgcagctgtgggatgtggctggcgtggtcgagggccgtccggtgaaaggcgccattgcactcgatcaattttacatggctgaagggggcgccattcactacaaaaaagatctggtggtgaataacaacaagcacgtcctctggtggtcctttgtcacggtatacgaggacggcagctgggatgctggctcgttcatggtgggccacgaccacctcggttacgcgattttcaacaatgaaaaaggtgaggtgcgcgtcaccactgatattgaaggccagaccgaacacaaggacggcagctatttcctcaagtccgcgaagatcgtcatcgagggcagggaagaatgggagtttctgccggacgagaagggcgaaatgatcgacttcgttggcggttttccagttaccgcgcagcaggaagggcgctggcgtcgggtgggcgatagccgcgagccgtcgcattggcttggctggggcgagtcagaccgacgcaacggctcggcgcgcaacgtccctggcgtggatatccgatag

SEQ ID NO: 349848 - DNA, 786 bp, Pseudomonas aeruginosa
atgaaattccgcgacaaagtagtgctgatcacaggcgccggccgtggcatggggcgcgccattgccctggaatatgccaagcagggcgccaagatcgtggtgtcggcccggacagcgagatacggcgaagaaaccgttgaacagatcaccgcgctcggtggcagtgcctgtttggtcgggggcgatatcgctgatcgaacagcgataaaaacgatggtcgacggcggcgcggaagcattcggcgcgctggatatcgtagtgcattgcgctgctgacgcccctcatggactcatcgccgagatgactgacgacagcatcgatcgtctcgtgcgcagcaacgtccaatcgctattttggctggctaaggatgccgcgccgcatttatccaaagcgaaggacaaaggtcgcctcattttcatttcttctggcgaagccaaccgcaaatacacgccgatgctgatcggttatggctcgagcaaggcgttcatgaacgctttcgcacgcgggctggcggtggagttcggaccgttgaacatcctggtcaacgtggtcgagccaggcctgatcggcactgaccggatgaccgaagcgctgggcgaagatctgccccataagctggctgagcatttcccggttgcgcgcctcgggcaggctctggacatcgctaatgccgtgctgtttctgacctccaacgaggcctcctacataaccggcacgtcgctgctggtggacggcggcgcaaccatggtctcactgccgatcgatgaaatactcaaggggcactaa

SEQ ID NO: 349849 - DNA, 1254 bp, Pseudomonas aeruginosa
atgacatcgacaaacgaaacaaatgagttcaagcagggctggcgcatcgtgctgcttggtttggtaggcatctgcaccagcatcaccgccgcgttgctctatggcttcgggaccatggtcatcccgctggaacaggccttcggctggagccggggcgatctgcaagcgtccatcacgttcctgtttgccggagtcgccatttccactcaattggttggcccgctgtaccggcgcttcgggcttcgacgggtcgccatcatttctatcgtgctgcaaatcatcggctatttcgcgatcacccaaatcgagggttcgatcggctggttgtacctggctttttttctgatgccgatcgtgtgcgcggggactatcgcgatcacctggacccagctggtcaatctgtggtttgagaggaaccgggggctggcgttggcggtcattctttgcgggactgggctgatggcaatggtcttgcccccgctggtggcgcggctcgtttcggagtacggctggcaggcgggttttttcgcgctgggtgcgatgccgctattggcgaccttgccgctgtcgttgctgtggttgcgcttgccctcggagactgtggcccgaaatcagactgcagagaataaaagcactgaactgcccggtatgtcatataagcaagccctgcgttccggaacctactggggtttcaacgttgcgttgattctgtcggtgtcgcttaccgtcggtatggtcaccaatatggtgccgatgcttcaaggcacaggtttgagcgcgcagacggctgctcaggtcttcggaaccttcggcatcgcgatcatcgtcgggcggctgctggtcggctatctgctagaccgctattcgccatcgctcgtggccgcgatcagcttggctctgccggcggttggctgcgccatctttctgttttccgatggccagaacgtgccgctgttggtgttggctacgctgaccatcggggcgagtgccggtgctgagttcgacctggcggcgttcctgatggcgcgctatttcggactcaaggactacgcccgcatattcggcctgcacttggggttgattaccgttgtctcaggcatggtgccaatgctttttggttacctgttcgagctttatgacggttactccgctgtgctgacgagctgtctggttttcgcgattgttggcccgtcgattttgctctggctgaggatggagccggcatatcgcgcccgccaacagcaaaccgcctga

SEQ ID NO: 349850 - DNA, 357 bp, Pseudomonas aeruginosa
atgagtgacgaggcaaaacaagctatcgaacgcttcctgcatggccaagtggagtgctggaacaacggcgacaaggaaggttttttcgagcattaccgcagcgtgactcgtagcggtctgagcattgaattcgtgggacgaccgctgccgacggactcttgggaaatcctcgaagggatgtgggcgcagcaacaaccgcgctgccgcatcgaagtcagggaaaccatcattaacggtgaagaggccgcgtgctaccactacaacgcaatgcgtgacggtaatggtggtatcgaaaccattgagctgtaccgcttcgacggcggcaggctgtgggtgcgttatttcatcaagaactga

SEQ ID NO: 349851 - DNA, 234 bp, Pseudomonas aeruginosa
atgaagatattcagcaaagaaggcgtggaaatgatggacatcaagtccatctcccgcgatggcgagcgattgatagtcaaaggcaaggtcatgggcgccatgagcactacccttctgatcaagccggaagattgctggcaagccgctcgattgctagggttgcgcgtgattatgtacctgccgctgctgctgctaaaagggtactggtcgttacgcaaaaaggatgtagcctaa

SEQ ID NO: 349852 - DNA, 759 bp, Pseudomonas aeruginosa
atgaatcttgggctcaacggaaaggtggcgttgataaccggcggcacgacggggattggattggcagcggcactggctttgggcgcagaaggcgctcgggttgtggtgtccggaaggcgtaccagggagggcgagcaggctgttgctgccattcgcgagctaggagggctagcagagttcgttcaggccgacgtcagccgaggcgccgaagtacagaggctggtcgagcaaacggtgcggctttgggggcagctggatatgctgatcaatagcgctggcattgagggtacgccgttcgtcccggtagccgattattccgaggatgactgggatcgggtattggggatcaatctcaaaggcacctggctctgtatgaaatacgcgataccccacctgcttcggcagcagggcgcgagcatcgtcaatgtttcatcgatcggcggcgtcaacggtgggtctctcggagcggcttaccatgccagcaaacacggcgttgtgggcgtgactcgcgcagctgccattgaatatggcgcccaaggcctgcgcataaacgcggttgcgccaggcgcatttgccaccgagatgtccgaacgtctgttccgcggggataaacatgaagcggttgcccagaccaacccaatgaagcgctggggccagctggaggaaatcgccggcgcaattgtctggctctgttcgcctgcggccggctacgttaacgggcacacactcgctgtcgacggcggctttttgattcagtga

SEQ ID NO: 349853 - DNA, 1197 bp, Pseudomonas aeruginosa
ttggataccggaactacaacccccacgcggctcaacctgtcgatcatcttcattgtctgcttcaacttcatgtcctacgtagccaatggactgcccctggccgtgctgcccggcttcgttctcaaggaccttggattcggcactgtcttggcaggcatcgtcatcggcacgcagtacgtgtcaaccctgctatcacgaccactggccggagtgctggctgatcgcttcggcgcgaaatgggctgtcatcgtcgggctcaccggccttgcgctttgcggcgttctgaccacggtggctattgttatgcatgcctcgccctggctcagtgtctcgatcctgattggcgctcgcatcatccagggcatcgcttctgccatgatttcaacgccttgttgtacctgggccatcgggttatacggcaatgcgcataccgcacgagtgatgtcctggaacggcattgccgcctatggcggtatcgccgtcggcgcgcctttgggagtactgatcagcgatcaattcaacctggccagcatcgggctgttcattgttttgctgggcctgctcgcgctgcccctggcggcagttaggcgcccagcaccgctgttgcgcggcgaacggctgccctttttcgacgtgttctggtcggtgacgcccaacggcttggcattggcatgcagctcggcaggctttggcagcctcactgccttcattgcgctgtatttcgacagcctcggctgggcgaacgccgcatggtgcctgaccggcttcggcgtcgccttcattatcacccggctcgtcacgcctaacgttgtggtacgtttcgggggctacgcaatcgtgacagtttgcctgctgatacagggcctcggactgctgctcgtctggctggccccctcgcccgaggtcgcgattctcggagcctcgctgactggcatgggagtatcctgggtttaccccgggcttgccgtagaaaccctggcgcgtacgccagacgccaatcgcaactccgcgttaagcgcgctttcgctgttcttcgacctggcggtcgggttggcaggccccttgatgggtttggcagcagccagcctaggccttggtcacgtgttccttggctcggcgctactctctgctatcggcttcatgctggtggtatcccttcgcagacgataccagagccagccgctactagcgcgctga

SEQ ID NO: 349854 - DNA, 837 bp, Pseudomonas aeruginosa
atgagcagaacctggttcattaccggcgcttctcgcggcctcggcgcggcgattgctcaggccacgctcactgctggcgataatgtagtggtctgcgcacgccggctcgaacagctggataagttcgtcgcgcaagcccccgaaagagcgcttgcggtggagcttgacgttacccgggaggaccaagcgatagcggcggttgaggctgccgttacgcgttttggacgcatcgatgtgctggtcaacaatgccggttatgggcaacttgcacccttcgaagaaaatacacctggcgatgccgagcggcagttcgccaccaatgtctttggcgtgttcaacgtatgccgagccgctttgccgatcatgcgtgagcagcgcagcggccatatcttcaatgtgtcgtcagtcgctggtttggtcgccatgggaggcgcggcgttgtactgcgcctccaagttcgcagtggaaggattttccgaatcgctggctcaagaagtcagccagtttggcatcaaggttacgctggtcgagcctggcgtattccgtacggatttccttgacccaagctccgcggctttcggcgccaatgggcttgaggactacgcaacgtttaccgcgaagatcaaggcaggctcagccgccaacaaccatcgccagacaggcaatccagccaagctgggcgaagcgcttgtgcagctggccagcatggaagagccgccgctccgttacgtcgcggggtccgacgcctaccaagcgatcaccagcaagctcgaaaaggtgaaggaagaaatcgagcaatggcgtgacttgtccgcttcatctgacggcgcttcctag

SEQ ID NO: 349855 - DNA, 1236 bp, Pseudomonas aeruginosa
atgtcactcgcctcggtagtgatcatcggtgccggccacgccggctttcaggtagctgcctcgctgcgtcaggaaggctatgacggaaaaatcaccctaatcggtgatgagccaggcctgccctatcagcggccgcctctgtccaaggcctacctgctcggcaagatcaccgagacgagtctgctcttccgtcctgccgaattcttcgacactcaacgtatcgagctgttgcatgaccaggccacggcgatagaccgtttgaaccgcagggtattgctcgcttccggcgccgttgccacctacgaccatctggtgcttgccaccggcgcgcacaatcgtccgctgcccgttcctggtgccgaactggagggtgttttcggcatcaaggccaaggccgatgctgatgtgctggcgccgctggtaaaggaagcgcgaaatgtcgtcgtggttggcgccggctttatcggcctcgaattcgcagcagtcgcagcagccctaggcgctaccgtgcatgtgctggaactgggggatcgtcccatggctcgcgcgctgtcgcgagaaatgtcggaggtattccgggatgcgcatgagaattggggtgtccattttgactttcgtcagggcttggcacgcgtcgtcggggacaacggacgggtatgcgcggtagaaacctccgatggccgtacgctgccggccgacctcgtggtcttcggcatcggcgtgatccccaacgttcaactggcgaccgaagcaggcttgcagatcgaaaacggcatcaaggtcgacgccaacctgctcaccgtagacccgcagatttccgcccttggcgatgccgcttgcttcccctgcctgcacaacgatgaacagccgacccggctcgagtcggtgcagaacgccgtcgatcagggtcgctgcattgcggcgcgactgatgggcaagcccgcgccctactccgccttaccgtggttctggacagatcagggcaacctaaagttgcagatcgccgggctctcgaccggttatgacagcactgtggttctaggctcgatcgaggcgcgtgaagtatcggtgctgtgtttccgcaatcaacatctggtcgcagttgagtcctgcaatcgcatgggagatcacatggcggcacgcaagattcttgcccggccgcccaagctcaccccacagacagcagctgccgaaggcttcgatctgaaagcctgggaagcggccaatcgcgactga

SEQ ID NO: 349856 - DNA, 321 bp, Pseudomonas aeruginosa
atgcctaccttgatctttatcgaacacaacggcacgcaacatcaggttagcggtgccatcggtcagtcggtgatgcaggccgcaacctttgcctcggttcccggacttccggcggactgcggtggagcctgcgcatgcgcgacgtgtcacgcttacgtcgaagaagcgtggatgcaaagacttcctgccgccgaaggcatggagtcggacatgctggactatgcgttcgagcggcgcgagaacagccggttgacctgtcagctggtgatcagcgaagccatggacgggttggttatccacctgcccgagtcccaattctaa

SEQ ID NO: 349857 - DNA, 1269 bp, Pseudomonas aeruginosa
atgcccccttcgaagaacgaagtggcgatcgataccctcgaatttcgccagagctggaaaatactgattctcgccgtggcgggcgtcgcaatcagtatcaacgcggcacttctctatggcttcggtaccctcgtcgtaccgctgggcgatgcctttggctggagcaagagtgagcttcaagcaagcatcacctttctgttcggtggcgcggtcatttcgctgcagctagtcggctggttcaaccttcgctacggcatgaagcgggtcaccgtcgcttccctgctgctgctctctctcggctacctagcaaccacgttgctcactggatctatctggtcgctgtatttcgctttcgccgcactacccattcttggcatgggtgcgctggcagtcacctggacccaattgctcagcctgtggtacgaccgcaaccgtgggctggctctggcgatcgggttgtccggcacaggcatcacggccgcaaccattcccccattgatggcctgggggatcggccaatgggactggcgcgccgcgttcataattctagctttgctcaatctgctggtactgcttccgcttatcctactgtggtttaaggttccaggcgctgccggggcccagtcagacaaaagggaggccgatctacagaaactgcccggcatgtccttccgcaaaggtatgacctcgcgaaagttctggacctgcaacctcgcgctcgggctggtgatttcctcgatcgtgggaatggtcaccagcacggtaccgatgctgcagtccagagggttgtcggcaagcgatgcgaatttgatcttcagcggctttggcttttcgcttattttcggtcgcatgctgatcggctatttactcgaccgtgtgtggccgcccggaatatcggccatcagcctggcgcttccagccatcggatgtgcgatctatctcagcggaacgggggagttttcttcactgctgctggccgcggtgctcgtcggctttggcgccggggcggagttcgatatagccgcattcctgatcgcacgctatttcggtctgcgcgaatacggccggctgttcggcgtgcatcaaggcttgaacaccgtggcctctgctctcgccccgttgctgttcgcgtacatgctgagcaccaccggaaattacaacgccatgctgctctattcagccgcctgttgcctcgttggcccgctgttgctgcttacattggggcgaacaccgcgctttgccgcgttgcccatgctgacccatccctga

SEQ ID NO: 349858 - DNA, 1674 bp, Pseudomonas aeruginosa
atgccaaccctgggccgcttcaccattggagcgaagctcctgttgcttccgctttttttcatcgtctcgctagtcgtcctctcgggcgtcgcctaccaggggctggaaaagcagcaggccgtgatagatgaaatagaccagttgcgatttcaacaatacaaacgggttcttgaaacgtctgcggcttcccaggcggcgatgatcaacgcgtacgccatggtggtccgaattctcgagtccaatgggcaggcttcaagtgaggagctggagttctatctggtagagatggatttgagttccgctgagatgctaagcctgcttgacacggcggcgaaagaaacacggcttgtcgaggatgagcagactgcttaccagaccgtgcgggaacaagcggaaatttatgcgcacggtttggcggacatgaaacaggctgccctgagctacccaccgcaagcggtatcgcttcttgggattgtacgtgcggatttcaacagtctttccgggcagttcagccgcttgctgaccctgcaggaggagctcacctctgcagcgtttaccggtgccagcgaccgggtaaaaaccgtagtggaagtgctcgccggcgtgctgttggctgcaatcgcggtttccttgcttgcgagcgtcatgttgcggggccaaattgtccgatccatccgtgtaatcgagcacgcgtcgataaagctgcgcgatggcgatctgactcagcgtgtacgaatcatcggtcgtgatgaaatcgcccatacaggccaagcgttcaacgagctgatcgagagctttcagcaggcggtgcgccgcgtggcgagcgtggcagcagcagtgggggcttcggcggaggagctggttgtgacgtcaacgcaggtcgcgcagagttcggccagtcaatcctccgctgtgacggaggtgtccgctacggtcgagcaaatgagcactggcatcgcctcgatatcgtctcatgcgcaggaactgcgcagtgccgccgatgccagcctgaagggggctgaggcggggcactcgacactgacgcgactgcttcgagaaatagaaagcgtgcgccaggccttcgccgccatccgcgtgtcggtgggtgatttcgtagagagcacatcggcaatcacagcgagcatcacgcaggtaaaggaattgtcggctcagaccaatcttcttgcattgaacgcggcgatagaggcggcacgtgcaggcgagagcgggcgaggcttcagcgtggtcgccgacgaggtaaggaatctggcgcaacgctctgctctggcagcgaattcaatcaatgacctcaccttgaggttggatgatcagtcgggagtggtcgaccaagcgctgcaagctggtacggtcgcgctggacgacagcagtaagctcctcgtggaacttgagagaacgctgcaacaggcagccgcgctggtaggggattcgacacgcggcgtggatgagatcgcaagggcagtcgagactcaaagtgaaggtgggcgtgatatagcctcgaatgttgagcgcatagcgcgtatggctggcgagggggatgcgatcactcacagtgttgcaagcgctgttgcggggcttcgcgagctttcacaggaactcaaccttgcggtgggccgtttcagcttcgaatctgaagcgatggaatgttcaaaataa

SEQ ID NO: 349859 - DNA, 762 bp, Pseudomonas aeruginosa
atggtgggtcgcttacagaacaaggttgcgctgatcaccggtactggtggtgggcagggcagggcagccgcactgcgtttcgctcaagaaggcgccattgtggtcggctgcgacttcaatgggccggcgcatgaggaaaccgctgcgctgatgcaggagcagggtttccgcttatatggcatggctccgctggatcttggcgaccacgaacaggccaaggcctggatcgacgccgccgtggccgagcacggtcgcatcgacatcctatataacaacgcttcggccgcgcgttttggtgcggttaacgagatgtcgatcgatgactggcactacaccatccggaacgagttggacctgctgttctacaccaccaaatacgcttggcatcatcttgccgagcagcgtggcgtgattatcaatatttcatccactgcagcttggggcggctccaaggtcgccggtatatcggcgcattcggctgcgaagggtgcggtggtgtcctttacccgccagctcgcggtggaaggtgcgccggttggcatacgagctgtcagcctcagccccggattcgttgcgacgcctggtacccgagcatttctggaaaatccggaagcgcgtgcagcgttgctagatggcgtactaatggatcgtcccggtgagcctgaagaggtggtcgccatggcactgtttgtggcttctagtgaggcctcgttcattaccgggtcggatttcgtcatagacggcggtctgcttgcaatctag

SEQ ID NO: 349860 - DNA, 942 bp, Pseudomonas aeruginosa
gtggatataatcggcatcggttacatgggcttcgaaaccactaaactcgatgagtggcgtgactatggtccaaacgtcatgggcttcggaatcggccgcagtcccgagagcgaccccgattcgctttatttcaagatcgacgatcgccgccatcgttttgccttccaccccggtaaggtcgaccgtctcgcctatataggctgggaagcgataggacggatggccttcgaggatgcgttgaagaaattcaccgctgccggcgttgagttcacccgcggcgacgcggagctttgcgagaagcgcggcgtgcgcgagctgatccgttttcgcgatccggtcggctatcagcatgaactattttacgcacaaaaatggacgccacgctccttcatgccggggcgctgccatggtggcttcgttgccaacgagcgcggtgctgggcacgtcgtggtgatcacgccggaatacggccccgaactcgagaatttcctgatcaacgtgatgggcttcagctggtatggcgcaggcgctggcaagggtcgcaccggctttttccgttccaagctgaaccatcacaccagccatgacatcgcatatggtttcgggccggggcgtatgggtgtacagcatgtcggcatcgttgtcagcagcatccgcgacgttggcgagacctacgacatcgtgcgtaaacgtgagctgccaatgatgatgacgctcggccagcatacccaggacccgcacgtgtccttctaccatttcacgccttcgggctttgccatcgagaccattgccgagatcgagccgtggcagggcgatccgttcgaactcaatccagaagtattgagcgtatgggggcatgaaatggttggccccatcctcgggccgagcgtgaaaacgcctgaagaggtactcgatccggaatacttggccagcaagcgctga

SEQ ID NO: 349861 - DNA, 897 bp, Pseudomonas aeruginosa
atgcgcatcgcgcgcgtggaagttgccggcgaggccttttgggccttgctggatgccaatagcgtttgcctgcgggccattcgggcgcctttcagcgaatgggcaccgtcgcttggcgagcaaggggaagcggcgctggacctcgacgctgagtggattcctctagcagcgtgccgcctgctaccgccacttcagcctggcgggcggattttcggcgttggcctcaactatctgagccatctcgagcggctaggtagcaaagcgccggcacataccctggcgtatttgattccggaatcagctctggttggcgcgggtgaagacattcagtttccggccgtgacgggtgagctcgactatgaagtcgagctggtcgccgtggtcgcccgtcctctactggacgagccgcaggcgagcgcgtgcttgctcggctatacggttggcaacgacatcagtgcgcgagatgcgggccggcagatcggtcgtctcgacctgcttacgcaaaaggccatggatcgcactactccgataggtccttggatagttacgctcgatgagctcggtggtcccggtcagccggcactgaatctgcaactgagcgttaatggtgaacagcgtcagcaggacaacaccggaaacatgattttcctggtggacgagcttctgaattacctcgatgcacgaataacgcttcgcccaggggatatggtttttactggctcgacgcatggcgtggcgctggaaacgggcaacttcctaaaacccggcgatgcgatcgatgcccgaatcgagggcgttgggcaactgtgcaaccgcgtcggtgagcggcgcgagctgcatgctgcacgcaaggtgggccggcttgggctgcctgcgggtggtgccgttataggctaa

SEQ ID NO: 349862 - DNA, 1587 bp, Pseudomonas aeruginosa
atgaaagagggatcaccctggattccgttccgtcaccgagtattccgaggcctctggtttgctgctgctgtcgtaaacctggccatctggatgcaaacggtcggtgcggcctggatcatgacgacgctgtcgtcgtcaccgctgatggtctcgctggtacagacggcgatgacgctaccggtctttttgttcggcctgccaggtggagtgatcgccgatctggtggatcgccgccgctggctgatcgtaacgcaggcgacgatgttcggcgcggccgcagtcctttgcctgcttgcctacagcggcgagctgggtgcctggacgctgcttttgctgacctttgttctgggtactggcagcgcgttgggaatgtccgcgtggatggtgaccatcgttgatgtgttgccgcgaagtgaggttccggccgcagtatcgctgaatggcatcgcgaccaatgccgctagggcattggggccggccattgccggcgtgctgatcgcatactggaacgcggcatcggtgtttctggtgattgcactgtgcatggcggccgtgatcctgtttattctcaccttgaaatcgagccggcaggcgcatgacctgccaccggaaacctttagcggcggcatgcgcagcggtttgcgctatatccggcactcgtcagtcttgttcaatgctttgaaacaggtgttcgtttttaccagttgcgccagcgcactttgggcgctgatgcctctggtagccaaggaagagctcgacatggacgctggcggctatggcttgctcatggcattcatgggcggaggagcagtggtagctgctctcaatctaacgaagctgtatcgccgatttacgttgcgcacgctcattgcctcaggcgcgatcgcttttgcagctgcaacacttgctgctgccctaacgcataaccgttacgtcgtgtgcgcgatgctgatcttcgctggcatgggctggatggccgtgaatgcgaccatctccacggtcgtgcaaacctacgcggcgaactgggtgcgcgcccgggtcgcttcggtgtacctgctaatgcttatgggagccatggcgctgggcggggttttgtggggggcgttggcagaatatataggactcaataacgcgctcatcatttctgccgcgactattctgttggggcttcttatcacccgtaatggcccaatcgagttgggtaacgaagctgatttcgctgaagcacagcagaccgacaagctggtgctggcacgcgatgtttctcactccgatggtccggtgtctgtggaaatcagctaccgagtcaatgatgccgaacatggcattttcgtgcgcacggcctatgaggtcggccaatccagacggcgaaacggggcacagaactggcggctttaccgcgatctgagtgaaaaaaacctttacgttgagcgttttatcgtcgagtcctggctcgaatatctgcgccagcaggctagagtcaccaaaggtgacgagtctagagaaaatagcttgcagcgattccgatgtgacactttggcaacgcgccgctacatctaccaagccccttcggtaaacgatcagtaa

SEQ ID NO: 349863 - DNA, 795 bp, Pseudomonas aeruginosa
atgaatagcaatgaaattttagacctaggtgaacagcagaaggccaacggtgccgtccttgtcaaaccggtgtctaatgcgattcgtatcttgcgacatctgagccaagtcggtacgcctgagcgctccgttgatatcgcacgccagctttcaatcaatccaagcacatgctttaacatcctgcgcacattggtcgctgaagacgtggtggatttcaatctcatgtcaaagcgctattcggcggggatagggctggcgcgtctcgtcgagcagttggtcacccaggggcagcgggtgcaactggcgaagccgttattgcaaagcctggctgcgaggcagagcatcactgtcacgttgtggcggcgcctgggtgcggaccgcattgtgatcgtcagttccgcggcaagccccacggacgttcgaatcgatatggccgaagggcaacgtctgccgatgctgatgggtgccagcggcagattgttcgctacgcagatcgatctcgacagccccgaaatacgcgcgacgtacgacagcatccgctgggctcgaccgttgcctttcgatatgtaccgggaagaggtacgcgaggctcagaagcgaggctgggcaacagacgatggccatttttccgtgggcattctggccgttgccgcgcctgttttttcccccggcggcagcattgactttacggtttcggcagtgatgttccgcggtcagcgtgatgaagagggcatcgccgaattgggcgatgctctcgtcgaattctgcagcgaactggccagcgtcctcttctaa

SEQ ID NO: 349864 - DNA, 399 bp, Pseudomonas aeruginosa
atgcctagaaaactacccgcgctgaacgccgataccctcgccttctggcagggcggcaagcgaggcgaactgctgattcaccattgcgaagcatgttctcagttctttcatcctcccggtcccatatgtcctcgctgtgccagcttcgaggtcggcccacgctcagtctccggtaaaggtacggtggtgagctacacgcttaactaccagccatggaccgccgaactcgacgtgccgtacgtcgtagcgatcattgaattgatcgagcagtcgggtctgcgctttgtcagtaacgttatcggcatggatccgcaacaggtgcatatcgacatgccggtccgagtcagcttcctgaacgtcgaggacgtctggctgcccatgttcgaaagggatcaatga

SEQ ID NO: 349865 - DNA, 702 bp, Pseudomonas aeruginosa
atgtcccagtctttgcaggacaagaccattgtcgtcacaggcggcttcggcgtgcttggtagaacccttggcgatctgcttctggcccgaggtgcccgagtagcgctacttgaccgcgccgagctgtccggctcattccctgaagctgcacaactgcatgccatcggcggcgttgacctgacgtccgtcgacgcggcagcggaggcattgaacagggtagtcgagcatttcgggcgcatcgatggattggtcaacgtagccggcggtttcgcctgggaaacgcttgaatccggaagcctcgacacctgggatcgcatgtatcaaatgaacgtgcgcactgcggtagtggcctcccagacggcgctgccccatctcactgcaaccggcgcggggcggatcgtcaatgtcggcgcgttggccgcactcaaggctggcatgggcatgggcgcctatgcggcgtcaaaggctggcgtggttcgccttaccgaagcgctggcagaggaggtcaaggaccggggcgtcactgtcaatgccgtactgccgagtatcatcgatacgccgactaatcgcgccgacatgccggacgccgatccgggccgctgggtatcgccaacagcactggcatcggtaatcgcgtttcttctgtcggacgaagcggccgctgtaaccggcgcctgcctgcctgtgagtggtcgcgtatga

SEQ ID NO: 349866 - DNA, 999 bp, Pseudomonas aeruginosa
atgaggctcgtaacctataccgatagcgctggcttcgagcgcgccggggcattgatcgaaaatgatgggctgattgtcgacctgcagactgcctatcgcagtatgcaaggtcgtgagagccccgaattcgccagcgttctgacgttgatcgaaggcggcgaacaggccctcgaacaagctcggacgctggtagccaaggcgccctccgcagctgtcatcgaacgcgccaccgtcaagctgcgcgcgccgatccagccaccgccgcagatgcgtgactgttcatgcttcgagctgcacttgaaacagagtttcgccgccgccagacgagcgcgtgccctacgtacgccggacccggaagcgacactgaaagcgatgaacacgggtgccgatgaccgggtaatcgagaccttcaatcgacagccgatctattacaaatgcaaccgctttgcggtagtcggtatcgacgatgagtttcagtggccgagctttagcaaggcactggatttcgaactggaattcggctgctacatcggtaagcggggcaaggacataagccgtgacgcagcccgctcgcatattgtcggctacaccattttcaacgacatgagcgcgcgcgacgcccaggcgaaagaaatgtccggaatgctcggccctgccaagagcaaggatttcgacacggccaatatcatggggccctgcctggtcacctctgatgaactaggcgatccctatgatctggacatggtggcgcgggtgaatggcgaagaatgggggcgcggtaacacgcgagacatgcgctggcagttcgaagatgtcatcgctcatgtttcacgttcggaaaccctgtatcccggcgaatttctcggttctggcaccgtgggcaatggttgcgggttggagcagttgcgttatctcaagccaggagacttggtggagctggaagtgcagggcatcggcgtgctgcgaacccgtgtcggcaccgccacgaacgacgcctga

SEQ ID NO: 349867 - DNA, 576 bp, Pseudomonas aeruginosa
atggcagaagttcaacaacgcggcgaggaccagatccagccgggctctccggttggcaccaaacgcgtgccggtcggggctgatgtctacaatcaggctgtgaccttcctttatgaggaggcaacgctgcttgaccagattcgtctgcaggaatgggccgcacggcttgataccgatctgatttacacggtgccgctgcgacatactcgcactcagtcagaactgtcggagagcatcgtgcgtagcgtgcagcattaccacgatgactatcgctcgatcatggggcgtgtgcttcgcctttccggcaagagtgcctgggcggaagacccgccgtcgcgtacccggcggttggtgacgaacgtgtttgtcgaggaaaccgccaaccctgatgagtacgtggttaccagctatctgctgttgacgcgcagccggttcaaggaccaccacgtcgacatcatcagcggtgaacgtcgcgacgtgctgcgtatgcgtgaggacggcttcaagctggcgcggcgcgaagtcattatcgaccaggccgttctgggcactccaaacctcgctgtatttctctaa

SEQ ID NO: 349868 - DNA, 744 bp, Pseudomonas aeruginosa
atgagtacgtttcgccgccgagtggacatagcgacctgcgaagaacacggcgaaggtgaagttcgcgcggcgctcgaagatgactttcaccactttcgcgtatgggcaaaataccaagcaggcgcactgattgctgtcggtggcgaagcgatacgatacccctacaccgcttgcctgcaggcaactgagccccttgagcgcttggtcggcatgcagctcagccgggtcgcccattcggtaacacgccagacggacgcaacgcaccagtgcacgcatctactcgatctggcagggctggcgattgccgcagctgcccgtcagagtcgcaagcgtcgttacgatatcgagattcctggccgagtcgacaatcgaacaatcgcgagattgacgcgagatcaggactggaaactgaactggtccgtaaatggtccgcttatcgaggctcctaaggcttatgccggagtcaatctacgcgaggggatggcgcgctgggcgttgcaaacgttatcggaagaggaagcggaggctgctttgatactgcgccgctgtacgctcatttcgctgggaagagaacgtgacctggacaggcagacacatgcagtcccgagcggactatgctttagccagcaacccgagcgcgcggaacaagccatacggattaagggttcaacgtgggatttcggatcgtcgcaagaacaactgtgtgctagtgatcaagattggctgaacagccaaggatcatag

SEQ ID NO: 349869 - DNA, 801 bp, Pseudomonas aeruginosa
atgaaactgctacaagagcgtgtggcgcttattactggttcgggcggcggtataggtcgaggtgtcgcgttgagcttcgccaaggcgggcgctgcggtggtagttgcagagctggacgaacaaagcggcacggccgttgcgcaagagctgaaagcgttgggcgccagagcgctctttgtgaagaccgatgtttccagcaaggaagatatcgaggcggctattcaggcttccgtggatgaattcggtgggctcgatgtcctggtgaacaacgccttcgcgcctacgcccaacgtcctgcttgaagataagaccgatgagatgctggcccaaacgctcaactccacggtttgggcggcctggtgggccatgaaggctgcgctgcctcatatgaaggcgcgtggcggtggaaagatcgtcaacttctactccatcgacaccgagatcggtgcgtggctgcatggcgattacaacaccgctaaatcagccattgtcggcctgacccgcagcgctgcctcggagtgggggcggttcaacatttgcgttaatgccgtagcgcccacagccatgggcgctacttttcacaagctggcggcggaaaacccggggttcgcggaaatgtcggcctcaatgcggccattgggacgctgtggcgatccggaggaggacatcggcccggtagtcgtatttctggcatcggagatgtcgcgtttcattactggcgagaccattcacgtggatggcggcctgcacttgccgggctacaactcacgccctaaagacgttccagttcgggagtactga

SEQ ID NO: 349870 - DNA, 1632 bp, Pseudomonas aeruginosa
atgagcggcacgggaaatacagacacctgggcagtaggcgaaagagacactgtcatcgcagcacttgagcgcgctgtagcgcggcatccagacaaggtactgcttgattttagcggtgatttatacacatacggtgaaactgatttactttctaccaaaatggctcattcgctcgcttcgctaggtgtgaaggcaggcgaaacggtattgacgatgctggacaacaacatcgacgccgtcgtgacatggctcgcgatcaacaagcttcgcgccgttagcgtgccgatcaataccgccttgaagggcgagtttttgcgccaccagatagccgacaccaataccaaggtggtgatctgcgaggcggcctatctggatcgtatagtgccgcttgcatcgaaattgtctgaggtgcagagcattctttaccgtggccagctggaatcgcttcctgaatgcgccatttcggtcgcttcgctggatgagttccgcggccatgacgaaacgcctttcgaaaccaagcctcagccatctgatctctcctgcctcatctacacctcgggaaccacgggaccatcgaaaggctgcatgatcagctacaacttcatgtgcaacttggcgcgcctgcaattgcgggccggacctgcgaacgagaacgacgtaaccatcacgccgctgccgctgtttcatatgaatgccctgtgcgtgtcgattatcgccagcattctggtgggtgcccgggcagcgatactgccgcgcttctccgtttccaacttttggcaggaagtcgaacgctcaggtgccaccattgcctcgattctcggtggcatgggcgggctgctggcaaaggcgcctgaaaacgacgcgatgaagcggtgttatggccagatccatacggctcgcggcaatccgtatactgaggagaccaagaaaatatggcgtgaacgcttcggcaccaagctggtaggcggtaatggctacggtctcaccgaggcctgcgtgattacctcgcttgcaggtggcgaatatgcggcgcctggctcgtcaggcaagcgcatcccggacttcgatgtacgtattgtcgatgatgaagatcgtgaagtaccggcgaacacgtccggtgaggttgtggtacgcccgctgcgtccggacatcatgttccaaggctattggcagcgcccggaggacaccctgaaactgatgcgcaacatgtggttccacacgggcgacatcggcaagttcgatgacgacggcttcttctatttcgtcgaccggaaaaaggactacctgcgcaggcgtggcgagaacatttccagcttcgagatggaggccgccttcgccgtgcacccggacatttccgaagttgcggtacacgccgttccgtcggacaaaggtgaagatgacgtaaaggtcaccgcggtattgcacgatggcgcgacacttcagccagaggagctattcaggtgggctaccgactcggtgccttactacgcgctgccacggtacatcgaattccgcgagacactgccgaaaaatccccaggggcgagtgttgaaatacctccttcgggacgaaggtaaaacagcctcgacctgggactgggaagacacggatatcaaggtcgataaacgctag

SEQ ID NO: 349871 - DNA, 729 bp, Pseudomonas aeruginosa
atgccaaagcgcgcaaatcagcttgctgaagcagtgtcacctccgccgaaaaaaaaggccgcaccccgtgtgaaacctgtgagtactgtcaagaaaaccgttcgtcagggcattggcgtttcatcttctggcgccaaggtaaaacccaaccgccggtcggaagagaccatttccaatatcctcgtggccaccgaagaagtagtgctgcgatcaggtgctgatcgcatttcgatccttgatgtgtgccaggtcgccggtgtttcccgtgggacgttctatcgatacttctcgtcgcaagacgacctgctcgataccttctccagacacaagcgcgacagtttccatacatcgctgacccaggcgttgggagatatcgccgatccggatgcgcggctcaacgcgcttatcgtctatttggacaattacctcgagcaaagtcgcgcgcagcgcctgctgacggtcgcgcctgaatatgcgctggggttcttccgccgaattttccatgactccattgttcgtttccaagatgtgctcgacatcgttttcgacgagtgggacgagcgacttggcgtcaggcttgatcgcgaattgatcagcgaactgatcatccgctatgtgatgagcgagacgctggtgtccgagtcggcgaaccgtcgcatgcttcccgttcgtgtgaagaagctgatcgcggccctgacaatcggatcgacctcgcgctcgcgccgctag

SEQ ID NO: 349872 - DNA, 855 bp, Pseudomonas aeruginosa
atgaaactggcgcgttgttcccataaagatggcgaacccttctgggcggtagtcgacatccagcaggatgaagtcacacccatcgtcggcctgttttccgagtgggctcccgccatagcccaaggcaaggggatcagtgcgttgcgtttcctggggcggccagtgccgctttcccaggttcgcctgttaccgccaatcgagcccgtaaatcgagtggttgtcgctggggcgaattacaccaagcacctcgccgaggattttggcctcagcgcaccggcgcagcctgtggcctttctcaaggcctacggcgcactcatcggagcccacgatccgattcgctttccgccgctgacagaaaagctcgatcacgaggtcgagctggtggtggtcattggcagcagcgagatcgacctggctgaccccttgggttgcgtcctcggatataccgttggcaatgatgtaagcgcccgcgacctgcagctcagcggtccaccgggaatcggaatggatctgttcgccgccaaaagccaggacaagaccaccggacttggtccgtggatcgtcaccaaggatgaattcccggcggggtctccagccctggggctgaccttgaaggtgaatggtgaaacccgccaggacagctataccagcgaaatgacctggaatgttggtgagttgatcagtttcgtccaacagcgctccagttttgcttgcggtgacgtgttgttcacggggtcgccggccggagtcgggatgggaactggcgtgtatttaaaccctggcgatgtggtcgaggcgaccgtggaaggcataggtacgctacgtaacgtagttggcgagaagcccagcgtctaa

SEQ ID NO: 349873 - DNA, 906 bp, Pseudomonas aeruginosa
atgactaataaagaagacaaaattgtagtggttggtgccggcttgatgggtaccggcattgcgcatgcattcgccagttcgggattcgccaccttgttggtggatactcacgccgagtcgctcactcgtgccaaaggcaacatcgaaaacatcctcagcaccggcgtcaagctgggaaagattaccgatgaggtcgcccaatcttcgctggcgaatttgattacctgtggtgatttgagcgaggcggcgcttggcgccaactggctggtggaaaccgtttccgaacaactggccgtgaagaaagccgttctaggtcaggctgcgcctctgctggcaccgaacgcgatcattgcgaccaatacttcagcgctgagcgtcaccgaaattgccgcatcggtgcccggctttgccgaccgggtcgttggcatgcatttcttcaatccagtgcacaagatgaagttggtcgaactggtgcgcggcctagccaccactgacgaggtcgtcgtgcgtaccaaggcgctgtgcgatgcgatcggcaagacttcgatcaccgtcaacgagtcgcccggccttactaccagccgcatgtccgctctacttggtaacgaagccatgtacatgctgcaggaaggcacggcgacggccgaagatatcgacactgcgctgcgcatgggtttcaaccatccgatggggccgctggagctcggcgatctgacaggttgggatactcgcttgtcggtgctgcggtacttgcaccagacactgggagagaaatttcgaccctgtccgctgatcatcaagatggttgccgccggacgtctgggtcgcaagacggggcatggcgtctatcgttacgaggacggcaaccgagtgccgggctccggcctaaaggcgagtgcgctatga

SEQ ID NO: 349874 - DNA, 807 bp, Pseudomonas aeruginosa
atgggtagcaatcgtgaaatccacggcgaagcctttggttggatggcggcagagcgttacgagctgacaagccagggcgaggcctccgagcggatggctgacaaatggtcactcagtcgtgaagcgttggacgactacgctttcgaaagtcatcagcgtgccgcgaaggcagctgatgcgggttatttcgatagccagatcgttccggtaccggtcgagttgttgcgtgagcacgcgctgaccgaaccagcagctgatctggcggcggacgaaaccatccgtcgcgatacctcgagggaaaagctctcgacgctaaaaaccagtttccgcccggagaatggacggatcactgcaggtaattcatcgcagatatccgatggtgccgctgcgctgctgttgatgtccgcggacaccgccaagcagctgggcctcaaggctcgcgcgcgcatccgcgccttcgcgaccgtaggtgcagacccaacgctgatgttgaccggccctatcgaggcgaccaaaaaggtgctggacaaggctggtttgtccatcgatgacatcgaccttttcgaggtcaacgaagccttcgcgtcggtaccgcttgcctggatgcaggaaaccggtgtgccgcatgacaagctcaacgtcaacggcggagccattgcgttgggtcaccctctgggtgccagtggcgcgcggctaatgactacgctgctcaatgaacttgagcggcggggcgcccgctatggcctgcaggcgatctgttgcgctggcggcctgggtactgcaacgatcatcgagcggctcgactga

SEQ ID NO: 349875 - DNA, 504 bp, Pseudomonas aeruginosa
atggcgcgcgtgtctttcgttccgctggatgaaatgccgaaagagttgcgtagcgccgttgcgcgcggccagcaaagtcggatgctgagttcgcccagacctgttcaggtctgggcacatcggcccagcgcagcattggcctggcttggtttgctggaaagcctgcatcaggacagcctgctcgatgagcgcctgcgtgaattggtgcgcctgaaaatcgccagcatcaccacctgccaagcgtgccaactcgctcgtaaatccgaccaagtgacggaagatgacatcgcctgtctttcttcagatagcgatcgtttcgatccgtctgaaagagctgctttgatcttcgctgaattgttcgccagcgattacatggccatcagcgacgaacactatgcgcgtctggccgagttcttctccgaggctcaagtagtcgaactgaacatgtactgcgcgctgatgctggcgggcggtcggatgacctatgtgcagcaggcgtattga

SEQ ID NO: 349876 - DNA, 1275 bp, Pseudomonas aeruginosa
atgtctacacaggcgcgggacaatctgggcaaggcgttcgcggacgtcgccagcaactatcgtggaagcgatgtggaccttcatgcggtataccgcgagatgcgcatgaattcgccggttcttgaagagaacttcatggcgcgtctgggggtgccgagcatcgccgggctggacgccaaccgtcctacgttcaccttgttcaaatacaacgatgtcatggcagtgatgcgcgatgccagcaacttcaccagtggttttatcgctgaaggcctgggcgcgttttttgacgggctgatcctcacggcgatggatggagacgcgcacaagaacattcgcaacctgctgcagccggtgttcatgcctgaaactgtcaaccgctggaaagaaaccaagatcgatcgcgttatccgcgaggagtacatcaagccgctggtgccgagcaagggcggcgatctgatggactttgccctgtatttcccgatccgggttatctattccctgatcggctttcctgaggatcgtccggacgagatcgaacaatatgctgcctgggcgctggcaatccttgccggcccgcaagtggatccggaaaaagccgccgccgctcgcggtgctgcgatggaagctgccaaagcgctctacgacgtcgtcaagattgtcgtagccgagcgccgcgcctccggcgctgaaggtgacgatctgatcagtaggttgatccgcgccgagcatgaaggccgctcgctcgatgatcatgaaatcgcgacctttgtgcgttcgttgctgccggcggccagcgaaaccactacgcgtacgttcggtacgctgatgacgttgttgctcgagaaccctgacgtactggagcgggtgcgcaacgatcgcagcctggtttccaaggccatcgatgaagcggtgcggctggagcccgtcgccaccttcaaggtgcgtcaggcagccaaggacatggaaatccgcggtgtgcagattcccaagggggctatggtgcagtgcatcgtcacctcggcgaaccgtgatgaggatgccttcgagcacggcgacgtattcgacatcgacagacgaccaaaaccctcgttcggctttggttttgggccgcatatgtgcatcgggcaattcgtcgcgaagacggaactcaactgcgcactgaacgcgatcctcgaccttatgccgaatatccgcctggatccttccaagcctgcaccagagattatcggcgcccagttgcgcggacctcactacctccacgtcctctgggattga

SEQ ID NO: 349877 - DNA, 1149 bp, Pseudomonas aeruginosa
atgtctatcactcagttcagttacagcagaattcccgccgaggccgagtcccttcgggcggaggtgcgggagtttctaaaaagcaatcttgccgactatccggtgacagccagagcgcagtcctggatgggtttcgatgctgccttcagtcgcaagctaggcgcccagggctgggttggcatggcgttgcccgagcagtacggcggcgccgcggcaggtccgtttgcgcgttacgtgatcatcgaagagctgctcgcagccggcgcgccggtttcggcgcattggattgctgaccggcagagcggaccgctgatcaaccgattcggcaccgaggcgcagagagagcgctatttgccgccgatttgccgtggtgagagttatttctgcatcggcatgagcgaaccgaactccggctccgatcttgcctcgatcaagacttcagctgtgcgtaatgacgccggctggctgctcaatgggcagaaggtctggacgaccaacgcgcagcactcgcactacatgatcgccttggtgcgcaccggtgaaaaacaagcggcgcgtcacgaaggcatgtcgcagttcatcgtcgatcttaagttgccgggcatcaccattcggccaatccgcgatcttgctggcggcgagcatttcaatgaggtgttcttcgacaatgtgcaactcgatgcagacgcgctgattgggaccgagggcaaaggctgggatcaggtaacggccgaattggctttcgagcgcagcggcccggagcgttttctcagctgtatagagctgctcaagactttgatcgccgggatgggcacagcgccggacgctttgcaaagccgcgaaattgggcgactgaccgcgaagctgctgacgttgcgcaacatgtcgctggcagtgaccgcacaattggctgccggcgaacatccagcctgggctgcgtcatgcgtgaaagacctgggtaaccagttcgaacaggaaatacccgagatcgcccaattgctgctcgaagctgagcctcgtcagaacggcggtagcgaacacgcgcaggttcttgcctacctgactcaaatggcaccgtctttctcactgcgcggaggcacccgcgaaatcctgcgcgggatcatcgcgcgcggattggggttgcgataa

SEQ ID NO: 349878 - DNA, 891 bp, Pseudomonas aeruginosa
gtgtatgtcttggcgcgcgctgctggacggtacgccgcgcctgtgccgctgggcgaagcgctattggctaactggttgctgggtaaggccgggcttgagccgaggaccgcggccatcagctttccagccaatgcgcagctgagcctgaatggcggggtggtacacggcaccgtgcgagacgtgccgtggggccgtcatgtcgagtcgctggtcgctatagccgacgcgggtagcgagacgcccagcgtcgtgttgctgtcggtagccagcgcggccggtcagacgctcagcttgaacgtcgcgggcgagcctcgcgactccctgcatttcaacaaagcccaggtactggcttgcgctccgttgcctggcgagctgtccgccgatgtgttgttgttgggtggcgccatgctgcgctcggcgcagatcgcaggtgccttgcatacgctgctggacatgacatcgggctacgccaccgagcgctcacagttcgggcggccaatcggcgcatttcaggccattcaacagctgcttgcggtgttcgccgaacagacggcagccgcgaacgtcgctgccgaggcagcctttgctgagtcggatgccgcacttgcggggctgaccattgcggctgcgaaggtcagctgtgccgaggcggccagcgctggcgcaggcattgcccattcggtgcacggtgccatcggctttacccaggaatattcgctgcatctgttttcccgccggctgtgggcctggcgcagcgagttcggctcggccagcgtctggagccagcgcatcggccagatggtctgcgcagcaggtagtggaggctattggccgctgatcactgggcatgccagtcagtcgctatcaaccctcgcggagaaaccgttatga

SEQ ID NO: 349879 - DNA, 873 bp, Pseudomonas aeruginosa
atgggcttctatcgagtttttcttgttttgtgcctgagtgcggtttcgatgctgagcgttgcccagcccgtcagtcaggcggacgactatagcgccgaggccgagcgcgccaaggcgttgctgggcaaggccgtggcggcgtaccaggccgaaggcgacaaggcgttggccaagttcagccggcaaggcgattacatcgatggtgagctctacatctacgttgtcgatacctcaggggtgatgctcgccagtggtggcccttcagcgacgctgattggcaagcaggtcaccaatgttctggacgaggacctgaaggctgcgttcgaggccgcattgaaagagccggaagacggcacggtgcgcagcgcggattaccgctggtggaactggcagcatggcaaggtcgaacgcaagcaggtgttctatcagcgagttggcgaccgcatcatttcggtcggctactacatgcctcgctccagcagtgaagcggcagaagagttgctagaaaaagtcgccaacgaggtaaaagccgatccgaagacgactttcgaccgaatcaacaagcacgacaaggcgctgagccaggatgacctgtacgcattcgtggttgatttgaacactcagaagtttattgctcatggcttcatacgccgcctggtaggcaccgattttcaagcgttacgctctgccgacggccagccgataggtaaacagatgctgcgggctatggcgcagggcgatacaggggaagtctcatatatatggcgcaaccctataaccggccaaaccgagtacaagaagacccttttaaaaaaggtcgatggttatgccgtcgcggtcggttcgtatgagaaatcaatgaaactggattaa

SEQ ID NO: 349880 - DNA, 741 bp, Pseudomonas aeruginosa
atgaccgacctagtattgcttcatggcgggcaacacggatcttggtgctggaagtttttggtcgatgcggtcaagcagcgcgaggccttgttcgagcgggtcatctgccttgatatgcctggttgcggcacgaagcgtgggtgggatgtaacgacgctgaccctcggcgacattgtcaaagaactcaacgacgagttgagagctgcgaacgttcgcgacgcggtgctgctcggccactcgattgcaggtgttttgttgccaatgatggtcatcgaagatcagtcgctctactcgcggcttgtctacctcgcaacggcgataccggccgaaggtcaatcgatcatgcaactgctcggatcgtccttgcatggccagaacccggaagaggttggctggccgctgaatcctgttactaccgcgccagttgatatgcagaaagcgatgtttggtgctgacatgagcgacgcgcagcttacctggttgctgagtgaggcagccgctgacgtcacgcctcctgcagtagccacccagccagcggcccgaaacggctacgcaaataacgtaccttcggtttacatcctgacctccagggatggcattttgccgcccgaatggcagcgcagattcgctgaaagattaggctgtgaggacctcatcgaaatcgatacgccacatgaaccgtttgtaactcaccctgaattgctgggcgctacgctggctgaatggatgatgggccgatga

SEQ ID NO: 349881 - DNA, 993 bp, Pseudomonas aeruginosa
atgagtgcgccacgcagcctcgaacgaaaccgggccgagcttgcggacttcctgcgcagccgccgcgaacgcattacgcccgaggaagtggggcttccgtcgggcggcaggcgacgcacgccgggacttcgacgtgaggaggtcgcggctctggctggggtgggtttgtcctggtacacctggctcgagcaggggcgggagatcggcgtttcggcagcatttctcgagaatctctctaggacgctcaaactggatgcgacagagcgtcgccatctgtttctattggcccaccagcgattgccaccggagcctggtaaaacttggtgcgtggcgccgccgctgattcacagattgatagccgatctgccgatgcgcccagcgtatgttttgaacctgcgctgggacgtactcgcctggaatgcggcggccgacagggtgttcagcttctctagttttccagtcgagcgccgcaacctgctctggctgctgttcaccgcacctacgattcggaccctgtttgatccttgggacgatcaggcactgcagatcctttcaagtttccgccgcgacttcgtcagggcgccgctcgatccggacatcggcacgctggtcaaggatctggaaaaggtcgatacggaattcaggacctggtggcgtcagcacgacatccacggtccttgccagggtgtacggcacttgcgaatcccggacattgggctggtagtgttcgaccatacgtctcttacgatcgatgtcgaccgcgatctacgtctggtttattacgcggcgagggaagggcaagccgcaagccggctatttgaacaatggctgaccgacgaggtcggcatcaccagcatggggaatgagccgctcaccaatgaccgtggcccgcgagcgcccgaggtgccaggagacctgtccgcgctatctgcggcgtcttcctctgctggtgagatggtgctctcgcttcagtccccaagcgcattgagatag

SEQ ID NO: 349882 - DNA, 654 bp, Pseudomonas aeruginosa
atgaccccagaactagcgcccaccacgcgtccatctgtgaaagcaggccggacgccccgcaagccacagcaggaccgtggacacgagcgtgtcgccgccattctggatgcctgcgcgaaggtgttgcagcgcgatggcgaagcgggcctgacgatgcatcgtctcgccaaggagtcgggcacctccattggctcgctctatcacttcttccccgacaagcacagcgtcctcgccgccctcaatcagcgtcacaccgacgcgctgtgtaccatcaccaagcgactggagcagatcgacgatcacgtctggaagcgcctttctacagcgcagatggtggaacggctcatcgttccctttcttgaatacattgctcgtcaccgggatatccagttgctgctcagcccgaccctaggcgatcggcagcttcattcgccagcgcttcgcgccgcagtgcgttccatctacgaaaaggttctccacatgaggttgcccgacgcaagtgccgaagatttgcgcgcctatagtgcggttctgttatccataccatccgggatgttccattcggctcctgagacgaacgaaagcctggagcggatctggctacaggagattccgcgcgccctgattggctatctcaatgcgcttggggactga

SEQ ID NO: 349883 - DNA, 1611 bp, Pseudomonas aeruginosa
atgccgggttcgccgtcgacgccattgcacagcaatccggtcaggctcgcctatgcgctcgtcgcgatgctggttggcatcaccggcggcctgggcaatgcgttgtttagcgccaatctcgccgccatccagggggagctggggctgacgcccgagcagggcgcctggctgcccgccgcctacctgatggtcaacgtttccactaatctcctgctgatcaagtttcggcagcaatacggattgcgccgtttcgcggagatcggcctgacgatctacgcgctcgtgaccgttactcatatcttcgtcgaaggcttcggcatggccgtattcgttcgggcggtcagcggtttcgccggtgccacggtcagcaccttggccgtgctctacatgctgcaggcgtttcgcaaggccgacatgcccaaggggctgatcatcggcatcggcatatcccaactggcgacgccgctggcctggctgctgtccccggccttgctggatctgggggagtggcatcgcctgtacgtattcgaggcgggcctcgccctgtgctcgttggcggcggtggtggtgctcaagctgccgccgggcgaacacatcaaggcattcgaaccgctggattttctcacgttcctcctcatcgctccggcgctggcgctgttcgccgccgtgctggcccaggggcgggtgcagtggtggttcgagcagccctggatcgcctatgcgctgatcgccgggctggtgctgatgatcgccgccctgacgatcgagcatcatcggaaaaatcctctggtgcagacgcgctggctgggtatggccgacaccctgcgtttcgccatcggcgcgatcgccctgcgcttcgtcctgacagagcagaactacggcgcggtcgggttgctgcagacgctcggcatgggggctgatcagttgcgggggctctataccgtgatgctgatcggactggtgctcggcatcgtcgtcagtgcgctgaccttcggccccagaaccatcgtcgcgcagatcgtcctgtccatcgtactgatcgcgacgggcagctttctggataccgatgcgaccaacctgacccgcccccacgatatgtttctcagccagggcatgctgtccttcgccggcggcctgttcatggggccgctgatgttgacgggggtcatgaaggcgctgaagaacgggccgaattatctggtgagcttcgccgtgctgttctcgatcacccagagcctcggcggtctcgccggcccggcggtattcggcaccttccaggtggtgcgtgagaaggcccattccagttatctgaccgaacagatcaacccggccgacccgatcgtggcgcagcgcctgcaactgcaggggcaactctatgcgccgctgattagcgatccactgctgaggcaggcgcagggttccgcgcagttgagccaggtggtgcgccgcgaagccaacgtgctggccttcaatgatgtgtttcgcctgatcgggctggtggccatcagcgtactgagctggtcgctcttccacattctgcgcgcggcccggcaaaagaagcgcgagagcctggccagcgtgactccccctaccgatatccaagatacctga

SEQ ID NO: 349884 - DNA, 1161 bp, Pseudomonas aeruginosa
atgaccgacaaaaagaagccccgcgaagatctgcccgctgccccggtcgtcgaggaatccgccgcgccggccgatgccgggccggtcgagagcgagccgccgaagacgatcaggcccagggcccgcaccgtggttctgatgctgggcgtcgccctggtcgggattctcgcaatactctacgcctggcggctgccgccgtttaccagcggcatcgtcaccacggaaaacgcctatgtccggggccagatcaccgtgctggcaccgcaggtcaacggctatgtctctgaagtcctggtcgaggatttccaagcggtggagcagggacaggcgctgatccggatcgacgaccgcatctatcgtcagaaggtggcgcaggcaagggcggagctggccgcgcgccaattcgaactggataacgtggtgcaggcgctggcctccgatcaggcgacgctggcttcccgacgcgccgaaatcggcgcggcgaaagctgagtttgaccgtgcgcgggccgatgaactgcgcgtcaacgagctgtccgagcggggctcagtttcggttcgcgagcgcgaccagattcgcgccaccgcgcgctcggccgccgccaatgtgaagcgctcggaagccgcgatccagatcgccgaggaaagcctcaaggccaccggcgtctccaagggcgggctccaggcccaggtcgcgttggccgaagcgtccctgcgcctggccgaaatcgatctcgccaacaccctgatcaaggcaccgagaggcggccaggtcagccaggtcacggtgcgcctcggacagtacgtctcggcgggttcgcaactgctctatctggtgccgcggcaactctggatcatcgccaactacaaggaaacccagatccaccacatgcgcgtcggccagccggtcaccttcgatatcgatgcgctggacggcgccacgctcaccggacgggtcgagcggctggcgcctgccaccggttcagagttcagcgtgctggcgcccgacaacgccaccggcaacttcaccaaggtggttcagcggctgccggtgcgcatcgccatcaatgccgagcagccgctggccgagcgcctgcgtccgggcctctcggtggtcgtccatgtcgataccagcgccgatgacgaggagggcgtgcaatga

SEQ ID NO: 349885 - DNA, 1443 bp, Pseudomonas aeruginosa
atgacgcggcccgacagggtcagccgggcgttgtcccccctgctgctggccatggccctgaccgcttgcgcgccggctcggcaggcgataccgctggcggcgcaggtcgaggtgccggatgcctggcgcgacggcacggcagccaggtcggccatccaactgcgctggtggcagggtttcgccgatccgcaactgaaccgcctgatcgaaaccgcactggcctcgaacaccgacatcctcacggcgatgtcccggatcgacgaggcgcgcgagcaggttcggctggcgcgctcgtccctgctgcccagggtcgatgccgtgatcggcgggcagcgcgtccgtgatctcggcacgacgggaatccagcacaccacggcctttcagccggagttgcaggtatcctacgaggtggatgtctggggccgtctgggcaagctgcgggaagcggccgagctgggttaccaggccagcgaagcggatcacgatgcggtgcgcctcgcggtggtcagcaccctggccagggcctacatctcactgctatcgctggactaccagttgcaggtgacccgccagaccgccgaatcccgccaggaggctctgcgcatcgccggcgaccgggcgagcctcggctacacctcgcaactggagctgacccaggcgcagtctgaatacgaggccgccgcacaacttattcccgaactggaacaggcgatccgccagcaggagaatgccatccgtctgctgaccggcacgctgcccggtgcggtcacgcgcggcagccatttcgacaccatcgccctcccagcagtgcccgcggctctgccgtcggagctgttgcggcgccggcccgacatccgtcaggccgaactgctgttggccgcgagcgatctcagcctcgacgccgagcgtgatcgttttctgccgcaggttcagctttccgcgaacatcggccagttgttcgtcaacgcgctggactacgatccagagcgggtctgggggctgggcggcagcgtactggcgcctttgttcaatggccgacggctggaagcgggggttgcgatcgctaccgctcagcgcgatcaggccgcttaccgttatcgagcctctgcgctgaacgccttcagcgaagtagagagcgccctttccggcatccaccagttcgccgcgcaggcagagcgcgtcgaggcgcggcgcgagattctggcgcggtcgctggaaatcgcccgcgaccgctaccgcggtggctactcctcctacctcgaagaactcgacgcccagcgcaacctgttcaacaccgaactggcggtgatccagatcgaagaaaaccgcatcggcaacctgatcaacctctaccaggcgctgggggggggctggcaggcggatgcgatccacgcgagcgaggagcaccccgttcctttgaaacatattaagagggatcattga

SEQ ID NO: 349886 - DNA, 984 bp, Pseudomonas aeruginosa
atgaaataccgcacccaactccggccaggcctgctggtcatgctgctggtcgcttgtgccgcggcggaagccgatacgctgtcgatcaaggcggaaaacgacatcatctcctcgggaagcgatggtcattacagcaacgggctggaagtaatctggggcttcgagcccgaacaggatcactggagccgtagtctcgcagatctcctgccgggctggtcgggcagtgcggtggacaatgtcgcctatcgctttggccatcagatctatacccctgaggaaatcgaaaacaatggactgatcgaggacgatcgtccgtatgcgggactgatgttcgccggggtgtcgatgttctccgacaccccgcacgagggctggcgttcggccgaggaattgcaccttgacgtcggcatcgtcggcccggctgcgggcggcaagcgattgcagcgcgccgtgcacaaggccaccggcagcgacgagcccaacggctgggaacatcaattggagaacgagcccttcgtcaatctggcctatcagcaccgctggtggctgcagaagcgcatgggcgggctggagctggaatacggccccagcctgggcttctcgctcggcaatctgtacacctacgcatcgacaggcctgggggcgcggctcgggcagaacctgcagcgtagcttcagcattccttcggtcactcctgggcaaagcggcaaccagttcttccacgcgggcagcgggttcggttggtacggcttcgccaatctcgagggacgctacatggcgcagaacatgctcctcgacggcaacaccttcgaggacagccattcggtggatcgccgcgaatgggtcggcgacgccacgctcggcggcgtgctgacctggagccgctggcaactggcgttcgccagcgtctggcgcacccgcgagttcgagggacaacaggagcacgaccagttcggctcgatcacgctatcgacctggttgtaa

SEQ ID NO: 349887 - DNA, 171 bp, Pseudomonas aeruginosa
atggatgaattgaatgtaatgatttccatactgctggtggcgttcctgacgatgactgtcgggttcgccgcgcgcgagaggaactggggggttgcattgatcggactgggcatcgtcggtgtgttttcggtgctgggatacaagatgtacatcactttcggcggtgcgtga

SEQ ID NO: 349888 - DNA, 1902 bp, Pseudomonas aeruginosa
gtgcttctgctgctgatgctgggcggttgcgccggggtcaaggtgtccgccctcgaaaccagggactacatctccctgcgccgcggggatgtgctgagcacagggcaactcagctcttcggtggggaccgcgctgcaggtggtcggcatcggccaggacgaatgcaaggcagccgctgccgtctgccttcgaacgctgggcgagtcgaaagcgctgggcgacgagcaacggctgtcggtattggccgaactctggctgcaggaagcgttgcggctggatcgatcggcgcagaccgatgcgcagaccgacgccatgctggatgcttacctggaaagcgcccggcacgcttacgcttacctgttcatgaccgagcgcacggtggggcagagggccctggacgataggcagacccaggtgcgcgactattacaacttctccgtgcaaaaggcgttgactgggctctttgcgcgctatcaaggcaacccgccacaggctggcgaaggccagggcaacttcgtgctgcatagcggccgctggcagattcagggtgcggtgggcgatgtccgtctggctggcggccgggacctgccggaggcgctgattccagcggcttcgctttcctttaagggcttgcgtaaccagtatcggcgggacgggttgggagcagaactggtcgccatgactgaccgcagagtggtgagaaaggacagtgcggagctggcctggagcgagacgccgttcccggccgtcactgcagtggcgagttttccaggagcgaccctggacgaggttctgagcacgcaaagggtgcatatcgtcggctacgacccatttcgccaggacagcatcacgatggccgggcgagagatcccactggcggctagcttcacctctggctacgggctctggctggctcgttcgggatttgcctcccagtcattgctgacactagtgggcaagggcgaggtactggaaaagccacacgtctatctgatgcagccctacgatccgaaccgccgcatcatcatcatgctgcatggcctggccagcagtccggaagcctggatcaatgtcgccaacgaggtgctgggcgacgaagccctgcggcaaaactaccagatctggcaagtctattacccgacaaacgccccgctggcattcaacaacaaggcgatccgtacggcccttgagcagacccttgagcacttcgatccgagcggaacggcccaggcctctcgggatatggtggtaatcgggcatagcatgggtggggtgctgtcgcggttgatgctgtcgtcttccggagatcgtctgtgggccgccctgcttgagaggtatccgcttcaggggcgtaggctcgagcgggtgcagaaggaggtcggcccctatgtgaggttcgagcccttgcccgatgtcagccgcgcgatcttcgtcgcggccccgcaccgcggcacgccattcgctgagaaccgcatttcccgctgggccgctggcctcgtcaagctgccggcctcggtgcttgggcggatcaccgatgttgcgcaattgctgatcgtcccgggctcggccaatgccgaggtgttgacccggccactcaacagcatcgacaatctcagcagcaacgacccctttgtcaggctgagcgccgacctgcccatctcgcctgcggtgcgctaccactcgatcatcggcaactacacccccgcgttgtcactgctggattccagcgatggtgtggtgccgtattccagtgcccatctggccgcggcagagtcggaaatcgtgattcctttcggccacagcgtgcaggagacgcccgaggccatcatggaaatccgccgcattctgcacgttcatctgcacgagtccgacggcgaccggttcgcgggaccggtaccatga

SEQ ID NO: 349889 - DNA, 993 bp, Pseudomonas aeruginosa
atgaccctgcgtgttttcctgcaggtgctggcttcgctggcaatgctgctggcgacagcctgggggggcatggcgctgtggtatcagttgccgatgatggctgcgggcaagagcgcgtcgatagccctgtggtgcatcctcgcctcggcgctgctcatcgcgctctggcggcttcggccctggatagcgatttgcggctacctgtcgctgttcgcgctgttgcaggtctggtggaactccctagagccctcgaaccatcgggtctggaccgatgatctgatgggaatgacccacggacgtgcggagggcagtcaggtaaccttgcacaacgtgcgcaatttcgactggcgcagcgacgaggactatgacccacgttgggaaacccgccgctacgatctggatcagctgacgtcggtcgatttggcgacctcttactgggggatgccggccatcgctcacgttctggtttcgttcggcttcgatgatggccagttcgtggtattcacggtggaaatccgcaaagagcgtggcgaaagctattcggaaattggcggcttcttcaaacagttcgaactgagcatcgttgccgccgacgagcgagacgcgttgcgggtgcgcaccaacgttcgcaacgaagatgtctatctgtatcgggtaaatatgtccgaagaggcgatgcgggcgctcttcctgtcctacatccagcagacaaatcagctgcagcaagaacctcgtttctacaacaccattaccgccaactgcaccaccatcgtctttgagatgatgcgccagatcatccgcgggttgccgctagattacaggctgctgctcaccggctatctacccggatatgtccaggatgtaggcggtttagagcagaatcttaaactagaggagttgcgtcagcagggacgaatcaccgaacgggctcggcgggcaggtaacaatatggacttttctcgggtaatacgcgatggtgtgcccggctggtaa

SEQ ID NO: 349890 - DNA, 936 bp, Pseudomonas aeruginosa
atgctggtagtagcagccctgggcggcaacgccctattgaagcggggcgaacctctgaccgcgcgtacccaacgatccaatgtgcggatcgccgcccaggggctagcggccatcgtacgggctggccatgatctggtcattacccatggcaacggccctcaggtggggcttctggctttgcagggcgctgcctacaaaccggacgaggcctatcctctggatatgttgggggctgaaaccgaaggcatgattggctacgtcatcgaacaggagctggagaatgcgctgaatcacgaccgaccagtagctacgttgctgacacaagtcgtggtggatcagcatgacccagcgttcgataacccgaccaaattcatcggacccgtgtatgaacgggccgaagccgaatcccgggccaaaaccgccggttggcatatcgctcaagatggcgacagatggcgaagagtggtgccctctcccaagccgcttgaaatccctgacatgcgggtgatcaagttgctgttggaacaaggcgtagtcgtgatctgcggcggtggtgggggcattccgatactacgcaacgaagacggtagtaccgtcggcgttgaggcggtcatcgacaaagacgcagccagcgccctgctggcgcaacagctccaggccgatgccctattgctgctgactgatgtcgatgcgatctatcgggatttcggcacggacagcgcagcggcgatcaggagtttgagcgtggaggaagggcgtgcgctcgatctgccggccggttctatggggcccaaactggccgctgcagccgactttgctgaattcggaggattcagcggcatcggcagattggacgatgcggtgggtatgctgcagggttgcgtcgggactagaatccagaggaggttgaacctgagacattcaagcagaaactga

SEQ ID NO: 349891 - DNA, 186 bp, Pseudomonas aeruginosa
atgaacgcctacacggtgtcgcacctggctcaggatgccggagtgagtgtgcatgtcgtgcgcgactacctgctgcgcggattgctgcgcccgtccgcgcgcaccgccggcggctatgacgtgttcgacacgggcgccttgcagcggctgtgcttcgcgcgggcgcgcaccgtgccgggtgtgtag

SEQ ID NO: 349892 - DNA, 633 bp, Pseudomonas aeruginosa
atgaacctcacacatcgcttgaccgaggtcaccgaacgtctcgcgccggccaatccggaactcctcgtcgcgctgctgcgcgagatcgccaagggccgcccggtgccgccgccagcgctcgccgctgtcctcgaccagccggccgaggaggtggccgccgcactcgaacaagcccaggacaccgagtatgacgccagcggcaacatcgtcggtgctggcctcacgctgcgcgaaaccccgcacgtcttcgagatcgacggccggcggctgtttgtatggtgcgcgctagatgccttgttttttccggtcctgattggccagacggcccgcatctcgtcgcgttgcgccgcgagcggagcgcctgtttccattactgttacgcccaccgagatacagaatgtcgaaccggccggcgcggcggtatcgctggtgctgccgcaagcgacaacgaccggcgtccgtcagtccttctgttgccatgtccatttttttgccagcgccatcgtggcgagagaatgggccgccaagcaccaacaatgcgtggaaatcgtcagcgttcaggaggctttcgacctgggtcaggagcttggtcgtcatatgcagcgggccacccggccgccccgatcgacatag

SEQ ID NO: 349893 - DNA, 771 bp, Pseudomonas aeruginosa
atggtcgatcgcagcaccgagcactggtatccgactgccgcgtacttgtatgcgctgcatctgaacggccttgcgcttgcctgggagtacctgcgcaggcatcccgactatcggctcgactggctccgccgtcatcgctggcgacagcccgcgcaagacgcggcgcatcgctggggcttgcgtttgctggaagacccggccttggatgcgcgcgacgcgcatccggcctggctgcccggccatgcggccttggtgcagctctacccggacgaagacccgccgcccgatgcctcgatcttcgcgctctggcgcatccccggtcacaagcaactgatccacgatggcaagcgcctgttgctgatggcctgcaggccagggcactgccagcgcttcgccctggcgcccggcctggaagacggcatggctgtcgcctatgcccaccgcggcggcgctcctacacctgcgcgcaggcttacgcccagcacggcctttgccaacgtcaagccccggccgacaccggccgcgcttctggagctgcacaccttgcaggcgctcgacgcgaccctggcgggcgcgtcactgcgtgaagtcgcagaaggattgttcggcgtggatgcagcagccgattggtacagcgatggtggcctgcgctcaaaggtgcgccgcctggtgcggcgcggcgatgcgctgatgcgcggcggctatcgccagctagcacagcttccgccgcttgagaagggtcgtcttgacgacaacgcaaaacggccctga

SEQ ID NO: 349894 - DNA, 348 bp, Pseudomonas aeruginosa
atgacccatgtggtgacggagaactgcatcagatgcaagtacatggattgcgtcgaagtatgcccggtggattgtttctacgaggggcagaacatgctcgtgatccatccgacggagtgcattgattgcggggtgtgcataccggaatgtcctgcggaagcaatttttccggacacccacgccggtctggcgcaatggctggaactgaacgcagcttacgccggcaaatggccaaacatcacgagaaagggcatcccgccaccggacgcagattcctacaacggtctgccgaacaagtacacgctctacttctcgccgctgcctgggcgcggcgcgaaaagagcatga

SEQ ID NO: 349895 - DNA, 972 bp, Pseudomonas aeruginosa
atggaaagagtcagagaaacattggaagcacggcaggtctggatctacttcgccgcaatggccgttggggcggtgctgggggttctcatcccgagcctcgacagcctggaagccgcgatcaatccggcccttgccttgatgctgtttgccacattcatgcaggtgccgctcgcagaaatcggtgccgcgctccgcaacacaaagttcataggtgcgctggtcgtcaccaacttcatcgtcttgcctgtcgtcactgccgggttgttgcagttcctgccagacaacccgatgttgaagctggccgtgcttttcgtgcttgtcgctccgtgcattgattacgtcatcacctttacccatcttggtggcggaaacgcgcggttgctgctggcgatgacgcccgtgcttctcgtgctccagatgctgctgcttccggtctatcttggcctgatgctcggtgacgaagcggcgcaactcatcaaggccgggcctttcattcatgcgtttgtctggctgatcgctgttcccctgcttgcggctgggctgatgcaggcgctagggaaacgcacgaaaggcggcgcgtctctagtcgccgcattgaatctgttgccggtgcccgccaccgcactcgtgcttttcatcgtcctggcttcggtcatgccgcaaatcgggcttgcgcaagacgccgcattgcgggctgcaccgatctattttgccttcgcgctcatcgcgcccttgatgggatggatggtggcgcgtgcgatgcgtcttgaatccacgtcggcccgggccgtttcgttctccgcatcgtatcgaaactccttggtcatcctgccgctcgcgttcgcggtgcccggcggcgctcccctgatcccggccgtcattctcacgcagacgattactgagttgttcttcctgcccctctacgtgagattgataccccgcttgtccccggcgccggcacaagcctattga

SEQ ID NO: 349896 - DNA, 279 bp, Pseudomonas aeruginosa
atgaagaagatcatcacgttcttgctcgcgacaatcttggctgcctgcgggcagtccgaagcgccgcagcaagccaccagcacggacacgaacattcccacggtggaagaactggcatccaatcccgaccggctcaaggagctgcgccagcagtgcaagacggatcgcgccaaactcggcgacgtactctgcaaccgtgtggccgaggccacccgcaaacgcttctatggcgacggtgaaacgccatacacgccgccgaaggaatcgcccaagttctga

SEQ ID NO: 349897 - DNA, 864 bp, Pseudomonas aeruginosa
atgagcgctcctcgcagccttgagcgaaaccgggcggagctggctaactttctgcgaagccgccgtgaacgtatttctccacaggacgcgggcttgccttctggtgcaagacggcggactccggggcttcgacgggaggaagtcgcagccctcgccggggtaggcctgtcttggtacacctggctggagcaggggcgagagatcagcgtatctgcgactttcctcgaaaatctgtcgcgcacattgaagctggacgccaccgaaagacggcatctttttttgctggcgcatcagaggctcccgccagagccgggcaaaacctggtgtgtcgtgccaccgctcgttcatcggttgatggccgatctcccaatgcgtccggcgtacgtcctcaatcttcgctgggatgtgctggcttggaacgcggctgcagataaggtcttcgctttctcgagcgttccgacagagcggcgcaacttcctttggctgttgttcaccgcatcttcgatgcgcgcattgctcgacccgtgggaggatcaggccttgcaaatgctatcgagttttcgccgtgatttcgtcagggcagccgaggaccccgacattggagcattggttaaagatttggagaagatcgataccgatttcaggacctggtggcggcaacaggatattcatggaccctgccagggcatccggaattttcagatcgacgggatcggcaaggtggtgttcgatcacacctcactcacgatcgatgtcggccgtgacttgcggcttgtctactatgcggcgaaagacgggcaggtacatagccggcattttgagcgatggctgacgacctcgagcggaaacgcgatcggcgtgtag

SEQ ID NO: 349898 - DNA, 1233 bp, Pseudomonas aeruginosa
atgtaccaatcattgcttcgtcagcaattggagttactgaagtcctccaaccagtaccgcaccttcaccactctcagtcgcatctgcggccagtatccgttcgccaagctgaacggcgagcagccggatccggtcgttgtgcggtgcagcaacgactacctaggaatgtcgcagcacccgaccgtacgcgagcagatgcacctggcattggaaacgtacggcgctggctcaggcggttcgcgcaacataggtggctcctacgagctttatgagcgactcgaggcgagtcttgccgactggcacgataaagaagcggcactggttttcccgaccggctttggctcgaacgacgccaccctccaatgcctgctgaggcaaatccccgattgtgtcgtgatcagcgatgcgctgaatcacgcatcgatcgtcaacggcatccgagcaacaccgaatgaacggcaggtgtttcgccataatgacgtggaacacctggcccagatactgtcccgctatccaattggtcaaccgaagctggttgtgttcgagtcgatctactcgatggacggcgacatcgcaccgattgccgacatcgtggaagttgccaagcgcttcaacgcgctgacctatctcgacgaagttcatgcggtcggcatgtacggcgctcgaggggctggcatcgctgccgagctcgacctggtcgacaagatcgacatcatccaaggcaccatggccaaggccatcggcgtaatcggtggttacatcgcatcgacccgcgtcatcgtggacgcagtacgttcctttgcgacaggcttcatctttaccacgtcccttcctcctgccgtcacggctggctgcctggcaagtgtcgagcatctcaagtcaagcgatgacgagcgccagaagctacagatcaacaccgccttattgcgcgagcgtttgaaacaacacgacatacccgtcatgccctgctcgaaaacgcacgtattgccggtattggtcggtgacgctgagcgctgcaaagttgccgccctgcggcttctacatacacacggggtctatctccaaccaattaactacccatctgtgccggtcggtacggagcgctttcgggttaacgcaacgcccaaccacagccaagcccagatcgagaatctagccgtttccctgcgcgaaaccttcgaccattttgcgatccctttggcatccaaaaccttcacttcggaggtggcctga

SEQ ID NO: 349899 - DNA, 1071 bp, Pseudomonas aeruginosa
atgaacgtattgattattggcctgggatacgccggacagcgatttcgccaagcattcgaacatgtcacaaaccgagccggtgtttcgacctctatcgcatatgtcggacgacgtcagaaagctacgccactgcgttacttcgcctgcattgacagtgcgctccagcatttcacacccgatatcgtagtggtcagtgccaacgatataagtcacgccgatgtattgcgccagcttgcgggctaccaaggctttgtcgtctgcgaaaagccgctcgccacacccactgacgcgctgaacggcatccaagacgcgctcagcggtgtcggcggattcgcgttgaatctgattgagcgctattcgcaggcgacgcagatcttgcgtgaatgggtcgcccgccatgggtgggaattggcacgtgccagcttctattggggcaaggatcgcatcaatgactaccggcccacttgcggagttaccagtgaagcgtttcatgcgttggatctgctgcgctgggtatgcccgactgcgggtccgctgcggccggatggcgttctgggtatccggtcagacttttcggtatctggacttgcggtcctcgacaccgtgcagctgaccgctgtccttggttccgcgccggtcaccggctatagcagctttgtcaacgtcgttcgccaacgcaccgtcgacttcagctttgtcgattgggaagaccagcttatccatgcgcgactgaccttcgatacgccgcgctgggatcatgaccatctgcggatctggatgcgggatatcgacggcacggaactcgtgctgcacgagctccgactctctcccagccagtcgggactcgagaccctgcacaagctttctgagttctgccaacaggtccttgactgggtcgtgcggcgccagccgcctccccacccattcgccagcctggacgacgccgtcgagctacaggaattgctcaatcaactggagcatcgcgcgctcacccctgccgcggcccgttacaaccgtggcgctcagcgcgccttgctcgtcgagggcagcgacctggaagccctcggctaa

SEQ ID NO: 349900 - DNA, 1854 bp, Pseudomonas aeruginosa
atgtgtggaatagttggatggctgtcctacagccaggacatgcaggcgcaacgcaatacgctgaagcgcatgaccgagacgatggcaaatcgggggcccgacgccgaggggatctggataacgggtccaatcggctttggccatcgaaggttgtcaataatcgacctggaaggtggtcggcagcccatgctggctcgacgcgacgacgggttagaagcggcggcgatcacctacagcggtgaggcctacaactttcgtgaactgcgcgccgagctgaaaggacgcggccatcgtttcgaaagcctcagcgacactgaagtggtcctgcgcgcctacctagaatggggagagggattcgtcgagcggctcaacgggatgtatgccttcgcggtttgggacctcacaacgcaggaactactgctggttcgtgaccggatgggcgtgaagccgctttattactacgagacggtcgacggggtggtgtttgggtccgaacccaaggccctgttagccaacccgctcgtgccccgtaccgtaagggccgacgggctgcgtgatatcctggagatggtcaaaactccgggccatgcagtgtatgacggcatgcgtgaagtcttgcctggcgaggtcgtccgcatcaatcgtcagggcctcacacgacaccgttattggcgactcgaggctcgtgagcatggtcatacgcttgaccagaccgtccggcatacgcgagatctcctggaagatatcgtgcagcggcaagtcgtttcggatgtacccctgtgcagcctgctttccggtggtctcgattcgtcgatcatcaccgccttagcgtccagaaaactgcttgctgaaggcaaggaaaacattcattcgttctcggtcgattttctcgatcacggcagcagttttgccagcgatgcagtgaggggcacgcctgatgcgcccttcgttcgcgacttggttgagcgtatccactgcagtcatcacgagatcgtcctggacagccgagagctggccgatccggcgcttcgccatcgagtcatcgaggcgctcgatctaccgcctgccttctggggcgacatgtggccatcgctctatcggctgttccaggaagtgcgccagcactccaccgttgcactgtccggagaaagcgcggacgaggtctttgggggctaccgctggttccacgaccctgcggcgatccaggcccagacctttccctggctggtgtctgtgactggcaaatacttcgacggcaagaccctcttcgacccggcgctgctacgtcagctagacctgcccgggttcgtacaggacagctacagtcaggcgctcagcgaagccccagtactaccgtcggaggagcaaacggatcggcgcatgcgccagatgagctacgtcaacctgacccgcttcgtccagacactgcttgatcgcaaggaccggatgagcatggccgtcggtcttgaggtcagggtccccttctgtgaccacaggcttgtcgagtacgcattcaatattccttgggaaatgaagaccttcgatggacgcgaaaagagcatcttgcgtgcggcgactcgcgacctgttacccgaatcgatcagcgatcgggtcaagagcccctacccctcgacgcaggatcctgcttacgagcaggcgcttcgcacctcactcacccagatcatggccgacaaggacgcacctgtgcgagcccttctcgatgcatcgcaggtcaagcgcaccctgaagagacccgttggcgacacctcgcccatgtacgaccgaatgggcatggagctggcggttggcctgaacacctggctgaccgaacaggatgtcagcctcgatctttaa

SEQ ID NO: 349901 - DNA, 1209 bp, Pseudomonas aeruginosa
atgaataccccgtatcccaacaagcaacttcccatctacctgatcgcactcggtgcatttgcgctgggcatggcctcctatgtcacagcaggcctgattcccctaattgaggcctccttttccgtttcggtcgctgtggctgcgcagctggtgaccgcctttaccctcgcctatggccttggctcgccgatattcgttgcgctgaccccacccgatcatcaacgcaccggtttgctgttcgcccttggattgttcgttctggcaaacgcggccagcgccctcgcagcaggctttgccgaactggtgatctggcgggccgtggccggaataggcgccggcgtctacctcgccatgggcatcggcgcctcagcagcgctctcatcgcccgagcggcgcggaaagtcgatcgccatcatcatgggaggcatggcgagcggcgttgtgctgggagttccagtgggtttgataactgcagacagcttcggctggcaagctgcactttggctcgtcaccttgctggggttgttagcttttgcgggcctggcattgatgttgccgaggctgcaagcggcgcccaccagctccctgggacaaaagctcaggatccttgccgatgggcacgtgatgaccatacttcttatttccctactagctgccgttgccagtctgggcatgtatacctttatcgctccactgctcgccgacccggaactcggtgcagtccgctcggtaacgccttatctctggatctggggcatcggcggcgtactcggcagctttctggtgggcccggttgtcgatcgagtcagggggcccgtgctggtcttcgccattatggtgatcctctcggtctccttgttcctcttaccggtttcggccacgctcggcacatggctggtcatgttgccgatcatggcatggggcgccgtaggctgggccctgcaggtaccgcagaacaacgaactgatacaggccaggctggcacacggcgatggcaaccttgccatcgcgctcaacgaatcggcgctgtacctgggcagcgccataggtgcggccgccggaggcttcgtcctgctgctacagatgcccacctggacgctggccgcctgtgccggcttgatcgccttactcggcgcactgcttcagattctcaaccttcgtcgtcagcgagcctggccgcgcacagtccaacctgaaaccaaccattga

SEQ ID NO: 349902 - DNA, 936 bp, Pseudomonas aeruginosa
ttggagcttcgtcatcttcgctgtttcgtggccgtcgccgaggagctgcatttcgcacgggctgccgaacgtttgcatatggagcaatcgcccttgtcgcggaccatcaaggacttggagtaccgcttgggtgtgcagctgttcgaacgcacaacgcgccgaacgcgtctcacctgggccggcacggtcctgttgcaggaagcccggcgtgtcattgcggtcgtagaacaggccaaagcgagcgtgaaaggcgccgcttcgggttaccaaggtcagctacgtattgccctgtccgacggcgtcccgcaattgcggctggcgtccctgctcgcgctgtgccgcgaggaagaccccgacatcgaaatcttcctgcgtgaagtgccgtctgcaatgcagaccagaggcctgctggacgatctgttcgatgtcggtctgtcgcaaaccgcaaaccaggctgacgggctgctggccgtgcccgtatggcatgacccgcttgtcgttaccctgccagcacgccaccagttgctcgcccaccgcgagattccactggaggaactcgccgggcacccattggtgctctgtgagcctcaagtctgcgaagggttctggcagcagctacagctcgtactacagcctattgcgcccagactgaccatcgcggagagtgtgccaaccctcgatctgatgatcgcgttggtagccgccggttacggtctggggttctccagcctggcgcgaatttcagagctccacaatccggacatcgccacccgtcccctggcgggccagagcacgctgaccacctacttggtccgtcgcaatagcgagccgtcagcaccattggatcgttttatcgaccgagtggcacgggttgcgtgcggcatggatgatcattccggccaccaaccgacaggcttgcgctctctggacgcatag

SEQ ID NO: 349903 - DNA, 264 bp, Pseudomonas aeruginosa
atgagcgcgacgcgcaagctgagactggggccgctgcctaagactgagaacaccaagctgacctttctctgtcctgcaagtcttaaggccgatctagaccgttacgcctcgatgcacgtggagacatatggcgagccggttgatgcggtaaccctcatcccgtacatgctggaggccttcatggcaggggaccgcgggttcaaacgtgaggcaaaccgctctagatcctcgtcgctttctacgccgagcgctcagggcacttga

SEQ ID NO: 349904 - DNA, 732 bp, Pseudomonas aeruginosa
atgagcaaaggcgtgcatttctggcccctcgctgttgcatggtcgttgctgacagtgcagccaatttcagccatgacggtcatcgaccccaccaacctggtgcagaacacgctgacagcggttcgcacgctggagcagatcaataaccaggtcgagcagctgcagaacgaatcgcaaatgctggtcaatcaggcacgcaacctggcgagcctcgattacaacgtccttaaccgcctgcatgcgtcactggcgaaaagcgagaagctgatcgcagaggcacgagggttggcctacgacgtgcagagcctcgacagtgagcttgctcggctgtacccagaggaatatgcgtccaccatcagcggcgatcagatgtaccgggacgcgcgtaaacgttgggcgtacacgctcgatgggctgcacaccgccatgcgtgtacaggcccaggtctctggcaacctcgccgacgacgagagggcgttagccgacctggtgggacagagccagtcggccagcggctcgctgcaggccatgcaggccaccaaccagctgttggcgttgcaggcaaaacagtcgatccaggcacagcagcttcagcttacacaggaccgtgccgcctctttggagcttgctcggcaggcggcagccaccgagcgtgcccgcgaaatccgccgccggttcttgggcgacggcacgccgtatacaccctttcccgtccgtttttacgggaactga

SEQ ID NO: 349905 - DNA, 2442 bp, Pseudomonas aeruginosa
atgctaaatctcaccgaataccgtcaacgcccagcgctgctcgccgactggctgccctgggccgggctggttgcgcccggcgtcgtgctgaacaaggacggttctttccagcgcacggcacgctttcgcggccctgatctcgacagcgcgacgcagagcgagctggtcgccaccacggcgcggctgaacaacgcattgcgccggctcggcaccggctgggcgatgttcgtcgaagccgagcgttgtccggcggcatgttatccgcactccgacttccccgagccgttgtcgtggctggtggacgaggagcgccgcgcggcgttcgaagaaggtggcaaccacttcgagagctgctaccacctcacgctgcagtacctgcctccagaagagtcgcgtgcccgcgctgccaagctgatctatgaaaacacctcgacggccggcgtggactggcgcgagcgcctcacggctttcattgccgagactgagcgcattttcgacctgctcgcgggcgtgatgccggagatcggctggttggatgatggtgagacgctgagctacctgcatacgaccgtctcgacacggcgtcatcgcgtcggggttccggaggttccgttccacctcgacatgctgctgacggacgtgccactactaggtggcttggcgccgatgctgggcgatgagcacctgcgtgtgactacgctgcgtgggttcccgacctcaacttggccggggatcctcgatgacctcaaccggctgggctttgcctatcgctggagtacacgctttgtatgtctcgacaaggacgaggcggaaggggagctgggtcgcctgcgtcgccaatggttcgccaaacgcaagagcgtgctggcgctgctgcgcgagaccctattccagcaggagagcccattgctcaacaccgacgctagtaataaagcggcggatgcggacgctgccctccaggcgttgggcagtgatcaggttgcctttggctacctgacttccaccgtgacggtgctcgatgcagacgccgacctggccgacgagaagcttcgcagggtggagcgcgtcatacagggacgaggcttcgtcaccattgcagaaagcctcaactcagtggaagcgtggctttcgtccatcccgggcaacgcctacgccaacgtgcgtcagccggttgtgtcgacgttgaacctcgcgcacctgatgcccttgtccgccgtatgggccggaccggagcgcaacgcccacctcgacgggccacccctgatcgtgacccgtaccgagggtgcgacgccgttcaggctcgtgacacatgtcggcgatgttggccatacgctggtcgtcggtccgaccggcatgggcaagtcggttttactcgccacactggcgatgcagttccgtcgctacaagggttcacggatttttgccttcgacatggggcgctcgatgcgagcgaccgtgctgggtctgggcggcgaacactacgacttgggcggtaatggcgcgatcgccttccaaccgctcgcacgtgtcaacgaggagggcagtcgtagccgggctgctgagtgggtcgaagggcgtctgcttcaagaaggagtggccgtcggccccgatgaaaaggtggctatctggtcagcgctcggcagcctcgggggggctcctgtcgaacagcgcactctcaccggtctgtcgctgctactgcagtcaaacacgctacgccaggcgttggcgccttatgtgctcggtggcgcgcacggcaagctgctcgattccgacctcgactacctaagtacggccgatgtgcagtgcttcgaaatggaggagctgatgcctagcaaggccgcggttctggccgtgctgggctacctgttcgcgcgtttggaggaacgcttcgatggcgcgccgacgctgctgatcctcgatgagtcctggctgttcctcgacgacccgatcttctccgcgcgcatccgccagtggctcaagaccctgcgcaagaagaatgtcagcgtcattttcgccacccagtctctggccgacatcaaggattcaagcatcgccccggcgatcatcgagagctgtgcgagccgcatttttctgcccaattcgcaggcaaccgagccacagattcgcagcatctatgaaggcttcggcctaaatgcacggcagatcgagatcgtcgctaatgctcagcccaagcgcgattactactaccagtcccgtgcaggcaatcgcctgttcgacctcgatcttgggccggttgcgcttgcgtttgccggcgcctcgtcgccacaggaccagcaagcaatcgatcaggtgcttcgcgacgccagcctgccagggttcgtcggcgcctggctgcgtcatcgcggcctcgactgggcggctgacttgctgccatctgcaccaccgccggctgtttctaccgaaccggaggaggacgcttga

SEQ ID NO: 349906 - DNA, 1029 bp, Pseudomonas aeruginosa
atgagtgctgctggccaagccactcaggctgtctcgctggaccggcgtatcgccatgcttcgcaccgcgatgggtccggtcatcgcagctgcccttgaagaccccgatgtcgtcgaggtcatgctcaaccctgaccggacgctgtgggtggaccggctgtcgtcagggcgcgcgccgctcggcgcggagctctccgaagcggatggtgagcgcatcatccggttggtcgccgcgcatgtcggcgtggaggtgcatcgcggcaaaccgctgctgagcgccgagctgccggaaaccggcgagcgctttgagggcatcttgccgcccgcggcaccgggtcccgccttcgcgttacgcaagcgggccgtgggcgtcatcccactggagcgttacgtgacagacgggatgatgaccgcagcccaagccgcctggctgcgcgagatcgtgcgtgaacggcaaaacatcctgatcgccggcggcaccagtaccggtaaaaccacgctggccaatgcgctgctcgccgagattgcctgcactggcgatcgggtgctggtgcttgaagacaccatcgaactgcagtgtgccgcccgcgaccacgtaccgcttcgcacccgtgcaggcgtggtgtccatgcgcgaactggtgcgcacgacgatgcggctgcgtcccgatcgcgtggtggtgggagaggtgcgcggtggggaggcgctggacctcgtcaaggtttggggcaccggtcatccgggcggcatcgccaccatccatgccagctccgctcagggcgcactgctgcgattggaacagttggtgctggaggtcgcggtaaatccgcctcgagcgttgatcgccgaggcggtcaacgtggtgatcgtcatcgcagggcgcggccggcttcgccgaatccagagcatcgcccgcgtggtcggttacgacggcgcgggttatcacctggcggacgcgcagcacgcctctaatgccgtcccaaacgcttctgcttcgttaccctcaaccacgcctggagaactgccatga

SEQ ID NO: 349907 - DNA, 261 bp, Pseudomonas aeruginosa
atgagaaccctgacaccgatactctgtgcactggcactcaccgcctgcggcgaaaccgggaaacctgaggcgccgctgccgacagttgacgagctggccgccgaccttgcgcggctggaagagctgcgcccgcaatgcaagctggaccgcgccaagctcggtgatgccttgtgcaatcgagtggccgaagcaacgcgccggcgcttcatcggggacggaagggtgccttatacgccgtcgaaagaggtgcccaaattctag

SEQ ID NO: 349908 - DNA, 1980 bp, Pseudomonas aeruginosa
atgaccgaccgccgcgatgatgactttcgccttcgccctggtgcgccgaagagtcgcgataagggcttcgtttccaaggtgctcaagcaggttggcaaggctggcggaaagtcggctgtacgccgtccggctttggccagtggcaagggccggtacgctggtcagcggcccggctcgcggctggggcgagggcacacggcagcgcgcttcgcaggcgcctcgctcacaccgttctcacgccgggtgaccatcaagaccctactggtcaaccagcgccaggccagcccgcaatcattggccaagcacctgggttatatcgagcgtgatggcgcgggccgcgacggcgaagcaggccgcgcctacggaccacagacggatgaggttgatttgggcgcgttccgggagcgctgtgctgatgatcgccatcactttcgcttcattgtcgcaccggaggacggggctgaactggacgacttgcgcacctacacccgacagctgatgggacgtatggaggctgacctgggtacgcggttggactgggtggcggtagaccactggaacaccgacaacccgcatacacacctcgtcgttcgaggacgcgatgacaccggcaaggacctcatcattgccagcgactacatcgcccacggcttccgccgtcgggccgccgaactggccaccgaatggctcggcccccgcaccgagttggaacttcagcaatccttgcaacgtgagatgaaccaggagcgttggacgagcctggatcgcacgttgtgcctggaagccgggcctgagcggacgctgcgaatcgaacgctttaaccagccgccgctgcaacgccagcgcctggcgctgattggccgtctccagcgactacagcaaatgggactggctgaagaggtccggcccgggacatggtccattcaggccgacgcgcagacaatcttgcgcaccctgggtgagcgaggcgacatcattcgcaccctgcagcgtgccatgagcggacggtcgcgcgagttggccgtgttcgcgccaaaagaggacggggttgcagtcacagggcgggtggtcgccaaaggcttatccgatgagctcggtgaccgaggttatctggtcgtcgatggtctggatggcaaagcgcactacgtctccctcagtgcgagcgacgaactggccaactacccgaccggctcggtggtgagcgtacgcggctcggccaagatacgggagacggaccgtaccatcgcagcactcgcgggcgatggtctgtaccgttgcgaccatcatctgacgatcaccaagggccaggcgaacggtaaccgtgacccacaggaactcgtcgcagcccatgtgcggcgactcgaagcgctgcgtcgggcgggcatcgttgaacgtttggcggacggactgtggaaagtgccggccgatctacccgagcgcggccgccagtacgacgccaagcgcttgggtggggtggtcatccagttgaaatcccatctgccgattgaacggcaagctcgcgtgatcggtgccacctggctcgatcagcaactgatcggcggcgagcgagggctgggtgacctcggctttgccggtgaggtgaagcaggccttgcgccaacgcgccgatttcctcgtggagcaggggctggccgagcgtcaggctcagcgcgtggttctgtcgcgcaatctcttggcgacgctacgtaaccgggagctcacccgggtagctgagcaggtcgccacggaaactggattgacgtaccggccgctgaaagacggccagcgcgtggccggcctctatcgccgtagcgtcatgctcgccagtggcagttacgccctgttggaggatgccaaggcgttcagcttggtgccgtggaaacctgtcattgagccgcgcctgggtcagcagcttgccgcgacggcacggggtaattcggtttcttgggagcttggaaggtcccgcggtgttgggatttga

SEQ ID NO: 349909 - DNA, 534 bp, Pseudomonas aeruginosa
atgactgtacaaacaattactgccatgccggcgacgaactccgttgttgccatgtgttgcggcaagactgacgcgacgtcgctgacgcgcgtgtccctcatccacgtgccgcagcgcgtccaggtctacctgcgcttcggtgatccggtgcgtattacccgcctggaccctatgcggcgtatagccgtgttcctgcctggcgccatcttctgccgcgttcgctggcaagccaacgagtacggcacggtcagctggcaactgacggtgatgcagggatgcacgcaacgggacgcggtgcagcatattgccggcgtggtgccaggggctcggttgctgctgcacgccatcggcaagccgacagtgcgcatggtgctgccgctgattgatgccatcgaggcgcagggcatcgatccgacaacggtgtcaccagcgtattggcacatgctgaataaccggctcgccgcacgcctggccatgcccgtctacaccgccgagcgtcactccgcctggctgacgaggcgggggctgcagtga

SEQ ID NO: 349910 - DNA, 261 bp, Pseudomonas aeruginosa
gtggtcggcatgacccgggttggcgacaaacgcacgcccatcggcgtgcgtcctcacgcggacccgcatgccgaagcctgggttcgtcagagggacgccaacgtcgtgcacaggcgcgatctatatagcgcgcgcctgaccctcgacatcaccccggcgttgcgcgcccggatcaaggtatcggcattcacccaagacatgacggtggccgagttgctgcgggggctcttggagcgcgaatttccggagaaaacaggatga

SEQ ID NO: 349911 - DNA, 639 bp, Pseudomonas aeruginosa
atgatcgttgccctactcaatcagaaaggaggggtcggcaagaccaccttagcgacacatatcgcaggcgagcttgcattgcgcggtcagcatgtcgtccttctagacgccgacccgcagggttcagcgctggactgggcgcaacggcgcgcgcaacaggggctacccaggctgttcagtgtcgtgggactagcccgtgaaacgctgcaccaggaagcgcctgagctggcccgtcgcgctgatcacgtcgtaattgatggaccaccccggatcgcggcgcttgcacgctctgctctgctggccgctggccgcgtcatcatccctgtacaacccagcccgtatgacctgtgggccagcgacgaaatggtcgcactgatccgcgaggcgcagctatttcgccctgagctggcggcagcgtttgtcatcaaccggcgcatcagcaccaccatcatcggccgtgaagcgcgtcaggcgctggcggatcagcctataccggcgctacgtgctgaggttcgccagcgcattgtctttgccgacagtgtggcgtcgggacgtcttgcctgcgagacggcacccgacagcgccgccgcgcgcgaaatcactgccctggtgcaggagctgctggggtggtcggcatga

SEQ ID NO: 349912 - DNA, 819 bp, Pseudomonas aeruginosa
atggctcatcgcaacgccgagcagaggtgtcccaccgcggcctatctctaccttctgcaccttgatgagcatgctcttgcctgggagtacctgcgcagaaacccggagtaccggcgtgactggcaagactgcgtgcgccgggctgcggccgcgcaccgctggggtttgcgcgtgctggaagatccggggttggacgcccgcgacgcgcatccgctctggcttgtggagcatccagggctggtccagctccaccccgacgtttattcctcgcccgacgcggcagcattggatttctggaacattccgggccgcaagggcctagtccatgacggtcggtgtctacgcgtggccaccggtatttccggctgccggatcaggctggcaatggcgtctggcctgaaagatggcgacgcgttcgttgtcgccatgcgcacaggccgccgaccggggtctcgtgcgtgcgtcatgactgaagcgctgaaccaactggccgccggctcccataccacgccactggcacagagcttttctaggccgagcgccaccgccttgcttgaactgcacactttgcaggcgttggatgccagcctggcgggtgcctctctacgcgaggtcgccttgtgcctcttcggttctgcggcggtaacacagggctggcatgccgacgcgagtctgcgctcgaaggtccgccgcctggtccgccgaggccgaaggttaatgctcgatgactatcggcgtctggcacggctcgacctgcagggtagggccgttccgaaccatcaccaaaacgaccctgaacaggggagcccagctgtctga

SEQ ID NO: 349913 - DNA, 1356 bp, Pseudomonas aeruginosa
atggctgattataggaacagctggaagcaggaatcgaacctggacccgtataaagcgccccatggtgtgaatttaatgaataataaccctaaacatgccttggcaatttgggccaagcagtacgaaatcagcagggatgacattcaggagagaaaagagacagctttaaggttagctattgaagggatcgctgacggctcaataatttcacttgatggcgtaatatcaccgctttcacaaaaaatcaaagcgcatcatggagttagtctctttgagatgaacggcaattggatcgaaacagcacagtattggacgtgcccctgctgcgcacgagggaagtttcaaatttctagattgggcggcaaaggacaaatccttgcgaaactcgtagagcatcacgaccatatgtctgatgcactaaaagccgcattcagaaaggttttcatcgagagcggtaccgataaacctactagtaccggattagcgctaattgagcgaatggcaccagcgttttcggcctacccatccgttttgatctgcgaagactgcaacaacgcagatgctgctgcaaagaaggtcatttcggatacaggccgaaaagttgattggcattctttctccattgggcagattagccagttcattatcgcccgcaaccataccccgcacattatagacaaagtaaaagttctagaaatttggaatctcgctcgccctgcttacgttgcacgaatgaacttagtatacgaagtagcaaaagccgcagtgctacatgattattggttcgagagatatcaaggggaaacgaccccggtacctaccttatctaacggatttagcagattcaacggactagagctagttaatggcgaagcgctagttcatgagatggcaagaagcacctttaaacacaaatctaactacagtagatggcgctcaggagaacagagcatcggagacataccacctcctaatttcttagcaatcatacaatcactgccgggatgcgctcgtatgtgggctgcacttccggaccaatggaaatgccctatatgtgagcgctccaagtatcagatcgtcaattataaaaaaggaaaaattagcttccatacccacggaccgactcgatacagcccggcctggaaatctactgggcaaatctgcataggatgcttcaatgtagtgacggctctgaagcgtgaactgcagatagattacggcgtagaggtcaactctccttttgactgtattacacctggcgaaatgcgaagcatcattcgggctagagcccattcatcacatttagtggatccggaaatggcagaaacactcgtgactaaatggcaaccgcgttaa

SEQ ID NO: 349914 - DNA, 147 bp, Pseudomonas aeruginosa
atgcctacagcgcagaccaccaccccgcagcaagtctgcgaaaacatcctgatcggcgaaaagcgctacaacaccgacccgcgccgcgtctacaggaacgcggccttcgcgaaccgacttcttcaaggcattgtttgctgccgttga

SEQ ID NO: 349915 - DNA, 1719 bp, Pseudomonas aeruginosa
atgaaaattgattccgtctatctaaatcagtaccgaaacttcgctgacgcgcacatcaatctggccaagaacagcctggtgattggaagcaacgatgttggtaaaaccaacatgatccatgcgttgcggctcttgctggacaagagcttgtcagaggctgatatcgagccgacgacacgtgatttccattgtgcgcaaaatggcacgcaggccgataacttcctgattcgagttgcgttctccgaagtcactcaggacgccgtactttcccagctcaagggctttgtcagtgctaccggccatttcttccttgagtttcgggccaccagggcggaccacagctatgagatcgctgcaggttatgacctctttgcaatggaggttattcctagtcgctactacctgaaacaccttcatctgaagtacatccactctcagcgtgaccttgtgcggtatatccgttcggagaagcggcaccttttacgccttgcgcaggaggcacgcgacgacgcccaagtggatgccgatgccatacagctgcagacacttgctgggctgctggagtctgtaaactccggtgtgaagaacctgcactacgttgctgaggcgacccaagacctcaacaacgaactgagggcgctctctcaccataacgctggttacaacgtctcgttggataccggtgcgataggtatcgagcagttcatcgagcagttggagctgggagccagcaccaacggctcgcgtgtaatgctcggaggtgacggccgtaataaccagatcctgctggctttgtggaaggccaaaagcgtgcttgagcacgatcaagacaatgaggtggtgatctattgcgtcgaggagcccgaggcgcatctacatcctcaccagcagcggaagctggcgagctacctcatcagtgcgttgcccggccagaccatcgttaccacacattctccacagatcgctgcaagctaccgccctgactcggtcgtccgcctactacgccacaacggaggatcccgagcggcaagccagggttgctctaattgcatcgacagtgcatggacagggcttggctaccggataagcatccttcctgcagaagcatttttcgcctcggcagtcatgctggttgaagggccttcggaaatgctgttctacgctgcgctggcacgcgcacatggcttcgaccttgatcaccgcaacgtgtcactgttgtctgtcgatggcgttgcgtttgaggtttataagcgggtgctagacgctctggaaattccatgggctgcacggactgacaacgacatttccaatgtttctcttggtccaaagggggcgcaagtcgtgtggcgcaacctcgcgggcatgaaccgcgctctgtcgctggcagggatgcctcctcagccgcaccgtccagtgccatacaatcaagccgcctcgctggcggatggtacttggaacactgtaagtgccgcagtggcacccttgggcatcttcctctcgcagatcgatctggagcacgacattgccaccgaactcccaacactgttggacgggttcaacggtcttgcgttgcctcaagcaatctcttacctgcaagacaagaaagccatccgcatgcaggagtttgttgagcactgtggggttcgactcagtgtgctgccgactgggcatctgttgcagccgctgattcactgtatgaccgctgctgcgcaggtatag

SEQ ID NO: 349916 - DNA, 1626 bp, Pseudomonas aeruginosa
atggccaccttcacgccaagtgcggagcaagcccaggccattgaatttgcgagcgacatggtgatagtggcccgtcccggcagtgggaaaaccagcgtcctgtcatgcaaggttaggagtctcgtttcggggttgcgtcgccaccagggtgtcatcgccatctccttcacgaacaaggcgagcgatgagctggagcgtcgttgtaaagcagatgctttcgacgtgaaggggtctttcttcggcacgatcgatgatttctgccttcgtgagatcgtgtttccgtttacacggcagttgatgcctgttgccgctccagccaagacggtcaaggtcatggagctgcccgaagcggtaaggctcatgctaccggcaacgccgatccagaacggtactgttgctaatacggccgagttcctgccgttcctgcaggcggcactggctctgggatttgttcccctagagaccgtgggcatgcttgctcgctacgtggtcgagcaatccccggcatgtcagaactacctcgtagcacgttatcgcgctgtgtatatcgacgagtatcaggacagtgggtatttccagcatcagctctttctgaagctgaaatctctgggattgaccgctgttgcagtcggagacagtgaccagtccatttatggattcgcgcacaaggactcgaggtacttgattgagcttacggtaccaggcagtggatttgcgcactttgccattaccaccaatttccgcagccatccatccatcaacgactttgcacttcgcctgctcgacccgaaccatcctattgcgccgacgagcgatatgcgggtgctaattaaaacggtcgatggtcaccagggcgccatgggtgtttggttgaatacagccattccccgtttaatgcgcttctatcgggtagccgcagcgagcagggttgccattttgtgccgacatcagcacacagcacagttgattgctgacgatattggacttgcccaccatcttgtcgaggagagccctttccagactgcaccggcagcggaggcaagtcttttctcggatatgttgaggttgcgattcgaccagcaattgaccgcagaggcactgattgagcgatccggtgcgaccaagctagccgctaacgaacggcgtgcgcttcgccgtgcgttattaagttgccgatcttgcttggatagcgacctagttgcgaccgtgttgaatgccgccacatgcctgctagggcagcagccttcggcggagggcgcgggagagcttggggccgtttgcggagatcccgacaagctccgcaggcttcaaggctccagtctcgatgccgttcagatcatgaccctacacaaggcgaaaggattggagttcgacctcgttttccatgttgatctctacgatcacgtgatcccgaaacgcacttatccgccaggacagtatggagttttcttcgagcacgaaatccaatgcctgaatctgcattacgtgggagtcacacgagcagttaaggcttgcgtgttgatgacatcgaactttcgcatcaacgggcagggagatgttaagaacggtgctccttcgcaattcattggcaggaacggggcgaatgctatgcccatcttttggtaa

SEQ ID NO: 349917 - DNA, 162 bp, Pseudomonas aeruginosa
atgccgggaaagccgtatggcgcaagctttccggaggagagatttaccgtcaaagaccggtttggtctcgatagtaaacgggagggtccgaatccgggcatcggttcttaccgttaccagtaccgccaaaccatcccgctgcctggcgatagctaccgatag

SEQ ID NO: 349918 - DNA, 780 bp, Pseudomonas aeruginosa
atgacgccaggtacgatggaagccttcatcgaccatctttcaattcccaaatcctgcgaattgaacaagcccgtttacaagaagctctttcttgataacggcatcctcgatatcgccgataaaaccgccctgaaggacgatgtagagaagatccgttggctctataccttgaagccagccacgatcaacatcgcgggccatgtcgatggcgagcgcgacttctctgaagtcgccattctccaggtcgagatcacatcgaccaagcgactaaagcgcatcgcgaccttcatgcagcggtcgatcccgtatccgctcattctgctgttcactcaaggcaaccagctttgcctgagtgttgccgacaagcgtattaaccaggcagacaaggaaaaatgggtcgtcgaggacctcctgtacaccgactggattgacctggccgcgccctcggctgcccaggcagccttcctggaagactgcaatatcaacagcttttccttcagcaatttccttagtttctataaaagcttggctgatcgtgtcatagctattaattgcgccagccatagcggacactatgagcagggcgcaaccgacaatatcgaaaataaatccagcgagggtcgtcttgaacggctccgtgagcttgaaaagctcaacctgaaaaagtctgaaatcgccaacaagctgaaaaaagaaaagcagctcgggcggcaggtcgaacttaatacacaaattaaaaagattaacgacgcacttgaaaaaattagagagaccatttga

SEQ ID NO: 349919 - DNA, 3231 bp, Pseudomonas aeruginosa
ttgagttggggtgaacgagctttgttactggacaacagaaataacggcaacgtagggaacacgctgcgccatcacctcgccgctggctcgaagctatctgtgctttcaggtctgttcactatctatggcttctcagcgcttaggaaggagctttcccgcatcgacggcgcaaggctgctgctttccggctgggaaggtctgccgctccaggcgctcattggcgcggataccgacctgcgcctagtgaaccagcttgaccagaagcgcatcgccagggaatgcgccaaatggctcgccagcagggttgaggttcgctctgccaatgcgccgcagaacatgttcctcgtggaggatggtagccagggcagctttgctatccatggcagctcagctcttacccctgccggtctgggcgaagtccaggccgataccccgctgatgaacactggcatcgccgacccagaaaccaccaagcaactaatggcctggttcaattccgtctggacggatgccccacgcgcccgcgacatcaaggacgagctcctgcaaaagctggagttcatcgctgccgatcagccacgcgatttcatctatttcctgacgctctacaatctcttcaaagacttcctcgaagacatcgacgaagacagcatcatcaagaccaagaccggcttcaaggatacccttgtctggaacaagctttataaattccagaaggacggcgtgctcggtgccatcgacaagctcgaaaagcacaatggctgcatcatcgccgatagtgtcggcctcggtaagaccttcgaggcgctggccgtcatcaagtattacgagctgcgcaatgaccgtgtgctcgtgctttgcccgaagaagctccgggaaaactggacgattttcaccgtcaacgataagcgcaatctgctggcccaggaccgcttcaactatgacgtcctaaaccataccgacctctcgcgcctgaaaggcagctctggcgagatcaatctcgaaaccctgaactggggaaattacgacctcatcgtcatcgacgagtcgcacaacttccgcaacaacaaccccaccaaaggcaccaagacccgctatcgccgcctgatggaagacatcatccagtctggagtgaaaaccaaggtgctgatgctctctgcgaccccggtgaacaaccgcatgaacgacctgaaaaatcaggttgccttcatcaccgagggacgtgacgacgccttcagcgacatcggcatcaagaacgtggacagcacgctgcgcctggcgcagaagcagttcaaccagtgggtcaagcaaccgcctgaaaatcgatcagtcgcctccttgctggatacgatgagcttcgattacttcaagctgctcgatatcgtcaccatcgcgcgctcccgtaagcacatccagaaatactacggcacggcggatatcggacgattcccgacacgcctgaagcctcagaacatctatgccgacatcgatgcgacccacgaatttcctccgctaaaggaagtgaacaagaccatccgacggctcacgttggcgggctactcgcctatgaaattcgtccggaacgacaagaaggatgagtacgcccgtcgctatgacaacgctgtcggcgacggcaaaagcgtgttcaagcaagtcgaccgggaagagagtctgatccacctgatgcgcgtgaacctgctcaagcgcatggaaagctcgatcaactcgttcacgctcacctcgcaaaagctgctggcccaggtcgaggcgctcctgcagaagatcgacgcgcatgaaagcggtgatatcgaagccctaaacattgaggacatccacgaccttgagatggactcacccgagcttgaacccttcatgatcggcaacaaaacccgtgtcctcctccaggacatggacctcatccgcttccgacaggaacttgaagcggaccaggtgttcctcacctccatcgtcgaatccgcacataccgtcgacgagcgccgtgacgccaagctcgaaaagctgaaagaggtcatcgccaaaaaagtccgggaaccactcaatcccggcaacaagaaggtcatcgtcttcacggccttcgccgataccgcgaagtacctctatgcccacctcgccgaatgggcgcgggacgaactgggagtccacagcgcccttatcacgggcggcggcaccaacaagacgaccttgaccggggccggatcggacctgaacaacctgctgacagccttctctcctgtgtcgaaggagcgcgccaagatcgatcccactgccaaggcagagatcgacctgctgattgccaccgactgcatcagcgagggccagaacctccaggactgcgacaccctcatcaactacgacatccactggaacccggtcaggatcatccagcgctttggtcgcgttgaccgcctgggctcgaagaacacccaaatccagctcatcaatttctggccaaacatggagctggacgagtacatcaacctcgaagccagggtggcgggccgcatgatgctgctggacatttcggctacgggcgaagaaaacgtcatcgacgccgatgcccaggaaatgaacgacctggaatatcgccgtcgccaattgcagcagctcaaagatgccgtggtcgacctggaagacatggcgggcggcgtctccattacggatctcaccctgaatgacttccgcatggatctttcaggctacatgaagaagaacctgcacctgctgcagcaggctccggacggcctccatgcggcagtcaccatcgatgctgacctcaagaccgatggtctcaaacccggcgtgatcttctgcctgaagagcatcagggacggccagcgcgctgtgcaggtggatgaaaactacccgttggcaccttactttcttgtctacgtcacggacgaagccgtggttgagctcaacttcacgcagagcaaaaaggtgctcgacctcctgaagaagcatggcctttcggcagcttccattgatagaacggctaccgggcaggtgaacgaccgcaccaagaacggtgccgacatggagcactaccaacagctcctggccgtcgcggtggatagcatcgtaggcaagagcgaagagaaaggtgtgcagagcctcttcaccagaggcggtacggtgttgaccgccaccagcagccagggcatcgaagactttgccgttgtaacctacctcatcatcacggacgcttcgtaa

SEQ ID NO: 349920 - DNA, 183 bp, Pseudomonas aeruginosa
atgcctgaagagataatgacccttaaggaagtggctgagtacctcaagcttgcggagaagacggcttaccgcctggccgccgacgggaccattcccggcttcaaagtagggggcaactggcggttccgaaaggccgtcatcgaagactggatcgaccagcagacggtcaaaaatcgtacttga

SEQ ID NO: 349921 - DNA, 171 bp, Pseudomonas aeruginosa; identical to SEQ ID NO: 342422

SEQ ID NO: 349922 - DNA, 873 bp, Pseudomonas aeruginosa
atgactggcgcaggcgcagctttctgtacggttgttgatcgcatacaggatggcgatcaccagtgggcggtggtggtagagcagtgtgacccgacgaacacggatgattcgctcgttttgtttaccgctcaggctattcgagatgcctacggtgagcaggagatccaggcgatggctgaagaggtcatgcttctccagctccctgagcctgctgatgtcgtgacagctcacttttctctggatgatctccttgctagctttcgcgaaggtctgcctgacccagacgctgagggcaaaaagcctgcgccgttgtcaaattaccggtcggaaacggctgagattcttgcgcgagaggccttgaagcgtgtgtttaacatggctacgcctccgtcattgcatgcaaccaaaggaaataggaaccaacccatcttggggttcgacggatggacgttgatggttctcgagtgcggaagtttgtcgctggttttggttcaagtaaaagctactgacgaccaaaagcgccctccgggagaggcagaaaagctcattgcagagtgctctagcgctccgttagatattcagaagcttaaaggattcatttctgcctgtactatccggtgtaaggggacagattttgcaaaaacattgatggagcttttggtggagcttcgtcaaaaaaataagcttgagaacattgttgtggcgccagtgataattcgcggcctagtttctgctaatcatgacgatctagcatcactgaagtctgctgtagctaatttcgggggcgcgcgctctcggggtatgagcatttcggttggggctaatctgaacgattttggtaaaattgctatgaataaggcgcgccaatcatga

SEQ ID NO: 349923 - DNA, 3123 bp, Pseudomonas aeruginosa
atgagtgatgtgattcgcgatgcctacgactctcagtctgttcaagatatagtaagaaggctggacaactattcatttcaaaaagctatttcggaagaatctgatgtcgctccggtagatagggatgagattgaccgactttgggtcgcagcgacattgtcagttgatgataatttaggtggtgccgattccgagttctctttacttgactcgcgtgagtgggcaggtaagtcctttgataagtggcttaccttcgtagattcgagcgctcagtttagtgtgctggagcagcgggacgttttacagctaatttcgacagggctgctggccagtcgccaaacagagcttcggcaagttctgagaaaaaattcggttatacaatgcgtttctgacgacttggcggattctgaaagctggctgagcttggtcagagattacatttttcaggctatctatttgcttgcgaggcaggacgggagaaaggacgtcgctgaagcagtgtctctgttgagttctttgagaaaactccagagcgataaagagaaggcttggttggctggtcgaggtaataaggagcaatctgcccttagtttgctggctctatatcatacctcttcagcggcagataccttggctcgttacttggtcggtggggtggtgacgaccccgacaggtaagtcgggaaatattagtaatgagttggcagttttaaccagtaaagcggccgaatatgcagagctttcatctgatcccgagctggttagctgggtgaggtgtgctgcatcgtcgatacttcagctgcgttctgatgcaatttggtccaatgcgaagaatattaatggtcttatagatcaattcatagcgcacctggcagatcgtggcagccctgtatttagtcttctcccatctcagcaagaggcactccggaaaaacttcctggacgccaggagtgaggcggtaattctgcaaatgcctactagctccggaaagaccctaatggcagagcttgcggctcttcatacagtgtcttcttattcggatgcacgggttgtgtatttgactccgactagggcgttgtcaacacaggtaaaaaggacactgagcgcagattttagggagatggggattgatgtcgtatctgctggcagtgcatacgaagaagatccttatgagcttaccttgcttgagggggcctctggtgtggttgtggcaactccagaaaaaatggatttgcttctccgaagccactctgattggttcgactctgtccgcctactaatagtggacgaagcccatttattgaaagatggagagcgtggtgcgcggctggaattgctgctagccaactttagaagagagcatccacatatacgcatgctcctcctcactccatttgttgataatgcggaggagttggctcgctggctgagcggagaacgtggggcccccgttgatgtgaaatggcgaccctcccgactaatgattggcattgcggcttttaagggtagggtccctaataagtttgtcgagatagagtggaaagaaccgcaccgtttaggcggtgccttgacagcgactaagatgaccctcaccccagaggaaaatgataaattcagaaagtcatcatcctctctaaataagtcgattattatcggaggtcggctgcagaaaattggccccgttttaggtatgtatccttcatctcgaagtgcagcagaaacagctgcatttgagttcgcctctgaggcgcgcgaggttgatttagagtcggcatctccggagcacagagttgctgttgctttagctgagtcggaatatggtgaagactcaaagttggcgtactgtttgcggcgaggggttgcgtatcatcactcggctctttcaaatgagctgaggtatttggtagagcgactggccgcctccaagaaaattaatttcttagcggcaactacaacccttgcccagggaatgaattttcccgtttcaagtgtgattattcattctgctcatgtcccccagcgtagtaatttaacaccggctgagttttggaatattgctgggcgtgctggaagagtagggctgtctgagcgggggcttatagtctttgctaacaaagaacatagagatctttggaatttttacactgagaacctgtctgaacgaattgattctgcgcttgatgatattgcagagaaaataaatgattcagattcattgaagtggatctatcggacgcatgagcctgtgcgaccttttttacagtacttatcacatgctagtgctactctggggataagaagagcttatgctgatctagagcgcttagttgaggcaagtttttccgggcgaaccaaggctagtaaagattttctgttttatttggcaaagaaatatctcggcgagatttcgtcaaaaaatcagagttacttgaaggttgctgataagaccgggctgggatcatatagctttgatgagttgttctatcatataaaaaatgatgccgtcctcatgagtggtgagccttctgtactagcaagcactgaggggttaaagcatttagtcgatgcgctggcaaatctccctgagctttctctagcacttgagcgcggcaaggggccaattaatacaatgcttgtcgctcagattatccatgggtggattaatggtgcgccgatttcagatttatcctcctcgtttgtgggtaagactgaagaggatcgtattcgtgcggcaggaacgtatgtgtttagcaaagtttcgcaaacagtctcatggggtgcccatgcctatttgaagggtagggcagttgctcgtggcgatgaagatgaaagtgtaggtgcagagatcatgctgccagcctatatccagtatggtgtcaagaagccggaagctgttatggcttccatgctgggtgttcctcgagcattagctatgggggtggcagatacctacgaagcagaattcgggaaacttcgagttgatgaaagtatgaagtttaagaagtttcttgagggctctgatcagagtttttggaatagaagtgtttctaaaacatcattgctaggtaaggtgagtggcgaggatgttcgcatagtttggagggaagcgcaggggatcctctga

SEQ ID NO: 349924 - DNA, 1788 bp, Pseudomonas aeruginosa
atgagaaatcttgagctactaaagtcgattaaaactcgtagtgagctggcggttttgctgggatacaagcccaaagctcttacctacctcctgtttaaaatgccaccagagcaaaggtacaaatcttttcctgtgccgaagcgctctggtggccagcggacaattaacgctccgtgtcctgagcttaaagccttacagaaacggttggcaggtttgcttgtcaattgttcctccgagttggctttagcaaagaaacttcctaggatttcctacgggtttaataaagggggatctactctagataatgcatcagttcatagaaggcggcgttatgttcttaatgtcgatcttgaggactttttcggaagcattcatctggggcgtgttagaggcttttttattaacaatgaagactttaagctattgcctgatgttgccacggtcattgcgcagatagcatgtcttgacggtaagttgcctcaagggtctccagcttctccagttatatcaaatattattggccatatacttgatgtgcatttggctaggttggccagaagatatggctgctcgtactctcgttatgctgatgatcttaccttttctaccaataagcctatttttcctcagcagatagctagtttggttgatcctcttgaacatatatgggttgctggtggggagttagagcgagaaattactcgttgcggttttagagtgaatcactctaagactcggttggagtataatgactcacgccaggtagtgaccggggttgttgtaaataagaaactgaatgttccaagtgagtttaagcggggtgccagggcaatggcagatcgtctctttaagacgggaagctttgagaatgttcaggtagtcgagcttgatggcgttaagcagtttgctaggacaagcggtaccattaatcagttggctggtgtatttagctacatttatatggtttctcattggaattctaagaagctggctatcaagcctggaactccattaacatccatagagagggttcatcgggactttctcttttataaagatttttatgctaatcagtttccgacgatcttgtgtgaaggaaaaacggataacacttatctaaagtgtgcacttaaaggccttgcgagttcctttcctgcactaattgggcgcaagccagatgggtcgcctgattataagattagattttttagaggctctcgtcttgcagctcgcttgttaagcctttctggtgggactgctcagctaaaagattttattgctgcttactcttcttggtgtgcgaagtttaagtcccaaggcggagcgaagccggtaataattgttatcgataatgacgctggcgccacccatatttataattggtatgctagtgtcaagaggattccaaagccggatggtatgttgccttattattatgttgggcagaatctatatatagtcccgacacctaaggcggcaccagctgacatgtcaaaaattgaggatttgtttaaggctgatgctcttggtgttatattgggtggcaagagatttaatccaaataatgatactgaaaataccacagagtatgggaagcaatatttcgcggatcatgtggtgaaggccaggcagaagacaattgacttctcaggctttgagcctcttcttgatactatttctaaaattattctatcgcatacaaccgctgtcgccgctgcggcggaaactagcttcgctgcagctatagaagcttctacagctgttgctccagttgcgcctcctacctag

SEQ ID NO: 349925 - DNA, 1386 bp, Pseudomonas aeruginosa
atgatgtatcctcgtctcaagctggctcgcagcttacttaccgaagatgggataattttcatttccattgatgataacgagcacgcaaacttaaagatcatttgcgatgacattttcggtcaagaaaactttatgggcgaggtttgccgagctactggccagacaacaggccaggatagtggcggcctggggagttcttttgactacatcttggtttattcaaagagtgtgggttttgacctttgcggtcttcctctcaatgataaggacttgactcgattcgagaacgaagatgagcgaggaaagtttgcatatgaccagatgagaaaaacaggttcaaatgaccggcgagaagatcgcccaaagctttattaccctgtaactaatcctgatggtgaagatgtataccccattgctccggcagggtacgaaagctgttggcgttttgagaaaaaagcatacgatcgcttgctaaaagacaatttcatcctttggaagaagacaaagcgcgacgacaaagaagtctggtggccgtatgttaaatactacctggagggaaggaccaagcgcccatcaccgctatggaacgacctagacggaaataaaaaagctgctcgtgatgtaagagccttgtttgatggaaagaaggtcttcgatttcccgaagccaattcccatgattgaacgctgcatccagattgcgccaaattcgtctccggatgacatcatattggacttttttgctggatcagccaccactgcccacgccgtgatgctgcttaatgcaaaagactctggcaacagaaggcacattagcatccagcttcccgagcctgttgaagaggattctgaagcgttcagtgcaggattcaagaccatctctgaaatttccagagaaagaattacgcgggcggccaaggcaatcaagaaagactacccgcatttcgatggtgatcttggatttaaggtattcaaactttccagctcgaacattaaagcctggaatcccgaccgtgccgaccttgaagagacgctcctttctcaccaggaacacttggtcgaagggcgcagtgagcaggatattctctttgagctgttgctcaagcgcggcattgaccttgctgtacctatcgagagcaaaactgtaattgagaagaatatttatagcattggctacggtgctgtatttgcctgtcttcacgagaccatttctcacgatgaggtcgaaggaattgctcacgcaatcctgaaatggcatgaagagctaaagcctgcttccgacacacatgttttcttccgtgatagtgcattcagcggtgatgtctcaaaaactaacatggctgccatcctggaacagaatggcataacccatgtgcgcagcttgtaa

SEQ ID NO: 349926 - DNA, 3018 bp, Pseudomonas aeruginosa
atgaagctgcattttgaagacaatcttgattaccagatggcggctatacagtctgtcctggggctgttcaaagggcaggaaatctcccgttctgagtttaccgtcacctatcgccctgaatctgggccgcagggttcgctgggtctgacagaaaatgagcttggggtgggtaaccgcttacagttggtagatgaggaaattatcgacaatcttcgcgccatccaactgggcaacggtttgcgaccatccaaggatctgaagagcggcgatttcaccgtagaaatggaaaccggcacaggcaagacttacgtctatctgcgcaccatttttgagctgaataaaaattacggatttacaaaattcgttattgttgtgccttctgttgccattaaggaaggcacatataagacactaaaaatcacccgcgatcactttgaaaacctttaccccaaagcaaaggggtatgagtatttcctttacgactcgtccaagccagggcaagtacgtagcttcgctaccagtccgaacatccagatcatggtgacgaccgtaggtgccattaacaagaaagatgttaataacctctacaaggaaaatgagagcatgggtggcgaaaggccgattgatctcatcaaggctaccagtccgatcattatcgtagacgagcctcaaagcgtggatggcggtctgcaaggtcaggggaaaaaggcgctagacgccatgaacccactttgcacgctgcgctactcggcaacccatgcggacaagcaccacatggtttatcgtctcgatgccgttgatgcctatgaccggggcttggtcaagcagatcgaggttgcttcccttcaggtcgagggcggtaataacaagccctatgtgaggcttgagtccacgcataaccgtcagggctcgatcacagccaagatcgaaatcgacgtacaacgcggcaagaacataaagcgcgagattctcaccgttgaagacggtgacgatctggagcaaatcgctaatcgcgccatctatgaaaatatgcagatcggcaccatcacctgcggcaaggacaaccagtcaatccagatcaaggggccgggtatcgaccaggtattgagtcctggtgaggccattgggggtgtgagcccggatgagatcaagcgcctgatgatccggcgcacgatcaaggagcatcttgataaagagctgaccttcgctgccaataagcagcctatcaaggtcttaagcttgttcttcatcgacagcgttgagcattaccgccaatacgatgaagacggaaatgaggtcaagggtaaatatgccctgatgtttgaagaggagtataccaagctcgccaagtccagcgactaccagagcctcttcaaggaaattgatctcgaaaccaatgctgccgaagtccacaacggctatttctccatcgacaagaaggagcgtcttgtcgatacagcggaaaacacccaggcgggccgcgacaactccgagcgtgcctataacctgataatgaaggagaaggaaaagctgctgagcttcgataccaagctcaagttcatcttctcccactcggctcttaaagagggctgggacaacccgaacgtcttccagatatgcgccttgcgtgaaatgggcacagagcgggagcgccgccagaccatcggtcggggcctgcgactctgcgtcaatcaggacgggcagcgcctgcgcgggtcggacatcaacacgctcaccgttatcgcgaccgagagctatgaagagttcgccgaaaatctccagaaggagattgaagacgataccggcattcgtttcggcatcgttgaatcccaccagttcgcgaccgtgctgacggtcaatgagaagggggagactgccccgcttggcgtcgagcactccgagaggatctggcagttcctgaaaggcgaaggctatgtcgacgccaagggcaaggttcaggactccctgcgcgccgcgctcaaagatggcagcttcaagctgcccgacgacatcaaagctgggctcggcagcaagcctgattttgcggcggaagacatccaaggcgtcctgaagaagcttgctggcaagcttgatatcaaaaatgccgatgaccgccggattatccgcacccgcgaggccgtcctgcagagcgcggaattcaaggcgctctgggaccgtatcaagtacaaaaccacctaccgtgtggacttcaacaacgagaagctcatcgtcgactgtgccaaggctattcaggattgcccgcccatcaccaagaccagggcgcaattccgcaaagccgatatcgcgataggcaagggaggcgtgacggcggaagaaacctccgcttcagccttcaccaccatccatgaagatgacatcgaacttcccgacatcatcacggacctccaggacaagacgcaactgacccgtagcagcatcgtcaaaatccttaccgaaagccgtcgcctccaggacttcgcgcgcaatcctcagcagttcatcgactatgccgccgaagcgattaaccgcaccaagcgcctggctctggtcgacggtatcaagtacagcaagatcggcgatgagcacttctatgcacaggaactcttacagcaggaagagctgaagggctacctgaagaacactctcgaaacgcagaagtctgtctacacccacgtcgtctacgactcagcgggcgttgaaaagaccttcgctgaggatctggagaagaacgaagcagtgaaggtgtacgccaagctcccatcctggttcaaagtgccgaccccgcttggcacctataacccggactgggctgtcgtcgtggacgatagcggccaggagaaactgtatttcgtggtggaaaccaaaggcagcacctggtggggggatctgcgccacgtcgaaggtgccaaaatcctctgtggcgagaaacactttgaggaaattgccagcggtggtaaccctgccaaatacatacgcgcggtcgatgtcgatggcatgatgaaacacgcagaagcgtaa

SEQ ID NO: 349927 - DNA, 318 bp, Pseudomonas aeruginosa
atggatgagttttggaaggcggcgctgaaggcaggtggcccggttgccattgttggttttttgatctggtggttcatcgggcaggcttttgagcagcaactgatcgcgattttcggcaatgaacagaagttcgcattcgtactgatgattacaggcggactattggtctgcctgtatgctgctatcgcccacttcggcaaaaaaccagataccactgttcacaaagagaacaaggccgtctttcacaggaccgtcatcaagggcgatgttgttctcggcgacaaaaccgtaaattcaaaggaaaaaaatggggaatag

SEQ ID NO: 349928 - DNA, 1416 bp, Pseudomonas aeruginosa
ttgctggcgccctaccaggggcgctgcctgggcgtcggccagctcaatgcgctgctcaaggccgtcaccgaccattacctggatcgcggctacgtcaccacccgcgcctacctgccacagcaggacctggcctccgggaccctgcgtatcatcgtcgtcgaaggccgcctggagggcctggacagctccgcgctggccagcccgcgcgaactggcgatgagctttccgggcaggaccggcgagctgctcgacctgcgcgaactggagcaactggtcgaccagttgagtcgcctgccgtcgcgccaggcgcaactggagctggtgcccggcagcgaggtcggcggcagccgggtgcgtctcaagggtgagcgcgacaagccctggcgggtctccgccacgcgcaacaacgacggcgacgtcagcaccggcgagcagcagatgggcctgggtctggactgggacagcccgctgggcctggccgaccagctcaacctgcgcgccaaccgcgacgcggtgaccgaccgctggcgccattccgacagccagagcctgttctacaccctgccctggggttggtggactttcacctacggctacagccagagcgactaccgcacgcgcaacgaggccagcggcttccccttcaagctcgatggcgacagccgcagccaccagttccgcgccgaacgcgtgctgcaccgcgacggcgtgagcaagaccgccatgagcctggggctcagccaccagcgcaccaacaactatgtcgaagacacccgcctggaagaccagagcacgcggatcaccgagacccagctcggcttcaaccatggccggcggatcggcagtggcttcgtcaacctcgacctcggctggcagcagggcatcggcgcccttggcgcgcagggtcgcggccacccgcaggcgggcgatccgaatgcgcgctacgacaagtacagcctgaccctcagctacctgcagccgttccagctatggggcgagcgcttcagcttcgacagcctggccaccgggcaaaggagcgaggacgtgctgttcagcccgcagcgcatcagcctcggcggcaacagctcggtgcgcggcttcaaggaccagaccctgaccggcgacagcggcggctactggcgcaaccagttgcgctggcggcgcgcggtggaatgggcgccgctgcggccctggctgcaggaatacggcgtggccttcgcttacgacgtcggcgtgatccgccacgaccgctacaacgacggcgccagcgggcgcatgagcggcaacgccatcgaactggatgcccgcggccgctatttcgccgccagcgtcggcttcgcccgctcgctggagcggcccagcgccatcgagcggcgcgagcacccgatctatttccgggtcgacgcgttcttctga

SEQ ID NO: 349929 - DNA, 147 bp, Pseudomonas aeruginosa
atggatcggtttgagctactaatctactcactgttcggcgtgctctgcgcgttgggggttacagccgcgattggatacaagatcgccgcttacctcgacaagcaacacgacaacagtggaacacctccgaactcaactgccgattaa

SEQ ID NO: 349930 - DNA, 1269 bp, Pseudomonas aeruginosa
atgtatctgcgcaaattggatctgacggatttccgcggtttttcttcgttgcggtgggagctcaaagagggagaagaggcaggttggcacgtgctaatcggccctaacggggctgggaagtccggattcctgcgctctgctgctatcgcatttaccggagatatcgaattcacagcctctcgccgtactgcacgagacttcatccgcaaagcggagggcgtggagaaggcgataatccaagtagaagtcgcaccaactattggttgggataagagcggccggcaaggccccatgtcatcaaagccagttaaaggctccataacgctgcacagcgatggggctgttaaatcctcgcctacaaaaaacgttaacttttggggggaaggtcagggctggttctctgcagcattcggccccatgcgacgcttcactggcggtaaccctgaaaatgttaggctctttgccggatttccaagacttgcccggcacctaagcattttcgatgaaggtgtcgccttgactgaagcgcttgaatggctgcagaagcttaggtttaggcagcttgaaaaggtctccagtgacagcgctgagactggcctgcttgggaaggttcggcaatttgtgaatcaatcaggattcctcccccacggagccaagctgacagaggtcacatcagacggcgtcaagtttgaggacggcaacggtgtagagatccccattgttgaaatgagcgacggttacagagcagtgctgtcgatgaccttcgaactcctgcgtttgatggcccttcgttatgatgaagacagccttttctctgaggacgcttctacgatcttggccccgggcgtagtcttgatagatgagatcgatgcccaccttcacccatcgtggcagcgagagatcggtccatggctgacaaagttgtttccggctattcagttcattgtgacgacacactctccctacgtgtgtcagacggcgctgaagggctcggtgtggactttgcccgcacctggctctggcgagcaggtgcaccggatcgcaggcgagcaactgactcgcattctgtatggtgacgttctgcatgtcctgaacagtgacgcctttggcgggcttccaggtcgatccgaagatgccgtccacatgctggatcgcctggctcaactcaaccgcaagcttgatcgaggcactctttccgcacctgaagtatctgagcgtgcagatctgaagcaaactctagggcctgtcgtagaaggtgatgagcagtga

SEQ ID NO: 349931 - DNA, 804 bp, Pseudomonas aeruginosa
gtgatatcaatcacagcagccatccttgataaacgtgcggtggatcgcctgcaggatctgcaagatgctgtaaacaatcttcccgactatgcggctcaggtggcctacgcaaagagcagctggagccgaaagccttcctcgttgttcgatggcttaaagctaaaattagccgaaatgtgtagcggaaatcgaaggtgtgcctactgcgaagattcgtttgcagatgaaattgagcatatgcggcctaaggatttgtatccagaacaagcatacgactggaacaattacgtccttgcttgcggtccctgcaatggtccgaagaacaaccagttcgccatactaagcgacccgcttgcattggttgatgtaacccggaaacgcagtgcaccagtaatccaaccggttgctggccgacccgctctcgtcgatcctagaattgaaaatcctgtcgactttttgtggctcgattttcgcacatggcgctatgtgccaaattcagacgacgagacctctgagatttggcttcgcgccgaatacacaatcgacgtattaaggctcaacaaacgagaggcactcgttcgaggacgcaaaagtgcattttctggcttcagttcaaggctgactacttggctggaaaagcgagagcactggagccctgaagaacaacaggagtttctagatgatttcagggcagagcgttatcgaagtgtttgggagcgaatgaagctgtatcggaatcaagtacctgctcttcatgatgttgcacagctaattgaggcagcaccagaagcccttcagtggtga

SEQ ID NO: 349932 - DNA, 1911 bp, Pseudomonas aeruginosa
atgaccacatatcacaccaggaaccctcttggctcaaaggatccacgggatttgtacgataacgccgagaactacgatacggcgatgaacgatctaaccaatgagcagtgggcagaccgatttggagtaagccgaccaacttggcttggtattgaacaacgggttaacgacttcctcgttcactcaggattcgaaacccctcccctccaatacatcgatgacactccgctgacagtacagcgcgcgactcagctgatagagagaaacggcaacctgtacagcgtgcgcctccccgcaaatctccccgtgactttgacaggaatttgggcaacagatgaaccaatgctgaccgttcgggcggatcaggcattgcgccaacagcttgccagccaaaccggagccgacttggtttcccatggcgaagtcatgttgagcgatgagctgggaaagggcttcccgctgccaaccaagccgctaacggacttgttcattatttacgggcaatcgaattctgtcggttgggcgcaagatacccctgggtatcccactgtaataactaactgggcaaaagccttcgacccgacaaatgggacgcttactccagttccgaaggggttgatcagtagtgctggacaggtcagtaccggtcacggctgggcggaattcgtcaatgaatatgtgcgcctgactagtcgcaaatgcgtcatcatgtcttgcggcttgggcggccaatcactggcggcactgagcaagccgggaaccatctacacccaaatggctaatgcggttgccgcgtgtaagtcggctattagcaccgccggctacactctcggcaaggtctatgcgatttataatcagggcgaggaagacgccaagatcggcaccactaagtggaactataagttgccgctggtaacgctggtcaacaacatgaagaccgatttcttgttggatgccttctttttccagctgatgggatcaccgcgctccggcttcggtaacgaggcacaactcgccaacattcacgcgtcgcagcgggaaatatgtatcgaacaaaccaatacctatatggccagcgaggcagcggcagccttcaccaccggtagcggcatgatgcagtctgcggacggagtacattacacccaagaaggttacaactatctcgggcgcgaaaccgctaagcgcatcgctaatgtggtgctgggagtcaacggacgccaagaagacagtatcgaggccttcggcgcagtgcgtgcgggtatgcgtcgccgctggagttccgtctatgcgcgtatccgcaaggatgctggtggctttgtgttactcgatgaggcgctgtcgtccaacggctatgcgctggggtttgtcgacaccattaccactggtaccggggctggtgcggctgtcaccctcggtgtgactttgaataactttgtagtggccggcgaatcgtcaagcgtgtccaacctacagtccgatcgtaacggcttacgaccggtattcagcaaggtgacaattgacgcaccaactgcaaagatcggtttggcagtgacctttaacgctagattgtcttttttggtgagcgccactggggtgatccgctcattgcgtaatatcgcctcgactaacaacttcatcaatgcaaacgtcaccgcgtctgtcgccggattggtcgtaaccttgagtttccctggcggcctggaacaatttcccagcgtatcaaactatggctccggtagcgtcaacgtcaccgcagacaacattggaccgcccaccaccattcaactgaccttttctagcacttcggcactggccatagtcaatgcagacgtgatcggtattaagccggagtcaatcattaatggctgcgagttcggcatcgggctaatagcggcgaatatcggagaatag

SEQ ID NO: 349933 - DNA, 234 bp, Pseudomonas aeruginosa; identical to SEQ ID NO: 341518

SEQ ID NO: 349934 - DNA, 1008 bp, Pseudomonas aeruginosa
atgagcctgcgcctgcgcctgaccctgatcctcggctcggccttcatcctgctctggtcgctggccgcggcctggatgctctgcgacctgcgcgggcagatgatgcgctccttcgaccaacgcctggcggcctcggcgcggatggttgccggcctgctccagcagttgccgcagccgcagccggcggacggccagaccacgcgcctgagcgcggagcaactgggaattcccaacggcatggcctgccaggtcagctcactgcgcggcgaagtcctggcgcagagccatgccaccccggagcgggcgctggacagcaccgccagcggcttccgcgaccaggaaatcaacggcgtgctgtggcgcagcttcaccgtgcaggccggcgatctgcgggtcagcaccgccgaccgcctggaagagcgcgacgtgctgcaacgctcggtggttgtggccgccgcggtgccggtgacggtcgccctgctcggcagcctggccctgctctggctcggcgccggccagggtctggcgccgctcaagcggattcgcgacgccctcacccgacgtggcgccgactcgctggagccactggagctggcggccctgccgagcgaactgaagccgctggtggaaacccagaaccagttgttccagcgcatcgcccaggccatcgaacgcgagcgacgcctgaccggcgatgccgcccacgagctgcgcagcccgctgaccgcgatcaagacccacctgcaggtcgcgcgcatgaccgagggcgctgccgccgagcaggccctggcccacgccgaggaaggcgccgaccgtctgcaccggacgctggaccagctgttgctgctggcgcgggtggaaggcagcctgtcgttcgacgacggcgtgcaatgcagcgccgaggacgccgcccgggtagccatgcacgacgccggccacggcgacgtgcggatgttcgagctgaagctggccgacggcttgtccgaggcgccgctggaagtcccctag

SEQ ID NO: 349935 - DNA, 351 bp, Pseudomonas aeruginosa
  misc_feature (185)..(185): n is a, c, g, or t
atggccaaggatacccgcgatacccagaccctcgacgccttcccggccaagccatccaggggccggcctcgcaaggctgacgcgctctccaatgctgagcggcagcgcctctaccgtcagcggcaggcgggtaaggcaccccaggtggacgcggatgccctggtccgtctgcagaacgaattcgnccggcacgttgatgatgcgcgcgccctggtcgcccatcttcgaaagaccattgcgcagatggagcttgaggtggatctgtgccgccaagagcgatccgatgccatgcgcgtcaacagcatttaccgcgagcgcctggagcttgctggtctccctacagactactag

SEQ ID NO: 349936 - DNA, 735 bp, Pseudomonas aeruginosa
  misc_feature (456)..(456): n is a, c, g, or t
atgcgatgccgccccgggtttttcgttaccgtaacggaaaatccttgctttcggtccggcagggcctatgattcgaatattcgttacggtaacggaaattcgaagatggccaaggatacccgcgatacccagaccctcgacgccttcccggccaagccatccaggggccggcctcgcaaggctgacgcgctctccaatgctgagcggcagcgcctctaccgtcagcggcaggcgggtaaggcaccccaggtggacgcggatgccctggtccgtctgcagaacgaattcgaccggcacgttgatgatgcgcgcgccctggtcgcccatcttcgaaagaccattgcgcagatggagcttgaggtggatctgtgccgccaagagcgatccgatgccatgcgcgtcaacagcatttaccgcgagcgcctggagcttgctggtctccctacagactactancccctccgaagccccttcgcgggcttcgtcgttcccgccgctccgaaaccacctcgcgccctgatcacccaagcgtgcgtatcgcggccatccatagagcacgctgttgatgcgcacatggggcgatcagatctccgaggaatgttcagcggtctagcccggcgagttctcgtagggccttccaggctcgctggctttgggtgctcgaacggcacccggaggggtgggggtgctgttacacccccactttaccgcacactcgtgcggtggtcggactag

SEQ ID NO: 349937 - DNA, 1137 bp, Pseudomonas aeruginosa
atgttcatcgactggcttagcgtttcacaagaacaccctcacgaccttccggtcgtgtgcgacgtgtttacgctcacagtcgatgccagtacccatgaggttctgagtacccgtcagccgtggttcaagcatgagggtagttactccacgtcgatcaagatcagcgtccagggtcgcaaggttcgtgttgaggggaatcccagccgaattgaccgtcaggacaacctttttggctatgtcaccatcgagcagtgcatcgccgtctacaaccagcttctggctgagtacggccttcccgctttcacccggtgtactgaaatccatctccgtgacggagcctccggcgctcgccctggtgattgggttgctgatggatgcgttatcgaccgcatcgacctgacgacgaatgtttccgtaggggagggcaacgtgctcgcctacctgcgcggcctgtctacccagcgtattggccattccgttggctacctgtatccgaatggccggactgtcgattggactgctgccggcaaaaggaaaggtggtgtccgcctccagtatcgaaaggcgtacgacaaagcctttgaaatgggcgagcaccttcgcccgcgcgttctgcgcatgttcggcgatgaatcgccagagctggcctacgtggaccagctgatttcgtactgcaaccagcatggcgttgtgcggcaagaacaggaactgaaacaggagttcctgagccgcgagggtcttcgctactggggccttttcaacgaaaaccgtctccgcgatatacacgatgaatttctggcggtggacaagaaactgaaggtaacggccatggaccttgcgaccatttcccagcaactgattgccgaaggtgttgttaccagcacctatgcggccaacatgaccgcgatggtcgctatcaattggagcaacgggcagcctttcgacaagaacaaccggtccctccaaaagcatcgcgcacgtcttcgccagatcggtatcgacatcgctaacccttgcgataccagccgcttcacgcccgttatcgtgcgccaggctcgcgaggtcaccaagacttacgaccttccgattccggactggtatcgccgtcctgtcggtcatctgcggttggtggcctga

SEQ ID NO: 349938 - DNA, 1002 bp, Pseudomonas aeruginosa
atgtgtaagcccgatgaaaaccagtgtcgagataaggcagggcaaactacgtcatggtctttgattcgcccggacttgaatggtctcggctcgattgaaaacgtctgcaaacagggctgccgggtcgccctgggcgcttcgacgtgtggcccgatgaataccgacccgacgaagggattttgttctggcacgggcacattcaccggcgatgaatgttcacccacggatgagagttcgggtggcaacaatccggaccccacagacccgactgaccccaccgatcctacggacccgactgaccctaacaagcccgacgagcacggttgtatcccgcctgcgaagtggtctggcacgacgtgcgtgatgcctgatccgggcgatggtggagacggtggggacggtgatggcggcgacggtggcggcgatggcaacggtaatggaggaggggacggcaatggagatggcggtggcgatggagacggcaatgggaacggtgatggggacggtaatggcgatggagacggcaacggcaacggcaacggcgacggggatgaggatggcaagtgtgacccggccaaggaccccagttgcaagccgtcttcggtctctggtgaggcgtgcgaaaccccgttgcagtgcgaaggcgacgccattcagtgcgccatcttgcgacagcagaaacaggcgcgttgtgacgctcaggaaatgaatgatttcgagaagaacaaagagaagatttcgaagttgttccagggcgaagagttcaaagaacagcctgaccaggaagtggaaatcccctcgttcatttcgcagtctggtcggtttctaccgtcgggttgtccgcctgataaacagttcagtctgtctactggcggcggtcactccttcacgttctcttataagccgctgtgtgcgtttgcttctgacctgggcgtgctgattgttgtggcggcaagtatttttgcgacgctctatgtcggtcgcggttttggaggtgagtga

SEQ ID NO: 349939 - DNA, 327 bp, Pseudomonas aeruginosa
atgcaatatctatatgctgcacagttgatcctgatgattgttatgccgctggtgcgcatggtactgcgcttcctgggcgtgggctttgttacttacatgggcgttaatctacttgtggacactgcgaaagacttcattacgtccaagattagcgcgtcctctgtagagatacagatgattcttggcttgggcaatgttgatatagcgatcaatatttgcatggcggctgttgtgactcgtgcgattctttccggttgggataagcgaactgaccgcaagcgcaaacaagtttggaataagccgggtggaacttcgattgaggcttaa

SEQ ID NO: 349940 - DNA, 1197 bp, Pseudomonas aeruginosa
  misc_feature (379)..(379): n is a, c, g, or t
atgatttatattcgtactggaaagccgggtcacggtaaaacgcttaatactattcgtgaaattgacgaaaaggcatttgctgaaagtagggtggtttactatcacaacattccggaacttaagaccgacaagttaaaggcgtcctggttcgaatttgaggatccctataagtggtttgaattgcccaatgacgcgattatcgttgttgacgaggcgcaaggttggttcggtgtgcgcgatccgcgccagaagccgccagagcatgtaagccgcttcgaactgattcggcatcagggccatgaaatgcacttggttacgcaggacccgcgattcatcgacgtgcatatccggcgtttggcgaatgggcatgttcacttcnggcgggtgttcaagtcccagcaactgttgaggttcgagtccgatacggtcattgatgcggtcgagaagaaaaccagcttcaaagatgcggacaagaccacgatcaagctcgataagaagtacttcggcatgtaccggagtacgcagggcaagcatcatttcaaagtgcaactgccgaagaagttcattgcggcatgcgtggtcctggtcgttacggcgttcctggtctaccgggcatatgagcgctaccaggaagaacagcagcaagctgcggcggaagaagttgcagctcctggtgcggcatccgtggttgactcggtgacggacaaggtcggttcgatcctgaacccggtttcggcggcaggtggcggcggccagggaaaggtgctgacggaagcgcagtacctggagcttcgcaagccgcgtgtgccggacttgccggcgtcggcgccgatctacgacgagttgaccaagccggtgacgtacccgaagccgttctgtgtgtcgtcgcgcaatgaggacctagtgcgccgcaacgcttcgaagatggagttggggtatcgtgatggcgtgttgaacgggtgtcgctgcaacacgcagcaaggcacgcggattcggctgtcgttctcggcctgcatgaactacgtggagaacggggcgttcgatccggcgattcctgatcgctcgatcgatcagcgcatggttcagcctcagccggcatcgcagcagtttcaggtgcagcaggtccagccgcgggatgcgttcgggacgcgggtcactgtagtgcctgatagcagccgttcgccccgcacgttgtga

SEQ ID NO: 349941 - DNA, 771 bp, Pseudomonas aeruginosa
atgtcgacggtagtcgctcaacccagtaccagtaccaccctacgggtgcgcgctgatttcttctccatcttggaaacgcgcaccaccccaacttcttcggtattcgccacatgggttccaccgcaaggctgcaggtcggtgtctttaatactcaccaaccgaacctgcccggcgcccatcggaggttggacactcatggtgcgcaccagatccggcctagcccgcagtgcatcgtcgctcatggtgtcgatcgaaaccggatgtgctgcctcgaccattgccgccaaggcgctatcaatggcctcgcgggacagcggttcactcgtcacgaagtccagggcgcgcatgctcatcagtgatgctgcacccattgaccggatagggcaggacagcacagagcatgtgcgctgcggtatgcagtcgcatgtgccggtaacgacgcacccaatcgatctgcgcaagaaccacctcgccaggcttcagtgctcggagaacggttgcctggccttcagctgggatatgcaggatggcatccctgccagcacctgcttctgtccccttgcgtgtatcggcgatccggagccgcgtgccatcagccagcgtcagccaaccactgtctccagcctggccacccccctggggatagaaaacggtctggtcgagcagcaggccatcttcaacgacatcggtgattctcgccaaacactcttcccggtaggagtcttggagaaaaagggaggcggtctgcgtcatgatgcctccattggttga

SEQ ID NO: 349942 - DNA, 1902 bp, Pseudomonas aeruginosa
atgcaaatcaccttcgacaggaaaactgtaaacacctgccttcaacagaactttatactccccacatatcaacgcgactataagtgggaagttaagcacatgcaggagctaatgaccgacattcaagagtcatttctttcttcctgggaagaaaaacacggaagaaaagatgtacttggctatgaacaatacttccttggaacaataataacaactcaggtcgaccaaggagggaaagcgattgtcgacggccaacagcgaatcacaacgctaactttaattctcgcctatatacatcgtctccaaaaaagcaaacctaatttagaaatatcccccgtcgaccaatccatcaggcgaaaagttgcaggtcaaaatgaattcaaccttgacatggataaacctagacaggaattctttacccttctgatcgacggtacagaagacgaggacgaattaaatgctgctgtagatagcataaaccataaggactctggaacagagcgattgtgggagttataccaagaaatagataagtctctagcggcagaaataactgaaagaaacttgcttgctcatttctttgattacttaacggaatgcgtttgcatgtttgagattggcgtccccagagaacaggacgggcacaaagtatttgtcaccatgaatgatcgaggactgaagcttagcccaatcgatctcttaaaaggttttttgctttcaagcatctccacaaatgaagacaacaaagcttcgcatgcttcttggaacgcaagcattaacaaactaaaacaattaggaagcgacgaagattcaaacttttttaaaacgtggttacgcagtaaatttgctaacacaagtcgaggtaaaaaacgaggtgacgcccctggcgattttgaactggtaggagatagttaccatcgatgggttatcgataacaaagaacgcctagacctcaaaaatagtgatgattacacaaacttactaactggcacacttccgttctacgttgatctatactgcaagataaaaactcatgagcgtcagtatagcgaaagcttcccacatgttttttataacggcgccagagatctaacacttcaatccatgcttataatgagcgccagtaaatcaagcgacacaagctctgaaataaacaaaaaaattagatccatctcttacttcctagattacttagctgtaatacgcgcgctaaatggaaaagaaaacacatatgacaacatcagagatttggtctttgaaataacgaaagagattcgcgatctagactcaaatactctaaaacaaaagcttgcagccaggatcgattccgagaaagacagggtctctgcaataaaaaacgcatcctactaccaaatgaaaaggcaggatctgctacacgtacttgcaaggattggtgagtttcttgagaagtcactagaactaaccaacaaagttggctttgaagtttatgtaaatcgctctagagactctaaaacatttgacatcgagcatcttattccatacgacatagctgccgtcaatgctgaactagcgaaagcaggtggaataccattcgatggtgccgcagacttttattcatatagaaacaacatcggagcactaattctactcccccgcggaagaaatagatccatgaaagccatgccatacaaagaaaaactccaaagatattctaacgagaacgttcttgcacaaaccttatgcaataccttctacttgaaccaaccaaacctcgatagatttaaagcagaaacaaatatcgagctttcccatatagatttcatggacgcagaatcaattacaaaaagagcagccgcatatttatctattgctgagaaaatctggtcaaaagaaaagcttgaaacaatatttaactcataa

SEQ ID NO: 349943 - DNA, 852 bp, Pseudomonas aeruginosa
atgagcatcaaggcgatgaactgggcgtgggagcagcggctaccacccaattcaaagctgatcctgatggccttggctgattcggccgatgagatcgggaagtgctggccgcgcgtgcggctcatcgccgaaaagtgctgtgcgtctgagcgaacggtacagcgcgttttgaaagagctggaagaacgcggcttccttcatatcgagcgcaggtttcgaggcgacggagggcaatcctcgaatgcctattacctgtgcctcgaatcaccccccgtcaatttgtcatccccatctctcaccccctccgacaagttgtcaccggggggcgacgcggccgtcactcccccggtgacacgacagacatcccagggcgacagaactgtgtcaccccatgaaccaccaaccagaaccatcaataaatcatcactacaactaccggcgaaagttatccacacgccgcccccttcgcccgtgccgggcgaggcggagaaaggcgcctgcggcgcattggtgtggccttcacgcctgaatgagcgggagcgcagtgccatcgcctccatggtgagtggccttgatgccaacgatgcacagatgctcctggacgaactcgccggggtaatggcaacgcagagcatcaagaccagcccggaacgctggtttcgtgcggttctggatcgctttcatcaaggacgtttcgcaccgtcggccggtcttgccgcgaaggaaaagagattgcgcattcagagcacaccagccgagacaccagttcagacagcttcgcccgacgtcattcgtcatcatttggagcgcatccagaccatgctgggcagaaagggggccaccgtcgaatga

SEQ ID NO: 349944 - DNA, 738 bp, Pseudomonas aeruginosa
atgagcacaatcaaagtcctggccgtcctcggcgtagccggttggatgatcttcggcaaccatgaggccaaggcccaaatcccggtcaccgacggcgcttccatcgcgcagcagatcgccaatcaggtcgaaaccatcgcaaaatggaagatgcagtacgaccagatgaccagccagatcaaccagatgaagcagcagtacgagtccctgactggctcgcgcggcctcggcaacatcctgaacaacccggcgttgcgcgagtacctgccgagcgactggcagggcgtctatgactcggtgaagtcgggcggctatgccggcctgagcggccgggcgcagtcgatctatgaagacaccaaggcattcgatgcctgcgcccatttcaagatcgcggaccagcgcaccgcgtgcgaggcccaggccatcaaaggtgcccaggacaaggctttcgccctggacgcctacgacaaggccaagtcacggctgaaccaaatcgaccagctcatggcgaagatcaacgacacgcccgaccccaaggcgattgccgagttgcaaggccgtatcgcggccgagcaggccatgattcagaacgagcagaccaagctccagatgtacgcgatggtggcggcggccgaggatcgcttgcaggaacagcgcgcgcacgaaatgaacgtgcgggacgccgcgaagcgcgacggcctcaaagtccagcccatgaacttttcgctgcgtccataa

SEQ ID NO: 349945 - DNA, 480 bp, Pseudomonas aeruginosa
atgatttacgttctctccggcctactcgcgggcctgtacgcggcaatggttatcggcttctggcgcgacgtgcgccgcttcggcaagtggaaggaagccatcggccgcgaagtgcatatgttcgctatggatggcgtgtccatctatgcggccttgatggtggcctatttcgccgcgcacgactggtacggcttcaccttgccactgttcagccaaggccaactcatgagctggcaagcaatgctcctggcggtcgcgtgcgctgtcaccagcctgtccatcggctacttcaatggccgggaaaggttcctgacaccgacctatgcaggtcgtcgggaagcaacgctgcgcttcctcgcctctcgccaaatcatcgaagcggccgaagtagctcatgggctgaaagtcatgcaacaacgtgaagcccggcaagctgctgtccgcaccatcgaagccgaagcgcgggaggtcgggaaatga

SEQ ID NO: 349946 - DNA, 267 bp, Pseudomonas aeruginosa
atgagaaagcccatcctctccctgatcgtctcggctgtcctggtcggctgcacggaaccggctgaacccgtccagtcggtcgattggtacaaggaacatgcaaccgagcgggccgaccgtttggcgaagtgccgggccaatcctggcgaactgtccgaaaccccgaactgcatcaacgcggaacgcgctgaaagccttgccgatgcgggcaagcggcgcggcctcaacgtccagcccatgacgggcgtcaagatgggaggcaagtag

SEQ ID NO: 349947 - DNA, 1077 bp, Pseudomonas aeruginosa
atgccagcaacaacaaacgtcttccagggcatcggcggcactctggacaatgccacgacgaccttcgtcacgaacgtggccggcgacaccattgcaatggtctatccctgggcactcggcgcgctgacgctttacatcaccttgtatgcctacatgatgatgaccgggcaagttcaggagcctttcaaaacagggcttttgaagatggtcaaggtcatgatcgtggggacgatggccctcaatgccgatatgtacctgaatggtatcgtcgaagccttccgaggcatcgaagaagggctaacgtccgccttctccggctcggctggcggctcgatctacgcctctctggacagcagcttgagcaaggggcttgagctaatcatgcagtgccgagaaaaggcgcaggcggcgagttggcgggagatggggacgatcttcatgtggtatctcatcatggcgattcttgccatcggctttgccctggtcgtggtgttcggcggcatcgcaatcctgatgtccaccatctacctgaaaatcctctttgccattgggccggtgttcatcatgtgcctgatgttcccggccacggcgaagttcttcgattcctgggtgggtttcgtactgaaccacgttctgattgttgcgctgacggcggtcgtgctgacgcttggcgtcacgatctacgacaacgaaatatcgaaggtcgtcatcgactccgatcagaacatgctcatggtggccctggagctgcttgtcgtggcagcaatcctctatggcatcgtgaagggtgtcatgccgatggctgcggctctggctggcggtatctcgatggctgtcatgacggcacgcggcctgaccgatagcctggacaaaggccggcgcggcgtccagcaaacggcaaaggccggcttggtacttggcaaaggcgcttacggcttgggcgagggtgcctacggccttggcaaagcgggcgtgaacaagcttcgaggcaatagcgtttccaatgccggcggcggtggatggcagcccgcattcaacgcggcaaccctgggcaacctgcaacggaaaagccaatga

SEQ ID NO: 349948 - DNA, 1443 bp, Pseudomonas aeruginosa
atggcagtcgaagagctatgtcggcaggctgcatccaagattggatggctttacgccatcaaggacgtgagcgggaagattggcacgctgaggcacgccatttggtcggacgttctggtctgtccccattgcgccacggaagtctcgctttgggatgccagcgttaagaccaaccctctagctatggctgattcttactgctgcaaaggatgctgcaaacacgtcgcaatcgaagcttgcgaacgtgccaccgaggtggtcatcgacgcattcggctgcaagcagctcacgaagaagcgcgttctcgcgcgtgttcatgggcgcagcggcacagcgaagtggcagcgagctcccaccgatgaagatcgcgagctgttgtcgcgcattgcgaaggtcaagcccccgaagtccgcgcctagctccgacatcgaatggggagagttgcgccgcgctggttaccatctgggcattgagaagctccaccacttctacacgaagcgcaacttcatcgcgatggcgaccatgatggagctcacggacacctttccagtagacgtgcgtgatgctctgaaactgctggtgctgagctacaacgcgagccattcgacgctgatgacccgcgtcgtgctcaagaagggccaaggagacttcgtcctcacgagcgcccaaagcggtgtgctgtatatcagtggattaccagtggagaaaaacatcatcgagggcgtgcgccgtaagtcgaaggcgttcatcgactcgttccgcctgctgcacgggagccgaagccaagtgacggtgcacaacgtcagcagcgaagcgatgccgctaaaaactagttcggtggactacgtctttactgacccgccattcggcgactacattccctatgctgaactcaatcagatcaacgagctgtggcttcgccgctcaaccgaccgcacgcgtgaagtcatcgtgagcccgtcgcagtcgaagggcgtcgtcgaatacgccacgatgatgggctcagtgttcaaggagatggcgcgcacgctcaagcctgaaggcgttgccactgtcgttttccactcagcacactcccaaatctggcgcgcgctcgcgcaggcctattccgaggcgggattcgctgtggaggccgctagcgtcttggacaaaatccaggcgagcttcaagcaggtcgtctcaaaagtctccgtaaagggagacccactgctgttgctttcgaagcggtcggtcgagcacgcacgttcaaagtcgtgcgagaagattgcagccgagataattcgaacagccagcaacggcgtacgacttgatcaccagcggctctactcacaattcgtggggcgctgcctggaactaggcgaggacgtgggcatggacgcgaaaaccttctatgcgctcgctcgcgcggaagatcgcagctatgaagcctcgcgcacgcaatga

SEQ ID NO: 349949 - DNA, 2049 bp, Pseudomonas aeruginosa
atgaagcggacatgcagcacgaaccacgattcgggccgcacttccgacgcggagcggcgcaagcggctgggtcaatacttcacgggcgtgggcttggggcgcgtgctcgccgcccttgccgaggcggacaaggcgaagagcatcgtggatcccatggcaggctccggagacctgctggcctcttgcattgagatcaatgcggagccggaggtgctggcggccattgagatagacccggtggctcttgatgcgtgcgcagagcgcttgcccaaagcccattgtctcttaggcagcgcttttgaccccgagaccgtcaccaagcttcccgcacaggcgtgggacctagtgatcgccaatccgccctacgtccgctaccaagcgttttctgagaaggccgacgcctcgcacgcattgccctcggcgatgcagattcgcgcaggcttgttacgcacgattgatctgatgtcagcgctagacgcggaggacaagcgtctgttcgcgcacttggtcgatggctattctggcctctccgatttggctgtgccctcgtggattctttgcgcggcgatggtcaagcagggggggcggctcgcaatggtgttaccagagtcgtggctcagccgcgactatgcgactatcgtgcactacctgctgtttcgttggttcgacgtggaattcgtcgttgaggatgagcacgcctcatggttcgaggatgcccaagtcaaaacgacgctgatcgtcgccaagcgaacaaagcggcgcgcgtctgccctctctctacccgagggcgcttcctattgccacatctcgatctccgcagctgcggcaagccaagacagcccgatcggaaaccttccccttccagggagatgccgcgagaagagctttgcaaatcaagctcggttctggctccgcaacgcgtcaagccattcgacggagctggctcgcgcacggcccgtgtcgttgatgcaagcgtaccgcaatgccgtcgccgccgcagcgcgacagaagtggtttgtggccctgggtgagcccaaagcgcgcgaggaaagagtcaacattccccacgacatttacgattggcttgtgcggcgtgaactgccagtgaccttcgaaacactagagtcacaaggggtgtcggtgggccagggtttgcgcacgggggcaaacgcgttcttctacgcggacggtcagcgccatggcgacatggtgctactgtcgttcgtaggttcgctagcgggagtgaaggccagcgtgccaacgagcattgcaaggcccgtactgcgcagacagtcggagttgccagaaggatttgtggtctcgcccgtgacagccactggttgggctctcgatctgcgtggacacgcgctgcctgatgatatcggcgctggcgacttgatctcaacgccctaccagcctatgccggaggaagtggccgcggtagtgaaggctgcggcgcaggcaaacttcggcacgccagaaaagccgcaaaagatttgggagctcacggctgtagcgcccaatatgcggcctgcggtgcgcggagctcatcctcgctactggtacatgctgccgaacttcgctccgaggcatctgcccgacgttttgctcgcccgcgtgaattcggcgactccgaaggcgtatctcaatgaggggcgcgagtgcttggtcgacgcgaacttctgcacgctgtggacggcagagaagtcgacgtggacggctcacgcactgctggccttcatgaacagcgcttgggcgcaggcggcgattgagcgctcaggcgccgtaatgggcggaggcgccttgaaggttgaggcgacgcacctgcgccgactaccggttcccaccttcagtgctcaacgtcttcacatgctctcggagctaggggggcagctcgctgaaggtacagacgcccaaacgacgctcgcggaaatcgacgaactaatcgctcaaaccttaggttgcgatcaagcaggaacagctgaactgagggaaatcgcgcgcacggggcaagcgcgacgcgccaaacacaacgggaaacgaggttag

SEQ ID NO: 349950 - DNA, 3246 bp, Pseudomonas aeruginosa
atgggggcgaagtatattgaggctcagggtaaggcgttcctaaaggaagtcgtcgccctcatgggagaagggaaggctgaggacgtgctgcgacacgctctctcggcgaggcttccgctgatgttcccagagcagccctggtgggtgaaagcacatgtcaccggcacagaagcactcgccaagtttcacgagttcggagcgaagaaatacggtttcgttgacgtgctggttggcgcgacggtcatcgaatacgagcgggacctcagagtgctcggtgctttcgaccacggcctgcatcaggtcaaacagtattgtgcctcgcgactcaacgccggcacgccttctgacctgctcgtcggcgttctctcagacaccgttcgctggagcgccttcagcgtgaaggcggtcaaggacctttcggccgtccccggggcgatgagctttggtcccggccacattgagctcgaactgatcgaagattgcgacctatcagcggcgggagacgtcgaagccaaaaggctcggtggttttcttgtccggcacctgggccgcgaaggcgggcgcctgctcgcggctttcactctggcgaaggacttggggttcgagagcccgttttgtcaagcgcacctgacacccatcgacgctctggtggatgctgccttcaaagccgacccgacctactcgggattgatcaccaagttgtggaccgacttcgtgtcctatctcggaggcgaggctgccgcgggaaagttcgacatgaagtcatatgtgggtgagctctacatccttacgcttgccaagctcatttgcgccaacgtgctcgcgggaaagggcatggttagcgacgacgcggagctacacgcgattctgaatggtgatttcttcaaagcgcgagggctaccgaatctcgttgaatatgactacttcggctggctaaacgctagcccctacgtcaccaacctgatcgaagtcgcgcgagacattcaggatgacttgcgcgcctacgatttcaagtcgtcgccagcagaggatttgttcggcagactcatggcacagctcgctgcacgatcgcagcgactgcttctcggccaagagtggacgcccgcctggctcgcggcgaaactcgtgggccatgcgctatcgaagctgcctgaaggccagcagcctcggttcgtggatatgtgctgcggatcgggcgcgatggtagtggagaccgtcaaaggcgcacagaaacgccttcaggcggcaggatcgaggcccggagatcctgtcgcgctcggggaactcactgccgcgatcacggctttcgacattgacccgctggcggtgatgcttgccaaagttggctgggttctagcgagtaaagagtggctcgtcttaggccacgaggcgcagattcccgtctaccacgccgactcgctgttcgccaacacgcctgtgacgaaggtattcagcgcaaccggtgaagagcagcgcaagcttcgtctggacacggaggaagtggaactgcctcagttcctgatcgagtcgaagcgacaagcccttttcgacgcgctgctctcgcgaggctacgagatggctatgagcagcgcagcgtcgcccaagacaacactgacggatcatgatatcgaagtcatggtagacgcggttgtggccgattcgagcgccatattgacagccgacgagaggtccgcctcactgcagttttgcggaaagctgctgcgagctctcgaggtcctgcagcgagccggacgtaatggcatctgggctttcgtgctgcgaaacagctttcggcccgcgcttgtcgctggccgcttcaacggggtcgtcaccaatccgccgtggctggctctgagcaagatccgcagtaacccttaccgtgatgcgttgaagaagaaggcggacaaatatgggatcaaggcgccaggctcatctcacttgcacgtcgatatcgcaacgatcttcctgctgcatgccatcgaccgatacctcacgcctggtgccgtggtcgcctgcattctccccgataccgttctcaatggattgcatcacgcgccgtttcgggcggccgagtatttgacggcagatcgccccgtcgcattcgaccctgaggaaatatggaaggtcgcaagccaaacatttaagaacgaagcgatcgtgttgttcggaaacaagggaacaccaaagagcgaagcgacaactttcagcggacgcagagtcagccgcgccgaagatgagataactgcctatcatgtgctctcgtcaggtgcaaagaaggtttggactaccgaccttccggccacggcgacggaggtgctgagcacggacgactccattagcaacctgtttcggcaaggcgccgatgttatgccgcgcggcgtcgtcttccactccgccaagaaggtcgggctgtcgtggaatctcggtcccattccaacaggttcgcctttttcatttctccgctcagaggggaaggttctcaagaacttttcccttactgcgaatggcgtcagcgatcaggtgatgttcgacgtgcttctctcaaagcacctggccccatgggagctaacctcaggcgccaaaggcctgctgcctttcaggtggggaacaagcggatgggaagcgtgcactggccccggcctcgccgccctcggcgctgcgacggccggcgcgttcaagaccactcttgctgcgaccaatgagaccatcgaacagttcttcgagcgagtggatactgatcggaaaaagcttacgaatcagcgttggtctgacgatgattggctcgtattcgtccctgccggcggcaagaatccttgcgctgcctacgttaaagggaagcagattccgtgctcgaggaccatcgtggatcaaaccctttactgggctacggttggctcggaggatgaggcgatctacatcaccgcgctgatgaacagccctgcattggcggaggccatcagggaacaccaaccgcgcggcgcgtttggagagcggcacattcacaagcttccatacgagcgcacgcctgcctatgatccagaggatccaacgcatcaagcggtagtcgatgcggcaaaggctcttcttcgccaatggagtgtccgtaagttggagagagacatcgaaccattcctggctcctgaaaagcatcttgtcacgcggcgaaagaagattcgcgatgctcttgccgatctacccgcttggaaccactacatcgacgcttgcgccaatctatacagcacctga

SEQ ID NO: 349951 - DNA, 159 bp, Pseudomonas aeruginosa
atgcgcgatggccaattggagattccaagccgcggcgctttggtgcaatacgtcctgcagcgttaccagatcgatccaagcaaggtccagcctcgcgccgcggcacaacagatcgtcgtcatgaatctcgatgaactgcagcagtggatctaccagtag

SEQ ID NO: 349952 - DNA, 258 bp, Pseudomonas aeruginosa
atggatttcctcacattgacctggtggttcgcctgcatagtgctgctcgtcgttatggtgacaggtggagccatagtgatgctttggctgcgcagtgaggcagccctggagcttggggcatttctccgcctgcaattggatgaggaacgtacccacagtgcagagttgcgagcagaaatgatggagttgcaggctgcagtcagggctgaacgcttttatgtcgagcagttgcggcgccaggtcgaactgctcaggtga

SEQ ID NO: 349953 - DNA, 891 bp, Pseudomonas aeruginosa
atgtttagaaaaattctcgatacggtctccctagccgcagatagggttgcagagagcgtttctgacgcgttcgacactacccgcgaaaccgtttccagtgctgctgatgcggtgaccgatgcttatggaactgctcgcgatacagttgtcgatgctgccgataaggtggctgacgttgtctcggatgcttatgtagcggcgcgtgacactgtggcagaggctgcggacaaggcttccgacgtagcctccgatgcctatgacttcactcgcgacactgtttccagtgctgctgactcgatggtggacgctgtttctagcgcctatgactcgacccgtgatgttctgagcgacggttttgatgcctcctgcggttacgccagtaactttggcgcatccatgagtgaattctgggcaagccgcaagtcccgcgaagaggccaaggagcgggaagccgaggctcgtggtgagtctcgtgaaaaagcccgtagtgtggagcgtgagcagaagttcgaggctgcactgaaaaaggccagtgcgcgccttcaggacgacaatgcgtacttcgggattcttatcgcgatgcaggctgtagcccaggcaagcgctgcttgtgatggaggaatctctgctaacgagcaagagcagatcgacgagctgctattggggatgggggctaaatggctgccgcagcaggttcgtagcaagctggatgagcttgtcgccaacccgccaagtttgcaggatgcatttgcgatggcgcaaagggtagggccagacgcacaggatctattccaagaaataattcttttcgtgactcatctcgatgagcagatcagcgagtcggagcaacggtttttcgcccattgggtccagatgcgggcaagcgcctga

SEQ ID NO: 349954 - DNA, 1656 bp, Pseudomonas aeruginosa
atgacggatcgaatcgagcgtttcaaagcacgtcggcaactccaaacccagctgcgcgagcaacctgctcttgttgcgttgccgagcacagcggaaacagcggtgctgttgcaacagcccgtcaaccagtcacgaattgatgaggcttttggggggctgtcgttggatctcgatgttgaggtttgcgaggctgatattgatgcagcgctgcatgcattcagcgagtcctttggccgggagcgttttgggcagttactcaatgatagtcggcgcgaggtactgcaggctgtagctgttccctttggcttggggcgggtattggcggtttatgacaaggttggcggtaatgtagacaccattcacaacgcccgcgagggtgtctatgccaccgatgaggcaagacagcagtacgacgaaagatcggagtatgactcggataaataccatggggataagcgctacaaagacaagaacgccaaggacaccattgcgcaggaggaggggcgtctcagagatgcttataccggcgaaaccatgggtcgtaagcaaacggatccgcgcaacctcgaccatacgatagcggcgaaggaaatccacgaagacgccgggcgtattcttgctggggtcgatggtgtaaaactggcaaacgactcgtcgaacttgaatccgaccaaagagcgcttcaacaagtacaagggccagcgccgggctgaggatgtagtcgctcagttgcagcaggagagtccggagcgtcgtaagcgaatcacggagcttgagagtaagaccgagctgacagtcaaagagcgaaatgaactggagctgcataagcagaagcagacgatcgccgacaacccagaacaattattggcgaaggacaaggtcgcacgtgagaaatacgaaggtaagctccgtgatgagtactatcggagcaagaaatttcgggatgacctgctaggcactagcgtcaaggaaggcgggaagatggccttccagcaggcgtttggcttaatgttggtggagtttttcgcggctactttcgatgagattcaggattgctatcgaaaagggccggtgcacgatagctggtggccggagctgcgtgagcgcatgcagcgggttgccgcccgtgtcgccaaacaatggaaagtggctctcgcagcggctggggcgggatttgtatccggtttcctttctaacatggtgacggttcttctgaacactctcaagactaccggtaagcgggctatacgtatgttccgtgagggcttcatgtcgctgttacgggcgctgagagtgttggcgtcgccaccaaagggaatgagtccacgagaaggcgctcacgaagcgttgaaggtaatctgtgctggtgccgttgttatcggtggtgttgccctcgaggagtatatcgagaagcaaatcctagcagtcccgggactgggagccatggggactattgtttcagtcgtcgtggttggtgccctgacagggctcgcaagtaccttcattgtttatctgctagaccgcctggacccgctaggcgtaaaccgcaatcgagagcttgctgctctccagcagtatctggatggggaactagaggaggtaagggggagcaacgaccaattgctgttgactttggaggctgcacttgattgttga

SEQ ID NO: 349955 - DNA, 2571 bp, Pseudomonas aeruginosa
atggcaacggttccttttaaagtttcggcccgggctgcgagattaatagggcgggagaatgttgcaacctcgcaaggagcagttactgaacttgttaagaacgcatatgatgcagatgctagtgcctgtgtaattctcttcgtgcctcgatgggaacaagctccccaaaatatttctgataaacagttttccgagcttgaaagggttttacctgacgcaaaagactattacctccctggggatgacggaagggctctttcttcaagtatatcggagatgagtctcgcaaagattaattctgcatttcagaatatattagatttgtggattgtagataatggtcatggcatgtcagttaaaacgattgaagaccattggatggttattggtactgacgttaaagaggtcaaggacacatcatctggtgggcgtgttgttacaggtgcgaaggggattggacgctttgcacttgataggcttggacatgaatgtgagcttttctctgcggagccgaaaagggatagctttgctcattggtctgttgactgggacagctttgaaggggatggaaaggttttagatgatgttcaggctgttcttaacagtcagccaggtaagcttgttgaagtttatgaaagtataaatattcgacgctatctccctagcgctggacctgcagtagagggggaagaaggggcggtcttggattttgagcatggcacagctattaaaatatcctacctgcatgatctgtgggatcagcgcgatagttctaaactaaagcagactcttgaggctcttctaccacctaaggaacggggggattttaatatctatgtctatgaccataggacaatatttggtaacggatggattgataatcttccgcctgatcaatttgactacagattgactgcacgagttgatgagtctggtgaagtttctatcacgattgagagaaaggagatagatgcctctagaataagaccttcagtgtttgagcttcaagaaatgcagggggctgggtttcttctagaggattttaaacgtgggagttacagctattcaacaaggcttcgcaatatccttaagctctcgtcgagtgaagatgaccgagagtttttggctgttgggccatttagttttactctgtacttctttaagttatcgaatcccactgaggataatttggagcgctatcctcagaaaaatttcgatgcggctaaaagacgtcgatggttgcaaagctcaggaggaattcgcatttatcgagatggctttcgtgtgcgcccctatggagagccaaatacacaaggttcggactggctgttgttagggcagcgtgtggctgctaatccggctgcagcaaaacgcattggttggcgtgtccctccccagcaacttgctggaactattaatattactaagtcaggaaatccactgctggctgatcagtcaaatcgtgaaggcataatgaatgagcgggccttcgccgttttccgaaaaatcattttggccttgatcagtgagttcgagagagatagaagttatatttatagcaattttgatcgggcctttgagagtgaccatgccgaggaagtagaggttgcagaagggcggcaactggccgagaatattttagctggtgtagtacagagtacgccttcgtctggtcagttaggtttaggtatatcggaggcactagctaagtctggcgaggatttgatatcagagaatattaagattgctaaggcttacaagtccgaagagcggaagaatgaggcgcttaaggatgaaattcaagtcatgcgaggtctagcaactctaggcacggttcttgtgtcatttactcatgagcttaaacagataaaggctaatatggaatcgcgctatatgcggatggaaaatgcattaaagcgtgttgttgatagtgaaaaaattaagttgcttccagatcaagttaatccatttcatatagtggggcgctgggggcgcgaagatgaaaaggtgagtcggtgggttgattttgccttgtcggctgtttcgccaacaaagcggcggcgtagagttattaacctttccgagtatttttcaggcttgtctgagtattggaaggattttcttaagtctagagatgtatctcttgaggtttgttttgatgatggttggccagcttctgtgttggctcatgaaatcgacttggatagtatcttctataatttgcttgtcaattcggttgaggcgtttatccggccctctcatgaggcctctcgtgatatagtaataagcgtatgcaggctgggtgatgagcaggttgagataaaatataatgatagtggccctggaatatcggagggatttggcagtgccgaggatatattcaagttcggagtttcgtctaaagctgcggacgactctgcaggagtggctggtacgggaatagggatgtggttggttaaggggatcgtagacgactatggtggttcagtaacgcttttatcgggggcgggagatataaatttctcgcttcttattaggcttccagttcacaataaacagggaggtatatag

SEQ ID NO: 349956 - DNA, 672 bp, Pseudomonas aeruginosa
atggatgagggtcaggaactctctattcttcggcctaatattgcttatgttgatgagttagaggatgagcgcgataatttttttactgatgcctatgactcagagtgttttgataagatttacttgcttgagccagagagagagattgatgaaatggttcgtaagttgcttgatcttgatattgatgctctagtttctgactttaatctgtcggaggcgagtgcattaagctatgatggcgagcagcttgttttagcgtttttggctgtgaaaagcgagtttccatgctttattcgaacctcgtatgatgatcaagcggttatcgcatcggatgatgttaatcgcgtttactcgaaaaacgttgctcatgatgaaggggcaggtcgttatttgtttaaacgtgttgttcagcaagttcgtcgctataaacagcggataggcgagtggcaagatgaattgtcgaactttttaattcgtaatccaaaccaactggttgctgtcgacgttgagaggattttggagctagatgcgaagcttgagtcttgtttagggaaggatgtggcaatacctactcatgttaagaggcgtttattggcgagtgaaaataatttggttcaggagaccgagcgtctaattgctgacattcgatgtgttattgatggaaggaaatga

SEQ ID NO: 349957 - DNA, 603 bp, Pseudomonas aeruginosa
atgacgatgttacgcttgagaaagccgatccgtcgagaagtggaagagcgttcaccatatacgaaatatcgtgatgagttgagggaagattttaatcaggcatgcggctactgcgatgatgatgatcgtcgagctgataaaacttgcttccatattgatcatttcgccccgaggaagtattttcctcatctggagaatacctatacaaacctggtgtattcctgccgtttttgtaatgtacgtaagtcggatcattggatagggaatgatccgttgattcataatgatggaaaaaaaggctttgtcgacccatgtgatgatgaatatgatgagcatcttgggcgtgctttatctgggcggatttttgggaagaccgagcttggttgttatatggtccgtcgtcttaatttgaatcttttacgtcatgagctactttggaactctcggaaagtgcgattgctccgtgatcaagtcaggttgcttctcgataactatcttgaggcaggacttcctaaggactatgtttatatagagcttttagagagattcttggggttgacggaaaaaatagaagcctacgaggttagtgcaagtaatgggtag

SEQ ID NO: 349958 - DNA, 1611 bp, Pseudomonas aeruginosa
atgggtaggagggcagcagttagatacacaggagctgtatatacaccatcaggtattgcatcagcccttgtttcagcaattaaaccaatcttgcctgatcagtgcttaaaggttcttgagccaagtgttggggacggggcttttctcgatcaaatagttgatgccttggagggggctgagattactgcagttgacattgaccagaatgtcatgaccgccttaagtgagcgctttgacttttcaaaagcttctgttgagtttttggttggtgattttatcgaatatgctacgggctgtatctctgctaaaggaaagacatttgatttggtcgttggaaatcctccgtttattcgggggaggaatttttctgatgacttcaagagaaatataagagagttctctgagggtgcttgttatccattgggagatttaaagaatagctgggttgcttttcttgtcgcctcgacaaaggtcttgtctgaaaatggtgtcgttgcatttgttcttccgtatgaaattattacagtggactacgggaagaaagctcttcgttttttgtgttctttttatgactgtatagatatttatgtgtctagggaaaaagcatttccatcgattgatcaagatgctgtgatttttgtaggtcagagaagttgtgatacgagaaaagggctttatgtaaagtttgttgagagtatgtttgatttggtggcgtcaagggctcataaggtgagccttgatgagagtgccaatataggtattgagcttagttcatttcttattcctaaggctactttggatcttttgaaagatctgcggagaaggtgtgcgtctattcatgattacgctggaagtgcaccgggaattgtttcggcggcgaatgatttttttattttaagggagtctgatgtttataagcttggtttggaagattatgtggttccaattctaaagaaaggtagttttgcgagctttaagcctgtgttttctaggcaggattttctggctattacgcccagtgagccatgctatctgctaagtattaagggggattttgattgtttggataaaagacttcaggaatacataaagttcggtgaagggcaaggctttcatttgagatataagtgtaggaatcgtaaaaattggtatgaggttcctattgttgcgcgtgagttaggtttcgtttttaaacgctcacatatcctcccaagagtttgtttaaatgaggctgatgtttttcttacagatacagcctatggtcttcggatgaaggatggctttaccattcatggtctttgctattctttctataattcgctcactgtgttgtttgctgagattgatgggcgcttttatggtggaggagttctggagctttcccctaatgagtttcgtggattgccattggtttatcatgagcctacgcaggatgaatttaatgaatttttagatattcatgatcaggctgctggaaatgttagtttgattcttgattatggtgaccgatggcttaagcgcgccttgggtcttagctcgaaacaggttgctatgattcagcaggctttagatatggtgcgaaagcatagaatgaggcatggtaggcgttag

SEQ ID NO: 349959 - DNA, 1200 bp, Pseudomonas aeruginosa
atgagctttccgggcaggaccggcgagctgctcgacctgcgcgagctggagcaactggtcgaccagttgagccgcctgccgtcgcgccaggcgcaactggagctggtgcccggcagcgaggtcggcggcagccgggtgcgtctcaagggcgagcgcgacaagccctggcgggtctccgccacgcgcaacaacgacggcgacgtcagcaccggagagcagcagatgggcctgggcctggactgggacagcccgctgggcctggccgaccagctcaacctgcgcgccaaccgcgacgcggtgaccgaccgctggcgccattccgacagccagagcctgttctacagcctgccctggggctggtggaccttcacctacggctacagccagagcgactaccgcacgcgcaacgaggccagcggcttccccttcaagctcgatggcgacagccgcagccaccagttccgcgccgaacgcgtgctgcaccgcgacggtgtgagcaagaccgccatgagcctggggctcagccaccagcgcaccaacaactatgtcgaagacacccgcctggaagaccagagcacgcggatcaccgagacccagctcggcttcaaccatggccggcggatcggcagcggcttcgtcaacctcgacctcggctggcagcagggcatcggcgcccttggcgcgcagggtcgcggccacccgcaggcgggcgatccgaatgcgcgctacgacaagtacagcctgaccctcagctacctgcagccgttccagctatggggcgagcgcttcagcttcgacagcctggccactgggcagaggagcgaggacgtgctgttcagcccgcagcgcatcagcctcggcggcaacagctcggtgcgcggcttcaaggaccagaccctgaccggcgacagcggcggctactggcgcaaccagttgcgctggcggcgcgcggtggagtgggcgccgctgcggccctggctgcaggaatacggcgtggccttcgcctacgacgtcggcgtgatccgccacgaccgctacaacgacggcgccagcgggcgcatgagcggcaacgccatcgaactggatgcccgcggccgctatttcgccgccagcgtcggcttcgcccgctcgctggagcggcccagcgccatcgagcggcgcgagcacccgatctatttccgggtcgacgcgttcttctga

SEQ ID NO: 349960 - DNA, 291 bp, Pseudomonas aeruginosa; identical to SEQ ID NO: 336196

SEQ ID NO: 349961 - DNA, 261 bp, Pseudomonas aeruginosa
atgcaagaggctattaaatcggctgtcggagaatcaaccgcgaaagagatcatgcgccactatggtggtgagtgcatctatattggctctatccgggtggctctggctaagcgcgaagcccttagaaggaatatagatatcaatagtagggctgatattcttattcgaaagggcgtccctatccgggaaattgtaaaagagttcagcgcagaatatgacctttgtgacaggcaaatctgcaagattctcggctacatgtag

SEQ ID NO: 349962 - DNA, 1311 bp, Pseudomonas aeruginosa
atggctggggtcgaccttgttgtcggtctccagcagcgagtaaccgatccccggcatcaggaagctgctcagcccggagtcgtcgcccagcttgtactcctcgcgcatccagttcagcgaaaccacccgctgccagccatcgggctgcttgctgtgccattcgccgccaagggtcagcaacttgctctcggtgtcgaccaggtcttcgaactggtagccgctggtgaagcgcagcttgtcggtgagcggcggatcgaggggaatctcgtaccaggcgccgacgttctgccgtggtgcggagatttccgactcgaatcccaggctatgtccttcggcattcacccaatggcgggtccagttgaacctcgcgcgcgccccgacgtcggtcgagaaaccgaggccgacgcccatggtccggggcttgcgcgcctccagccggaccgctaccgggatcgcctggcgtgcgccgtcggcctgcgcctgggtcggcgcggcgtcgacccgcacgccctcgaagtagccgctggattgcaggttctggttgagttcggcgatcagttcggagtcatagggttggccggccttgaacggcaccatgcggcgcaacagttcttcctcgatgatcgagtcgccgtcgaagctcaccttgccgaaggtgtagcgctggccgctgtcgtagaccaggtcgatgtcggcgatgccggcgcgcggatcgatgctcaggcgctgggtgctgaagcggccctggaagaagccgtagcgcgaggcctggttctggatcagccgcttggcgtcctcgtagacgccctggttcagcttcgcgcccggtttcagctgcttgcccgacggcaagcggaagctctccaggctggcggcctcgccgagcacctggatattcacctggcgcaggcgcacgggctcgccgggcactaccttgagcgtgagcttcggcggcttgccgtccttcacctcgctgtcgatctgcgcctggaagtagccgagcgcctgggccgccttttccgcctgtgcctcggcattgcggcggaaacgttgcaacgccgcctcgtcccgctcgccgaggctacccacataagcctcgatattggccttcagggcggcattggcgggggtgacgcgcacgctaagctggctctccgcgaaggcggccgtactcaggcacagcagcccggccagcgggaaccggaacaatccttgagtcagtctcatggcgcggatgctacgcaggcgggtggcgcgcgtccagatttgcgcggacgccgccgaccacctcctgacattcgggttttatga

SEQ ID NO: 349963 - DNA, 1404 bp, Pseudomonas aeruginosa
atgtccaaacattcccggcttgaaaaagccttcctgcgtagcggcatcctcgtcgaccgccagcaggacatcgtcaccctcacccgtcgtcacgacggtacttcggcccaggtcctgctgcccgccagcttcgcgctggaggaaaaggccgtgcgccagttgctcgacttcgcctcggtccaggcacccggcgacaccgggcacgtctgcaaggcctgcgccacgccggacttccatcccggcagcatcgccccggtcggctccatcgtcgccagtacggcggacttcgtcattcccgctgccatcggcaccgacatcaattgcggcatgcgcctgctgcgtaccggcctgaccctgtccagcgccgaggagcacaggcaagccctggtcgccggcctgacccacgtcctgctgcgtaacggtcgcgacgtaccattgcgggtccaagcgttcgaagcgctgttcgccgaaagccccgggcactgcctggagcgtctcagcgaagacggcctgtgggccgaggtcgaccaggcgcggctgttccgcgagttacagggctgcatcggtctggatgaattcggcgggcgtctcgagtatgcccccgaggccttgcgcgatcgccgccgcagcctgatccgcgatcccggcctgggtaccaccggttccggcaatcacttcgtcgagttgcaggtggtggaccgcctgctcgaccgccaccaggccttcgccctgggcctcagggccgacgaactggtggtgatgatccacagcggctcgcgcgatgtcggcttccacgtcggccagcgctggatggaccgtgcccgcaccgcctggccgcgcggccggcgccaccccgcgtccggcctctacgcgctgggcggcgagctggccggagaatacctccaggccatgggtggcgctgcgcgctatgcctggctgaaccgggtggtgctggcggagctggtgcgcaaggtcttgcgcgagaccttccagcgcgacgacagcgccctgctggtggacgtcccgcacaacgtggtgctccaggaacagggcctgaatctccaccgcaagggcgccacgccggcccgccagggcgatctgctgctgattcccggctcgatgggcgattactcgtacatcgccagcggcctgggccacccggactggctatggtcctgcagccatggggccggccgcagcatccgccggcaggcgctacgagcgctgaaaggcccgggcgacagcgcgctgccctggcactgcgtgaccctccgtgaggagcgccgcatcgaagaggccccgggcgcctacaagccggtggggccggtgatcgatgcccaggagcgtgccgggctgatccggccgctggcacgcttgcgtccgtggctgaccttcaaggcctga

SEQ ID NO: 349964 - DNA, 906 bp, Pseudomonas aeruginosa
atgcccagagccagcaaagtcaccgatccgtcctacgagctgatggacgatcacgaaggccattcgctgatctaccgccagcacggcttccccagcccgctggtgcgctggcacttccacaaggaatacgagctgcacctgatcgtcgccagctccggcaaggtattcatcggcgactacatcggcaacttcgcccccgacaccctgttcctcaccggtcccaacctgccgcacaactggatcagccaggtggagcccgacgaggtggtggcccggcgcgacatgctggtgaacttcaccgacgaggtgctggaggacggcagcggcgtattctccgagctgaaccgcctggccccgctgctggcgcgggcgcgctacggcatcgagttccgcgacccggcgctgatcggcgaaagccggcgactgttgcaacgcatcgccgacagcggcggcatgacccgcctgggatacttttttatcctcatggaacagctcgccgaatgcgaggactaccagttgctctctaccgtcacttcctcgcaactggccgacgagcacaacgtcgaacggatcaaccgggcggtggactacatcttccagcactacgcccaggacctcacccaggagcaggtcgccgcccacctgggcatgacccccacctacttctcgcgcttcttcaagcaggccgccgggcgcggcttcgtcgagttcgtcaaccgcctgcgcatcagcaagtcctgcgagctgctggcccgcagcgagctgccggtgaccgaggtgtgcttcgagtcgggcttcagcaacctgtccaatttcaaccggcgcttccagcagctcaagggcatgacgcccaccggctaccggcgcctggtgacccagcggctgaccgagcagaacctgctctga

SEQ ID NO: 349965 - DNA, 930 bp, Pseudomonas aeruginosa
atgaacaccacttccaacgagaaatcgtatttcgacctccacacctcgggcatcggctacctccagcgtgtccgtgaggtgcccgtcaggggcggccgccgtgcgcagcccttcctggcctgcaccatcgccgcgctggtcggccccgccagggacccgagctaccgctacttcgacgtcaaggtctcgggtgccgaggccaagaagctcgttcagcgctacatcggcgttgacgattccaagcagcgaccgctggtgcgctttcgcctcggcgacctctggggcgatgcctacatccgcgacaagggcgaacagaaaggccaggccgccgcatccctcaaggcgcgactgctcaaggccgagctgatcgagcgggccgaactggcttcgatcgagcagcacgagttgatcacccgtggcatcggctacctcaaccgtccgaaggacgtcacccccaaggatggtgacccgttcctgtcgtgctccatcgccgcgctggccggacctgtcgatgaaccggaatatcggtacttcgacacgatcgtcgccacccctgaagccgagcatctggttcgccgatgcgtgcaggccatcgaaggggatcgcaaggtgctgatcgcctttcgtctgaacgacatgaagatcgatccgtacatccgcaccaagggcgagcacgctggggaaccggccgcaagcctggaatcgacgctggtccacatcggtctgatcaagatcgacggcacccaggtctatccgacgagccaggcgcatgccgaggcagcgccagcggaggacgcacccgcgtccgaagccgccaacgccatcgacactgccgccgacgccgtttcctaccaatctgccgagcccgccgagcgcgagcccgaatgtgcagtcgaggagcaggagccggcattggctgcttcgttctga

SEQ ID NO: 349966 - DNA, 828 bp, Pseudomonas aeruginosa
atgctcgcgctcttacattcgaataagcctgagcaattttccccaccggatatcagtaacttcatcaatgagtggtgcctaacgcccgatgaatgggacacgactaaaggcaagcaactccggaatcatgcgaggcactaccatgcaactgaacctaacaactatgcttgccgagttcttggatactccatcgcgttgagcgatgagttcagagatcattgggtagaaatgtggaataccagctttgcgctgagagaaatcctagaattccgaccggtatatcagatttctgaagagtggcggccttcagacgcatccgggctgatgcgcacgctagttgacataggcttgggcatcctcgactgcactgccaatgatcaggaagccgtgaatccagaattattgaccaaatccgctgcgctttttgaagttctgtggtcagctacaactgagatgctaagcattgacatctacggcgacgacttctggacgcttatgcagcaacatttagccattcgtcggatacgatgggctgccgaagccatggattcaattcaagtcaaatatagcgatcatctcgataatgcagccagcccgagcgcacatgcaaccttgaaattgatgtccagcgatacacgctcaatcgtaagtgttttgcccctgctgcttcaaaacggcatagtccgggagcgccttaaacaccttgtcaacaaggcggagattgacatgccggcacttgcaatcagcgcagctaaataccaacaagcgccagaaaggaagttcaaaattcatccccatcacgttagcttgatcgaagagttgacatag

SEQ ID NO: 349967 - DNA, 267 bp, Pseudomonas aeruginosa
atggccaccaccatgcccacacacagtagcgaaggcgaaattcttaccatcaagcaggtcgctgactacctgaaggtcactgagcggacgatctacaggttggccggggccaagaagatcccagccttcaaagttggcgggacgtggcggttctcgcgtgtagacattgacaactggatcaagcagcagtcgctggaaggactcgacgccgcgcgcgagggtgacgacacggccaatggccaaatgaacgatggagtgcggaagtaa

SEQ ID NO: 349968 - DNA, 2730 bp, Pseudomonas aeruginosa
atgctgggcctgacactacgagaagaattccggggcaagcgcctcaagggcacggccattgagctgtccaacgaccagcacacgggcgcgacccagatcgcggcccagcagtttctggagatcacctatccgacgcacgacttgctgaaaggcatcgaggccgtcggccccagccaaggtcgccccgtggttgtgatcggcgaacgcggcctcggcaagtcgcacttgatggctgcgctctaccacgcggtgaccgaccccgcctcgaccaagtcatggctcaacgcatggtccaccacgctggccgacgccaacatcggcaagattgccctgcgcgacgggatgcacgtcatcggcgagagcctgcatcgccaccgctacaaattcctgtgggatgtgctgttcgagaaccatccccacggcacctacatcaaaggaaaatgggaaggtcaaggcgcatccaagacggaaatcccgtctgacaaactcatcattgagctgctggaaaacaagccgacgatgttactgctggacgagttccaaacgtggtacgacggcctgaccaataccaagcagtacccgtggaagaactgggcgttcaatttcatccagattctttcggagatcgccaaggagcggcccgacctgctggtgctggtgatctcggtgcgcaacggcggcagcgacgcctatcagcaggtgcatcgcgttaacccggtcgccatcgacttcaaggcaggtggcagcgccgagcgcatccagcaggatcgccgccggatgctgctgcaccgtctgttcgaaaaccgcttgcagatcgccagcggcaccatcgaatcgctggtcgcgcaacacgtcgctgaatccttccgcctgctcgatgtgccttcctccgagcaggaacgcaagcgccgtgaattcaccgaatcgtggccctacgcgccgcacctgctgcgcctgctcgaagaacaggtgctcatcgccaccgacgcgcaggaaacgcgcgacctgatccgcatcttagccaacctctacaagagccgtggcgaggccgtgccggtgctcactgccgccgacttccggctggacgatgacacctccggcatcggcgcgctgctcgaagcggtcgccaaccagcaccaccgcacgctgcgcgaaaaggcacaacagaacatcatctcggtccaggaggcgcggcacgaccacgccagcatcgcgccacatctgcaagaaatcatcggcgcgctgtggctgcgctcgattgccgtcggcaaccttgccggagccgagcccgccacgctgcaactggacatcacccgtgacaagccggtggatgacaacgccttccaggtcgagttggctaccatcgtcgagaacagcttcaacattcatctggatggcaccaaactgctgttccgcgaggaggagaacccgcgcgccaagctcatggcctacgcccgcaacgacaaactgtttgccgacagggcggatcaggcgcagctcgccaagcaggtgcgctacgtcattggcggcagcgacgaggttgcaaaaaccttccgcgtaatcgccctgccgaagtcgtgggtcaacgatccgtggacggcactcgatgaagccgagcagcccgacaagtgggacgaccgcctgcccattcttgtgctgccagaagaaccggaaaaactcgacgccacgctgggccgctggctcaaagaccagttgcaaaagcgacgcaacaccgtgcggttcctgctgccgcgtgcgggcagcacaaactccttcatggatagtgacttgctcatactcgcccgcgccgaaatgaaggcccaggaatggggcgggcagaaccccgaatacaagaagctgcacaaggagttcgagaacaccctacgcgacaacctcaagaagcgcttcgaccgctttgccgtgctgcaacgctggaatttcgctgaccccgcgcagtgcaagttcagcgtcgagcgtctggacaaacagggatcgcagattcccgaagccatcgaggaggcgctgactggcgacctgttcgtgccggaggatttcgaggatctggtgctcgaatacgccagcaacaacgaatcggtcggcaagctgctgcgtgaactgcaagagccacgccctgccggacaggactgcatcccgtggctgggcgaaacggcgatgaaggaacgcctgttgcgtttgtgcgccaagggcaaggtcgccatcaacgtgcgtggcatggagtacctgcaaacgaacccaggcgaggacgaggacgccgcgtggcggcgcctgcgccccaagctttcgctcacgggccgccacctcgacgacgtgttcgtgatgctgccttcggccgtgcccgcaacgggcggcaccacgccacccatgccgccgacggcaggcacatatccgaccggcagcgctgcccccgcgccgggcgtgtccgaacccacaccgggtggttcgcccgctcccacgccagtctccacgtcgggcggcatcttcggtgacgatggcaccaccaccaaaccgcgcacgccgctgtcgaacccggccacatcgccgctcaacctgatcggcaagatcgaaggctggggcatcggcccggccacgaaggtggcggaggtgtccatcaaggtctccaccgccaccggcgcgcagctcaaggaactgctcaagaaactgcctgaaggcatgaccttcgagctgaaccttgagaaggaggacgactga

SEQ ID NO: 349969 - DNA, 1002 bp, Pseudomonas aeruginosa
atggcactgaccgccgccgcactgcacgccctgacgcagggttcggacgccgacgcatggcgcgtcatcgtcggccacgcggtcgaaattgcccgcaagccgctggccgcaggcaacgcgcccagcgaggtcgtcaagcgcgaccgcgaaatcggtgagctggatttgttcctctcctccagcggttgggatttgtggcaggccttcggcggcagcgtcgagcgcacctcagatcgcctggtgcgctggtgggccgaacccttcagcgccaaggccgtgctgatcctcgatggtctcagcttacgcgaactgccgtggctgttgcagggtgcgaaggaacatggcttcaccacgcacgaggtcagcgccaacgcttccgagctacccggtgaaaccgatgagttcgcccgtgcgctcggcttcgccagccgcagcaagctccagaacaacggcggtggcctcgcgcacaagctgcaagccgccagcaccgaatcggtggatttgccgtggaaggactgcgaagccctgatcggcagcacgccgaaccaaatcttctggcaccactggcctgacgccaagctacacgacggctccggcgcaggccaagggctggaaccgctgacgaaggacgtggccgagcaactgtccagcgacgacttctgggccttcgtcgagcgccttgccaccgggcggcggctggtcatcacctctgaccacggctacgcggctaccggctacttccccgatgcagatggagaggtcggtcagttcctcaagcagaccttttctagcggacgcaacaaggcgggcactggcctcacacaaaacgactgcggtcccttcgtgccgcccgtggccttgcagatcaacggcccccacggcacgcacctgttggccttgggccgcaggaagtggcgcagccaaggcggctacccgacgctcacgcatggcggcctgtcgctgctggaagtgctgtcgccgtttgttgagctgaccaaatag

SEQ ID NO: 349970 - DNA, 399 bp, Pseudomonas aeruginosa
atggaggtgctcaacgatgccgccacgacaggtcgggccatcgtcgttccggggccgtcaaagtaccaagacgcactagtcaatacgctttttgacgagatgcgtaccgcgatgaatgcggcacttgccgacgctcaggcgctgttgtgcatcggctttggcttcaatgacgaccacttgcaaggtgtcatcaagcgccgtctggccgcaggaatgcccgcgatcattgtcacacgcgacccgaccccgaacattgaacaactgcttggcgaacacccgcacgtgatcgccgtgttcaaggatggcgatggctcagtttgtcactggaatggaagcatgctgccgtgtccagaaccgctctggcaattggatgactttttgaaaaaatttgtggagtga

SEQ ID NO: 349971 - DNA, 948 bp, Pseudomonas aeruginosa
atggcaaagacaaaaaaaaacagcctgcgactggatgccgatttcacggaagacacagttggttttgcgctggagagcttcttatcgatgttgagcttcccgcgcatgaagttttcgattgaaccattctcccgtggaagggaacgatggctcggcgctgatgcacgactgaatggacacatagccggattcaagccgttttatatgcaattcaaacggccatcggcctacccggacaccagcacggccaagatcatcaccgatagaaaaacgttgaagctaccagttgtaccgcgcacgttgtactttgatctcagggaaaaacgccccacgcacaaggactaccagcacaacattctttatcgtctgcgtcagcgactaatgactcggagaattggcgatgcggcttatgtctgcccactgtttttggatcgctctgcctatcggtttcatgtgcatatggcgggattgcgcaggtggccccgcttttggcataaccatccttgggagttggaggacatcctgattcacagttctaggggtgcagtcaatttcaacgccattcctgtgatgcaggagcatgtgtcgattccgccgcatgccgtagtaaccaacgccaagcacagctatagctttactgagcgcggcaccgacctttgcttccattccccattgtcgctacctgaaggaagtcgctcgctggcgtatttcctgacaggcgtcgttgggaacccgcaatcggacgaaggtttcatctcgcccgaaagggcgcaagagatgctgcgagaactcttttctggtgcggaaggcgaagaccgcggcagtctattgccagatgattttccacagaatgctgaggatggaattgcaagctggctgcactggggtgattacttgaaaacagaacaccaaattgaacagttcgcgcttgtgcgctgggcggattga

SEQ ID NO: 349972 - DNA, 3213 bp, Pseudomonas aeruginosa
atggccaccaaaaaacaactactccaagaagccgtcgccaaagccgttggcgcaggcaaaaccgtcgcgctggagacggtggatttcaacgatcccaaccgccccaagacctgcctggaggtggatttccccatcctgccggtcaatcaggtggcgatcatcgaaggcaatgcgggcaagcccatctaccagatgtccaaatggtgggcgcggcggcgctccagcgtgttccgttcgatgttgatcgcggcagccaccaaagcgccggacgacccttcgcacgcggccaagctggtgtgggacaactactacgccaaccaccagaagaaaggcgcgttcaagcacctgaaggtggcggacatcttcatgggcggcggcaccacgttggtggaaggctcgcgcctcggcatgcagatgatcggcaacgacctcaacccggtcgcgtggttcgtggtgaagcaggagttggcgaatgtcgatctggagcaagtgaagaagctcctcgccgacatcgaggccgaggtcaagccgcagatcatgccgtactactactgcgatggcccgcagggagagaaaggcacatggacgcacctgcccacgggcaaggtgatgcctgccgatttcgatccgctcgccattccgcgtgaacagcgcaaggactacaagtacgaaggcccggagatcatctacaccttctgggccaagcacgggccgtgtcaggtgacgggctgcggccaccgcacgccgatcatgaccagcccggtgatggcggtgaaaacgctcaccgtcaagcattggcaacatacctgcggcaagtgcggtgaggggttcgatgtggaggaagaggccgcgcgcatggcccccgatgcgccgttctacgtcgcccccaccgaagcgccgtactccgtgctcgaccgcaagaagggcgtgatctgcccacgctgcggccacaccgcgctggtgaacctcggcaagggcaagaacaagaaggtggaactgagcctgctggtgcatccgcaatggctggcgggcgaagcgaagcaggacgctacgggtgcattctacggcggttcggcgcaggacgacgtggcggcgaccacgcgatgggacgttgcacgcgccgcgaagattcgcctgttggaggtgcgcggcgcgttgccggatgaggtgaccgacccgggaacgggtgtcacctttgcaccggagaaaggtacggtcccgaagaagtcgcactacgcctgctcggcctgcggcacggtgcaggatgtgctgaccaccatcaaggctacgggcaagaccggaccgatggcggcgtacgcggtgcagggctatgcacccaagcgcagtgaggcaggtaagccttacaacggtcgtttcttcgctgcctacggcacggcgcacgcccggcagtacgacagtgcattttcagaatgggaggcgcgcaaggatgccgatctaaaggactactggccgcgctctgaactggcctacggcttcatgacccaccatctgcaaggtggcgtaccaaaccacggtttcacgcactggtggacgatgttcaatccgcgccagttgctcgttcacgcacaaattcttaaagcgattgttgaggttggaggctacgactggaagacgcgcgagtatgttctcgctgcgttccagcaatacctgcgtaaccagagtcagttcggtttctggaacccgcagcgtgacactccagagcccatgttctcgaacaacaactttcacccgaagtccacggtaatcgagaactgcgttttccctgcgttgggacgaggcaactgggcggcctgcgtcgagggcatcgttgagggacgcgaatgggctgtagaaccttgggaagcagtaagtctagaaaccctgaagcgtcaggctcctgcattggcagaacagattactggcaagagcgagaaggtctatcccagtgatcccgtcggcgaagttggcgtgttccaaggatcgtccaccgacctcgcccacgtctccacatccagcctcgatctggtcattaccgatccgcccttcggtggcctgctgcattactcggagctgtctgacttcttctacgtctggctgcgcctcgcgctgaaggacaaatatcccgactacttccgcgccgattacacgcccaagtcgctggaggcggttgccaaccgcgcacgcgaaccggaagacccggatggtttctaccagcgcctgctcacgcagtgctggcgcgaggcgcatcgcgcgctcaagcctagcggcattctggccttcaccttccaccacagcgaagatgagccgtgggtggcggtgctggagtcgctgttcgacgcgggctactacctcgaaggaacgtatcccatccgctccgacgaaaccaagggcgaaggcgagttcggttccaagaccattgagtacgacatcatccatgtctgccgcaagcgcaccgaagagcccaagccggtgagctggggccggatgcgccgcgaggtgatggccgatgtgcgccagttgcaggccatgctggagaatcacgccaaggaaggtctgcccgctgccgacattcaggtgatccggcgcggtaaggcgctggagtacttttcgcgccactacggcaaggtgtacgtggacgaaggccgcaccatctccgtgcgcgaagccctgatcggtatcaatcagttgatcgacgaggatgccaacaagggcgcggaaccgccgccggtcaatgccgaacccatgacgcgccaattcctgcgcacgttcggcgcggccactgagctgaagcgcgaccagttgcagaagttcctgcgcggcagcatcaccacgccggatgacttcgcgcagcgcggctggtgcagcgaggtgaagaaagtcttcacccgcactgcgccgctggacttcgcccgtgaatggcaaggcaagcacaagcgcaagctcacctccgatttcgatcaagcgctggtgctgatcggggcttgcgtggatggcagcggcatcaacgcgtcggatacgctgaagaacgacaatttcaagccacatgtcgcgctcaagccactgctggagtggctgcaaaagaacggcccggatcaaaccacccgcaacgcggcctcgcgcgcagtgtcgattttcaccacttggcaagccagccaagctccgaagccgcaacaggcttcgctgttcgatgacgatggggagtacgggcaatga

SEQ ID NO: 349973 - DNA, 498 bp, Pseudomonas aeruginosa
atgagacaactgcgcgactcggtctggcaggtgcgcggcaccagttgggtatgggacgaagaggcccgcaaccagatctgcgtggccagcgaggtatggagcctgcgccagtttttgcgcgccaaagggcaatggcccgacgacctgccgagcaatggcggcagaacgctggtggtcgccgggctggatggcagcctcgatctgctgtcgccaacggatgccgaaacgtggctggccgacaccatcaagcctgccgtgctgtcgtttcaggacgaatggggaagcgatggcgcgttggtgttctggctgcccggtggccacaaccgcatcagggcgaatgccgccaccgatgaggtgagctggctgtgccacacgccccacgggcaccagatcgaccttgggcgcatcctgtggggccaagccaacgagtacccgcaggaaattctgcttcgcgacggcggcaggcctgccggcctgttccatttgcgaattacttga

SEQ ID NO: 349974 - DNA, 699 bp, Pseudomonas aeruginosa
atgagcaagaaggatgtagacaagaaggatgcaggcaagaatctgatagaaaacattggcgagcttcctgttagtgagtactcagaaattatactggatgctttcattagtgacgaaactttaaagtcgatacctacggtatcaacaattcttggtgttgttaaggctattaatagcgcaagagaaaagcgctttgcaaaaaaagtaaactcttttttggaagaagctagaaaagaggttacgccggaactagtaggtaggttttacgcaaaactagaacctaaagaaaaagagcggtttgcagaggaggctatagaaaacctatccagagcagactcagagcagaaagctaggattctaggtggcgctttcgccagagtaataaatggagaagtaagtgttgaggtttttgagcaccaagctcgaataaccaataatgtttcactgattgatattcatacatttatgcatggttatgagaacgaaaatctctttattgacagtcttggcgacgtactgacaaatcacagggctcttaaaaggagtatatcagcggagagagataggtcaccaaatggggttggggaatcatttcatataaaagtaaagtatgaattaacggggattggaaaggagtatcttagaactcttcataaggtctatcgagatgttatatctccagagaaaataattaaatag

SEQ ID NO: 349975 - DNA, 3381 bp, Pseudomonas aeruginosa
atgcacgtgactaattttgagcaacaccatagcggtgatggggacaacgttgcgggcaacaagatcatcaaggtggtcaaggagcttgctccgaaggacctcgtcaggcccttagaaatggtgtttgaaagcctacggcaaaaggataaggaaaaagccaaggctcagatggacatcctcaaagtagtcgcgcagcgcacagtggaatctgctgctctggcagaggtcgtatccatctatggtgggctcgtggaagctcaagatcaggatgctgcctgggcgaccgtcgcaaagatcgtttcacgcgccataaaccctatcatcagggacgtttgccaggccgctctgctgcaactgtcctaccgcaccgcacgtgagggagaggcgaaagacctttatttttctgagccctcaccaggtgcttactcccaggaagcgtatctgcgttgttacgcggacgaagagcaaatacgggcggccgtaaaaagcttccccacggagggcgtactgaccggtgctgttgaaggggctattcggctgtccgcaacagatctggcgcttgagctggcaacacgcctgaactcactctatagctcttacaacgccagagtacttttggcgatagctacaggcgttgcactcaatccagatcttgctggacagcacttttggctgaaccgcccggaggtgaaggagcgggtagacaagctcagagatatggccattcgacttcttgatgagtcgggtaccgacgggcgagtccatgaccttagctgctcgattcttaatatatatcaataccaatccgccgagttgctcgacgctttgaaaaagcatgttcagcacttagacccgaatagatcaaagataattgctaggtgtaaggcgttggccggagacgatacgtgccttccgcaggctgagagggacttacaggtagcgtatggagacccgcaaaagaggcaagcatggtgccggcaatttcttgaagcgaacacgcaccaactagaagaagtaggtccatttctcaatctggctaatccgtccgagcttggtgaatggctgagtcgcgagcgaatattgaccggggcctcggaaatggaagaagcctatatcaggctggttgcggatatttttcgacgcacggatcaagacgataacccagtccatcggcacgaagtaagcgaacatgtagaccagttcaccagagaatgggagggcgcgctccacaccatagcaccaaccggcctcttcgaaattgccgagaaactagtcgccctaaatcttccaaatatggcgctcaagctcacgacgcacgtgatacctagtcatgagctgtggccttcaccctatgttttgactcacctgcgctgcttacaggaagccggacaaaacaagacctttgacgaagttgtcgctcgggtaaaaggcgccgatcaatcagtggcactgcttagcttccaatcagtgcaagctgaacgtggcggcgatatcgacttagcgatcaagttcagtgaatccatgatcgaacttgcgcctgcgcaaccttatccctggcaccgccgctgctatctcctcagccgatatcgtagcctggaagagcaaaggctattccatgagcgaattccagattcggtattgatgaacccctcgcgcgaagtgaagggcatcctcttttttctggcactcgcaggtagcttcaaacgcgcagagacccagtgggtcaaatggatgattgaggccccccacgatcatgcggtggatctagttaatttccatctcggccttaatacccggaaaactgagcccatgcaggtttcgacttcagtagagcaatgccgggcggctgtccagtacacccatgagggtgaaaccttggttcggctgattgtcgatgatgagctggagggtagtgagtgcaccctgaaagcatccagtcagctaggacaattgttgcagaagctgtcgcctggcgatagcgaaaacttgaacatggctacctacaaggtagaagagcgtcttccaccttatgcagcctgtgtgcggattgcattgacgttgcgtcacgtccataacgacggcagtgattgctttgtgatgatgcacataccgtctgagcctgacgagctcattccctttttagaaaaaaaaatggcgacaggtgcggagaggcgcgagaatctacagacgatggaggctattccgttgtaccttcggggtcatgcgctatatccatcggatgccttcaaggcggccatgaactgctggacagaccaacgagtccctaagtcgccattatgcgatataggagacacggagccggctgcagtcgtgcttgatgcatacagcatcagctatctagcggttacaaatattaccggatacttactaggtactggtatttcgctcgtagtacctgcaactacgaaagagaaacttgaggcgtttctcattgaaatctctgacgagcattttatgcttctgggccttacagatggcgggagacttttccgaacgacagcatcagacttacgtgaacgggatgctcacatccttgaaaacttacgccttatcctggacaacgttaccgttgtgcggccagctatgcatgatgaagagctagatgcattcacagtcaaagatgccgtcgacgctacagtttatgacgcgatgcagctctcggtagccaacaagattccatggctctgtatggatgggacttttggtgcccttcacaatgtgaaaggtcatcctctagtgaatgcccagacagttttgcttagagcaatgatgaacgcaccgtttgatttcgaacaaaggcgtcatgcattagtgttctacgctttaggcgcgcttccactgccgctcacgttccaagatatctatcgcttggctagcaccccgagcactctgtctggatttattcttttcaagatcattcagactcatgggcgtgaaatctttgccgctgaagggcgcctggaaatgctgctaaacgctatttatctacaccttgaccgcctacttggtaacgaggctctggcaatcacctcaaggtacagcccttggatgaactactccgcccatgttttcaaccacggcataagcctttatctagccttggccggtagcggcagcgctgagtttcggctggctagtgcggtacaccatatggctcagctgagcatcgatgaccagtctcttctgaagagtctaatgggcaggtttgtgcattttgcccatggtcatttcatgagctgggaagcgatcaggcaaaactacctgtcaatcgtagaggccagaaaacatcaagagccaagcgcaagcaacgagacggactcggaaccagaagcggcaccagttgccagagaagatgcctga

SEQ ID NO: 349976 - DNA, 342 bp, Pseudomonas aeruginosa
atggacttcattaccaccggagtcatcgcaaatactgtttacgacctactgaaaaacggcttgaagctccgtgctagcgtgcttaaggatcgccttggccaatggattaaggaagacgtcatcgccgaagctgtcgctggcgagctttctaagcttggtctccacgacggactgagtgaaaaagcaatatcccagcaacttgatcaatctcaggcaatttcatctctaatccgcgatatcaacgcagaggctgctttggttgcaccatccactatcactaccgtcaaccaaacgcacagcggcagcggcgacaacgtgggcggcaacaaaatcgtcaactga

SEQ ID NO: 349977 - DNA, 1320 bp, Pseudomonas aeruginosa
atgacagaagtagatcatgaataccgctgcccgctagccctagtagatcgccgcttagcgcaggtacatcaacactggcatgaagcggagcgtgcatatttcgaccctgatggattcctagtcgcaatccagaccgcgattcaaacactgcgcaccgttacattcatcctgcagagcaacaaacacctgttcagcaatttcgacgattggtacgaccagtggcaaaacaagctacgagctgaccaattgatgcgctggatggttgacgctcgcaataagatcgagaagcaaggcgatctggagatgcatagcttcgtccgggccgagattatggcgtcttactacgatgacggcccccgagaggatgtacccgcagaactattccaaagcccagcagaactgattagtcgcatttcaagtggcgcatacaaaatgcatgccttcaaggatggcattttgcgtgttcaacggcgctgggtagaaaacacgttgccggactacgagctgttagatgccgtgggaatcgcctatgggaaactggccgagctcgtggacgacgcccacatacaattaggcctctccgctccatcaacaatggttggcgaggtggatcactcagagggccgagctgcgcgaaatggccgtctaccgtgcatgatcgggcacagtgagatccgcagccataacatatggctcgcaactgggcagacgctggagctcgaacaaaaacaggtcaaatttgacagggacaccgcagagatagcagcgaaaaaatacaatcttgatcccaaagaaatagtcccacctacaatctccgccccggaagagttgctggactccctgtttgctaccggaaggaaaatgatcaccgctgccggatatcacgacaccattgcgtttctcttacacggcaaaagggtcataaaaatattgcaattggctcttcaggagcacggggagaagtatctggtcttcagaaaccttgcacacgaggtcaccaaatgcggcgctgacggagtgattcttatgggtgagatctggatggcaccatttgactcaagccaaccttaccgacgggccgcagatgcccctgaaaaagcagagtatctgtcagcgactttagtgaccaaaaccggtgagcccttacagcggcaagctaaaataagtcggagcggcgaagtgttaagccttggggaaactgagacagtggagaataaagcgcccatcatattctaccctatctatgccgcatgggggcgtgagatccctgcggcatggcacgaggtgttcacatctagggatggtgcaagtaagggctag

SEQ ID NO: 349978 - DNA, 1155 bp, Pseudomonas aeruginosa
atggatgatcaaacaaaaactccccatcctagtgatacagaagttaaaaactctgaggtaaagtcgctggttgtgttgaacgcatgtgctgcgaagtttttcaaaaaaacgcttggtggcctgactttctacgatagcaacagaggcaacgactgggatctaaaatcccccgtatgcgttgactttgtaaatctcattggcaagaagttttctaggagcgggaggatctacggatacgtagacccgaatatgctcgctgctgccgataacttttccaaatattctagcagtctcgacttcaatgcctttgtcatcggcgttatggaacggctgtgccatgaggcaaacgacccggcccgccgctctctcactgagggctatgttgtattttcacactaccaagattaccggcaggtagaccatctcttgattgtcatgcttggcaaaagaggtggatatgattttgacgatgacaacaacctcaacccaagagggacggaaagcctaaacctccaagatttccgtcaggccgcctgtatggacttgacggaattcaaaaaaggcttcccgcaaaacacaggtgattcctacctttacttcattaaagggaattccaaaagcgagttcttcaatgtcgcactgggctgctccgattcaataccagggaaagtctgcgttgacaacttgaaagacgcgttaggcgcataccttacagaggaagcaagtacactgtcctcgtcagagcgacgcactattcatacgcgtgtagttagctatattgaaagcaaggcaggcgagcgggtacatctttcagaaattcagcacgtgattaacaaatgcctgaaagaagattcaccccatctcggcggactcatcaagttcatctcggaaaactctgaacgctttaaagtgagtgaggagttccagccttctggtgtcaccgctaaaaacatgggatatgtggatcttaagcttccctccggagagttcgcgggacgtttgaaactagacgccgtggccgttggcgacagcactgctgatcttagcgttgataagaatttcgtgtacttgaaggtaaaactcccaagcgacgtatcaagcaggctgaagggtataaatgctgacgatccatcgtcaggatcccaagatgcttga

SEQ ID NO: 349979 - DNA, 1128 bp, Pseudomonas aeruginosa
atgcttgatcgaatctcgctggatgatgaccagctcatatttgacacgcagttgctggacatgaaagacacccatgagtttctcagagcttatggctgccatagtcccgaaaaactggacctgattgggtatgatcttttcctgctgaagtcatcggcgtggaatgaaggctacgtgcccttttttgccaatgctgagtcaatgtggcatacgttacgaacgcgtagcaaaaagcctgaacacatgcacatcatcggcatggatgaagatcagcatgcttcaatttcacgactcactgacctgtattttttgcttagagaaacgctcaaaacgctttgccataacaacggcgaagaaagccagactctcaaatacgtgttctacagttcgaaagaatcgcttcttacaaaattagaagtctcgtacctgatagcatgtgacgagctaatgaccatcaatgttgatgcagcggggattaagcacgctcaaacaatgcatgcagcagtgatggcagatgaagacgttcattgcgaagaaaggcgtcacgttatgcgagaaacgctgacggatttcttgaaggatgaaaaagactgcagcatccgcgtgataatggcgtccatttcgaacttccacaagaaatacaatgaacgctataaggtttatgtaagcaaattttcggtgaacaaaattctcactgaaattgaaagtgattgcgttagttttctgggtaaggtccaagacgcaatcatggcccagcaaacaaaggcgtttgctattcccggtggtatcgtggcggcgggcgctatcttgaaacctgctacaaccgcatgggattacctcgtcatactcgtagggctaatcatttcgacctggatgataacttccttaaacaacaacgtagccgcccatatcaatctgcttgcagatgagttcgagcgctccactaaaaagtacgacgacatcgtcgtaggcgtagaagagattcaagtaaaaattgaagactcacgaaaaaagctttcaacctcctctaggtttgctgagtccaggcttaatgcgctaacccgcgtatgctggctaatactaatactgataagcctgattttgctcaaacgtttcttggaatcttag

SEQ ID NO: 349980 - DNA, 993 bp, Pseudomonas aeruginosa
gtgcctagaaaaactttgatttttggaaacggccttggaatggcgcttgatccacgtcatttttctctaacgaatgcaatggcggacgtgtggaacgatccactcgcgatttctgacgttcacaaggaattgatcagccaatgcttggggggcaatggcgcgctaccccagcgtgaagaccagctcgaccctctccatctcgtgatctccgcctgcaagacgcttagcagcataaatatgtcgcagcggatgaacgtgcattggctctcgcaggaaggccagcagtttcctattgctgttggaaactacatacacaaggtcgctactaggctgcatttgtatgatggcggacttccacaagcgtttttggaacctttgattgaatttgttcgccaaacaaagtcccatattgccacattgaattacgacaaactgctttatggggcattcctagatgcaaatctaatggctggctacttcgatactactctggtcgacggcatggttgctggaggcttcagctctaatgcccttgaacgtctatacaacaatacatacggatattatttgcatctgcatggatcacctcttttcttcgaccatcatggtttagctcgcaaaagagacaggcacgaactcaacccttcttccccagaaggctctgatcacatagttctgacccatgtacgtcataagcgatcagtcattggggcgtcaatggttctatccacctactggaattacttgaattttagccttgctgaatctgaggaaattatcgtatttggctattccggcgacgatgaacatctgaatgatgtgatagctgcgtatgcacaatcgaagcacatcgtaattgtcgaatggaatggcctaggtcagtcccagcagcaacggacatggtattggtcacaaaaatttaaaacgaacaatttccaccattggtatttaccaaatatcttagaattcagctcttgggatcgtgtctattaa

SEQ ID NO: 349981 - DNA, 756 bp, Pseudomonas aeruginosa
atgcgcaatcatcttgaggcattagttccgatctttattgacatagaaggtgagcgcttcagtcttctcggatctggggtgttgattgagtttagaggggaggcttttctattaaccgcagggcatgttattgacggatttgagcgcggcgctttaatggtgcctcactctgacaataaaattgttgagattgatggaggctattcttatatcgatccaagtgacggcagaaattccgacaacttggacttcggatatttcaagcttgaaaaatccttcgctgaaggaatgaaggaattattttatgccatacctgaaagcgagttcggaataaagggagactatagcgacaaggagctaatgacattcggcggctttcctattcgaaagcataatgtagctggcagcgtggcagctacaaaagagtacgcttatggagcgtatcacgcagccgcctcggactatgccacgcttaggtgcaaacctagactcaacatagttgcaaaatacaacagaaacaaaaccgtcgacccatcaattggcaagatacaatctgcacctctgccacatggaataagcgggggaggaatttttatatggccacccgtacttaaagacttgatcccagatgatcgcaagcttattggcatcggacatacatatctgaaaaatggcggttattttatcggcactagattagagattatactgactgcaatacttaaaaataatcctcatctagccatccagacttaa

SEQ ID NO: 349982 - DNA, 312 bp, Pseudomonas aeruginosa
gtgcctgacatgagagaagagtttgaagcttggctactgcgcgagcatggccttgagtcggaatggcaggatgagcgcaactgcttcaaggactacccagcgcaccttgcgttcaaggcctggaaagccagccgcgcggctctgagggtggagttgccggaggttggcagcgcacctgacggggcgaagtatgaccttgggttcggcgacccaaagttcgctcatgactatcgcgagcatcaagtctcggcggccttgcggcaactctgccgagaagccctccagcaagccggaatcgaggtgaaggaatga

SEQ ID NO: 349983 - DNA, 147 bp, Pseudomonas aeruginosa
gtggacaacgacaacgaaaccatattggcagtgatagtcatcgttctcttcgtcctggggatcttacgggtcgtcggggatatgcaggaactctacaggcagaccgagttgaaaggacaggagttgagcagatggagcaagcaatga

SEQ ID NO: 349984 - DNA, 186 bp, Pseudomonas aeruginosa
atgagcaagagtatgacggtccgcgagtacataaagctccgttttgaagagatggagaggttcgcggatgactgggagagaaatcaggacgattacggcgaacaggattggccgctgtatcttgacgttgatgactggattcagcaggaagaagcctacaacgagtgcgccagagagaaggcctaa

SEQ ID NO: 349985 - DNA, 498 bp, Pseudomonas aeruginosa
atgaaccttgcaacactggaaaagcagcgtatcgaccttcaaaagcagatcgctgaagagaaggatcgccacacccagcacttggccagtcttagcaacgcgctgacggaaaccaagcgcctcatctcggtatccgctgacggccttgaccttgatgtgatcaatcgggtcgaggcgttctttgaggtacgcggctcctacgccaaggccggcgaagatcgtgcacgtgcgctgcaggccgccatcgacgatctcgccaatggcgcgcagaagatcaagaagtgctacttcggcaccaaggactacgcccattggcatggccagttcgtggattgcaactacggctacggcccttcgcacggcagtgtgattttctctatcggccttcgccgcaatgaagtcggtcgccagctcaccgatgaagaaattgaagactgcctctactacctgcgcaatctggaacgcatccaggcagcggctgaaaaagctgcagcgtga

SEQ ID NO: 349986 - DNA, 198 bp, Pseudomonas aeruginosa
gtgagcggcaagtactatgtagcgttgtattacgagccaggcggaaagcgtgacaccaccataaagcaatatgtgcgtgatgcaggattcgagtacctgaggcctcttaacaaagagttccgcacccttgaggtgaacgaaaacgtgaggatcatagggcgcgttatcgatcacaagttcgccaaagggatcctatga

SEQ ID NO: 349987 - DNA, 243 bp, Pseudomonas aeruginosa
atggacctactcgactacataaagcggctcgacgccgcagagctgagcgacctggcaaccagatgcgaaaccagctctggacagatcaagcaggtcgcgtatgggcaccgtagagccagcgccactcttgccatcaacctcgaccgagagacagacgggaaggtgacctgcgaaaagttacgcccagatatcgactggggctatctgcgctcgaatccatcaaccaacaaatcagccgcataa

SEQ ID NO: 349988 - DNA, 300 bp, Pseudomonas aeruginosa
atgagcaagttcaaggcgggcgatcttgtcctggttgtggctggaagcgtcccagaaaacatcgggaaagctggagaactggcattcaaggtacaggatggtgattgttatgaacccgttactccatgtgggcacctttaccacaggaacaccagcggtgcccccgtttggattgtggtagggaattatttcagctcacaaggttgcagcggtttctgccagaaaaatgagcggaacatcattcctctacgcggcgacctccaatccgagcagcagaaggcgaagggggtggaggcgtga

SEQ ID NO: 349989 - DNA, 219 bp, Pseudomonas aeruginosa
atgaagatcacaaacgtcgagtggaacgagggggcgcccaacgtcgttaagcctgggatgctgcttcagtacagcgatgggaatgtccatttggtaggaaccgagcggcgaatgctcatcaagactccgataagcaaatggtcatgggccataaggccgcacgaactgcaatggctagcggctatggcaaacaagcacaaagcgagggcgcggggatga

SEQ ID NO: 349990 - DNA, 2064 bp, Pseudomonas aeruginosa
ttgaccgtcgaaaccactgatagcattgttgagtacacgggtaacggggttactacggcattccctgtgccgtttgaattcccgactaatgaagatcttgttgttacgcaggtctacaacgatgtgtcgacggtccttgtacttggaacggactatctcgttgttggggctggtgctcaggcgggcggcgcagttattaccacagttgcgcctccgcttaactcagtgataaatatctcaagacagctagagcctcttcaaaaaaccgaccttagaaaccagggtaggtattttgctgaaacacacgaaagcgtgtttgactacctgacgatgctgattcagcaagggttctctggcttgtcccgtgcgctgcgtcggccgctcggcaaagactacttcgatgctgaggggcgtaggattgccaacgttgagagcccggttcagaacaatgacgctgcaaacaaggtatggaccgagcagtatgttgggtctgtcataggcggcattgaaggaaaccccaacaactcagccaatgtactgtatatcgatcctgatggcataccgcgggttgtccaagacctttctggtccaaatggcgctaactacatcggtcggggaactgctccaggctctgttgaggatgctttgcaatccctggaaagccgtgcctctagcgtagagggtcaactttccattgcgcctgggcgcctgttttctattgctcgagagtttcaagcgaacacgcttgcgagatacgattctttcccgcaacgcattgtaagtaaagcggcatacgattcaacttatgatcactttggtgtaatggatttaacccccaggggtgagctgattcttctatttcgtagagggactatacacactggcggaagtgatggaaagattgcgtttcgaaaacttcttccaagcggagtttgggggcctgtaacaattatcgcgcagcaggctggccaggacttcagggcggcaggcggcggggttatgcccagcggtaggatagtggtaagcggaacaatctggtttaccggtgatatgtatatttacgtgtcagacgattacggtgacacatggtatctcaagaaaactatccctaagggaactgctgactatcgcctgtcgtacggtaaagcaattcaggttggtaataaattcgtccttccttactacatggaagagggttctctgttcaagctaagatggcttgaaacaacggatggaggggagacctgggtagagggggcaactatctatagcggtcttgtaggatacaacgaagctgagtatgtcaacatgggaggcggctacgtccttggcatagcgcgcaacggaacaggtgtaggcggaaagcttaggcagttcctctctacagacggcggaactacgtggactgaccagggggatgtcactgctcagaatggagacggaacggatactgtagtagcgccatcactttcatatgtaacaaataaggcagggacggcatatgtggctctgttctacacgaaccgtactactcaggcctgctactataggacaaacaaagtatcttccttgatagctggaagctctggctggtcagataggattcaggtgtatagcgctccagcagcatccggatatagcagtcaagttgtcctttccgacagccgggtctttgggaatgtctatcgtgagacttctggaacccagtcaggagcctatcagtttgaagtgtatctaggtggacttccggattttgagactgactgggttccggttagtgcaagttctgtttatacgtttgctcatgggcttagaaggcctccgaggaatgttgtgatccactttgcgaagagtacaaacccaactgaatggtatgatgtagacacagcttactataatgacggagcaaaccgcgggtctggtgcgaggatcgaaatcggcgggaccaacattagggtcggaacaggttcggcagtgtggggtaccggttactttggaggttttgactcaacgtctggagatagagctgcaagtgggtactataggatacaagcattcctatga

SEQ ID NO: 349991 - DNA, 1134 bp, Pseudomonas aeruginosa
atggggatgccacaagggacggttactgatagagctttgcgtgacttcaagaagattgacaggcagtcatcactagagctagatagcttgagaggattgtcggcaatacttgttcttgtcgcgcactcgttccagatatttgtggcgccagtcaatagctcgatgtatggaatgctagggcttatagcccaggcatcggtaatgctatttttcgctttaagcgggttccttatcacgaaatctataacaaataactactcacatggattcgatgttaaaaagtactgcgcagatagaataaaccgaataataccaccacttttagtaagcttagcaatatgcattgctctatggtacatggctcctttcgcattcccaaatggtactagagatttcatttacacaagcgactttatggcgcgagaagggttttatatagatctagaatctatcataggcacgctatttttcctgaatggatttattgttaaaaacattagcgctaatgcaccactatggagcctgccgtatgaagtttggtattacgtcgcagcaggaattgtagtgtcaataagaggcaaagcaggattaatcatatctgctattcttatgatacttcttggagtgctaagcaaaacattctttctatattcaattgtatggttttcaggcgctgcggcatgcattgctcacaacaaggacgcaaatgaccgcgcactatcatcagtgattctttatacattctcatctatagcagcagtcataggcgcatactatttgtataaatttacaagagtcgcctccccctcacaaatagatatgagaatcatcgcattatacaacgcatcgatagggatagcgttctcatcattcatatttagaattgcagcagggaaatctgcattcataaaatatttctcaggaacagcaaaattctcatacactctttacgtcattcacttcccaatacttctatttgcatatggcgcatctcagccggacgtttcagatataaccagatcgttagttgcttcagttataggtattgcagcatgcattgcgatctctatgtcgatagctggaagcgtagaaacatcaaagataattaagtatagaatacttaaagaagcttaa

SEQ ID NO: 349992 - DNA, 1656 bp, Pseudomonas aeruginosa
atggctgagatcacctcccagcaaatggccggcaagctgctcgcggccgggttcgagcgcagcggcccggccgcgtcggccttgagcgacccgatcgccgacacacccatggtcgtgaccctggaccagttacgcccctacgaccatgacccgcgcaagaagcgcaatccggcctatgaggacatcaaggcgtctatccgcgagcgcggcttggatgcggcaccggccatcacccgacggcctggcgaggaccactacatcatccgcaacggcggcaacacgcggctggcgatcctgcgtgaactgtggtcggagaccaaggacgagcagtttttccgcatatcgtgcctgttccggccgtggcccagccgcggcgaagtcgtcatgctgaccggccacctggccgagaacgaactgcgcggcggcctcaccttcatcgagcgcgccctcggcgtcgagaaggcgcgcgagttctacgagcaggaaagcggcgccgccctgagccagtccgaactggcccgccgcctggccgccgatggcttcccggtccagcagtcgcacatcagccgcatgaacgacgcggtgcgctatctgctgccggcaatccccgccgtgctctatggcggcctcggccgccaccaggtcgaacgcctgtcggtcatgcgcaaggcctgcatattcgcgtgggagcgctacgccaagggccgcacgctggtccaggacttcgacgaattcttccaggaagtcttgtctcagtttgatgtgcaggccgacgagttctccgcgcagcgcgtacaggacgaactgatcggtcagatggccgagctgctgggcgtcgattacgacgtgctcgcgctggacatgaccgaatccgagagccgccagcgcgctctgctcagcgatccgacgccatcctcgacaccgcccgccttgccgaaggctgggcttatcgcgcgcccacctgccaacgcctcgccgcccatcacagggcctgcaccggtagcgccgcctgcaggccctgcgtcttccacctcaacgccggagagcgacgcagatgccaacgaggcgggcacggccagtccgacagcggatgacgatctgcttcagaagcacgtcgtctcgccggcaccgacgaccgaacggctccagtccatccagcgcatggtcgccgaccagttgggcgatgcgctgccgcctgacttctcggcgaacgtcttgcagtccatccccgtgcaggccggcgggctctatccgatctccgatgtctggtacatcgacgcgagcctggacacgcccgagcgcctgcgcattcatgtcgcgcagttcgcccgcgagatcgcgggtgaagccggcctggacgagtgcatcgatgaccgtccagtcggcatcggtttcgcctgccatgcccgcgcccaagacctggggccgctgagccgtgccgccctggcgctgctggcgtgcctggccggtcagcagcccgccgacgttggcctggataacgggcaattcgtcatcgacctgccggcgctgctgcacggacaggacgacgcaacccggcgactgagcgacacagcgctggtcaagctgttccggctgctgcggctggcccgccgtctgctcgacctggacgccggcgctgcggaccctggaacgtga

SEQ ID NO: 349993 - DNA, 744 bp, Pseudomonas aeruginosa
atgcatatggagccagcgatatcaaaggttttctaccgacccattgaagcggcaatacgctgggccggtctgctaaagcacgaatgggaaatcttagccgccgttccctcgccgagggacttgccccttagacacgaatgtccgcgatggcgcgagttgcggctgtacactcatcgaatatacgacgccatcgacaatggcgagttgcctttcgggcgtaatggaatcacgcttaaagacgaatccctcctccgttcacccgagttgaccattcgccatctggacttgaaacgctggatgcgcgcgcactatcccgaacaccggccaccctttctgttcagccgctgcgagcgcattgcccatccgatcatcacattggaagccggccaagcaatgcttgtcgaacgtcaggcgatcaagagcgaactcgactattgccgccatcaactgcacgaacttcaagagaagcacggagcgttgctgcggcacccgtccatcaatgccacgtgcaatccatgtggcgtcagtgaccgtgctgaaacgacgtatctgcacatcatcggtggcatggtcgaactgatgctcgggcggtccccgtcgggcgtcgcatactcgagatttcgaacacaggaagccatcgtcagcgcactagtcgcgaactacaggggaagcatgggtatcacagaacggacactcaatggcaagttcgccatcgcgcggcgcagcctccatagcgcggtgtga

SEQ ID NO: 349994 - DNA, 1620 bp, Pseudomonas aeruginosa
ttggcctctcccagaaaagcacctgctctgcagggtttcgcagggattcgtcaccgcagaaagccaccagcagcgccccgccaagcctgctggctggggtccgcagaaagtgcagaaaaagaggtctatttagagcggaggcgtggcggggggacgactgcgcgcgccaaggtactagcacatcctgcccttcctaacttacgggcaacgcagtactatccaatagtggcccattggcagtgcaaggaactcggaatgatcgaaggttatacggacgaacaattcggtgcggctattcataaacatgtcagtccgtcagagcccatcaacacaattgaattactgaaagggcggcatagcgaacttgaagacataaagcgttccctgtacgcaaagggaagacacatattcatcttcggagacagaggtattggaaaatcttctctagcacagactgcggcctatatataccaaagttccgacgcttctattattcaggtgggatgtactaagaccagtaccttcctggggataatggaggctatcgccaagaagctggtcaactctctagacatcatcgaaactcaagtcagatccacatttaatctaaaatttcttagccttgaatttctgcatagaacgtcgaaaaaaccagaaatcccggatataaaagatttagacgacgcactagacgtaatatccgacataaaggaaatccattcagaaaagcccatcatagtaattgatgagttcgatgccatcgaaaaagagcagagataccattttgcagagttcttaaaaaaaatgggcgactctggaatctatgtgcccatgattttcagtggtattgccacttcactggatgacctactaggcggtcacctatccagcattaggcaactgaaacctatcgaactcaaacccatctcatgggactccagatgggatatcctcgttgaagcactagaagcttttgacattgatttcgatgatgagatcaagtacagagtcgcggggattagcgatggcttcccctattacgtccacttgattacggaacacttactttgggcggtctatgacgacccgcattctatgaaatctgcaacctcagcacacttttatcaggctctagaagcatccgtcaaagcagtacaagagcagatcaggaagccttacgacactgcaactcttcgacatagccaagatttccatcatgtaatttgggcagctgcggactccacggatcttcatagaaatattgattccatgtattcttcgtatgaaagaatcataagagaccttaaccacctagacgaagaaaaaagactaacaccaatagaccggagaaagttctcacaacgactaagcacattaacaaaagaaagccacggcgcagtcctgaaaaagatgaccgaaaataggaatggctggtatcatttctcagagaacatgctaagagggtatgtcaggctcttagccgccactcatggcgtacaactctggacacaggaagcagcggcaccaagacagtttataaatccacgaccacaacatcagactaaccccacccgctatttcccatccgtaccacggggaatccgcctaaaggacgactga

SEQ ID NO: 349995 - DNA, 828 bp, Pseudomonas aeruginosa
atgtcggcgacagtgtcctcttttttgacaagctccgtgccaaccgctcgatcagcgtctggtggccatagctgtacagggtgggtacgcaataattcgatggtgatctcggcgcgcgttgccagcacagagcgcttgggtaatgccacggctagctcctcctgccacaaaggctccgcgtcccagccgtgcatcgccgccatgttgtcaaaggcgatcgccatgtcacagctgccgttcgccaatgtgctatgcaaacctgctgggtcaacctctcgaagcaacaatcctgtctcgggctcttcgctgcgatgcaacgcgagcagagcggcggaggatgagcacgagattcctgtagtgaccgcaagcgcaagcgccgcccgaggtcggcagagtgtagacatcgaggcagcctcgtgtggggatttagccagccctaagccaagaagaattaaatcataccaagagttaaatttaacgtggtttaaatttccgccggcctccacgcttttggctatgcaaaagcgcaccgttcagcgaggccgtccttccggcactactacatatgaccccactatcgcgggagcctttggtcgagctgtgcgcgatgcacggctggagggagggattgcccaggaggctttggcgagcctggccggaatagaacggtcccacatgggcaagatcgagcgtggcgagcatctgccgacgctggcgctcgtgttcaagatagcggccgcgttggaccgctccgtgacagccctgatccaatcgacggaaaataatctctgtcgagcagagttgaaagacgatggggaccctctttag

SEQ ID NO: 349996 - DNA, 906 bp, Pseudomonas aeruginosa
atggaactacggcacctgcgatgttttattgtcttagcagaagagctgcatttcgctcgtgcggctgggcggctgcacattgaacaatcgccgttatcgcggactatcaaagaactggaagaccggctcggggttcgtctttttaatcgtgaccgcagaggaactcacctgacgcgggcgggcgaggtttttctacaggacgtgcgtcgagtctttcttgcgcttgatcaagcgcaggagagcgtcaaggcagctgccgctggtcacttcggcgtccttcgggttgctatttccgatgggatcgcccagccccgattagcttcgctgctagcgtcatgccgtgcagaagagccgacaactattattcgtttgaccgaggtatctctggccgaacagctacgcggccttcgcgacgacacatttgacatcggcttcgcgcggaccgacgagtgtggcgacgacatcgtctctgtgccgctttggcaggaggccctcgttgtcgcggtacctgcacggcacccgctactcgcgcacccggtcattcccatcaatgaattgttgtgctacccattagtgagttgccaccccgaaacgtgcgaaggctatcatcgcggggtcgagcgaatcctgcgcgcgtctgacaaggaaccaaacgttgtcgaacgcgtgacgtcgctgagcatgctgctgacgctggtcgcagccggttatggcgttgggttcgctacagtgagtcagatcgactcttactgtatccccgatgtcgtcacccggcctctatccatgaaaaacccgatgctaacaacgtacctattacggaaagcgggcggcgacattccagaggcgttgaccgcatttatcgatcgggccattcgagatcttagcgatggcacactcagtgactaa

SEQ ID NO: 349997 - DNA, 912 bp, Pseudomonas aeruginosa
atggaagtcaatctgaacgatctggccatattcgttgaagtggttcgccgaaagagcttcagtcgcgcggccgatatattggacatcccttcatcgacgctatcgcgccgcgttactgaactggaacagaacatcggcatccgacttctcaatcgaagcactcggcgtctcggtctcaccgaagcgggcgccttctattacgagcattgccgacgcctggtcgaggaactgcgcgtggcgcatgaacagatagtcgaaatgaatagctcgctgagcgggttgcttcgaatctccttgcccgatggtctggcacagatgctcctccccacggtgatgcgggaattcggcaagagatttcctggcattgcgtgcgacttccatatgagcagtgagattgtcgatcccatctcaaaccacttcgacttggcgctgcgctttggacaccaacccgattccgaactggtttcgcaccgcatcctcatgttgccacgtgaactctatgccgcgccgagttacctagccgaacatggcgtaccgaatcagccggaggacttgccccaacatgaatgtctacgcatcagccccgtggaagagcactctgtatgggagttacgagatggtgcccaaactcaggctatcaatgtcagtggaagaatgtccgcgagccatgccggggcgctggtgcatctggcggttgcgggtttcgggattactgcgatccccgtcttccatatgatgcggagcgccgtgcaggcggcgggtctggagcgtgtgcttcctgggtggagcttggtctcgacgcctctctatgcgctactaccgaccaatcacgtgcccgcaaagacgcgcgcttttttgggtttaatcgagcctaagctggtcgacgacatcgaattagtgtctcgaatttag

SEQ ID NO: 349998 - DNA, 1533 bp, Pseudomonas aeruginosa
atgtcttcgtcggagttttcgccgctctcgggctttaaactggcttttgctgcgctggtgctttcattgggaaacttcgtggtggtgctggataccaccatcaccaatgtcgcaatgcctacgatttcaggcttcctcggcgtatcaacgacggaaggcacctggattatcacggcctatgccgttgcggaggcgattacggtgccgctcacgggttggctctcccggcaattcggtcaggtaaaggtctttatcgtatccgtagcgctcttcgtgttgttttccgtgtgctgcggcctgtcatggtcacttcctagcctcgtcctctttcgagtgttgcagggcttcgcgggcggtccactgattcccctttcagcgactctgctcctgtctgttttccccgagaagaagtcaaacgtcgcattagccctgtggggcatgatgacggtggtggcgccgatcatcggtccgatcttgggcggtttgatttctgataactggcgctggcaatgggtgttctacatcaatatcggattcggtctattggttgggctcggaagttggtgggtattgaaaggacgcgaaacgaagattcaacgttctcgtctggacggtgtcggcctaactctgctcgtggtgttcgtgacagccttccaagtgatgctcgataaaggacgtgagctagactggttctcgtcaaacgtcattctgacttgcgcgattgtgtcggcgatttcccttatcctgttcatcatatgggagttgacagatgagcagccagttattgatctgagcgttttgaaatcccgcaactgggtggtatcgaccatcaccctttgcctgatgtacggcatttttttcggcaacatcgtgctaaccccactctggttgcagcaatggatgggatacaccgcgacatgggcgggcctcgcaaccgcgccaatgggcattcttgccgtagtgacttctccgctcgtgggccgtcttttgcccaaggtcgatcctcggttgctcgtgacctacggcatgggagtgctggcggcctccttcgttatgcgggcgttgatgacgtctcaggtcgacttcatgtcggtcgcgattcccatgttcgtgctgggcgctggcattccagcttgcgttatcaccctaacttccctgggtgtctccgatctaccccctgaccgtatcgccggcggatcgggattgcagaacttccttcgcgtcctgtgtatggccattggatcatcgctgacccagacctattgggaacacatgaccaagtttaaccgggcagaactcgtcgcggctattgatccgtccgccccagcagcaatgggctcacagcttacccctgcaggcgttccggccgagagtgcgatcgccatgttctcgcgattagtcgatagccaggcaatcatgctcgcgaccaacgacttctaccaggaagcgacgattctgatgctcgcgtccattggcgtcatttggttgatcaagcgccctaaagggccgctgcaaaaagtcacggggcactag

SEQ ID NO: 349999 - DNA, 1176 bp, Pseudomonas aeruginosa
gtgagcactgaacacgacgaaccccaggagcagtcgcaatccgctgccgatcctgccaagaagaaaaagcgaaagaagatgctcattgcctttggcgctgcgctactcgtcgttctcgcttgctacttcatttggttgattttcttcgcgggcaagacggtaacaaccgataacgcctataccgccgtagaggttgcacaggtcacgccgctggtcagtggccccgtaaaagaggtcaaggtggtcgatacccaagcggttcatgccggcgatgtcctggtcgtactcgacgacacggacgccaagatcgcccttgagcaagcagaggccgatctgggacgggcgcgccgccaggtacgtcagatcgttgccaatgacaccactctggccggacagatggatcagcgggcggccgccatacagagcgcacagcacgaagtgacccgggcgcgttcaaggtatgacaaggctgttcttgacgaaaagcggcggcgcaaccttgttgaaggcggggccgtatcggcacaggacttcactgattcgcaagccgaactccgagaagcaacggctgctcttggacaagccgaagccaacctgaaagcggcaggcgcagcgagtgtttcggccaaggggtcacggcaagccaacgaggcgctgttcttggacagcaccgtggagactaatccgatcgtggtgactgctaaggcgcatgcggaccaggcacgcgtcaatcttgatcgaacggtattgcgtgcacctgtcgacggcatcgtcacacagcgctctgtcgatatcggacaacaggtccaggcaggcatgcgattgatgaacattgtgcccatccaacagatctatgtagacgcgaacttcaaggaaggtcaactacggaatgtgaagcctggacagaaggcacgcctcaccgctgatatttacggggatgacgtggagtatgacggccgggttgaaggatttgcgggcggatcgggttcagcgttatcggtgatccctgctcagaacgcaaccggaaattggatcaaggtcgtacagcgcttgcctgtgcggatccgtctcgatcctgagcaactcaagaagcatccgttgcgcatcggtttgtcgatggaggtctccgttgacctgacgtcctcgggtgatcgtcaggaacacgcgaaggagtag

SEQ ID NO: 350000 - DNA, 1503 bp, Pseudomonas aeruginosa
atgatgcggtgtcagcaagcccccttcggcgcaagtcctcccggcggagaaagcggaatccgtcggcgtttggtggctgccggaataccgttgctttgcgcggctctaagctcgtgcgcgctggtgcccgacgtcggtcctccgccgcaacccactccggcttccgagttagcctcggagcgaagctttaccgccccaaaagctgattggccaagcgatcattggtggagcgaatttggcgacactcaacttgatagcttgatggccgaagccttggcccattcaccctcgatggcgcaggccgaggcgcgcgtgcgcgaagcgatggcacgcgcccagattgctcggtcggcgctccttccaacggttggtgctggcgcatcggttactaaacaaaagctcagctacaactacatctttccccaaacagcggtaccgcgcggctggaacgacatgggagaggtcaccctcgatttcagttgggaactggacttctggggaaagaaccgcgacgccctgcgtgcagcgacgtccgatgcgaaagcaatggaagcggatgctgccgccgcgcgcctactactgaccacaacgctcgcgggcgcctacgtccagctccagtatctctacgagtatcgagaagtcgccgcttcaacgctgcgcaacagacaagaatccgcccagctcatacagcggcgtgtaacgcaaggcctgaatgcccgcacggagatcgaagaatcttcagcccgggttgacgcggccaaggccgcactcaccgaagcgaatgagcgaatacaactcgcgcagaacggcatcgctgccttattgggaagaggttccgaccggggtttggaaattacgcgaccgtcgatgtcggcccgacgccgtgtgggccttcccgactcgctaaatgcaaatctcctcggcaggaaccccgaggtggtcgccgcacgctggcgtgttgaatccgcagctaagcgcgttggcgtggcccgagccgagttttatccgaacgtcaatcttatggcattcgtcggcttccagtcgttggggctcaacaacctcttcaattcaggttcggatgtcggcagcgtgggaccggccatcagtctgcccatatttgaaggcggcaggttacgcgccaactaccgcggttcacgcgctgaatacgattttgccgtggcttcctataacgaggccttgactcaggcgttgcacgagaccgcagacgccctccgcagtctcactgctctcaccgatcgatcagcggcgaccgattcggcactgaaccacagcgaggagtcctatcgcttagcgaaagcgcgatatcagggggggatcgccgactatttaacggtgctcactactgaggatgctttgcttcaggcgcgacttgctgatgcggccattcacgcccgtggctattcgctcgatgtggcgttggtcaaagccctcggtggcggattcgaatcccattcaacatttgaagcaaaggtaaacccgtga

SEQ ID NO: 350001 - DNA, 696 bp, Pseudomonas aeruginosa
atgtcgtcagtacgctcaaaaacctcgacgcctaacgatgccccgaaagaaggcgcagcagtgtctgagaaggcacgggtggttctcgctggcgcccgggccgtttttctggccaacggcttcgcagccgcgactaccgatatgatccagcaagctgcaggtgtctccaaatcgacggtgtatgcgtactatccgaacaaggaggcgttgttcgtagccgtcgttgaagcggagtgcgcgcggtttttaaagacaatcaacgaaacgcagttttccggaaaacgcctaggggaaactctgcttgcgatggcacgagcgtatcttgagattgtgttgtcgagcgacgcactagcgctgtttcgcatggttatggccgaagcaccccgccttccggagctcgggagacgtttctatgtagcgggtcccgcaaggatcaacgcaatcgtcgctcagcggctagaaattggcatctcgaatggtgagctggaacttggcggaataggcctggattccgctgcctcgttgtttgcgaacatggtacgtggggaagcccagatgcagtgcctgacgcacccgaacgcgcaggcatccgctgttcaacgtgaccagtgggcaaaagatgcagttattgcgtttctgcgcgcttttcccacaaaaaggcgagcgcctggcaatcggcacgctgacgatgcctga

SEQ ID NO: 350002 - DNA, 1026 bp, Pseudomonas aeruginosa
atgacactcggcaaattgataaagctttttcgtccacgcaagttcaaccctcgctcttcaatagacggacgctcacatatcccgggcgttcctgacgaactgacgatcgaggtcgatcccgatggatcgccagtttccatgcaaccggaagaatggtttgtttgtttcgtgccggggttgcagaaacagtggtggcatcgcttcaccgacccgaggcacaagcatgtcttcgcactacgcatggtaagcgatgatagttggatactattcgaaccatggtggacccgcatcatgaatactacgctgacgcttgatgaagcggcaaagtttttgcgatggggaggcgtgggaagcgtgctacggataaaagagtccattccaggtagcggcagtcagacccggggctgggctaactgcgcggtattagtctcccttctccttggtcgatcctattggacctggacgcctcatggactttaccaggcactcgtgcgagagccggaaacggagcatgtggacgtggctggcttcctagaaaagctactgcatgacatcgcgaataagcaggcatcgcgtgttgtcatcgaccgtgacatctatcggcaaaggacgttgatagacgcactgtataccgttggtattcggctcatgaggataacgacctccccactcgggctcggagtgcaccgtctggctgcttcggaagcatttcactttccaacggcatccgccgctttcttcgaacatggacccaatcgcgtgatcgaagagttgactctcatatttcagcacgctcaaaccaaaggagagcttagtgatcgatgggacgctgaaaagctggcgagacatttcctgttgatgctaagaggcaatctgcatctggagattatgatgggttgccgcgatgctccggacgaagtggaaattgaacgccgcgttgtatcggctgttgatctgctcttgtacggggtgcacggacgagagcagagcagtcacaaaataccgcgggattctgcatctcaatga

SEQ ID NO: 350003 - DNA, 615 bp, Pseudomonas aeruginosa
atgaactgcacaacagcgacacccgagacggacggacgcaggaaagaaattatgcgcctcgtagaagaatcgttacgcgcgctaaacggccaggcatctgatttggaaatagtcatccttaacgcaaatgtcgcgccggaagaggtgaccgaccacttcggtagtttgaatcaactcatgatgcacatggtgacggctctatcggaaaacctcctgataccactcggtggacattcgagcacggaagcggcattcgcaaacatactgagacattttggaaaaggcatggcccgggcgtaccaggacttttaccttatcggtctctatcgtattgccctgacggaagccacccgacacacggaggcatgtaaggcgttcttcgaacatgggcccggtctaattacaaaccgactcgccgaggtatttgacaagtaccggcgggtcggagaaatcagcgatggagacatgcagcttcgcgccgaccactttcttgccatccttcgtagcaaagtcgagatcccgaacgccaaggctctttccgaaggagagctagatgcccttgtagacgaagcggtgcgaatcacatgctggggcatcaaaggggaacacacatga

SEQ ID NO: 350004 - DNA, 1836 bp, Pseudomonas aeruginosa
atgaggcagcgaatcgaagattacggcctcatcggtgacggtcacaccgcagcgcttgtaggaaggaacggttccattgactggctgtgcttgccgcatttcgactctggggcatgcctagctgcgcttatcggaacgagagaaaatggattttggcgcatcgcccctgtggcgaaggtcaggaagattacccgccgatacatcgagggcaccatgatcctcgtaacaacgttccgaacgaaagatggcgaggtagaactgatcgacttcatggctatggatcagcgggatagacacattattagacgtgttcgtggcaccaaggggaaggtgaagattcagttcgaacttgcggcccgctttgactacggcatgacggtgccatggctgaacgaaattgacgaccacacccacacgatggtcgccggtccggactcacttgtactccggacatcccttgcacttcgtgctgaaaatggcgtcctcagttcccaatttaccgtcaaggacggagaaacggtttcggcagttctggggtacagtccgtcatatcaggaatcgccggctgtcatcgacgctgaccgtagcttccagcgtacgaaagccttttggcaaggatggtcgatgcgaggcgccgaggccgggccctggacaaccgttgttcggcgatcactgttaactctcaaggcgctcacctttcatccgactggcggtatcgttgcggctcctacgacttcgcttcccgaatttctaggtggcgaacgcaactgggactaccggtattgttggttacgcgatgccacgtttacgctcctcgcgtttctcaatggcggatatgaagaggaagcggacctatggcgtgaatggctactcaaggctgtcgctggtcgaccagagcaaatacagatcatgtacggcctgcgtggagagcgccgcctagacgagtggacagttccctggctgagcggctatcggaagtcatcacccgtgcgcgttggaaacatggccgcgaagcaaacacaactcgacatctacggcgagctgtcgcatgccatggcagtagctgccatgggagggcttcccccgccggccaggggcctgaccctgcgcaccgctttgcttgtccacttggaaaaggtatggaaagagccggacgcgggaatttgggaaatacgtggcgacccgagacatttcgtacattcaaaggttatggcatgggtctcgtttgatcgcgcggctacaagcaattatctagatggcgatgggccgaagcagaaacactaccggcgagtagccgaccgtatccatgcggacatctgcaagaatggcgtggacccgaaacgacaatgttttgtccagtcctacggatctaccgaaatcgacgcttctgcgttgttgttcgccatcgtcggatttctgccgccagatgatgagcgcgtggtcaacacagtgcgggaagtcgaggaacgattggtccatgacggattcgtaatgcgttatgagaccgatagcggcatagacggactgccaccaggggaaggtgcgtttttagcgtgcagcttctggctggtcgacatctacgtattgcaaggccgatacgaagatgcgcaacgcttgttcgagagcctcatttccctcaccaacgatgtgggattgcttgccgaagaatatgaccctcgggcaaagcgtcagcttggcaacttcccgcaggccttcagccatgtcgcgctagttaattcggctttcgctctccatagagcgacgtcaaaagcggaatcggggcggcaggacaatgtgtcacgtagccctccgcatatcaaaccaaatcgcgcctga

SEQ ID NO: 350005 - DNA, 1782 bp, Pseudomonas aeruginosa
atgtacatggtgctgggcgtcgtgatgctgctacgtggttttgcggacgccctgatgatgcgtgctcagcaggccatagcctttaatggcagcgcgggatacttaccgccgcatcattacgaccaggtattcaccgcacacggtgtcgtgatgattttctttgtggcgatgcctctcatcacaggcttgatgaactatgtggtgccgctacagatcggcgcacgcgacgtggcctttcccttcctcaacaactttagcttctggatgaccactgcgggcgctgtgctcctgatgatctccatgttctttggtgtctttgcacgcacagggtggttagcctacccaccactgtccggtttggctcaaagccctgatgtgggcgtcgattattacgcttggtgccttcaaatcgcgggagtcggcacgacgctatcgggcattaatttgcttgtgaccattatcaagatgcgcgctccaggcatgtcgatgatgaagatgcccatttttacgtggacatcgctttgcacgaacgtcttgatcgtcgcggcgttccctgtgctgaccgccgtactgggattactgctactcgatcgttacgtcggaatgcattttttcaccagcgacttcggcggcaacgccatgatgtacgtgaacctgatctggatctggggccatccggaagtctacattcttgtgctcccagtgtttggcgtgttctcggaagtggtttctaccttcagccaaaagcggctcttcgggtacgcctcgatggtttacgcgactgtcgtgatcacagtgctttcgtatctcgtgtggctgcatcacttcttcacgatggggtccggcgcgagcgtaaactcattcttcggcatcaccacgatgattatctcgattcccacgggagcgaagatcttcaactggctgttcacaatgtatcgcggccgaatcaagttcgaagtgcccatgctgtggacgatgggcttcatggtcaccttcgtcattggtggtatgaccggcgtaatgctggcggtaccaccggccgactttgttctgcacaacagtctgtttcttgtcgcgcactttcacaacgtgatcatcggcggcgtagtgttcggcatcttcgcagccatcaactactggtttcctaaggccttcggctacaagctcgatcctttttgggggaagtgctctttctggttctggctggtcggcttctacctcgccttcatgccactctatgtactcggcttcatgggcgttacgcgccgcatgaatcatttcgatgatccgtcgttgcagatttggttccagaccgccgcagtaggtgccggccttatcgctctgggcatcggctccttcctggtgcaactgtgggtcagctataaacgccgcgaccagttgcgcgacgtcaccggcgatccatggcacggccgcacgcttgagtggtcgacatcgtcgccgccgcccgactacaacttcgcctttacccctctcgtgcatgacgccgacgcgtggtggcagatgaaggaacataacgccaaacgcccgatggccgactttcggccgattcacatgccgggaaataccggcgccggtgtgttccttgctgcctggtccctggtgttcggtttcgctgccgtatggcacatgccaatacttgccgccgtatgtttcttaggtatcgtggcaaccgccatcatccacagtttccaaaaagaccgcgcatattacgtttcggctaatacagtagaggcaaccgagcgagtcgcctggtctcaatag

SEQ ID NO: 350006 - DNA, 1638 bp, Pseudomonas aeruginosa
atgtcactcgatcacctgttctctcgcctctttggcaggaccggccggggaattattctcggtttcggggctgtgctgtgtttaatggtgctactgacggtcattggtattgtgcaggtcaaccgcatgaacagcgcgctaagcgccatcaatgacatctatagcgtaaaggaacgctacgccatcatcttccgcggcagcgttcatgaccgttcggttgcggtacgtgacgtcgttatcgcgagcccggaagagttggccaatctggtggtcgatatccgtcgcctcaagcgccagtatgacgatgcggcagtgcccttggatgtactgttgaaatcgggagcgaatatcgccccggcggaagtcgacgcacgcgccgaactcaagaaagtcgaggcgagcattcttccagttatcgagggcctcgtggcggccaaagaacgcggtgacgagaacagcgcccattccctattggcacaggctcgcccgctctttgtgcaatggttggcttccgtgaatcgcctgattgacctggaggagagcctgagcaaggaacagagcgacatggcgcgtgagatcggtatcgaattcaagcggctcatgatgatactcacggcggcggctatcgtgctgagcgccggtttggcgtggctcatagcacgacgtattacgcgtgcactgggagccgaacccgctgaacttagggaaattgcgaaagccgtcagcgccggcgacttgacgggcgccatttgcgtcaagcgcggggacaacgggagtattctggcaacgcttgcgcgcatgcagcagaatttggcatctgtcgtgggtggtgttcgccagcatgcggacgcggtgtcggtcgttagcattcaactggccgacgggagtgccgggctcttggccagcacaagtgaggaggcgcgtgcactgcggctgacggctgagtccatggatgagctgatcaccaccgttaaaagcaatgcgcaggaggcccggaacgcgagctcgacggcgggacaagccgtggatgtagcacgccagggcagccggacgatgcacgacatggttgtcgctatgcaggatctgtccgcagcttcggaacagatctccgagatcacatccgtcatcgagggcattgccttccagacaaatatcctggcgctcaacgcggcggtagaagctgcccgggcgggcgaacagggcaaaggttttgccgtggtcgccagtgaagtccgttcgctagctcagcgttccgcggatgctgcaaaggagatcaaaacgctgataagccaatcggtcgagattgtgcagcggggcgtggaccgtgtcggcgaggcgggtgaaaccatggacctgatccttggccgaatcacggagacgacggtgaccatggacggcatcgttcaggcatcggctgagcaaaccgcgcagatcgagaacgtagcgattgtgatcgcccgactggacgcagacactcagaagaatgcgcgccgggtcgcagaagcctccacgggagccgactccttgcgtcaacaggctgccgaactacgggaggccgtcgccaccttccgcttggacgcctcaacgaccactccagcagcgccgccgcggcccagtcctgttttgattgaagtctga

SEQ ID NO: 350007 - DNA, 1530 bp, Pseudomonas aeruginosa
atgacgctctacacgaccgactacctggagtattacctgaccctggtgggctgggtggtcaacaacggtatctggaacatcctcgtcgccagcggcgtcttcgcgttgccgtttctcgccatcgtgatccaggagtggctgcgtgcgcgaaccgaaggcgcggatgaaggcaacaagggcgtgctgtcctcgatgcggatcgagaatcgggtattcgtggcgatcgtggtcatcatgttcgccggcatcccattcatcccggtcgatctctccacgatcaagttcgacacgacccgctcctcgcaatgccagatcaacgtcccgcagccggcggacacaggctggaatacctcgtacaccgcactcaacaaccagagcgcgctggtgccagtctggtggttcttcatgcacgcgatctccaaggccgtcaccggcgcggcagtcgcggcgattccgtgtggcaccgacctgcggcagatccgcatggatgtggacgccacccgcatcaatgatccagtgctggctcaggaagtcgccgacttcacccacgactgctacgggccgtcgcgtgccaagctgttcatgaaccggcccacgctgtccgacgcgcagatgaacgacgtgacctggatcggctcgacctacttcctcaacacgggtggcttctacgacacctaccattccagcacggcacgcacggcctggccctacgatgccaaccgcgacgcggggctggctcaggtggacagcggcggcggatatccaacgtgtcagcaatggtggacggacggcagccaggggttgcgcagccgcctgttggctcaagtcgatcccgacttactgagtcgcatcgggaaatgggcgggtttcctgtcgcagacggaggtcgacgactcggtgatccgggccatcatctcgccccagcagcagaagatgaatcagggtcaggtctatgccgattacggcggccaggttggcatgaccttgccgaacgtcgtcacgcgcggcaccagcgacgtcggactggctgtgggtgcgctgggtatgttcccggcgatggacgtggtgcgagaagcgctgccgatggtgctttcgttcctgaaaatggcgctcatcatctgcatcccgctggtgctggtaatcggcacctacgagttgaaggcgatggtgacggtgagctgtgtcgagttcgcacttttcttcgtggatttctggttccagctcgcacgctggatcgacagtacgatcctcgatgcgctttacggctggggattcggtgccgggcggcctcacacgaacttcgacccgctgatcggcctgaacaacactttcggggatatgctgctgaacttcgtcacggccacgatgttcatcctgctgccggggttttgggtcgtcgctcttggatgggttggagttcggacaggaaacatccttggcggtcttacggctgcgactggtgatgcaaaagctgcaggcggaagcggcagcaaaacagcgttgggggctgccaaatcagccatgaaatag

SEQ ID NO: 350008 - DNA, 354 bp, Pseudomonas aeruginosa
atgacgcactcgaactggtggcggttctccctgctgttcaaccgccgggtcggggcggcgctgttctggagcgggctggtcattggtgctgcggtgctggtcaacctggccggcatccgcatcgtcggtggcatcgacggctgggagcgttggctgcgggcacacgcgatcgtcttcctcgcctggcggctatgcctgtacgcgtgtacggcctggggctggtggtggatgcgccggcgggtgcagcaacgtgaatcggcctcggaaacgcgccaacgcttcctgcgcatcgaggttgccgccgtggcggctattgtgctcatggaaggcagcagttggctgcagcacggctag

SEQ ID NO: 350009 - DNA, 1413 bp, Pseudomonas aeruginosa
atgaacatgcacatgacgaagctcgcccgcagggcgaaaccctacatctggcgcagcctgctcacggctgccgggttggtggtggtgattggtgctgcgtgggcgcagcagacccgtatcgacagcaacggcgcgagcatcaacggtagcgtgatcggcgatgacgtgctctacagcgtcggcggcggccgtgccgtgtccatgggcggtgcgggcaacatgcagagccttggtgtaggtgttggctggaacagcaacctgatctgcggcgacatgagcctgtcgaacaccttgcagaaccagctcaacggcgttaccaacggcttccagacgatcatgagcagcgtgatccagaacgccaccagcgcggtggcgtcgctgcccgcgctcatcatccagcgggccgatcctggcctctacaacttgttgaccaacggcatcctgcaggcgcgtctggatttcgaccgcagcaagatgacctgccgcgccatcgccaaccgcatggcggacatggcgggcggccagacgagctgggaccaactcgccgagggcatggcactcaagcaagccgtcagcagtactgacgccgtttctgcgatcgagcaggccgagaccagcaagggcaacaacggtgtgccgtgggtcggcggcggcaatgcgggcggcagcggccagcgctcgatcaaggtcgtctcggacgtgacgcgcgccggctacaacctgctcaacggccgcagcgccaccgatacctcgtcaatcgaccccacgacctgcggcaatcggctgacctgccagacctggtcgtcgccgcaggcggcttctgattgggccacgcgcgtgctcggcgagcgcgagcagcagacctgcgaaagctgcacgaagacccagaccacgcccggcgtgggcctgacgccgctgatccaggaggagtacgagaccaagctgaaggcgctgcaagacctggtgacgggcgcgaagccgaccacagcggcgaatctcgatgcggcgggcagcaactcgttgccggtcacgcgcggcgtggttgaggcgctgcgcgacgaacccgatcaggacgtgctgggcaagcgcctggcttcggaagtggcactttcaagcgtgctggagaaggccctgctgttgcagcgcacgctgctcaccggctcgaaggagccgaatgtggcggccaacgatctcgcggtgaaggcggtggattctgagaacaccacgctggaacaggagatcaacaacctgaagaccgaattggagctgaggagggaattggctggcaactcggccatgaccctgatcggacgttacaagacgcgctccgacgattcgcgcgccattttccagggcgacacgacgccggaccgcctgcaacagatccagaagccccggagcaacacgccatga

SEQ ID NO: 350010 - DNA, 951 bp, Pseudomonas aeruginosa
atgagcgcacgactgcttgcacgctcccgccgtctgcgctccgtcatcgcctccctgatgctgtgcgtcgccggttcggcgcttgcgctgaacaccgcgaccatcatcacctcggcgctgtcgccggattgcctggagtaccgcgtcgtcggcatctgctactggctgttctgctcgtggggcggttgcacggtacgcacgtcggtcaaggtgcggcactacattccggacgcggtggtgtcgagctactcgaacaccggcgagaacccctggatcgaaatgcggctcatgagcctgcccaacccgaccgctcaggcagggggcgacggcacgaccaaccaggaccgcgagaacaacctcgccaagttcaagaatgcggacgtgatcggccatccggcagcgacggtcttcagccgctatgccagccagttcggctacacctgcaccggcgccggcactgccttcatgccgtatctgttgagcacgctcgatacggtggcctggcgctatgacgtgcccgaggcggtctatcccgaggccttgatccccggcatgcgggagatcggcggccgcctgacgatgaacctgtggggcaacgtctatccgcgcggcgggctcctgcaccagaccgacgactacaagagcggcgccgtcgtcgcgcagcgtgccggcgacgtggtgacgcgcagcggtcagatccacgtttaccagccgctgctggccagcgcgcacgacggctactggccggccggtgcgctgaccgagagcgacgcatcgaccggcaagtggcaggagctgacgccgacgctttcgaccacctgcgcggtcttccccaacagcaacgtacatgtgcaggccacgcagggcgactacgcctgggcgctgtggcgcccatacgcctgctgcgagcgccgtggccaggtcttccttggcagcaccgatttcatgtga

SEQ ID NO: 350011 - DNA, 402 bp, Pseudomonas aeruginosa
gtgagccgcggcgtgctcgccatgttcgccgcactgctgttctcgtccgcgcaggccgccgacgtcatcgccttcaccgacgcccagcatccggtgagcaacgcgggcggtgcccgcgtggtactgctcgatgcgccgaccggcctggaagcctcgctcggcgcgcagcttccggctgatcccgcgcaggccgaagccatcgtccggcaacgtctcgcccaaggcagcgccggtttgcagcagcaactcgctgcggcctaccagggtgtcgccgacgcctgggggctggggatcgccacgattcccgctgtggtagtggatcgccgcttcgttatctacggcgatcctgacgtcgcgcacgcggtcgccagtatcaacgcctaccggagtgcgcggccatga

SEQ ID NO: 350012 - DNA, 726 bp, Pseudomonas aeruginosa
atgcgcaagctcccgttcttgtcacgctccccacggcttctggtcggcctggcggtggctgtgttgctgggtgctgccggctggtgggcatgtcatcgcacggcaccgagcgaggcaacttcaatcaccgctgcatcgcccgacgccccgagcgagacaccacccaaggctccggcagggccgccctggatctatgggcgcgccgacgcccgcttcacggtggtcgagttcgccgacctggagtgtccgtattgccgggcctacttcccggtgctcaagggctggatcgacgcccatcccgaggtgaactggcagtggcaccacctgccgctggcgatgcacgatccggcggctaccgccgaggcgcggatcgcggagtgcgcgggcgagaccggcggacatgctgccttctgggaagcggtgacgtggatctacacgcacacccgtggcgatggacaggggctaccgcccggcgtgccgtatcccgacctctcgcctgacgtgcaacgctgtctcggcagcaaccgtcccgacgcggctatccgggctcaatccgccgaggccgccaagctcggcatccaggccacgccgaccctgcaagtacgcgatcgccagtccggcaaggccatcgtgctgcccggtcctgtcgaaggcgatgccttgttatcggccatcgacatgatcgccagcgacggccaggcggatacagcgccatcccggccttga

SEQ ID NO: 350013 - DNA, 1458 bp, Pseudomonas aeruginosa
atgaaaagtaacggcctgctcaaatggctgatgatcccgatggcgctggccgtcgtgctcatcggcatcaagctcttctccagcagttccggcagcaagcccgcgtcgcagacggcggccagccagctcacgccggaggagatgaaggcgctcggcatcgagggcgacacgccgcgcgataccgttgccacgctggtcgcgcaggtcaagcaactgcgcaacgagttgcagacctcgctcaacgacaacaagaacgccaagaccgagaacgaccgactacgcgcccgcgaaagcaccgttgaccagcgcatccaggccgcgctcgacggcgaacgcggccgcttgcagcaggaccgcgatcaggtcgccagtgaccgccagcagacgcagggcctgttgcaggacttgcaaaagcgcctggacggactgagcggcaaaggtaatcaggccgatctgccggtaggccttgggcttcaggacggtgacggcaagaatttcggtgctggcactggcggcacgcgctgggtggagcccgacgacaccaagcccgacgccaagaacagcagcagcgccagcaacggcaaagggccgagtttcccgaccagcttcggccttgcgcaaaacacgtcgtctaccacggccacggcggtcgccgacgccggggagaagccggctggcgcgtcggcgaaggcggtctacaccgtaccgacgaacgccacgttgatgggttcgatcgccatgaccgcgctgatcggccgcgtgccgatcgatggcacggtcaacgacccgtatccgttcaaggtgctgatcggcccggacaacctcacggccaacggcatcgacattcccgacgtggccggtgccgtggtcagtggcaccgcctcgggcgactggacgctttcgtgcgtgcgcgggcaaattcgttcggtcacgttcgtcttccaggacggcacgatccgcaccgtgccggaggactcgggcaacgccaacggcaacaccagcaacaccagcggccagaacggcaacaacagcacgatccaaggcggtctcggctggatcagcgacccctacggcatcccatgcgtagccggcgagcggcgcagcaacgccgtgcagtacctcggctcgcaggcgctcatcaccgcagccggcgcgggtgcggcctcgctcatcaagtcggacagcggcaacgtctcctacatcagcaacagcaacggctcgctcggcaccgtcggcatctcgggcaacgaggcgatgggtcgcattctcgccggtggcgtgcaggagatgagccagtgggtcaacaagctctacggccaagccttcgctgcgatctacgtgcagcccggcgccaaggtcgccgtgcatctcgaccatccgctcaacatcgactacgacgccaagggccgccgggtcaaccaccgcatcggagaagctcatgcgccggatctggactga

SEQ ID NO: 350014 - DNA, 921 bp, Pseudomonas aeruginosa
atgaagcgtcttgtcctgtcggccctggccggcttcgccttgagcctggggctcgcctccaccggccatgcggtcgaaatcctgcattgggcgcgcatgccgctggccgtgccgctcgtcgtcggccaggagcgcgtggtgttcatcgaccgcaacgtgcgtgtcggcgtgccgccggacatcgccgaccgcctgcgcgtgcagagcgcaggcggcgctatctacctgcgcgcgagcgatgcgatcgcgccgacccggttgcagttgcaggacgtggaatccggcgcgctgatcctgatcgatattgccgccaccccgccgaaggacgggcaggccccgctggagccggcacgcatcgtggaagaagccgctaccggcacgcggtatggaagcaaggccgcccccccggcaagcgatgccgacgaagctgccgcctcgcctggcaggccagcagccgcgcgcgagacgcccattcccgtcgtgctgacgcgctacgccgcgcagaacctctacgcaccgctgcgcacggtggagccggtcgccggcatcacccgggcaaacctgcgccgcggccttgcgctggacgccttgctgccgacgctgcccgtgcgggcgcgtgcgctcggtgcctggcggctcgaagaccagtgggtgacggcggtgcagctcaccaataccgctgatcgctggctcgatctcgacccgcgcgcgctccaaggcgacgtcgtggcggcgacgttccagcacccgaccttggggccggcgggacagtcaaccgataccaccgtggtctatctcgttacccgtggccacggcctggccgagtcgctgctgcccgcggttgcgcccatcgaccccgcggtgaacctgccgcccgccgcagcggccggccaggccgaaggaggccgcgatgaaaagtaa

SEQ ID NO: 350015 - DNA, 729 bp, Pseudomonas aeruginosa
atgagccgcttccgcaacgagatcacgcacctgcaggcgcacgtcaagacgctgcggctcgcggctggtgcgctgttcgtggtgacgctgctgctcgcgttcggctggtggagcgccccgaagaatctcaccatccacgttccgcctgacttgcgctcgggcagcacgcgccgctggtgggacgtaccgcccgaaagcgtgtacgccttcagcttctacatctggcagcagcttcagcgctggcccacggatggcgaggcggactacccgcgcaacctgcgcgcgctgtcggcctacctcacgcccggttgccaagccttcctgcaacaggactacgaataccggcgcagcaacggcgagctgcgtcagcgggttcgcggtatttacgagattccgggccggggctacggcgacgatccgaacacgcgcgtcaaggtcgtttccaacagcgactggatcgtcaccctcgacgtgacggctgacgagtactacggcggcgatcaggtcaagcgcgcgctcgtgcgctacccgctgaaggttgtgcgcatggacgttgacccggaacacaacccgtttggcctggcgctcgactgctacgcgggcacgccgcagcgcattgaagctgcaccggcaccaaccccgaccagcacgcccatcagcgggccgatcagcgcatcgagtaccgcgcccgccaacacggcagatcatccgcagggagataccccatga

SEQ ID NO: 350016 - DNA, 426 bp, Pseudomonas aeruginosa
atggccgccgcgtccgagaacctgcaagacgggctcgtcacgtttctgccgcaccggctgaatcgtcagccggtggtcgtgcgtgggctgaccgccgacgagttgtggatctgcgccggcttgtcggccgcggcggggctgacactcggcctgccgctcgcctggatcacccgcagcatcgccatggtgccgacgctgatcgtcgtcggcatcgcgatgggtgtctttgccggcggcggcttcctgcggcggcagaaacgaggcaggcctgacacctggctctaccggcagcttcagtggtggctggccttgcaccacccggcattggccgcgctgctgcgcggacgctccctcatcacccgttcgggcatctggaccacccggcgccaggccagcccacctcctgcttcccggagtgccgcatga

SEQ ID NO: 350017 - DNA, 240 bp, Pseudomonas aeruginosa
atgacgccctctgccgaccagaccgccgccttccaggccaacggcggcttcactcccacggccgtctccagtgtcgtgctcagcatcgtattcgccgtgctcctcctttggggcgtgtgggcgatgcggactgcctacgtcggctgggccgaacaacgcatctcccaacgtcagttcctcggggtcatcgtgcgcttcctcgcgatgtacgtggtgctgaccttcttcctcctgtcctga

SEQ ID NO: 350018 - DNA, 372 bp, Pseudomonas aeruginosa
atggcatccctttccagctacgcaccgacctggcgacacgccttcgtcgcgatgctgctcgttgcttcgggacttcaacccgcgattgccgcggacgacgcgaccgagcgtgaacaactggccgcgctctcgcgccagctcgaactgctcgaccgcctggccgaacacgcggccgacgtctcgccccaggagcgtacccgctaccacttcgactatgcccgcctgcgcgacgacgtgaagcgcgtccgcgcgggcgtgcaggactatctcgtcccccagcgtgcccaaccacgcgcccccgtgtctctcgccggcgactacgtgcgcagcgacaccgactcccacgacggcaagggggcatcgaagccatga

SEQ ID NO: 350019 - DNA, 750 bp, Pseudomonas aeruginosa
gtgagcgacccggccgtcgccgcacagcgcgcgcagcagcaacaacagggggccgtcgccagcctcgtcacactgccattccgtctattcggcgtgctgtgcggttcgctgctgctgtgcatcgtgatcgagtgcgtcggcatgcacttcttctggccgcaggaaggctggcatcacgcccaggcaatgctcagtcacgagctggatcagttctcggtcaacttcacgcgcagcgcactggttcaggagccgggacgcaccgcgcgtgcgctggtcgagcacgcctacgactggctgttcgtgaaaagcgggctgctcgaatggatacgcgacgcttcggcacaggccagtgccggcacgcgcaaccaggcgcatgacttccgctactacatggcactggtctacgtgcatgtggaggcgtacctgatcgcctcggcctacacggtgctgaccttcctggtgcggttcttcgtgctggtgctgacgctgccgctgtttctgctcgcggcgtttgtcggattcgtggacggtctcgtgcgccgggacgttcgccgcttcggcgcgggccgggaatccggcttcatctaccaccgcgccaaggcgagcctgatgccgctggccgtgttgccatgggtaacgtacctggcgctgccgatcagcgtgcatccgctgctggtcctgttgccgagcgcggcgctgctgggaattgccacggatgtcgccgcggcgaccttcaagaaatacctgtag

SEQ ID NO: 350020 - DNA, 2163 bp, Pseudomonas aeruginosa
atggcccagccccatgccatcgaggtattgctgcggccagcggtggagctatacaccgttgccgtttgcacgggcgccgcgcttctgtgcgtggcggcaccgtggtcgctcgcgctgagtccgttgctgggcctaggcagcgccttggccttcctggctttcggcgtgatccggctgcgggatgcctggggcatcctgcgctatcgccgcaacatccgccgtctgccgcgctacgtgatgaccagccgcgacgtgccggtcagccagcagcggttattcgtcgggcgcggcttccgctgggaccagcggcacacgcatcggttgatgcaaacctaccggcccgaattccggcgctacgtcgagccaaccacgatctaccgggtcgcgcgccggctggaggaacggctggagttcgcgccgttcccgctttccaaactcgccaaggcgttgacctgggacagcccgctgaatcccgcacggccgttgccgccggtcggcggcctgccacggttacacggcatcgagccgcacgaggtcgacgtcacgctgccgctgggcgagcgcgtcggccatagcctggtactcggcacgacccgcgtgggcaagacgcgcctggcggaactgttcatcacccaggacatccgccgcaagaacgccgctggcgagcacgaggtggtcatcgtcttcgacccgaagggcgacgccgatctcctgaaacgcatgtacgtggaagccaagcgcgctgggcgcgagggcgagttctacatttttcacctgggctggccggatgtctcggcacgctacaacgccgtgggccggttcggccgcattagcgaggtcgcaacgcgcatcgccggccagctttccggcgaaggcaacagcgccgctttccgcgaatttgcgtggaggttcgtcaacatcatcgcgcgtgcgctggtcgagctggggcaacgcccggactacctgctgatccagcgccacgtcatcaacatcgacgcgctgttcatcgagtatgcccagcacttctttgccaaaaccgaaccgaaagcgtgggaaatcatcgtccagcttgagggccggctcaacgagaagaacatcccgcgcaacatgatcgggcgcgagaagcgcgtggtggcactggagcaatacctgtcgcaggtgcgcgtctatgacccggtgctcgatggtctgcgcagcgccgttcgctacgaccgcacctacttcgacaagatcgtcgcgtcgctgctgccgctcctggaaaagctcaccaccggcaagatcgcgcaactgctcgcgccggactactcagacctgaacgacccgcgccccatcttcgactggatgcagatcatccgcaaacgcgcggtggtctatgtcggactggatgcactgtccgacgccgaggtggcctcggcggtcggcaattcgatgttcgcggatctggtctcggtagccgggcacatctacaagttcggcatcgacgacggtttgcccggtgccggatcgggcgtgaaggtgccgatcaacgtgcatgccgacgagttcaacgaactcatgggcgacgagttcatccccatggtcaacaagggcggcggcgcgggagtgcaggtcacggcctacacgcagacgctttccgacatcgaggcacggatcggcaaccgcgccaaggccggccaggtggtcggcaacttcaacaatctgttcatgctgcgcgtgcgcgagaccgtcaccgccgaactgctcacacgccagttgccgaacgtcgaggtgtatgcaaccgcgctggtcagtggagcgaccgacagttccgacccgcgtggaaacacggcgttcacctcgaacacccaggaccgcatcagcagcaccagcgtgccgctgatcgagccggcgcacgtcgtcgccttgcccaaggggcaatgcttcgcactggtcgagggcggcaacctctggaaagtccgcatgccgctgccggcacccgatcccgatgaggtcatgcccaaaaatttgcaggagctggccggttacatgcgacagcactacgtcgaggccggcgactggtgggaaaaccaggggttgccaggcttgcaggaaagcgcgctgcccgacgatctgctggacgatttcaagcagttggcgaccgccgatgacgaggccggatcgtga

SEQ ID NO: 350021 - DNA, 531 bp, Pseudomonas aeruginosa
  misc_feature (134)..(134): n is a, c, g, or t
  misc_feature (416)..(416): n is a, c, g, or t
atgaaccgtatcgctttcgccttggccctcgggctgcacgccgcatcgatcactcacgcgcagagcgtcaccaccccgctcgttgtggtcgaagaccacggcggggtttctgcgctgccgtactaccaggcgcncaatccccaggatgcagcggccgccgcaccgacgacaccaagcccccgcattggcagcccagccgacgctgaggcggccatgctgccggtgcgctcggcacgtctctctccgggcgacgaaccgcgtcgcgtgattcgcgcgccgggcctgacgccgctgttcctggtcggcgacgacgatcgctcgcgcgcctggctgcggcagcggcaaaccgcgctgcacgacattcaagccgtggggctagtggtcaacgtggcgtcggccgaggcgctggcatcgcngcgacacctggcaccgggcttgatgctgtccccggtgtcgggggacgacctcgccgggcggcttggcatccgccactacccggtgctgatcactgccaccggcatcgagccctga

SEQ ID NO: 350022 - DNA, 600 bp, Pseudomonas aeruginosa
atggcagcgccaataaggaggcggtccagccgggcacgcgccaccctcggcatagcgtggctgctaggtgccggcatcccggcgttggccgcgcaggcacaggaacttccgccgcccgcctaccagatcgccgcgcagcaggccggcgtaccgtcgccggtgctgttcgcagtcgccttgcaggagagcggtacgaagctgcgcggccggctggtcccctggccgtggacgctcaacgtcgccggccagagcgaacgctacgccacccgtgccgaagcctgcgcgggcctgcgccgcgccctggcccgcgcacccgccagccgcatcgatgccggcctgggacaggtcaatctcggctaccaggcccatcgctactccgttccttgcgagctgctcgacccataccggaacctggcgatcgccgccgacatcctgcgcgagcagcacctgccaggcgaggactggctgctcgccatcggccgctaccaccgtcctgccggcggcgaagcggcggcccgctaccggcgcagcgtccatcggcacctgacgcgcgtgcttggccccggcggctcccttccttccgtgagcacgacaccatga

SEQ ID NO: 350023 - DNA, 732 bp, Pseudomonas aeruginosa
atgatgcgacagcctgccatcgccgcctgccttgcctgggccttgggcgtggcgtccttacctgccagcgcgcagtcggctccgacggcgacctcccgcacgaacctcagccaggcgcaggccagcacggacgaggcgctcgacgagcgccaggcgcgcgattggggtctgcgcgccgaggagtgggcgcgctaccgccagttgatgcagggaccgctcggcgtctattcgcccaacctcgacccgttgaccgctctcggcatcgaggcgcgcaacgtcgaggagcgcaaccgctacgcggagttgcaggtgcaggccgaggctcggcgcgtggacaagacgctggcttaccagcgcgcctacgacgcggcctggcggcggctctttcccggccagccgcgcgtgagcctgcccggcacccaggcgccgaacgtcggcaatacaggttccgggcggatggcggtgttcatcaaggccgactgtacgccctgcgagcagcgcgtgcggcaactccaggccgccggcacgccgttcgacctctacatggtaggcagtcgcggggacgacacccgcatccgccagtgggcgacccaggccggcatcgacccggcccgcgtgcgcgcccgcacgatcacgctcaaccacgatagcggccgctggctctcgctgggtctgcccggcgaattgcccgccgtggtgcgcgaggtgaacgggcaatggcagcgccaataa

SEQ ID NO: 350024 - DNA, 648 bp, Pseudomonas aeruginosa
atgacctttccccaagcccccgaagcaggtcgccgcacacactggttcaagattgccgcgggaatctggctgctgctcatcagcctgatcgccgtcgtcaacagcgtcggactctcccgcctcaccgagcaggcccgccgcgacacgcaggaaacgcagatcaaggcgctcgccgaacaggtcgcggaactggcccagcaggccgaagccggcaagcgccaacccaagctggcaagccaggccgaggtcgccgccgcacggcaggcgctggaaacgcgccttaccagcctcgaacaggcgcaagccgatgccgcccacgcgagcgacctgcaagcgttgcaggaccgcgtcggcgccgtcgaaacccaccagcaggaactccgttcggcgacgcccgccacgcttcgcccgcgtgtgccggtggcagtcaagcccaaggtgccgacaccgccgttccgtgtcgtcggcctggaactgcgtggcggcgagcgtttcctgtcgatcgcggcaccggccacgaactcgctggcgaacgtccggctgctgcgcgaaggcgacagcgatggcggctggcaactccaatccatcgaagcacacgccgcgctgttccttgtcaacggccagtcgcagcgcgtggcgctgccgtag

SEQ ID NO: 350025 - DNA, 594 bp, Pseudomonas aeruginosa
atgtgcccctcccatccattgtttcgccattccggccgtgggccgctcctggggcccctcggcctgctgtggtcgttgttggccagtggttgtgcgacgacgcccccgccaccggcgccgcccgaaccgccagccgctgtcgcaccggcactttcagccgagttcgtcccggtggtccgttacggtcgttacaccctggtcgagctggttcccgaccaggcgcagcgcgacctgatgcagcaagtggtggacatttccattccgtccgccttcgacgcaaccgtgggcgacgcgctgcgctatgtgctcctgcgctccggctatcggctctgcgataccccggatgccggcacgctcttcgccttgccgttaccggccgcgcatctgcatctcgggccattgtcgctgcgtgatgccttgctgacgctcgccggctccgacgcctgggatctgtcgatcgacgacgccacccggcaggtgtgcttcaaccgccgcgccacgccgccaccggccacgaccacacccgccgtcgctcctgctgaatccgagagcgattccgtcgatgcacttcaaccctgggaggcgctgccatga

SEQ ID NO: 350026 - DNA, 255 bp, Pseudomonas aeruginosa
atgaagaccaacacccaaccctccgaagccatcaacactcgcctgaagctcgaagccgagatcgcggatttcctgcgacagcgcatcgacgacggggacctcaaccttgaagacattcccctgcggctggcacgttatggcctgatggaccccgaggcgttcgccgccgaaatgcgcgagcgcatgggcatggacatggacgacgaagcgtacgaaatccactttcacaggcccgagctcggggcttttctttga

SEQ ID NO: 350027 - DNA, 312 bp, Pseudomonas aeruginosa
atgaaagtgactgacctcgctcgtgtggtcgctccggatgcaaagctggaggtagtgggaatccgtccgggtgagaagctgcatgagcagatgattagtgcggaagatgcttactacacgtatgagtatcctgagcacttcaagattcttccatctataaataactgggctacgtgcgaaaagcgtataaagaatggcataaaggttccggaaggttttgtttacgcgagtgacaataatacagaatggatgagtgatgaaatgctgcaggattggatcgaacagaatcgcgaaaagatcgggagcatctga

SEQ ID NO: 350028 - DNA, 312 bp, Pseudomonas aeruginosa
atgcgcgggcgcaggcagtacgcgcgcaagggacggcggcatgggaagggagccatctggctcctttccctgggtctgccgatgttcgcgtcggccatgcccctcgaccaggcggtcagggcagggctggcgatccacccggaagtacgatccgcgatggccgaagcggaccgtgcaggcaccgaggtggagatggccaaaggggggtactacccctccgtgacgatgtccggggggccgcaggagttcgacttcggcgagatcgtctacgatctcaccgcgtcgcagatgctgtacgacggggtcgggtga

SEQ ID NO: 350029 - DNA, 831 bp, Pseudomonas aeruginosa
atgatgatctccaagcagtcgttcgggctgctctggctcaacccgccgtatggcgatctgtccaaggacgtcaacggcaacatcggctatcagggccagggccgtccccgcttcgagaaactgttctaccagcgcagcctatcgttgttgcagtacggcggtgtgctggtcttcatcgtcccaggctacgtgctcgacgccgagctggtcggctggctgacgcgccactacacggacctgcggatctaccgagcggtggagacgcagttcaagcaggtggtgatctttggccgcagggtgcgtcagcgcgagctggcacccgatggtctcaaggccgtgcgtaatctgctgctgcaggtcgggcttggtgaagtcgaagccgaggagctgccgagcgaatggccgttcctgccgtacatcgtccccgccagtccggccgagccggagcattttttccgcgtgacgatggagccggagcagttcgccgatgaagtcggccggctgcaaggcctctggccgtcgcaggacacgcacctgggggccgcgcagcagtcgctgcgtccaccggcgcgtgccttgtcccactggcatctcgccctggccctggccgcgggcgcgatctcgggggttgtgcgctccaagaccgggcgcgtgctcgtcgtcaaaggtgacacccacaaggacaagacgcttcaacgcgaattcaccgaacgcgaagacggctccatcgccgagacccgcatcctcaccgacaagttcgtgcctgtcatccgcgcgtgggacatgacgcccggctccgctacacggggcgaggtcctgaccatccgttaa

SEQ ID NO: 350030 - DNA, 261 bp, Pseudomonas aeruginosa
atggacccgatcctggctgcgctcccgcccgcgctgttgaagctcgttgaagggagtttgtccaacgacgaagtttcttcggacgaggaaatgctgcagtacttcatcagcaacggcctcaccgaggaacaggcgcggcaggcactgacctaccgcgaccagtacctcaacaacatctacctggaaggcttcacgccgatcacttcggcggacgagccgcttcacttcaacccgcacacccggcagttcgagccggactga

SEQ ID NO: 350031 - DNA, 675 bp, Pseudomonas aeruginosa
atgggcgcagagctagccgtcacctggctgaacgacaaggccagggcacatgtcgaacccctggcgcaacaggtgcaggccagtgtgcgcatgcccctggacgtaacccgggccggcgagcttgacgctctgttcgagcgcctcgcagtgcaatggggatcgctggacttcgtcgttcactgcctggccagcgcgcccaaggaggaaatccgcgggcgcctactggacagttccagtaccggcttcctgcaggccattgatatttcctgtcactccttcatacgcatggcgcgcctggccgagccgctgatgccccggggcggcagtctggtgaccatgagttacctgggcgcccaggagacgatcgagggttatgccctgatggggccggtcaaggccgctctggagtgcagcgtgcgctatctggctaccgagttgggggcgcgtaatatccgggtgaatgccatttctcctggtcctatgctgactcgagcggcctccggactaagagactttgatcatttgctacaagcctcgacctatcgtgctcccctgcgtcgcttggtcaatttggaggatatcggtggcttctgcgtttggctggtcagtgacgccagtcagggccaaactggcggcgtgcacttcgtggatggtggattgaatatacttggttga

SEQ ID NO: 350032 - DNA, 1065 bp, Pseudomonas aeruginosa
atgtacaggatcagttctagttatgtcaggatgctggtagatatgctgcaagcagagggactggatgaggtgagcctgtgccacaaggccggaatcgatatgagcttgctgacgcaaacggaagcattcttttcacgtgcaagcgcgtatcgcttgatggagcttgccgagtgcgcctcaggaaacccgaacctaggcctcaaggctggcgcacatttccatcctggcagctttcaactggtaggctacgtaatgatgtccagcccaaatctgaagcaggctttggagcacctagtgcgatttttccccctgcttggcaatggcgtcaccctactattatctccggagcaagaggggcgtctacgcttgatatatctagaacatcttgaagagggcatatccaggggaagagcgtttgaggatgccggtgccactgcactactggagttctgccgctggcttaccggcagcaggccaccacgaccgctgcaactcgacttcgtccatagcgagccgcagaatatatccgaataccaacgactgttcggttgtttactgcgcttcggcgcccagcacaacagtgtcttgttcgatcagcaagagttgctgcgtccattaagtaccgcgaacgaggcactggctctgctgcataatcgattcgctgaatttcgcttggggcagttaggtggcacttctctggctggacgcgtgcgcggattagtcgttgaacgtctaggccaagatggatgtgacatggagtctatcgctcaggctctctacatgagtaagcgaactctacagcgatccttggagaaggaaggaatacagttcaaggatatcctcagcgacgttcgccggcaattggccgattattatctacgtcgcagctcatgcactctggatcgggtagtcgaaaaactcggattccatgatcagagtagcttccataaagcctgcctgcgttggttcggccgctcccctggacgttaccggcaggacgaaggcgagcaaaatatgccttatgaaaatgcaccaaccactacttatcagactgatgatcagtga

SEQ ID NO: 350033 - DNA, 756 bp, Pseudomonas aeruginosa
ttgaatacttcgaacaatccggcgcgtatagcactggtcactggtggtatgggggggattggtacggcgattagtcggcgtttgtatctggacggcttcatcgtggttgtgggatgtagcccttgctcccgacgtaagacctcctggatctccgagcaatttgatgcaggctttcacttccactgtatcgattgcgatatcactgactgggacagtacccgccaaacctttgaaatggtgcgagagactgttggttcgattgatgtgttggtcaacaatgctggcatcacccgagacggcaccttccgcaagatgtctctggagagttggagggcggtaatcgataccaaccttaccggcttgttcaacaccaccaagcaggtcatcgaaggcatgctggccaaaaactgggggcgcgtaatcaacatctcctcgatcaatggtcaacgagggcagttcgggcagactaactactctgcggctaaggcgggcattcatggcttcagtatggccttggctcgcgaggtgagtggcaggggtgtgactgttaacacggtttctcctggttacatcaagacggacatgatcgcggcgattcgcccggacatccttgagagcatgatcaccggcatccctgtcggccgtctcggccagcccgaggagattgcatcgatcgtggcttggctggcctccgatcagtctgcttatgccacaggcgccgacttctcggtgaatggtggcatgaacatgcagtga

SEQ ID NO: 350034 - DNA, 1179 bp, Pseudomonas aeruginosa
atgatcgaagtcgttatcgttgccgccactcgcaccgccatcggtgcttttcaggggagtctggccggcactcccgccgttgaattgggcgccacggtgatccgccacctgctcgagcagactgctctggatagcggtcaggtggatgaagtgattctcggccacgtactcactgccggtgctgggcagaatgccgctcgccaagcagcggtcatcgccggcttgccgcacgcagtgccggcgatgaccctgaacaaggtctgtggctcgggcctgaaagccctgcacctaggcgcccaggcaatccgctgtggcgatgccgaggtggtgattgccggcggtatggagaacatgagcctgtcgtcctacgtcctacccaaggctcgcactggcttgcatatggggcacgcgcaactagtcgacagcatgatcgtcgacggcctgtgggacgctttcaacaactaccacatgggtattaccgccgagaacttggtagataagtacggcatcagtcgcgaagcccaggacgaattcgcaaccgcctcgcagcagaaggccgcggctgccattgaggccgggcgcttccgcgacgagattgtcccggtgagtattctgcagcgcaagggcgaggtgctgagcttcgacaccgacgagcaaccacgcgccggcatcactgtagagtcgctggggaagctgaaaccggccttcaagaaggacggcagcgtcaccgccggaaatgcttccagtctcaacgacggcgccgccgcggtactgctgatgagtgctgcaaaggccgcagcgctcggtctgccagtgctggcgaagatcgcggcctacgccaatgccggcgtcgacccggcgatcatgggtatcggtcctgtgtcggccgctcgcagttgcctgaagaaggcgggctggagtctggccgagctggatctgatcgaggctaatgaagccttcgccgcccaggccctggctgtggggcgggagctaggctgggatgctgacagggtcaacgtcaacggcggcgctatcgccctcggccaccccattggcgcctccggctgtcgcgtactggtaaccttgctgcacgaaatgctcaggcgcgacgcgaaaaaaggcctcgctaccctgtgtatcggcggcggtcagggcgtggcgctggccatcgagcgctga

SEQ ID NO: 350035 - DNA, 1701 bp, Pseudomonas aeruginosa
atggacaacggacacacctttgctcactactggtcgggtcaggcgccttttatcgccagcttcatcctgcagcaactacgcttatatgtggcgcaaaatgcttggttcagcggccacgaccaaagccggtggttcgacgtacctgtcgaggcgttggagcagctgcaggctggctaccaacaacagtgggccgaacttggccagcaactgctgacctgtcaaccgttcgtgttcaacgaccgtcgctttgccagcgacaactggagcgaaccgctgttcggctctctggctgccttctaccttctgaactccggtttcctgctgaaattgttggaactcctccccatcgatgagcaaaagccgcgccagcgccttcgttatcttatcgaacaagcgattgcagcaagtgctcccagtaattttctgctgagcaaccccgatgctctacaacgcttggtagaaacccagggcggcagccttctaagtggcctattgcatcttgctagtgacctgaaggaaggaaagttgcgtcaatgtgacctgggcgatttcgaagtcggtgtgaatctggccaccaccccgggtgccgtagtgctggaaacccctcttttccaactgatccagtattcgccgctcagcgaaacgcaataccagcggccagtattcattgtcccgccggcgatcaacaaatactacatcctcgacctcggcccggaaaactctctaatccgccatctgttggagcaaggtcatcaagtttttctgatgtcctggcgcaacttcactcaggaacaggccgacgtcacttgggagcagatcatccaggacggagtgatcagcgccctgcgcactacccgggccatcagcggtgagcgccatctgaactgtttggggttctgcattggcggcaccatgttgagctgcgctctagcggtgctggcagcgcgtggcgaccacgatattgccagcctgagtctattcgccacctttcttgactaccttgataccgggccgatcagcgtcttcgtcgatgagcaattggtggccttccgtgagcgcaccgtcggtggccatggtggaaaatatggcctgttccgcggcgaggacatgggtaataccttctccctgctgcggcccaacgagctgtggtggaactacaacgtagacaagtacctcaaggggcagaagccgcttgctctggacctgttattctggaacaacgacagcaccaatctgccgggggctctgtattgttggtatctgcgccacacctacctgcagaacgacctcaagtcgggggagttggatctgtgcggcgtcaagctggatctgcgcgccatagatgctccggcctatatcctgggtactcacgacgaccacatcgtgccttggcgcagcgcctatgccagtacggcattgctgggaggctcaaagcggttcgtcctcggcgcctccggccacatcgccggagtaatcaatccgccagctagacagaagcggcactactggaccaatgatcgcatagagtcagtgcccgacgattggctgcagggagctcagcaccattctggtagttggtggagcgattggttcacttggttgtctggctatgccggtccacgcaagactgccatcagtatgctgggcagtgccgaatacccaccgcttgagcgtgcgcctggccgctatgttcaacagtaa

SEQ ID NO: 350036 - DNA, 1038 bp, Pseudomonas aeruginosa
gtgagtaggataagtaccagtctaactgctcaactagtgagcatccttgccagtgaaagtctcgacacagagcgactctgcaaagagtcaggaatagatatcgaagaactaagctcacaaagcaaattcatctcaagatctagctttcttcaactaatggatctagcagaaatcgagagcagcaacccaaacattggactgaaagcccaccatcaacttcttccaggcgcatttcaactagtaggatatgcaatgatatccagcgccaccttaaaagatgcactattggcactagttcgcttttccacgcttctaggaaacggctttaccatcaaactcacacaagagaagagtggaatgcgcctgtggcactctgacaactcagaaggcaaagcaaagaaatctcgagcatttagcgatgtaatactatcatcaaccatgggactatgccgtcgaatgacaggaggaagacgtcccatagcacgagaagtcgagtttatctaccccatgccaaaagacatctcagagcaccaacagatttttgattgcaccttacacttcgacagaaatcgaaatagcatcctattttttcaagaggcactatctattcccctaagcactgcaaacgaggcactcgcggtactccacgaaagtctggctgaacatcaaaaacaccatttaaataatggatatttcagcgagcgcacacgatcctcgctcatcaagcgactcgggagcgccccctgcgacatagactccgtagcaaaagaacttaacaccaacgctcgaatcttgcagcgcgaacttgcaaaagagggaaataacttcaaaaaaatactcgatagcactcgaaaaaaactagccgagcattatttaataaattatctatcttactcgctagagcacatatgcaccttgctaagctttaaagaaatcagcagccttcacaaggcctgcctacgctggttcggcactccaccagggagctttcgaagcaccaacgcaggaacgaacctacctagggatggtctgaaatag

SEQ ID NO: 350037 - DNA, 591 bp, Pseudomonas aeruginosa
atgcagagctcgcaggccgctctggctgcttcgcgctcgcaggtagtctcggctcaggccgggatcgccgccgcgcgctcccaggtggtcgaggcgcaatcggccatcgaagcggctaccgcaagcaccgcgcgcctgcaagcggatatcgacgacagcctgctcaaggccccgcgcaatggtcgcgtgcagtaccgcgtggcgcagccgggtgaggttctgtccgctggcggcaagttgctcaatatggtcgatctggccgacgtctacatgactttctttctgccttcgggccaggccggcaaggtcgagctcggccaggaagtgcgcctggtgatcgatgcgttaccgcagtacgtgattccagccaaggtgtcctacgtggccagcgttgcccagttcacacccaaaactgtggagactgccaacgagcgcgagaagctaatgttccgtatcaaggcgcgccttgatccggctctgctagagaagtacataacttacgtgaagaccggcgttccaggcatggcttacctccgcctcgctccacagggtgagtggccaactgacttgcagatcaaggtcccgcaatga

SEQ ID NO: 350038 - DNA, 2745 bp, Pseudomonas aeruginosa
atgacctctgccgactgcgtagcgcttttgaacggtgtcttgctgcgttatggtgagacccgagcattagacaatatcagcttggacattccggctaatcgcatggttggtttgattggccctgatggtgttggtaagtccagcttgctcgcgctgcttgccggtgctcgcaagatgcaggatggagatatccaagtgctgggcggcgacatgcgcgacatgcgccaccgccgcgccgtgtgcccgcgcatcgcctacatgccccagggtttgggcaagaacctctacccgacgctctcggtgttcgagaacgtcgacttcttcggtcgtctcttcggccacgacaaggtcgagcgcgagcggcgcatcgccgacctgctgcacagcaccggattggcgccgttcgccgagcgcccggcgggcaaactctccggcggcatgaagcagaagctcgggctgtgctgcgcgctgatccacgatcccgacctgctgatcctcgacgaacccaccactggcgtcgacccgttgtcgcgcaaccagttctgggagttgatcgcgcgcatccgctccggccgcgaagggatgagcgtgctggtggctacggcctacatggaggaagccgagcgcttcgatcacctggtggcgatggacgacggcaaggtgctcgctaccggcacgcccgcccaactacgtgagcagactggcacgcagaatctcgaagaggccttcatcgcgctgctgcccgcgagcaaacgcgacggtcaccacaagctggtcattccacctcgcccacagagtgacggcgcgccgcagattgccatcgaggccgaagggctgacctgccgcttcggcgatttcgttgcggtggaccacgtcagcttccgtatcgagcgcggggaaatcttcggctttctcggctccaacggttgcggcaagtccaccactatgaagatgctcactggcctgctgccgaccagcgagggtagctgtgccttgtttggccagccggtggaccctaacgacatggagacgcgccggcgagttggctacatgtcccaagccttctccctgtacgccgagttgacagtgctgcagaacctcgaattgcacgccaagctattccatttgccggacgagcagattggcccgcgggttgaggaaatgcttaaacgcttcgacttggataaggtccgttgcgaattacctgacagtttaccgctaggtatccgtcagcgcttatcactagcggtggcagttatccataggccggaaatcctgatcctcgacgagcctacctcaggcgttgacccagttgctcgtgacggtttttgggaactgatggtggagctttcgcggaacgatggtgtgaccatctttatctccacccatttcatgaatgaagccaggcgctgtgatcgtatctcactaatgcatgcaggcagggttctcgacagtgacactccccaaggccttatggagaagcgcggtctgccgactttggaggccactttcatcgcctacttggaggaggcagctggaggacctgtaactattgaggcacagcccacgccggaacaaccttctgagacaactaaatcagctaaatatagggggaatgatcgctttagctggctgcgtctacttagctatgcccgccgtgaggcaatggagttgcgtcgtgacccagttcgtctgaccttggcactattgggaacggggttgctgatgtttattattgggtatgggattaacgtagacgtagaaaatctttcttttgcagtgcttgatcgtgatcagactaccaatagtcaagagtatgtactcaatgtcgcgggttcgcgctactttattgaacataacccgatccaaactccagaagagcttgaccagcgtttgcgtagcggagagttgagtttggcattggaaataccgccaaattttggtcgtgacttaaagcgtggagatactccaaccatcggagtttggatagatggtgccatgccaactcgtgctactactgtccaaggttatgttcaatggttgcatactagctatttagctgaactatcacgtgaaaatgctggctccaagtccagtgcagcagcaggtgtagaggtacgataccgatacaatcctgacgtggagagtcttaaagccatggttccggcggtgattccgttgctgctgatcatgatcccagcgatgctcaccgccttaggagtggtgcgtgagaaggagttgggctcaattaccaacctatatgtcaccccagtaactcgcctggagttcttgcttggcaagcaactgccctacatcggtatgggcatgattaacttcgtactaatgcttaccatggcggtgctactgttccacgtgcctctcaagggcagtctgttggcactgactctgggggcgttgctctacgtgattaccagcacaggtctaggattgctgctctctaccttcatgaggagccagatagctgcggtgttcggcactgcgatcgccacaatgattccggctattcagttcgccgggctgatccatccagtatcctcgctggaaggtgccgctgcgttaatcggcaagctgtatccgacctcgcatttcctgattattagtcgtggtgtcttttcaaaagcgttgggtatttctgatctatggggttattacctaccattggtagctatgatactgatgctaacgctgctaagtgtgtgcctcctgaagaagcaggagatctaa

SEQ ID NO: 350039 - DNA, 1125 bp, Pseudomonas aeruginosa
atgaagaaattagcgaacatcttcaaccttggtatcaaggagttccacagtctggggcgtgactatgcaatgttgatcctgattgcatgggcattttcatttggcgtatacagttccgcaacaggagtgcctgagacgctacatcacgcctctattgctgtggttgatgaagatcagtctcaactatcaaagcaaataataagatccttccagcagccatactttcagactccgtctgagataaaccaagtcgaaatggaccatgggatggatactgagttgtacagctttacacttgatgttccaccagactttcagagagatgtgctcgctggtcgtaatccaaaaattcagttaaatgtcgatgcgacccaaacagttcaggctttctctggtgctggatatatacagagcatcatcgatagtgagataagggagtttgttaatcgctatcgaggggagcagcgtctgcccataaggttggctgtgcgctcagagtttaacccaaatttaactcaggcttggtttggggctgtaatggaggttataaatcagatcacgatgctgtcgataatccttactggggccgctcttattcgggagcgtgagcatggtactgtcgagcatttgctagtaatgcccctgactgcatttgagattatgttggctaaagtttggtcgatgggagtggtcgtgctcacggctgcggctgcatctttgctatttgttgtgcatacatggattggtgttccattgagtgggtcttttttgctttttttaacgggggcggctatccatctatttgctacaacttcaatggggatttttttggggactgtcgctcgctcaatgcctcagttggggcttctggttataataatattgattccattacagatattgtcaggcgggacaactcctcgagagagcatgcctgagttggttcagaatataatgttggtcgcgccgactacacattttgtaacattggcacaagctattttgtttcgtggggctggttttgcaatagtttgggggcagtttgcgtcgatctttattattgggctagtgttctttgtttcggcgctttggcgttttcgtcgaactatcgggcagatggcgtga

SEQ ID NO: 350040 - DNA, 210 bp, Pseudomonas aeruginosa
atgaaaaaccttatcgcagccattctctgtacattcacattgagtgcttgctctaccgaatacctgatcatgaccaatgatggtcaagtactgactaccgccgacaaacctcgactagacaacaagactgggatgctcgaattcaaagatagtcagggcaaaaaccaacagatcccccaaagtagcgttaagcagctaatcgagcgttga

SEQ ID NO: 350041 - DNA, 210 bp, Pseudomonas aeruginosa
gtggcaacctgcggcgtgatcctgagcgatcaggtgttgctgtggatggcggtggcggtggtgaccttcctctatggcctggcggccgttttgctgacccacaaactggccgagcgcatgcgggccaatccgtgtgccgtcgatttgctggagcgcttggctggagcttgcctactgggatttggcatcaagctggcggcaatgcgctag

SEQ ID NO: 350042 - DNA, 549 bp, Pseudomonas aeruginosa
atgagccccaatccctttctacgcggttacgacaagctgtccattgaactgatcgtgcacgacctgcaggcaggcagcacggtacgcgaaatgtcctacgtgattcatgcccaagaccaggaacacacgttagtgctcggtatacagccgacactggagctagctcgcgacatcgtgcagcgcttgagctttgagaccgggcacttcagccggtgctgggaaatcagcgcagagcatctgccagaggacgtgctgatccaacttttccttatgcgcaccgatctccacgccctacagctggagtttttcgagaacgccaatcaaagcgtaattggctgcaagctgcgaaacacaccctggacggatcagcacctgaacctgttcaacaccagttcggctgagctgcgtcagcagcagttggactatgggttgcccgccgagctcgtggagatcctgcacctggcagggcaggccgatgtgcgctttttgctgttcgacccggatgcggcgttgctggatgggctgccagtgttcaaggacgtggcgtaa

SEQ ID NO: 350043 - DNA, 909 bp, Pseudomonas aeruginosa
atggacaggcttgagcaataccgtattttcgtgcgcgtcgcggagatggaaagcttcatcaaggcagcgaacgccctggcgctgccgcgcgcatctgtctctgcagcggtacagcggctggaaaacaacctggggacccgtctcctgaaccgtaccacccgtagcgttcaactcaccgccgatggcgtccagctgttcgagcgagcccaggcgctcctggccagcgccgatgcgattgactgtctatttcgagagcaaaagcaacaagtaagcggccgcctgcacgtcgacctgcccagtcgcatcgtgcggcgtctggttgctccagcgttaccacaattgctggagcagtatcccaatctccaacttctgctcggctccagcgaccgagctatcgatctggtgcgtgagggcgtcgactgcgtgctgcggatcggcccgctgaccgacagcagcctggttgcgcgcccactgggcaacatagagctgatcaactgtgccagccctgcctacctccaccgccagggtacgcctcaacagctcgaggacctcgtccaaggacactggatgatcggctacggttcaccgctcaaggggcaagaacaaccctgggagttcgttgacaacggcggtcaaatacaaagcctgatgctgcctagccgggtgatcgtcaacaatgcggagagctatatcgcctgctgtcaggctgggctggggctaatccagatcccgcgcttcgacgtccaagacttgctccgggcaggcgagctttgcgaggtactgccaaacctgcgcgccgcaccgctcccagccaacctcctatacccgcaccgactgcagcgttccggtgtactgtcgttgttcgccaactggctagaggctctgtttgccccttgccttgtgaagtaa

SEQ ID NO: 350044 - DNA, 774 bp, Pseudomonas aeruginosa
atggcctacaacagcattcaagacaaggtagtcatcatcgccggtggcgccaaaaacctcggcgggctgattgctcgcgacctcgctggtcatggggcgcgtgcggtggccattcactacaacagcgacgacagcaaggccgctgccgaggagaccttgcaagccattcgcgcgagcggtgctcaggcagtggcgtttcaggccgatctcagcggggcggcagctgtcgagaagttattccaggacgtagtggccgccgtaggcagacctgacatcgccatcaacacggtggggaaggtgttgaaaaagcctttcacagaaatcactgaggctgagtacgatgagatggccgcagtcaactccaagtcagcgttctttttccttcgcgaggccggccgtcacctgaatgacaacggcaaaatctgcaccttggttacttctctacttggcgccttcactccgttctacgccgcatatgctggcaccaaagcccctgtggagcacttcacccgagccgcagcgaaggaattcggcgcccgcggcatttcggtcaccgcggttggcccggggccgatggacacgccgttcttctatcctgccgaggaagctgatgccgtggcctatcatcagagcgccgcagccctgtctcccttctccaggaagggcctgacagatatccaggatgtggtgccctttattcgccatctggtcagtgacgggtggtggatcaccggacaaaccttactgataaacggcggttacaccacaaaatga

SEQ ID NO: 350045 - DNA, 2586 bp, Pseudomonas aeruginosa
gtggaaaacggctggtcctttgtcggtagcctcgccgttgggagcgttactgtgcaaggtacagacggcagcggcaccgcctcgcgctggatcaataatggcgatacctacatcggccttgacggtatcggaacgctcgcaatcaccgacggcggcaatgtgcgcagtgtcgggaccgtcgtcgtcggcagcgagccaggctccattggtactgtcaacgtttcagggcccaattcgctctgggatgccagcgccgggcccggcccattgcctaccttccagatcggcgtgtatggaaccggcatcctcaccgtcagtgctggcggcgaggtgcgcagtgagcaagctttgctcggggcggcgccgggcgggctggggcaggtcactgtctctggagctggttcgagctggacccccctcaacaacatctacgtggggttcgagggatcgggcgccctcgaggtactggacggcggctcggtcgcaaccgagcagaccggtggcggtgccgccacggtttatgtcggataccgtccaggcgccgatggcagcgtcactgtatcgagcaccaccggcaacgtatcgcggctgagtgccaccgacgacctgcaggtcggggttgagggcgtcggaaccgtcaccgtcgagaggggcggtctggtgcagacgggagacgaggtgcgaatcggcaccgccgcaagtggggttgggactgtgcacttgaggggcgatgcgagcgggcggggcattattgaaacggcggctgtggaagcggggcccggtgccgcgacgctcgatctggatggcggcattctgcgggcgaacaaggaccaagccgattttctgaaaaacatcccgaccctgaccgttggcggcgaaggcgcctggttcgacagcaacactcatgacatcggtgtcgccaccgcttttagcggggtctcgaccttcaacaaactgggagcgggcaccctcactctgagcggcaacagtacgaactttacgggcgatgcccaggtacaggccggaaccctgcaggtggacggcattctgggggggaccatgaacgtcctgtccggagcgcggctgaccggtaccggccaggtcggaaccacgaccaatagcgggatcatcgcgcccggacaccccggaacgctgggaacactgacgattgccggtgactacgccccctcgggaggcgcaatcgagatccgcacccaactggcaggtgatgactcgcccaccgatcgccttgtaataaccggctcaacctccggcaccactcccgtccgagtgaccaatgtcggcggcgcaggagctcagacggtggagggtatccagatcatcgaggttgggggcgcctccaacggcgtattttccttggtcggcaattacacctaccaagggcagccggcggtcgtggcgggggcatacgcctatcgcctgtaccagggcagcaccagtgctaccagtgatggcaactggtacctgcgctcctcgctggataaccctgtcgttacgccccctgtagatccgccgatcacaccacccgttacgcctccagttcccccgccggtcactacgccatccggtccgctgctggcgccgactgttccgctctacgagagctacgccagcgtgctgcagcgcgtgaacgaactgggcacgatgcagcagcgcgtcggaaaccggtactggcagcccgacgccgaactgcagagcgaagcgaaggatggccagccggccatcggccgcggcgcgtgggtgagggcggagggctcggattcgcagatcgatccgtcctccagcaccagcagtgccgactacgacgtgcacctctggaagttcgaggcgggcttcgatgcgccggtctacgaaagcgaagccggtaccctggtcgtcggcccgaccgtgcactacggcactgccaattccagcgtgtcctcgctatatggcgatggttcaatcgatgtcactggctacggcttcggtggtacggcaacctggttcggcaacgacggtacctatgtcgacggccaagcagcattgagttggtacgacagtgacctgcgctcttcgcagctgggcaagaagctggagaagggcaaccgtggcaacggcgcggccgcgagcatcgaggttgggcatcgtgtggcgctgaacgacatctggtcggttaccccccaggcccagctgagctggtcgcaggtgcgctttgattcgttcaccgacgaatacagcgccaaggtctccgacgacaacggcgacagcgtcgtttcacgtctgggcgtgtccctcgaccgcgaaatacgctggacggcaagcgacggtaaagccagccgtgcgcatgtctacggcatcaccaacctctactacgatttcgccaatggcacgtcggcggacgtggacgatctgcacgtgaagagcaaagagcaagcgctctggggcggtctaggcatcggtggatcgctgaactgggatgacaaccgctcgatgctgttcggtgaactgctgggacgcaccagcctgcaggacttcggtgacagccactcggtgggggccaaggtcggggttcgcgtgatgtggtaa

SEQ ID NO: 350046 - DNA, 1665 bp, Pseudomonas aeruginosa
ttggaactgcggtcaaccggcaagagccgaacgaaccacgacgtgccactgcagcacgaacgctcgagtaccccacccatcgttcgcctggtggcgctgggtgtagtagttatctggttagcgtttgtggccattatgggatggtgggtagcccagcgccgcacagcggaagacctcgacaacttagctgcaagcgcggcatacgaagcccaaatcacggcgcgggttgtggaccgcctgttcaccgagatgaccagcgtggcgaacatggtggcccgtcagaatgaggtgatccagctcgcgacgcgctatcgctacgaccctcccagctttgcgcccctcacccgggaggagcgcgcctcgatactcacgaaggatccgttggttcgaaaggttggggacttcatggatcgactgtcccgtgatctgcgctatgcccgtatctacatgaacaacctgtcagatgatacggtcacggccagcaactgggccgagtcattcagcatcgtcggccagatctattcgggtcgggcctatctgatcgatgcattgcgtaatggcagatccgagatgttcggcatagcccggctgaacaagacaccctcctacttcgtggcaagccgcatcgatgatgcggagggcatgccactgggctctgtgacggtcaaattcgatgcgccggatgtggcgctctatctcaccggacgtcacattgcgttggtcgtaaaccttcaggggcgcgtgacgacggcctccagcgaactcttcatgctgcgtaacgtcgcagcactgctgccaccagagattcgcaggcctcaggaaaatgacgaggaagtgggccaggccatggatattcgcgcgattggagccaccgatatggatggtttgtggtcaatcgacggacaaccctacctggttcgccgccatccgttgagcaatgcgcaatatcagttgctgactatggcacctctcgaccaccaggaggcgatgcgcgcgcagacctactggatgagtgccggtgtgggactgctcggatcgatcctgatcctgctctccagtcgggtggccggccaggtgttgatacgacgtcgggaggaacgctacgcagcaaaccatgacacgctgaccggcttgaaaaaccgtcgtgcaatcctggccgacctcgatcagtacttcgctttggcgaaacgcagacggcaaggggttctggttgccttcattgatctggatggcttcaagacgatcaacgacacctacgggcatgaagtcggcgacctgttcctgatcgaaggcagccgacgcctgctgggaggcttgcgggccaccgatgagctgggtcgctggggcggtgatgaattcatcgtgatcggtttgaccgaatcgaccagtccgagcgacatggaagcagctacagcctcgatgcgccgacgcctggtgccgctcctcatgggcaactacgtctttgacgagtgcagcttcgaatatcctggagccagctttggcatcgcgagcgtagacccctcggtgatgtcgctgcaggcagcgctcaaaattgcggatcagctgatgtatgccgacaaggctgcacggcgggggcagcggatgacagagaacggccgtgcctcgggctccgacgactgcggacaaaccgataccttggcctga

SEQ ID NO: 350047 - DNA, 882 bp, Pseudomonas aeruginosa
atgatgacttcacagcacatccaaattgcctataagtccgtcgaagctgatggaatcaaggtgttctaccgtgaggcgggtgctccggatgcaccggtactgttgcttctgcacggttttcccagctcctcccaccagttccgtgacctgatgccactactggcggacaagtaccgcctgatcgcgccggatctgcccggctttggcttcaccgaggtgccgtccgagcgcaactaccgctacaccttcgacgcaatcggagagacgatccgtcagtttgtcgatgcgctggatctgaagcgttacgcgatgtacttcttcgactacggcgcgcctaccgggctgcggttggcgctggcatatccggagcgggtgagcgcgatcatttcgcagaacggcaatgcctacctcgaaggcctgggggacgcttgggcgccaattcgtcagtactgggccgatccgtcgccagccaatcgtcaagtgatcaacgatgccatcctgcatctggagggcactcggtggcagtacgtggaaggtgtaagcaatccggatctcatagcgcccgaggcgtactacctggatgcgctactgctggagcgtccgggcaataaggacattcagcttgatctgttctacgactatcagaacaacctgaagctctacccggcgtttcagcagttcttccgagacacccaagtgccaacgctggcgatctggggcaagggcgacccgttcttcattccgccaggcgccgaagcctacaagcgggacaattcgaatgcagtggtcgagttgctggataccggacactttgcgctggagactcacgtcgaacatattgctcggcgtatcgttgaagtactgggcgaccacatcaactga

SEQ ID NO: 350048 - DNA, 585 bp, Pseudomonas aeruginosa
atgaccgccgcgcttacagaactgccaatccctttggtactcgccgatcacccggcgttggacttgctgaatactcagatgatggtcgacggacagcggcgcgatctgctcaacagtgacgccgacgcgacggagtggctggatcgaatcggtattgcgctaccgggggaagccgccataggcgacgggcaattgcttggccaattgcgagctctgcgtgaatgctttgaagtcttactggtagccaggcgtgaaaatcgtgtggcggatccagcggcgctcaacgcgtttctcctgcacgctgtgccacagctggtttgggaggaggcgggcgcaccggtattggatcgcttccgtcagtctgatgccgtaagccagtgcttggcgcgactggcctttgctgctgccgagttgctggctgacggtgatttcaatctggtgcgcaaatgcgagagcgctgactgttcgctgatgttctatgaccgcaccaagtctcataaacgccgttggtgcagcatggcgctgtgcggaaatcggcataaggtcgccgagtttcgcaagcggcgtcagagcgtgggcgactga

SEQ ID NO: 350049 - DNA, 4902 bp, Pseudomonas aeruginosa
atgagttttgccattgccggcctaaccaacgccaacgagttctacagccagcactacctggacgagatcctcgagaaagacctcaagccgctgttcgaccagtggaaagagcagggtgccgacagccctgtcgcccgcttgcgcgcagcctctggtgccaacggttatttccgtgctcgtcagcgcttcttgagcgagcgcaaggccagcgagcgcgccagcctatttatcgatctggtgcagccgctcttgcaggctatcggttttgaattggccccggaaaaccttgctctcgccgatggcgagcagccggtgctggccacctaccgtgatgccaaacatcagccgttgctggtgatcgccgcagccatcgctggggtggatgacgaagagcttggtccgctgcagctcaaaccgcaggcagccgacagccaaagcaaaagtcgccaggccgacggtgactgggaagaaaccctaagtcgccgtctgttcgccgacgaccacccgccacgttgggtgctgttggtgcaccatgaggaatggctgctgatcgagcggagcaagtgggggcgcaaggctctgctcagcttcaaactgcccgacctgtttggcccgcgtgatgacaaactgctgcgtgccctcgcggccctcgccggcagccagtcggtattgcccgccgagggcggcgtggccttgctcgacagtctggacgacaactcccacaagcatgccttcgaggtctccaccgacctcaagtacgccctgcgcgagtgcatcgagctgatcgccaacgaggccatctggtataagcgcaccgtggccaaggagaaggtctacgagcgcaacgacaccgacctggccgagcagcttagccgcgaaagcctgcgctacatgtaccgcttgctgttcctcttctacatcgaagcgcgccccgaactgggctatgcgcccatcgatgcagaggcctacctaaagggctacagcgtcgagcacctgcgggagctggagcagactccgctgaccaccagcgaggcacaggagggttattacttccatgaaagcctcaagcagctgttcggcttgatctggcagggcttcccgcgccgcgcggacagcagtgggcagatggacttcacagcagcgcatgacctactgctcgacaccggctttaccatcgccccgctgcagggccacctgttcgacccggcgcgtacgccgctgctgggcagcgtcaagctgcgcaatcgtgtgctgcagcaagtgatcgagctgatgtcgctgtctcgcggcggcggcaagcgtcgccgtggccgtatcagctacggcacgctgggcattaaccagctcggtgcggtgtatgaatccctgttgtccttccgtggcttctttgccgaggaagacctgtacgaagtgcgacccgaccccaaaggtaaaaaggccagcacgggcgaggagggggaggacgccgaaatcgatgatgacctcgacagcagcgatgaaccagaaagcagcaaggcagacaagaagaaggtcgccgagctcgacccgctagaagctgcctatttcgtcccggccagcgccattggccagtacaccgacgccgagcgcctgtttggcggcaacccgcgcaaatacgccaggggcacttttatctaccgtctggccggtcgcgcccgggaaaagtccgcctcctactacaccccggaagtactgacccagtgtctggtggagcatgcgctgaaggaagtcctccccggcaaaacggcggatgagattctccagctcaccatctgcgagccggccatgggcagcgcggcgttcctgaatgaagccgtcaaccagcttgccgaagcctacctgcgggccaagcagaaggagctaggccagagcatcccgcacgagcagtacaccgaagaaaaacagcgggtgaagatgtacatcgccgacagcaatgtcttcggtgtggacttgaatcccattgcggtggagttggcggaggtctcactttggcttaacgccatctttaagggcagccacgtgccctggtttggcctgcagctgtacaacggcaactccctggtcggcgcccgccgcgaggtgtttagcatcgtccagctcacccctggcagaggcgagaacggcctgcccgagcgcgattggcgtgtcgccgcgccccactcactgccgctgacgcaggcgccgaagaccactgatatctaccacttcttgctgcccgctgaaggaatggggatggtcagtgacagagtggtaagggcactggagcccgctgccttcgagcagtttaggcaatggcgcaggtcctttatcgcgccactgaccaaggatgaggtccgtcgcgtgcagaccttgagtcaagctgtggaaaagctctggcaacaacatgccgaagagatctcaagggtgcgcaaggccacctgcgatgagctgcacgtttggcccgacctgaccgctaaccgtgcccctaccagcaccgcgcagaaggacgaaatctacaagcgcgaaatgctcagcgaggcacagaaaaacgccagcccctaccgccgcctcaagctggtaatggacgcctggtgcgccctgtggttctggccgctggacaaggccagcgagctgcccagccgcgagcactggtggtttgtgctggaaaccgtgctgctgggtaatgccagtcttgccagcgcgccaggcgatgacctgtttccggaaaccacgccgcaacaggggctggactttaccccagagcgcgatcgctatggtcatgttgatatcgctgcgctggtcgaggcgttgccccagttgcaggtggcgcaacaggtggccggtcagcagcactttatgcactggccgctggagtttgccgatgtgttcaaagcccgtggtggcttcgatgtgatcctcggtaacccgccgtggatcaaggtggagtggaacgagcagtcgctgctgtcggacttcgatccccgctttgccattcgcaagctcagtgccaagcaggcggcggatcagcgtgaagttgtgtttgcggtcatgccacaggcgcgggctgattatgtaagtgaatgcgtggctactgagggtttgggtgtattccttaattccatccagaactaccccttacttagggggcagcagaataatctgtataaatgcttcctacctttggtttggcaggtggggagtggtgtgcaggcgctacttcaccctgaaggtgtatatgacgatcccaagggaggcttgctccgggagaagctatatcttcggttgcgagcgcattatcaatttgaaaatcagctgatgctttttgcggaggtgcatcacaatactaagtacagcatcaatgtctatggtgcgcctctgcctgtgccaagtttttttcatatagccaatctgtttgcgccaagtacggtgcttgctagtctacaaagttctggtggcggatttgttccgggtattaagagagatgaaggtggctggaatacttcgggacatcttagtcgtttgatcgatgtgaatgaaactctgttagccacgttttcccagttatatgacgcgccaggcaccccccttttgcaagcgcgactccctgcggttcatagtcaggaacttgtatcggtgctgaggaagttctctgaggcctcgaagcgaatcggggatttgcgtggtgagtatttgccaatcgatatcttctggcatgaaactgaggctcaaaaagaaggagtcattcgtcgttgcacgggctttgtcggcgatgagagggatttggtgatgtctggtccgcatttttatgtggctaaccctctaagtaagactcctcgctctgtctgtacgcttggtagtcactatgacgttatttatctcgattttttgccagataactacgttcctagaagtaactatgtgcctgcttgtgaggctgaagcctaccgtgcgcgaattccccgtgttgattggcaagagggagggcaaaaagaatcacggccagtaacggaatattatcgcttgatccatcggcggatgctcggcttgccaaacgagagagcgctaattgcgtctttaattccaccgggagcggctgttatcaatacttgcataactactgcttttaaggatgaaagtgttcttgttgcagttgttgcatcattttcctcgctttcttttgatttttttacaaaaattatggggcgcccagatttgtatggtgagggcttggcgaagtatccattcatatctgattcaaggatggttttacgagctttagcactgaactgtttgacagttcactatgcgaatatttggcgaagaatctgggatggctcgttctctcaggagcgttgggccagcatcgaccctcgactgccccagggtttctttgcccagctcacccccgaatggcagcgtaactgcgccctgcgcagcgactacgcccgccgtcaggcactggtggaaatcgacgtgcttgccgcccaggccctcggtctgaccctggacgagttgctgaccatctatcgcgtgcagttcccggtcatgcgccagtacgagcgcgacacctggtacgacgccaatggccgcatcgttttcacctccagcaagggcctggtcggcgtcggcttgccacgcaaacccggtaagaaggacgaaccctgcaccctgatccaccctgacggccgccgtgaaaccaaacgccttggctgggacgacgtgatgcctaaagacggcaagccccagctcgccgacggcactatcattgagcgtatggtgctggacgacacccagcccggcggaccgatcaatcgcatcgtccgctacaccgcccccttcaccctcgccgaccgcgaagccgactaccgagtggcctgggcgcattttgaagcgagaggtcagtga

SEQ ID NO: 350050 - DNA, 912 bp, Pseudomonas aeruginosa
atggatgcgaaaaatcttgttgtactcatgcaattaaaaaaagctatgcaggaaaatgcgcagaaagagcgtggtgcacatatccctggtcaaggctttagcgaggcgtcggaagaagtatttcgggagctagcgcgcaggaatctttctaggtcaaagaatcaaaagaattcggaccctatttttacacctgccaaattcgactcgactgctatagagacgagagtggctgaagtagtaaagccggaaagtgatcggacgcttcatcggcagaataacaaaagaggaagaaaccctacgtttagaggagttgaagtaacccctgagcactacagggccttggttgatgctgcttcgagttttagtgcgcgtgacaagttggtaaaaatggaggcgctcgccttctaccttgaaaaggctcctaatgataaaggagccttgaatatgtttgcccgaataagcgcactggaagatcccaagccatccaagagaacgcgcaaggcttctaaggaaaaagggagtagagtaaaagcacctcttgatatagaaaaaattaaatattcaaactgtgaggtgtgtcaggagcgcctgatagtgacggagttcagaaagccaagtgcccgcgtcctatgtggtaaatgcagggcggaaatggatggcaggaagaataaatctaagctcagaatagtggatgagtctgtgaggaataagaagattgctcagatcgaaaagtccatagcagcaatgaagaagcagatcgaggagtccgggggcgatcctagtagacctcgccccgggctggcaaagctagaacgagcactggaaattgaacgccttcatgcggtttctgggttgagtaaacttcgttgtaagattgttccgggaagttatgggaccggaaaacggacgtag

SEQ ID NO: 350051 - DNA, 192 bp, Pseudomonas aeruginosa
atgagggctgagctgacacagcaagaggcgcgagtggtcgacctgctcgctcaggcctggaacgagtacctgcagctcccggtggagcattcagtcgaggcgccggagttctgcgtggccatccatcgatgtcaggacatggtgctcgccagatgcggtcgtcgggcgctgaaccgtcggcggggcgactag

SEQ ID NO: 350052 - DNA, 984 bp, Pseudomonas aeruginosa
atgacgattgacgcaattcgagataaggtgcaaagacttaagggctctcagcatactacagctgtcatgtatttcattcttaacgccgctggggtttttaggctgcggaaagtaagtttaacacaagacgcacagcaagaggctacaagagccctcattgaggacttggagcagttttttaatggtgactatgtccttcgcgatctaacgaacgcagatcagcgagataatgccatatatgcttataatttaccgagaaaacctgagcaactagagcttctaattttatcctttcaagatcaaggacaaactccagagtttgatcatgtaagtgattcactggcagatgtaaaagcaatagtcttaactgtaggggatgggcaagataaattgtccgtctacaaacatcacttcccaaccaatacttatcgtcattctggatttagtattcttagggtgggtatgaatcaaaataggttcaagcaactggacgaggatattgttcgtgttggtcgttcgatagatttcttatatgatggtgctagtgtttacgttacaaatttcaaaatacttgagaggttttttggttttaaagatgtaattaaagcagaggcggagggtaagctcaatcagttggcagagcgaaatatcattgaaaatattgaggttcttagagagcgaatagttgagattggcgatactacttttagcaaaaaaatcatacgggcacttgttcactcgccggtgcttgatagggtaggtaatgatagaattattaggtttgttaggggacaccacattcttgggaagaaaataagagttaatgatgctggtactcagtttgatttagataccaaaatttctcaaaatttctttattaagcttctaaatgatgattatttaaagtctgagctaaccaattttgattatgatgccgacagtaaagatattgttgaggtcgaaaatgacaatgcgaatgcgtaa

SEQ ID NO: 350053 - DNA, 732 bp, Pseudomonas aeruginosa
atgcgccggtccaaaagaaccaacacgctggttatcgtctctaaccatgtagagtcagtatatgacgatcgttggataaacgacgtgctgcactacactggaatgggtcaggttggccctcaaacacttgaattcaaccagaacaggacgctgagcgagtcacctaccagcggcgtagcggtccacctgttcgaggttttcaccaagcgggtttacacttatattggtgaggttgttctggccggagatccctatcaagaacagcaatcagatgcagaaggaaatgatcgtccggtatgggtattcccgttacggctgaaggcgggctctttgccggaaataccagatattacattgaaagcgcttgacgaagttaaagagaaacaggctcgccacctaagcgacgatgaggtcgagagattggcaaaacagcagggacagacgaaggtcagcatgcgaaacgtcagcactactcaacaccagcgctctccgtgggtggcagagcacgcacggcgccgagctaaaggccactgtgagctatgtggtgagccagcgccgtttaagcggaaggatgacacgccctatctggaaacccaccatatcgaatggcttgcgaatggcggagcagacacgattgagaacaccgtggcactttgccctaactgccaccgaaaaatgcatgttataaatagcgaaagtgataaaaatatactttcagagaaagccatttaa

SEQ ID NO: 350054 - DNA, 1176 bp, Pseudomonas aeruginosa
atgtgtaagacggatggtgtgatgcgtttttctattattattttaatgctttttgggggtgctgtccctgtagtaataattactacctacttttgggttttttcaaatggtggttcaggattatcaaatagaccagaagattggtcggcgtttggtgctgttttggcaggagcatttactcttctcagtgctatttctacaacgcttgctctggtctttgtgagtgttcaaacaggcctggctaggaagacagcggctcgccaaattgagtcgttgactctggagcagtatattagtcatagaaaagttttcagcgaaagactggaggctgtagagagacattttgaaggtcgtatttcgtttctggctcttgatgagttgtatgggcgagtgtttcccaaaaataatccggtgcattttgaggcgagagtggatacctcgaatgataacagtggtcggcttgctcatttaattaaagtttatgaagcgctgtatgatgctgctgtggatattcgagaaggtaaaactgggcaggttcataagtttttacagagatttctaagcttccaagacgcgctgggaattatagttaaggaggtggagcctattggggtggttcgtcataggaaatttgataaggcgctcaatatattttccctcatggagtcgttgaagcgggctgaatatgttttaaattcttatctcttttattccgcaaataaaacggttgggagatttcgtgccttagatgtaggtgagcttgttttctgggttatgtatgagctaatgcatgaaggtgggaaggcgataattgtagagcttggtgatgagggggcgactgatagatttaggggtcatagatttagggttgatagatttaggaagttcttgattatgtataaaatatgtatcgagggaggtaagatagtatctgggggtagtgggggggtaagtgcgtcttatatatatggtgaggctttagattgcttgaggcgaattttgtctacttggagtcttcttaaggaaggggttctagatttgtgggggccttggcttgtggattttgaaaagtatgtgaaattaggtttagatcgcgacgtggcacacaacggagaagatgaagctgaaagccgtagggttaaatttgaaaaaattcttggttctttaaaaatgtaa

SEQ ID NO: 350055 - DNA, 1119 bp, Pseudomonas aeruginosa
gtggaaacacctagctcgccgccggcgctggggttggtccctggtggagtgttgccagtggcaacacccaattccccgccggcgccgaggtcgatccttggcagagtggtgcgggccgcaccacccagctcaccgtcggcgccgaggccaggacctggcagagtgtttcgggccgcaacacccagcttgccgccggcgccgaggccaggacctggtggagtgttgcgggccgcaccacccagctcaccgtcggcgccgaggccaggacctggcagagtgtttcggcccgcaacacccagcttgccgccggcgccgaggccaggacctggcagagtgtttcgggccgcaacacccagcttgccgccggcgccgaggccaggacctggcagagtgtttcgggccgcaacacccagcttgccgccggcgccgaggccaggacctggcagagtgtttcgggccgcaacacccagcttgccgccggcgccgaggccaggacctggtggagtgttgcgggccgcaccacccagctcaccgtcggcgccgaggccaggacctggcagagtgtttcgggccgcaacacccagcttgccgccggcgccgaggccaggacctggtggagtgttgcgggccgcaccacccagctcaccgtcggcgccgaggccaggacctggcagagtgtttcgggccgcaacacccagcttgccgccggcgccgaggccaggacctggtggagtgttgcgggccgcaccacccagctcaccgtcggcgccgaggccaggacctggtggagtgttgcgggccgcaacacccagtttgccggcggcgctgaggtcgatccttggcagagtgtttcgggccgcaacacccagcttgccgccggcgccgaggccaggacctggtggagtgttgcgggccgcaccacccagctcaccgtcggcgccgaggccaggacctggcagagtgtttcgggccgcaacacccagcttgccgccggcgccgaggccaggacctggtggagtggttccagtggaaacactcatcttgccgttggcgccgacttgggtatctctaccgttggtaatctggttggcagttcatgtagttggctttgttgcatga

SEQ ID NO: 350056 - DNA, 195 bp, Pseudomonas aeruginosa
atgggctgcttccctggcgcgctgctcaccagcctgacgcagcgcggcaatctgcccgccctgctccgccactgcggactccaactctccccgggcggcgcggcaggcgaccaagtccgaccgcgcagcatcgagctgcggccggtagtgccgcgcgccgatcccaacaccgccaacggcaccgaggccgactag

SEQ ID NO: 350057 - DNA, 669 bp, Pseudomonas aeruginosa
atgtcagagaatgagaaaccgctgaggtggctgcgccggcaggatggtgagtgggagtgggcagctgactacctggtgcaacgactcgattccgagtacataaagtcgatagcgcccaatccgaccaatcgactgggaacctacgaaaacgtggtttctgccatcggaaaaatccggaagaatgaccctgagcttgtcatcagactgcagggcgctgtacggcaacgtcggtaccggtccgatagcaacggcaggaagccgctgacgttcacccttagcaaagaaaccatctctaggttgaagcatcttgccaagcggcatgagacaagcgaaacggccgtaatcaccgcgcttatagataaggcagggcaagcggccgaagccgagaagaactacgaaaaacagctcaaggaatcaatttcaagggagcgcaaaattgccggccagataacggcgtccatgagcgctcaacgggacgaagcactaaaacacgtagagcgatacctgaggcttctcgcccagtgggagcggaagtaccctgacggaataccctcttctgacagcgacgacgacatcaacgagcgtattgaggccagaatgaaggaccttaaaagcgcgctggcctacatggacctcagagaccgcctgaccactgaacgcccgacctaa

SEQ ID NO: 350058 - DNA, 1509 bp, Pseudomonas aeruginosa
atggctcttctcttcgaaagcctattggatgcagattcttctttttcacctgatactcgcttcatattagaagtcatagccagagatccagggtactggcgagattcagcgagaaagcggagcgtgaagccgtttgcgaagacgctccatgtggaggagaaagtcgtctctgccgcgttgaacgagctagtcgatgccggtgtcatgaagcatcatgttgtcccacgagcgggaagcgcagggcgggcatcggttgcctacacgctaggttcgtgtcatgtggacgcattgataggggatgactcctaccctcaacatgccgagctgttgcaggtgctgttctcgggcgcggacatggcttttcctgtgctcggacgtgagcctgatgagggtgacgaacaagacgaacaagacgaacaagacgagcaagacgaacaaggcgagcaagacgaaaaagacgaaaaaggaggggggaagatggctgcggagaagcctaaaaagaagaggcatccgccgccaggtggtcgtgggcggctgagcatccgtaatcgtctgctttttgcggttttgctctctcgctctgatcagtttggtgaggtacagatcggattccctgaactggcccagctcacgggcatgaagcctacgcaagttaaaaatcgcctctttcgcctgatgcaccttgggctgattcgtcgttatgtggcggggctttcgagcaaggttttcgccttgcgcaaagtcaacagcacctacttcctgaatatcgatgccctcgggccgcagggaagtattgccatacacatcgcacgagacccggaggctaagaggtttatccatgctgaccttcttcaaggcgattgtgcgaaagccatgaggggcgagtccgacggagtaaggacacccagcagccttctccagctcttggctgggcaggaatggggagtcttttccctgttccaacatctgctctccaggtacgcctctcatctgctatctcgccactggcaagatttgggttctggggtgcagattgaagacgcggagctgatgacgtctattaagaaggacttcatcagggagccacagcttggggcggtaagtgaaaccgatattgagtcagaggagggagccagcagcgaagctccgagtaagctgaaagatggagcaggtggtgatgccgagcaaacctgcgagagcatctactcgctggcgatggatatcgcacgtgagtaccgggagcgatttggccaggctaactgggtggacttcgagtcggcggatgttcgaattcttccggcgaagcggcggaccggatacagagccattacgctcatgctccagccggcgcctgtggatctcggccgcttcacggtgtttttcgagggccctcggggaagtttgaaagtagggctggcgaatgatgagaccgaaataaccctgaagagtcgattgcggttcgggttggccaccttgccgcccaaggcgagaaaggttcgggcgcagtaa

SEQ ID NO: 350059 - DNA, 372 bp, Pseudomonas aeruginosa
atgtcgaagcttgctgagttccgtgccgcagaaaaggcccttgctgaccaactggcttatctcgaatctctgaaaaacgataactccctcaaaaaggaaatcgagtttgaggaaaagctgaaaacgctgatgggcgaatatggcaagtcccttcgtgacatcgtcgcgatcctcgatccatcggcagttggcgctgtgagtgtccgcggaggccgtgcatcgcaatccaagcgccgtgagcgtgtggtgaaggtctacaagaatccgcacactggcgaagtggtagaaaccaagggtggaaatcacaaggtgctgaaggcttggaaagctgagcacggtaacgatgtggtcgagtcttggctgcagtcctag

SEQ ID NO: 350060 - DNA, 525 bp, Pseudomonas aeruginosa
atgcccgaagacgaccgtattgctccacgtctgatcaagaaatataccaatcgacgcctatacgacacccacaccagtacccatgtcaccctgggcgacatccgtcgactggtcatcgatgaagtgccgttccgggtagtagacgcgaagagtggcgaggacctgactcgaagtatcttgctgcaggtgattcaggaggcggaaagcgatggcgagccgatcttctctagcgacatgctcaagggcatcatccgtttctacggcccgttccagggtatgctcggcaactatctggagaagagcattcagaccgtgatcgacatccaaacccagacaggggtgcagtcctctcaggcttggagtgactttatgcacaaacaggtgccagtcatgcaggatctgatgagtcagtatgtcgagcagtcgaagaagctctatctggggactcagaacctgttcggcttgttcggtggcatcccacccagcaattctaggcagaagaaaaaagacggtaatgaccaatga

SEQ ID NO: 350061 - DNA, 135 bp, Pseudomonas aeruginosa
atggacaataatagcaagggcgtggagctttcacccgagaacacgcttgcaccagcgcagcgcggcatcaagttgtcgtttgacacctacgggccggaagcttcggatggccttgagcgtgtgtcgcagacttag

SEQ ID NO: 350062 - DNA, 264 bp, Pseudomonas aeruginosa
atgaccaacatcaccacttacggccaaaaacatcaaaatagggctggactgtcaggatatgttgccgagctgggggcagcgttcctcagcgcccgcctgggcatcactgcagaaccccgcgaagatcacgccaagtacctggccagctggatcaaggtcctgaaagatgatcgcaaggcgttcatcaccgctgcatccaaggcagccgaggccagcgattacctgctggccctggccaatcaggagcaaaagcaagcggcctga

SEQ ID NO: 350063 - DNA, 267 bp, Pseudomonas aeruginosa; identical to SEQ ID NO: 338387

SEQ ID NO: 350064 - DNA, 792 bp, Pseudomonas aeruginosa
atgaccgagcgcggcatgggtatcacccgggcctgcgggctcgtagggatttctcggtctctgtttcactacgagagccggcgcacgggcgatgcggcgctgactgaacgcatgaaagagatggcggcggtcaagcggcgctatggttaccgtcgcatccacgtgctgttgcgccgcgagggctggcattcgaatcacaaacgagtttggcggctgtacagccaagctgggttgagcgtgcgtcaacgcaagcgcaagcgcatcgcggcaaccgagcgcgtggttcgtccagcggcgaccgggccgaatcagagttggtcaatggactttgtcgccgacggtctggcctatggtcgccggttccgctgcttgaatattgtcgatgactacactcgcgaatgcttggccatcgaggttgatacgtcgctgccgggactgcgggttaccaacgtgcttgaacggttggcagaaatgcgtggcctgcctcgatccatcaccgtggacaacgggccggagtttgccggcagggcgttggatgcctgggcctatcaggcaggagtcaccctgtcgttcattcggccaggcaagcccgtggagaatgcctacatcgaaagtttcaatggcaagttccgcgacgaatgcctcaacgagcattggttcctgtcgcttcgcaaggccaaaaccttgatcgaaaactggcgggtcgagtacaacaccgatcggcctcacagtgcgctaggatatttaacccctacgcagtttgcgcaggcacatcaggaaaaaatgctttaa

SEQ ID NO: 350065 - DNA, 384 bp, Pseudomonas aeruginosa
atgaccaccgccaccatcaccgcacacggactcgtgggccacctcggccggggagcagctccgcgcgagttggaatgcctccttgcggtggccgctgggaagtcctcgaaagaggccgctcgggtgcttgggattgcggccggtacgatcgacaagcggttactggcgttgagcacgaagcttcacgtcactcgccgagccgcgatggtcgccgaggcattcaagcgcggaatcctgacccatgcggtgtttgccctagccaccctggtcggcttccactcgattacgaatgacgacccgaccctgcgcaaccgtcgcggcggggagcgccgagttgaggttcgtgtagtcgctcgacgcttggaaagcagtcacacagtttga

SEQ ID NO: 350066 - DNA, 2547 bp, Pseudomonas aeruginosa
atgagccaggaaagtttttttgcaaagcgagaagagagtttttcctcattccataatctgttcgaacacctcggacgcctacagcagctgcacgggaagctcctgctcgatgcctttggccaacgccatgagacgctgctcgcgcccctgagagaaggtcgcctgcgtgtccccagcgcaggcgattgctgggaatacctggtcgacttcggacagcgaggcctgctgttctgggatgcactgcgccaacgtggcgacaataccctggcccacgagcgcgccggctatcccctgctgctcaagtttccctatgaggtgctgatcgacggccatgacctgccccacccggtcaactactccctgctacacatccttccaggggatgaacatccgagcgatgccacgcgccagccggtcatcgtcatcgacccgcgcggcggtcacggtgccggtatcggcggcttcaagcaggactctgaaatcggcgaaagcctgcgcgccgggcacccgacctatttcattgctttcagccatgcacccgcacccggccagaccctgattgacatcgccgatgctgaggcccgctacatcgaaacagtcagcgcgcgccatccggagtccggcaagcctgtggtgattggtaactgccaggccggctgggcgttgatgggactggccgcggcacgtccggaactgccagggctggtgatcatcaacggtgcgccgctgtcctactgggctggagtcaacgggcacaacccgatgcgctatgccggcggtctgctcggcggcgcctggatgacccgcttgggcagcgacttgggcaatggccgtttcgacggcacctggcttgttagcaacttcgagaacctgaacccggccaatacctactggagcaagtactacaagctgttcagcaacgtcgataccgaaaccccgcgcttcctcgatttcgagcgctggtggggcagcccaaccctgctcaacagcgaggagatcgaggtgatcgtcgacgacctgttcatcggcaaccgcctggctggtggttccgggcgcaggaccaccagcatcgacctgaaacgcattgaggcgcccgtggtggtgttctgctcatacggcgacaacataaccccgccgcagcaggcactgaactggatagccgacgtctatcccagcgacctggcactgcgcaacgctgggcgcactatcgtctacctgcagcacgccagcatcggccacctgggcatcttcgtctccggcaaggtcgcccgtcgtgaacaccggcaactgctcggcgccatcgatgccatcaccctgctgtcgccaggactgtacgagctggtgatcgacgacctgccggcatccgccagtgacgaccaggcgtatcaggtacatttcgaatcccggtgcatagccgacattctcggccacgatgaggatggccttagcgacgaacgtgaattcgccctggtcgatcgcgtctccggattcaacagtactctctacgactggttcgtgcgtccctggatgcacagggcgatcaacgaaccactcgccgaatgcttgcgcaagagccatccgttccaccagcagcaagtcgtctggagcagtctcaatccaaccctctggtggctggcgggccatgcagccctgacgcgcgccaatcgccgcccggcatcacccgacaatcccctgttcggctggcaagaggcattctccagctcggtcgaggctctgctcgatggctatcgtgacgtccgcgacgcggtccaggagatgctcttccatagtttctacggtgggcttagcaccctgactggcggccagacaccacgctcgccgcagagctacgtagagcagcgcgataaggctctggtcgagcatctgcacaactcgcttctcaaggggggggagcaggaagcgctcattcgtattctctgcctgctcgcgcatgcaagcggcagctttggcaaggaacgtatcgaacagctcgcccagcaggcccgcgcgctctcgcaacaactcggcatcgacccgctttccgtgcgtgacagcgtccgcctgcaggatttactggtcttcgccctccccgaagagagtttgaagatgttgccattgttgcttcccgaggctaggcagcgtgaggcagtgctggcagccgccgtgcacctcgtgcccgaactactctacgccgagggcgcagtgggcgaactctggcgccgtttgcacgacctgcttgaacaccccctgccggccttcgcacggccatccgttccgctcatcgctgtggacagcgcgccagaacaagccccgtcagggctgctcctccccgaggcggatgtccatgcacccagggccggcgcacagccaaggaagaaaaactctgcccagcctactgaggcgcagatcgataccagcccacccccagtggcggccgagagcaagggccccgtggccgcggtgaaaaaagcgggacgcgccaaggcgacccgctccgtgcccgcccatgtccccgcgagcaaggacaaaggaggccgcgccgaatga

SEQ ID NO: 350067 - DNA, 933 bp, Pseudomonas aeruginosa
atgagccaggatcactaccagcagttgttgaaccgctgcgccgaaattggcccgcttcccaccatcgttgtgcatccttgcgaggagaacgcgctgcgcggggcgctggaggccacccaggccgggctgatcgccccgattctggtaggcccgcgtcacaagatcgcggcaaccgccagcaaggccggcctggatatcgatgggttgaccgtggaggacgtgccacacagccacgccgcagccgagcgtggcgtcgccctgatccgcgagggccgtggcgagctgctgatgaaaggcagcttgcacagcgatgaactgctgcatgctgtggccgaccgcgaaagaggtttgcgcacggaacggcgcctcagtcatgtgttcgccatgagcgtgcccagctatcacaaagcgctgttcgtcaccgacgcggcggtcaatatctttcccggcctggaggacaaggccgatatctgccgcaatgcgatccagatgctgcacgtccttggcatcgaccggcctaaggtagcgctgctgtcggcggtggaaaccgtcacggccaagctgccttcgaccctggaagccgccgcactggtggtcatgtcccggcgcgggcagatcgacggcgcgctgctcgacgggccactggctttcgataacgcgatcaacgccgacgctgcgcgagtcaagggcattcattcagacgtcgccggtgatccggacatcctgctggtgccggacatggaagcgggcaacatcctcgccaagcaactgatctatctggccggcgccgaggcggccggcatcgtcctcggcgcccgcgtgccgatcattttcaccagccgcgccgacagcccccgggctcgcatcgccagttgcgggctggccgtgctgctcgccgaggcgcggcgcacccgcctgggggtgcccgcatga

SEQ ID NO: 350068 - DNA, 1209 bp, Pseudomonas aeruginosa
atgagccccgttcaagacgaactgatcgtcaccgttaatgctggctcgtcgagcatcaaaaccggcctgttcgccggccgccaaggagaggaacagccacgtttgctggcgcgcggcaagctggacggcattggcgtggcaccgcgcctccagatcgtcatggccgatggaacggtggtgcaggacgtagtctttgcgccggagcatgttgccgacatgaaggcggctttccagcaggtctatcgcgcactgaaggaaggcctgcagagtcgcccaccggcgctgatcggccatcgagtggtgcatggtgggatggaattcagcgacccggtacgcgtggatcttgcaactctggcgcgcctgaggacgctggaacccctggcgccgctacatcaaccgcacaatctggcagctatccaagcagcgctcgagcacaatgcgcatctacctcaggtcgcctgtttcgataccgcgttccatgccgggcgcagtgaaatgagcctgctcttcggcttgccttacgcgctgtacgaacagggtgttcgccgctacggcttccatggcttgtcctttgaatatgtcagccagcgcctgatcgacagagcaccagagctcgctgccggcaagctggtcatcgcccatctgggcaatggttccagcctgtgcgccatcgaggccggccgcagcgtcgaggtgaccacgggcttcagcgccctagacggcctacccatgggcagccgctgtggcgccctggatcccggcgtactgctgtacctgctggatcagggcatgcaggttcgtgatttggagaagctgttgtatcggcagtccggcttgctcggcatctccggggttagcagcgacatgcgcaatctgcgcgccagcgacgacccgcgcgcagcccttgccatcgactactacgcctaccgcatcgcccaggaaatcggtcggcttgccacgtgcctgggtgggctggacgcgctggtattcactgccggtatcggcgaaaaggatgccgcgctgcgtgcccaggtactgcagcatctcgcgccactctttgggctgcgtctcgatgacgcggcaaaccaatgcaacgccgagcgcatatccagcgccgccagcacacgggccgtgtgggtcatccccaccgacgaagagagcatcatcgcccgtcatgcctggcgtctgtatcaggatcaacacttatga

SEQ ID NO: 350069 - DNA, 762 bp, Pseudomonas aeruginosa
atggaaaccaagcaggaaacgccgaaggccaagccggccatcgtgccgcaaagcgcggcctctcacatcgacagggccctcgctcagccgtcgaccgcgtcaacgcaatcgtcgccgccaacgaggctgcccgacaggctgctggaacggctctgggtgaagatgaccgagatgtacgggcaccgctggacgtcgagttttggcgacaacccgaatcctgacggcgcctgggctaccgtgctccaggggctgaccggccagcaactggcccacgggctcaacatgctgacgttcatgggcagccggttcgactggccgccggcggcgccgacgttccgggaactctgcttgagcgtccagccggagtcgctcggtctgccggaccacgacaccgcattccatcaggccctggcgtgccgctaccgccaccaggtggtcaaggccgccgccgaggcgaccggcgttttcgatctgcgcaccggggaggtgaacgacgatcgcctccgcaagcgcttcgggttccactacgccgagatggtccggcgctgggcgaacaacatcccgctgagccagcccgtcgtccacgcgatcgagcatgacaccgggaagagcttactggacctggccgaggatgaagccgagcagcagctccgccggcggatgcaggcccagggcctggatgggctcagtggcgcccaggcgcgggaactgctgctggccaagatgcgccggaaagcgccggaggtgcgccgtgatgcatga

SEQ ID NO: 350070 - DNA, 798 bp, Pseudomonas aeruginosa
gtgaccatcgacaccgacgaggaccttctctactgggtgcagcccaaggatgggaaaccattcccggtttctccggagaacatgctgcatttcaagatattcagcatggacggcatcgtcggcttgtcgcctatcgagtaccaggcggagaccatgggtctggccaaggcgggccagcaatggtctgcgcgcttcatgcgcaagggcggatttactggtggctacatcatcttcaaggagttcctgaccgagaagcagcagactcaggttatggcgcgcttccctgacgtgcgcaagggcgatgccgacgacctcggcaagatagctgtcttgcagggtggcccaacctttgtaccggccggtcttagccagaaagacgcccaattcatcgagtcccagcagttccaggaggaggcactggccggcatttacggtgtgcctctctggctggccaaccgggccggcaagacatcgatcatgggctccaacctggagcagcaactgatcggcttcgtcacgttcggcctaaaaccctacatcgacgcggtcgaggacgagttcaacgacaagctgtatgggcgcacctcgcgcttcgtcgagttcgcggtggaggggctgctgcgcgctgacagcgccggtcgcgccactctgttcgctgcggctcttggtggctccggtggttccggctggatgaccatcaacgaagttcgccgcaaagaaaaccttccgccacttgatggccctgaatacgaccgggtctcccggtgggagatgcagaccaatgctcagcaaacttga

SEQ ID NO: 350071 - DNA, 318 bp, Pseudomonas aeruginosa
atgcaacagaaaacccaaaacgcgcaacccccgcgctctgctcatcaactcgcatcagacctgctggatggcctcgaagccgctgttgagaccgtcaaggggctgcgcgccatccttgcactggtccgtagagatgagcagtgcagcagttacctcaaggatatctgcacgataggactcggtcaggccgagttcgtcggcgggaaccttgaggatgatatgagacaggccgacgcagaattgttcgaactggagcgtgtcgcgacccaatccggaaatcctgaaagcgtgtcgcgacacgaaggcggtgcggcatga

SEQ ID NO: 350072 - DNA, 567 bp, Pseudomonas aeruginosa
  misc_feature (141)..(141): n is a, c, g, or t
atgtcttttttcgattcggaaaaactgcaaagcgcacagaaagccaaccttgacctgttgcagcagatcagcggcaaagtattcgagagcgtcgagcagctcagtcagttgcaattcaaggcgctacgcgcttccagtagngagcagttcgacagcctgcgcaagctgctgtcggtgcgtgacccgcaggccttcgccgagttgcagacgtccttcactcagccagttgctcaggctgagcgcctgctggagttcaatcgagaggtgtatgacctggtctctagtactcagacggatattgccaagctcgccgaacgccaagtcgaggccggtgccaagcatgtgcaggaattggtggatgtcatcgccaagaacgccccagcgggcgcagagccggcggtagccgtcctcaagtcggcactggaaagtgctggcagtgtctatgaaagcgcacagaaagccgccaaacaggcagccgagatcgccgagaacggcatcgcagccgccgcttccgcggcaggtcaggccacccgtgaagccagcaagactgcgggcgggcgcaagtaa

SEQ ID NO: 350073 - DNA, 375 bp, Pseudomonas aeruginosa
atgctcgacctgttcgcccaggtgctgggcatggccaacgccgtcgccgagaactgccgagcgatggtcgagttgatcctcatcgagcgcggtgaacacccgcacaccgcggagcaggcgaacctgccgacgatgttcggagcgctgcaaggcgttgtcctggccgccactgtggacccacgcggcacgtgcgccggctgtgcctatcgcctcggcaccccggcgaacacctcgccggtcaccaccaccgatgccatctactgccggcaggaactcagccggttctactgccacgccgacctggacgaccagggaaacccggtccgcacctgtgtcggccacgccaaagccatgaagcaagacgccacgaaatga

SEQ ID NO: 350074 - DNA, 681 bp, Pseudomonas aeruginosa
atggaaaacgctgagtactcacaagatgttcgtgatattgtggataggtatcgtgaaaagaaaaggctttttgaacttttcttgaataatgtgcagtcggagtttttaacgtctcctgctcttaatacaggtgtcccgtctgttattcattctataaagattagattgaaggacgaagggcatctagaaaagaagatagttaggaagatagctgaagggcgagagataaatagagacaatattttttctgagataaccgattttgcgggcttgagagtgctgcatcttcatcaaaatcagttttcggaaattcataagtttataatgaaaaaggtatcttctaagtattggaagcttttggagaaacctatagcttatacttgggatcctgagtcggttgagtactttaagaagtttaaggttaggacctcaataaaggcttcttattatactagcgtgcattatttgatatctcctgcgaatgatgagaataatgtctcgtgtgaaatacaggttcgtactttgtttgaggaggcatggggtgaaattgatcactctataaattatcctgaaaaaacagatcgagctgcaactgtcgagcaattaagggttctgtcaaaacttgtgtctactggatcccgtttggcagatgcaatatttaaaatccatggtgctgactag

SEQ ID NO: 350075 - DNA, 1263 bp, Pseudomonas aeruginosa
gtgtataaggaggtgcggttcgctgtgctgatgcgggagctggagcatgggtatagcaatgtgattagattgtcacctagttttctagggggcttttttgttttgagtcaatgtgccatcatgagaagtttgttgagcgataggaacttaatcgagatgaagatactttctgtttttaacaataaaggcggtgtcggaaaaactacgctgacatatcatttggcgcatgctttaagtgagttggggcataaggttcttctgcttgatgctgatcctcaatgtaatcttacaatttattctatgcccgttgatacgatacataggatgtgggagaaagaggatgattgtgtagagctaggtattgaagagtttaggaagaaaaaaacggaagcggaacttgagttgcttgaaggagagactcgttctttgcattacttacttcagccaacaattgatggaactggcgactatgagagacttcctccccctcataggattactaagaatcttcatatgatcccgggaaggctttcaattcatgaatttgaggagaaggtttcatctagatggagtgatgcgtataggggagatgctttggctatacgaactattactaagattagaagtctttctgaggattatgcaaagaaaaataagtatgactttgttattgttgatacttcccctagtttaggttctcttaataaaactattatatctactgttgatgggttcttcgttccggctgctcctgatatgttttctctttatggaataagaaatattggtagtagtttgaggaagtggcatgaagagtttgatataatttataagcttatatctaaagataagcgaaagctatttccggcggaatttgttaagtttcttggttatactatatataatgcgcgaaaatatactaagcatagctcgaagtggaacttggctcaggctcatttgaaatatgcattgcaaattccagagattattaatgaccacattggaaaagacttaaggaaaggtattagtgacgagttgctctctgagcctattgggggcgagtctgtcatgcatggacacaatacattccctagcttagctcagcactatcgcgtgccgatgtggaagattcctaatctaagtcgactggataaagagcatcaaaacacagtgaatgggcaaaaacctgacattcttgcgacacagcaaaagtacgctgaattttctaaatctctgattgaaagaattaagttgattggatga

SEQ ID NO: 350076 - DNA, 1110 bp, Pseudomonas aeruginosa
  misc_feature (979)..(988): n is a, c, g, or t
atgaagaagctccttcccctggcgttgtcgctgcactccggcctgctgttggcctcgcccgcgttggacgctggccagcgccagccgctcaacctgcatgccatcggcatgttcatggtgttcgtgctgttcaccctgtgcatcacctggtgggcggcgcgacggacccattcgacggcggatttctatagcgccggtggcggtatccggggctggcagaacggcctggcgctggccggcgactacatgtccgcctccacgctgctgggaatcaccgcgctcatctacagctccgggatggatggctacatctatctcatcgccttcttcgcgggctggccggtactgctgctattgatgaccgagcggctgcgcaacctgggccgcttcaccttcgccgacatcacctcgtaccgtctcgaccagggcaaggtgcgcaccatggccgccatcggatcgctgaccgtggtgtgtttctacctggtggcgcagatggtcggggccgggcagttgatcaggctgctgttcggcctggactaccagatcgccctggtgatcgtcggtgcgctgatgatgctgtatgtgactttcggcggtatggtggcaaccacctgggtgcagatcgtcaaggcattcctgctgctggtcggcggctcgctggtgctgttcctggcgatgcgcgaattcgacttcagctatgacaggctggtcagccaggcgatggatagccatgccctgggcgaacgcctgctggcccctggtggcttgctggccgacccgttgaccgcgctatcgctgagcctggggctggtgttcggcaccgccgggctgccgcacatcctgatgcgtttcttcaccgtcggcgatgcccgggaggcgcgcaagtcggtgctctacgccaccgggttcatcggctacttcttcaatgtcattttcctgctgggcctggcgtcgatcgtgatcgtcagccagcagcccnnnnnnnnnngccccggttcttcgagggcggggaagcgggaggcaagctgctgggcgggggcaacatggtggtcatgcacctggcccaggcagtgggaggcaacctgctgctgggcttcctctccgccgtga

SEQ ID NO: 350077 - DNA, 3834 bp, Pseudomonas aeruginosa
gtgcaggcactgccttcggccgttagggctcagggcagcctgcctcgcctcgaagagcggagcgccgttcttgccgagcctccggttgggcagccggcgttgcaaaccctgccgtcggttgcgcgcgttgagggcgtgcccagcaatgccacaccgagcaacagccacaagtatctgatcgagaccaacccggcgctcaccgagctgaagcagttcctcaactcggactacctgctcggtggcctgggtatcaatccggacgatagcaagaagcgcctgggcgacggtctatacgagcagcgcctggtacgcgaagcgatcgtccagcgtacggggcagcgcttcatcgccggattgaacagcgacgaagcgatgttccgctatctgatggacaacgccatcgccagcaaggacgtattgggattgacccctggcgtcaccctcagcgccgcccaggtggcggcgctgacccacgacatcgtttggctggaagaagtcgaggtgaatggcgagaaggtcctcgcccccgtggtctacctggcccaggccgaggggcggttgggcccgaacggcgcgctgatccaggggcgcgacgtgaacctgatcaccggcggggacctgaggaacgccggtaccctgcgcgcgcagaacgacctcagcgcgacagccggcaacatcgacaacagcggcctgatcgaggccggcaaccgcctcgacctgctggccagcggctccatccgcaatgaccagggcggcatcattgccgggcgcgaggtaagcctctccgcccttaccggagacgtcatcaatgaacggacggtgacccagcaccagtcctcctacaggggagccggtaccactgaggcatttgccgatagcgccgcgcgtatcgaggctgcgcagaagctgaccgtttcggcaggacgcgatgtagccaatattggcggtgtcatcgacagcaagggcgacctcgccttgcaaggcggcagggatgtcctggtttcggctgcggtagcggagcggggctggacggcaggaagccaggcataccagacccagacgacccagatgggcgccgaggtcgtggcggggcgcgatatcagcgtcagcgccggacgcgatatcagcgtcgtgggcagccgcatcgacgctcgtcgcgacgtgacattcgaggcgggtcgcgatgtgggcctggtcgcggctgccaacgaagagcatgcctatggcaagaccaagaaggtcactttccaggacgacaagatcacccagcaggccactcgcgtggacgctggcggcgacctggcgatcaatgccggacaggacctgcggctggtcgcgagccaggccagcgccggcgacgaagcctacctggtggccggcgacaagctggagctgctggccgccaacgacagcagttactacctctacgacaagaagagcaaaggcagcttcggtagcaagaagacccggcgcgacgaaatcaccgatgtgacggcagtgggcagccaaatatccagcggcggcgacctcaccctgctcagtggtggcgaccagacttaccagggcgcgaagctggaatcgggcaacgacctggccatcgtcagcggcggcgcggtgaccttcgacgcggtgaaggacctgcaccaggagagccacgagaagagcaagggcgacctggcgtggcagtcgtcgaagggcaagggccagaccgacgaaaccgtacgccagagccagctcgtcgcccagggcaacctggcgatcaaggccgtggaagggctgaagatcgacctcaagcacatcgaccagaagaccgtgagccagaccatcgacgcgatggtgcaggcggatccgcaactggcctggttgaagcagatggagcagcgcggcgatgtggattggcggcgcgtgcaggaactgcatgacagctggaagtacagcaactccgggctgggcgtcggcgcgcagttggcgatagcgattgtcgtgacttacttcacggcgggtgcggcgagtgcggcattgggatcgatggcgggtgtgggggcgggctcaggaagcatgatggctgctgccggtagcactgcaatggtccaggccggtacagcagtaggaacagctgccgccggctgggcgaatgccgctggaactgccgtggctatgggcatggccagcaatggagcgatcagcaccatcaacaaccggggaaacctgggggatgtcgtcaaggacgtgacctccagcgatgcgctgaggggctatgtagtcgctggcacgactgcggggctgactgccggcgtctacgacaaatggacctcgacccagaccggcacctcgaccgctctaccgaacaccggggccgtggcgcccgccgcagggttgggcacctggcaaggtgtgggccagttcacctcgaaccagttgctgcagaatggcacttcggtgctgttggaccgggcgctgggcggcaagggcagcctgggcgatgcgttgcaaaacagcctggcaaatgcctttgcggcctacggcttcaagctgattggcgacaccacccatggcgtgctggacgacggcagcctcggcaagatcggcttgcacgccctgatgggaggtctggccgccgaagcggtcggtggcgatttccgtaccggagccctggctgcgggagtcaacgaggcgctggtggatagcctcgccaagcaatacgccagcctgcccatcgatgacaagaagggcctgctgatcatgagttcgcagttgatcggcgtgctggcggcttcgacgcagggcgatgcggacgccaagaacttgcagacgggagcctgggtggcggggaatgccacccaacacaactacctcagtcattggcaggaggagaagaagcggcaggaggtcgatggctgcaaggacaaacagctctgcaaaaccggaatagaagccaaatgggcaattatttcggcccagcaggatgtcggtatcgtcgtaggtgttggaggaggcatcggtctttcgacagctgaaaccgcagtgggtgtttatgagctggtcaagaactggagggaaacctatgcagctctggagcagttggccacttcgccagagttccggcagcagtttggcgataactacctgaaggggctggaggagcgcgccgcattcttgacccaggcatacgaggatgccggctggcaaggttcggtcacagctggtgtcgagggcggtaggttcgctgcggaacttgttggcgttctgacggcagtgaaaggtggcgcgcagataaccgccaagctgccaacagcagccaagaacctggtcaacgcgattgcggagtcacctgtttccggtagtatgagttcgcagctcggggcagtgggggacttgggtaggctgggtgggggtgcaaaagggactgcgactgccggaaaagtggccgatgagttcattccaccaggaatggaacgtccgttccgtccagttaatccggagttcccaccaaacaaagctgtagtggatgcgatggaaagcccgcgcattaaaggaatgacggcttgtgatggtacagactgctcagaaattgcgagtaagttgcttgcggcagcaggcgggaaggggaaagttattgaggttaggccaactcagcggagtaacctaaatttgtatgagaatggtaatgaagtcccagggcaagcttatcaccaagtctatacagatgggcggtacgtgtatgaccctcggctgtcatctcagccaatacctaaaggcgactgggaacagcatataaaaggcatgaatcctgatggggtcactatttctgataagttgcaggggttgcgatga

SEQ ID NO: 350078 - DNA, 1293 bp, Pseudomonas aeruginosa
atgaagaaagtgacccatcaaaaccgcctcctgctgcaacccgacggacaactgctggactcccccaagggacggctcttcgttgattccatgacgggggcgttcaccgacctgtcaggcgtgcggatcctgcgttgcggcgtggacacggtgcggcagttgtacaacggcaagttgcgcccggaagtgatggcgctgtttgacctctcggtggatgtggtcgagttcgccggctacgaatggtccaagggccgcatcggtcgcgactccggctatcagtaccgtctgcagaacgcagaactggggctgatcctgctgatcaagaaccacaacatcaaggtcgatacccttggctcgcacctcaagattgaggtgtcgccccatgccctcgacggtgccgacccgcatatcctccagggcgtgctggatgacttggccgctgccgtgctgagtcactgcgagaccaaccaagccgctgtgcatatcgccctggacgtacaaggctggaaaccgcctcgcgatctggtggatcgcatgcattgccgctcgcgtcgggtgcggcaaatcagcgggatcgagcggatcgaattcgacggcaacgcctcggtctacgggcgtggcgagacgtacatgtttggctcggccaacggcctgcaactgtcgatctataacaagaccctccaggctcgggccaccgacaagctcgactattgggaaagcgtgtgggcaaccctgaacggggatccgttcggcgatggcgacccggcctataaccccctggaaacggtctggcggctcgaattccgtttccaccactccatcgtccagcagttctccgaaggctcgcgtatggcctccggggaggtcattggctgccgcacctatgaggggctttgcccgcacctgcaaggactgtggaactacgcctgtgaaagcttcaagctgctgagccggacggcggtctacgatccgttctggagcctgatcagccaggacgcccgcgtccaagtcgagtgcgatccgctgatcgagcgcaccgagtaccggcgctattacaagaccgccaagggcttcagtgggcgtaactgcgagatgttcctcggccagttcatcagcctgattgcgcgggagcgcattcctgcaaaaaaggctattgagtccgcccgcaaactggagttctggcacgttatcgaagaccactatctcgccaagggttggactcgtcgcgatctggaaaggcatatacacaagctgatgtgtgatcggtatctacggcggggatacgcgatctga

SEQ ID NO: 350079 - DNA, 417 bp, Pseudomonas aeruginosa
atgagaatcgctcccaactcccgctcgccgctgctgcagtggctgagcttcgccctctgtgcctgcgtgctggtcaacgcgctggcttgcggcgtcctgcacctgcaggcgctgggagtgggcagcgacaaggggcagaaggccagcgtcgggctgttctgcgtcgccggtgccagccaatggctatccctggatcccgacgacgggtccgccggcgatccggtaccggtcaatccccagttgccgatgagctgcccgatgtgcagcgccctggtgctgttcgtcgcgctcggggtgatctggtcctggcgcttgcaacggcgacgccaggcgcgtttccgcccgcccgccacgcgcgagccggtgccgccccgatacgtctggccgccggccaacccgcgcgcttcccccgcctga

SEQ ID NO: 350080 - DNA, 2607 bp, Pseudomonas aeruginosa
atgaacagcgcacaccgcaaaccgctccccggcacccgcctggactacttcgacgcccgcgaggcggtcgaggcgatccagcccggtgcctacgccaagctgccctatacctcccgcgtgctcgccgagaacctggtgcgccgctgcgacccggcgaccctggaggcttcgctgcgccaactggtcgagcgcaagcgcgacctcgacttcccctggtacccggcgcgggtggtctgccatgacatcctcgggcagaccgcgctggtcgacctcgccggcctgcgcgacgccatcgccgacaagggcggcgacccggcccaggtcaacccggtggtgccggtgcaactgatcgtcgaccactcgctggcggtggaatgcggcggctacgaccccgaggccttcgccaagaaccgcgccatcgaggaccgccgcaacgaggaccgcttccacttcatcgactggaccaagcaggccttccgcaacgtcgacgtgatcccgccgggcaacggcatcatgcaccagatcaacctggagaaaatgtcgccggtgatccaggcgcgcgacggcgtggccttccccgatacctgcgtgggtaccgacagccataccccgcacgtcgacgccctgggcgtgatcgccatcggcgtcggcggcctggaagcggagaacgtgatgctcggccgcgcctcctggatgcgcctgccggacatcgtcggcgtcgagctgagcggccgtcgccagccgggcatcaccgccaccgacgtggtgctggccctgaccgagttcctgcgcaagcagaaggtggtcggcgcctacctggagttctacggcgaaggcgcctccagcctgaccctcggcgaccgcgcgaccatctccaacatggctccggaatacggcgccaccgcggcgatgttcgccatcgaccagcagaccatcgactacctgcgcctcaccggccgcgacgacgagcaggtcgccctggtggaggcctatgcgcgcaccgccgggctctgggccgacagcctggtcgacgccgagtacgagcgggtgctgaagttcgacctgtccagcgtggtgcgcaacatggccggcccgtccaatccgcacgccagggtcgccaccagcgaactggcggcgaaaggcatcgccggcaacctcgagcgggcccgcgccgaggaagccgagggcctgatgccggacggcgcggtgatcatcgccgcgatcaccagttgcaccaacaccagcaacccgcgcaacgtgatcgccgccggcctgctggcgcgcaacgccgaccgcctcggcctggtccgcaagccatgggtgaagacctcgctggcacccggctccaaggtggtcaccgaatacctgcgcgaagccggcctgctgccgcacctggaagccctcggcttcggcgtggtggcctacgcctgcacgtcttgcaacggcatgtccggcgccctcgacccggcgatccagcgggagatcgtcgagcgcgacctgtacgccaccgcggtgctctccggcaaccgcaacttcgacgggcgcatccacccctacgccaagcaggccttcctcgcctcgccgccgctggtggtggcctacgccatcgccgggaccatccgcttcgacatcgagcgcgacgtgctcggcgtggcggacggcaaggagatccgcctgaaggacctctggccgagcgacgaggagatcgacgcggtggtcagggcggcggtgaagcccgagcagttccgccaggtctacatcccgatgttcgacatcacccacggcgagcgcgagaaggtcgacccgctctacgcctggcgcccgacgagcacctacatccgccgcccgccgtactgggaaggcgccctcgccggcgaacgcaccctgcgcggcatgcgcccgctggcggtgctgccggacaacatcaccaccgaccacctgtcgccgtccaacgcgatcctcgccgacagcgcggcgggcgaatacctggcgaaaatgggcctgcccgaggaggacttcaactcctacgccacccaccgcggcgaccacctcaccgcacaacgcgcgaccttcgccaacccgaagctgttcaacgagatggtgcgcaacgccgacggcagcgtgaagcagggttcgctggcgcgggtcgagccggaaggcaaggtgatgcgcatgtgggaagccatcgagacctacatggagcgcaagcagccgctgatcatcgtcgccggcgccgactacgggcagggttcttcgcgcgactgggcggccaagggcgtgcgcctggccggggtggaggcgatcgtcgccgagggcttcgagcgcatccaccgcaccaacctgatcggcatgggcgtgctgccgctggagttcaagccgggtaccacccgcctgaccctggggatcgacggcagcgagaccttcgacgtgctcggcgctcgccggccgcgcgccgacctgaccctggtcatccaccggcgcgacggggagcggctcgaagtgccggtgacctgccgcctggacagcgacgaggaagtctccatctacgaagccggcggcgtactgcaacgcttcgcccaggacttcctggaggcggccggcgcctga

SEQ ID NO: 350081 - DNA, 3810 bp, Pseudomonas aeruginosa
  misc_feature (3361)..(3361): n is a, c, g, or t
gtgcaggcactgccttcggccgttagggctcagggcagcctgcctcgcctcgaagagcggagcgccgttcttgccgagcctccggttgggcagccggcgttgcaaaccctgccgtcggttgcgcgcgttgagggcgtgcccagcaatgccacaccgagcaacagccacaagtatctgatcgagaccaacccggcgctcaccgagctgaagcagttcctcaactcggactacctgctcggtggcctgggtatcaatccggacgatagcaagaagcgcctgggcgacggtctatacgagcagcgcctggtacgcgaagcgatcgtccagcgtacggggcagcgcttcatcgccggattgaacagcgacgaagcgatgttccgctatctgatggacaacgccatcgccagcaaggacgtattgggattgacccctggcgtcaccctcagcgccgcccaggtggcggcgctgacccacgacatcgtttggctggaagaagtcgaggtgaatggcgagaaggtcctcgcccccgtggtctacctggcccaggccgaggggcggttgggcccgaacggcgcgctgatccaggggcgcgacgtgaacctgatcaccggcggggacctgaggaacgccggtaccctgcgcgcgcagaacgacctcagcgcgacagccggcaacatcgacaacagcggcctgatcgaggccggcaaccgcctcgacctgctggccagcggctccatccgcaatgaccagggcggcatcattgccgggcgcgaggtaagcctctccgcccttaccggagacgtcatcaatgaacggacggtgacccagcaccagtcctcctacaggggagccggtaccactgaggcatttgccgatagcgccgcgcgtatcgaggctgcgcagaagctgaccgtttcggcaggacgcgatgtagccaatattggcggtgtcatcgacagcaagggcgacctcgccttgcaaggcggcagggatgtcctggtttcggctgcggtagcggagcggggctggacggcaggaagccaggcataccagacccagacgacccagatgggcgccgaggtcgtggcggggcgcgatatcagcgtcagcgccggacgcgatatcagcgtcgtgggcagccgcatcgacgctcgtcgcgacgtgacattcgaggcgggtcgcgatgtgggcctggtcgcggctgccaacgaagagcatgcctatggcaagaccaagaaggtcactttccaggacgacaagatcacccagcaggccactcgcgtggacgctggcggcgacctggcgatcaatgccggacaggacctgcggctggtcgcgagccaggccagcgccggcgacgaagcctacctggtggccggcgacaagctggagctgctggccgccaacgacagcagttactacctctacgacaagaagagcaaaggcagcttcggtagcaagaagacccggcgcgacgaaatcaccgatgtgacggcagtgggcagccaaatatccagcggcggcgacctcaccctgctcagtggtggcgaccagacttaccagggcgcgaagctggaatcgggcaacgacctggccatcgtcagcggcggcgcggtgaccttcgacgcggtgaaggacctgcaccaggagagccacgagaagagcaagggcgacctggcgtggcagtcgtcgaagggcaagggccagaccgacgaaaccgtacgccagagccagctcgtcgcccagggcaacctggcgatcaaggccgtggaagggctgaagatcgacctcaagcacatcgaccagaagaccgtgagccagaccatcgacgcgatggtgcaggcggatccgcaactggcctggttgaagcagatggagcagcgcggcgatgtggattggcggcgcgtgcaggaactgcatgacagctggaagtacagcaactccgggctgggcgtcggcgcgcagttggcgatagcgattgtcgtgacttacttcacggcgggtgcggcgagtgcggcattgggatcgatggcgggtgtgggggcgggctcaggaagcatgatggctgctgccggtagcactgcaatggtccaggccggtacagcagtaggaacagctgccgccggctgggcgaatgccgctggaactgccgtggctatgggcatggccagcaatggagcgatcagcaccatcaacaaccggggaaacctgggggatgtcgtcaaggacgtgacctccagcgatgcgctgaggggctatgtagtcgctggcacgactgcggggctgactgccggcgtctacgacaaatggacctcgacccagaccggcacctcgaccgctctaccgaacaccggggccgtggcgcccgccgcagggttgggcacctggcaaggtgtgggccagttcacctcgaaccagttgctgcagaatggcacttcggtgctgttggaccgggcgctgggcggcaagggcagcctgggcgatgcgttgcaaaacagcctggcaaatgcctttgcggcctacggcttcaagctgattggcgacaccacccatggcgtgctggacgacggcagcctcggcaagatcggcttgcacgccctgatgggaggtctggccgccgaagcggtcggtggcgatttccgtaccggagccctggctgcgggagtcaacgaggcgctggtggatagcctcgccaagcaatacgccagcctgcccatcgatgacaagaagggcctgctgatcatgagttcgcagttgatcggcgtgctggcggcttcgacgcagggcgatgcggacgccaagaacttgcagacgggagcctgggtggcggggaatgccacccaacacaactacctcagtcattggcaggaggagaagaagcggcaggaggtcgatggctgcaaggacaaacagctctgcaaaaccggaatagaagccaaatgggcaattatttcggcccagcaggatgtcggtatcgtcgtaggtgttggaggaggcatcggtctttcgacagctgaaaccgcagtgggtgtttatgagctggtcaagaactggagggaaacctatgcagctctggagcagttggccacttcgccagagttccggcagcagtttggcgataactacctgaaggggctggaggagcgcgccgcattcttgacccaggcatacgaggatgccggctggcaaggttcggtcacagctggtgtcgagggcggtaggttcgctgcggaacttgttggcgttctgacggcagtgaaaggtggcgcgcagataaccgccaagctgccaacagcagccaagaacctggtcaacgcgattgcggagtcacctgtttccggtagtatgagttcgcagctcngggcagtgggggacttgggtcggctgggtgggggtgcaaaaggaactactcccactgtaactgccgaagggcgtattggtaactctgtatttaccgacgttaaccaaactgccaggcctgccgctcaagcgaatcccaatcagccgactttgattgcggaccgagtggatgcaaagattgcggctaatggaaaacctcacccgaatggaaatatggcggatgctcatgccgaaattggagttattcagcaagcatataatgcagggaaaaccactggtgcagatatggccttgaaggttgaaggtaaagctgtttgcagctattgccgtggtgatatcgcggcagcggcagaaaaggctggtttgaactctctacagataaacgaagtgactacaggaaaaactctatattggaagcctggtatgcggtctttgagggagcttgaatga

SEQ ID NO: 350082 - DNA, 195 bp, Pseudomonas aeruginosa
atggagcgcctgttccgcagtctgaagtcggagtgggtcccgtcaacgggttacctgacggcgcaggaggcccaacgggacatcaatcattacctgatgcaccgctacaattggatcaggccgcatcaattcaacgacgggttaccacctgcggtggccgaagaaaaactcaacccactgtccgggatgggttga

SEQ ID NO: 350083 - DNA, 681 bp, Pseudomonas aeruginosa
atgctcgattatgggcgttatcagatctggtatgactgtgatctgggtgagccccaccgtttcaactatcagcttgataaagacaacggcgatctacctgccaagcgtaactatcgagtcgataaaagcctgcctgctggctgcaaaggtcagcactcatctgccccttactcaggcgctccagaaaaattcgaacgggggcacctggctccgatcaatcactttgatgatgatcagagcgcgatggacgcgacgaacgtgatgaccaatctcgttccgcagtacgactcccacaatgctccgacctggtacagaaccgaactcataacggactgttttcgcgacatcaagccagtcaaggtgattggaggcgtggttttcggacacgatccagaagacctgaagaatgactatttcgtggcgtcccacggtattgccacacctgagtttttctggaaggtattactgactgaagatgcctcaggcaaaccaacgattatcgcctggtggatcccacaccagccgggcttaggctcagatctggacctatacctacgatccgttcatgagattgaaacgttgcttggcccaagcgaacaaccgatcgatgtaccggaaaatttgaaggatgagagagcggccagtacttggcagtcaccgagtggttgcacgggaagctaa

SEQ ID NO: 350084 - DNA, 930 bp, Pseudomonas aeruginosa
atgcgtagcctatctctgcgagtgaagtttggtaactggtggcgtcagcctggcgctcgtgcaattacggcattgttgctgttgttgctagccaatcgtgcctggtgtgtcgaggtctatcccggtgactacacagcactgccgccaggtacgaaccttggcgtggtctattacgaaacagccgagcgaactcagtcctgggcgagaggggacagacaggctggagacccacggctgacatctagagtcggcattgcacgctacattcactttatggaggtgaatggcgtcttgatcgatccgcagttggtcatgtcctatggcgagttggatgcggacaaggacattagcgcattgggcaatcgcagcagcttcggcgatcccgcgttcgtcaccaccgcttgggtgatcaacgatccggtcaaacagcgctatctgggcatcacgccctacgtgttcttcccgttgggcaactatgacaagagctcggtgctgaacctgggcgacaatcgctggcgcttcgttctgcaggccggctatatccagccgctgatagggcctttgatgctcgatttgactgccgatgcaagttggttcggcaagaacacggactgcgcggcagcctgcggcagcgccacgtcacagaccctccgacaagatccgctctatcacttgcaggcagctgtgcgctggccattggctgaaagcacgacactcttcgttggtgcaggacgcatcttcggtggggaaacacgtatcgacggggtcgatcagcataaccggcaggccaccaccaatatgcgtgtgggtgtgcagcagtttctatctaagacaacgatgctcagcgtggcctacggacgtgatcttgatattgacaatggcttcagggagacggatcgactcaacatgcgcttaaacttcacattttga

SEQ ID NO: 350085 - DNA, 321 bp, Pseudomonas aeruginosa
atgccacgtgtcgtgtttatcgatgagcaatctggcgaatacgccgtagatgcccaggacgggcaatcgttgatggaggtggccacgcagaatggcgtgccaggaatcgtcgcggagtgcggcggctcatgtgtctgcgctacctgccggatcgagatcgaagatgcatgggtcgagatcgtcggtgaagccaacccagatgagaacgatcttttgcagagtaccggcgaacccatgacggctggaacgcgattgtcctgccaggtgttcatcgacccctccatggacggtttgatcgtcagggttcctctacctgcttag

SEQ ID NO: 350086 - DNA, 1230 bp, Pseudomonas aeruginosa
atgggggaacgtcgagacactacgctcatcgttggcgctggccacgcaggaacggcagccgccttcttcctgcgagagtttggctatcagggcagggtgcttttattgagcgcggagacacagcacccttatcagcgtccaccgttatccaaggagtatttgcttgctcagcacagtacgccgagcctgctgaagggcaaggactcttatgcacgtgccgatatcgagctgtgcctgcaagatgatgttctttcgataacgccggcttcgtgtcaggtgaagagctcacaaggtagttatgcctatgaccatttgatccttgccacaggctcgcagccacgcttcatggctgcattcggccatgctgataatctctgttacttgtcggattgggatgatgccggacgcattcggcagcagctcgctgaggccagccggatcgtcgtactcggtggcgggttcatcggcctggagatcgcgtcttctgcctgcaaaatgggtaaacacgtcactgtgatcgagcgggcgccgcgtctgctttcacgagtggttagcgaggcattcgcggcatttattcgtgacattcatctgggtaacggtattgagtttcgtctgggtgaggaagtgcgcgaggtgaggcggagcacctgcggtgtgcgggtcgatgcggtgtttttgagtgatggccaacttctggaatgtgacatgttggtcattggtgtcggttccgagccacgtatggagctggcaacggcagctggcctggcgtgcgcttccggcgttctggtggatgagcactgtcagaccagcgacccgttcatcagtgccatcggtgactgtgtggcagtgtgtccttcgccagggcatcagttaccacgccgcgagagcgtgcagaacgctacagagcaggcacgcctggttgcagcacgtctgaccggtcggcccatgccgccagtacagacgccctggttctggtccgaccagttacaggcgcgaatcaacctggcaggtgagcgtccggcgcaagggcaggtgattgtgcgtcgttacggcggcgacaaggtttcgatgctgtacctgcaagaccagcaattggtggctatcgaagcctgcaacatgccgggtgactgcttgctggcacgacgtaccatcggtcaaaaccatagcttcgatctcgctcgtctggttgacgccgacgttccgctgaaagacgcccttcatttcgcatag

SEQ ID NO: 350087 - DNA, 1287 bp, Pseudomonas aeruginosa
atggacgctagagccaccattccggaacatatcgcgcgtacggtaatcctgcctcaagggtatgccgacgatgaggtcatctacccggctttcaaatggttgcgtgatgagcaaccgctcgcgatggcccatatcgatggctacgaccccatgtggatagcgaccaagcatgccgacgtcatgcagattggcaagcaaccgggactattcagcaatgccgaaggtagcgagattctctacgatcagaacaacgaagctttcatgcgctcgatcagcgggggctgcccccatgtaatcgattcgttgacctcgatggacccgcctacgcacacggcttatcgcggcttgaccctgaactggttccagcccgccagcatccgcaagctcgaagagaatattcgccggatcgcgcaagcctcggtgcagcgtctgctcgattttgacggcgagtgcgatttcatgacggattgtgcgttgtactacccgctacacgtggtgatgacggcgctgggtgtgcctgaggatgacgagccgttcatgctcaagctgacccaggatttcttcggcgtacacgagcctgacgagcaggccgttgctgcaccgcagcagtcggcggatgaagccgcccggcgcttccacgaaaccatcgccactttctacgactatttcagtggtttcaccgtcgaccgccgcagttgtcccaaggatgacgtgatgtcgctgctggccaacagcaagcttgacggcaactacatcgatgacaagtacatcaacgcctactacgtggcaattgccaccgcgggtcacgataccacctcgtcatcgtccggcggggcgatcatcggcctatcgcgcaaccctgagcaattggcgttggccaaatccgatcctgcactgattccacgtctggtcgatgaagcggtgcgttggaccgctccggtcaagtcgttcatgcggaccgcgctggctgacaccgaagtgcgtggccagaacatcaagcgcggcgaccgcatcatgctttcgtatccatcggccaatcgtgatgaggaagtgtttagcaatcctgatgcattcgacatcacccgttttcccaatcgacacctgggttttggctggggggcacatatgtgtctcggccagcacctagccaagttggaaatgaaaatcttcttcgaggagctgttgcccaggctcaagagcgttgaactgtctgggccgccgcggctggtggcgaccaacttcgtcggtggcccgaaaaacgtgccgattcgcttcaccaaggcttag

SEQ ID NO: 350088 - DNA, 1419 bp, Pseudomonas aeruginosa
atgcaaagtccatccgcgttctcgctgacaatcggcgggcatggtgtcgctacatccgattatttgccagtgctcaatccggcgacccgccagcccatcgggcaatgccctgtagcgagcgaagagcacgtcgagcaggcggtggctgccgctggtgatgctttcgctgtctggcgtcaggtgccttatggcaaacgctgcgagcaactgcaagcactggccggaattctcgaagccaatctggacgaactggcccaactactgacccgcgagcagggcaagccgctagccgatgcgcgaggcgagctggcgggtgcaattgccttctgccaatgcgcgggcagcctgccgctgccagaggtggtgcacgagcaaagtgccacgcggctgtctaaaaccgtgcgcgaacccctcggcgttgtagtggcgattgtgccctggaactacccggtctcgattgccttcgtcaaactgaccgccgcgttggctgccggtaacacgctgattctcaagccggctccgaccacgccgctgactacgctgcgcatcggcgaactgatacgtgatgcgctgccggccggggtaatcaatgtattggcaggcaacgatgacctgggcccctggctcaccgagcatgctgatgtagccaagatcagcttcactggttcgagtgttacagggcgccatgtggcacgttcagcagcagccgatctcaagcgcctgacccttgaactgggtggcaacgatgctgccgtggtgatggccgacagtcttagcgatgcggtggttgagagggtgttttggtctgccttcaccaacgccggacagatctgcatggccaccaaacgcttgtatatccacgaaagcatctacgaggcgtttcgcgacaagctggttgcctacgcgcagaacgtggtgatcggcgatggctcccagccaggggtgaccatgggaccgctgcaaaacgccaagcagttcgccaaggtcatgtcgctgatcgacgctgtgcgccagcgtggcgggcgtttgatcgagtgcgggcaaatgcgtggaggcgatggctatttcctaccgatcacctttgtcgacctgccggacgagagcgcgccagaggttgtcgaggaggctttcgggccgttgctgccgctgctgaagttcagtgatgtcgatgaggtcatagaacgggtcaacgccagcccgtacgggctggctggcagcgtctggagtcgtgatagggaggttggcgcacgggttgcagcagccatcgacagcggcagcgtttgggtcaacgactggctggcgatcacgccgtctacgcccttcggcggcatgaaggcgtcgggctatggcgctgagagcgggcttgaagggcttctggaattcaccacgcaaaagaccgtgatcatccaacaacaataa

SEQ ID NO: 350089 - DNA, 687 bp, Pseudomonas aeruginosa
atggcgatggcccgtgaacacaatctggtgaagattgacgaattagccgatgacgcccccatcgaactgctcgggccgcttgggtgtggcgtgcagactggtgccggggctgtgatgatctccctcgacgtgcgtgctgacagcagttttctggtgctcggcggcggcgccgtcggtctgagtgctgtgatggctgccaagctgcgaggttgctcacgcatcctcgtttccgagccttcggctgccaagcgtgagcaggcgctggccttgggcgcaaccgacttaattgacccgttgaacgagaacctggtcgagcgcgtgcagcagatcaccgaagggcagggctgcgattatgcgctggagtgcaccggtctggtttccgtcatggagcaggcaatcgattccatggccatgcgcggtcagttggccgtggttggtgtgccacccaaacttgatgcaaccgctgctgtcagccccctggcgctgatccagaaagggttgaagctggtgggtgtaatcgaaggcgacagcctgccgcgtgtgttcatcaacgagctgtacgcgcagttcaaggctgggcgttttccgttcaccaagatgatccacacctatccgctgacatcgatcaatcaggccatcgccgatgtcgagtcgggcgtctgcatcaaggccgtcctgatcccctga

SEQ ID NO: 350090 - DNA, 1152 bp, Pseudomonas aeruginosa
atgcatgacatcgaactgactgacgagcagcgcatgatccgcgacatggcccgcgatttcgcccgcaacgaaatcgcgccacacgcccaggcctgggagaaagccggctggatcgacgatgccctggtggccaagatgggcgagctgggtttgcttggcatggtggtgccggaggagtggggcggcagctacatcgactacgtcgcctatgccctggccgtggaggaaatctccgttggcgatggcgctgccggcgcgctgatgagcattcacaactcggtcggttgcgggccgctgctgcgttacggcagcgaagaacagcaacgcacctggctgacggcactggccacgggtgaagtgatcggttgcttctgcctgaccgagccccacgcgggctcggaagcgcacaacctgcgtacgcgtgccgagctgcgcgacggtcaatgggtgctcaatggcgccaagcagttcgtcagcaatggccggcgtgccaaactggctatcgtctttgccgtgaccgacccggagctgggcaagaagggattgtcagcgtttctcgtaccgacggacacgagcggtttcatcgtcgaccgcaccgaacacaagatgggcatccgcgcctcggacacctgtgcggttacgctcagcgattgtcgtgtgcctgaagccaatcttctcgggccgcgtggcaaagggctggccatcgccttgtccaacctcgaaggcgggcgtatcggtattgccgcccaggcgttgggcatcgctcgtgccgctttcgaggcggcgctggcctacgccagggagcgcaagcaattcggccaggccatcgccgagcaccagagcatcgccaacatgcttgccgatatgcacaccggactcaatgccacgcgcttgctgatcctgcatgcagcaaggttgaaaagcgcgggccatccgtgtctgtcggaagcgtcccaagccaagctgttcgcctcggaaatggccgagcgcgtctgctccaaggccattcagatccacggtggttacggttatctggaggattatccggtcgagaagtactaccgcgacgcgcgtatcacgcagatctacgaaggcaccagcgaagtccagcgcctgctgatcgcacgcgagctgcgggactgcgctttgtag

SEQ ID NO: 350091 - DNA, 1110 bp, Pseudomonas aeruginosa
atgagtggtgatgatcaagcggtcatcgcgacggtccgcaaccgtgtcggccacctgaccctgaaccgcccacaaggcctgaatgccctgaccttgccgatgatccgtgcactgtcctgtcacctgcacgcgtgggcgcaggattccgaggtgcttgcagttgtgctgcgcggggcaggggagaaggccttttgtgcaggcggcgatatccgctccttatacgagagccatgcggcaggcgacgacctgcatcagcgcttcttcgatgaggaataccaactcgaccagtacattcatacctatcgcaagccgatcctggcattgatggatggcttggtgctcggtggtggcatggggttggcccagggggcggcgctacgggtgatttccgagcgggtgaagatggccatgcctgaggtgggtatcggcttctatccggatgtcggtggcagctatttcctttcccatctgctgggcgagctgggcacctacctcggtgtaaccggcattcagcttcgcgcggccgatgccttgcatgcacgcctggccgactggtgcttgccgagcgagcagttcgaggagttcgaccgctgcctggacaatctcaactggaccactcccgcccacgagtcgctgcgtaccttgctcggcaccctggccagcaaccggattaccggcgctgaactgcgcgccctgcaaccggccatcgacgagcatttctccaagccggatatcgccgccatacgtgaatcgctgctgagcgaagcacgcgtgcagttccaggattgggcagacgaaaccgtcaagctgatggacagccgctcaccgctggcgatggccgtgaccctggaactgattcgtcgtggtcgtgacgccagtctggctgactgcttcgcgctggagacgcacttgggccgccagtggttcgccaagggcgacatcatggagggcgtgcgtgccctgatcatcgacaaggacaaacagccgcgctggtccccggctacgattcaggaggtgaagccggagcaggtcagcgacttcttcgcgggttggccggcgatcgcagacaagaagcgcaaagcgcccatgaccgccgaggagaaccgctga

SEQ ID NO: 350092 - DNA, 897 bp, Pseudomonas aeruginosa
atgaacattggttttatcggactgggcaacatgggtgggccaatggccctgaacctgctcaaggctggccatgcggtcagcgtctatgacctttcggccagcgcagtcgcccacgcgaccgaagcgggcgcccgtgcgctcggctcgccagcggagatagcgaaaagcgacgtgcagttgatcatcaccatgctgcccgctgctcggcatgtgaagcaggtctacctggcagaggacggcttgctggcgaatgtccgcggtggtgtgctgttgatcgacagttcgaccatcgacccgatcagtgcccgcgaggttgcagcggcagcggtcgcccacggtaacccgatgctcgacgcgccggtttccggtggcaccggaggcgcgtcagccggcaccctgaccttcatggtcggtggcgaacaggccgacttcgacaaggccaggcccgtgctcgaagcgatgggcaagaacatcgtctactgcggtgcctgcggcaacggccaggtggccaaggtcgccaacaacatgctgctgggcatctccatgatcggcgccgctgaagccatggccctgggcgtctcgctgggcatggacgccaaggtactggccggcgtgatcaatacctccagtggccgctgctggagttcggatacctacaatccgtttcccggcgtgatcgagagcgtaccggcatcgcgcggctattcgggtggtttcgccactgacctgatgctcaaggacctggggctggccagcgaggcggcgaaacagatcggccagccggtcgtcctgggcgcgctggcccaacagctataccagagccatagcgcgcaggggcatggcggtctggatttctcgtcgatcatcaaggcctatcgaaaggacagcgagcaatga

SEQ ID NO: 350093 - DNA, 774 bp, Pseudomonas aeruginosa
atggaattcgaaaccctgctggtggagacacgcggccgcgtggccctcatcaccctcaaccgccccaaggcactgaatgcgctcaatgcccaactgatcagcgacctgaacgcagcactcgatcatttcgagcgcgatgaacaggtgggctgcatcgtcatcaccggttcggacaaggccttcgccgccggtgccgatatcaaggaaatggccgggctgacctttccgcagatctacctcgacgatttttttgccgatgccgaccgtctcgccactcggcgcaagccgctggtcgcggcggtttccggctacgccctgggcggcggctgcgagctggcgctgatgtgcgacttcatctacgcctcggagaccgcgcgcttcgcccagccggaaatcaaccttggcgtgctgcccggtatcggtggcacccagcgcctgactcgggcgcttggcaaggccaaggccatggagatgtgcctgaccgggcggcagatggatgccgccgaagcggaacgtgccgggctggttgcgcgggtattgccggtcgagcggttgctggaagaaaccctcaaggccgctgaggcgattgccgccaagtccctggccagcacgctgatgatcaaggaggcgatcaaccgtgtattcgagaccagcctcagcgagggggtgcgcttcgagcggcgcatattccactcgatcttcgctaccgcggaccagaaagagggcatgaacgccttcgtcgaaaagcgtccggcgaacttcagccatcgctga

SEQ ID NO: 350094 - DNA, 1503 bp, Pseudomonas aeruginosa
atgcaaacctttcctaccgtaaagctgctgatcaacggggctttcgtcgagtccaagaccaccgaatggcgtgacgtggtcaacccggccacgcaagaagtgctggcccgcgtgccgttcgcaacccgcgaagaaatgaacgccgcagtggctgctgccaaggccgcgttcattacttggcgcaagacccccatcggcgtacgtgcacgggtgttcctcaagtaccagcaactgatccgcgagaacatcaaggaactggcggcgatcctcaccgccgagcagggcaagaccttgcccgatgccgaaggcgacgtatttcgcgggctggaagtggtcgaacacgcggcgggtatcggcaatctgcagcttggcgaactggccaacaatgtcgccggtggcgtggacacctacaccttgctgcaaccgctgggtgtgtgtgccggcatcaccccgttcaatttcccggcgatgattccgctgtggatgttcccgatggccatcgccaccggcaataccttcgtcctcaaaccctcggagcaagacccgatggtgaccatgcgcctggccgaactggccctagaggctggtgtaccgccgggcgtgctcaacgtgatccatggcggcgtcgatgcagttaacctgatttgcgatcacccggatatcaaggcggtctccttcgtcggttcgaccaaggtcggcacccacgtctacaaccgtgcgacgcagaacggcaagcgcgcgcaatgcatgatgggcgcgaagaaccacgccatcgtgctgcccgatgccaacaaacagcagaccctcaacaacctgctcggcgcctctttcggcgctgccggtcaacgctgcatggcattgcccgtggtgattctggtcggcgaggcgcaggcctggctgcccgacctggtcgagaaggccaagagcctgaagatcaatgctggcgtcgaagcggcgaccgacattggtccggtggtttcctgcgcggcgctggaccgtatcagtggcctgatcgccatgggccaggaggagggtgctacgttgctgctcgatgggcgtaacccgtcagtgccgggctacgagaagggcaatttcgtcgggccgacgatcttctccgacgtgcgcacggagatgaccatctaccgtgaggaaatcttcgggcccgtactgtgcgtgatcaacgccgacagcctcgatgacgccatcgccctgatcaacgccaacccgaatggcaatggcactgcgctgtttacccgctccggcgcggccgcccggcatttccaggaagagattgacgtcggtcaggtcggtatcaacgtgccgatcccggtgccggtgccgatcttttccttctccggctcgcgtgcctccaagctcggtgacctcggcccctatggcaaacaggtggtgttgttctatacccagaccaagaccatcacccaacgctggttcgacgaggatgaagtcggtggcacggtgaacaccaccatcaccctcaagtga

SEQ ID NO: 350095 - DNA, 891 bp, Pseudomonas aeruginosa
atggactgggacaacctgcgcttttttctggagctgtcgcgcagtcgcacactgagcgctgcggcccgtcgtctggaggtcgactacaccacggtgtccaggcgaatccagaccctggaaaagaaccttggcgcgcaattgttcagccgccaggccaacggctatgccctgagcgaagccggcaggagcttgctaccccgggccgaagcgatggaaagcgcctgttcggcaatagaacgcgagcgggtggagcgcacggaaagcctctcaggtaatgtgcgcatcggcgcgaccgagggttacggcgcgctgctggcgagccagctcgcgcaactgacgcagtgccatcctaatctcgccatcgacctgcttgcggtgccgcgtacggtgcacctgtcacgccgtgaagcggacatcgtgatcaccctggaacgcccggagcgcgggccgtacatcatcaccaggctgacggactacgtactcaagctgtacgcctcgcacgactatctgaaccagcaggctccgataaagaaccgcgaagacctgcgcggacacggcttcgtcagctacatcgacgacctgctgtacagcaaggaactgctctatctggaagacatcggcaaaccgcgcctgaccttgcgcagcaccagcatcctcgcccagcaacaagccgtcgcagcgggcgccgggattgccatcctgccggctttcgctgccgacaccgactcacgcctgcagcgcatcctggccgatgagatcgagttcaggcgtacgttctggatgctgatgcccatcgagctcaaggacatcgcccgtatgaagaccacctggaatcacctgcgccagatggccgaggccagccagaacctgctcatggggcgacagggctga

SEQ ID NO: 350096 - DNA, 807 bp, Pseudomonas aeruginosa
atgagcaccatgactgcaccgatccgcgtggatcatgaaggtccaatcgacatcgtgaccctggatcgggccgagaccttgaatgccgtcgacctggagatggcccaggctctgcacgactatttcagtgcgatgcagagcaaacgctcgacccgagtgatcatcctgcgttccgaagggcgcgcgttctccgcgggggctgacctcaactcgccggccttcgtgccacccggctcaggtcgggcgcagcgccagcacgatatccagcgcctgtattccggcatcgtgcggctgatgcgcagttgtccgcagccgatcatcgccctggctcagggcgctgcctgtggtgcgggtttttcgctgctgctggccagtgatgtgcgctacgtgacctgccacgtcaagatgaatgccgcttacctgaaggtcgggcttggtggttgcgacatgggctcgggctacctgttgtcgagactggtgggcatgtcggtggctgccgagtacctgctcagtggtcgcttcatcacggctgaacgggcgagggcaatggggctggtcagcgaaatcgtcgagccggagcagcttctggagaccggattggcgctggcggccgatatgctcaaggcgtcgcccatgggcctgcgcatgaccaaggaaacgctgaacgcggtgatcgacgccggcagcctggacgccggcttggcgctggaagatcgacagcaggtgatcctgctggataccgatgatcatcgcgaggccgtgcaggcgtttcgcgagcgccgcgagccacgctaccgcgatagctga

SEQ ID NO: 350097 - DNA, 672 bp, Pseudomonas aeruginosa
atgcacgaagccaaggtattgctgcttgtagatgtccttgagtacggcgtggtgcaggctggcggtgagttccggggtgaccttgtagtcggcgccgatgaattccatccccgaggattcggctgggcggaagcggccgttgggcgtggagacggtgatcttctcgttgttcgacgagtcccggtacttgatccggtccaggtagccgaggtggaagtccaggccctcgatatccttggagtgcaggtacacgccgttgaaggtctgcggcagcaagcgagccgggctggacaactgcaagggcagattgaggatcagttggccggcgttgatctcggtcttggccgcgcgcattttcgcggtcaggccgagggtcgaatattcgtcttccgcgcggccatcggagtcgagcggcagcaagcccgagccggattggcgaggcgtggagtcgagcttgataccggtcagggtgcgcacatcgaaaccgaaaccgaccgggccctcggtgaagtccgacttgtaggtgaagttgatcgcctgggcccattcccggtagcggctcttcagtggtggcggggcgttgtcctggaactggcggtcgaagtaataattctggaagtcgatgtaagccgtgctgcgatcgagaaaattgtcggcgtgggcgatgggtag

SEQ ID NO: 350098 - DNA, 402 bp, Pseudomonas aeruginosa
atgcaactgttcggcgataccgcgcagccgtacatgggccgcagcgagccatcgcccgtggtggaaggggcgatggcaacagagttcatcaacgccaaggaacgcacctggcagattcgcgaagactacgacttctctggcgtcggcgtgccaggtctgtcggccaccttgtggcatatgcgcggcaacggtgcggaactgccggaaagcatgggcggcaagaatcgcagcgaacgggaaacccaggcggcgatcacctatgtcatccagtccggcccgctcaaggacgtcagcgtgcgcctgcgtcatgcctggtaccgcaacaacttcgagccgaccgcgacgttccgcgacaataacgagttccgcatcaacgtctactacacctggaagctctggtaa

SEQ ID NO: 350099 - DNA, 774 bp, Pseudomonas aeruginosa
atgagtagtgacacctgtaccaggcccggcccgcgccgggtcgccctgcaaggtgcggtcaactgccgcgacttgggcggttatcccgcccatgaaggtcgacgggttcgccacggcctgttgttccgctccgactccctggcccagctcacagccgaagacctgctgaccttcgccgcgctgaacctgcgaggcatctacgacctgcgccacgagcatgagcgtctcgccctgcccaaccatttgggtgatggaccgctaccgatcactcacttgctcggcttcattccacacggcgccagcgaagtgattcgtggcgtgcgtgatcgacagctgacagtggctggagcgcaggcgatctttctggaaatgtaccggcgcttgccgctggagcatgccgagcgttatggccaactgattcgtcatctgctcgaacccgatgccctccccgcgctgattcactgcaccagcggcaaggatcgaaccggtttcgctgccgcagtgattcttctgatgctgggcgtggacagggagctgatcgtcgaggactacctggtcaccaaccgctaccgtcgcgacctgcgcaccttcgtcggtgacaacgccgatgccgaagtgctgcaggtgctgaccggcgccgaggctgcttatctgcacagtgcctttgcaagtatcgactcgcactggggcggcactgagcggttcttgcgtgatggcctgcgtatcgatgcggcgcagcaggcgcagttgcgtgcgttgctgctagagaactaa

SEQ ID NO: 350100 - DNA, 1116 bp, Pseudomonas aeruginosa
atgctcagccctcaagacgatttcatcggccaccagaccaccaccactttcgaccatgtacagtccagcgatccggcctggatggagcgcctgtggtacaccggccatccacgcaacggcgagatgatcttcgacatcggcctgggctatcaccccaaccgcaatgtcatggatgtgttcgccggcatcaccgtcggcacgcgccagtacaacttccgtgcttcgcggcggttgcgacccaatccgctggaaaccgctgtcggaccgctgaaaatcgagattctgcaaggcctgcgtcgtcatcgcctgcaactggagccgaacgactccgggctggccttcgatatcgaattcatcgccagcatgaacgcccacgaagagcacccgcattttcgtcgacgccagggacgggtcaccgaagatatggcgcgctgccagcaactcgggcgctaccagggctggttcgaggtggagggggtgcgccataccatcgacagcgaggactggctcggccagcgcgatcactcctggggcatccgctcggaaatgcgcagcgacgaaacccatccaccggtgaccttctatccgccgttcctgttcgcctgggccaccgtgcagttcgccgagcgcggtttgcacgtgttcttcaaggagcgggcacccggcgacttcatctatatctccggcgaagaagtgctgctaccgggcaacaagcctgacctgcgtcgacgcttggtagacgtcagcgatcaccgtatccagtgggctgacgatccccatgggcagacggtgcagtcggccgaactggacatccgcctggccaatggcgtggaaaagaccttgaagcttcgtgtgttgccggcgcgctatttcctcaagggcggcctttacggcggcctcgatggttggttccagggcgatgacaaaggcgcgctgtacatggagcacgaaagctgggacctgacctgccctgaaacgcgcaagcgcctgcggacactcagcgatcacgtgatcgaagtgcgtgacggtgacgaagtgggttacggcatcatggagtacggcgtgggcaaagggtacgcacgctatccggaagtgcaggagcatcctgctatctga

SEQ ID NO: 350101 - DNA, 477 bp, Pseudomonas aeruginosa
atgaacaattctttccaacgcctgatcgagggcatggtgaataccctgcgcaacgaggtcatcccgcacaccgagggcgaatacgcccgtggccaggcctatggcgtgatctacatgctcaacagcatcgcattacgcggcagttggtctgcggactacgtgcgcccgcaactggacatgctccaggcgctgaacgatgaacttgcgccgctgctgaccggcctggatgcgccggcattgcccgagttgtcgcagagcggtgattccgtggcgcacttgcaacgcgtattggaggccggcgaccagcgcgtctgcgagttgctcgattggctcgaagcacgccgcgacagcctgcctcccgagcgccatgctgccatcgaagcggcattgcgggtttacatgggcaaacaggtggcctgggagatcaagaccagtgccaaaccgatgttcgccgaaatttccagcggaaaggagtga

SEQ ID NO: 350102 - DNA, 1002 bp, Pseudomonas aeruginosa
gtggacgagtcatcattgaaaccacgcttgatcgcgtaccttgccgagcagaccggccatgactgggcgctcggttcattcacccgcttcgccgtgggtttttcatggatcacttatggcttcagcgccacgccagccggtgagagccaggcgcgcggattgatcctgcgtcttggcccggccgatggcctgttcgcaccctacagcgcattgcccgagtacagcgcgctgaaggccctggaggggcagggcgtacctgcgccacgggcgttctggtggagcgacgatgcgtcgattcttggcgcgccgttctgcatcacggaaaaggtcgaaggttcggcccccgtaccttggggcggcgccgatgcgttcgcggcatcctggcgtaccgacatcggccagcagttcgtttctgccctggctggtatccatcgcatcgactggcgtggccgagaaggcttcgaccaggtgcaggtgaccgaagcgaatgccgcgcacctgcagctcgactattgggaaaacgcccgccagcgctgggcgttgcgtgcctacccgatgctgcatcacgccatgctctggctgcgccgcaatgcaccggtggctccgcgtgtgagcctggtgcacggcgactatcggctgggcaacttcctcgagcaggatggccgtatcacggcgattctcgattgggaactggtacacctgggcgacccgcatgaggatctcggctgggctttcctgccgcagttcgccatgggctccggtcgcgtgtgcgggctggtcactcaggaggatttcatcgcccgttacgaagccgaggtcggcttcagcgttgacccggcatcgttgcatttctatcgcgtgctggcgctggtcaagctggcgctcacgcacatggctggcgtgcgctgcttcgaagacggtcgtttcgacgacatgcgcatgccggccatgggcacccaggtcatgcccgtccttcgccaaatcgagaagatcctgccatga

SEQ ID NO: 350103 - DNA, 456 bp, Pseudomonas aeruginosa
atgatggaaaacaggatcagcgcggcaagccgccatccacgcctgaccgaacgtgatgcctacaagcactggagccgcgagcaggtgcgatggtcggacaccgatctggtaggccatgtgaacaatctttcctttgccgcgtattgcgaaaccggacgctgcatgttcctgcgccccttcgtcgaaaaaggcagcccgcagcgggcgatgatgctgcccgcacaactggtgctgaacttcatggccgaagcgcactggccacaggtggtcgagatcggcaccggcatcatcgccatcggcaacacctcgtgccgcatcggccagggcctgttcgtcgaggatcgttgcattgcaacctcggaagtcaccaacgtgatgatcaatgaagaaacccgccagccgatgccgattcccgattggttgcgtgactggatgaaggattacctcatcgactga

SEQ ID NO: 350104 - DNA, 789 bp, Pseudomonas aeruginosa
atgagctacgaagcattcgatctcaaggtcgaggacggattggcgcatctgaccttgaaccaacccgagcgcggtaatccgttcgacggcgtgttctgcgcggatttttgtgccatcgccaattcattggccggacgtgaggatgtgcgcgcggtgctgttgcgggccaagggtccgtatttcagcgtcggtggcgatgtccagcagttcgcccgcgacctcgacgtactgccgaacaagatccgccaatggacggcaacgctgcacatgggcctcgcgcgcatggcccagctggatgcgccgttggtggcctgcgtggagggtaccgccatgggcggcgcggtggcgatgatcgccgcttgcgacctggtgttcagcagcaatcgggtgaagttcggcgccgcttattcgcacattggctacagctgcgatgccggcgccagtttcagcctggcgtcgcgcatggggctggcccgggcacggcgttttctcctgcttggcgaggtggttgatgccactgaggcggagcgcatcggcctggtggatttcgtccatgagcccgaggcggtgcacgacgccgccttgaatcaggctcgaaccctggccaacggcccgacccgcgcttacggcgaaatccgtcgcatcgtcgcccgctcactggctcagccgctggaagcccaattggaggacgaggcgcgcgggctggctcgcgttgccgctacagccgatgctcgcgaaggcgttacggcgtttaccgagaagcgcaagccacgtttcgtaggccgatag

SEQ ID NO: 350105 - DNA, 1176 bp, Pseudomonas aeruginosa
atgtttgagcgtacgctgttcacccccgaccacgaggcgttccgcgagacggtgcgcaagttcatcgacaaggaaatcgccccctaccacgcccagtgggaacatgagggcacggtgccgcgcgagctctggatcaaggccggcgaagcgggtctgctgtgctgtacggtgcccgaggagtatggcggcctgggcctggattacctgttcgacgtggtggtcttcgaggagatggcgcgcagtggcttcaccggccctggttttctgatccattgcgatctggtcgccacctacgtgaaatcgttcggcagcgaagaacagaaaaaacactggttgccgaagatggtcagtggcgaggccatcggctcgctgggcatgaccgaaccccatgccggctccgacctgcgcaacatccgcacccgggcggtgcgtgatggcgacgattatgtgatcaacgggcagaaggtgttcatttccaatggccagctgtgcgatgtgatcgtcctggcgaccaagaccgaaggtgccaacggcgacaaggaggtgacgctgttcctggtcgacacctcgttgccaggcttcaagcgtggcaccaacctggaaaagctcggcctcaaggcccaggacacctcggaactgttcttcgaagacctgcgcgtgccggccagcgccatgctcggcggcgaaggcgagggcttcaagctgatgatgaccaagctcgcccaggagcgcctggcccaggccattcgctcgtctaccgtggccgagcatctgatcgaactgaccgtggcctacaccgccgagcgcaaggcgttcggcaaggccatcggcgatttccagaacacccaattcaagctcgccgagctgaagaccgaggcggtgattggccgggtgttcaccgatgcctgcatccgccagttcatggacggcaaactcgacgcggtggatgcagcgatggccaagatgtcgctgtcgaacctgcactgcaaggtcgccgacgagtgcctgcaactgttcggcggttggggctacatgtgggagtatccgatctcccgggcatacgccgacgcgcgcatcgtcaagatcgccggtggctccatcgagatcatgaagcacatcatcggcaagtcgatgttcgccgaatacgcccacgccacgcgccatcagcaccagtaa

SEQ ID NO: 350106 - DNA, 1167 bp, Pseudomonas aeruginosa
atggatttttccagcaatcccgaccatcaggcgattcgtgaaggtgttggcgccgtggtgcgttcctttggcgacgactattggctggcccgtgacgaggatggacgttttcccttcgagttccaccaggccatggctgatggcggctggctcggtctgaccatgccggaggaatatggtggctcagccctgggcgtgagcgaggcgatggtgatgatgcacgaagtggccagccacggcggcggcatgaccgcgacctcgtctgtgcacatcaacctgttcggcccgcatccgatcgtggtgttcggcaatcacgaacagaaagcacgctggattccgccattgattgcaggcaaggaccgctgctgcttcggcttcaccgagccggatgccggactcaacaccacggcgatcaagacctttgccgagaaggtgcctggcggttatcgggtacgtgggcaaaaggtctggacatcgaccgcccaggtcgccaacaagatcatgctgctgacccgtaccacgcgcctggaggactgcggcaagccgaccgagggcatcaccatcttctataccgacctcgaccgcgaacacatcgaggtgcagaagattcccaagatgggccgcaaggcggtggactccaacgccattttcatcgacgacctgttcatccccgatgaagaccgcatcggcgaggagggcaagggcttcagctacatcctgcacagcctcaacccggagcgtgtgctgatcggcatcgaggccatcggcatcggccaggatgcgctgcgccgcgcgacgcagtatgccaaggagcgggtggtgtttggccggcccatcggcgccaaccagggcatccagcacccgctggcggaaaagtggatgcagctggaggccgcgcaactgatggtcagcaaggctgcctggctgtacgacaacggccgcggctgcggcgccgaggccaacagtggcaagttccttggcgcacgcgctggctatgacgcctgcctgcaagcggtgatgaccttcggtggctttggttatgccaaggagtaccacgtcgaacgcctgctgcgcgaggtgacggtgacgcgcatcgcgccgatcaccgagcaactgatcatgtgcttcatcgccgagaaggtgctggatctgcccaagtcctactga

SEQ ID NO: 350107 - DNA, 459 bp, Pseudomonas aeruginosa
atggccggcctttgtttcgatgagtttgaactggatcagaccttcgcccacgagatccgccgcaccgtgaccgagagcgacaacgtctggttctgcggtgccacctgtaaccccgcacagattcacatcgatgccgattactgcagccagaccgagttcggccagccgctggtcaactcgatcttcacccttggtctggtaatcggcctatcggtacaggacacgacccttggcaccacggtggccaacttgggcatggaaggcgtgcgctttcccaagccggtcttcgccggcgacaccctgcgtgcgcagaccaccgtggtggagatgcgcgaaagcaagtcgcggccggatgccggcatcgtcagcttccgccacgagggcttcaaccagcgcggcgagctgatctgcacctgcctgcgccaagcgctgatgtggcgccgcgccgcgatcaaatga

SEQ ID NO: 350108 - DNA, 894 bp, Pseudomonas aeruginosa
atgtcccttttcagcaaagacgccctcaagggcaaacgtatcctcatcaccggcggcggtaccggcctcggcaagggcatggccacgcatctggccctgcatggggccgaggttcacctctggggccggcgcctggaggtactgcaagccgccgccgatgaaatcaaccaggcgtgcgacagcagacgtgcccacgtacaggccgtggatattcgcaatgccgagttggtcgacgctgcggtggaacgcatcttccaggaacacggcccgctgaccggcctggtcaacaacgccgccgccaacttcatcgcccagaccaaggacttgagtccacgcgccttcgaggccattacctctacggtgatgaacggcgccttcttcaccacccaggcctgcggcaaacgctggatcgaacgcggcctgaaaggctcggtggtgtcgaccctggtgacctggatctggaccggctcggccttcgtcacgccatcggccatggccaaggccgccgtgaatgccatgaccatgtcgcttgcagtggaatgggcgcgctacggcatccgcgtgaatgccgttgcccccggcccattccccaccgactacgcctggcagatgctcaaccccaccgcagaaagctcggtgggcgcgacccaggccagtgaagtaccgatgggccgctatggcgaaatcgccgagctggccaacctgatgctcatgctgcaaagcgacggttgcgactacatcaccggcgagaccatctgcatcgacggcggccaccacctggcggcgccctccactttcgccggcctgaccaaactgcaggacgaggactggaagaacatccgcgaagccagccagaacgcgagcaaagccagcaaggccgagcgcagcgtgtga

SEQ ID NO: 350109 - DNA, 921 bp, Pseudomonas aeruginosa
atgagcgcaagcaaactactcgacggcaaggtcgccctggtcaccggcggcggtcgtggtattggtcgtggtatcgccctggccctggccgaagccggtgccaaggtggtggtcaacgaccttggcgtcagcctggccggcgccagcgaagctgaaaacccggctgcggaggtggttcgtgaaattcaagccatgggtggtagcgcagtagccgaccaccactcggtggccgaccatcagcaggccgggaagatggtcggcacggctctgcaagcgtttggccgtctggacatcgtggtcaacaatgccggcaacctgcgtgactgtattttccatcgcatgagcgaggaggaattcgatgcggtcatcgccgtgcacctcaagggcgcgttcaacgtcagccgcgccgccgcgccgtttttcaaggagcaaggcagcggctctttcatccacatgacctcgacctcggggttgatcggcaacttcggccaggtcaactactgcgcggccaagtccgccatcgtcggtttgtccaaggccatcgccctggacatgcaacgcttcggcgtgcgctccaacgccgtcgcacccttcgcctggacgcgcatggtcggctcgattcccgacgaaaccccggaacagaaacgccgcgtcgaaggcctgaagaaactcatcccggagaagatcgcgcctttcgtcgtggcacttggcagcgatgccgccaaggacgtgtccgggcagatcttcggcgtgcgcaataacgagatctacctgttctcgcaaccgcgcccgatccgcacagcccacacccacgaaggctggacgcccgagcagatcgtcgaacgcgtgttcccgatgttcgagaacgacttctacgcgctgcacaaatctggcgatgtgtttacctgggacccggtttag

SEQ ID NO: 350110 - DNA, 882 bp, Pseudomonas aeruginosa
atgccgtcaacgcaggaaatccgaccgatgcgctcgttgctgttcgttccggccgacagcgaacgcaagctggcgaagagcgctggctgtggtgccgatgtgctgattctcgatctcgaagactcagtgctgccggtgaacaaggtgttggcgcgtcaggggcttgctacgttcatcagtgcgtatcagggaacgggtgagctgtgggtgcgggtcaacgacctcgattccggcctgctactcgctgatatcgctgcggccgttgcggcgggggctggcggtatcgtgctgccgaagttgcgtaatgccgaagagctggcgcgagtctgtgcgtatctggacatggccgaggccgttcatggccgagtgccgagcagcctgggcatcctgcccgtatgcacggagaccgccgaggcggtattacgcctgcctgagctgatcggccggccatggccacgtctgcgtggcatgttgtggggcgccgaggacttgagctctgccttgggcgcgggtgatccacgccatgaaaacggcaactggcggccgttgtaccagctggtgcgcaatcagtgcctgctgatctgcaacgcgttgcaggtgccggctatcgatacggtctatgtcgacgtgcgcaatgccgaaggttgccggctaagtgctgttgaggcgcgctatgacggtttcaccggcaaagtggcgatccatccggatcaggtggcggtgatcaatcaggcatttactccgaacgatagtgaagtcgctcatgcccgccgtgtggtggaggcgttctctggtggcgagggcgcggtaatgctcgatggcaagatgctcgacattccccacctcaaaggtgcgcggcggttgctggcgtcggtcgagtag

SEQ ID NO: 350111 - DNA, 1452 bp, Pseudomonas aeruginosa
gtgagagagagcgtaaccggcatccagtcctggggcgcctacataccgcgactgcgcatggcgcgcacgaccatcgcccaagctcacgcatgggcttttccctcgctccgcggcaaaggcgaaaaagctttctgcaactgggacgaagatgtcatcaccatggccgtcgaagccggtcgcgactgccttggcgacggcgcccgcgagccgttgcactgcctgactttggcctcgaccagcgcaccgttcgccgacctgcagaacagtacattgatagcgagcgccttgcgcctggaaaaccccatcgcctgcagcgatgtcggcggttcgacccgtgccggcctcactgaactggccaatcggttgagcgcccccatcgaaggctccggcggcttgctgctggccagtgaaaaacgctcggccaaaccggccagcgcccaggaactgcgctatggctgtggcgcagcggcgctgcaattgggcagcgaagacctcgctgcacgctttctcggtcgtcactgcagcagcattcctctggtcgatcatttccgtcagaacggtatcaagtacgactactacggcgaggaacgctggatacgtgacgaaggggtcgatcgcctggtacctgccgctatccgcgagctgctcgaccgcctgcaactcgaaccagcacacatcgcctactttggcctggctggcgtgccagctggcagcgatgcgcaggtggcgcgcaaactcggtatcgcgcccacagccgtcagcactttactcaccgacaaggtcggcgataccggcaccgctcacggtccgttattgctgatcgaagcgctggaaagcacacagcctggcgacatcatcctcatcgccgcgttcggccagggctgcgaagtgctcgccttccagcgcgagtccggcgggcgcccaccacggcaaggtctcaaggcgtccatcgccaacggcatcctgcaaagcacctacctgaagatgctgtcgttcgagggcgaaatcgaactcgactggggaccacgcgccgaaatcgacaccaaggccgcgctgacccagcaataccgcagtgccgaacagattctcggcttcgtcggcggtcgctgtcgcgcctgcggcaccgtgcagttccccagcctcgccacctgcctgcactgcgccgccagtgacagccaggagccgcatcccatcgccgacagcccggcacgcctggccacctattccgccgactggttgcagtaccacccggcgccaccgctgtacatcggcctggtgcagttcgacaacggcgcgcgggtgctgatggaagtcgtcgacgtgggcactgccggattggaggtcgggaccggcctgggcatggtcttccgcatcaaggcgcgcgacacccggcggcactacgaccgctacttctggaaggccagcccgcaagcggcgggcaccaccgactga

SEQ ID NO: 350112 - DNA, 1200 bp, Pseudomonas aeruginosa
atggcaagtggtatcaaggacaaagtggcgatcatcggcatgggctgcacgcagttcggtgagcgctgggacattggcagcgaacagttgatgagcgaagccttcgacgaagccttgctcgatgcgggcatcgaacgcggccagatcggcgcagcctggcttggctcggcgctggaccaggccaacataggcaactcggcgattcccctggccaccgccctgcgcttgcagggcatcccggtgacgcgggtggagaacatgtgcgcgaccggcaccgaggcgttgcgcgccgccacctacgcggtagccagcggcgcggtcgacgtggccctggcgatgggcgtggagaagctcaaggacaccggttacggcggcctgcccgtgccaaccaaaggcaccctcagcgatttgtggatgccctactgttcggcgcctgccggcttcgcccagctcgctgccggctaccgcgcgcgctacggcatgagtgccgaagaattgaaacgggccatggcccgagtgtcgtggaagagccatcagaacggcgcacgcaatcccaaggcgcatctgcgcaagccgctgacgctggaaagcatcatcgacgcaccgatcatcgccgagccccttggcgtgttcgattgttgcggggtcagcgatggcgctgcctgtgccatcgtcaccactccagaactggcccgggaattcggcaagcgccaacgcgtgaccatcaaggccctgcaactgtccgccagttgcgggcgcgaagccggcctcggcgactgggacggcagcaacgtgcccaatacccgtatggccgctcaggccgcttaccgcgaagcgggcattcgttcgccgcgtgaagaactgagcatgctggaagtgcacgactgcttctccatcaccgaactggtgaccatggaagacctcggcgtcgccgaagatggccaggcctggcgtgacgtactggatggccggttcgatgccgacggtgccctgccatgccagatcgacggcggcctgaaatgcttcggccatccgattggcgctaccggcctgcgcatggtctacgagcattacctgcaactgctcggtcgcgccggagaacgtcagttgcctgccccgcgcctgggcttgagccataacctgggcggcgtgccgtacaacggtgtggcagcgatcagcatcgtcggcctgctggactga

SEQ ID NO: 350113 - DNA, 645 bp, Pseudomonas aeruginosa
atggccactcagaaaaccacccccaaggcggccaagaccgtcagcaagaccggcaccaccaaaaccgcgaccaagaagacgcccgccacgaaaaccactgcatcaccagccagaagcaagaaagctgccgctgtcgagctcgatgaggcgcttgagcagaccagcacgttgccggcccacgacgacgagtcggccctgctcaacgtgcgtatcgcctttcaccttcacgacgtatcgcgcatgcgccgcgccgcctacgaccaggtgatgaaacccatcggtatcacccgagctcagtggtgggtgctcgcgcacctgtcgcgccaggacggcatgatgcagacccagctcgccgacctgctggaagtcggcaaggccagcgtcggtaccctgctcgaacgcctcgaggcagccaaactcatcgagcgccgcccggacgccgtggacaagcgtgccaagcgtgtctacatgctgcgttcggcgcaccaggtgatgaagaccctgatgcaggaagaagccaagttcaatgaccgggtgctggccggcctgaccctggatgatcgggaaaacctgctgcgcatgctcgcgcggatcaagaaagccctgtcagacgtggaagtgccgaaggatttggaactggagtga

SEQ ID NO: 350114 - DNA, 1257 bp, Pseudomonas aeruginosa
atgacgctgcggcaattcggcagcgctgcggcggtggtcgcgttgctacgcccgggcatgaacgtgttcgtacctggggtttccggcgaaagcctggctttctaccgcgccctgcaggctgagcctggagccgctgccggagtgcgtttcattggcgcgcatttccctggcatcaacaccagcgattacctcggtttgcatggcgaggcccgacaacgtggctacttcatgcagccaggcttgcgcgccggcctggcggatggccgtgcgcaattgctgcccctggactatccggcaatctggcgcgacctgctgacccaggatatcgatctggtcatcgcccaggtctcgccacccgacgctgaagggcgttgctccctcggcccgagccaggactttctaccggcgatctgggcacgcgcccggcaacgcatcgcgcatatcaatagccaggtgccgcccacggcgggctcatttcatatcgactatgccgagctgcatggcgcgttccactgcgacgagcccctgctggagtacgtgccgggcggggacacgccatccgccgcgctgatagaggcagtggtatcgctggtacgtgatggcgacaccctggaatgcggtatcggcacgttgccgaatgcgatccttggcgccttgcatgggcatcgcagtctgcgcgtctggtcgggcatggcgacggcggcgatggccggactgatcgatgcgggtgccatctctggtcacgcagcggtgaatgccggcgtggccctgggtgatgccgcgttctatcgacgtatcggtgatgacccgacgttcttctttcgtcccgttgcgcaaacccacgacgtacgacggatcgctgccttgccagggttctgtgcgatcaactcggcggtggaggtggacctgttcggtcaggtgaatgccgataccttgcgcggtcggcaggtagctggcgttggcggattaccggcgttcgtcagcggagccagtctgagcgaagggggccgctcgatcatcgcgctgaacgcggcgacccaggatggccgcttcagccgtatcgtcggtcaactcgatggtcagacaccggtggcactaccgcgccatggcgccgactacgtggtgaccgaatacggtatcgccgcgctacgcggcctcgatctgcacggccgcgccaaggcattgatcgctatcgccgccccggcgtttcgggatgagctggcgcgtggctggcaggaacgacttggcaggctctga

SEQ ID NO: 350115 - DNA, 399 bp, Pseudomonas aeruginosa
atgaatgctgttcccacggttggcgaagtgctggtgcaggtggacagtccgccgctcgacgcggaccgattgcgtgcctatgcccaggcctcgggcgatctcaacccattgcacttgcagacggacttcgctcgccaggccggcttcgacgatgtgatcgcccacggcatgctaggcatggcccaactgggacgactgctcagtgaacggtttggccaggagcgcatcctggcgttttccacccgtttcgttgccgtggttccggtcaacagcgtgttgcgttgcacggcatgtctacaggcgctcgacggtgaacaggcgaccctcagtctggaggcgacgctgctggccagcggcgaggtagcgatcagcggcagcgcacgtgtggtctggtcatga

SEQ ID NO: 350116 - DNA, 417 bp, Pseudomonas aeruginosa
atggcgcttgatcgcagccaggtcggttttgctttgccggccttcgacgtcatggtcgaaccggctcaggtggtggcgttcaacctggccatcggcggcaaccagaacgacccggtgccgccgaccttcatgaaagtgctggagggtgcgcacaacagttcgcggcgcattgtcgaggcactgggtatcgacctgcgcacgctgctgcatgccgagcagcaattcgactacaggcagccgctgcagcccggagaaaccgtgtcggtcagccgtcgcgtcagcgacatctatccggggcgcaagtcgtcgatgaccttcgtcgtcatcgagtcgcaggcactgcgctcgacgggcgatttgctctgtacgtcacggcagattctgctgatccgcgagcgtcaggagaggagatcatga

SEQ ID NO: 350117 - DNA, 1299 bp, Pseudomonas aeruginosa
atgaacgaaattcagacttccctggatgccgacggcattcttctcgcccggatcgacatgcccgggcgcagcatgaacgtgttctcccgcgcgttgatggacgagttggaccagttgatcggcaatgcccaggccgatccttcagtgcgtgcagtggtgctgacctccggcaaggacagctttcttgccggtgccgacctagacatgatccgcatgttcaccgagcgtgcccagcaggataaccacgcccaacgcgttgagctgtgcggccatctgggccgggtgttccgtcgcctggaactgagccgcaagcccttcgtcgccgctatcaatggtctggcgctgggcggcgggctggaggtgtgcatggcctgtcatgggcgtatcgtcgccgatgatcccgcgctgcaacttggtctgccggaaatcaagcttggcctgctgccgggggctggcggcacgcaacgcttgccccgattgatcggtgccgaaaaaggcctggccctgttgctgagtggtaaatcggttggcgcagcagaggcgttgtcgctgggcctggtcgatggcgtggtaccggccgagacgttgttgcaggtggctcgccaacgtgccctggcattggccgattcgtttcagccggcgccttgggatgtgccgggcgcaggcttcgacagcggtccttacgactttgaccagctcgatgtcgccgatgccatttgcgaccgtctgcagatcagcgcttaccagcgtcagcattacccggcctaccaggcgatcatcgagtgcgtggtcgatggctggtcgctgccgatgagcgaagcctgcgaccgcgagatggatatcttcgtcgacctgatccgcgatccggtggccggcaacatggtgcgtaccttgttcctcaatcgccagcgcgcggccaaggctggcttgctggcgccagacagcccgctgcagcacggcgagaaggcactcattccacgcctgactgccgtgaatgcgcaggctgagcgactgggttgcgaagagcctgatcggttgttggcgagcgcactggccgccgttggcatctggggcgaggggcaattggaggcccccgaactggctgacgtggcagcggtggcggcaggcgtgagcccagcctacagcggcggcccgttcacctatctgcgccaacagggacagaaatccttgcgccagcgtgccactgccctgcaggccgtggatgctcagttgttccaggtacccgaagcgctggggcgtttcttcacccggcaggatgagcacgcccatggcgcttga

SEQ ID NO: 350118 - DNA, 792 bp, Pseudomonas aeruginosa
atgagcgactacaaagacatcgaataccgcgtcagcgaaaacgccgtgcacatcaccatcaatcgcccggacgtgttcaatgcgttccgtgcgcaaacggtggaagaactgatcctggcgtttcgccgcgccgatgaggaaaagagcgtcaacaccatcatcttcggcggtgcgggtgacaaggcgttctgcaccggcggtgaccagaaggcgcacctctccgaagatggcctgtatggcccacgtggcacggttggcctgcccatcgaagaactgcagacggcgatccgtgatgtgcgcaaggtcaccatcgcccgtgtgcaaggctatgccatcggtggcggcaacgtgctggcgaccctgtgcgacctgaccctggcctcggaaaaagcccagttcggccaggtcgggcccaaggtcggctcggtcgatccgggcttcggaaccgcctacctggcgcgtcacgtcggcgagaagcgtgcccgcgagatctggttcctctgccgccgctacagcgcccaggaagcctacgacatgggcctggtcaacaaggtggtggcgcacgaggcgctggatgacgagtgcctgctgtgggccgcggagatcaaccagatgagcccgaccgccattgccatcgccaagcgttcgttcaacgccgacagcgagaacattcgtggcatcagcttcatgggcgtctcggcagtcaagggctactaccagagcgaggagtcgaaggagggcgtgcgcgcgttcaacgagaagcgcaagccggacttcaagaagtacgtctga

SEQ ID NO: 350119 - DNA, 768 bp, Pseudomonas aeruginosa
atgcgtggactagaagggcgcaccgcctacgtcaccggagccggcagtggtatcggcctggccatcgcccagcgcctggccgacgaaggcatggccatcggtattctcgatatgaacggtgaagcggctgcgcaggcggtggatgccatcgtctcgcgtggtggcaaggcccacgccgaggtctgtgacatcacccagtacgaccaggtctgccgtgcggtcgcagccctggagcaggcggtcggcccggcctggacgctggtcaacaacgccggttgggacaagccgatgccgttcctcaagaccgagccggcattctggcgcaaggtcgtcgacatcaactacctcggcccgctgcatgtgacccacgccgtggcgccgggcatggccgagcgcaatggcgggcggatcatcttcatcgcttccgatgccggccgtgtcggctccagcggcgaggtggtctattccggctgcaagggcgcgaccatcgctttctccaaggccctggcgcgggagctggcacgcaacaaggtgctgctcaactgcgtctgcccggggccgaccaacacgccggcgatggacagcttcgtcggcagcggcgagcagggccagaagattcgcgacgccatggtgcgcggcgtgccgctggggcgtatcggtgagccggacgactacccgggcctggttgccttccttgccagcgacgacgccgcgttcatgaccggccagaccatcagcatctccggcggcctgtcgatgcacggctga

SEQ ID NO: 350120 - DNA, 1152 bp, Pseudomonas aeruginosa
atgcttgcctcacgcagcgactggcgcagtgaacgacgcgcttacgaagagactcacggcatctttcgcgagcaggtgcgtcgcttctataccgacgaaatgcagcagcacggcgaacgctgggagcgcgagggcgtgaccgaccgtgccttctggcaacgtgccggtgcccaggggctgctctcgccgcaggtgcccgagtgctatggcggtgctggtctggatgtcagctacaacttcatcgtcaccgaggagttggcctggcacgccgcgcccaatggcttccagacccattccgacgtggccatcgaatacctgctgcactatggctccgaggcgctcaagcagcgctggctgcccggcacggtggatggcagttgcatcagcgccatcgccatgaccgaacccggtgccggctctgacctgcgggcgatgaaaaccacggcgcggcgcgacggtgatcacttcatcgtcaacggctcgaagacctacatcagcaacggtcagaacgccgatatcgtggtgactgccgtgcgtaccgactctgacagcggcgccttgtcgctgctgctgatcgaggccgaccgcgagggtttccagcgtggtcgcaacctggacaagatcggccagcacagtgccgacacctccgaactgttctttcaggatgtgcgcgtcccggtcagcaacctgattggcgaggagggccgtggcctgcagatgctgatcatgcagttgccgcaggagcgcctgtccatcgccctggccgcccaggcgggtgcgcagcgcgccttcgacgaggcactgcgcttcaccggcgagcggcagatctttggcaagcgcgtgctggatttccagaacagccgtttttccctggcggatatcagcgccaagttgcaggtcggctgggcccacatcgattgggcgatcagccgccacctggccgaccagctcagcgccgaagaggcggccgccgccaagctgtggcacgcggaaaccctctggcaagtggtcgattgcgccctgcaactgcacggcggcgccggctacatgaacgaatacctgatcgcccgtctgtggcgcgatgcccgggtgatgcggattttcggcggcacctcggaagtgatgaaagaaatcatcgggcgcgccctgtag

SEQ ID NO: 350121 - DNA, 1626 bp, Pseudomonas aeruginosa
atgctaggaaccatcatggatgtcccgctgctgctgtcgcgcctgatcgaccatgccgctgtccatcacgccaccaccgagatcgtcgcgcgccaggtcaatggcagcatcgtgcgggagaactgggccgggctgcagaagcgctccaagcgcctggccaaggcgcttgccgccaatggctacggactgaacgactgcctgggctcgctggcctggaacaccgttgatcatctggaactgttctatggtgtgctcggtattggtgccgggctgcatacgctgaacccgcgcatttcccatgacgacctgcggcatatggcggagaaggtcggcaccaaggtggtgttcatcgactccggcaccctggccctggccgagaagctgcagccgctggtgccgcacatcgaacgctggatctacatggacgaaggtgaagggctgccgcaatcgagcattcctggcctggtgaccaaggctgccttcgtcgagcccttcgacagcgacttcacctggccgcagttcgatgagcgccaggctgcaaccatctgcttcacctccggcaccaccgggcggccgaagggcgtggcttattcgcaccgcagcctgacccttagcgcgatcaacatgaccatggctgacatgtacggcaactaccggcccggcgcacttgaatgcgtgatgccgattgctgcggtgttccatgccaacgcctggatgatgccgttcagtgcgcccatgaacggccacaagctggtgctggttggccgtgccttcgatccggaaagcgtgatcgaactgatccgcagcgaaggcgtgacggttgccggagccgtgccgaccatctggcaagacctgatgcagaccctgcgtcgtctcgatctgcaggtgccgaccctgaagacaggcctgctcgcgggcacacgcccgtcgctggccttgtgcaaggagatgaatgcctttggcattcgtgtacatcagtcctggggcatgaccgaagtgcccggcgcggccaagtcgacacctccacctggttcgcttggttgcgacccgatgtacagcgatcaattgcagcactgccgccaggggcgcatcggctttctcaccgaggtcaagctgctcgacgagcagggcgaggcgcagccgtttgacggtgctcactccggtcacctgctggtgcgcggcccgaccgttgccggtggttatctgggcgatgaaggtgacaaggccgaatggctggatacaggcgacatcgccaccatttacccggacggcaccctggaaatcgtcgaccgctccaaggacgtgatcaagtccggtggcgagtggatcagcactctgcaactggaggcggcggccctcagccacggcgcgttggcttcggcagcggcgatcagcatcgagcatccacgctggcaggagcggccgctgttgctctgtgtccttgctcagggcaagcaggtcgaggcgcaggagctgctccagcacatggccgcgaccctgccgaaatggtggctgcccgatgaggtgcgcttcatcgagaaactgccactgacgccgaccggcaaggtcgacaagatggccctgcgccgcgagcacgcccagcgtgcttcgcagatcgtgttctga

SEQ ID NO: 350122 - DNA, 1986 bp, Pseudomonas aeruginosa
atgagcccttcgtccgcctcccctcccgctgccgccgatcaccagcagcctctctggacgcccagcagcgcccgccagcagcgagcccgtatcagcgactacatgcactggctcggcaagcgacaggtgccggtcagtttcagtgactaccccagtctctggcagtggtcggtggagcagcccgaggtgttctggcaaagcatctgggactacttcgaggtggaatcgccaacaccagccagccaggtactaagccataccaacatgctcgacgcacgctggttcgagggctcccaggtcaattacacccgccaggtgttccgtcattcccgcacggaccggccagccattctcttcgccgacgaaaatggcgcgcgccagtcgctgtcctggggggctttgcaacagcaggtcgcatccctggcgtttcacctgcgcgaactgggcgtagtagccggcgaccgggttgtcgcctacctgcccaatcgccccgaagccgtggtggcctttctcgcctgcgccagcattggcgcaatctggtcgatcagttcgccagacatgggcgaagtcggcgtactcgaccgcttccgtcagatcgaacccaaggtgctgatcgcctgcggccagtaccgctacggcggcaagacctacgaccgtcgcgaaaccctgcgcaacctgcgtcaggccttgccgacgctgcgccagtgcatcgtggttggcgacgctatcgatgacgccctgagctgggacaacctgacggccgacgacaaacctctgcaacccgcctggctgccattcgatcatccgctgtggatcgtctactcctccgggaccaccggtacgcccaaggccatcgtccacggtcacggcggcatcatcctgtcgatgtccgtggtgctcggcctgcacaacgacctcggcccgaatgatcgttatcactggtattccagcaccggctggatcatgtggaactgccaggtcagcggcttgctgctcggcactaccttgtgcctgttcgacggcaaccctggctatcccgacctcggcgcgctgtggtgtttcgctgccgacagtcgcgctaccttcttcggtgctggcgcagccttctatgcagcttgcctgaaggctggtatccagccggcgaagattgccgatcttggccagttgcgctcggtcggctccaccggctcacccctgtcgccggagtgctacgaatggatctaccgcgaagtagacgacgacctgtggctgacgcccatgtccggcggtaccgaccttgccgggccgttcatcggcggcgtgccgatcctgccggtgtatgccggcgagatgcagtgccgagtgttgggcgcgtcggtcgaagccttcgatgaagccggccagtcattgatcgacgaagtcggcgaactggtttgcacccggcccatgccaaacatgccgctgttcttctggaacgacgccagccacgaacgttatcgcgacagttactacgacacctaccccgacgtctggcggcacggcgactggattcgcatcaccccacgcggcggcgcgatcatctatggccgctcggacgccaccatcaatcgccacggcatccgcatgggcaccagcgagctgtaccgcgcggtcgaggccttgccggaaatcctcgactgcctggtggtcgacctcgaataccttggcaagccgtcctacatgccgttgttcgtcgtgctcaaggacggcgcgcccctcgatgacgccctgcgccaacgtatcgaaagctgcattcgcacctcgctgtcggcccgccatgtgcccaacgagatattcgctgtcgccgatgtgccacgcaccctgtctggcaaaaagctggagctgcccatcaagaaactgctgatgggccaggtgctggacaaggtggtcaaccgcgacgccgtggctaatccggacagcctggcgtggtacgtcgatttcgccgcacaacgcgccgccaatgcctga

SEQ ID NO: 350123 - DNA, 1185 bp, Pseudomonas aeruginosa
atgagcacgcccgatatcttcttcatcagcgccacccgtaccgccatcggcaccttcggcggcaccttgaaggacattcccgtcaccgacctagccagcctggtagtcaaacaggcgctgttgcgcgcaggcatcgaaccgacgcggatcggccatgtggtgatgggcaacgtcatcccaacctcgccgcaggacatctacctgtcgcgagtcgcggcgctcaacgccggcattccccaggaaaccccggcgttcaacgtcaaccgcctgtgcggctccggcctgcaagccatcgtctccgcggcccaggtattgcgcctgggcgaggctgaagtggtggtggcaggcggtgccgaatccatgagtcgcggcccctataccctggccggtgcgcgctggggtaaccgcatgggcaacgcccaggccgaggatctcatgcttgccgtactgcacgacccgctgcaaggcatgcacatgggcgtgaccgccgagaacatcgccgagcgttttggcatcagccgtgcagagcaggacgaactggcgttgcaaagccagcagcgtgcttcacgcgccatcgccaaaggctatttcactgaacagatcagtgcggtgccggtgaagacccgccagggcatggtcgacttcgaccgcgatgaacacgtgcgcagcgatgtcgacctcgaccagttgcaacggatgaaaccagtattcaaaaaggacggcagcgtcaccgccggcaatgcttccggcctcaatgacggcgcgtccgcgctggtcatggcaacggcagacgctgtacgtgcacaagggttgaagccgatggcacgcctggtcagctatggccactctggcgtcgcgccggaactgatgggcctcgggccgattcctgcgacccgccaggcgctggagcgtgcaggcttgaaagcgaccgaccttgatgtcatcgaatgcaacgaagccttcgccgcccaggcctgcgcggtggtacgcgagctggagctcgacccgcagcgggtcaaccccaacggttcgggcatctcgcttggccacccggttggcgcaaccggcgcgattcttaccaccaaggccatctacgagctgcaacggacccatggacgctatgcgctgatcaccctgtgcatcggcggcggccaaggcatcgccatgatcatcgaacgtacgtga

SEQ ID NO: 350124 - DNA, 489 bp, Pseudomonas aeruginosa
atgcgcgagctggccaggcacctgggcatctccagcggctcgatttaccaccacatcgagagcaagcaagctctactcggtgaactgatcgaagacctctaccagaccctgctggccggcaacccccaagcctcacgcttgcgcaaaaccgcccaggaagaactgcgtgacatcattgactggcatctgctcgtgcatgccatgaagacaaagcagttccttctcgccgaacgcgatgtgcactatctcgacgagcaataccgcgcgcccatcgaaagcctgcgccgtgaataccagaaacgcctggccagccggattgccgcagcgcgcggttgcccgccctctcccttgatccagaagctctgcgccagtctggtctcagttctcaacaaccttcccgcttggctgccagcggatatggagcacagccgtcagagcctggttatacgcaaccttataaaagggatggtcgatagtgcgctggagtga

SEQ ID NO: 350125 - DNA, 153 bp, Pseudomonas aeruginosa
atggaaggctacatgtgcaccttcacccattacgatccgttgtacaaaacgacctacctccctcttgaagcagccattcgctggtgtgctctcaccgcctacgaggccgagatcctagatgctaccaactcgcctgaagttttcgaccactga

SEQ ID NO: 350126 - DNA, 504 bp, Pseudomonas aeruginosa
atgaccgaagaagaacatgatgccaagctgcgcgccgaggcccaggcgctcagggaggaagtcgcagagtacgaggctctctgcaaccgtcaggccgagttgctgagccagtccattgtcgccattcgagggccagagcctgaactcacgcgctggggatatgccgacttaccactacgtgtaaagacgattgttgaggaagtcgcagcactgcgcgcaagggtggtggttgtgccggagcggaagctcctgaatgccggcgtcccagggctgaatcgtaatagcggctggaacgactgcctcaacgaactggcgcgcctcaacggcaagacggtcagcgaggggctgttgcgcgaagtcgcgcgccacttgggaaactggcttgaactccacgaatgcgagtgcgacggcggattccactactgcggccgcgaccaggtggcaaagaccaaccgcgaactccgcgccctgctcaaccaggacaaggagaacggcaatgggtga

SEQ ID NO: 350127 - DNA, 534 bp, Pseudomonas aeruginosa
atgaccgaccacgcagagctgcggaggctggctaaggcggcaacgcctggaccgtggcgtgttcaaaccgggtgcagttggcgccgcatcggaaccgacagcggtgatggagatgtacttcgtccatgcacgcacccgcatgatggctggcctgacatagtagcgcccgcagagaatttgaaatacatcgcatccgccaaccccaagaccatcctcgccctgctggacgagatcgacgggctgagcgacgagttatccgcatgcaccgagcatcctggcggatgtgggtattggcgcgaggccgccaagcgtagagccgaagagcgcgaccggctgagggcgcagaacgatgcgctgcagggagcgctacatgccgttcaagctgaggtagacgggaatctccgcccacttacccgcgacctcgtgaacatggtcagcggcttgaataacggcactcacccgaatgacatctacgaacactgcgacgagatcgaaaggatcatcggagcagccttgaaaggagcaacgcaatga

SEQ ID NO: 350128 - DNA, 294 bp, Pseudomonas aeruginosa; identical to SEQ ID NO: 340529

SEQ ID NO: 350129 - DNA, 795 bp, Pseudomonas aeruginosa
gtgcaccacgccttcggcgattaccagcggttgtcgcgcaaggtcttcgccggcctgatgagcaagcgcctgagcctgctggcggtgtccgacgcggtgcgcgacgatatccgccgttgcctgccgaagtggccggcggagcggatcgagacgctctacaaccgcatcgacgtcgctgcgctgcaggccgagcaggtcgagcgcctgagtgcgcgccggcaactgcgcctgcccgacgaggcctgggtggtaggcaacgtcggccgcctgcatccggacaaggaccaggctaccctgctgcgcggcttcgccgccgcgctgccgcgcctgccacagaacagcctgctggcgatcctcggcagcggccgcctggaagagcagctcaaggacctggcctgcgaactgggcatcggcgagcgcgtgctgttcctcggccaggtcgaagaggcacggcgctacttcaaggcgttcgacgccttcgccctgagttccgaccacgagccgttcggcatggtcctgctggaggccatggtcgccggcgtaccgctgatcgccaccgcctgtggcggcgcccgcgaagtggtggaaggggtcggtattctcttcccgctgggcgacgagacggccctggccgagggcctgacccacctggcggcgctcgaccgccgccagcgcgaggcctgtgcgcgactcatgctcgagcgcctggagacacgcttctccgacgccgcggtgcgccgcgaattctggcgcctgccgacgattgccggcttcgcttcggagtctgcatgctga

SEQ ID NO: 350130 - DNA, 708 bp, Pseudomonas aeruginosa
atgtctgccctcaatgcgtttcgccaacgctacctggtgaggttctggtcgccgctgccggcgctggtcgccctcggcgtcgcctccgcctactacttcgcgctcaccggcaccttctgggcggtgaccggcgaattcacccgctggggcggccacgtgctgtcctggttcggctaccagccacaggactggagctacttcaggctgatcggccttcaaggcacgccgctggaccggatcgacggagtgatgatcatcggcatgttcctcggcgccctgtgctgcgccctctgggccggcaacgtcagcctgcgctggccgaccagcaaacgccgcctgctgcagggcctggtcggcggtatcgtcgccggcttcggcgcgcgcctggcgatgggctgcaacctggcggcgttcttcaccggtatcccgatgttttccctgcacgcctgggccttcatgttcgccaccgtcggcggcgcctggatcggcgtgaagatcagcctgctgccgttcctgcgcacgccgctgaaagtcggcgccacggccagcgccctgcccgacgccgaaagcctggcccgacgcacacgcctgcaggcccgcctgggcctggcggtgctggcgctcgccgcgctgttcgccgcctggcgcttcgaggtatcgctggtgcgggcatggcctgcctgttcggcctgctgttcggcggcctga

SEQ ID NO: 350131 - DNA, 417 bp, Pseudomonas aeruginosa
atgagaatcgctcccatctcccgctcaccgctgctgcagtggctgagcttcgccctctgtgcctgcgtgctggtcaacgcgctggcttgcggcgtcctgcacctgcaggcgctgggagtgggcagcgacaaagggcagaaggccagcgtcgggctgttctgcgtcgccggtgccagccaatggctatccctggatcccgacgacgggtccgctggcgatccggtaccggtcaatccccagttgccggtgagctgcccgatgtgcagcgccctggtgctgttcgtcgcactcggggtgatctggtcctggcgcttgcaacggcgacgccaggcgcgtttccgcccgcccgccacgcgcgagccggtgccgccccggtacgtctggccgccggccaacccgcgcgcttcccccgcctga

SEQ ID NO: 350132 - DNA, 1341 bp, Pseudomonas aeruginosa
atgatgcccaaccgccattcgctgttctggcgcctggccctggtgctggtggcgttcttcctgctatcggtatggctgtcctggacctggggacgtagtgctgaactgaagggttactacctgtccgccgaagcccgctccgccttggcggattatgcgcggcgagccgagcgtgcctggctcgacgatggccgcgagggcatcgaccgttggctggccgagccgcgccagcaggcgctggactgggtggtcgtgctcgacggacggctgcaatcgctgggcagtcgtccgctcaccacggaggaagccgagcgcctgactttcctgcggggcgtcgactggccgatgagttcccgctcgctgtcgcggccattcatcaacctgcgcttccccgaacatccggagcaaggcagggtggtcctgcgtcttcccgccgagttcgtccctcccggcttgtcgccggccaagcgcctggtcacccacggcctggtgccggccgggctggccctgctgctgggagtgttgctgtatcggcgctgggtagtgccgctgggacgcctgcgagcgcaggccaatgccctgcgcggcaacgacctgacggcgcgtacgcaggcagagatcagccggcgcagcgacgagctgggcgatctggggcgggcgttcgaccatatggccgagcgactcgacgagcacatggtgttgcagcgccaactgctccgcgatctctcccacgagctgcgcacgccgctggcgcgcctgcaggtggcggcagagggcacgctgtccgcgcagctcctgcgcgagcgcctggagcaggaggtacagggcatgcagcaactggtggacaacaccctggagctggcctggatggacaccgaacgcccggtattggcgctggaggacatttccatcccggcgttatgggacctgctggtggagaacgcacgcttcgaaagcggctgggccgccgagcggttccgcagcgatctgcccgaggattgtgtcgtgcgtggcaacctcaatgcacttgcccaggccctggagaacctgctgcgcaacgccatccggcattcgccggagggcggcgtgatccgcctgcatggtcggcgcgaaggaagttgctggtggctttgcctggaagaccagggcgagggtgtggccgagcaccagttggagaccatcttccgcccgttcacccgactgtcttcggcacgtaccggcaagggcttcggcctgggactgagcattgcccgtcgcgccgtggtgctccagggcggccgcctatgggcggaagccgccgatccggggctgcgcctgtgcctggtgctgccttctgcctag

SEQ ID NO: 350133 - DNA, 228 bp, Pseudomonas aeruginosa
atgagcgccgacgaaaaacgcatacgagagttcgcctaccagatctgggaatccgagggctgcccagacggccaggccgaacgccactgggccatggcccggcaactggccgaagcggaagccgccgcggcggcaccgccgagggccacgtccccggcgcggcccgccagcgaaaaaccggcggcggccaagccgcgcagccgccgcaagcccgaagcgggcgaatga

SEQ ID NO: 350134 - DNA, 480 bp, Pseudomonas aeruginosa; identical to SEQ ID NO: 332569

SEQ ID NO: 350135 - DNA, 294 bp, Pseudomonas aeruginosa; identical to SEQ ID NO: 332570

SEQ ID NO: 350136 - DNA, 591 bp, Pseudomonas aeruginosa
atgagcgccaactcgctgctcggcagcctgcgcgagttgcaggtgctggtactcaacccgccgggagaggtcagcgacgccctggtcttgcaactgatccgcatcggttgttcggtgcgccagtgctggccgccgccggaagctttcgacgtgccggtggacgtggtcttcaccagcattttccagaatcgccaccacgacgagatcgctgcgctgctcgccgccggaactccgcgcactaccctggtggcgctggtggagtacgaaagccccgcggttctctcgcagatcatcgagctggagtgccacggcgtgatcacccagccgctcgacgcccaccgggtgctgcctgtgctggtatcggcgcggcgcatcagcgaggaaatggcgaagctgaagcagaagaccgagcagctccaggaacgcattgccggccaggcccggatcaaccaggccaaggcgttgctgatgcagcgccatggctgggacgagcgcgaggcgcaccagtacctgtcacgggaggcgatgaagcgacgcgagccgatcctgaagatcgcccgggagttgctgggagacgagccgtccgcctga

SEQ ID NO: 350137 - DNA, 879 bp, Pseudomonas aeruginosa
atgcgcacacccgcctggctcggcagcggcatgccgctgctcttcgtgctgctctggagcactggattcctcggcgccaagttcggcctgccgtacgccgagcccttcaccttcctggccatccgcctgctcctcgcggccgccctgctggccgccttcgccctgctcagcggtgcgccctggccgggctcggcacggctggccgggcatgtcgcggtcgccggcctgctggtccatggcctgtacctgggcggggtgttcctcgccatcgagcacggcatgtcggccggcctgacctccctgttggtcggcctgcaaccgctggctaccgcggccctggccggcatctggctcggcgagcgggtcagccgccggcaatggctgggactggcgctcggcctggctggcgtagccctggtggtgctcggccgcatccacggtggcgccgacggcctggcctgggccgcggtgctggtggcgctggcggcgatcacctgcggcacgctgtaccagaagcgcttctgcggcggcatggacctgcgcaccggcggcgtcgtccagtacctggccagcggcgccctgctcggcctcgccacgctgcttttcgaaagccgcgaggtgcagtggagcacgccgttcgtgctgaccctcggctggctggtgctgggactctcgttcggcgccgtcggcctgctctacacgctgatccggcatggcgccgcgtcgaaggtggcgagcctgttctacctggtgccgccagtgaccgcgctggcctcctggctgctgttcgacgagcgcctggcgccggcggcgatcggcggcatgctgctggtgatgctcggcgtcgcgctggtcaactggccgggccggcgcgcctga

SEQ ID NO: 350138 - DNA, 1059 bp, Pseudomonas aeruginosa
atgactcccgatcaacgatttgcccgttgggttcaagtcgctatcgcggtattcgtgttgctgttcgtctacttcctggtcgccgacctgtggatgccgctcaccccgcaggcccagttgacccggccggtggtgcgcgtcgcgccgcgtgtcagcggtcaggtcgccgaggtgctggtgtccaacaacggccacgtgcagcccggcgaagtgttgttccgcctcgatcccgagccgttccaactggccgtgcgccaggccgaactggcactggaggaagccgagcgcaccaaccgcgagctggatgccgccatcgcctcggccaaggccgacctcctggccgcgcgcagcagcgccggcgagctggacagcgaggcgcgccgcaccgcccaactggtgcagcgccaccatgtgtcgcagcagatgcacgagcaggtcagcgcccaggcccaggccgcccgtgcccgggtcgccgcggcccaggcgcggatcggcgagctgaccgcgcgacgcggcacggccggcgaggacaacctgcgcctgcgccaggcgcgtaacgccctggcccaggcccgtctgcaactgcaatacagcagcgtccgggccgaccgtgccgggaccctgagcaacctgcaactgaccccgggcacctacgttccggccggaacgccggtggcggcgctggtggacgaccgcatcgacatcgtcgccgacttccgcgagaaatcgctgcgctacgtgcgccctggcgaccgtgcggcggtggtgttcgacgcgcgtcccggcgaagtgttcggcgcgcgggtggcggccatcgacgccggggtcaaggagggccagctggacgccaacggcgacctcgccgcgccggtcacctccgaccgctgggtccgcgacgctcagcgccagcgcctgcacgtggtgctcgacgaacttcccgaaggcctgctgcccaccggtgccaaggccaccgtgcagctctatcccggcgacggcctgagccacctgctcggtcgcgcgcagatcgtcgccatcagcctgctgcactacgtctactga

SEQ ID NO: 350139 - DNA, 609 bp, Pseudomonas aeruginosa
atgcgtggtcaagaaactcagctacaatttctaatagaacagtttccatggattcttgataagaagtacgaaagctacattccacggcgggcgctgaaaactatttgtgaggaggcgcagcagcaggggatttttactgcgaggcccgtacatgttgcttcccctgctgactatactaagcctgattttgtgttttttgtggactctgcagatactcatatcttggttgttgagctgaaaggtccggatgctgtagctagctggccggagttcgagcagctccactcatatatgacatacttacagtctagagattcttctaaaaaagttcgtggcgtattattggccagagagtttgaccctggaattcaagagcaaaaaagtaatgccatggaatatgtgaagtggcaggatgtattaaaactctcgcgtcgagaccacatgcagttgctcggagggttgcttgcaggggcagatgctgacccgaacgatgttcgagtcagacaagtctgtgaccttggtggacatagcgttactggttttcttgctcaaatggccaagacatcccctgagcttgacgagattgtaaaggcggtcaagaagtcttaa

SEQ ID NO: 350140 - DNA, 1122 bp, Pseudomonas aeruginosa
atgaccgcagaaaccctcgccaagacgcccctgcacgccctgcacctggaactgggggcgaagatggtgcccttcgccggctacgacatgccggtgcagtacccggccggggtgctcaaggagcacctgcacacccgcgagcaggccggtctgttcgatgtctcgcacatgggccagatccgcctggtgggcgccgatgcggcgctggcgttggaaagcctggtgccggtggacatcctcgtcctgccggtgggccagcagcgctacgcgttgttcaccgacgagcagggcgggatcctcgacgacctgatggtggccaacctcggcgattgcctgctgctggtggtcaacgccgcctgcaagcaccaggacctggcgcacctgcgtcgtcacctggagggccgttgcagcgtcgagccgctgttcgaggagcgtgccttgctcgccctccagggaccggcggcggtgcgggtgctggagcgcctggcgccgcaggtggcgcagatgaccttcatgcagttcgcccgcgtcgagctgctcggccaggactgctacgtcagccgctccggctataccggcgaagacggctacgagatctccgtgcccgccgcccatgctgaggccttggcgcggcgcctgctggccgagccggaagtggcgccgatcggcctcggcgcgcgcgactcgctgcgcctggaagccggcctgtgcctctacggccacgacatggacagcgccaccacgccggtcgaagccagcctcggctgggccatttccaaggcgcgtcgcgccgacggcgtgcgcgctggcggcttccccggcgccgagcggatcttcgcccagcaggcgcagggcgttgccagcaagcgcgtcggtttcctgccgcaggggcggatgccggtgcgcgagggcgccgagatcgtcgatgcccagggccgggcgatcggcaaggtcagcagcggcggtttcggtccgagcctcaacgcgccgttggccatgggctacgtgccgaacgaactggccggcctgggcagcgaggtgacggcgatggtgcgcggcaagccggtgaccctggtggtcagcaagatgcccttcgtggcgcagcgctactaccgcggttga

SEQ ID NO: 350141 - DNA, 1377 bp, Pseudomonas aeruginosa
atgtccctgagtgtcttcgatctgttcaagatcggcatcgggccgtccagctcccacaccgtggggccgatgcgtgccgccgcgcgcttcgccgaggggctgaggcgcgaggggttgctggaggccactgccagcgtcaaggtcgagctgtacggctcgctcggcgccaccggcaagggccacggcagcgacaaggcggtactgctcggcctggagggcgagcagccggacacggtggataccgccgcgattcccgcccggctcgataccatccgttccagcggcgagctgcgcctgctcggcgagcggccgatccgcttcgtcgagaaggaacacctggcgctgatccgcaagccgctggcctaccatcccaacggcatgatcttccgtgccttcgacgccgccggcctgcaggtccgcagccgcgagtactactcggtgggtggcggtttcgtggtcgacgacgaggccgccggcctcgaccgcatcgtcgaggaccgcacgccgctggcgttccccttcaagaccgcgcggcaactgctcgaccattgcgtccgcgaaggcctgtcgatcagccagttgatggccgagaacgagaaggcctggcgccccgccgaggaaacccgcgccggcctgctgcgtatctggcaggtgatgcaggattgcgtcgaggccggctgccgcaacgagggcatcatgcccggcggactgaaggtcaggcgccgcgcggcggcgctccaccgccagttgtgccagcggccggaggccggcctgcgcgatgctctcagcgtgctcgactgggtcaacctctacgccctggcggtgaacgaggagaacgccagcggcggccgcgtggtgaccgcgccgaccaacggcgcggcggggatcattccggcggtgctgcattactacgcgcgcttcatccccggggccgacgacgacggcgtggtgcgcttcctgctcaccgccgcggcgatcggcatcctctacaaggaaaacgcctcgatctccggcgccgaggtcggttgccagggcgaggtcggggtggcctgctcgatggccgccggggcgctctgcgaagtgctcggcggtagcgtgcagcaggtcgagaacgccgccgagatcggcatggagcacaacctcgggctgacctgcgacccggtcggcgggctggtccaggtgccctgcatcgaacgcaacgcgatggcttcggtgaaggcgatcaacgcggcgcgcatggccctgcgcggcgacggccagcacttcatctctcttgacaaggtcatccgcaccatgcgccagaccggcgccgacatgaaaagcaaatacaaggaaaccgcgcgcggcggcctcgccgtgaacatcatcgaatgctga

SEQ ID NO: 350142 - DNA, 765 bp, Pseudomonas aeruginosa
atgatgtactacttcgtgcccaagcaggccgagcgtccggtctactcctaccgcctgtccatcgtccacttctgggcgctgatctccctgtacatctgggccggcccgcaccacctgcactacaccgcgctgccggactgggcgcagtcgctgggcatggtgatgtcgctgatcctcctggcaccgagctggggcggcatgatcaacggcatgatgaccctctccggcgcctggcataagctgcgcaccgatccgatcctgcgcttcctggtggtatccctggccttctacggcatgtccaccttcgaaggcccgatgatggcgatcaagaccgtcaacgccctctcccactacaccgactggaccatcggccacgtgcacgccggcgccctcggctgggtggcgatgatctccatcggctcgctctaccacctgatcccgaaagtcttcggtcgcccgcagatgcacagcatcggcctgatcaacgcgcacttctggctggccaccatcggcaccgtgctgtacatcgcctcgatgtgggtcaacggcatcacccagggcctgatgtggcgcgcggtcaacgaggacggcaccctgacctactccttcgttgaagcactggtcgcaagccacccgggcttcatcgtgcgcatgatcggcggtggtttcttcctcaccggcatgctgctgatggcctacaacacctggcgcaccgtgcgtgctgccaagccggccgaatacgaagccgccgcgcagatcgcctga

SEQ ID NO: 350143 - DNA, 1347 bp, Pseudomonas aeruginosa
gtggaacgggtcggcctggacgacaacttcttcgaactgggcggtcattcgttgctggctacccgggtgatttctcgggttcgccaggagcagcagttggacgcaagcctgaagacgttgttcgagcggccggttctggaagcgttcgcccagggattggaacgcacgacagatgcggtctcgacgataccgcttgccgatcggcagcaaccgttggcactgtccttcgctcaggagcgtcagtggttcctctggcaactggagccggaaagcacggcctaccatattccgagtgccttgcgcctacgcgggcggctggacgtggatgccttgcaacgcagcttcgacagcctggtcgcgcggcatgaaaccttgcgtacccgcttccggctggagggagggcgttcgtaccagcaggtacaacctgcggttagcgtttccatcgagcgggaacagttcggtgaagaaggcctgatcgaacggatacaggccatcgttgtgcagccattcgacctggaacgggggccgctgctgcgggtgaacctgttgcaactggccgaagacgaccatgtactggtgctggtccagcaccacatcgtgtccgatggttggtcgatgcaggtgatggtcgaggaactggtccagctctatgccgcctatagtcgagggctcgaggtagcgctgccggctttgccgatccagtacgcggactacgccctgtggcagcgcagctggatggaggcgggggaaaaggagcgccagttggcgtactggaccggcctgctgggcggcgagcagccggtgctggagttgccgttcgatcggccgcgtccggcccggcagagccatcgtggcgcgcagttgggtttcgagctatcgcgggaactggtcgaggccgtgagagccttggcccagcgtgaaggcgccagtagtttcatgctgttgctggcctcgttccaggcgctgttgtatcgctacagcgggcaggcggatatccgtgtcggtgtgccgatcgccaatcgcaaccgcgtggagaccgagcggctgatcggcttcttcgtcaacacccaggtgctcaaggccgacctggacggtcggatgggcttcgacgagctgctggcacaggcccgccaacgcgcgctggaggcccaggcgcaccaggacctgccgttcgagcaactggtggaagccttgcagccggagcgcaatgccagccataacccactgttccaggtgctattcaaccatcagagcgagatacgctcggtgacgcccgaggttcagttggaggacctgcgtctggaaggcctggcctgggacggggccagactgcgcagttcgacctga

SEQ ID NO: 350144 - DNA, 1929 bp, Pseudomonas aeruginosa
atgagtaatccaactgttaaatatcgaccagagatagacggactccgcgctattgcagttttgtcggtcattctttttcatgccggatttaagtcattctctggaggatttgttggagttgatgttttctttgtaataagtggatttttgataaccacgattcttattaaggatcaagaacgcggcggtataagtataatcaagttctaccaaagacgcgccaagaggattatgcctgcgctattcgtggtgatacttgcaacaatgccgttggcgtgggtgtttttgcctccagaagaactgaaaagttatttctcaagcatcgcggccactgcaacgttctcatccaacatcctgttttggtatgagtctggatattgggatacggcaacaacgctcaaacctcttattcacacatggagccttgcagtagaggagcagtactacattgtttttccgttgctggtgatggccgtctggcgactagggcgcgcatggttcgccgtcattaccttggccttggtagctgccagcatgtggtttgctgagcactatctggctactgatccaatgatgtcattctatatgctgccagcacgcgcctgggaattgcttgtcggctcactaaccgcgctctacctgctacgcagaacggcgccgatatcgtcagggccgcttaatcaagcactgtcgttatccggcctatcgatgatcgtatacgccatactagcttataacgagcagacaccattcccaggcatcaatgccgcgctgcctgtgattgggactgctctgatcattgctgccaccggtccgcgtactctggttggagtcattctcagttctaggccattcgtaatgattggcctgatcagctatagcgcttatttgtggcaccagccaatactggcaatcttcaaactccgcagctttggagagctatcagcagagcactctgcgattgcgatttccttcacgcttttgctttctatcttgagttaccggctagtcgaaaaacctgtgcgcaacggggccagcgccctaggtaagcgacctatagcgtctacagcgattgctattgttacgctcatatctgtagcgtcgtatggctatgtaaaggaaggattcccggaaagacttgatagcgtctacagcattaattctcagctaatagagaacgctaatagaaagctttttatagaagatactgacccgcaaagcgataaaccagtggtacttatagttggcgactcctatctaactaactggtccatagggatttcaagccaagtagataaaagccgctatcgcgtaatttccgtaagctatttagggtgcaagttcagtgatatttccaaatccctgaaagcatccccgacagaatctcgatatacagagaactgcgaaacattctcaaaagtcactagcgatagaaagctgctagactctacagagaagatattcatcgtttcacacagacctttctcctacagatacaacatgtacaggtttgatctgtataagaagctaaagaatgaaaccggagccgacctatacgtatttggcaactacttccaacttgatgtagataaaaagcaatcatgcctatccacaatgttcatatcgaaaaattcagcaaaatcctgtatagatgccgcaacctatgatggcagcgaaccatatgggaaatactcttcgagaatgagagccccatatacatacatcgacgtaaaagagcttgtctgctctatcttaggttcttgtccgtatgatgcgagcggagtcccattcattactgacgcgaaccacatgacggcaacgttcttgatctctgttatgaaagacatagcatcacgcaggtccgactatttaaaatcagtcggacttggtgatgtatttctaaaagacctgccagtaacagggggttga

SEQ ID NO: 350145 - DNA, 894 bp, Pseudomonas aeruginosa
atgccccggaaacgaaaaagccccggcagatgccagggcttcggtggtgactttcgccagaggcgaatttgtcacgatggagataagtctgcctcagccgcacatttgtcgtcaagcagcatttttcatcatttttatcgccgaagagacaggcacaagcgcggccttgtcgagatcgttgcaggcatcgaaacaggcctggataaagccgtcccattccctatcccagtttcttgggtcaagttcaatgccatgcatacggtcaagccaggcgcggaacgactcagggcttgggcagggatcaacgccttcgctctggccgccctggtgcatgcgacggtaccggaacaagactcccgcagcgacatagcgcgccttctcgaatttcttcgtgtacatccttgggccagtttcgtacgcgaccctgaacacgatctcttccgctgtctctttgtcgtcttcgccggccatcgggctgtacatgtgattgccgaacaccttcaggtgcgccgggagggtatcgatcgccttttgaatcacgccggcgagcgcctggtgaacagcccgaggagtgctaatgtcgcgctcagtcctggtctggtggattcctggcacgaaggtgtgctggctgtaggagacagcatccccatcatcgtcgatctcggtgatgcggcgccggacatatccgccagcctcgacaattccaagagcagctcgctccgccgcctcagccattccgctgttccaaggggtatagaacgcatcgtgccaggcaatgcgtgcgctgttcagattcatttcccttcccccttaatcagcccatattcacgaaggatttcccattgctgggcgatgtattccgccagcgtcatgcaggtttcgcttgcttgctga

SEQ ID NO: 350146 - DNA, 240 bp, Pseudomonas aeruginosa
atgaaagacaacggtggacaagcgtttccctcggaatcgatgtacacgtccgaagcgggaatgaccctgcgcgactacttcgctgcccaagtcgtctgtgggcttcagcaggtgctttggagtgagccgaggctctccaagtttcatagcggaagtcacgtcatcagccacatggccgcagtagcttatgagaccgccgacgccatgctaaaggccaggcaggttggaggtacggagtga

SEQ ID NO: 350147 - DNA, 1284 bp, Pseudomonas aeruginosa
atgacgccgcagcagctcaccgaggagtacatcttcgcgcacgatctccgggaagccagcgcgaagatctaccgcgccgcgaccaaggcgctgctcaagcacttcggtcctacggcaaccgtacaggacgtggaccaccgggctgtcctgggatggcgacgcaaggtactggaacaaggcctgtccaagcggagctggaacacgtactcgaatcatctgcggacgatctggggctatgccatcgagcatgagttggtgacgcactcccaagtcaacccgttcagaaagaccaccgtcattccccccaggcgagcaagcaaaaccgtcgccgccgaagccatcctgctcgcccgcaattggctcaacatgcaggacggcgcagagcgctgcaccggcgaacgcgcacggatcacgcccgcctggttctggctttgcacgtttgaggtcttctacttcaccggcatccggttgaatgcgctgttgtgcatccgcaagcgcgacatcgactgggaaaatcaactgatcctcatccgcggcgagacagagaagactcacaaagagttcgtagtgccaataacggaggggcttgtgcctcacctatcgaggctcctgcaagaggccgatagagccggattcgccgatgacgaccagttgttcaacgtcaaccggttctcaccgcactacaagagcaaggtgatgaactccgaccaggtcgaagccatgtaccggaagttgaccgagaaggttggggtgcggatgactccgcaccgtttccggcacaccctggccaccgacttgatgaaggcacccgagcggaacattcacctcacgaagtgcctgctcaaccactcgaatatccagaccacgatgagctacatcgaggccgactacgatcacatgcgtgccgtgctgcatgctagaagcctggcccaaggcgcgctggagaatgtcaggaaggtggattacagcggctccccgcaagcctctgccaaaccgaagccatgcgggcaacctctcgctcgagtgagtgaagcgccgccaccggaggccaggacagagcctgcagaaccaagggagcacacgccagggacaggcattcagggaggtccaaccgcgtgggaagcagatgcgctaccacagccacctgacaccttcgaaccaagcgtgctgttcactctgatggctcaaaacttatcgaaccgtgccgcctcggcatccgcggctcccgctgcaacaagcggatcaggcggatggggatctgccgcccgaagcaatctcgcctag

SEQ ID NO: 350148 - DNA, 2565 bp, Pseudomonas aeruginosa
atgcgaatagaccgtttgaccagcaagctgcaactggcgctctccgacgcccagtccctggccgttggccatgaccatccggccatcgagccggtgcacctgctttccgccctgctcgagcagcaaggcggttcgatcaagcccctgctgatgcaggtcggcttcgatatcgccgccctgcgcagcggcctcaacaaagaactcgacgcgctgccgaagatccagagcccgaccggcgacgtgaacctgtcccaggatctcgcacgcctgctcaaccaggctgaccgcctggcccagcagaagggcgaccagttcatctccagcgagctggtattgctggccgcgatggacgagaacaccaggctcggcaagctgctgctcggccagggcgtgtcgcgcaaggcgctggagaatgccgtggccaacctgcgtggcggcgaagcggtgaacgacccgaacgtcgaggagtcgcgccaggcgctggacaagtacaccgtcgacatgaccaagcgcgccgaggaaggcaagctcgacccggtgatcggtcgcgacgacgagatccgccggaccatccaggtcctgcagcggcggaccaagaacaacccggtgctgatcggcgaacccggcgtcggcaagaccgccatcgtcgagggcctggcccagcgcatcatcaacggcgaagtgccggacggcctcaaggacaagcgcctgctggccctggacatgggggcgctgatcgccggtgccaagttccgcggcgagttcgaggaacgcctgaaggcggtcctcaacgaactgggcaagcaggaaggccgggtcatcctgttcatcgacgaactgcacaccatggtcggcgccggcaaggcggaaggtgccatggacgccggcaacatgctcaagccggctctggcgcgcggcgagctgcactgcgtcggtgctactaccctcgacgagtatcgccagtacatcgagaaggatgccgcgctggagcgccgcttccagaaggtgctggtggacgaaccgagcgaggaagacaccatcgccatcctccgtggcctcaaggaacgctatgaagtgcaccacggggtgagcatcaccgacggcgcgatcatcgccgcggccaagctgtcgcaccgctacatcaccgatcggcaactgccggacaaggccatcgacctgatcgacgaggccgccagccgcatccgcatggagatcgactccaagccggaggaactggatcgtctcgaccgtcgcctgatccagctgaagatcgagcgcgaggcgctgaagaaggaagacgacgaagccaccaggaagcgcctggccaagctggaggaggatatcgtcaagctcgagcgcgaatacgccgacctcgaggagatctggaagtccgagaaggccgaggtgcagggctcggcgcagatccagcagaagatcgagcaggccaagcaggagatggaggcggcgcggcgcaagggcgacctcgagagcatggcgcgcatccagtaccagaccatcccggacctggaacgcagcctgcagatggtcgaccagcacggcaagaccgagaaccagttgctgcgcaacaaggtgaccgacgaggaaatcgccgaagtggtttccaagtggaccggtatcccggtgtcgaagatgctcgagggcgagcgcgagaagctgctgcgcatggagcaggagctgcatcggcgagtgatcggccaggacgaggcggtagtcgccgtgtccaacgccgtgcgccgttcgcgcgccggcctcgccgatccgaaccggccgagcggctcgttcctcttcctcggcccgaccggggtgggcaagaccgagttgtgcaaggcgctggccgagttcctcttcgataccgaggaggcgctggtgcggatagatatgtccgagttcatggagaaacactcggtggcccgcctgatcggcgcgcctccgggctacgtcggcttcgaggaaggcggctacctgaccgaggcgatccgccgcaagccctactcggtggtgctgctggacgaggtggagaaggcccatccggatgtattcaacattctcctccaggtgctcgaggacggacgcctgaccgacagtcacgggcgtacggtggacttccgcaacaccgtggtggtgatgacctccaacctcggttcggcgcagatccaggagctggccggcgaccgcgaggcgcaacgtgccgcagtgatggacgcggtcaatgcgcacttccgtccggaattcatcaaccggatcgacgaagtggtggtgttcgagccgctggctcgcgagcagatcgccggcatcgccgagatccagctcggtcgcctgcgcaagcgcctggccgagcgcgagctgagcctggaactgagccaggaggcgctggacaagctgattgccgtcggcttcgacccggtctatggcgcacgcccgctgaagcgggccatccagcgctggatcgagaacccgctggcgcaactgatcctggccggcaaattcgcgccgggtgccagtatctcggcgaaggtggaaggcgacgagatcgtcttcgcctga

SEQ ID NO: 350149 - DNA, 1026 bp, Pseudomonas aeruginosa
atgcaagtgaaacacctgctgctgatcgccatcctcgccctcaccgcagcctgctcctcgaacaaggagactgtcgacgagaacctgagcgagagccagctgtaccagcaggcgcaggacgacctcaacaacaagagctacaacagcgccgtcaccaagctgaaagccctcgaatcgcgctatcccttcggccgctacgccgagcaggcccagctcgagctgatctacgccaactacaagaacatggagcccgaagccgcccgcgccgccgccgaacgcttcatccgcctgcatccgcagcaccccaacgtcgactacgcctactacctcaaaggcctgtcctccttcgaccaggaccgcggcctgctggcgcgcttcctgccgctggacatgaccaagcgcgacccgggcgccgcccgcgactccttcaacgagttcgcccagctcaccagccgcttccccaacagccgctacgccccggacgccaaggcgcgcatggtgtacctgcgcaacctgctggcggcctacgaagtgcacgtcggccactactacctgaagcgccaggcctatgtcgccgccgccaaccgcggtcgctacgtggtggagaacttccaggaaaccccggccgtcggcgatggcctggcgatcatggtcgaagcctaccgtcgcctgggtctcgacgacctggccagcaccagcctggaaaccctcaagctgaactatccggataacgccagcctcaaggatggcgagttcgtcgcccgcgaaagcgaggccgacacccgctcctggctggccaaggccaccctgggcctgatcgaaggcggcgagccgccgccgcacatggaaacccaggccgccaaggacgtgatcaagcagtacgaggatgccgagcgggagatccccgccgaactgaagccggaaaaccaggatcacagcgccgacgacgagaagccggagagcgatgacgacgaggactccggtcgctcctggtggagctacatgaccttcggtctcttcgactga

SEQ ID NO: 350150 - DNA, 768 bp, Pseudomonas aeruginosa
gtgaggctggatctggtcgtcttcgcacagggtataggcgcgctccagcatgttttccagctcgcggacgttgcccgggaagcggtagttcttcagcttctcctgtgcgtcgccggtcagcctggcggccggcaggccggtgtcgccggccaggcgcttgaggatgcgttcggcgagcagcgggatgtcctcgcggcgttcgcgcagcggtggtacgcgcagctcgatgacgttgaggcggtagtagaggtcctggcggaagcgcccggcgccgacttcggcggcgaggtccttgtgggtggcgcagaggatgcgcacgtcgacggcgacctcctgctggccgccgaccgcgcgcacggccttttcctggatcgcccggagcagtttgacctgcatggccatcggcaggtcggcgacttcgtcgaggaacagggtgccaccgctggcggcctggaacaggccctgcttgtcttcgatagcgccagtgaagctgcctttcttgtggccgaagaactcgctttccatcagctcggagggaatcgcgccgcagttcaccggcacgaacggccgctcgatacgtggcccctgctcgtggatcaggcgcgccaccagttccttgccgctgccggactcgccactgatgtagaccggcgcctggctgcgcgccagcttgccgatctggttgcgcagggcgcgcatcggcggcgactcgccgagcaggcggttgtccaccggcgcttcctcggcttccgggttgcgcaagcgtag

SEQ ID NO: 350151 - DNA, 192 bp, Pseudomonas aeruginosa
atgcaccaccagcacaaccgcccattgctggccgatagcctgaatggcgcgcctgcccccctggtgatccgctccggtgcctatctcgtcgccgagatagacgacatagacgctgggggcgggctggtcctgctcactcaaggccgccagatcgggcaccccggaaacgatggccagcccaggaacctctga

SEQ ID NO: 350152 - DNA, 345 bp, Pseudomonas aeruginosa
atgctgtcgccccagtccggcgcgaacgtccaggcgatgatccggttgccagtgatgaccaggaccatgtccggctcgccctggagcttccagacgatccgcgcattgacgacgggtgggccgtccgtgccaatgctgaccgtccaagtgcgttcctccagggcggcaaaacccagcggcggcgatgcctgcccggacagcgtgatgccgtctgcggcttcgcggtcgatagcggtcagcgtgcgcggactgaaatatgcgttccagactgatgccggtcgtatctgggtgctgacgacgttgcccagttccattgcggtcggaatcaaccagaggcggttgtag

SEQ ID NO: 350153 - DNA, 924 bp, Pseudomonas aeruginosa
atggcctatttcacaggaacagcgaacaacccggccgacttgctcgccaaggtgcgcgtccacgccgagtcgctcggctgggtcaccgaccgcgcctcggcatcggaatggctttgtcacaacgcggagggatactggtcattcagtgccggggccaatcagttccagatggcgggcaatacggggttcgacaacgggctggcgtggaacgcgcagcccggtaactcggtgcagaacaacccctattcgtcgaagggaccgaccgtcgcacagctgagcggtgggccgttcacccgttaccacctgtttgccacggcggcctatctgcacctgcacgtcgagatcgcggcaggtcagttccggccggtgatgattggctcgctcaacaaacgtggcgtcggctatacgggtggtcagtatgtctgcggctcgttcatctatacccccggtcaggcactgacaaacaactggtcgtcgcatccgttcgatggctaccacattcaatacagcaacagcagctgcatgctgcggctggacggcctcgacggcggcccgtcgccggaatggttgccgttcgactacacaacgaacgtcccccggcgcgtcgtcggccccggtcgcggaaactacagcagtcagtaccatcccgacgtggggctgatcgacgccagcgcaaacgagctgaacagctcgaccacccctgtgccctgcgcaatctatgcgttcggcgctcagcagcgctcgcggtacgtgggcgaggtgccggacttcgggctgtgcaacatggctttcctcgcgcctggtgatccgctggtcgtcggcagcgacacctggcgcgtgtacccgctgctccagcgcggaaccgctaccgacttcggcggcaccagcgcctgggtcggctattgcttccgggtggtcgagtga

SEQ ID NO: 350154 - DNA, 3477 bp, Pseudomonas aeruginosa
atggctactaatcagcaactctcgatagcactgcgcatccaggctgacctggctgaagcgcagaacgcgctcagacaactgacgggcaacctccagcaggttgaccggggggcggtccagaccaggagcgagctgtctgcgatgggtgggcagttggatagccttcgcgcacaggtgcttgggtttgtcggcgcttgggccagcctgagtgcgctgggcggcctggtgactatggttgaccaatatgggcaaatggccgaccgcatccaaatggtcaccagcagcaccgccgagtatgagcaagtgcaggcccggttgctggagacggccagccgcacctaccggccgctggcggaagcccaggagctatacatccgtactgccgacagcctgaagtcactgcggtacaccaccgagcaagcgctggacattaccgattcgttttccttcctgctggtaactaacgccgcgtcggcggaccgtgcggcgagtgccatcgacgcctactcgaaatcgatccagaccggcaaggtcagctctgacgcctggcagtcgatcatggccgccatgcccagcctggtgaacgccctggcggagtccaccggcaagagcactgaggaaatccgcaagctgggcatcgagggcagcctgtcgttgcgcgacctgaatgaagggctgcgcaagaccgtggcggcgaaccgcgaggcggcagacaacatgggcacctcggtccaggacgcgctggtcagcctcaacaacgccctgagcgcctacctgggcgagctaaaccgcacctatgacatcaccggcagcgtgtcctcggcgctgaacgtgctggccgagaacatggaggtcatcgtcaagctgtttggcgtcgcggcggtggcggggctgacccgctacgtggccagcctaacgctggccacccaggcgaaactggcggcagtgctggccgctcgggcgcaagccgctgaagaactgcggactgcccaggctcaggtcgcttcgacggcagcggcagcagccaatgccagggcgcaggcgggtctgacagtgagccacacccaggcggctgcggccgaggcggcgcataccgccgcgacccagcgccttgctgctgcgcagttggcggccggcgccgcgatgcgcgggatgctggccgtgatcggtggtccggccggcatcgcgatgctggtggccggagcggcggcaagcttcttcctgtttcgcgatagcgcccaggcggtcaagagtagcctagatgacctgagcgagccgctggaccaggtggtcgagcgcatgggcaagctgagcgagattgagcaagatcgcgagttgacccggctttccgagcagatcgacggattgcggcagacggctgtggaagccgcccgcgaaatgcgagaagttgctagcaccgccctctatggtgccaggctggatcgcatcccgtctgccgaagcacagcaggccctccagcctctaatcgatgcgtcggctgacgctgcgcgaggcgtggaggtggactggaagtcggtgatggacaccctggccgccagcggcgctgttcccgattcactcaagcgcaagctgctggacatggcggctggtcaggcagaggcaggccgcactgctaccgagctggggcagcgtcatgcggaactcaaggcacgcctggagggttcgactgccgccatcaatgagaacagcgatgcgctgagcaaagggtcggacaaggcggccgagtatatccagtccctgcgcctggccatcgccgacctggaagatccatctgtcctcggcaaagccggccgtcgcctccaacagttcggggccgacctcaatgccgaacagagtgccgaaatactgcgcctggagaccctgaaggccaataccgagaaggcagctcaggcccgcgaggatgcccggcgcaaggctgaatccagtgcgcgacaacaagcctccacggctgagcagttggcgaagagccaggaaggctatgttgcggggctggaaaagcaagcccgcactctgggtctcaccagcgcagaggtgcgcgcctacgagctggccgagaagggtttgaccggagccctccacgctcgggcggcggcagcactggccgctctggcggcggacgagaagaagcggcaggccgacgccaatgcgcgcaccaacgccggcctggaggctgaatacctgcgggcgaccggccgcaccgttgacgcgggactgctggaaattcggacgaaatttgacgcgatgcggcgggacttcgaaaaggcgggcaacgacgccggcctggcctggatcgacaagctaattcccgtcgccgaggctaaggtccgactggacgacgtcaagcagcagatggacgacttgctggccgaccagcagcgcgccgagtcttccgtcaacgtccagcaggatgccggcgtcatcaacgaaatggacgcccggcagcgcatcctggacattcaccgggcgacctacgagaagctccagcagattcggccgatcctggagcagatggcccgccagcctggcgaggtcgggcgagctgctgccgagtcgctcgcccaactggacgccgaggcggcgcgcctccagcagaccacgacgctgctcgaaaccaccttgcgggacgggctcaccaccggctttaccgacgccatcaagggactggcttccgggaccatggacttgcgcgacgccatcacgtcgctgggtgaggctgtgctcaatgccctggtgaacatggcggcgcagaacctcgcgcaatcgctgtctagcggcatcatggggctgtttggtggcggccagcaggacaccagcatgacgaccggcgcggcggctgtgaccgcgtcggcaggcgctctatcgacagcgggcgcttcgctgctgaccggggccgctgctatccaagcggccgctgcgtcgctggcagccgccaatggcgtccaagggctgggcgctgctgcgggtggtgcgggtgcggccggagcggcagcgggcggcggcagttggttgtcctccatcgccggcatattcggtttcgcctccggtgggcacatcaaggggccaggaacaggcaccagcgacagtatcccgattctggcatccaacgacgagttcatgacccgcgccgccgttgtacgacagcccggcgccctggcatttctcgaacagttcaaccgctacggcatggccgcgctggccggctgggcaaaccctgtccgtcacgcaaccggcgggcagatcggcactcccgcccccaacctgccggcccccgtccgtgctggcgcgaacctgcccgaaccatccaagaacttcagtacctcggtcgccaactcgatctacctgcacgccgttcaggacacggatcagatggcggccgaaatgtgggccggcaaaggcggcgaacacttcttggtctggctgaacaagaaccgccaggccgtcaagcagattatctag

SEQ ID NO: 350155 - DNA, 180 bp, Pseudomonas aeruginosa; identical to SEQ ID NO: 327659

SEQ ID NO: 350156 - DNA, 915 bp, Pseudomonas aeruginosa
atggccatcattactccggcgctgattagcgcactgaagacctcgttccagaagcacttccaggacgccctggcgacggcacccagcacctacctccaggttgctacggtgattccgtccaccaccgccagtaacacctatggctggctggggcagttccccaagctgcgcgagtggatcggtcagcgtgtcatcaaggacatggcggcccagggctaccagatcaccaacaagctcttcgaatcgaccgtgggcgtaaaacgtaccgacatcgaggacgacaacctcggcgtctacggaccgctcatgcaggaaatggggcgcgctgccggcgcgcatcccgacgagctggtcttcgccctgctcaaggccggcaacgccaatctctgctacgacggtcaaaacttcttcgacaccgatcacccggtctatccgaacgtggatggcaccggcacggcgaccaccgttagcaacctgttcgcgccggccgctgatccgggggtggcctggtatctgctcgacaccagccgcagcctcaagccgttgatctaccaggagcgcatgaaaccgtcgttcacttcgatgaccaaggaagacgacgagcaggtcttcatggccgacgagtaccgctacggcgtgcgctcccgctgcaatgtcggcttcggcttctggcaactggcagcgatgtccaccgaagagctgaacaaggcgaacttcgagaaagtttacgacgccatgcgcaaccagaaggccgacggcggccgtccgctggacattcgcccgaacctgctggtggtgccgaccactctgcgctccaaggccaaggaagtggtcggggtgcaacgtctggccaatggcgcggacaaccccaacttcgaactggtccaggtactcgataccgcctggctcaactga

SEQ ID NO: 350157 - DNA, 1653 bp, Pseudomonas aeruginosa
atgaagggtaacaccagagacttcctggcggatatcgcccagcttgcgggggagttccgccgccagatcgaggccgaggtcgcaggtttcgaccccgacccgaaggccagcgccgcccggcgcgaacgggccagcgcggactatgagtatttcgcccggacctacttcccgcactacgtgaagcgcggtaacgcgctgctccacgactacctatacaagcggttgcccgagctggtggaccacccggacggccagcacgaagccattgcggcgccgcgtggtaatgccaagtccaccctggtgagccagatattcgtgatctggtgcgtactcaccggccgcaagcattaccccctgatcatcatggatgccttcgaacaggccgccacgatgctggaggcgatcaaggcggagctggagttcaacccgcgcctggccatggacttcccccagggcgccggcaagggccgcgtctggcaggtcggcaccatcgttacggcgaacgacgccaaggtccaggtcttcggttccggcaagcggatgcgcggccttcgacacggcccgcatcgtcccgacctggtgatcggcgacgacctggagaacgacgagaacgtccgcagcccggagcagcgcgacaagctggaaaactggctgaagaagaccgttctgtccctcggctcggccgacgacaccatggacgtgatcatcatcggcaccattcttcactacgactcggtcctgtcgcgcctgctgaaaaacccactgtggaagcggcgcaagttcaaggcgatcattgaatggccgcaccgcatggacctgtgggagaagtgggaagagcttctgctcaactcagatgacgaaggggtcgccgcgctggagttctaccaggagcgcgccgccgccatggaggatggcgcgatcatctgctggccggatgggcagcccctctacaagctcatggtgaaacgtgcccgtgatgggcactcggcgttcgactcggaacagcagaacgacccagtccagggcgagaacgcccccttcgccgcctgcatcacgttctgggtcaaccgcctggcgcagtggatgttctacggcgcgtgcgacccgtccctgggtaagcaaggttccagccgcgaccccagcgccatcctggtgggtgggttcaaccgggagacaggcgtcctggacgtggtcgaggccgccatccgcaaacgcctgccggacaagatcatcgaggacatcatcgccatgcagcgggcctatcactgcctggtgtggggcgttgaggcggtccagttccaggagttcctgcgcaccgagctggtgaagcgctcggccaaggctggctgcccagtacctgcccgagcgatcacgccacacgccgacaagctactgcgcatcgaaagcctccagccgcacatggccaacggcctcatccgtctgcatccaagccagaccgtcctggaacaacagctgcgccacttcccggccgcagaccacgacgatggccccgacgccctacacatgctctggatgctggccaccacggggttcgcgccgatagaggcgactttggtcaaacgccggcacgaatacgcgcccggccttgacgattcttttgacactggcggccgcttcggcggcgcatggtag

SEQ ID NO: 350158 - DNA, 1146 bp, Pseudomonas aeruginosa; identical to SEQ ID NO: 327811

SEQ ID NO: 350159 - DNA, 378 bp, Pseudomonas aeruginosa; identical to SEQ ID NO: 327814

SEQ ID NO: 350160 - DNA, 363 bp, Pseudomonas aeruginosa
atgccccttgagctgatccagcagcgtgatgatgcgattgcgctccttcgcctcactgcccagttcgcccaggtaaacctgcaattggggaatcagctcatcaaccgccaccagcgcctgactagcgcccgtaccgctttcctgttcgtacgcgatgaaatgctgtcgcagaatggctatcagcagggactgctccagattcagtctttgccgacgcacgagggggtgcgaccagtcatcctgctcagccacctcgccctggcgaacggtaacaaacaccagcccccgaacctcgtcgacccccatggcaaggtcgagcggctccaggattctgtccaccacctcgatattggtgagcgctga

SEQ ID NO: 350161 - DNA, 678 bp, Pseudomonas aeruginosa
atgggcgctaaaccgaaggcgcagacggtcgggttcgaatacttttttgacatccatttcgccctgggcaagaagatcgacgaggtctgcgcaatccgcgcgagcggaaagaccgcatggaagggttcgatcaccagtaacggccaggttcgcatcaatgcgccggacctgttcggcgggaagaagggcgaaggcggcctcgacggaacgctcgatgttctgtttggcgaagaggaccagggcgtccttccgcgcttggcggccatgcttggcggcctggtgccggcgttccgtggtgtaaccactgggttctattccggcctggtcaccgccatgaacccctacccgaagacctgggagattctgcgtcgaggcgggaaccgcttgtgggacggcaacccctggcatcccgaaaagcaatttatctggctcgcggacggtcagatcaaagcgatgaacccggcgcacatcctatatctcgtctacaccggccgggacttccggggactggcccgcacgcgaatggacgaggcgagctggcgggccgctgctgacaagctgtatgccgagggtttcgggctgtgctttgaatggactaggtccgacacgttcgccaacttctgcgagacggtgaaatcgcatatcggcgccgaggtttacccgaaccgacagacctga

SEQ ID NO: 350162 - DNA, 525 bp, Pseudomonas aeruginosa
gtggacgagacggtctacagccaaggcgtgacgctccaggcccggctgctgacgaacaccagcgagggccaactggccccggcgctggccgccactgacagcctcacgctgacggggcgccagggtaagccgtatccgcccggccaattccgcatcaacggtagcgcgtacccggcgaaggtctacggggtgctgtcggtgagctgggcgaagcgcgaccgtatcggccaagccgaccagttgatcgataccacggtcggcaacatcggcccggaagctggagcgacggtgacgctccaggtctacagcggcacgacgctgaagcgcacctatgccggcctcacatccagcagttggtcctatccgctggccgaggacatggcggatggtccgctccaggacgtgcgcctggttctgcgcagcgtccgcgacggcatccaatcctggcagcagcacgacatcacaatcgaacgacacggccttggcttccgcctcggcgaggaacttggaggcgtagcaccgtga

SEQ ID NO: 350163 - DNA, 525 bp, Pseudomonas aeruginosa
gtggacgagacggtctacagccagggcgtgacgcttcaggcccggctgctgaccaacaccagcgagggccagttggccccggcgctggccgctaccgacagcctgacgctgaccgggcgccaaggtaagccatacccgccaggccagtttcgcatcaacggcagcgcgtacccggccaaggtctacggggcgctgtcggtgagctgggcgaagcgcgaccggatcggccaggccgaccagttgatcgataccacggtcggcaacatcgggcccgaagatggggcgacggtgacgctccaggtctacagcggcacgacgctaaagcgcacctatgccggcctcacatccagtaactggtcctatccgctggccgaagacgtcgctgacggcccgctccaggacgtgcgcctggtcctgcgcagcgtccgcgacggcatccaatcctggcagcaacacgacatcacaatcgaacgacacggccttggtttccggctgggcgaagagctaggaggcgtttccgcatga

SEQ ID NO: 350164 - DNA, 336 bp, Pseudomonas aeruginosa
  misc_feature (304)..(304): n is a, c, g, or t
ttgaagccagcggggttggagcagattgatgatgacttctgggatgccttcgacgggctggatcgtgaagcgctgattcaggacaccctagctgtgctggcggagcaggggcgccctgtgagtctcggggagcttgcgtctttgcttccacctgctcacgacctagaaacctttgcgctctggttggcgatggcacgcgaggcaggtattgaggtgctgaaagaggagcgtcagctcgtggagctagttgacgaggatgagcaacgctggcgcttcaatctgccttatgtcggactcgaccacnaggcactcaaggacatcgattgggagttgtga

SEQ ID NO: 350165 - DNA, 417 bp, Pseudomonas aeruginosa
gtgagctactgcacgctggccgacctgatcgagcagtacagcgagcagaaaatccgtgaggtgagtgaccgcgtcaataaaccggccacaaccatcgacacggtgatcgtggatcgcgccatcgccgacgccgactcagaaatcgacctgcatctgcacggccgataccagttgccgctcgccagcgtgccaacggcgctcaagcgcattgcctgtggcctggcctacgccaatctgcacatcgttctaaaggaagagaacccggtctacaaaacggccgagcatctgcgaaagctgctgtcgggcatcgccaacggcaagttgagtctggccctggatgctgacggcaagccggcgcccgtagccaacacggtgcagataagcgaaggccgtaacgactggggggccgactggtga

SEQ ID NO: 350166 - DNA, 168 bp, Pseudomonas aeruginosa
atgaatcacgccattgcccacctggacatcgccgcgcagatcgccgagcacaacgcgccaatcagcgaggctcagggtgaagccgctcaggcggagctacagcaccaggtcgccgccgactgccgcgaggcgctcgacgtcctggaacagttggagtcgcagctgtga

SEQ ID NO: 350167 - DNA, 147 bp, Pseudomonas aeruginosa
atggcgcgtgaggcaggtatcgaggtgctgacagaggagcgtcagttcgtggagctagttgacgaggatgagcaacgctggggcttcaatctgccttatgtcggactcgaccacgaggcactcaaggacatcgattgggagttgtga

SEQ ID NO: 350168 - DNA, 192 bp, Pseudomonas aeruginosa
atgcaccaccagtacaaccgcccattgctggccgacggtctgaatggcccgctggcctccttggtgatccgctccggtgcctgtctcgtcgccgagatagacgacataggcgctgggggcgggctggtcctgctcactcaaggtcgccagatcgggcaccccggaaacgatggccagacccggaacctctga

SEQ ID NO: 350169 - DNA, 1218 bp, Pseudomonas aeruginosa
gtgaacgcgaagctcgattttgacgcaacaaagctctatgaggccttgaaataccagatctacgtcgcgatggactactgccataccctcgacaagaatgacgtcctttggatcgaggtcttcggtgacgtgaccgttgaaggccgtgatcaaattgaggtgaaggagtacagcgacagcctcaccgacagccatgaaaatttctggaataccctcaataattggctaaaacctgagttcaatcatcagcaattcgctaacctgattctcctgaccacgcaagcgtatggtgaacgagcagctatcaaggactgggatcagtggaacgttgctcaacgcctggctgcgctggaagccattttcaaggatgccgagactcgcttcgagaatgccaagctaaaaagagaagcggtcgctgaccaaggcgacgaaagtgggactggtggaaagaccccgggatcctcgaaggccttgatcttgcagcgcaaggtaatggccgagaccatgcgcgaatccctgatcgatgccctgcctaaggtcaagatcatcaccgagcagcctgacctgatgggcttgattgccaggtacaaaagagcccatctcaaaagtatccacgagcaccgctcggacgattttctggatgatcttttcgggttcatgactagcgcagtgaaggtcacagaaggatggcggttcaccacggcagagttcgacagaaaattcacggagctgacagcacgttacatgaaaggctcagtgaagtttccccgtgtcaacgccgaggagatcgagcgcgaagccgcgaaaatgaatgtgcgtgatcgtacgtacgccaaaaagctggatgaaatcggaggcgctgaagatgtaatccttgaggccaccgtcgatttgctccatgcccacgactacattattgagctgatcaaggactgcacgacctcacagagtgacgtggaagactacagcaaaagccatatgcgtacccacagcgctagcaggtcagcgctcatggtcgatatcgacgagacctggtcggatgcaaagctgaagcaagcatctctcaagttctaccatgcacgctgtggcctggatgtcgcgggctttggcagttacgaagatacgcccgtggagttccgcaatgggatctaccacatgctggcagacgcggttcctgcaagcccaacgaaggagtttcactggaggctctggaagtga

SEQ ID NO: 350170 - DNA, 462 bp, Pseudomonas aeruginosa
gtgatcgcgaaacccattgaacacctgttcacacttcagcgctcccctattgcgctggcaccggtgatccacaacttttttgccaattcgatccctcgggaacgtgacctactgctgagttatctggtattgccgatggtgctgtacccggccatgcagtctgccctgctgggagtgagaaagaccagcaaccttcgcaccctctgcaaggatcaatcgagactggttgggctcacccataacacgcagcaattcaagtcgctcaccaatgcggccctgctagtgcttcaggccgaacaaagcatcgagctcactgacaacttgacggtgaagtccatcaaggacgtcagggcctcgaatgccaatcccaaacagctcgaagccgcacgccggctttccatggtctgcgcagaggcagacgtcgtcaccatctacaggacgttaggattcaagtcgctatga

SEQ ID NO: 350171 - DNA, 2004 bp, Pseudomonas aeruginosa
atgaaatgctttctgcggtacatcggcgtggttgacacccaagacaaaattcaccagatacgattggagccagggcttaacgtaatcactgggaagtcgtccacggggaaaagcgcgatcctggaaattttcgactattgcctcggcagtaccgaggacaccattccagtggggacgatcaccgagcgcgccgagacgttcttcatcgcgctgcagttccccagctatttcatagtcgctgcacgcaagaaaaaatccgatcgttgctttttgcttgaagtacaaggatccgacccagagcggcttcttaagctcattgagcaacccaaggccttcttcgatcccaagcactacatgccactggccgacttcaagaaaagcctggggcggtacttcgccataacactggaaaacgttgatgaggacccgtacctgaaagcggctggacgcaataaatctgcgaccccgtcagtacgcagcttctcttccttcatgcttcagcatcagaatttgatggccaacaagcacgctattttctaccgcttcgatgagaaggagaaacgtgatcaggcgatcaaccacttcaaaatcctgatgggactagtggatgaggcctattttgatctgtaccgggatcatgaggttgccaagtacgaactgaagaaaatccaggcacagatccctaagcaagagcagcgaaaagaagctgctatcgctcgatacaaccgctatctgactgagttcaagtcgctggcaggcattcccctgattgatgctacggctgaagacatctacagcaaacccgccaccatgttgaagatgatttccggtcgcactgtcaaaatcgatgtcctttcagatcaggtcgaaacgcgccgggctgagcttcaagctcaacgaattgctcagctaatcgagaagcgccaactgcaggggcaaatgaggctggtcaatgagtctctatcctctgccacacagttcagcctgagcatgacggctgaagctttgcccgactcgattgaattgtcagcagcccactgccccctttgcgaggcccccacaagcacccctgctatggaggccaacaagcttgtaagcgcgatcaattggttgaacgacgagctcaagctgtctgcctacgcccgggagagtttcgctgcagagcgccgatccattcaggaagcgctcgacaaggtgaacactgagctgcgccgaatccaggccgacatccagccacttgacgaagaaattgccaagctcaagacgtccaagtcggtcgacgagcaggcaatgaaggccaagctccgcctcgaaatcgctattcaagatcaggtggacaagcctgagtcagagctgcttgccctagaaaaaattctgcgagctgaagtcgagcgcctggccgccctactggcgaaatacaatatcaaggacagactcaaaaccctgagcaatgatatcgatgccaagatgtgtgagattggcaaccacttcgactttgaggaaacgtataagccatcgaagctacgttttgacgttgaaacgttcgacctttggtaccagcagaaccaaaacaccagggtgtatctacgctcgatgggcagcggtgcaaactggttatattcacaccttgccttattcatgtcgctccactatcaattcgctgcgctctcggacaaagggtgcaaaatccctccgatcctgttccttgatcaacccactcaggtctacttcccagcgtcactggatgacgcagaagcatttgatgccaaagaactcgcaaaacaggccaagcgtgaagacgccgtagatgccgacatgacagctgtaaccaatatgttcactcaactggccaagttctgtgatgagaccggcaaaaagaccggagtaaccccacaaatcatcgtctccgatcatgcagaccgactgaaccttggtgaaggatataaattctcagactttgtcagggctacgtggagaacacgggggttcatcgcagagacgtaa

SEQ ID NO: 350172 - DNA, 1794 bp, Pseudomonas aeruginosa
atgcctctctcggacactgcggtccgccaggctcgggccagcggcaaggcttataccctcggtgatagtcgcgggttagcactcgcgatagcggccagtggcagtaaaagctggcactttcggtacctttggcttggtaaacaaaagcgtatgtctttagggacttacccagaagtcagcctcaaggacgcgcggattcggcgagatgctgcccgggccttagtagcaaaaggtataaatccccagaaacatcgcaaacaggaacagctggtgcggcaactgaccgccgagcaaaccttccaggctgtcttcgaaaaatggcttgagtatcggcgacttagtctgaaatcaggtcgtcaaagtagccttgagcagttgcagcagattttccataacgacgtgctgcccgtcatcggaaaatgctctgtgtacgatgtgacacgtaccgacttggtgcaggtgttagctgggatcgaggatcgtaaggcgttcagcgttgcccaaaagtgcaggctctggctcaagcagttttttcgctttgccatggtcaagatcccggggcttgagcgcaatcccgcattggatttggaggccgtcgcccagccgagaccacccgtcatacataatccgtatgttcgctttgaggatttacctctggttctacagagcttgcgtgacttccacggtaaaccacaaacccgtatgggcttgcggttactactgttaacgggagtgcgtactggcgagcttcgatccgcgacaccagatcagttcgatttggaacgaggactttgggttattccagcagtaattgtgaagcagttgcaggtggcgatacgcaagcaaggcaagaggccgcaagacgtgcctccctacgttgttccgctgtcggaccaagccatccagattattcgccatttgcttggcaaaatgcgtagtggtcagcgttatctactggcgcatcgggataacctgaaaaagcctatcagtgaaaatacactgaatcaggcgctcaaatcgctaggttttgaaggacagctaaccgggcatggtattcgtgcaaccatcacgacggcgctgaatgaatttggatatcctaaagtttggattgatgctcagctgtcacatacgagctcccaagggggtggggaggcctacaaccatgccgaatacgttgaaccgcgccgtaagatgatgcaggactgggctaaccgcatcgatctattggaggttggaaatataggcaaagcaagcgcacctctggtaggtcaggtgaacgattcccctggtgatcaaatgggacaaaatactagcgcgattcgcttggaaggaaatgcaactgttattatgacgttctcttccgctgatttagcaaaagtattctctgctttttcgacttcatttttgccggagagatctgcgagcacgttagatgccaaggggatagaggcttacaactcgtcgaacaatcttccgttgtcggcatttgcaaaacttgcgtgcagaccttgtgaacaggtcatgcaggacataaaatctggtcgattactcgccttgtttaatggcgatatgggctatagagttccagtttggcagatagagcagaccaagtatctgcttactcttatggtcatgactcataccgatagaatcgatgatttggcaatctattcggcgctttccaaaccaatggcacattttggagggctctctcctctggaggttgttacatcggacactatcatcgaaattagcgatatcgtgtgtagaggtctggcaggccgggaatgttag

SEQ ID NO: 350173 - DNA, 2571 bp, Pseudomonas aeruginosa
atgatcatcagctttccattccttcaaaacactaatatccaagagacggatgcaatcgatgatggcaccttcaatctgggtgagaaaagcggtaagggtgcctttcctgtcagccatcagttcagttggcatggtggtgtacacctcgtagctcctggcggaccaaataaacctgagcccgtccgcgctatcgccgacggtgaggtggtatttgcacgcgacagccacccgattcccctcaatagcgccagcgacgaggtcaaagcagcccagcccttgctgtactacaaaggctggaccagcaatggcgtcatccttctcaagcatgagacggaaatcggtgaaggtgtgcgggtaaccttctactcgatctatcagcatctacataccgtagccaataaatcaggtacggaagcaccattgaaaacaggcgacaaagtctatcgcaaggatcccatcggcaaggccggagctatatacggcaatcccaaccgcatccatttcgagatcgtcgcggacagagttaacgtggaagccttgatggggcgcagcgctggcaacctgactgcccagcaaggtcggcgggctagcgtatggggggatgtgcatattgttttgcctaccaacactcctttctatgtccatgatcctcgccttgagacgaaaacctacgtggtacgtactgccagtccgggtgtagggggagtcaacgatactcttgactccgtcgcccaacgctttcacaccacgccaactcgcattcgccgactaaacggcacacccgccaaagcagaaaattggtggtctacggtgactgcggggagtacggtcatccagcgcaccatacgcgtgccagcacagtacggcatcgctgccactatgccccccgcggacctcacaattgaagactggcgccattggcaagccacaatcagcggacgaacatccactgagcttatcgtcagcctgagtgaaagacgaggaacgatcacactcactacgcgcggccaccacggcactctggttggccggtgtacagaaccagaaggtagctacaacctatataaggcagcgaccgaaacctatccaggagggccaagcgctggttatgaaatgctgcgcttcggacgcattctcggtcccgatgcccccgccgcaactgatatgcaaggcggtcgcttgccacatctccgcaaaatcgtcacccagggtggtctggaagcgttcgtcgatctcaactctgacggagtcaaggtgtatagcgacgccgactttccgcattggctgggttggaccttcatcgacgacgacatagatgacaacggccgctgcgactcgaaacagctactggacctgattgaaccaatggcaccaacccctaaccccgccccgggattgcctgatgttcttggtgagatcgtccatggcgccgccaaagtattcgacgcggctatgcaatacaaagatcgcctcgcacgagcctatgccaagatccactctggaacgatgcgtaagcgccttagctactgcgtggtcaacttacctaccgaatggtcacgcgacgactttgacaagcgctgggcttggatcaaaggagacgacccgaacgacatcccagctaacgtactgaccagcatctgtctttcacctgatgcctacgaaaaactcaagagtcaccacgaggcgctagcattttgggaggatgcggcgagggaagggctagctcttaataaagtgcattaccactttcacccaatgcggtttatcgagacttttagaaagtgcgcgtggcttagcgaatcggagctattgagcatattatcgcctgcacctgctgccggaaaacaaagagcaaattctctacgaatacagatgaatcggatgttatctaaatatgctgtgtcgggatcgtatttgcgcgtagctcattttctggcgcaagttggagttgagactggttggtggcaatatagggaagaactcggaaatgaacgatattttcgtactatgtacgaggtaattacactggaagaggcggggcaagactacgatagggctgtttctctagcgcgcaatcttccatcgggacgacgtccgatagaactaccaaatcctggtccaaacccgaaaccaagtatcaatagaccgagctacgtagcgacccgcccggggcagatcgcgcaaaaagcgtctggcatggataacggcgtggcaaatgcctccaatggaggcatgattggcgacggaaacagatttcatgggcgaggatttctgcaaatcactggtagacgcaactataaaagctaccaagattatcgaggaagcaactttacgacagacccgaacagtgcactccttgcaacgaatgactacaacgcatgcgatgcgtcaggattttactgggctcgcgaaaaattaaatcgatatgccgatcagggcgaccaacccgaagcaatcactcgggtcggttcgatgattaacagaggaaatccttcaagtattcctctacacaatgctgagcgccatagcgctttcgccataatctggaagaatattcgtgaagatcagtaa

SEQ ID NO: 350174 - DNA, 2091 bp, Pseudomonas aeruginosa
atgcctacccaatccgacttgcgcttcacattcgacctcatcggcagcgacgcgcgcgacgttttcgaggttgtcgagtttgagttgcacgaggctctttccgagacctttctcctcgccgtcgacctgagctgtgccaaccctgctgtggacttcggccaggtgctcgatcattccgcttgtttgaccatctggcgcggcgacactcccgtgcgctacgtccacggcgccgtgtcctccttcgcccagggcgagaccggatttcgccgtacccgctactccgccgtcgtcgagccgcgcctggcgcgcctgaagctcagcgccgactggcgcatcttccaggccctctccgttccgcagatcgccgaggcggtgctcaaggcccatggccttacccaggattacgagcagcgcaataccaccgagcaccaggtccgcgagtactgcgtacaggccggtgacaccgactaccacttcgtcgagcgcatcatgcgcgaggaaggctttttctattccttccgccacagcgctgagggccaccaactggtgcacagcgaccgcctgttcatccacggccgcgtgggcgacgaaccggtgcagtacaaccccacgcccggcggcgaccagccgcagccggcgctgcgccgcttcgcctacaccgagaacgtgcgcactgcgcgccagacccagcgcgactacaccttccacagcccccgctacacccaccagcacagtcgcgacgggcaggacctggaccatcagggccgccgctacgagcgttacgattaccccgcccgggccaagttcgacgaggccggcaggcccttcgccgagaaccgcctgcgcggccaccggcgcgatgcgcgcattgccctggtcgagggcgatgacccgcgcctgcagccgggcatctccttcaccctcgctggtcacccccgtgaagacatgaaccgcggctggcgcccggtgagcatcgtccaccgcggcacgcagcacaccagccaggccgaggaaagcgccgaggcgcaacagggcaccttctaccactacgaggccgaactggtgccggacgacgccgagtggcgcgccgaaccgctgtcccagccgcgcatcgacgggccgcagaacgccatcgttgtcgggccgcccgacgaagagatctacaccgacgaatacggtcgggtgaaggtccagttcccgtgggatcgcgagggcaagcaggacgagtacagctcctgctggatccgcgtctcgcagaacatcgccggtgccacctggggccacatggccatcccgcgtgtcggccaggaggtgatcgtctcctactacgacggtgatccagaccagccggtgatcaccggacgggtctataaccgcctgcaactgccgccctatgagctgccgcggcacaagacgcggatgaccatcaagagtaagacccaccagggcgaaggctacaacgagctgcgctttgaggacgagaaggatcaggaggagatctacgtccacgcgcagaaggaccagaacatccacgtcaaccacgacgagaccacctgcgtcggccacgaccgctccgagcaagtcgagcacgacgagaccatcaccattgcccacgaccgcaaggaggccgtgggcaatgacgagcaggtcagtattgtccaggaccgccgccacaccatcggtcaggacgagttcctgactgtcggccgcaaccacaccctccacaccgacaaggatcgcaccgaagaggtgggcaaccaccgccgcgacaagaccgtggccaaccactgggtgagcatcggtggccaccaggagcagaccatcgaagggcacgccgagctgcaggccggccaggccattcgccaacgttcgcgcgtcgttctgttgcaggcaggcgaagtgttccgcctgcggggccccggcggcaccatcacgctgcacgacggcggcataacattggatggcgtcgccatcatcctgaaaggcccgatgacacaacacgctggcggtggcagctacacgttgtcgctggatggccagtcgctgcccggtctgccttttgatccaagcagcctgccactgtcggagtag

SEQ ID NO: 350175 - DNA, 3792 bp, Pseudomonas aeruginosa
atggaaactacaccggatgtatccccttcgatcgatatgaaggccttggaagagctttttgccaagcggatgcgatgggcatcactccacctgcccctttctgaggtggagagcgttgttccagatttattaatggatcttaagaagtttgaacgacgcgccagccttgccctgctggccggactgcttacgcatcccgattaccagtcaaatacattgcgcttggagttgctggtcgcattggctttcgtgcatgcacgtggtgtagaacaacctgaactggtggatgctgctagatggtttgaaatgattgatgaatccgaggcgacgtcgggggaggatgctgctgaagatgtcttcgtgaccttggtagcggatgaccaagaagactttctactgctcgaaggcctctgggagaacgcaggcttctacactcaatgctgcgtacatctggtgtcagggatgcctaaaacgccgcactacactcgtctttgcaaggaggtacgcgcactgttggtggtcgcggatgaggtctgtaagcaatcaggcctgacccggtatcagactggttcagataaggtcatggcccagttggttgttgaagatctacctcagtcgtttgagctccagcaacgtgtctttttaggattcgacgtcctgaggtccagaggggtccagcgtgaggatctggagcctttcctcactattgaaatggattgcgaagcgttgcgaacgcatgagccgggactcagtcaacttgaccgtcaacctttgttggagacggccggtggactcatcgtaatgttgcctaccgcgatatcgattgctttgcgtgatcacgtgattgcgtatgtattagcgaccagtcaggtacaaaacttcgaccgaaattatgccaagcttttgagccgtaagatcttcgagacccagctgtttggtactttttcggactgtccggtgcattggcgttcgtcaggagtcgaccaatatgccagcgctttgattgagttcgaccacggacaccttctagcaatgcacttcattttgccgtcaatagtgatccatcgagatggcggcttcaaatatacggcggctccgcgtgagagcatgacgcgagatcttcaagtggccgtcacggcgtcgatagcccaagtaaataactctttccaggcaggtatccacctattcgtgctttgcggttggggcaaaggaatgggtattgaagttccacgcataaaagactcgcgttggaagtctgaaactattgcgttggccgacctgatccggttaagcgatcttgattccatggcgatcaggcggttctggcgcctacaaacgtccgtagacgccctacatccggcaggggttgaaatcatgaacctcaacggtgtcgtgaatttgatcggctgggtcgaattgaatgacgggcacctgataccccatgcgcagctggaagaaggaagaattagtccagaatcgccactggtcatttctccacctcttaacctcttacgtgacatacgcgcgcgagcggactattcgcgtgattttcatgtccgaaaggatagcagtggaacagctcactatctggaacgtttacagaaaaaaccgtacttcccgaaccccgcagattcacgcatctatgtttctttgaccgcgctacagcagggtgaactagtcgctgcctgcttgggcaagcccaccatttgggtacgtatcgctgccccggcattcacttcacgcgatctggtgtacaggctttgggaaatgctcatcgcgcgcgtggcccgcattgtcgatgctacggaagaactcgctcctctctccgccacatactcactgttattttgctttgaggactcgcaagaagagtttgagcgctacgacgctgagatcccgcaagatctcgatacccttgtccgttttcaaagcacgtccgctcacgaggcaaccataaccttcttgccaggttatgttcatgcatttcagagtccgctgaacactgccgaacatacacttagcaaaatcacggtccaggcgttagctgcgctggtagcgaaagcacctatgagcgctgtggctagcgatatcctggctcgagctgtgccgaatgatcgcggccggaattttcaccgcatgcatgctcacacctttactgactatgtccgggacaccctaccggctaaacctcttgtttgcgacgacattgatagtgccacgctacggcttggccttggttggacggttcacgaggggggcaatcacatcgaaggggacgctgaatgccgtgtattcctcaatgctttggtcgataagcgggtcgagcacgtgatcgctcaattgcaaactctgaatcgctacgaactgatcaaacgcttgctagtcaatcacgcggtcggagaggctgaagagcagcattggaaacgaacctccgccgcagtactcggtttgcatggtgacacgcctgccacacgctgcactgttgtcgaacagctgtcggccttggcggctacgcagatatgcagccgaatcctgattgaaatggccatttgtgcgtgccccttaggcgatggccgaaatccctcagacctagaaattgaagctctgttcgctgagatatctctgttaaaccgcctgggtagctggtccgacggaatttactatggcgctttggagccgcggctgaaaatttcgccactaggggaaatcttactggccgacgcgttcgctgaggctgtggtaactcctatgctcagtacagtcatgggcgaccgctacgttcgatcagcacccggccatgaccagtattataatgctccactgaccttggactccacggctcatcttttggaggatgagttcctccaggcttggaagaaggaaatggggttcaccattgacgacggccgaaaaatgctagatgccctcgaaaacgatgggatcgtcaaacaagaagcggtattaacgctgacaaaaagtcagttactaaacatactgggtagcgccactaaccagccagcagcactccacttcgttgaccgcttcgccttgctcacgcggcagtcttggagtacgccacccactggcttcaaagggagggacatcttgccttggagatttggccgtcggctctctgtggtaagtcgtcccatagtccaattggacctgaacgaagatccgatgtatttggtttcgccttcgctcgtgcgtcgtggcttttttaacgtgctccgcggcgcacatgccggaacgatcgaccaggacttcttcaccaccccagaaatgcgcgacgcatggtggggcaaggccaacgaaggccatacctttaatgcagaggtcgcacagacgctccggtctgctggctggcaagcggtagagaacatcgaactttcagcgattctcaaacaaaaactagaacgcgcctacggagatgtcgatgtgctggcttggcacaatggcaggacagaagtattggttattgagtgcaaggaccttaccttccgcagaaactactcggaaatcgctgcattgctttcggattacagaggggagcgaaagaacggtaagccagacaagctactacgtcacctcatgcgcgtggatcgccttcagcaaggattaacacagctagggcgctatacaggtatcgagaccccaaggatctgctcatgtctcatcgtaggtggcgtcgtgccgatgcaattcgccaaagttccagcgcttgaaggtacgtttgtaggggatgtgcagacgcttctccaaaacgttggtcatgcgacctccaggctatag

SEQ ID NO: 350176 - DNA, 807 bp, Pseudomonas aeruginosa
  misc_feature (203)..(203): n is a, c, g, or t
atgaagcggttcattgagggtgagtctcggacgcaagtcacgttgctgccagaatgtctggacgattacatcaccgaagaaaacccagttcgggtagtcgacgttttcgtcgatgaactcgaccttaaagcactcgggttcgagggtgccaatcccgcgacaacgggccgtccggcttaccatccagcagtgctgctaaaaanctacatctatggctatctcaatcggattcagtccagccgccgacttgagcgtgaggcagagcgcaacgtcgagttgatgtggttagcgggccgattggcgcctgacttcaaaacgattgccgactttcgcagagacaacggtaaggccattcgcagcgtctgccgacagttcgtagtgctttgccgcaaccttaatctcttctcccaatcgatcatcgccatcgacgacagcaaattcaaagccgtgaataaccgcgaccgcaatttcactcaaggcaaagtgaaggcgcgcacgcagcagattgagcagagcatcgaccgctatctagcggcaatggattcagcggatcgggcatcgccggaagtggtcgaggcgaagactgtgcggttgaaagacaaaattgaaaagctgaaacagcagatggaaaaactcaaggacatcgaggctcagcttcagaccagtcctgataagcaaatatcccttaccgatccagatgtccgctcaatggccacaagcggccgaggctccggcacagttggctacaacgtacaaacagcagtcgacgataaacaccatttgatcattgcccatgaggtgtcatga

SEQ ID NO: 350177 - DNA, 843 bp, Pseudomonas aeruginosa
atgcacctcgaagacgacagccccggccatcacctgcaacgatcagacttcattcgacggcttgttcaagcaccaccaccatcaacggccccggacaatcagggaccatcaattcccaggcgaatcgtgcagtactggcatgacttgcaggcgctgcctgctgacgtgctggagtgcatgaattcttggtcgaggtggggatcacgcggattcgaataccgtgtcttcgatgcgcgtagcgcggctcgcttcattgaacaatcgctgggaaaggcgcatctgcgggcgttcatgcgctgctatcaccccgcgatgcaggcagactacttccgattgtgctatctcgtcatcaatggaggaatgtacgtcgatgccgatgacgtgtgcatcgccaaggacatctcggagctgttcgtcgggaacggcgttaaggttcagccactttgctacgacatcgctgcggactcgatggttcagtgcgaggtcttcctgcaagcgggaaacaaccgggacgggttgattttctacgtcaataacaacccgttgatcgcttgcgagggagaccccatcatcagtcgagcactcgagcgtgcaaccctgcgcttgaacttggcagccgagggtgagttgctggagattcaatcaactaccggcccgggcaacctgtcgcgcatcatcttcgagatgggcgcgcaatgccttgatgagcatcggctgaccgtacttcggacctgggactcgatcggcatatccaagtggccgctgagctatcgtgccgacgggagaaactggcgaatatcaaatgggaagcggtttgcctttgatggggaggagacaccatga

SEQ ID NO: 350178 - DNA, 2202 bp, Pseudomonas aeruginosa
atgaacctcttcgagccgctgaggggcatccgccacctattgcacaccatgttcttgcgcttgcgcgtgctgttgccgaaacaaaaggcatacgcgttcggcccaatgggcggagctcacccgggcagaatcagcgacatctatgtgatcaatctagatcggcagccgcagcgcttggtggctgtttgccgagagctggaccgcatcgttgattgcacggggcaaccactgtcaaagcgactcatccggcatgcagcctgcgacgcgcgggcactaccggccgcaacgcttgctggtgtcgatatcgagccctactacacgcttgcggatcaattgtccgtcgacccgtacccacaggttctaccggacacgttcgatctgactcgcgagatccgaatgagcaatgcagaaattgcggtggcacaatcgcacattgacatctggaagaagatagccagttctaaggcagcatacacgctggtgctggaggatgacgtttggttcgaacagagctttggccgccttgtcgacacggcgtggcaggagatgcgggagagcgacgggaccgatcctgactttgacgtgctctacctgtcgttcaaagaggtgaagcacggtgctcccaagattgcgctctcgcgcagcgtctttcgaccagagcgcgggctttggtatctctcgggctatgtgctgtccaagcgcggcgctcagcggcttcttgcacgcctgccgtgccgcggaccagtcgacctttggatcaaccagcagttcccagtgacagacgttcgcgcgctgcgccgctctgtcatccctcaacgcgtcgatctgctgtccacgaactcctactcaattctccctgtcttgagccagatcgggattctttccgatacaacgcctgggacgttccatcagcgtcccacggaaacaccggtgtttgcctttggttctcggaacactggcctatcctccctggctatggccttgtctatgctgggctatcgctgctgcagcgacttggacgaccttccgcctgtggagagaggtcgcttgcttcgaggtcagcgtggacgcgtttttgatgcctacgtcaatgtcgcggcgcttgagccccacatcgcgcagctcaaggaaaggtatcccggggcgaagttcatcttcgtcggcgagatcccgaagaacttaccgctgccccctgagagcgtcttgcaccagcgtgcctttcccgagggctgggtagaactgtgcgagtacttgcgcatgccgccacccagtgctagctatccttgcgttgcggagcgaggcgttcgtcgtcttcgccctcctccgcccgcaggtgaaagactggcaagaggcaagcggctggagcacgatgtttcgccgtgggttgccccgccatcgcgccactggcacggcatcgacgtggagctatgcgagcctgggccgtggttggaggtatctcgcgcccggtttgacgaccagttgagcgaactagacgcttctcgttggctgtcgcgcgacgatacgttccccgggaaccttgcactctttaggcctggcagcgtgcgagttctgccttctggcggcttagatctggtggtcgcaagtgcgtcgcttggtgttcgtgaactgagcgcaggtgccgtttgcagccgcggccggttcctgtatggacgctttgaggcaactctgcgagcgaccaacgttcctggcatagtctcgggcttcttcctccacagagatcttccgcgccaggagattgatgtggagatcaccggtaaccgtccagaccagatgctggccaacgtcttcttcaacccaggctgcgatggcgcaaagtttgactacggttaccggggggcacctattgccatcgagcttgggttcgatgcctctgaggcgttccacacctacgcaattgagtgggcccctgacgaaatcagatggttcgtcgacgatcgccttgtgcatcggagagtgctctgggaccctacgccgattcccgatctgcccatgacgctacatgtcaacacctggccgacacggtccgaagaacttgcaggaagacttgtgcgcgagtctttgccggctgttgctgcggttcggcgaatcgcggtggatgcgaatagcatcgacgcgcagggcgatgccgtctcggacagcgaaaagttggagtggctggtcgatacggcgcaagaaggatag

SEQ ID NO: 350179 - DNA, 1008 bp, Pseudomonas aeruginosa
atgaaccaacccagaaaacgccgctcaattaaccaagtgaaagaagagatttccgtacaagtcctccgagaacgccttccagaacagtgggtcatccatgactatggtgccgattacggcatcgactgcgtgatcgaactgtttgacttcgtagagggcgatgccacggtagcggagacgctgggggagaacattttcgttcagctcaaagggtccagctcgatcaactacggtacgcgacgagcgtatcaccgaggaaacgttgccaaagggccactggccgagtcccgcgaccggtacgatgacatccccgtcgcgaaattccagcttgagatgtccgagatcctgacggtgcaagctatgggcgtagcagtgcctgtcctgctggttctcgtagacaccactactagggaagcatatttcgtatgtctgaatgactacatcgacaaagtgatcattccagaagaccctctgtactacgagaaaggtcacaaaacaataaacattcctctagcaaataaaattagcactcacgaggatagcttggttccgcttcgggcttacggcaaacgctcgaagatgtacggtgcattcgggacattccattatcagcagcaagaaattcgccgagcgcgaggaaagatgctggtagaggaggttaggtccagagagagcataatcgccatggtcaaaaccttcacatcggtggccctccgcctagatatttggaaaggacacgagttttggcagcctatgggatggagtcataaggaactctcggacatcctagaaaatgttcagtcgggcttcgctattgaaaacttcgaagtcctgctggaatattgtgatgtgcatgtgtggcgcaggctggcaaacctttcaagcatgtatgaagagcttgtgagggaatggtttatgcctactagcctcgccgttctgtgctcgtacccgtctaatcccgacgagacgccttgtactaatgatgcgacggccagcaacgcgggttga

SEQ ID NO: 350180 - DNA, 1596 bp, Pseudomonas aeruginosa
gtggtcaccccggcgccggccctggccgccagcaagggacacctgctggccatcgccgacggtgtcagccagtgcgccgatggcggcctggcggcgcgcagcagcctgcaagcgctggccctggattactatgcgactccggaaacctgggccatcgtgcagtccctggaccgcctgctgctggcgcagaaccgctggctacaggccaacggcggcggccagccgctgctcaccaccctcaccgccctggtgctgcgcggcacccgctacaccctggcccacgtcggcgattgccgggcctacctgtggcgcgacggcgagttgctccggcagaccagcgaccacgtctgggaacagccgcacatgcaacacgtgctgacccgcgccctgggactggaccagcatctggtggtcgactatctggaaggcgatctggagcccggcagccagtggctactggtcagcgacggcgtctgggcgacgctgggcgacagcggcatccgcagcatcctgcgcaacgccgaagagccgcagcgcagcgccgaggccctggttcgcgccgcccacctggcaggcagccaggacaacgccagcgccctgctggtgcgcgtggaagccgtgcccgcaggcagcctcggcgacgccctcgcgcaactgggccactggccactgccgccaccgctgaagcccgaccagctcttcgaaggctggcgggtccggcagttgctcggcgaatcccgccagtccctgctctaccgggtcgaggatggccagggccaaccctggctgctgaagacccttcccgccgcacgtgccgacgatccgctggcaacccaggccctgctgctcgaggaatggttcctgcgccgcgtccagggccggcatttccccgagctgcacggattggcgcaacgccagcatctgtattacctgatgcgcgagcaccccggagagactctcgccgagcgcttgcgcaaccatggcccgctgtcgctgccggagtggctggggctggccaaccagctgctgcgcaggcttggccagttgcatcgacgcaacctgctgcaccgcgacctcaagccggaaaatctccacctcggccgcgacggcgagctgcgcctgctggatttcggcctggcctggtgtccgggattgtcgcgcgaagacccccatctgctaccgggtacgcccagctacctggcgccggagtgcttctccggcacctcgccctcggtgcgccaggatctctacgccaccggcgtctgcctctaccaggcgctgaccgggcgctatccctatggcgagatcgaagccttccagcacccgcgcttcggtcgccccgtcccgcccagccgctatcgccccgacctgccggcctggatcgacgacctgctgctgcgcgccgtcgcctgcgaccccgcacagcgcttcgagaccgccgaggaatggctgctctcgctgcaacagggagaagcgttgccggtcgcggcgccccgcccattgctggagcgcgaaccgctgcagacctggcgcgccatcgccctgctgtccctggccgccaacctggcgctactcctggtctggctgaagggctga

SEQ ID NO: 350181 - DNA, 579 bp, Pseudomonas aeruginosa
atgctgcgtatcctgctgatcgacgacacgccgaagaaagtcggacgcctcagggccgccctgctcgagagcggtttcgaagtggtggacgagtcggggctgaccatcgacctgccggcgcgcgtcgaagcgctgcgtcccgacgtgatcctgatcgacacggagtctcccggccgcgacgtgatggagcaggtctgcctggtcagccgcgaccagccgcgcccgatcgtgatgttcaccgacgagcacgatccgggagtgatgcgccgcgccatccagtccggggtcagcgcctacatcgtcgaaggcatccaggccagccgcctgcaaccgatcctcgacgtcgccatggcgcgcttcgagagcgaccaggcgctgcgcgctcaactgcaggcgcgcgaggcgcagctggccgagcgcaagcgcatcgagctggccaagggcctgctgatgaagatgaagcattgcggcgaggaggaggcctacacgctgatgcgacgccaggccatgagccgccagcagaagctgatccaggtcgccgagcagatcatcgccatgcacgacatgctcggcggctga

SEQ ID NO: 350182 - DNA, 1209 bp, Pseudomonas aeruginosa
atgacagacagagcgatacgcagccaggcctgggccggcggttccgacgcaccggaaaagagcgccctggacatcggtttcatggcgctgaccgattcggcctcgctgatcgtggccgccacccagggcttcgcccagccctacggcctcacgctcaatctcaggtgccaaccgtcctgggccgccttgcgcgacaagctgctcagcggcgagctggatgccgcgcagtgcctgtacgggctggtctacggcgtccagctcggcctcggcggcagcgcggcaagcgagatggcggtgctcatgggactgtgccagaacggccaggcgatcaatctttccgaaccgctgaagcaggctggcgtgaccagtgcggaggcactgctccggcatcggcgccagaatggtgcacgcctgaccctggcgcagacctttcccaccggtacccacgcgctctggctgaactactggctggcgagcatcggtctgcatccgctgcacgacgtgcacagcgtggtggttccaccggcgcagatggtcggccatctccaggccgggcgcatcgacgggttctgcgccggcggcccctggggcgccctggccgtggaccagggccagggcttcaccatcgccaccagccaggcgatctggccggaccacccggaaaaggtcctcggcactacccgcgccttcgtcgacgcctacccgaacaccgcccgcgcgctggtcatggcggtcctcgacgccagccgcttcatcgaacagaacgccgagaaccgcctgggcaccgcgcaactgatcagcggccgcgactatgtcgacgctccgctcggcgcgatccagccgcgcttcttcggccgctaccaggacggcctcggcaacgcctggcaggacccgcatccgctgcgtttctatgacgacggcgaagtcaaccggccctggctctcggatggcatgtggttcatgacccaattccgccgctggggcctgctgcgcgaagacccggactacctgggcatcgcccgcagggtccagcagaccgcactgtaccgcgatgccgcgacggcccttggcctgtgcctggacggcgccgacatgcgccgctcgacactgatcgacgggcgcacctgggacggcagcgaccccgccggctacgcccgcagcttcccgatccacgccctggccgaaaccggccagagcatcgccccctga

SEQ ID NO: 350183 - DNA, 2610 bp, Pseudomonas aeruginosa
gtgcttgaagcctaccgcaaacacgtagaagagcgtgccgcccagggtgtcgtgccccaaccgctgaacgccgaacagaccgcaggcctggtcgagctgctgaagaacccgccggccggcgaagaagaattcctccttgacctgatcaccaaccgcgtaccgccgggcgtcgacgaagccgcctacgtcaaggccggtttcctttccgccatcgtcaagggcgaagccacctccccccttatcgacaagcaacgtgccgccgagctgctgggcaccatgcagggcggctacaacatcgccaccctggtcgagctgctggacgacgccgaactggccaacaccgccgccgaacagctgaagcacaccctgctgatgttcgacgccttccacgacgtcgccgagcgcgccaagaagggcaatgccgcggccaagtccgtgctgcaatcctgggccgatggcgagtggttcaaggccaagccggaagtcccggaaaagctgactctcaccgtattcaaggtccccggcgaaaccaacaccgacgacctctccccggcccccgacgcctggtcgcgcccggacatcccgctgcacgccctggccatgctgaagatggcccgcgacggcatcgagccggtccagccgggttcggtcggtccgctgaagcagatcgaagcggtcaaggccaagggcttcccggtcgcctacgtcggcgacgtggtcggcaccggttcctcgcgcaaatccgccaccaactcggtgctgtggttcttcggcgaagacattccgttcgtgccgaacaagcgtgccggcggcttctgcttcggcaccaagatcgcaccgatcttctacaacaccatggaagatgccggcgccctgccgatcgagttcgactgcaccaacctggccatgggcgacgtcatcgacgtatacccctatgaaggcaaggtcgttcgccacgacagcggcgaagtggtcaccaccttcgagctgaagaccccggtcctgctcgacgaagtccgcgccggcggccgtatcccgctgatcgtcggccgtggcctgaccgagaaggcccgcgccgagctgggcctgggcgcctccgacctgttccgcaagccggaagcaccggccgatagcggcaagggcttcaccctggcgcagaaaatggtcggccgcgcctgcggtctgccggaaggccagggcgtgcgcccgggcacctactgcgaaccgaagatgaccaccgtcggttcccaggacaccaccggcccgatgacccgcgacgaactgaaggacctcgcctgcctcggcttctccgccgacctggtgatgcagtccttctgccacaccgcggcctatccgaagccgatcgacgtcaagacccaccacaccctgcccgacttcatcatgacccgtggcggcgtgtcgctgcgcccgggcgacggcatcatccacagctggctgaaccgcatgctgctgcccgataccgttggtaccggcggcgactcgcacacccgcttcccgatcggcatctcgttcccggccggctccggcctggtggccttcgccgccgccaccggcgtgatgccgctggacatgccggagtcggtgctggtgcgcttcaagggcaagctgcaaccgggcatcaccctgcgtgacctggtccatgcgatcccttactacgcgatccagcagggcctgctgaccgtcgagaagaaaggcaagaagaacatcttctccggccgcatcctcgagatcgaaggcctcaacgacctgaccgtggagcaggccttcgagctgtccgacgcctcggccgagcgttccgccgccggctgcaccatcaagctgccggaacaggcgatcgccgagtacctgaagtccaacatcaccctgctgcgctggatgatcggcgaaggctacggcgacccgcgcaccctggagcgtcgcgcccaggcgatggaagcctggctggccaagccggagctgctggaagccgacaaggacgccgagtacgccgcggtgatcgagatcgacctggccgacgtcaaggagccggtgctctgcgcgccgaacgatccggacgacgcgcgcctgctgtcaagcgtacagggccgcaagatcgatgaagtgttcatcggctcctgcatgaccaacatcggtcacttccgcgccgccggcaagctgctggacaaggtcaagggcggtatcccgacccgtctgtggctggctccgccgaccaagatggacgcccaccagctgaccgaggaaggctactacggcatctacggcaaggctggcgcgcgcatggaaatgccgggctgctcgctgtgcatgggcaaccaggctcgcgtccagaccggttccaccgtggtctccacctcgacccgtaacttcccgaaccgtctgggcgatgccaccgatgtgttcctggcatcggccgagctggcggcggtctcctcgatcctcggcaaactgccgaccgtggaggagtacatggcctacgcgaaggacatcgacagcatggctgccgacgtctaccgctacctgagcttcgaccagatcgccgagttccgcgaagcggctgcgaacgccaagatcccggtcgtccaggcctga

SEQ ID NO: 350184 - DNA, 468 bp, Pseudomonas aeruginosa
atgtcttcgcaaagaatcaaaaccccctgcgtagggctttgctccacggtatacggcgacctggtatgccgtggctgcaagcgtttccaccatgaggtggtcaactggaacctctacgacgccgaggaaaagcgggctgtctggagtcgccttgagcagttgctggcccaggtgatggccgccaagctggaagtcttcgacgccgcgcgcctgcgcctgcaactggagcagcggcaaatccgtttcgtccccgagcagtccccctattgctgggcctaccagttgatcgcccgcggttcccggctgatcaaccagatcgaagcctacggcgtggcactgctgccggaattccgcgactggagcctgccggacctgcgcgatgccatcgaccgggaattcttcctgctgtcggaagcgcattaccagcgctacatcgcgccctcgttcctgcaggcgatcgacagatag

SEQ ID NO: 350185 - DNA, 864 bp, Pseudomonas aeruginosa
atgcaagccattcgcagcatcctcgtggtgattgaaccggaccagctggaaggtctcgccctgaaacgggcacaactgatcgccggcgtgacccagtcgcacctgcacctgctggtctgcgagaagcgccgcgaccacagcgccgccctcaacgacctggcccaggaactgcgcgaggaaggctacagcgtctcgaccaaccaggcctggaaggactccctgcaccagaccatcatcgccgagcaacaggccgaaggctgcgggctgatcatcaagcagcactttcccgacaacccgctgaaaaaggccatcctcaccccggacgactggaagctgctgcgcttcgcgccctgtccggtactgatgaccaagaccgcccggccctggacgggcggaaagatcctcgccgcggtcgacgtcggcaacaacgacggcgagcaccgctccctgcacgccgggatcatcagccatgcctacgacatcgccggcctggccaaggccacgctgcacgtgatcagcgcccacccctcgccgatgctctcctccgccgacccgaccttccagctcagcgaaaccatcgaggcccgctatcgcgaggcctgccgcaccttccaggccgagtacggtttcagcgacgaacaattgcacatcgaggaaggtccggccgacgtgctgatcccgcgcaccgcgcagaagctcgacgcggtggtcaccgtgatcggcaccgtggcgcgcaccgggttgtccggcgcgctgatcggcaataccgcggaagtggtgctggataccctggaaagcgacgtgctggtgttgaagccggacgacatcatcgcccacctggaggaactggccagcaaggagtga

SEQ ID NO: 350186 - DNA, 612 bp, Pseudomonas aeruginosa
atgttgcccgagatcgaccaattccttgcctgttccactcccgccgcctgggtcgaggcggccctggagcgccaggacgtcatgctgctggaccacaaggcctgcgagatgaaggccgcggctacggcgatgcaactgatcggcaagtactccggccgcctggacctggtgaacaagatgagccgcctggcgcgcgaggagctgcgccacttcgagcaggtgctggcgatcctgaagaaacgcggtatcccggtggtcaatgtcagcgcctcccgctacgcctcggcgctgcgcgacctggtgcgcaagcaggagccgcagcggctgaccgatacgctggtggtcggcgccttcatcgaggcgcgttcctgcgagcgcttcgccgccctggtgccgcacctggacgcggagctggcgaaattctacggcggtttgctgaagtccgagtcgcggcatttccaggactacctgaagctggcctaccagtacggcgacgaggccgacgtggagcggacgatcgaggtggtgcgggccaaggaggccgagctgatcagcagtccggacaacgagttccgcttccacagcggcctcccggtggacctggtggcctga

SEQ ID NO: 350187 - DNA, 2736 bp, Pseudomonas aeruginosa
atggcagagtcgcaaacaaaaaatctttggattacaagtatccagccatattcggttggcgaagaaagctacatccccactgcaattttctatgaaagcccagaagttcaccatataggcaactccgccttacagaaaggcgaaggacttataatcaatgacaatttcaaaataaacctaggagaacatactccaggcacattaaaagggaaattagccccttcaaatgatggtgaagatagaagcgcctttgacctgtcacagaccttcatgaactcaattctaaaagatctagaagaagaaataaaaaatgaaacttccgcgcaacataagatcccagccaaaatacttgttgccgaacccctaagcttctccaacaaggaggagaagcacacaaaaacttggatgcagaactatcgagaaaacattcggcgcatactgaatcgctatgaggaagtagatttcctccctgaacctttcgcagtctatcaatactaccgctacggccagcggatcccgaatttacaagataaaagcaagcacatagcccttgttcttgatttcggaggtggaacatttgacgcctgcgtaattgaatcaactagccaaggagacataagtttaaccgggaaacactctaaaccattggcagctgactcctgcgcagtaggcggatttgaaataaacttccatatagccgagtacctaataaaaaggaatctagagggaggaaagagaaaagaagccgaccaatgcatcagcagctacaaaagagtaaaaaacggagagctaaactattccgcactcggcgaaaagaaaaccaagttcatagaaaacttcaaaatattagaacgagaagtcgaaaaatacaaaatcaatctcacctcaacaataaagagctggtcacttaacagtgaagcctacgaacgaacagctatcaagacaccaatcaacccatttgacgatgctacaaaatgggtcgatgatgaattctttgcgcaccagtttagaaaaatatttgaaaatgaagtatgggaaaatcatctaaagcggacgatcgggagagtattcaggaccgctgaagagaaactaaatggcaaatcaataacagtaacactaatatccggaggttcctccaacattcgatggttaatggagcttcttgaccgtgacttttctgacgaacttgaaggcgcaactccggttcctatatctcagtcgttccaagaggttgtagcaaatggattagcaattgaatgcgcgagaaggttctatgaacaagaaagcgaatttgtctctgtaacctacaacccgttaaagctatccctgaagccagacgaagaagaatcagaacagactagaaacttctcgtccgttggcgaaaagatagatatgaatggagtcaaacccggagacttaatgccctccgcgcaagccctccacaactttataaacgaacacctgcaatggaaaatccgcctatcaaagccaccaaaaagcaaactaacatatgtattctcaaagccaagcgactcaggactaactgaagataacgaagtatacaatagcgaaaatcaagttatttacaccagagataacaagcagtttgactcatacataacagttgacttgctaataaaggaagatggaaccgtatatccttctttcatatataagatgcctaacaaagaaaatggcgtagaaggagccactgtcgaaggcaggccattcgccatagacatgacaacgggcattacaagtacatcatcacccaagaactatattggattcgactttggcacaagctgctcctctctgtgccttctaacacaagatcaagttaagatcactgctgcacgctcaaacgaccccacgtggactagcctcagtgactccataagctatctgccataccctgtagcctatcctctgagaaagtatcttgatgtgaagaacaccaccacatcagctacggttgcacgtgaagcatttgaggccgcattagcattcatgacctatgtcacagtggccgaactgtactccaataaaaaagcaggaagaatatttaaaaacttccaacatcgctccatggggccacttaagtcagtactaaaacagtcaatagaggccctaggtaactctgcaaaattttcaaaaccaataaggtcattcctagaaaagaacgacaccttacttgaaagagcgatatctgaatttaacaatcacaagcacgaaaagcttgaggataatgcgttcgactaccatagccatctttccttagtgatcagctgctgcacaaaactaatgcgaggaaagctattcggctacatgacagacatggagcaaaaaccatttgaagatgacaaattcactggagttttcaaagtcgcccacgacgtccctccgtttaccaaatcacatgcctttgaaagtagcaagcagaagccaagaacactagcagtcctaactgagaccgaaagcgaatttgctcttccgctattcccactaatattctggctcgaaacgactgacagcgtgagtggaatggagtgcttctggtacgacaaaaccacagaaaactccggttcccccatagtgaaaccgtgcaataagaaatcagagttctctgcaaccgaacttaacccaaaactaggggcagcaattacctcatcgctcaaggagggcagtaactctttctcaactttcaaaatcaatctggagattgagagcgaataa

SEQ ID NO: 350188 - DNA, 870 bp, Pseudomonas aeruginosa
atggcaatggatcttggtaccacaacaatatatgctagtcagggcagttttggcacctacaactatgggaataacggcgcaaactggcctgcaccccatccggcacaaattggttatatctctaaaggccagcggaacgtcgcttatgtaaatggcgactgggagaaacctctgctttctctgtggactcagtgggcgaactggggtacgactctttatggatacccaagccttcctcagcccaatttcgagtttatatgggacatctttgacctacctcaggcagactacaatcagtattctctaggtgacgataggatcactgcaatgaatcgcgcgcagaatcacaactatcgtgctcctgtaggtgtcgatgaacccaactgggatcgcccaaaaatcgatacgttcaatggtggggtctacacgcccgcggcagcttttgctcactacctgacgggcaaaggtaagaaaatgaacttccctattgaacgtttgaatattaaacctaatgtaaaggctatgcctcagttcattgggattctgacgagcagtccaatggggcaaaccactgtggatttcaatgtgccatacgctactgctaaggatagttgggtggctggaaacacggttggagagattacgctccgagtgacaggcacccttgttaagtccacctcaggccaatggagcttccgtggagagatccgtgcatatgatgatgtatatgactttaatccttcaaatcatcgaaccgaaacggctgaagggatgactcgcttagggcgtgaagtgggtcagaaatttaaagacactactccctatcccattggaattccgggtactatccctgttaatatttctggttaa

SEQ ID NO: 350189 - DNA, 219 bp, Pseudomonas aeruginosa
atgccagaactcgaagtgaaaaccctgaaaggatttatcaaccagggcagctacgtcaaacgagggtcgactatcacggtcgatgaattgcgcgcccgcgagcttcgggccaatggtctgatcgaagggtgcgagatgaagcaggcgcccgcccccgaaaataaggcagctccggcgcagaagcagaaaccggccggcaagcctaaggccaaggagtaa

SEQ ID NO: 350190 - DNA, 1257 bp, Pseudomonas aeruginosa
atgttcaatgccatgagcaacgcggctcgcgccgagcaaaaccgtatgcatcgcaaggagcgcgctgacgatcaactggagctcaagggtgtcatggaggcactgagccagcgcgacgccgagattaaggcttttgctgaaaaggcgagccaggagatcaaggaccacggtcgtatcttggaagaaactaagaccgtgttggaaggtctttccgcctccgggctaaagtttcaagatcgtctccaggatctggagcagaagctggcccgccgcttttctgcgaacgatccgtccgatgccaagtccctcggtgaacagttcaccgaagacgacgacttcaaggcgctcgctgagaaaggccgtggcgttgctcgccttcgtgtaaaggcggtgaccaacatcaccagtgcaaccaccggaaccggcggtgttggtgtggccatccaacccgaccgcgtgccgggaatcatcgccggcccggatcggccgttcaccattcgtgatctgatcatgcctggtcgcacggggtcgaacgccatcgagttcgtgcaggagtccggtttccagaacatggcggcaccggtggcggaaacgctgtctaagcctcagtcggatctgtcgttcgaactgaaaacaaccacggtcaagacaattgctcactggttccgtgcttcgaaacaggtactagcggatatcccgctgctgcagagctacatcaacggtcgcgcgatctacggcctgaaatacgtcgaggagaaccagatcctcgctggcgacggcaccggccagaacctgctgggcctgatcccccaggctacagcgttcaacgatgctcttcgcaaggccggcgacaccaagatcgacacccttcgccgtgccatcctgcaggtgcgtatcgccgagtaccgtgcgagtgccatcgcgctgaacccgatcgattgggctgatctggagctttccaaggacagcacgggccaatacatctgggtcaacgtgcaggatggtggccagcagcgtatgtggcgcctgccggtgattgacaccaacgcggtaccggaaggtgagttcctggtcggcgccttcaacatcgcggcccaggtgttcgaccgtgaagacgcaaatgtcgaagtttcgaccgaggacggcgacaacttcaccaagaacatggtgaccatccgcgcagaggagcgccttgccctggcggtctatcgtccggagtccttcatccacggcgagttcgcggctccgaccccgtaa

SEQ ID NO: 350191 - DNA, 699 bp, Pseudomonas aeruginosa
atgaatcgaaaatctgtgtcgtccctgaagatcagggacttcgatctacatgtgaaggctgtcagcgatgacggccttttttctggctatggctctgtctttggcgttgtcgattcctacttggagatcgtcgcgcctggggcgttcaccgagagccttgcagaaataacagcaaagggccgaccggttccagtgctttggcagcaccgtagcgaccagccggtaggggtttggaccaatctcaaggaggacgagcggggcttgttcggcgatggcaagttgatcctcgaaggagtgccgcgagcggtcgaggctcatgcgctgatgaaggctggcgccgtctctggattgtccattggctattacgttcgcgaatcatcgcgtgacgaaaagaccggggtacgcaccctgaccaagcttgatcttgttgagatcagcctggtgacgttcccggcgaacgatgacgcccgtgtcgacactatcaagtcgaaactggcccatggctctctaccgagccttcccgaatttgagcagctcctgcgtgaggcaggcttctcgaaaactcaggcagcggtgatcgccaaccgcggcctgaagcatttgctccggagtgagtccgagggcgatccggcggacccagaaatggcccaggcgctgatcaagcagatcggccgaggcctgcagcttccctctttataa

SEQ ID NO: 350192 - DNA, 1296 bp, Pseudomonas aeruginosa
gtgaaatccgcccaacctggcctaatcaagtcgagcgtcgcgaacttcttcggaaaaaccattcggttgaccgacgccgggttctggtcagctttttacggggccgactctgcctccggcaagattgtcagccagcagagcacattgcagctctcaactgcttgggcctgtgtcaggttgattgcagaaactatcgccacgctgccgatctcgctctatgagcgcaaaaatggtgagtcggtggtggcgaccgcgcatccactgcacttcgttatcagtcagcagcccaacgcggaccaaacaccggtcgagttctgggagtgcgtgctggctagcctgctgcttcagggcaacagcttcaacgaaccaacctggaatcggggtgagatcaccagcctggaattcctattgccgcaggcgatgtctcaaccgcgccggctgccgtctggcatcatcgagtaccgctataccgactgtaatggaaagcttcgggtgcttaccgaagagtcgatgatgcatacccgcggatttggcactgacccgctatgcggactcagtccactggcgatgggtcgaaacatcttcggggcggccatggctgcggatgaggcggcgagcaagatgttcgccaacggcatgaagctcggcggagttctttcgaccgatcaaatcctgaccaaggaacagcggacggatctcaaggcggacatggctgctcagttcactggtgcggtgaacgccggaaagaccatggtgcttgaggcgggtatgaagtatcagcaggtgtccatgtcacctgaggatgcgcagatgctccagactaggcagttcaatgtcgaggaaatctgtcggtggttccgcgtgccgccgtggatggttgggcacacggagaagagcaccagttgggggtcgggcatcgagcagcagatgatcgccttcctgagcttcacgctcctgccatggatgaagcggatcgagcagagcatcaaccgccgcttgctgcgtccggaggaacgccggttcttctatgccaagttcaacccggagggtctgctacgcgccgatagcgctgcgcgtgccgccttctactcggcaatgacccagaacggcatctacagccgagacgactgccgcgagaaggaagatcttccgcgactgggcggcaatgcggccgtgctcaccgtgcagtccaacatgctacccattgacctgctcggacaagacaacaccagccagaaagcgcgcaacgtgatgctcgattggttgcgcgaagactacaagccagggggaacctga

SEQ ID NO: 350193 - DNA, 165 bp, Pseudomonas aeruginosa
atgaataccggactcttcatattcctggcggtatcgctggctgggctgctctgttgctgcgctggtgtttacctgctggccggcgccggctgggcccttatctctgcgggcttagcctgcttcgcgatcgctggatttattcgcaaggggctgatcagtggctaa

SEQ ID NO: 350194 - DNA, 378 bp, Pseudomonas aeruginosa
atgtctgcctgctggccgctgcagggtctgacgccggcgcagaaggctgtgctgatcagcctggcggacaacgcgaacgacgagggcgtgtgctggccttcggtggcgaagatcgccgagcgcacctgcctgtccgaacgtgccgtgcagcaggctatcaaggtgctgaacgagtgcaaggcgctgagcattgaagcgcgccaggggaggtcgacgatgttctattacggttctgggcgcagatgctgcacccccacccccgcaggatatgcacctcacccccgcagcatctgcacccagaaccgtaatagaacctacaagggaaccatcagggaaccttttgccggccgattccggccagcccgatgcggagcgtga

SEQ ID NO: 350195 - DNA, 1302 bp, Pseudomonas aeruginosa; identical to SEQ ID NO: 325814

SEQ ID NO: 350196 - DNA, 1350 bp, Pseudomonas aeruginosa
atggaaaccacttccgaaaaacaggggcgcatcctgctggtcgatgacgagtcggcgatcctgcgcactttccgttattgcctcgaagacgaaggctacagcgtggccaccgccagcagtgcgccgcaggcggaggccctgttgcagcgccaggtattcgacctgtgcttcctcgatctgcgcctgggcgaagacaacgggctcgacgttctcgcccagatgcgcgtccaggcgccatggatgcgcgtggtgatcgtcaccgcgcattcggcggtggataccgcggtcgacgccatgcaggccggcgcggtggattacctggtcaagccctgcagcccggaccaactgcgcctggccgccgccaagcaactggaggtgcgccaactgaccgcgcgcctggaggccctggaggacgaagtgcgccgccagggcgacggcctggaatcgcacagcccggccatggccgcggtactggagaccgcgcgccaggtcgcggcgaccgacgccaacatcctcatcctcggcgaatccggctccggcaagggcgaactggcacgcgccatccacacctggagcaaacgcgcgaagaagccccaggtcaccatcaactgcccgtcgctgaccgccgaactgatggaaagtgaactgttcgggcacagtcgcggcgccttcaccggtgccaccgaaagcaccctgggcagggtcagccaggctgacggcggcaccctgttcctcgacgagatcggcgacttcccgctgaccttgcaacccaagctgctgcgcttcatccaggacaaggaatacgaacgcgtcggcgatccggtgacccgccgcgccgacgtacgcatccttgccgcgaccaaccgcgacctgggcgcgatggtcgcccagggccagttccgcgaggacctgctctaccgcctcaacgtgatcgtgctcaacctgcctcccctgcgcgaacgcgccgaggatatcctcggcctggccgaacgtttcctcgcccgcttcgtcaaggactacggccgccccgcccgcggcttcagcgaagccgcccgcgaggccatgcggcaatacccctggccgggcaacgtacgcgagctacgcaacgtgatcgagcgcgccagcatcatctgcaaccaggaacgggtggatgtcgaccacctcggtttcagcgctgcgcaatctgccagcagcgcgccgcggatcggcgaatcgctgagcctggaagacctggagaaagcccatatcacggcggtgatggcctccagcgcgaccctcgaccaggccgccaagaccctcggtatcgatgcctcgaccctgtaccggaagcgcaagcagtacggcctatga

SEQ ID NO: 350197 - DNA, 1335 bp, Pseudomonas aeruginosa
atgtcgcaatcccaaccgaaatccgctccttcactggcgatcgaccttaccgaattccgccagggctggcggatcctgatcctctcgctgttggggatcggcacttccgtctcggtcgttccgttgtactccttcggctctctggttctgccgctgcaggaggggcttggctggtctcgcgaggaaatccagccggccatctccttcctgctggtcgccaccatcatcgctgtgcagatcagtggctggctgatccgccgccatggtctgcgtcccgtggccattatctcgctgatcacgttgtcactttcctattggctgatcaccttcatcaccgaggtctggcaactttatgcctgctacaccctgatggcattcgccgggatggggacgaccatggtgacctggacacaattggtcaacctctggttcgagcgcaatcgtggcctggcgctggcgatcattctctgtggtaccggcagcgcagcattgattctgcctccgctgctcagctgggcaatcgagctggcaggctggaaggccggcttctggattcttgcgttgctgccgttgctgataaccacacctctatcgattttctggatacgcagtgacagtccggccagcgccgccgtcacccgtgccgtgggcgggccgctcggtcttggcggcttgtcactgagcgagacggcccgttcgctgcgcttctggttgtgcaacgtcgcgctgctgctgtcggtcaccgcaatggtcggcatggtcaccagcaccattccgatgctgcgcgacaagggtctatcggctagtgatgcggcgatggccttcagtgtctacggcgtatcgttgattctcgggcgggtggtagtgggttacttggtcgaccggctgtgggcgcctggcgtggccttcgtggtgctggctatgcccgcggttggttgtctgatgttctctgtggtggatacccacctgcacagcctgatgctggcctcggcgctggtaggcctgggtgccggggcggaaatggacatcgcggccttcctcatggcgcgctacttcggcatgcgcgactacagcaggatattcagtctgcatatgggcttcattggtctgggggcggctctggcaccgctctacttcaactatctcttcgcgcagtccggttcctattcgggactgctgctgcactgcactatcagctttgccctgggggccttactgctgctgctcatgggacgctatccggattttggcaggcctctggagcgcaaagaacatggtgaagtggagaatgacagcatgggatctccgttgcggagccggggtcaggaggcgtga

SEQ ID NO: 350198 - DNA, 453 bp, Pseudomonas aeruginosa
atgtcggatagaaacgcacaggagctgagcagcttcctggagagtgtcgaccctttgctgggaatggatccgctgcttacgcatctggaaatccttggcgctccatcgttcgatgagcgcggtgcgcagctgcggctcaggctcaaggacttccatatgaatggtggggcgtcggctcatggcggtttgatcatgaccatactggacgtggttctggcctgcagcaccctgggccagggtagtggccgtagctgcgtcaccgtggagatgaaggccaacttcatccgcccaggaggtggggtgggtgatttgctcattgctcagggtttcctgcgggccagcggtaaatcactggcattctgcgatggcgaggtgcgcaacgagcggggcgagttgctggccaccgccaccggcaccttcaagtatgtcaatcgcaagctgccggcggtatga

SEQ ID NO: 350199 - DNA, 1047 bp, Pseudomonas aeruginosa
atgaacgatcaggatgccagcgaccgactggtcgacaccgtcaggagtgcactgaacagtcgcactcccgtatacatcaggggcggcaagagcaagaggttcctgcaccaggcacatcaggcgacggaactcgacagccgcgaccatagcggcattctccatctcgatgccgaacggatgacaatcagggcccgcgcggggactctactggcggagctgaaccaggctctgaacggcaaagggctgatgttggcattcgagccaccgagttttgcgccaacggccacggtaggcggcatggttgcctgtggcctggccggcccacgtcaaccctgggcgggagcggtaggcaagcacttgctgggaggtaggctgatcgatggcctgggtcgtcagcgggggtttggtatcgacgcgacggagtcgatactggtcggcaaccccagccaactgctggcgggaagcctcggcgaactgggcttgtttaccgagatctgcctgaaagttcgtgccaagccggcgtgtagccgaacgctgaggttggagatcgagcgcggcttcgccctctccctgatgaggaaatggcggctatgcgcctcccccatcagcgccttctgccataccggagacgccctctacctgcgcctggaaggcagtgcggctacggttcgcaaggccagcgatcagctgggtgggctggaagccaacgccaatttctgggaagagctgcgtgaacaccaattaggttttttccgcgaccctcggccgctttggcgcctgtcgctgcctgaggatgcgccgctatcgccggagctgccgggtgccatactgctcgattggtgcggcgcccagcgctggctgaaaagcgatgccccggccgcggcggtgcgccgtcttgccgagcggctcggtggctatgccagcggcttcacccccggcgcaacggaactccccctacggcacaacccaacgacccgctcgcagccgttccttgaactcaaggagcacctggatccgcatcggctgttcggaacgctcgccgactga

SEQ ID NO: 350200 - DNA, 864 bp, Pseudomonas aeruginosa
atgatggttttgcatacggagtcacctctggcctggggccagaagcagttggcagagttattccaactaggccgacagtctgcgtccgttttcaccgccgatatccatgacatcaacctgaacggccgggtgtttggtgggcaactgctggggcaggcgctgatggcggccaggcaatgctgcccgaacaaggaaccggccaccttgcactgcctgtttctgcaaggggcccgagtggatctgcccctgcaatacgtggtgactccgctgcaggatggcaagcggtttaccagcctgcatgtggccggacgccaaggcgagcgcaaggttctggacgcccaggtcagcttccaggcgtccatggcgggcttcttccatatggagatggccgatgacctgcccgggccggatgagctactgcccatggatgaactgccgggtggcgcctgggggcgtttcgagaagtcctgtctggagctacgaatcattgaagcggagcactacctgcggcgatctccaccggttcctgcggtcgcctactgggtgcgtttgcgccacagtttaccggacgaccctgccattcacgcctcggcgttggcctatctcagcgacttctggatcaacagcgcggctatcagctatcacgtccccctggatgacgctcgggagcggctgttcatcgccagcctcaaccactcgctctggttccaccaggcctgccgcgccgacgattggctgctgttcgtctgcgaaagtgccagcatgcaaggggggagggggctgacacaggcccgcgtctacgacagttcgcggcgtctggtggcttccattgctcaggactgcctggtgagtgagcgtcagtag

SEQ ID NO: 350201 - DNA, 858 bp, Pseudomonas aeruginosa
atgacaggaacaagcacctacttcacaggtggctcgggcaaccgcttggcggcggatgtctcgggcccgaaaggcgctcccccggtgatccttctccatggtggcgggcaaacccgccactcttgggcgcgagcacacaaggtactagccgccaagggttatcgggtgatttccctggacgctcgcggccatggcgaatccgactggcccgaggacggtgactacagcacagacgcgcaggtcgacgatctgcttgccgtcatcgccactcttggcgaacgccccgccttggtgggcgcgtccatgggtggcgtgcagtcgctgatcgcctgcggacaccataccggcctcgcttcggcgctcattcttgtagatgtcacaccacgccttgaaatccaaggtatcgagcacatcatcggtttcatgacccggcacccggaaggcttcgcctccttggagcaggccgccgaagtagtcgccgcctacaacccgaacagacgcccatcgcgcgatctcaacggtctcagcaagaacctgcgtcaacgcgacgatggccgctggtactggcactgggatccgcgtttcatgcaaggcaaccacctagagaaggtcacgcggatcggccagcagatgaaggccgccgcaagcggtgtcgagattcctactctactggtgcgtggccggcagagcgacgtggtcagccccgagggtgtacgagagctacgcgaaatgctgccacacctcgacttcgtcgatatcgagggcgcgggacacatggtcgctggtgacaagaacgatctgttcaacggagccattatcgagtttctgcaacgacatcatccattgcccctcccctga

SEQ ID NO: 350202 - DNA, 1626 bp, Pseudomonas aeruginosa
atgtcagcacgcgaacccggctggagcactgatcaggtcgacaccatcaacgccgtactgcaacgctctacggagaagtacggcgaccgccaattcctcgagttccttggcgagacctacagcttcgccgacctgaaccgggctgcctgccgcctggccaatgggctaaaaggcctgggagtgagcaaaggtcagaccgtcgtcaccatcctcgacaattcggccgacgccgtcgtcatctggttcgccatcaacaagctcggcgcgataagcgtgccggtgaacaccgcactaaagggcgatttcctgcgccatcaggtatccgacgccgatgctgccgtagtgatcgccgaacacgattatgccgagcgcgtggccaacatcgccgacaagctgcccaacctggaaaccctggtctatcgcggcaccacgcccgacctggtgtttaacaagcaactgctaccctgggccggcctgctcagcgacgacaccagcgaacccgaggttgatgtgcaacctggcgatttggccatgctcatctataccggtggcaccaccggcccgtccaaaggctgcatgatcagccacaactatacgtgcagcctggctcgacagatgctgatgatcaccaatcgcgatgaaacaaccatcacctggacgccgctaccgctgttccacttcaatgccgtggccaccagcgtcctgtgcaacatgatggtcggcgcccaggtcgccatctacccacgcttctcagtgtccaatttctggccggaaatcgaacgtaccggtgccaatgacgtgggtctgctggcggcgatgatgccgatgctggccggcgcgccggacaacgacgcaatgaagcgctgctacggccagatcaaaggcgtatggggcgcacctttcccggaaccagtgcagcaggcatggaagacgcgcttcggcgtcacccacaccgttgtcggcggcttcggcctgagcgaatgctcgctgccgaccatcctgccattcggtacgccgatgcggccgaacagctccggtaagcgcaacacggaatacttcgacgtacgcatcgtcgatgaccacgacaacgaactgccgcccaacacccccggcgagatcatcgtccgtccgcgcaagcctcacatcatgttcgagggctactggaagcgtccggaagataccctcaaggtcatgcgcaacatgtggttccacaccggcgacatcggcatgttcgacgaggatgactacttctacttcctcgaccgcaagaaggactacctgcgccgccgtggcgagaacatttccagcttcgaggtggaaagcgccttcctccagcattcggctgtggacgaagtggccgcccacgcagtgctctccgatctgggcgaggatgaactgaaggtgaccatcaccctcaagccggacaccagcctgagcgaggtagacctgtgccactgggctgccgaacagatgccctactacgcagtgccgcgctatatcgagttccgcagcgccctgccgaagagccccctgggtcgcgtctacaagttccagctgcgtgacgaaggcgtcaccaccaccacctgggatcgtgaaaaggccggtttcaagctcaataagcgctga

SEQ ID NO: 350203 - DNA, 1185 bp, Pseudomonas aeruginosa
atggtgtcggctctggaacgaacagcgatcatttccgggattggccagtcggccgtggggcgcaggttggggcgcacggggttggatcttactttggaagccattctcgcagcattgacggatgcagggctcgatcgcagccagatagacggagtggccagctggccgggctatcgtgccgacatgccggccttctcgccggtttccattggccaggtcaaggaagccttgggcctggagctgaactggtattgcgcgggcaacgaagccacccagatgagcggtttgatcaatgcctgcatggctgtggcctcgggtcaggctcgccatgttctgtgctttcgtaccgtaaccgagtccagcgccctggcgcagggtgtgcgctccagcactgtggggggctcggcgccacgggtatccggtttcggtgagttcttggtgccgttccaggccacctccgccgccaactgggtggcccttgccgccagccgttatttccatgaattcggtacccgccgggaccagttggcggccattgccctgaacgctcggcgtaacgccatgctcaaccccaaggcggtctatcgcgacccgctgagcctcgaccagtacatgagcacccggatgatttccacgccgctgtgcctgttcgactgcgatgtgccggtggatggggctaccgtgcttatcgtttcacatcgtgacacggcgccggatctacgcagcaaaccggtgttcgtcgaatccatctgtggcccgttcagtggccgggatgcctgggatcagatggatgatctcacccgttacagtgccgaagcctgtggcaagcgtctgtggagccgaaccgactacaagccggccgatgtggatgtggccgagctgtatgacggcttcagcttcctcaccttgctctggctggagggattgggcttctgcgggcggggcgaggcggcggccttcgtcgaaggaggccagcgtatcgccctcgatggcgaactgcccctggcgacccacggcggtcagctatcggccggtcgcctgcatggtcttggccatgtgcacgaggcggtggtgcagttgcgtggcgagggcgaggcgaggcaggtgccagggcagccgaaactggccgtggccagtaatggcggggggcctctggctggtgcggtactgctgtcgcgtgagtga

SEQ ID NO: 350204 - DNA, 1197 bp, Pseudomonas aeruginosa
atgagaatcctgatcgccgtattgtctttttttggcctgcaactgcaatcgctcgccgccgcgcccctggtgatcggtcttagttaccccagtaccgggagctacaagtgggaggggctttcgcaaaagcgtggggcgctgatggcggtagaggagatcaaccgcgaagggggcattctggggcggccactcaagctggtcagccgcaacagtggcgccacgcccgatcgggcggtgcagaatgtcgagcgcctggcggctgatggcgccgtgatgttgatggggggtgcgtccagcgacgaagtcatcgccgccggcgagcgcgcgcgcaagctgcgcttgccgtacttcgtccccaccgcctatgccaaccgggtgaccgggcgtgccggccacgactatctgttccgtgaaggcgcgagcgcgcggatggccaataacctgctgatggagtacctggaaaccacgttgccgggaacgcgctacttcatcatcaccggcgacgatgtcatccccagtggtcgcagcagcgacctggacgtggcttcgcgcagccgagaccggtcgacccggggtcactaccgcgaggcgctcaagcaggcggagcagagcaatgccgatgtgctgattctgatgctctacggcacggacgtggtgaatgccatgcgcatggttcacgacctgcggctcaacgagcgcatgcaggtggtggtgcccaacctcagtcaggacatggtcgagcaggccggaccggcactgatgagcggggtgatcggtaccgatacttggacttggcgggtgcctgagcgtgagggtaatgatcgtggcaagcgcttcgtcgccgactacatcgggcgctaccagggttacccgtccagcgctgccgcgtcggcctacggcatcgtgcggcagtgggccgatgccgtggcgcgtgctggtacgacggagtcggcggccgtgatcgcggccttgaacgaccacacttatcgcctgctcaaggacgagcagaaatggcgtgccctggatcaccagaacctgcagagcatgtatgtggtcagggtcaaaccgcgggccgaggtcatcaaggacgagctgaaacaggattacttcgaaatcctcgactggatggagggcgaggtagctgcgcccaccgagaaggaagtgcgctgggagcgtagtcccgaagggccggaatga

SEQ ID NO: 350205 - DNA, 1653 bp, Pseudomonas aeruginosa
atgcaagagcaatatgacttcatcatcgttggtgcaggttcggccggttgtgtgctggccaaccggctgtccgccgattccggcgtttccgttctgctggtcgagagcggccccgccgacaccgacccgatgatcaggatgccgcgtggcatcggcaaactgctggtcgcgggcaacaggcatgtctgggattaccagatcgatccgggtaccggccagcccgaagaactgtggctgaaaggccgtaccctgggcggctccagttcgatcaacggcatggtctatgtgcgcggcgctccggccgactatgacgcctgggaggctgccggttgcgttggctggggctggaaggatatcggtcggcagttcgttgccctggaggatcaccagctcggtgctgcgccgtggcgtggcgtcggcggcccgctcaaggtcagcatccatcctgccggctcgccgctgtgcgaggcggtgatctccgccgcagagcagtgcggcacgccacgggtagccgacaccaacgatgtcgccacagtggagagcggcgcgttcggctaccagccgcagaacacctggcacggccagcgcttcagcgctgcgcgagcgttcctgcagcccatccgcgggcgcgccaatctcaccgtgctgactgccaccgatgtgctgaaaatcaacttcaccggcacgcgcgtcgccaatgtcagcctcagggacaagcgcggcacgcgcgagatcggtgttggccgcgaggtgatcctcagcgctggtgccatcgagtcgccaaaactgttgcaactctccggcatcggcccggcgcaactgctgcgccagcatggcatcgacgtggtcgccgaccgtgcgcaggtcggccggaacctgcgcgagcacgtctgcctgcccctgcaataccgggtgcgcagcggcagcctcaaccgggccttccgtggccttggcctgctgggttcgctgtggcagtactacacggccagcggcggcccgctcagccacgccgcgcatgaggcgggcggcttcgtcaggacacgcccggaggtcgagcgtgccgatgcgcagatcggcgtcagcctgcattccctggcggtggccaggaacaaccaggtggtgccggaaaaggagcatggcctgactttctacagctacttcacccgtcccgagagccagggcgaactgacgatccgcagcgtcgatcccgccgccgcgccggcgatcaaggccaactacctggcatcgcaggttgatcgaaccgccgccgtggccctgatccgctgggtgcgcaggctggtcgcacagccggcgctggcagcgctggtggtcgaggagcttgtgcctggcccgcagtaccgcagcgacgaggagttgctcgaggcggcactgcgcatcggccgaaccgcctaccacgtcgctggcacctgccgcatgggcggcgatgccgattcggtggtcgatcccgagctacgtgtgcgcggggtggagggcgtgcgggtggtcgatacctcgatcatgccgacgctaccctcgggcaacaccaatgcaccggccatggccatcgccttgcgcgccgcggagatcatcactgccggcctggccaagccggccgacgccactcgccaggtcttggcgcaactgcacgaataa

SEQ ID NO: 350206 - DNA, 1491 bp, Pseudomonas aeruginosa
atgagcatcgcttttaccgatatccaatccttctacatcgatggcgaatgggtgcagccgaccgagggctacgagccggtgatcaaccctgccaccgaggaagtcattggcgaggcaccgcttgccggtcgcgcggagctggacctggccctggcggcggcgcggcgggccttcgacgaaggcccatggccgcagctgccagtcgaggcgcggatcgaggcgatccgccgcctgcgcgcggccatcgtcaagcgcgaggcgctgatcaagcaactgctgaccgccgaggtcggcgcggtgcagatgctgttcaacagcgcccagtacaacggggcgctggaggccatcgattatgcgatccagctggcgcagcgcatggagccggaaggcgtggccatcgaactgaaacccaatcctttcgaccccgccgctggagaactgctgggctcgggcatcgtggtgcgcgagccgtatggcgtggtggcggggatcaccccgtacaactaccccttcctgctcaacgtggtgaaggcggtgcccgcgttgctgaccggcaacaccgtggtgctcaagccctcgcagttcactcccttctccgccctgttgctgaacgagatcatcatcgaggcggggttgccgcgtggcgtgctcagcgtgatcaatggcggccctgatctcggcgccatgctcagcgaggacgcgcgggtggacctggtgacgttcaccggctccgaccaggttggccaggccatcctgcgtcagtcggccggcacgctgaagaaagtccacctggagctgggcggcaagtccgcgctgatcgtccgccatgacgcggacatcgccaaggccgccgccaccgccgccttcagtatgtcactgcatgccgggcagggttgcgcgctgctgactcgctatatcgtgcataactcgattcgtccggctttcgtcgaggcggtgaaggctacccttggctgcctgaaaatcggcgacccggcggatccgaccgtagtggtcggcccgctgatccgagaaagcgcgcggcacaagaccgagcggttcgtgcaggccggactggattgcggggccacgctggtctacggtggccagcgtccggcacacctgacgcgcggtttcttccacgagccgacgctgttcgacaacgtcgacaatgcttcggtgatcgcccaggaggaagtcttcggcccgatcggcgtggtgatcggtttcgacagtgacgaggaggcgatccgcctggccaacgcctcgaagttcggcctcagtggcgcggtgatgtccgccgaccgcccggcggctttccgcctggcgatgaagctgcgtaccggcggggtggctatcaacggtggcaccggcgactttttcgtcaaggcaccgttcggcggctataagcactccggtatcgggcgtgagctgggcaaggattggctcaaggagttcctgctggagaaatccattacctatccgcttggatga

SEQ ID NO: 350207 - DNA, 768 bp, Pseudomonas aeruginosa
atgtccattctgttgcgtaggcgcgagggttctatcgagatactgacccttaaccgacccgagcagcgcaatgccctgacgcccgaattaatggaagagctttccagcgctttcgagcaggcccagcatgcggacgaagtacgcgtggtggtggtgacggcggcaggagacagggcattctgcgccggcatggacttgaaggcctttgccgctggtccaggcgatcgcgtgccccgttccaccgcatatttcgaggcgttcatcgagggacgctttcccaagccgatcatcgctgcgatcaatgccacggcggtggcgggggggctcgagttgatgatgggatgcgatctggcagtggcttcacgggacgcgaagtttggtcttcccgaagtgaaatatggcctgtttcccgccggctccggtgtattgcttccggcaagagttccattggcgattgccctagagctcgcgctgactggcgacagcatcgatgctgagcgcgcttaccagttgggcttggtgaaccgtgtggtggagccgaacgcggtgctggacacggcactcgagctggcacgacgcattgccgaaaacgctccgatggggctggccgtgagcaaacgcctgatgtgggcatgtgcgcaggagggcatagacgccaccagaccccaggtgaaagagtcaatcgaccaagtattcaacagcgaggatgcgttggagggggctcaggcctttgcccagaggcgcgttccgcagtggaaggggcgctaa

SEQ ID NO: 350208 - DNA, 1200 bp, Pseudomonas aeruginosa
atgtacgacttgatgagcggcattcgcgtgatcgaggtggccgagcatacctatgtgccggccgcagccatggttctggccgattggggggcagatgtgatcaaggtcgagcgtgcccaagggggcgatgcctctcgccacatgcggctgccgggggcagacggaagagtcaacccgttctttgaaactggcaaccgtggcaaacgtggaatcgccctggatctgacccaggaggtggggagggagcagctgtatcgtttgatagaggaggctgatgttttcctcaccaatatgcgcgccgatgcgcggatgaagctgggcatcgagccggcggatctgttcaagcgcaacccgaaactgatttatgcccgtggcagcggctacggtttgcacggggctctggccggcgatggcggattcgactatccctcgtcatggtgccgttccggggctggtttcaatcagaccctgcccggcgaggcgcctcccaaacaaccaggctctattggcgatctcactggcggcgtgactctggcgggggcgattgccgcagcgctgttccggcgcgagcgaacgggcaaaggcgcagtggtggacaacgccctctacatggtcggaacctacctgatgtcacagtcgctactggccaccagcatcggcgtgccgaccatcccagtcgagcggcaggcggaaagctcctttgccctggccaacaactaccgcacccgcgacggccgctggatcgccctgtgcctgctgatggagaagtggtggccggatttcgtcgcgcatatcgaaaggccagagctgctcgacgatccgcgcttcaaggatgccgccacgcgtcatgtgaattcccaggccttggtcatggagctgaatgaggtgtttgccactcgtgactacgccgactggtgcacccgtttcaagacgctggaaggggtctgggccccggttcagagtccggcggaggtgctcgccgatccccaggctctggagaacggcttcgtcagcccggtagatgtcgaccaggctgggcaatatctggtgggggtgtcgccggcacagttcgatgagaaaccgattggcaagttgaaggcggggccgcgcttcgctgaacacaccgacgaagtactgcgcgagatcggcgtgagcgatgccgaattggccgccctgcgggcaatgggggcgatccgctga

SEQ ID NO: 350209 - DNA, 663 bp, Pseudomonas aeruginosa
atgagtgttccattgaccaaccaagcacaccttgcaaccaccaaagccaaagggcgcccccgcaagcagctcgatgccgctctgttggaggcagccgccgcggagttctttgaatatggctacaccgacgcaaatctcgagcgcatcgccgctgccagcgaaaccaccaaaccggccctgtatcggcgttatccgagcaaggaagcactattcaaggccacgctcgatcacatggccaaagatttcgagctggacctgagtttcctcgatccgtcccggccagtcgcggatgccttgtatgacttggcgcgcctattccacgaaaagctgggctcctccagggtgatcgccatgactcggctcggcgcccaggaaagcgccaagttccccaagttgatcctacattttcgcgaaactgtgatgaaaggcttcatggggcctatcaccgcctattttcaatggctcaatgacagccgtgtgacccgcatgccggacaccctcgagggggcaatcatcttctcgacactgaccggacgccctctggaacgcctgctgggggtggtcgtgcccgatgaaaaggtcgagccgtacctacgcgaactggtgcgtttcttcctcgcggggtactcccctacgacaaacgaaggcacagacggccgatag

SEQ ID NO: 350210 - DNA, 828 bp, Pseudomonas aeruginosa
atgacacccgaagacattcgtctgaacgacaaggtcgccttcatcaccggtggcgccgggggcctgggcgccggcatcgccgagaacctagccaatttcggtgcccgcgtggtgatcgccgacatcgacgccgcagcgggcgaacgcctggtcgcagccattcgcgagaaaggcggtgacgccctgttcgtgcctaccgacgtcaaccacagcgagcagatcatcgccgcggtggcacgtgccgccgagcatttcggccgtctcgacatcctcgtcaacaatgccggcggggtgcgccgcacccccttcctggagcagaccgagaaaagctggcgcaagcacatcgacttcaacctgatcagcacactcaccgccacccaggccgccgccaaggtcatgatcgagggcgggcgcggcggcaccatcgtcaatatcgccagcagcgagggcctgcgcgccgcgccgggattcgccgtatacgcggcgtgcaaggccgggatgatcagtttcacccgctcgatggccctggagttggccgaacacgatatacgtgtgcacgcgctggccccggatatgatcctcactcccggcctcaagccgtatttcgacgcggtgggagaagccggcgccgctgcacgcaaccgctacatccccatgggccgactgggctcgaccgacgaactggccggcgtggtgatattcttggtctccagcctggccagctacgtcaccggtctgaccctgccggtggacggtggcgccatcgcctccagcggctggacccgctcgccgcacaccggcgcctgggatctgtaccatgcgcagtga

SEQ ID NO: 350211 - DNA, 861 bp, Pseudomonas aeruginosa
atggccatcgactacgagaagctcctcgagctgcagatccccgacacccagcagagctacacgcacaaggacaccatcctctatgccctgagcctgggctatgccagcgacccgctcgaccgccggcaattgcccctggtatacgaagcggatctgcaggccgtgccgaccatgggcgtggtgctcgcccaccccggctactggccacgaaccctgaacaccggcctggactgggtgcgtatcgtgcacgccgaacaggggctgaccctgcacaaaccgctgccggccgaagcacgggtggtcggcaagtcgcgggtggtggacatcatcgacaaaggcgccgacaagggcgcactgattacctatgagcggcgcattctcgaacgcgacagcggcgaccccttgtgcaccatcacccagaccatgctggcccggggcgatggcggtttcggtggcccgcaacgcagcgtcgcaccgcccccggcggtaccggagcgggccgccgaccactgcgtggatctgccgaccctgccgaacatggccctgctctatcgcctgaatggcgactggaaccccctgcatgccgaccaggacgtggcgcacaaggccggtttcggtcgcccgattctgcatggcctggccacctggggaatcgccggccgggccatcatgcaggcggtgtgcgatttcgacggcagccgcatcgcctcgatattcggccgattcaccgcgcccgcctatccgggcgagaccttccgcacggaaatctgggtcgacggccctctagtctcgttccgcgtgcgcgccctggagcgcgacgtgatcgtcatcaacaacggccgcgtcgagctgcgcgactga

SEQ ID NO: 350212 - DNA, 897 bp, Pseudomonas aeruginosa
atgagcgagttgccaagtagccccccaccccttgctgcagcccatcccgagtggctcgataaagccctggcgcagccaggtcgttcgcattatgtcgaggccaacggtgcgcgcctgcatttcctgtcctggggcttcgaggccaggcataagcccaccctgctgttcgtccatggttttcgcggtcatgcccactggtgggacttcatcgccccctggttcaccgagaattaccgggtggtggccatggatctatccggtatgggtgacagctcccaccgtgcgcaatacgacgccagcaccccgagcggtgacatcgcagcaatcaccgagcacatcagccagtccccggtgatcgccatcggtcacagctatggcggctcgcgcctgttgcgcgcctgcagcgagaggcccgagctgttccagcgcctggtgatagtcgacagctatgtcgtgttcgagggtgaaagcctgccatccgaacccatcaaggtacgtggcaaccaccagtatccggacctcgccagcggcgcggcacgctttcgcctgattcccgcccaggcggatgccgtgccaggactggtggagcatgtggcccggcactccttgcgacgcgacgcaggtggctggtgctggaaattcgacaccagcctgcccccgggcggtgcccgtgaggccgatggcggacgaatgctcgcgcgggtgacccgcccggtcgactacctctatggcgagctcagcgtcgtggtcaatcgccagcgcgccgagcgaatcgtccaggccctgccccaggcccgcggtccaatagcgatccccactggccatcatcatctgatgttcgaccagcccctcgccctgatcagtactctgcgtgcgctcctcgccacgcagccttga

SEQ ID NO: 350213 - DNA, 1152 bp, Pseudomonas aeruginosa
atggaacagtttcctcgtggtcgagcggccatagttggtgcggccacctatggcatgggcgagtctcccggcatgcgtccgctggatctggcggcacaggctgcggtgctggcgctgcaggatgccggcctcggcctggccgctgtcgatgcgctcttcgtctgcactccggacgatgcgttgtccgggctgagcgcggcggaatatctgggtatcaccccgcgcttcaccgagaacaatcgcacgggaggttcggccttccactcgcatgtgataaccgccagcctgatgctggatgcggggtattgcgataccgcactgatcatctacggcagtaatcagcgcactgcgtccggtggtctcgtgtcgatgcgcctgccgtcaccctacgagaagccctataagccgctgacgcccttgtcgtcatatgccttggcggcgtcccggcatatgcatgagtacggcaccacgcgcgagcacctggcggaagtggcggtagcggcgcgcagttgggcccggctgaatcccgaagccttcgcccgcgacgagttgaccatcgaggactgcctgaaggcgcgcatggtttccgatccgctcagcgttcgtgactgctgcctggtcaccgatggcgccgccgccatcgtgctgacccgcgccgaccgtgcccgtgacctccatgcgcaacccatccacgtcctgggcgccgccgccgcgacctggtattcgggggtggatcagtctgccgacctcaccgtcaccgccgcccgcgagtcgggccagcgggcctacgccattgccggtgtcggtccgcaggatatcgatgtggtgcagctctacgatgccttcaccatcaataccatcctgttcctcgaggatctcggcttttgtcccaagggcgagggtgggcgtttcgtttccggcggcaacataggccccggaggttcgctgccggtcaataccaatggcggtggcctgtcctgttgccatccaggtatgtacggcctgttcaccctggtcgagtcttgcctgcaactgcgcggacaggctggcgagcgccaggttcccggggcacgcctggccctggcgcatgccaacggcggcaccctgtccagccaggcgaccatgattctggggacggcggacacgctgtag

SEQ ID NO: 350214 - DNA, 819 bp, Pseudomonas aeruginosa
atgagcaccctttcccgcctggccgacatgcgccacgtacgaaccgagatccgcgaccgcgtcgccaccgtgaccctggatcgtgcaccggtcaatgcgctggattcggtggccattcgtgaactgacggctaccttcaatatcctggcgcgcaccaccgaagccagcgtcatcgtgttcaccgccgcaggggaaaagctgttctgcggcggtatcgatctgaacgattcggcacgtcgtcatgcgcggcaactggtcgaggacgacaccaccatcgacttgctggacccgggcgcggtggtacgcgagatgttccatgccatctacgattgcccgctgccggtgatcgccgcaatcaatggcaagtgcatcggtgtgggcgtgctgatggtcgccagttgcgacatgcttctggcctcggagaatgccagcttctcggtaccggagatcaaggttggcgtgctgggcggcgcccgccacctgcagcgcctggtgggcccgttcaagacccgccggatgttcttcaccggcgagacggtgccggcccaggagttctaccgcctgggcgcggtggaagaggtgcttgcccccgacgagctgctcggtgcggcccagtcattggcggcgcagatcgcccgcaacagcccgatcggcctgcgcctgggcaaggagtcgctgagccgggtcgaggaactgtcgttgcgcgacggctaccgtatcgagcaggactacaccgggcgagtaactcgctataacgactccgccgaggcgcgcaaggcgttcatggaaaagcgcgatcccgcgtggtcctggtcctga

SEQ ID NO: 350215 - DNA, 1134 bp, Pseudomonas aeruginosa
atgaaacaatttcaggttgagtggtcgcagggcgaaatcgatcgtgtcttgcacaaggtggccgattgtcgcctacctccggcaccagtggacagcggctgggcgtttggttgcgatgccgagttcctcgcccaggtgcagaaatactgggtggagagcttcgactggcagtcctgtatggcgcgtctgaaccgcttcccccagtatcaagtggagatcgacggccaactggtgcatttcctgcacgtcaagggtgaggcgcaagggcgccggccgctgctgctgacccatggctggccaggatcgcatttcgagttctggcaagccatcgagccgctggcctatccgtcgcgccacggcggcaaggccgaggatgccttcgacctggtaatacccagcctgccgggtttcggcttcagtggtaagcccgccggcgtgactactcaaaggcaaactgcggtcatctggaacaagctgatgaccgaggtgctcggctacgcccgctatcgcgcccagggcggcgactggggcgccatcgtcacctcctggctggggctggatcatggcgcttcggtggaggccatccacctcaacatgctcggtttccgctcgctgacgccgccgcagaacgatgcggagaaggcctggcaggctagtgccgatgcggcgcagcgcctctacagtggttacgcggcggtacagatgttcaagccgcaatccatcgcctgggccgcggcagacaatccgctggggcaggccgcgtggattctcgaacgcttccatgactgggccgacctgcgtcagcgccccttcgagacggtattcagcctcgagagcctgctgaccaacatcagcctctatgtcatgaccggcagttttactagcgccgcctggttctatccgggcgtggtcagggacggcttcaccattctgccggcgggtactcgctgcgagacgccgacccacttcgctgcctgcagtggcgatgcgctggctccggtaccgccacgcagccgtgccgagctggtctacaacctgtcgggctggagtgacctcgtcgagggggggcatttcgctgcaatggaagtaccgggtctgttcgtcgaagacctgcgcagctggggcagggcctga

SEQ ID NO: 350216 - DNA, 807 bp, Pseudomonas aeruginosa
atgaaagtccgccaacctgtctttgatttttccagcattcgccctcattgggcgcctgtccgcgagttcgcccagagctataacgccttttctacggtgccggcccatatcgaacccttcttggtcaaggtgatgatgcgggtcaaggatgctctgggcgacaagcatcaggcgctgcgcgatagcattgagatcttcaacaagcaggaagtgcagcactgcaagcagcacgttgctttcaacaagatgctctacaagtccggctatgccggcatgcaggaacttgagaaaccctacaaggacgactacacgcgttttctggcgaccaaatcgctgcgcttcaacgttgcctactgcgaaggtttcgaggcgatgggctcggcggccggccaagtgttcttcgaggagctggaggaatatctggagggtgccgaccaggctgcggtggatctgtggaagtggcacctggcggaagagttcgagcaccgcgaggtctgcttccaggcctataaggcgctgtacggcagtggcccatttgcctatctctatcgtctgtggggattcgtctgcgcggtcaagcatattggcagccataccgcgaaggtttccgcgtatctcattggtgtcgatcgtgacgggatgacgccggaagagcgggaccgctccatcgagcggcagaagattctcaaggcgaagatttccaaggccagccgcaagcggctgctcaaagtgctatcgcctttctacaaccccggaaaaatggtgccttcgcctggcatggcggcgctactggagcgcttcggctga

SEQ ID NO: 350217 - DNA, 1080 bp, Pseudomonas aeruginosa
atgaagattttcgcggcaacttcccgttatgttcagggcgctggtgccttggacgccctgggccagcattgccggcctctgggcagtcatgcgttcgtagtgacggatacggacatggccaggttactcggcgagcgggtgacagcaagtttccaggcagccggcctggcctccgaactgcgggtatttcccggagaaatcacccacgccgcgattgccgaactggcggagcaggccctggcgttcggggcgcagatgatcgttggcctgggaggcggcaaggcgctggacaccgccaagggtgttgcgctcaagcttggtgcacgtagcgtcagcgtgccgaccattgcctccaacgacgggcccgccagcgcagccatcgccgtctacgacgagaaccacatcatgcaggacatcctgcaattgccacgcaacccggaactggtactcgtggacagtcagatcatcgccaattcccccgtgcgcttcctgcgcgccggtatcggtgatgccatctcgaagaagttcgaggccgaggcctgtgcagcggcgggtgctaccactctgctcggtacaccagcgtcactgaccggactgatggcggccgaagcctgctaccaagtcattcgccagcacgctgtggccgccatgtgcgccgctcaggaaaagcgggtcgacgatgacctcgaagccctgatcgaagccacggtactgctcagtactctgagttttgagaacggtggcctttccctggcccacgcgctggcacgcggtttctcctacctggaacgggccaagggcaccctgcatggagaccatgtcgcctacggcctgctggtgcagcttgtcatggagcgtcgcgatatcgcgttcatccaggacatctgcgaattctaccgtgggttgagcctgcctacccggctggcagacttcggtctggagcgaccaactccggtggagattcgcgaactggcggagaaatccatggtcagccccagcgccgcacgcttcgctccggcggtagacgccgatcaactagaagtcgccattcaacgggtcgagactctgaccgcccactag

SEQ ID NO: 350218 - DNA, 795 bp, Pseudomonas aeruginosa
atgaatttcgctgactacaagacgatgaccttcgaacgccgtggccgcgttcttaccgtgaccttcaaccagcccgagaagctgaatagtttcgccggggagtcgcataccgagctgtcctggctgttctacgatctggtggaagacaaggagagcgacatcgtcgtcctcactggtgctggtcgggccttcagcgccggtggcgacatcgagtacatgcagtggctgcatgacaatccggccgagttctaccgttgcgtgcgtgaagccaagcgcatcgtcaatggcatgcttgagtgcgacaagccgatcatctgcaaggtcaacggcgatgccatcggcctgggttcgaccgttgcggtgttctccgacatcatcttcgccgccgacaccgcccgtttcggcgatccgcacaacaacgtggcgctgatcagcggcgacggtggccagatcatgtggccgtacctgatgggctatgcccgcgccaagcattacctgtttaccggcgagaagctgagcgctgccgaggccgagcgttttggtctgattaacaaggccatgccggcggcagaactgaacgactacgtcgatgcctacgccgacaagctggccgccatgccggtgcagtcgctgcgctggagcaagaccaccatcaacgtgccgctgcggcagatggctgccagcatgatggacgtgggtatggcctacgagaacatctcctcgcagcatccggaccacgtcgaggcgattgccgccttccgcgagaagcgcaaacccgtgttcaacaagaagtaa

SEQ ID NO: 350219 - DNA, 897 bp, Pseudomonas aeruginosa
atgagcattgcgcaggcgttcgagcagacggaagtacccgtctggctcacctgggcaatgcagcgtccgggtcgttcatgctttcttgaggtggacggccggcgcctgcattacctgagctggggcgaagacaaaccgcagcggccggcgttgctgctggtacatggcatgcgcgcccatgctcactggtgggacgccatcgccccctatttcagcgaagattaccgcgtgatcgccctggatctgtccggcatgggcgacagcgatcaccggcagagctacccgaaccaattcggcgccctggatatcatcgacctgatcgaaggtgtcgacctcggcccggtgatcggagtgggtcacagctacggtggttcaaggttgctgcgcgcctgcgccgaccgtcccgatctgttcaggcgtctgctggtgttggattcgttcatcgtgctgcccggtgccgagatccccatcgataccgccaacaccgccagcaaacgctactacccggatctacccagcgccctgcggcgctatcggttgatgccggagcaaccgaacccggtgctgccgatactggcggccattgcccgtcactcattgcgtgaggaggatcagggctggtgctggaaattcgacctcaacctgccgcttggcgtggcccatgaagaagttggcgtcagcctgctacctcgtgtgccgcgtccggtggatgtgatctatggcgagtgcagcccggtggtcagccgtgatgatgcgcaacaggcggtgaacctgctgcccctggggcgtggtccgttcggaatgcccggaacctaccaccacatgatgatcgaccagcccctcgcggtgatcgcgatcctgcgcgggctgctggcttctggagagaaacatgagtga

SEQ ID NO: 350220 - DNA, 780 bp, Pseudomonas aeruginosa
atgagtgaactggtcctgcaggagaggcacggcgctgtcgccgtcgtcaccctgaacaacgaaaagacccgcaatgccttgtcacgggacatgctgttcgccctggccgaatgcctcgagggcctgaacgacgatgccgacgtgcgggccatcgtgctcaagggggccaatgggcatttctgctcgggcggcgatgtatccggtatgtctgccgagcgaccactgccggtagggcgcgggcgcatggtactcggccatcgggtaatccgggcggtactggaaggcaccaaaccggtggtggcgatggtggaaggctatgccgccggggccggcttctccctggcgatggcggccgacttcgtagtggctgcgcccactgccaagttcgtttcgtcctttgccaaggtgggcctgatcccggatctcggtctgctctggaccttgccgcagcgcatcggcctggcccaggccaagcgcatcttctacagtgcgcgggtcgtcgcctcgggcgaagcggcacaattgggcatcgtcgacgaactgctggcggagggtgccgacttgcaggctcgcagcctggaaatcgccgccgagttcaccgccaatgcgccattgtcggtcgctctggtgcgctcggctctggcccgcggtgtgacctgcctcggcgacgccctggactacgagatggacaaccaggctgcactgtacctgaccaaggatcatcgcgaggcggtggatgccttcctcaacaagcgtgcgcccggcttcgtcgggctgtag

SEQ ID NO: 350221 - DNA, 1065 bp, Pseudomonas aeruginosa
atgactttgcgcgttatcgtttgctacaccggtggcgttggccgggaactgatccgccagctgctacgcaatccggctttcgagctggtcggggtgctggtgcatggcgcggacaaggacgggcaagacgttggcgaaattgtcgggggcgctccggttggcttgatggccacgcgcgacatcgccgcgctcacggcgttgcgcgctgacgtcatgtcctggcatgggctgaagtgggagccggaggtggtcgcccactttcttcgtggcggaaccagcgtctattccgggatcggcggctggtacctgccgagccagacggaataccagatgctgcaggaggccgccgggcaaggtggcgctgcgctggttgccggcggcaacattcccggcctgatcagcgatgtgctgccgctgttctgctcgggctattccagcgatatccgcatggtcagggcctggcagcgcaactacattccccactatccgtcggccgtgcagatgggccagtacctgggcatcggtcagcccttgcccgatgcgcctttcgaccctgcggcggcaccggcggagatcgaccggttgtggatgtggggcatcgcccagtccgccgccctggtggcccagggactgggggtggtgatggatgaactgcgcctgaccaacaaggaatttggcccatcgaaagccgatatgatcctgcagcccagcgggctggccgtggccaagggcacggctgcgggggtgcgctggaccttcaccgccttcacccagggcacgcccttctacgagctggtcaatgagcagaccacgcgcctggacatcggcccgggctggcgcgatacgcagcaagcgctgaattggcgggtggtcatcgaaggttcgccaagcatccagtgcgagctcgggctactggccgaggcggatgcgccagaccacgtcgccgccctgaatgccgctcgcgcgctgaacttcctgccgcgcatcgctgcggcggctcccggctggcgcagcgtgctggatgtaccggccccggtcggcagcctgcgtcgagcgggggcctga

SEQ ID NO: 350222 - DNA, 966 bp, Pseudomonas aeruginosa
atgccaatcgatacgaaagaattacgcaacgccctgggtaagttcgccaccggcgtcaccatcgtcaccacccgagatgcggcaggcacggacactggcgtaaccgccaacagtttcaactcggtatcgctcgatccgccgctgatcctgtggagcctggcgaagagttccgcaagcctgacggccttcagcgaggcggagcactttgccgtgcacatcctggcagcggatcaggaagccctctccaaccgtttcgctcagcgcggcgccgacaagttcgccgaactcaccatcgcccgtggccacgacgggataccgctgctccacgactgcgccgcccgcttgcagtgccgtgtcgcccaccgctacgaaggcggcgaccacatcatcctgattggccaggtgctcgacgtcgagcactgcgagcgcaagccgctggcctacctggccgggcgctatgcctataccctgcacaagccggcgccagcctccggtgcacgtctcgcggatggcaccgccagcgggttcgatcgcaactggctgaactacctggcctaccgcacgacacgccagttcatccagcgccatcgaccgatcctgaaggtgcatggcctggacgaggcagacgcctatgtactgaacatcctgctggcccagggtcagttgccgccggaacagattcgtaccctcatcgacgatccctgcctgaatattcccacggtgctgaaagagctatcccggcgcggcctgatcctgctgcgcgaaggcgatggcgtacggctttcagacgcggggcgcagcgtggctatcgacctgatcgctgccaccaaggcgctggaggacgaggcggaacgtggcatggagcccagcgaaatcctgctgctcaaggagttgctgtggaaggtgatccgcaacacccacgcctccagcgagccgctccttgcccggagtccatcaccaacatag

SEQ ID NO: 350223 - DNA, 375 bp, Pseudomonas aeruginosa
atgagcgacaacagcaacaaggaactcgtcctcaagcacctgcaaggcttcgccgacatcgacagctacctgctgaccctgggcgaaaccgtcaccgaagacctggaatgggccaacagcggcttcccgacccaccatggcctggagcaggcccacgaagccctgcaccgcctgaacgaaaaactgcgcggcatccgcatcgagtgcctgagcatcgccgaggacggcaaccaggtgctgaccgagcgcatcgactacatggtcgacaaagagggcaatacgctgctcaccctgccctgcatgggcatcttcaccatcgagaatggccggatcaaaagctggcgggactatttcgacggttcggcgttcaagtga

SEQ ID NO: 350224 - DNA, 720 bp, Pseudomonas aeruginosa
atgagcatcgccatcaccaccgacggcaagagcggagacttccgctcccgcgtggcggccgaacgccgcgagcggatgcaggcccgcctgctcgacgccgtgctggatctctaccagcctggacatggtggtacgcagccgctgatcgacgatgtgatccgcgccgccggcgtgtcgcgtggcagtttctacaagtatttcgaatcggtggaacacgccgtcaccgccctcggcgaacgcttcaccgcggagaacatgcgggcgttcgagctgcttttcggccaggcacaagatccggcgctcaaggccatcggtggtaccgcgatgaccatcagccgcgcctggcacgacccccgctggggcggctttaccacccacgtcgatcatgtcgagtacttcacccgcgccagcagcaccaaccaggtcgtgcgcgaatgcctggccgaggcacgccgccaggggcagatgcacttcgcttcgctcgatgtcgccttcgatctcatcgtcggtgccacggttcaggcccgacgacgcctggtcaacggcgtcgaagcgccccatgcctatgtcgacgaaatgctgcaacggttgttcctcgggctgggcatgcagcccgaggcgcttgccgcaatcacccaggcggcctggcggcgcattgccgagtacgccccgcggctgggctggtggcgcgccgactgcgactggcaccagcaaccatga

SEQ ID NO: 350225 - DNA, 1245 bp, Pseudomonas aeruginosa
atgcccgacgccaccacgatacgcccgaacgtcaccgaagccttcgacccgcaagccagggcgcgggccttgcgccccctgctggctcgccacgcgcaacaatgcgagcaggatggccggataaccgacgaagtattcgccgcgctgcgggaagcggaactgttcgccatcaccgcgccgctgcgagcaggtggtccgggggcgaaactgatcacccacatagaaacggtggcggaactggccaagggctgcgtcggtaccgcctgggcctattccctgctgtcgagcgtgaccgccagcgtcaaggctatgccaccaccgattcgggaacaggtattgcgcaatggcgacgagctgttctgcagcgtcgcggcacagaccggctttgccgatcccgccggcgatggccactaccggatcagtggcaagtggggcttcgcctcgggctgccgacacgccaactgggccttgaatggcattgccatccgtgacgcggcggggcaggtggtggacggcggtttcgccctgatcgacctcgaacagccgcaggtcgagatactcgacaactggcaggtcgccggtatgtccggatcgggcagcaacatgatcgcggtggataacctggtggtgccggaaaccctgctgctgcgcgcgtcccggcgcccgcccgccgaggcgctgctggcgatgcccggcctggagccacgtgaccgctggccgacggagccgctgttccccctgatcgtgctgccgccgatgctgggagccgcaagcgccatgctggagagcgtcgtacagacgatggacaagcgtcctgtggtctggtggagctacccgagccagaaggactcgcagcgcctggtcggcgccgccggccaggcggccctggagatcgactcggcctggctgcacgtgcgccgcgccgccgcgatgctcgatgaaaccgcccagcaaagactgctcacaggattcgagaaggcgcgcatccaggccgattgcggttatgccatgggcctgctgcgcgacgcgggcaatcgtctgatggacatcgccggtcccggcgccttcgccctgagtagcccgctgcagcggttctggcgcgacctcaacgtaggcacccggcacaacgcgatgaaccaggggctgtcgatcgagctgtatggccgggctctgctgggcctggactccagcctgaacctgctcgccgatatcggtccggtgccggactgggcggcgccgcgctga

SEQ ID NO: 350226 - DNA, 1014 bp, Pseudomonas aeruginosa
atgctcaatctatcgatgaaacccaccggctggttccagatcggctggagcggtgaaatacctccgggcggcgtgaagccgatgaagtatttcggtcatgacatggttgcctttcgcaccgacgagggcgagctgtcggtgctcgatgcccactgcccacatatgggagcccaccttggctacggcggcaaggtcaacggcaagtgcatcgcctgcccctaccacggctgggaatggggcaccgaggggcagaacaccctgatccccggggaggaacgcaagatcccgaggaagatgcgcaagttccatgtgctcgagcgccacggcatgatctttctctggcacgacccgtcctgcggcgctccgcgcgagggctgggagttgccggatctgttcgaccacccggagctgccggccgaccccagggatttctatccctgctacccggacaacatcgtgttcaagccgaatgagcgcatccacccgcagttgatcaccgagaacgccgccgacaccgcgcatttccgctttacccaccgcgcgccagaagacccggtgctgctcgagttcgataccagcaccacggtatggaaatcgcagatgggtttcctcagcaaacgcaccagggaaatcgccttgcgcctgcatgcgcgcaatgccggggtcggcctgtccttcaccatcttcgagcatggcacgctgggccgtcgcctggtgctgtcctgcaccccggtggacgacgaaacctccgacctgcgggtcagctacttcttcccccgcgaccggctatcgccggacgtcatgccccagcacctgcgcgaactgtcggcgcagaccgaggaactgttcgaggaagacgcgcgcatgtggcgccaccagaaatttcgccagcaaccgatcttcgccaggcgcgatgtcgccggctatcgcgccctgcgtgaatggtgcgcgcaattctacgaggccgaaggctttccacgcggtccgctgcgggtcatggaagacgatctgtaa

SEQ ID NO: 350227 - DNA, 2208 bp, Pseudomonas aeruginosa
atggatctagccttttccgcagaacagcaactgctgcgcgagacctgtgcccgcctgttcgccagcgagtccaaccccgcgcgcatccgcgccgccgaggcgagcggcttcgatgccgaactctggcagcacgccgtcgaactgggcatcaacctgctgcgcacacctgccgcgcagggcggcagcgacatgggcctgctcgaggcggcgctggtggccgaagaagccggtcgccacctggcgtcgatccccctggccgaaagcctgccggcggcccgcctgctggcccggctggacagccctgaagccagcgtcttgctggaaaaggttcagcaaggcgccgtgatcagcctgctgccctgcgccctggagggtgatactccacgcctgctgccgggtgcccacagtgccgaagtggtgctggccctggagggtaaacaggtgctcgccctcagtggttcggcgctgcgcaaccggcaagcgaacctgggtagcgacggcagcgtcctgctcgatggtgcgcaaatggccagcctcgaacgcacccacctggcctctggagccgccgcccacggcgccttcctcgccgcggtcgaggaatggaagctgctcaagaccgccatgttggtcggcctggcgcaccaggccatccagctggccgccgactactctcgcgaacgtcagcagttcggcaaacccattggcagcttccagggcatcgcccacccgctggccgacgccctgaccgaggtcgatggcgcgcaactgctgctctggcacgccattgcgtccatcgcccacggtgagccggacgccgctgcccaagtgtcaatggcctggtggtgggccggacagtccgccacccgtgccgtagcccgcgccctgcacagcttcggcggctacggtgtatcgctggaatacgacatccagctctactaccgccgcgctcgggcttggtcgctgcaggccggcgatcccgtgcgggaactggacaccatcgctgaccggctgtggagcccggccgccgaccagcccctaccgcaagccggagaaaccactctggaattcggctatggccagcaggccgccgagttcgccgaacaggcccgaacctttttccgcgccaacctgaccgacgaactcaaggcccatgcgcaccactcggtggatggctaccacgccgcattcaaccggcaactggccgatgccggactgctgttcccccactggccgacgcaatggggcggcagcggcaagagccccttcgacatgcacgcgttgcaggaagtattcgaggaattcggctggcagcgcatcaccgcaccgatcaccaaccaggtcgcgcagatcgtcatgcgcttcgccagcgaggaaaccaaggccgaggccctgccccgcttcgcccgtggcgaggcattggcctgcctgggcttcagcgagccgtcctgcggctccgacgtgttcgccgccaagacccgcgccacgcagaccgccgacggcgactggctgatcgaggggcagaagatcttcactaccgccgccaacctggccgactactgcttcctgctcgtgcgcaccgacccgcaggcacccaagcacgccggcctgagcctgtttctggtgccgatggacctgccgggcatcgaggtgcacccggtgcataccctgcaggacgaacgcaccaatatcacttacttcagcaatgtgcgagtccccgaccgctaccgcatcggcgccatcaacgccggcacctcggtcatggccgccaccctggagctggagcacagcggcgaccagtaccgcatcagtttcagcaacatgttcaggcacgcgctggaatgggcccgcgccagcggtcgcctgggcgaaacggacgtgcgccgccgcctggcgcgggtggcggtgcacaccaccatcgcccgtgacctgtgctaccgcgccacctggtcggtgctggcgcaggcccccgaccgggccgcctatggccccatgtccaagctgttctccaccgagcagtatcagcgcgacgccatcgacctgatggaactgtgcgcacccttctcgctgctgcagagcaaccatggcctgggccatgtggaactgggctaccgccagtccatcggcatgacgatctatggcggtaccagtgaaatccaccgcagcctgatcgccgagcaggggctgggcatgccgcgctcgcgtacctga

SEQ ID NO: 350228 - DNA, 1560 bp, Pseudomonas aeruginosa
atgcgtgactacctgcccctgtcgttcgccgacgacctcgaccagcgcgcgcgcttctacgccaacgagccggcctatatccaggacgagcgccgcatcagccacagccagttacgggccagcgcgctgcagctcggctcggccctgtacaaggccggcatccgccatcaggaccgggtcggcatcctgtcgatgaactccatcgagttcggcgaaatcatggccgccacccaatgggccggctttatcctggcgccggtgaacttccgcctggcgccggccgagatcgccagcatcatcaacgacagcaaacccaggctgttcttcttcgagcagcagtaccaggcggtgatcgagcagctccgcgagcagttgccgtcgatcgaaacctacgtctgcatcgacggcgaaaccgactgggccatcagcctggccgccttcgccgccagcggtgacgagaccggcccgccgatacgcgccagcgaagaagatatctgctgcctgatctataccagcggcaccaccggaaaacccaagggcgtaatctggggccatcgcgagtaccgccagttgatccaggtcgatacctggctgtgcgacatgcagcagccggacgtgatcctgatcgtcatgccgatgttccacctcggcggcatggtcatcagtctgtcccagcatgtgcgtggcggcgcggcctacctgcagcgtcagttcgagccgctagatgtgctcaaggccatcgagaaggaaaagctcagcatcctgctgctcgccccgaccatggtgcaaatggtcctcgaccatccctatgtggccgaggccgacctgtccagtgtgcgcaccatcatctattccgccgcgccgatgcccgtgccggtgctcaagcgcgccatcgaaatcttcgacggctgcggcttcgtcaacctgttcggccagagcgaggtgtgcatgttctgcctgtccaccgaacatcatcgtccagatggcgacgaacgtgaccgcaagcgcctgggctcggtgggcaagccctaccccaacatgctggcgcggatcctcgacgaagacggcaaggaatgcgcgaatggcgaacccggcgagatcgtggtcaagagcagcgcgatgttccggggctactggaacaaccacccgaccaccctggaaaccctgcgcgacggctggtgccacaccggcgacatgggcaagttcgacgaggacggcttcctgtatctggtcgaccgcaagaaggacatgatcatcaccggtggcgagaacgtctactcccgcgaggtggaggaagccctgctgcaacatccggcggtttccgaatgcgcggtgatcggtgtccccgaccccaagtggggcgagaacgtctgtgcggtggtggtgttcaaggccgggcagcacgccagcgaaaatgcactgatcgaacactgccgcaacctgatcgccagctacaagaagcccaagcaggtgatcgccgtcgaggcgctgcccaagctggtcaccggcaagatcaacaagatcgagctacgcaacctctacgccaggccggcgcactga

SEQ ID NO: 350229 - DNA, 1167 bp, Pseudomonas aeruginosa
atgaacttcgaattgactgatgaacagaaactgctcagcgacagcgctgagcgctacatccgcgagaaatattccttcgaggaacgccggcacctgttcaagaaccccgagggtttttcccgccagcactggaacgcctttgccgaaatgggctggctcgcgctggacattcccgaggactgcggcggcctgggcggcagcaaccatgacctggcgctgctgatggaacaactgggcggcggcctggtggccgagccgctggtggataccgcggtgctctgcgcccggctgctgcgggcctgcgacaacgccgagctgcgcgaacgcctgctcggccaggtggcggctggcgaagtgctgctggcgctggcgcatcaggaacagcagatgcgccacgaatacgacgtcgaggtgaacaccaaggcccgccctgtggccaacggctggagcctgtccggcgtcaagcaccgggtgttccatggcgccagcgccgaccattggctggtcagcgccgagatcgaaggcaccggtgacttcgccctgttcctggtagaccgccaccccgtgggagcggccctggacagctatgagctgatcgacggcacccgcgccgccgacatcaccctcgagcatgtcgtggtccccgaggatgccctgctgattcgcggcgatgcggctctggcggccctggatgaagccctcgaccacgccgtgctggccatgagtgcggcgtgcctgggctcgatggagttcgtcatggcgctgaccgcggactacctgaagacgcgcgtgcaatacggcaagccgctggcccagttccaggccctgcaacaccgcatggcggagatgttcgtcgaaacggatcaggcgcgttccatgctctacagcgccctccgcgccgtggagtccggtgatcccgtgcagcgccgcctggcgatctccggagccaaggtgatcatcgcccgcgcccagtacttcgtcagcggccagggtatccagttgcatggcggtatcggcaccaccgacgagtacgccgtgggccaccattacaaagctgctgtggtctacgacaagcgcttcggcgacagtgagttccacctggaacgtgccaacaccgacctcagggccagcgacggccagccgctgcgaggtgccctctatgcgtga

SEQ ID NO: 350230 - DNA, 1203 bp, Pseudomonas aeruginosa
atgcaactgcatctcaccccggaagacgaacgtttccgtgacgaagttcgcgccttcctcaaggccaacctgaccagcgacgtgattcgtcgcagccacaccggcatgcatccgccaaatgaagacgaccggcgctggtggaaccgggtgctgcacgacaagggctgggccgccccgcactggccgcaagaatatggcggcaccggctggtcgcatatccagacccatatcttcgagtacgaatcctggctggccggcgcgcccgagttgcgttggcagggcctacgcctgatcggcccggtgctctacaccttcggcagcccggaacagaaggcccgttacctgccggccatcctcaagggcgaggaaatgtgggcgcagggtttctccgagcccggcgccggctccgacctggcttcgctgaagaccagcgcggtggtggacggcgaccattacgtaatcaacggccagaagctgtggaccaccgagggccagtactgcgaacagggctttttcctggtgcgtaccgagaacagcgatcgcccgcagaaaggcatctcgctgatcatcatcgacatgcggacgcccggtgtcaccgtgcgccagatccccatgatcaatggcgagggttccacctgcgaggtgttcctcgacaacgtgcgggtgccgcgcagcaacctgatcggcgagccgggcagtgcctggacccaggccaagttcctgctgtccaacgaacgcacgtccagtgccgatctgtacaaggcgcgcggtgacctggagcgcattcgccagatcgccagccacgagctgaagaacggcctgccgctgatcgaggacgagggcttcgcccgccgcttcgccatgttgcgcctggaagtggaagccctggaatggtcggtgctgcgcgtgatgcacgaggcgccgagccgccacccgatcgcagcctgcgcttcggtgctcaaggtgtgcggatcgggcctgcagcagaagctcaccgagctgatggtcgaggccctgggtcagcgcagcctgcgccagtaccgccgcgacgaggcctacgccgagccgagcggcaacccgttgtggccggcctatacggccggcgtcaccaccgacctcatgtacctgcgcgcctgcaccatctatggcggcgccatggaagtccagaaaaacatcatcgccaaactggcgttcggattctga

SEQ ID NO: 350231 - DNA, 2013 bp, Pseudomonas aeruginosa
atgcccgacgctccatacccccatctgttccaggaaattctcctgcgcaacctgagaatccccaaccgcacggtgatggctccgatgtccaccaacctgggcagtcaggaaggtttcgtgactcccgaacaggtcgcgttctaccgcgagcgcgcgagcggcggcacggggatgatcatcgtggagttctgctgtgtagagggcgccaccgggcgttccgagcatcggcagctcaccctggaatctcccgcccaggtggctggacaccagcgcctggtggaagccatcacctcggccggttccgtggcctgcctgcaactgcagcacggtggccgtggcgccaagcgcgacctgctcgccgatggcatgcccatcgcccccagcgacgtcgcgacacgctccgggcgcctgatggcgcgcgggatggatgacgccgaggtggagcgcctggtcgaggcgttcggtcgcgccgccgaactgggggtacaggccggctaccaggccgtggaactgcatggcgcccatggttacctgctcacgtccttcctctcgccctactccaaccagcgcaccgatcgctggggcggggacgaggagcgccggctcgagttcccccgccgggtgatccagcgagtacgccagagcatcggcgaccgcccgctgatcttccgcctgtctgccgacgagttcactccggacgggctgagcatcgaggacatggaacgcatcgcacccaagctggccgccgccggggtggatgccctgcacgtttccatcggtctgggctggaccagcttcgacaaggtgatcgaacccatgtcgactcccgaaggttggcgcctgccctactcccggcgcatccgcgcggtggtcgacgtaccggtgatcacggtcggccaaattcgctggccggaaaccgccgaacgcgcgatccgcgaaggcgacgctgacatgatcgccctcggccgccccctgctggccgatccacaatgggcgaacaaggcccgacttggcgagcgggacggcatccgcccctgcacgtcctgcaactactgcgtcgccatcagctctgccgccgacggcgccatcggttgcgccgagaacccacgcaccggccacgagctggacagcctgccggaagccggcaacctgcgcggccagcgcgccatagtcatcggcggcggacctggcggcatggccgcggcgctgatgctgcaacaggccggcttcgccaccgaactgcacgagtcgcgctctgtcctcggcggcggcctgatcgcctccgctgcgcccccgttcaaggacaagctcacctggtacctggactacctacatcgccagctcgaacacagcaacgtatcggtgcgcctggacagccgtatagagctggtcgatctggatgccggcgcaaaaccggccatcgtcatgctggccaccggcggccacgccatccgcatgcccatagatggagccgacaaccccatcgtccgcgatgcctacgacctgttgatgggggacagcgcgcgcctgccgctcgcggtcggcgagaagccggtactggtctatggcggtggcgagaccggttgcgaaaccgccgaactgcttagcgagcagggccatgaggtggtgctggtaagccgctcgccggctgagcaactggctcgctcggcagaggtgatctaccgcggagtgctgaaacaacgcctgctgaacaacccgcgcatccgcatccaggacaacgccagcatcgagcgtatcgacgccgacggtgctgtgctgctgcgccatcaggacggcagcagcagcgaactgcagaccagcgccgtgcttatcgcccagggccgacgcccggacgaaagcctgctgcgcggcctgctggaggcgcaactgccggtcaccgtgatcggcgacgcccggcgcggcggccgcatcggcgatgcggtgcatgacgcctaccgcgccgtccacagcctctgtgccagcgcggcgccactgcgcccgctggcctgctga

SEQ ID NO: 350232 - DNA, 1626 bp, Pseudomonas aeruginosa
atggcgatcgaaactggtaacccggatttccaggcgcgttgggataatacggtgcgttacaccgcgggctggcgcatggaagggaaaaacaaggacttcaccaactcgcatttctacgacgataccgagaataaatttgaccgaggcgacctggtgaccaaccgggtggatctgctgtcggagctcgatctggtgtggaagcgtgcccacggcgtgcgtgtgagcgctgcggcctggtatgacgaggcctaccagggcaagtcggagccgaacaagcagttggcgggcagtggcaactacaccaatgaccactacacttcctatgcgaatcgctatatctccggcttgtcgggagagatccttgacgccttcgcctttaccagctttcaggtaggcagcgtgggtgtgaacctcaaggcggggcagcacaacgtctactggggcgagtcgctgtattccatcggcaacagcatcgcctactcccaggggccggtggataccatcaaggctgcgtccagcccgggttccgaggccaaggaactgtttctcccgctcaagcagatctccacgcagatttcgctgactgacgagctctctctctcagctcagtacctgttggactggaagcccttccgtaccattccggcaggcagtttcttcgcgccggctgacggttcgcgttccgacctgggggcttcgcccgcggtggggatgccgggagggattccaaacggtgatgatctggagcccggcaagaagcgtggcgactttggtttgagcctgcgctggagcccctggtggctgggcggcacggcgggtctctactaccgcaagttcgacgagaaggttccgtggagcttcacgcagattggcctgagggagatggcgcctggtgtcgtgcttgcggggatgcccaatgccatccgtctgaattatgcgcgtgacaccgagctgtacggcttcagcctgaccaagaacctggccaccatcagcctcgcgggcgagctgtcctatcgcaagaataccgcgctgaactcggcgtccggctacaccgtgctggcggggggtaacggtgctgcggccgaggccagctatggcgaagccgaaggcgcgcggggcaatacctggcatgcactggtaaatggcatttacctgctgccgagaacgcctctgtggaccggcgggaccctgcaggccgagctgacctacagccgcctggacaagatcaccgagaatgaagggcgcttcaacggctatggttacggctgcaccgggcccaaggcctactgcaccaccaaggatgcctggggcgtccaggtgggcttcacccccgagtggcctcagttgttccccggttgggatgtatcgatgccgacaagcctcgcctatggcctggatggcaatggtccggccatggcgggtgtacgcgaggatgtctacagctactcgatcggtgtcaccggcaagtaccgcggagtacacaacttcaccttgcgctgggccgactcgtatgctccctacaagatcaaccgggcccagggtatcgtcacgagcgaccataccggtggcgatgcggtgctgaacaaccacggctggctgtccttgtcctacaaggcgaccttctag

SEQ ID NO: 350233 - DNA, 1380 bp, Pseudomonas aeruginosa
atgaattacaagaagatgatcatgctgggtgttgccagcgcactgttcgccggccaggttgtcgctacgccgacggatgaggaaatcagccagctcggcaccaccctgacgcccatgggggcgatcaaggccggcaatgccgatggcagcattcctgcttgggatggtggtttgtgtacggcaccggccgattacaagccgatcatgggggccaagggcggttcgccctatgccgatcctttcagtaacgagaaaccgttgttcagcatcactgcagccaatatggcccagtatcaggacaaactggacgaaggtacccaggagttgttcaagcgttatccggaaagcttccgcgtggacgtttatccgactcagcgctctgcctgcttcccgcagtgggtatatgacaacaccatcagtcgagtgaagaacccgcgtctggtgggtgatgcccccgggctggaaggtgctcatgctcaggtgcccttcccgattcccaaggatggctaccaggcgatgtggaactccaacaccaaatttgaactgccgtatacagaaggcactcaggcggcctatctgatcgacagttcgggcggggtgacgctgtccagtatccagttgatcgagaaccgcaattacttctgggacaacagcctcgacaaggtgccggccgaccagccttactgggcgctgatcgccaccaccaccgcaccggctgcctcggtgggggtgaagcagatgcgcttcaacttcctggaaacccaccagcgtgacgccatggcctggtcctatgtgcctgggcagcgccgtgtccggctggcgccggagttcaagtacgacacggtgagtacggccagtggcggcatcctgctgttcgatgagatcaacggcttcgacggcaagatggacaagttcgacttcaaactggtcgggcgcaaggaaatgtacgtgccttacaacacctacaaggcctggagtgccgatccgaaactggctaatacgccgaagcacctgaaccccgacattctgcgttgggagctgcaccgcatgtgggtggtcgaggccaccctcaagccgggcgagcgccatgtgcaaaaggtcaagcgcttcctgatcgatgaggatagctgggccatcctggcgtatcactccctggatcaggcgggtaaggtgcatcacctgatgtatcaactgtccgtccagcaatacgagaagcccgcctaccgtaacggccactatgtgctgtacgacatgaccaagggtgtatacggcaatggctcgctgatgggtgcaccgggcatgaccggcttctaccaagtcgatcctttcccgggcaactacttcacttcgggatccatggcaggcagcgggattcgctga

SEQ ID NO: 350234 - DNA, 1065 bp, Pseudomonas aeruginosa
atggctgttgtacgcaatctgcttttccttaccttcttgtccctttgcctttcggcaaacacgagtatgggaagtgattttctggacccgctggaccggcctgcatccgaggtcaggaatctggccggagcgcatctcaatgccgtgaccctagctggctcgcgattggtcgcggtaggcgctcgcggtctcatcatgatttctgacgatgccggcgccaactggtcccaggtggcatccccggtatcttccgatcttctgtctgcatatttccccactgttcggcagggctggatagtgggtcacgagggtgtggtgctgcacagcagtgatcagggccagacctggatcaagcaaatagacggtcgggtgacggccaggcaactcgaggaatactacggccagcgcgccgcgagcggtgatcagcaggccgccgggtacctcgaaggcatcaagttgaattacaaggatggcccggagcaggcgttgatggacgtctggttcagcgacgagaacaacggtatcgccgttggcaccttcggcaccctgctggctacccgcgatgggggcaagagctgggagtcctggatggcgcgggtggacaacccggaactcctgcattacatggcgattgccggcgtgggggatgaagtcttcatcgtctccgagcgcgggatcgtatttcgtttcgacagggacagtgaccgtttcgagacgctggagaccggctacgccggcagtttcttcagtctggcggtgagcaagaaagccgtaatggcggcggggctgcgaggcaccctgtatcgctcgctggatcaggggggctcctgggaacaggtgcccacgggtctgaatgtcgcgctgaccgctgttcagaccctgcctgacgggcgctttctgttggctagcgtcgatggtcgggtgagtgttagcgatgtcggcctgacaggtttcgaggcagtacccgtcccacgtccggggcgtttttccagcatggtggtgttgcctggaggaaaggccgtcacggttggctattccggcgtgcgggtcatcgacctgaagtag

SEQ ID NO: 350235 - DNA, 2496 bp, Pseudomonas aeruginosa
atggctttttcaaacccgatcgacatgcccgtcatcaaagaccctcgccagttcgatagagcgagtgggaactggctggagaaattggtgttcaatcaccggggtatggttatcctgctgtgtgcgctgatgacgctgttgctcggctggagtgcgctcaagttgccggtgaacaccagcttcgaaaagatgatcccgcagtcgcacccctatattcagaattacttccagcaccgtgacgccttgcgcggcatgggcaatgcgacccgtatcgtggtcgaaaacaccaagggcgatatcttcgacaaggagtatctgctgaccttgcagaaggtcaacgatgctgtgtttctgatgcccggtgtcgaccagggctggatgcgtggcctgtggaccagcagtctgcgctggacggaagtgaccgaggaaggctatcgcggtggcccggtgattcccgatcgctgggatggcaacccggagtcgatggagcgcttgcgggagaacatcaaccgctctgggatcgtcggcagctacgtggccaacaacatgcgctcttcgatgatctttgtgccgatgctggatatcaacccggagacgggccaggcactggattatgcggatttctcccggcagttggagaggaatgtccgctccttggaaaacgatggtgtcaggattcacatcatcggcttcgccaagctggtggggaatctgattgatggcctttacgatgtcatggcctatttcgctttttcggtgctgatcgccagtgcgctagttctcgcctatacgcgctgcctgcgcagcacactgctgctggtgttctgcgcgctgctcggagtggtctggttgctggggttgctcagcgtgctgggctatgagctcgacccctattcgatcctggtgccgtttctgatcttcgccattggcctgtcccacggcgcgcagaaaatgaacggcatcatgcaggacgtgggccgaggcacgcacaaatacgtagccgcgcgttataccttccgccgtctgttcatggctggactgaccgcgttgctggtcaatatcgtcggtttcgcggtgctgatgatcatcgacattccggtgatccgtgacatggcgctgaccaccagcctgggtgtggcggtactgatcttcaccaagctgttcctgattccagtgctgctgtcctatttcggtgtgagtgccgaagcggcccggcgcagtgtgcagagcgcggagcagatcgaggccggcctcagccccatgcagaaggttcgggcctggctgattcgcctgaccgagcgtcggcgtgccttgctggccataggcgttgcggcgctgttaaccgtggtgggtttctcgatgggcaggcaggtgcagtttggcgacctggatgccggggcgccggagctgcgtcccgagtcccgctataatcgcgatatcgccttcgtcggcgagaactatggtctgtccaccgaccagttcgtggtaatgttgaaaaccccgctgggaaaatgcacggagtttgcttcactgaccgaggcggatcgactcagcgcccgtttgcgtgaagtgcccggtgtgcagacgaccttttcgccggccgacggcattcgcctggcgagctccggatccttcgagggcaatcccaagtggttgaccattccgcggaacgacagcaaccgcacccagtccttcaacatgttctccacggatcgtccggaattgaccgaccggagctgcggcatcaccccgatcatcgcctacctgactgaccacaaggcggccaccctgaaccgggtggtacaagaggttgagagttatgcggctgagttcaatagccctgatcgcgagttcatgctggccgctggtagtgccggtatcgaggctacgaccaacatcgtggtcaagcgcagcttctggacgttgcacttcgtgctgtatggcgcggtagccctgttgtgcttcatcaccttccgcagttggcgagctgtggtagtggcgctggtgccgctgatcatcacttcgatcctgtgcgaagcgctgatggggatgctggggatcgggatcaaagttgccactctgccggtaattgccgttggcgtgggggtaggggtggactatgccctgtacctgctcagcgtacagctcagcatgcagcgccagggcatgacactggcgaaatcctatgccgcttcgttggacttcgtcgggcgcatcgttgcgctgatcgggttgaccatggcggcgggtgtgctgccctggatctggtcgccgatcaagttccaggccgacatgggcatcctgctggcattcatgttcctgtggaacatgttgggggcactgatcctgatcccggctctttcccattttctcctgccatcttccgcgcacggtgagccggccctcgtttcgtctgaagacgagcgactggcaactcttgagacggaggagagcaacgaggggcatcgtgcccgacattcccgggccactgtctga

SEQ ID NO: 350236 - DNA, 795 bp, Pseudomonas aeruginosa
atgaagcttggattgaccggacgtgtggccctggtttcgggggggagcaagggcataggccgtgcctgcagtgagatgcttgctgccgaaggttgtcgggtcgtggtggtggctcgtggtcaggaagccctggatgaaaccgtatcggccattcgcgccaacggcggtacggccattgccgtcagcgccgacctgacccgcgaggccgacgtgcaggtggctgtggccagggcgcgcgaggcattcggtgcgccggatatcgtcatcaccaacgtccatgggggtgaccccggtgacttccttgaggacagtgcggatgtcttcaccgactcctttcagggcttggtgatgagcgtggtgcacttggcgcgggcgaccttgccccacatgcgcgaacagcgctgggggcggctgctgaccatcggcacggctgccgccaaggagcccgcccccgggctgcggctgatggcggccaacactgcgcgtgccgccgtggtcaccctgaacaaacagctggctgacgaattcgcggcccatggcatcaccgtcaacaccctggccaccggctggatcgccaccgagcacatgcgcgaccaggtgggcaagatggcggcggccaggggcatggccctcgatgacatgctccagcgtctgtcccgtggtgtgccggtgcagcgcatgggcaagccggaagagatcgcctcactggcgacctatctctgctcggggctgggggggtaccttaccggttgcctgatacccgtggatggcggcgcccaccgctcggcctggtag

SEQ ID NO: 350237 - DNA, 1542 bp, Pseudomonas aeruginosa
atggcagcgcaattgctggaagcgccgaccctctgggccctgctgcagcgccgggtagcgcttaccccgcaggccaccatgctgatcgacgggcgtaagcgtcagcgcatgaccttcgcccaggccctggatatctcggcgcgcctggctgcgggtttccagcgctacggcattggccagggctcggtggtgacctggcaattgcccaccggcatcccggcggtgatgaccgccttcgcgctggcgcgcctgggggccgtgcagaatccgatcatttcgctctatggcgagcgcgaagtgcatggcgtggtggcacgcaaccgatcggacttccttctggtgcccggtgcgcaggaacgggactttcggctcatggccgagcgtatccgcgacagcctcgaacatccactgcgcgttattgtcatggcgggcgacctgccccagggcaaggcggtcgatctgccgccggcgccggaagacggcgaggcggtgcgctgggtctactacacctcgggcaccacgtcggaacccaaaggtgcctgccacagtgaccagacgctgatgatcggcgggcgcaacctggcgcgggcaatgcaggttggatctgccgacgtgggcaccgtggcgttcccctatgctcatatcggcggcgccatgtatactgccatgctgctggccagcggtatgagcgccgtgctgctggacaggttccaggcggccgaggcggtcgccatcttccgcgagttcggcgtcaccaccacgggaggcagtacggcccattacgaggccctgctggccgagcagcgtcgccaacctagcgcgcggctgatcccgtcgttgcgtctgctctgtggtgggggggcgcccaagccgccagagctctactaccaggtaacgaccgaactgggttgcgcgcttacccataactacggcatgaccgaggtaccgctgatctgcgccggttctcccagccatggagacgaccagctcgcctgttccgaaggtctgcccgtcgacgaggtggagctgcgtatcgtgcgtctggacggcagtcttgccgatattgaggagagtggcgaagtccgggtgcggggtcgaggtgtgttcaagggctatacggacaaggccttggatgaagaagcgttcgatgccgatggctacttccgtacgggtgaccttggtctgctgcgctccgatgggcgggtaacgctgaccggacgcctcaaggacgtgatcatccgcaagggcgagaacatctccgcacgagagctggaggatctgctctacagccatcccaaggtgggcgccgtggccgtcatcgggctacccgatgccgagcgaggcgagcgggtgtgcgccgtggtcgagcccgcgccgggcaagccccccctggagttcgcggaaatggttgcctacttccgtagtagcgggatcatgctgcagaagattcccgagcagttggaactggtagatagcctgccgcgcaacgagaccttgaacaaggtgctcaagcatgtgctcaggcagcgcttcaccacctga

SEQ ID NO: 350238 - DNA, 612 bp, Pseudomonas aeruginosa
atgattcgaggactggacaaagggcagcgtgctgcgttgctgatcagcgagtgccagctgggcgtaatcgacccgcagctctctcctttccagagtctggccgagcaggccggagcgcgcgccatcgtgccacggatagccaggctggcccaagcgttccgcaaggcaaagctgcctgttattcatttacatgtagtgcatcgaccaggttacgtcgacctgccccgcaccagcgcgatcatcgtccgctcgatcaaggatcagcgcatgatcgccggtagccgggatgtcctgccagtcgaggagctgacgcctcacgaaggcgatatcgtgcatgcgcgcagcttcagcctggtggccttccacggcaccgacctggatgccatgttgcgcaacatgggcgtgcagaccctggttcccgtgggcgtttcgaccaacgtggcgatatcgggcacctcgttgtgcggctcggatctcggctaccaagtggtagtccccgaggactgcatcgcaggcgcgtcggcagagagccatgagttcattctgcgcaacctgctgccgctttacagcaccgtgtgcgacagcgaggcggtgatacaggcaatcggctga

SEQ ID NO: 350239 - DNA, 2343 bp, Pseudomonas aeruginosa
atgaatgatgaagtgggagtggccgagctgttgcaggactcggcgaacgactatctggctggaacccatgcgcctgccaggttacgtggctggatcgggcgcgtacgaccggtggagcgtgcactgtggcgcggcatggctgagctgggctggacagcgctcatgttgccggaggagatgggtggcagtggtctgggcttacgcgaagcctgtgctttgagcgagataatgggagaacgtttgctcgcggaacccttcgtcgcctgctgcgtacttccttcggtgctgctggcggcgagtaaggctgacaacgtggcgagcggacgcgagcaactggctggctggttgcagtcaggcgaacgcgtgttgaccttcgcctggcaggaacgggccgctcagctcgatatcgaacagccgacatgcctcctgcgcaatggtgtgttgactggtgagaagcgcttcgtcattggttgtgaggcggattcggtgttgcttgtgctggcccaggaagccggtcagacggtgttggtggccgtggccgccgatgcttcgggggtcagttgcgagtcattcgctgctggtgtcggcagccaggcccatgtgcgttttgagcagacccctttgttgtttggtgagccgctgctgcgcggtgaggccgccgaacaggctgcgcgtcaggcgctggtcgccgggcgtatcgcgctgtctgccgaactggccggattatccgctggctgcctgcgacagaccatcgactacgttagccagagggtacagttcgcacgccccattggtagcttccagaccgtgcagcatcgttgcgttgacctgcacatcgaggcattactggcgcgtgcttcctggcagcatgctctggactgttacgagcaggctccgctgtccgcagccaccttggcggccaccagcgcggccaaggcgcgtagcggagcgggtgcggtaatcaccggcaagcaatcggtgcagttgcatggtgccatgggcttcgccgaggaagtcgatatcggcctgtacctgcgctctgcgatcttcggttcggcctggctgggggcggcgcagagccaccgtcgtctgttcgccgagcgttatccggccctgcgtagcgaagaactggacgatagcaccctgacgcaggtggcgcttagtgacaccagtgacccgcgggagtggggcgacgacgaattccgcctgcgcctgcgccgctggctggaggcgaactacccgcagcacctgcgtcaggacgaccgtcgcccattcctgcgtctgcgcggtgacgacctgtgcaactggctgcgcttgctcaacgagcacggctggcgggcaccggcctggccgcgggaatatggtggtatgggtatctcgttccgcaaacagatgatctaccaacaggaaatggaacgtgccggggtcgggcggatcatcgacaacggtgaaacccagcttggcccaaccctgatgaaatgggggacacaggagcagcgtgcctactacctgccgcgaatcctgcagtgcgacgatgtctggtgccagggttactcggagccgggggccggctccgatctggccagtctgcgtacccaagcggtgctcgagggcgacgagtatgtggtgagcggccagaagatctggagcacccatgctttggattgcacgcatatcttcactctggtgcgtaccggcaagttcgagaagaagcagcagggcatcagcttcctgttgatcgatctcaaggcgccaggcgtgagcatccgcccgatcgccaatatcgccggcgaaaacgaattctgcgaagtgttcttcgatgccgtgcgggtgccggcggtgaacctggtgggcgagttgcaccagggctggagtgtggccaaggcgttgctcggtcatgagcgtatctggctgggcagctcggccatggccggtagtgcactggatctggccgaacgcctggtggtgcagctgggcctgatggatgacaggggcgtgctcgaccgcctggctgctctgcaggctgacttgcatgactaccgtcgactctatgcccaggtgtgtgaccgcatcgccaatgaaggggccgaacctgacgccgaggcttcggtgctgaaggtttatgtctctgagctgttgcagcggatcactgagttcaacgtcgaagtcagcagcgagtacggcggtgtagttggtgatgtcagcattggcgatctggaggtcgatccgcactgggctctgatgatggcccgaccggtgacgatttatgccggtgctaatgaaattcagcgcgatatcctggccaaggccgtcctcaatcttcccaatctaccgcgcggctga

SEQ ID NO: 350240 - DNA, 1185 bp, Pseudomonas aeruginosa
atgagagaagctgtcattgtttccaccgcccgtactcctatcggcaaggctcatcgaggtgcgctgaacaacatcaagtcgccgagcatgaccgcccatgccatgttgcaggctgctttgcgcacaggcgtggagccaggagcaatcgaggatgtgatcatcggtgcggcgatgcccgctggcacggcgggtaggaacctggcccgcgctgctgcgctgcgcgcgggattcggtgtgcaggcggccggttctacggtggatcgtcagtgtgcatctggcctgatggccatcgccatcgcggccaagcagatcatcgtcgacgggatggacattgtcatcggaggcggttcggagaacgtcagcgcactgacaccgagttatctggagctggccatccgagagaaggatgaggttctggcggatatgctgccacaggcctacatgccgatgatcgagactgccgagttcgttgccaggaaatacggtatcagccgcgatgcgcaggatgagtatgcgctgcttgctcatcagcgggccgccgccgcccaggccgatggcaagttcgacgaggagatcgtgccactgcgggtgcagcagaaactggtagacaaacagaccaaggaagtcagctacaaggagtttctcttcaccgaggacgactgtctgcgcccggataccagcgctgcagggcttgccagcatcaaaccagtgttcgaaggggggagtgtcactgctggcaacgccagccaactgtctgacggtgcgtcggcctgcttgctgatggatgctcgccttgccgagcagcgcggtctgcgcccactcggtgcgtaccgtggtttcatcagtactggctgcgcaccggaggaaatgggtatcgggccggtgaccgctattccgcaactgctgaagaagcatggtctgacggtcggtgatatcggcctgtgggagttgaacgaggcgttcgcctgccagaccctttattgtcgcgatcggttgggcattgatcccgatcgtttcaacgtcaacggcggcggcatcgcgttggggcatccctttggcatgaccggctcacgcctggtcggcagcgcgctgctcgaaggtcgccgtcgtggtgtgcgctacgtggtggtgagtatgtgtgtcggtggcggtatgggggctgccggcttgttcgaggtttactga

SEQ ID NO: 350241 - DNA, 1146 bp, Pseudomonas aeruginosa
atggatttccaactcaacgaagaacagagcatgttgcgagacagcgttcgtcgcttcatggaagacaactgctcattcgaaaaacgcggcccggtggtcaacaagggctcattcgactccagtcactggcagcagttggccgaactcggcctacttggcctggcgattccggaagagttcggtggaatgaactgctccgctctggagtccgctctggtgatggaagagaacggccgcatgctctgcgtggaaccctattgggcagtagcagtgctcgccgcgcagaccctggcggccacgcgcgatcccaaggtgacgacgatacttcagaccctgtgcacaggcgaactgctgccggtactcgcccacgaggaagctggggcgcatggcaggccggcgtacgtacaaacccgggcagtcgccatcgatgacgagcgctggcggatcagtggcgaaaaggctgtggtagtggccggcaacgtggcagaactactgatcgtctcggcacgcaccagcggcagcgacgacgacgaacagggtatcagcctgttcgtcgtcgatccgaagggcgcaggagtggagcggcgcgacattcgcctgatcgataaccgctgggccactcacctctatctgcgcgatgtcgaggttggccgcaagaatctactgggtgccgtcggcctgggtttcggcgctatccgccacggcctcgaacacgccacggtggcgctctgcgccgaagccatcggtgtgatggagcgcgcactgtggatcacccgcgactacctgaagatccgcaagcagttcggccagttgctcggcgacttccagagccttcagcatcgtatgagtgagatgctgatcgaactggaactatcgcgcggcatgctgcactacgcgctgtccagcctcaacaaaaattcagatgagcgggccaagatactgtcaatggcgaaggctcatatcggcaagagtggccaatacgtctgcggccaggcaatccagttgcacggcggcattggcgtaaccgaagaatacgtaatcggccactatttcaagcgtatgacactgatcaacagtgcgctaggtagcagcatgcaccacttcgagaaactggcggagctggaacgcacgattggcctgaactga

SEQ ID NO: 350242 - DNA, 1200 bp, Pseudomonas aeruginosa
atggatttcattctcgatcaggaagacgaggacttccgtcaggaagttcgtgccttcctcaaggacaacctccccgcagatctggccgagcgtaaccaccgcggctatcacccattgcgcgaggacacccggcgctggaccaagattctccatgccaacggctatgccggcgccaactggccgaagcactggggcggtaccggctggtcgcctctgcgccagttcatcttcgacgaagaatgcctgcttgccggcgccccggccgtggacaccgcaggcttcaagatgatcggcccagtgatcatgacctttggcagcgaggtgatgaagcaggagtacggtccacgcatcctcagcggcgacgtattctgggggcagggcttctccgaacccaacgctggctccgacctgggctcactcagcacacgggccgaacgcgtcggcgacgaatatgtgatcaacggccgcaagatctggacatcgttcgtcgagaccgccgacatgattttcgtcctggtcaagaccgacccagcagcacgccagcgcggcatctcgatgatcctagtggagcgcgaggccccaggcgtgaccatccgcccgatccatgacatcggcgaaagccatagcctcaacgaggtgttctttgacgacgtgcgtgtgccggtcaccaacctggtaggcgaagaaggtaaaggctggacctacgccaagttcctgctagagaacgaacgcgccttcagcgccgagtggccacgcaacaacgctaacctggcgcgtctgcgtaagttcctcagcttgaaccaggccgacggctcacgactgatcgaccgtccgggcttcgccacccgccttgcccagctggaaaccgatctgcaggccctgcgctggcttagcctgcgtgcgctgcatgagaaggctggcggccagagcaggctaccggtcggctcgctgctgaagatccgtggttccgaactgctgcagaagattggcgagctccaggtcgaagcgctcggttgctacgccagctacgtctaccccgacccgctcggggatgcacagcgtgaggaggcctggcctcctggtcccaactatgccccaggcatcatggcggactacttctaccgtcgtgcaaccactatctacggtggggccaatgaagtgcagcgcaccatcatcgcccgttcattcctggagctctga

SEQ ID NO: 350243 - DNA, 1203 bp, Pseudomonas aeruginosa
  misc_feature (637)..(637): n is a, c, g, or t
atgaacgaagaactgcaacgctaccgcgagcaggctcgcagctggttggccgaacatgcggcaaactattcgggaagagcccgccatggcctcgaattcgagcaggatctggccctggcccgtgcctggcaggcgcacaaggtgcagcacggctatggctgtatcaccctgcctaaagaatatggcggcgctggtggtagcgaactggaaaaggtcatcttctgcgaggaagagatgcgctacgacctgccactgatctacttcagcatcagcctgaacaacccgctgccgatcttcctgcggtatgccccggagcactggaaacagaaactcggcccggcgacggtgcgcggtgaactgatctggtgccagctgttctccgaaccctcggccggatcagacctggcctccctgcgcctgaaggcagtgcccacggagggcggctggctgctcagcgggcagaaggtctggaccagttgggcgcagatcgccgactggggcgtggtagtggccaggagcgatccgaacctgcccaagcactccggcctgacctatttcttcctcgacatgaagtcacccggcgtcacggttcagcccattcgccgcctgggcgaggagaaagatctcaacgaagtgntcttcgacgaagtgttcgtccctgacgaacagcgcctaggggaaatcaacggtggcttcaaggtcgccgtcgaaactctgatgatcgaacgctacgcggtgaccgacgaatccggctacggcccgactctggagaacttcatcgacctggctggcaatgcccggatcaatggccgtccggcgctggaggacggcgaagtccgtgccaggatcgccgaggtattcgtacagcgccaaggcctgcgtgccatccatcgccgcgctctgcaagccttcgccaatggccaggctccagggccagagggggccatccgcaagctactgctgggccgaacccgccaggcgctgggttccaccgccatggatctgctgggtgccagcggcgcacgtctcgcgccacacggccatgcgaccaatgacttcgcccgggcctggctcgaccccagcctgcgcatcgccggcggcaccgacgagctgttgctcaacaccctggccgaacgtgtgcttgggctaccccaagaccaccggccggacaagggcatccccttcaacgccgcgccgaaataa

SEQ ID NO: 350244 - DNA, 1107 bp, Pseudomonas aeruginosa
atgcaagccgaacacgctgaagatctcgccaccatccgcgagcaggccagacgcctgctacaggatcaggcgacgcccgagcacctcaagtcgatgctcgatgaaccaggcggtttcgaccgtgagctctggcggcatgccgtcgagcaaggctggacggcgatcgcggtgccggaacaggccggcggtctaggcctgggctggggcggccttggcgtactgtgcgaggagctcggccggatcactgcctcgctacccctgatagccaacacgctagccgtgcatgccttgctggcagccgggcgggcggagcactcagccctgcaggaagccctgaccgatggcagccggatcgcctgcctggcgctggccgacccagccgatggaggactttcggtcaataactcggcccaggttcgcaacggcagactgaacggcgaaaaggcccctgcagccttcgccacggtcgccgatgttgccctggtgcaggccgcagacgagcacggcaacggcctctacctggttctactcgaccaacccggggtgcagcgcatcccggtcgatggtttcgacaactcccgcgcgacggcggccctgcagttcgttcaggtgcaagcgctacgcctcggcgatgccgagcagttgtcgaatctcagcagtcttgccgcgttgaccaccgccttcgagcagatcggtggcgcccaggcctgtctggacatggcctgtgactacgcccgcgagcgccgcgccttcggccagccgatcggtggcttccagggcatcaagcacaagctggcggagatgtactgccaactggagatcgctcgcggctgtacgcatgacgcgctggatgcctgggagcagggactgccggctcgcaaccaactgaccgctgccgcccgtctcggtgctacccgcgcctacgacctggccgcccaggagaacctacacgtacacggaggtatgggcgtcacctgggaagccatgccccatcactactatcgccgctcgcgcagcctggccctggagctgggaggctcccactactggcgggaacgactgctttgcgacctgggactcgaatctgcaactggcctggcaggataa

SEQ ID NO: 350245 - DNA, 408 bp, Pseudomonas aeruginosa
atgactgacgccgtgaaacgcacccttcccgagctggatgacctgaaccgcttcttctggatctgcggagcggacaaccagttgcgcatcctgcgctgtacggactgccgcctctggctgcacccgccaggaatcatctgtcccaagtgcttgagcaagcggctcgccccggaagccgtcagcggccttggcaccatcgaagccctgacggtcaaccatcaaccctggagcccggggcaggcggtgccttatgcaatcgcgatcgtcagcctggacgagcaaccaggcctgcaattgaccacaaacatcgttggctgccacccggattcggcctttattggccagcgggttcgagttgtcttcgaggcggttgaggacgtgtacctccccctcttcacccctgtctga

SEQ ID NO: 350246 - DNA, 696 bp, Pseudomonas aeruginosa
atgtccggtctggttgtggtgacgggtgccgctggcgctcttggacgcgcggtggcgcaagccttcattgagcaaggcaatccggtgttattggttgactgcaatgagcaggtgttgcgttctgcctatgaaggtgtagagggcaccaagcacgttctggtggctgatctgacggacggagcggcaactcttgaggctctagggcaggcgctgcaggcccatggtcctgcagcagtgctgtgcaacatcgctggggggttcgccatgggcgtggaggtgcatgatgccgacgccagtgtctggcagagaatgatggatctgaacgtgaccactaccctcaacgcttgtcgagttgtagtgccgggcatgttgtccgctggacagggcaaggtgatcaacgtagctgcggctggggctaccagcggcaaggcgggcatgggagcctactgcgcctcgaagagcgtggtcgccaggctgaccgaatcgatggcgctggagttgcgggagaaaggaatcaacgtcaatgcgattgctccgagcatcatagataccccggccaaccgcgccgatatgccggatgccgatttcgccaagtgggtgtccacccggcagttggccgatgtcgtgggcttcctggcatcggaccgtgccagcgccgtccatggggcggttattcccgtggtggggctgtcctag

SEQ ID NO: 350247 - DNA, 708 bp, Pseudomonas aeruginosa
  misc_feature (422)..(422): n is a, c, g, or t
gtgtgtctgatcggcatcaaccgcccggagcgtcgcaatgcgctggatacggtgacctacgttcagttgggtgaagcgctacaggcggcggatgacgacgtgggggtgagggcaatcgttctgaccggtgaaggcgggcacttcactgcaggcaacgatctggcggacttccagcgtctcaaggacgcagatgctgttcccggtatcggtttcctgcgcatcttggcgaccgtttccaagccggtggtggcggcagtcgaaggttatgccattggtatcggcacgaccctgttgctgcattgtgacctggcctacgcggggcgtagcagcaagttccggctgccgttcgtggggctggggctatgcccggagggcgcctcgacctacctgctgcccaggctggcgggcagtaaggtagcggnaaacctgctttttttcggtgagcccttcctggccgatacggcccgtgagattggcctgctcaacgaggtagttgaggatggcaccgcccttgagcgtgctatcgagcgggccgaggctctggcccgtttaccggttcaggccttggcgactaccaagcgcctgcttgtcgagcagcaacgcgacaaggtcggacagatcatggatgcggaagaaaaggattttctgcgctgctgcgctgggcaagaggcgcagacggcgtttagttcgtttttcgccaagaagtga

SEQ ID NO: 350248 - DNA, 429 bp, Pseudomonas aeruginosa
atgcgtaatgtactgcttccctttgacggttcggcctcggccaggcgcgctatccagtatctgctggatctggccggcgagtacccgagtatccaggtgcatgtgatcaacgtgcagaccacctccaagctccatggcgactatgtgtctgctgtcatgctggagcagctgcatgctggggctctcaatcatgcccaggagatcgctgccgaggcggctgcgctgcttgaaaaggcgggtgttcgcgtcgaggttcacgccctggtcggtgaggtcatcgacgagattgtccaggccgtcaaggcatacggttgcgataccgtgatcatgggaacccgtggtatgggcaacctgggcaatctgctgatgggctccgtcgctacccgggtggtgcatgaggtgcccgtaccggtattactggtgaagtga

SEQ ID NO: 350249 - DNA, 1578 bp, Pseudomonas aeruginosa
gtgaccctgcgcaacggtgcccatgccagcctcgcccagccggagaaattcgtcggctaccagggcaccgccgaagcgcccggcgccgtgctgctgaagaaccacggcctgcacttcgagatccagatcgaccgcgtaagccccatcggccgcaccgacgccgccggcgtcaaggacgtgctgctggaagccgcgctgaccaccatcatggattgcgaggactcgatgaccgccgtcgacgccgacgacaaggtagtggtctaccgcaactggctgggcctgatgaagggcgatctcgccgaaaccctggacaaaggcggcaagaccattgtccgccggctgaacccggatcgcgtctacaccggcgccgacggtgccgagctggttctgcacggccgcagcctgctgttcgtgcgcaacgtcggccacctgatgaccaacccggcgatcctcgacggcgaaggcaacgagattcccgaaggcatcctcgacgcggtggtcaccagcaccatcgccctgcacgacctccagcgtcgcggcaactcgcgcagcggctcggtgtacatcgtcaagccgaagatgcacggccccaccgaagtggccttcgccgaccagttgttcggccgcgtcgaggatctgctcggcctgccgcgccacaccctgaagatgggcatcatggacgaggagcggcgcaccagcgtcaacctcaaggcctgcatcgccgcggccaaggaccgcgtggccttcatcaacaccggcttcctcgaccgcaccggcgacgagatgcacaccgccatggaagccggcgccatgctgcgcaagtgcgacatgaagtccaccccgtggatcgccgcctacgagcgcaacaacgtgctggtcggcctggcttgcggcctgcgcggccgggcgcagatcggcaagggcatgtgggcgatgcccgacctgatggcggccatgctcgaacagaagatcggccatcccaaggctggcgccaacaccgcctgggtgccctcacccaccgccgccaccctgcacgccctgcactaccacaaggtcgacgtacaggccgtgcagcaggaactagaactcatcgatctcgccagccagcgcgacggcctgctgcgcgacctgctcagcgtgccggtggccgccgcacgcgactggagcgccgccgatatccaggaagagctggacaacaactgccagggcatcttcggctacgtggtgcgctgggtcggacaaggcgtcggctgctccaaggtgccggacatccacgacgtcggcctgatggaagaccgcgccaccctgcgcatctccagccagcacatcgccaactggctgcaccacggcgcggtgagcgagcagcaggtccgcgaaaccctacaacgcatggcccaggtggtggacgggcagaacgccggcgatgcggcctaccgaccgatggcgccggacgtcgacgcctcccacgccttccgcgccgcctacgacctggtgttcaagggtcgcgagcaacccagcggctacaccgaaccgctactgcacgcctggcgcctgcgcttcaagcaagaggcgtactga

SEQ ID NO: 350250 - DNA, 399 bp, Pseudomonas aeruginosa
atgcaaacccccggcgaccgcctgctggcacgcctgctggcatcgagcgggagccggccactgccgctggccgatctcgcgcgcctgctcgatgccgtgcaggggcgcatccaggtcgccagcgcagccgaaagccatgcggcgcgcctgcaggtgcgactgccccagctcggcgccgtggaggtgcaggtcctgcatggccatggccagttgcaggtcgagatcagtgccagccccggcagcctggcgttgctccagcaagcccgtggcgagttgctcgaacgcctgcaacggctgcatccggaacaaccggtgcaactcaccttcaatcagcagcaggacagcggccagcgctcgcggcaacgtcgctacctgcatgaagagtggcaagccgaatga

SEQ ID NO: 350251 - DNA, 1020 bp, Pseudomonas aeruginosa
atgcggtgcggcggccctgggctctgctcagaatgcactgccgacgcttcccgtgcccgcgccgccctggcgcaaccctccccggcgtcggacctcgacccgctcaacctagccccgcatgcggaagcgttcaacgaagcgcccgctgaagcactcaagcctgagccggcagaggcggatcggccggaggtggtggcgtggcaataccgcgtcaccgcaggcccgcaaactggatggagtctatggcacccagggaaaggcgaggagttcgaacgctcctacaccgtcgaacgccggccgcttatgaccgtcgcccagcatgagcgcatcgtcggggagctgcgggcggtgatcgcccaactccgccagcacaagaacgattacatggattccggccaggaaacgtaccgggcattacagaacgaaatcagagaacgggaagcggaaattgctcgtcttgatggtctggtttcgggccgcacggcagagcgcgacaccgccctgaccaaggtcgcggagctggagaaagaactggaaatggcacgcgacgccgcgtccaagggtgacgctgcgcgccacgcggcttgcggcatggaaatggatatccaggagctgaaagccaagctggccgatccgacagcagttcatcagtggcaattcagcaacgcatggttcgacggtagcgaagaggctgtgcttaaagcaggcaaagaaggatcgcctatccgcactctctacaccgcgccagcccaggctcagcacagcgtgccggaggggtgggtgcaatcactgccgctaaaggatcaccagccttgcaagccgaacgaggatagagcgaacggttacacaatcccgatctattcaaggccggttcttgttgaggaagccttgcgtaagttacgtgctgtcctctgcgacccaattggaaacgttgtcattgacggcagtgatggtgaccgagaagaggtacagcgagcgctcggtatgctcgccgccgcgcccggcaaggagggggtgtga

SEQ ID NO: 350252 - DNA, 1611 bp, Pseudomonas aeruginosa
gtgggtcttgacgtcgatcggcttcggataggccgcggtgtggcagaaggactgcatcaccaggtcggcggagaagccgaggcaggcgaggtccttcagttcgtcgcgggtcatcgggccggtggtgtcctgggaaccgacggtggtcatcttcggttcgcagtaggtgcccgggcgcacgccctggccttccggcagaccgcaggcgcggccgaccattttctgcgccagggtgaagcccttgccgctatcggccggtgcttccggcttgcggaacaggtcggaggcggccaggcccagctcggcgcgggccttctcggtcaggccccggccgacgatcagcgggatacggccgccggcgcggacttcgtcgagcaggaccggggtcttcagctcgaaggtggtgaccacttcgccgctgtcgtggcgaacgaccttgccttcataggggtatacgtcgatgacgtcgcccatggccaggttggtgcagtcgaactcgatcggcagggcgccggcatcttccatggtgttgtagaagatcggcgcgatcttggtgccgaagcagaagccgccggcacgcttgttcggcacgaacggaatgtcgtcgccgaagaaccacagcaccgagttggtggcggatttgcgcgaggaaccggtgccgaccacgtcgccgacgtaggcgaccgggaagcccttggccttgaccgcttcgatctgcttcagcggaccgaccgaacccggctggaccggctcgatgccgtcgcgggccatcttcagcatggccagggcgtgcagcgggatgtccgggcgcgaccaggcgtcgggggccggggagaggtcgtcggtgttggtttcgccggggaccttgaatacggtgagagtcagcttttccgggacttccggcttggccttgaaccactcgccatcggcccaggattgcagcacggacttggccgcggcattgcccttcttggcgcgctcggcgacgtcgtggaaggcgtcgaacatcagcagggtgtgcttcagctgttcggcggcggtgttggccagttcggcgtcgtccagcagttcgaccagggtggcgatgttgtagccgccctgcatggtgcccagcagctcggcggcacgttgcttgtcgataaggggggaggtggcttcgcccttgacgatggcggaaaggaatccggccttgacgtaggcggcttcgtcgacgcccggcggtacgcggttggtgatcaggtcaaggaggaattcttcttcgccggccggcgggttcttcagcagctcgaccaggcctgcggtctgttcggcgttcagcggttggggcacgacaccctgggcggcacgctcttctacgtgtttgcggtaggcttcaagcacagtatttccctcatcagtggtcccgggggacacgtatccaggaaccgacgcagatccgctcgtcaggcccaggtggacggtaatccaccaacctacgagggcatcggcaggttccagacagaagctgttttcaaagttttacgccggcgggctggggtggggctggcgagacgcttgagggaggcgccgtcgccagcgtacctgccggaaactgtgctcgtgacgctttga

SEQ ID NO: 350253 - DNA, 1650 bp, Pseudomonas aeruginosa
atgagcttttccacccaactcaacgacaaggcgctgcccggctggtccgtcggtcagatggataccgtcaacgacgtggtgcgccgtgcggcgcgcgagcatggcgaccgccagtttctagacgtgctgggcgatacctacagcttcgccgacatccagcgcgagagctgccggctggccaatggtctggcgaccctgggcctggtcaagggccagacggtagtcaccctgatcgacaacaatgctgacgcggtgctgctctggttcgccctgaacaagctgggcgccatcagcgtgccggtgaacaccgcgcttaagggcgacttcctacgccaccagatcgccgatgccagcgccgaactggtgatcgccgagaccgagtacgtcgagcgcatcgccctggtgcaggagcagttacccggtctcaagcacattgtccaccgtggcgccgcacccgcggcggacttcggcgggaagacgctgcttgcactggaggcgctgcgcagtgacgacgccagtgatcctcaggtcgaggtgctgcccagcgatctgaccatgctcatctataccggcggcaccaccggcccatccaggggctgcatgatcagccacaacaacgcctgcaacgaggcacggcagatcatcgaggctcacgggcgaacgcctgattccatcacctggacgccgctgcctctgttccacctcaatgccacggtcaccaccatcctgtgcaacctgatgatcggcgcccgctcggtgatctatccgcgcttttcggtctccgggttctgggccgatatcgaacgtagcggcgccaacgaggccaacctgctggcctcgatgggcccgctgctggccgacgcgccggacaacgaagcgatgaagcgctgctacggccagctcgacaaggtctattcggcgccgttcccgccggaactgcaggcacgctggcgcgagcgcttcggcgtgcgctacacggtcggcggtgccggtttcggcctcaccgagtgcgccatcgtcaccatgctgcccttcggccagccggacaaacccaactgcgcggggcgtcgctgtgactcgttcgatatccgtgtggtcgatgagcatgacgtcgagctgccctatggcacgcccggcgagctgatcgtgcgcccgctcaagccccatgtgatgttcgagggctactggaaccgcccggccgacactctcaaggtgatgcgcaacatgtggttccacaccggcgacatcggcaagatggacgaggatgggttcttcttcttcctcgaccgcaagaaggactacatgcgccgtggcggcgagaacatctcgggtttcgagatggaacgcagcttcctcgtccatccgcagatcgaggaggtggcggtgcatgcggtgttctcggaactgtcggaagacgaggtgaaggtgactgtcgtgctgggcgagggcagcacgctcagcgaagaggagctgtgtcgctgggccatcgagcgtgtgccgtactatgcggtgccgcgctatatcgagtttcgcgacgaactacctcgcagtccggtagggcgcattctcaagtaccgcttgcgtgatgagggggtgaccgagagcacctgggatcgagtcaaggccaatgtcacttttgacaagcgctga

SEQ ID NO: 350254 - DNA, 831 bp, Pseudomonas aeruginosa
atgcacgaattttccaacaagaccgtcgtgattactggggcggccagcggcttgggcctagcgatggctcgggtcttcctgcgtgaaggcatgcgcgtggtgctgggcgatctaccgggacctgcactggacgcggcgcgggacagcctggcagggctggccggtgaagtattggcaatccccgtggacgtttccgatgctgattcggtggaggcccttgcccgtcaggtagatgccatcgacggggcggacatcctgtgcaacaacgccggcatcaccggtgaccggccacgcaacagctgggagcacgacccgggcaactggcggcgggtgctggacgtcaacctgatgggcgtcattcatggcctgcacagcttcgtgccacgcctgctgcgtcagggccgcccggcccatatcgtcaacaccgcctcgatgggcggtttgctggccattccctatatcgcgccctatgtggcggccaagtcggccctggtggcggtgtccgagtccctggccctggaactggccggcgagggggcgggcatcggtgtctcggtactctgtcccggactggtgcgcaccggcctcaccgggccgggccgcgaccatccgctgtcgcgggtggcgcagccttccgccgctgccctggctttccagcagggcacccagcaggcactggagcaggcgcgcctgagtgccgacgacgtggcggagcaggtgctcgccgctatccgcgaacaacgcttctatgtgctgacccacgaaggctcactggcgctggcggggcagcgctggcaacgcctgcttggcgaatacccatccggagtctga

SEQ ID NO: 350255 - DNA, 774 bp, Pseudomonas aeruginosa
atgcaattagcaggcaggaatgcgatcgtcaccggcggtgcccgtggcataggcgccagcgtggtgcgtgcctatgtcgccgagggtgcgcgggtggtgtcactggatgtcctggacgagcagggccggaccctggtcgcggagctggagaccagccatcccggccaggccctgttccaccattgcgatatcgccgacagggatcaggtggatgaagccttccgcctggccgtggactggctgggcgggctggatatcctggccaatgtcgcggcggtggaacgcaccgcgcctgccgagcacatcgagcagccggactgggacctgattttcgacgtcaacgtgcgcggcaccctgcacaccaatcaggcggccttccctcatctgagggatagaggcggtcgcatcatcaacttcggctccgccgccggcctgggcggcatgcccggggctgcccactacgccgcgtccaagggcgcggtactggcctggacccgcaccctggcccaggagtgggcgcgccatcgcatcacggtcaacgccgtggcaccgatgatctggaccccgatgtacgacgcccaccgggccaagatgagcgtcgacgagctggccgcccatgatcagatgctcagtcgcatcattcccttgggcggaaaattgggcgacgccgaacaggacctggcaccggtgatggtctttctcgcaggggagggctcacgtttcatcacggggcaaaccctctgtgtggacggcggcactgtgccggttcgctga

SEQ ID NO: 350256 - DNA, 747 bp, Pseudomonas aeruginosa
atgagcaggaacaatccgttcgatctcagtggcaaggtcatcctggtcaccgggggcagccgtgggctgggttaccagatggtcaaggccttcgccgagcagggcgccgacctgatcatcgccagccgcaagctggaggcctgcgaagccgtggccggggaagtgcgcgccctgggccgacgcgccctggcggtggcctgccatgtcggcaagtgggacgaggtggagcgtctggtggaggtggcctacaccgagttcggacgcatcgacgtgctggtgaacaacgctggcatgtcgccagcggtgcccagccacgaggtgagcgaggaactgttcgacaaggtgcttggcctcaacttcaaggggccgttccgccttggcgcgctggttgcccagcgcatggcggcgggcgcgggtggctcgatcatcaacgtcagcagcaccggtggcatccgcccgtcgccgcagatcatcccctatgccggggccaaggcggctctcaacgccatgagcgtcggtctgtccctggagtacgggccgaaggtacgggtcaacaccatctccgccgggcctttccttaccgacattgccaaggcctggactccagaaatgcgcgagacctgcggcaatgccctgggccgccccgggcgcccggaggaaatcgtcaccaccgcgctgtacctggccagcccctgctccagttacaccacgggcgcgctgatcaaggtggatggcggcctgccatag

SEQ ID NO: 350257 - DNA, 1302 bp, Pseudomonas aeruginosa
  misc_feature (595)..(595): n is a, c, g, or t
atgtgggacttttccaccgaacccgaatttcaagccaggttggactggatcgaccgtttcctgcgtgaggaggtggagccgctggacgtgctctatccctcggtcagcgtggtctacgacacccgccacgccaaatctcgcgcgatcctcaagcccttgcaggacaaggtgcgcgagcagaagctctgggcctgccacctcgacccgcacctgggcggtgaaggctatggtcagctcaagctggcactgatgaacgagcgcctggggcgttcgctgtgggcgcccacagtgttcggcactgccgccccggataccggcaacgccgagatcctcgccatgttcggcagcgaggcgcagaaggcgcgctacctgcaaccgctgctggacggcgacatcgtgtcctgcttctccatgaccgaaccccagggcggtgccgatccgcgggtgttcaccaccacggcggtgcgcgatggcgagcactgggtgatcagcggcgagaagtggtactcctccaacgcccgctacgccgagttcatcctggtgctggcggtgaccgacccggacgcgccgatccagaagcgtatgtcgatgttcntcgtgccacgcgagacgccggggctggagatcatccgcaacgtgccgcacatgggcgagcgcatcgagcaggacgaggccaccgaaggctatctgcgctacaacggggtacgtgtgccgctggaccatctgctcggtgacgtcggcggcggtttcgccgtggcccaggcgcgcctcggcggtggacgcatccaccatgccatgcgcacggtcggccagtgccagcgtgctcttgacatgatgtgcgagcgcgccctgagccggcatacccagggcacctcgctggcggaaaaaggcacggtgcaggcgatgctagccgatacacagatcgagctggaacagttccgcctgctggtgctgaagaccgcctggatcatcgataacagccacggcgatccgcgccaggcgcgggcgcatatcgccatggtcaaggtggcgatggcgaagatctattacgagatcgtgcgccgcgccatccacctgcacggctccctcggcgccaccttcgagacgccgctggcctacatgtggaacaacgtgccgaccatgggcctggccgacgggccgaccgaggtccaccagatcaccgtggcccgcgagctgctgcgcaagtacaagcccgccgagggcctgtttcccagcgagcacctgccgccgaagatcgccgccgcgcgtgcacgctatgccgacatcctgggagcgcagtga

SEQ ID NO: 350258 - DNA, 1065 bp, Pseudomonas aeruginosa
atgaccacgacacttcccgatttcgatggcctgctcgactggacggccctggctgcctggatcgactccgctggcctgcctggcaatggcccggtcactgaggtcagccagctcagcggtggttcgcagaacaatctgtttctcatgcggcgcggcgatgcgcgcttcgtgttgcgtcgtccgccgcgccacctgcgcagcaacagcaacgagaccatggctcgcgaggcccgggtgctggcggcgatcgccggcagtgccgtgcctcaccctcgcctgctggcggcctgcaccgatgcctcggtgatgggcgtcaacttcttcgtcatgcagcccctggaaggtttctcgcctgctggcccattgctggggaggtacgccacggacgccaactggcgtcggcgcatgggcgaggcgtttgtcagcgccgcggccgcccttggcggactggattatcaggcgcttggcctggaaggtttcggcaggccgcatgactggcatggtcgtcaggtggagcgttggcgctcgcaactggatggttaccgtgacacacctggctatggcgaggcttcgctgccccatgtggatgcggttggccgctggctgtccgacaacgttccgcaggatggccgcatcggtatcatccacggtgatttccagtggcccaatgtgatgttctccctgcaggcaccgcgcatttccgggctgatcgactgggagctctccaccctcggcgacccgctgctggatctggcctgggtactgacttcctggcgtgagccgggtgaccccgaaggtggcgttggtgctaagccagtggtcgagccctgggatggcttcatgagccgcgccgaactgattgccctctacggcgaactgagcgggcgcgacatgagtgccatgccgtggttcttcgtccttgcctgctacaagctggcctgtctgctggagggcacctacgcccgctcactgataggcaaggcgccgcaggagatgggcacctacctgcacgactacgccacctggctgatggccaaggcccgacaacttatcgcggcctcctga

SEQ ID NO: 350259 - DNA, 510 bp, Pseudomonas aeruginosa
gtgggcaagacgtccaatacaagtgatgcagtgacgttcgaccattcggttcacagcgagcagggtgcccgcctggccgagctggtcgatgaggtactgcgtctgcatggccgtgtgatgagcgcgaggaagcctgccgtgctgggcagttccgcccagatctttgtgctcgcctcggtggttctggcgcaggagccgccaaccgtggcgcgcattgcacgcagcctgggctacagccgtcaggcggtgcagcgggtggccgatgtgctggtggagggcggttatgtcctctacgcggacaacccgcatcacaagacctccaagcagttgctgcccaccgacaaggggaagcaggcctatgccgaggccaaccgggaaagcgcggagtggaccgagcgaacctcccgtggactggaggccggggagctggaacaggcattgagcgtattgaggcgaattcgccggaatctcgagcaggacaaacaactgtccgcgggagggccggcctga

SEQ ID NO: 350260 - DNA, 738 bp, Pseudomonas aeruginosa
atgaacaaggtgttggcggggaaggttgcagtggttgtcgggggaagcagcggcataggtctggcgaccgtggtcgagctgctgcgcgctggctgtacggtgcgtgccaccggcgtttcccaggccgagatagaggcgtgtcgagcggactcggacgctgccggtgcgttattcgatctgctcgatgttcgcgatggtgcggcggtgacgaactatttcgcgagcctcccgcgcctggatatcttggtcaattccgccggtatcggtcgaggagcggccgaattcgaagaggagggtttcctgcagaccctggagatcaacctcaacggcaccatgcgctgctgctatgccgcgcgagagctgctgacccaccagggtggctgcatcgtcaacctcggttcggtgatgagcttcttcggcagccccacggcgccggcctatgccgccagcaagggcggcgtggcccaactgacccgtagcctggcggtggcttggggcaaggatggcatccgcgtcaatgcggtggctccgggctggaccgatacgcctatgacccgtggtatccaggagcatgccaccgaacgcaacgcccgtgtcctggagcgcaccccgctgggtcgttgggcccggccggacgagatcgcctcctgcatcctgttcctggcgtcccctgcggcatccttcgtcaccggtactgtgttggcggccgatggtggatatatggccaacggcctttga

SEQ ID NO: 350261 - DNA, 1200 bp, Pseudomonas aeruginosa
atgcgcaacgtcaattatccgatctacgatgtcgaccggcacttctacgagccgccagaggccttcctgacccacctgcccaaggagtaccgcaaggaattccagtacgtgcagatcaacggccgcaccaaactggccgtcggcggggtgatcagcgactacattcccaacccgacgttcgatgtcgtggctgcgccaggtgcgcacgagggctggtaccgcggggaaaaccccgatggcctctccctgcgtgagttcggcggtgacccgataccttcggatccggccttcttcgacggtgccgcgcacctgaaggtgatggacgagcagaagatccacgccgccctgttcattcccacattggcctcggtgatcgaagaacgcctggccgacaagccggacgtgatcgccgccctgatgcactcggcaaaccgctggctggccgaagggtgcggcttcgcacgtgagaaccgcctgttcccggtgccgatgatcaacctgtacgacgtcgaccgtgccgtcgaagagctcgagttcgtcctgaagcacggcgcccgggtagtgggtatccgcccggccccggtcgccggaaccaagaacccgctggaaggccgcgcgccgggcatggccgagttcgaccccttctgggctcgcgtcaacgaggcgaagatcttcgtcatgctgcacgtctccgactccggctatgacaagatcaaccgctggtggaccgccggcggcaagggtgaattccgccccttcgagaaggatccgttcgccgagaccctcgactggatgggtcgcgccatttccgacaccctgacctcgctggtctgccacggcgtcttcgaccgcttcccggacgtgcgcgtagcctcgctggagaacggcagctcctggctggaaccgctgctggagcgcctggagatgaactacaagaagatgcccaaggccttcaagcaggatccggtagcgagcttcaagaagcacgtcttcatctcgcccttctacgaagatccggtactgcgcatctgcgagatcatgggtgacaaccgcgtgctgttcggcagcgactggccgcacccggaaggcctgagccatccgtgggacttcttcaaggacatcgaggatctcagcgatgcgcaggctgagcgcgtgatgtgccgcaacctcaagggtctgctggaaggcgtgcgcgactga

SEQ ID NO: 350262 - DNA, 2136 bp, Pseudomonas aeruginosa
atgaatcagttgggtggccatccgccgctatggccgatcctctgcgcgggtgcggaggatcattggccacaggccgcatctttgctcagcgcgttggggagtgcgggcattggcgcgtggtactgggaaatcgccacgggacgtttctactgcacttcgctggcactgcaattattcgggcttgacgaagaaccctccaggccaacccagtatctcgacctcgttgcgccagaagatcgcaacgaagtgcgtctcctattccacaatgctctcaatcacgccgcttcgcttcccatcacccgccaccgcatctattcgccagacggtgatctgcaatggctggaagtcagcggcaaccgtgagtacatcgatgaaaaacagtgcctggttggagtactccgcaacctcacggaccacgagcgacaggccgttgaggcactgctcgaagccggaagcaaatatgtcaaggccttccagaccagccccaacgccattctgattaccgaacgccacagcatgcgcatcatagatgccaacgatggtttctacagaatgacgggttatcacctcgaggaaattttcgggaaggtcaaccgggaagtcggccttgagccgacgcagccggaggaggcagaaacagcggcttatctgctgcagcgcgacggctttatacgccacctggaaacgagtggcaggcaccgcgatggtacgttgcgtcgagtcgaagtgacggccgagccgatcattgtgcaaaaccagaagtgcctgttgttcacgattcacgacattggcaacctgaagacagctcaagagtccatcgagcatctggcctatcacgattcgctgaccaacctgcccaatcgcgccctgctgatggatcgtctgatccagcagatcgccttgctccagcgccacgacctgcgtggtgccttgctgttcctcgatctggataattttaagcacatcaacgactcgcttggccacccggtcggcgacgtcgtgctgaagatggtcaccacccgcctggaggccagtgtgcgccgggaggacacggtggcgcgcctcggcggcgatgaattcgtggtgctgatctccggcctggagggcaagcgtgccgaagtcagccggcaggcccgccaggtggcagagaaactgcgtggtctattggccgagccgatgctgctggatggtcaccacctgcaggtaaccccgagcataggcatcgccctgctgcccgatcacggcgacaaccccgctgatctgctcaagcgcgccgacatcgccctttaccgggccaaggattccgggcgtaacactatccagatgttccacaagtccatgcaggacgccgccaacgagcgcctgagcctggaaaatgacctgcgcctggccctggagcgtggcgagttcgagctgtaccttcagccgcaggtggacgcccgcgacgaccgagtgacaggcgctgaggccctgttgcgctggaaccacccgagccttgggttgcagtcacctgcacggttcatcccgatgttggaagagagcggactgattctggaagtgggtgcctgggtactgagagagtcttgccgcgtcgccgcgcaactactggcggacggcttgatcgactgccgtgatttccagctttgcgtcaacatcagtccccggcagttccgccagaataatttcgtcaacctggtcgagtgctgtctgcagcaaaacggtctggccgccaatatgctcaagctggagatcaccgagaacatcgccatcgagaatcttgacgacaccatcggcaagatgcaccgcatgaagcagctcggcctgagtttcgccatggatgacttcggcaccggctacagttcgctgacttacctcaagcgtctacctgtggatatgctgaagatcgaccggtcgttcgtccgtgacgtaaccaatgaccccaacgatgcggagatcgttcgcgccatcgtcgccatggcacgcaacttcaacctgcagatgatcgccgaaggtgtcgagcggcatgagcaactggagttgctcatgcagcagggttgctatcagtaccagggctacctgttcagcaaacccttgccgttggcgcagttctgccagttgctcaaggacaatcgctga

SEQ ID NO: 350263 - DNA, 1272 bp, Pseudomonas aeruginosa
atggccggcatgacgccaccgggccatcgacccgacgccgaggacgcagcgaggagcccggcgctgcacgacacgcctgctgtcacggcgctgtccctgccgcctttgctgtttgccaacatggcctgcacggtggccgtggtctccttcgtatccctggccggaccgatttcgcgcctgctcggcctgcagccttggcaggcgggcttcgccgttaccctgggcggcatcctgtggatgttgctggcccgcttctggggcgcgatggctgaccgccacgggcgccggcataccttgctgctgggggcggcgggcgtgaccctggcctactggtgcatgtgcgcggtgatcgtattgtcgctgcgcctactgtctccggcgttgctggcgtttatcgggctggtgctcacccggggggcggtaggggccttctactcggcgattcccacttcggcccaggccctgatcgccgatcactatgctccggcagaacgtgctggcgccctggcggcgctgggagcctccggcgccttcggtatggtggccggtccggccctggctggtgtgctggcgcagtccagcctgaccctgccgctgtatgtcaccgcgctgttgccggccatcggtttcctggccctgtggtacgccctgccgcgccatgagcagccgcgccgtcgtaacgagacaccgctgcgcctggccgacccgcgcttgcgtcgggccatgtcggtcagcctggtggtggtgaccgccatcggtgccgcgcagatgaccgcgggtttctatgccctcgatcacctgcacctggagccggtggatgcggcccgtgctgccagcctggcgttgacgctgaccggtatcgcgatgatcctggcgcaactgctggtacggcgcctgggctggccggcgcagcggctcatccgcatcggtggcctggtcgcggcggcgggtttcttcatcaccgcgatgacgtcaacggtcacgctgctggccgtcagcttcttcatttccgctctgggcatgggctggctgttcccggccttcgcgaccctggcgacgaacgccgtggagccccacgagcagggtgcggcggcggggtcgatcggggtcatgcaggggttgggcatcgtgctcggtccgctggccgggacgctgttgcacagcgtcggtgcgacggtgccattctgggtgttggcggtattgttgacggtcacagccctctggccgtcaggggccggatcggcccttgaccccggcaagcactcgcactga

SEQ ID NO: 350264 - DNA, 2022 bp, Pseudomonas aeruginosa
atgaagtttctgctgagtcccgggatatcgctgatgaatcgcctgagtttcgcgatgaagttcagcctgatctgtatcctgttcttcattccgctgctgggcaccagctactacctggtgcgggatgttcatcagcaatggcgcgctgcgcaaaacctgctcaatggtctgcccctattgcaacgcgccttgacgctgcacgatcggctcgggcttttacaggatctgacgctgattcaagagcggctcagcccgtccgacagaaccagcgatagtgccgctaccatcagccgtgccgagcaggaagcgctggcgctggtcaggcagatggccggggacgatgcgttgctggtcgccggtttcgaggaaaagcgcggcgagatgcagctaggtatcgaacagctcattgccctttcgggggctgcgccgaagcgagaattggccggacagttggttctgcgtggtgaactgcttcagcaacatatcctggcccacctgggcctgagtcgggacgcacatccgctggtacggcaggtcggcgaattgctgggtgtcactgccccggagatcgtgcgcatgttccagggggctaggcgggagggggccgctgccctggggcagaagttcctgggaggcaatagcagcatcctgctggatcgtctggtggaggagatcgaacaggctggcggcagctatggactccagctcgacggggtgatggccgctgcccacggcgatgtcaagctgacacgactggccaagctcagtctggagagcctggatgaggcgcgcaggcaggtggatgaggaggtgctgagcgcggtggacctgacggccccctggatgccatttttcgaacgcatgagtgagctcatcgagcgacatcaacggttgaacgaacaggcactcgctgtgctcgggcaggaattgcaggcgcgggcagccgaggcgagccggcagatggtgctgctgatcacggccctggtcggcgtgtttctgctgattctctacctctatgcctcgttctacatgtccacccggcgcaccctcgggcgcctcggggaggccatgcagcgcgtggccgccggcgacatgaccgtcaacctcctggtggacagccgcgacgaactggcggacctggggcgggtattcaacggcaccgtcggacagatccaggagctgatccggcgggtcagcggggtggctgcccaggtcaacgatcagaccgggcaggtacagtcgatttccgcgcaaagctcccgcgccgccacggagcagcgcgcccagctcgaacaggtcgccacggcgatgaacgagctgtccgccacggcccaggaagtggcgcgtggtgcggtcgccgccgccgattgcgcgcgcagtgccaacgacgagacggtgcgcgggcgtgaccgggtgcgcgagcaggtatccggaatccagcgggtcgccaccgagatcgatcgttccatgctggtgatcaaccagttggccgctgacagcaatgccatcggccaggtgctggacgtgatcaagagcatcgccgagcagaccaacctgctggccctcaatgccgcgatcgaggcggcacgggcgggggagcaggggcgtggcttcgcggtggtggccgatgaggtgcggaccctggcgcgtcgtacccagcaatcgaccacggaaatcgagcagatgatcgccaacctgcgccagcgggtgggggaaacggtcgggagcatggccgagagtcaccgggtcgcgggtgctaccgccagcgaggcggatcatgtcgaggtggcgctggacaatatcctgcgcgccatcggcaccatcgtcgaccagagccagcagatcgccgcggcggcggagcagcagaccgccgtatccctggaaatcgacaagaacctagtggagatcaaccagatgggcgcgctgaccgccgagggcgccgaacgggccgagcaggccagccaggcgctgcatgggcaggtggataacctgcagcaggtcatcgggacgttccgcatctga

SEQ ID NO: 350265 - DNA, 1185 bp, Pseudomonas aeruginosa
atgagcgagcatgaagtggtgatcgtcagtggggttcgcacggccatcggcgatttcggcggcagcctgaaagatctgccacccacggagctgggcaccctggtgacgaaggaggccatgctccgggccggtgtatcgggcaccgaagtggatcacgtgatattcggcaatgtgatccacagcgaggctcgcgacatgtacctcagccgtgtagtggcgatacaggccggcatcgcccagcaggcaccggctctgacgctgaaccgcctgtgtggctcaggcctgcaggcgctcatcagcgccgcccagggcatcctgctgggcgacagcaaggtcgcggtggccggtggtgccgagagcatgagccgtgcgccttactccagcagcagcaaccgcttcggctcgcgcatgggggatgcgaagctcgccgacatgctcacaggcgccctcaccgaccccttccatggcgtacatatgggcatcactgccgagaacgtcgccaagagccatggcatctcccgcgaggaacaggacgccctggcgcttgagtcccatcgccgtgcggcacgtgccatcgagcaggggcacttccgcgagcagatcctgccgatcaccctcaaaggccgggtacaggtgcggttcgacaccgacgagcatgtacgccgcgacgccgcgccggaagacttctcccggctcaagcctgtgttcgaccgcgaagccggtagcgtcaccgccggcaacgcgtcgggcctgaacgacggcgcggctgccctggttctgatggagcgcaaaaccgccgagcaacgcggcctcaaacccatggcccggctgctgtcctatggccacgccggcgtcgacccgctgcacatgggcattggccccgtgccagcctcgcgcctggctctggcgcgtgccgggctcgaagtgagcgatctcgatgtaatcgaagccaacgaggccttcgccgcccaggcctgcgccgtcagccgtgaactgggcctggacccggccagggtcaaccccaatggctcgggcatttcccttggccacccgataggcgccaccggtgccatcatcgccatcaaggcgatctatgaactgcagcggacaggcggccgctatgccttggtgaccatgtgtatcggcggcggccagggtatcgccgttgtgctcgaacgcctctga

SEQ ID NO: 350266 - DNA, 1188 bp, Pseudomonas aeruginosa
atgagcactatcaactaccccatctacgactgcgaccagcattactacgaaccacccgaggccttcctgcgccacctgcccaaggagttccacaaggacttccagtacgtgcagatcaacggtcgtaccaagctggccgtcggcggtgtcatttccgactacatccccaatccgactttcaactatgtcgccgctgtcggctcccacgaaggctggtatcgcggcgacaacccagagggactatccctgcgcgagtacggcggcgaccctatcccgtcccatccgtctttccataatggcgccgaacacctgaaggtcatggacaaggaaggcatccacgcggccatcgtgctgccaaccctggcctcgatcatcgaggagcgcctggagcacaagccggaaaccatccaggcgctgttccactcgctcaaccagtgggtcgccgatgaatacggtttcggcaacggccgccagtttccggccggtgccatcaacctgtcggactgcgaaaccgcctgcaaggagctggacttcctgcttgccgccggtgctcgctgcgtactgatccgccccgctccggtggccggcatccgtggcagccgctcgcatggtttcaaggagttcgacccattctgggcgcgcgtcaacgagtcgaagatcttcgtcatccaccacgtctccgactccggatacaaccgtatctaccgctggtggacggccggtggccaaggcgaattccgccccttcgaaaaggatccgttcaacgagatgctcgactggatgggccgtcccatcgccgactcgctgtcggccctggtctgccatggtgtgttcgaccgcttccccaacgtgcgcgtagcggtgctggaaaatggctcggcctggctggagccgctgctcaagcgcttcgaacaggtctattcaaagatgcccaaatcgttcaagcgcgatccactggaaagcttccgcgaacacgtctacatcgcgccgttctacgaggacccggtggacaaggtgatcgagctggtgggtgccgatcgtgtgctgttcggcagcgactggccgcatccggaaggcctcagccatccgctggatttcttcaaggacatcgcgaacctgtcagacgccgacaccaagaagatcatgcacagcaatctcaagggcctgctcgaaggcgctcgcaactga

SEQ ID NO: 350267 - DNA, 1287 bp, Pseudomonas aeruginosa
atggacatgaacgatctcatcctgatcagcgtcgatgaccacgtcatcgagccgccaaacctgttcgacaagcacctgccggccagatacaaggacatcgcgccgcgcctggtgaccaacgacaagggcgccgacacctgggtctacgacggtcaggtgatccccaacttcggcctcaacgccgttgtagggcggccgccggaggagtacggcatggagccgaccgcttacagccagattcgccacggcactttcgacgtggccaagcgcgtcgaggatatgaatgccgatggcgtgctggctgcgatctgcttcccgaccttcccacacttcgccggcaaccgtctgatcgcctccagcgacaagcgcgcggcactggcgatcatccaggcctacaacgactggcacatcgaggactggtgcggcgcggcgcccggacgcttcatccctctgtccatcctgccgctgtgggacgtgcaggcctgcgtcaccgagctcaagcgcgtcgcagccaagggctgccgcacggtgaccttcccggacaatccggcggccgtaggcctgccaagcctccacttgggctactgggatccgctgtggcaggcggcggtcgaggaacgcatcgtcatcagcagccacatcggctccggcaaccaagcgccacactcgtcgatggactcgccgatcgacgcctggatcgtgaccatgcccatggccatctccaatgccgccgccgactggctgttctcaccggtgttcaagaaattccccgacctgcgtctgtccctggccgagggcgggatcggctggattccctacctgctggaacgcgcagacttcgtctacaagcaccaccatgcctggaccaacgccgacttcggcgaactgctgcccagcgagctgttcaagcgcaatgtgctgacctgcttcatcgatgaccagttcggcctgcacagcaccgacttcctgaacatggacatggtcgcctgggagtgcgactacccgcactcggactgtgtctggccgaaatcgccggaaaccgtgtggagcgcgatcaagcacctgcccaaggaactgatcgacaaggccacccacctcaacgcgatgcgcgaattccgcttcgaccccttcgccagcctcggccgcgacaactgcaccgtgggcgccctgcgggccaaggccacgcacgtcaacgtcacgccggtggccggcatgggcgggcacaacccgtccaaccacagcggccagccggtgacctcgggtgaagtggtgaagatgttcgcctga

SEQ ID NO: 350268 - DNA, 807 bp, Pseudomonas aeruginosa
  misc_feature (69)..(69): n is a, c, g, or t
atgcgcgttcgcagccccaccattgacttctccgacgtgcgcccgaactgggcgccgaatcgtgagttngcccagtactacaacgccgcctccacggtgccggcccacgtcgaacccttcctggtcaaggtcatgatgcgcgcccgcgacgaactggccaaacgccccggacagcagcgcctgctggaggacgtggatatattcatcaagcaggaggtgcagcactgcaagcgccatgtcgccttcaaccagcgcctgtacgacagcggctacgccggcatgcgcgatctggaggcaccctacgaggccgactaccggcgctggctggcagacaaaccgctgcgtttcctgctggcctactccgaaggcttcgaggccatgggctcgtccagcgccgaagtgctcttcaccgaactggacgactacctggagggcgccgacgaaagcgccgtgacgctatggaaatggcacctcgccgaggagttcgagcaccgcagcgtctgctatgacgtgtacaaggcactctacggccacggcctgcgcggctacctgtaccgcctgtatggcttcgtctacgcggtcggccatatcggcagccacgtcaagcgggtcaatgcctacctgctcgaacaggatcgtcacggcctgacggcgacggaacgcgacgcctcgctcgaacgccagcggcaggtcaagcgacgcataaccaaggccagcctgccgcgtctgctcaaggtgttctcgccgttctacgacccggcccgcaagcaggcgccgtccggtatggaacactacctgaatctctga

SEQ ID NO: 350269 - DNA, 1587 bp, Pseudomonas aeruginosa
atgaccgatagcactagctctctctgggcgcctttgcgcttccccacttttcgctggttgtggctgggtgccctggcgatgaacctggcgatctggatgcagaacgtcggggcggcctggctgatggtgtcgctgaccacttcgccgatgctggtggcgctggtgcagaccgccatcagcctgccggcttttttcttcggtctgccgggaggggtgttcgccgatatcttcaaccggcgcagctacctgctggtgacccaggtcggcatgctgctggcggcgctggctctggtgctggcctgtgtcagtgggctggtcggcccgatgctgttgctcgggctgaccttcgctttcggcatcggcttcgccctgcagggcccggcctggtacaccacccaggccgaatcggttccgcgcggcttcctggcttcggcgctggcgctgtcctcggtgtcctacagttcggccagggccattggcccggcgctggccggtggggtggtggctgtgtcgggtatcgtcagcgtattcgtcatctgcgccatactgctgcttggctcgctgctggtggtgctgcatatgcgtcgtacggagcatgcgcatgccttgcccgccgaaagcctgtggtccggccttcgtggtgcgttgcgctatgcccgtcactccgcagtgatgcgggcgcagtgcttgcgcacactggcgttcgtcacggcgggtagcggtttgtgggcgttgctggcggtggtggccagtgagtcggggggcgcaggcggctatggtctactgcttggcagcgtaggcgccggaaccatgttcggtgccctggtgctgccggtgctgcgatcgcgactggagatcaaccggatgctggcggtggcctgcctcgcctatgccttgggtgtactggtggtggcgcaactggagaacatctggatccagtgcggtgcgctgtttgtcgccgggatcggctggatgtgcgtgggcactaccaacctggtggcgatccagtccgcagtgccaccctggatacgcgcccgctccgtggccatctacatgctggtgttccagggttcgctggccatggggggggctgcttggggtctggtggctacacagatgggaacccgtgaggcactgctggtttcctcgatagccgtcgccatttcgttgctggtcatgtggcgccatcccacccggttgggcgaggaggccgaggtcacgccctcgaccagcgaggtgccggtgttctctttcgcggagctgcaaccccaggacggtcccgtagccatccagattgcctaccaagtccacgaagaggatcgccaggagttcctgcgtcgtatccatgcagtgggggtcaagcggcgccgggatggtgccggtttctggcgtctgtaccgcgaattggaacaacctgactggtatgtggagcgctttatagtcgactcctggtcggattacctgcgccagcagacccgcgccaccctggcggatcgtgaggccgaggcgcaggtgttggccctgcacaggggggaggagccgccgcgggtgtctcattacgtcaatgagcccttgccgcgttcatag

SEQ ID NO: 350270 - DNA, 369 bp, Pseudomonas aeruginosa
atgagcctatgccccgatctcgaattccaagggttcctcaaagaggggcgcttcatgctccagcgcagtcgctccagccagcgccatttcttctatccgcgagtgctggaacccggcaccggtgccaccgacctggaatgggtggaggcctcgggcctgggcacggtctatgcggtcaccgtggtacgccccaaaccgccagtcgagccctataccgtggtgctggtcgacctggacgaaggcccgcgcctgatgtcccgggtcgagggcctgccggccgaccaggtgcacatcggcttgcgcgtcaaggcacgcatctgcgcaggcccggaacagtccttcgtcgttttcgacccacacagcaactag

SEQ ID NO: 350271 - DNA, 780 bp, Pseudomonas aeruginosa
atggccaacaacaacccgatgtctcttgcgggacgcaccatcatcatcaccggcgccggccagggcatcggcctgggcatcgcccgactggtcatcgagctgggcggcaacgtcgcggccgtcgatctcaacgacgaggcgctacacggcgccgccgccgacctgggtgagcgctacctgccgctggtgggcggcgtttccgacgcggccttcgttgaacacgccgtggccaccgccgtggagcatttcggcgcggtgcatggcctggtcaacaacgccggtatcggccgcccggcaatgatcgagaagatgaccctggagcaatggcaactggtgctcgacgtgcacctaaccggctccttcctgttcacccaggccgtcggccgccacctgatcgagcgcagcaaggccggcgaccaggcacccggagccatcgtgttcatttcctcggatgccggtcgacgcggcagcctcgggcagatcaactattcggcggccaagtcgggcatgttcggcatggccatgaccgccgcccgcgaatgggccaagtacggcgtgcgcgccaacgccgtgtgtttcggcatggtggagaccgccatgaccgaaaaagtgcgtaccgacccgcgcttcctcgacacttacctgcagcagatcgccttgggccgcttcgccacgccggaggaagtctcggtgccggtatgtttcctcctctccgaaggcgcctcctacatcacgggccaggtgctgtcggtcaacggcggctacaccatcgcggtatga

SEQ ID NO: 350272 - DNA, 1242 bp, Pseudomonas aeruginosa
atgaccatgaacgaattgcatccagaaacactcggcggtatccgtgtcctcgacatgacccgggtgatagccggcccttacgccgggcagattcttgccgacctcggcgccgaggtgatcaaggtcgaacgccagggtgaaggcgacgacatccgccgcatcggccccccttggatcaagggcaccgaaggccagtcgcaccaggaatccacctacagccaggcggccaaccgcaacaaacgctcgatcaccgtggacttcgcccaggccgaaggcgccgggcttatccgccaactggtggccaactgcgacgtgctgctggagaactaccgcaccggcaccctggccaaatacggcctgggctacgacgatctgaagcgaatcaatccacggctgatctactgctcgatcaccggcttcggtcagaccggcccctacgccaaccgctccggctatgactacttggctcaggccatggccggggtgatgtcggtgaccggtcatcgcgacggagaacccggcgacgggccgatgcgcgtaggcatcccggtggcggatatctgcgccggcctgtacgccgcaatcggcgtgctcggtgcgctcaaccaccgccacgccagcggcgagggccagcacatcgacgtatcgttgttcgactcccaggtcgccaccctgctcaacaccttctccgcctggttcaacggcggccaggaactgggccgcaccggcaacgatcacccgagcgcctcgccctacggcgtctaccaggtggatgacggctacatcctgatcgccaccttcaacgaccgcgagttcatccgcctggccaaggccgtggggcgcgaggactgggtcgaggatccgctcttcgccaagaacggcgcacgggtagccaaccgcaaggaactctcgaaacagctcaccgaagccctgcgcggccgcagcaaggatcagtggatcgagcacctgaatgccaacaccgtgtcctgcgggccgatcaacggcatggccgacctggaacatgatccccatgtgatcgagcgcgaaatgattgtcacccagcagcatccgctgaacggcagcgtgcgcagtgcggccagccccatgcgtttctcggccacaccggtgcaatacaagctgccgccacccgccatcggcgaacacaccgacagcgtgctcggcgaatggctcggcctttctgccgcgcagatcgccgacctgcgccagcgcaacgtgatctga

SEQ ID NO: 350273 - DNA, 1158 bp, Pseudomonas aeruginosa
gtgaccagtgccttcaacttcaacccgctcgtgctgcccgccagcctcgagcccctgcgccaagaggttcgcgccttcctcgccgaagcctcgccggcatggtccggctggaaaatcggccactcctggaccggcttcgaccgcgagttcagccgtgcagtcggcaagcgtggctggatcggcatgacctggccgacagcctatggcggccatgaacgctccggcctggagcgctacgtgatggtcgaggaaatgctcgccgccggcgcgcccctgggtgcccactggttcggcgaccgccagagcgggccgctgctgctgcgcctgggcacggaggcgcaacgtcagcgcttcctgccactgatcgccaggggcgaggcatcattctgcatcggcctgagcgaaccggattccggctccgacctggcctcgctgcgctcgcgcgccacccgtgtcgaaggtggctggcgcctcaatgggcgtaaggtctggaccaccaatgcgcacctgtgcgacttcatgatcggcttgtttcgcacgggtggctcagccgacgagaaacacaagggcctgtcgcagttcctcatcgacatgcgctcatccggcatcgaagtgcgccccatccacgacctgaccggcgaggcccacttcaacgaggtgaccttcgatgacgtattcgtcgccgacgacatgatcgttggccgcgagggtgatggctgggcgcaggccagtggcgaactggccttcgagcgcagccagccggatcgctacatgagtgccttcccgctgctgccgctgaccattgacgccctgcgggcgaacggcagcgacgaccgcctggccgcccgccgcctcggcgaagccgtggccgagatcgccgtcctgcgggaaatgtcgctgtcgatcgtcgggcaactgcaggatggtcactcccccgccagggaagccgccctggtgaaagaccttggcaacatccacgagcagcgcatgccggatctggttcgcgagttgctggactgcccgtcgagtattgcctgcggcgaccagctcagcgagctgcaggcgttcctcgtgcagaacgccccctctttctccctgcgcggcggcacccgggaaatcctgcgcggcatcatcgccaagggacttggactgaaatga

SEQ ID NO: 350274 - DNA, 1056 bp, Pseudomonas aeruginosa
atgagtaacagtgaaatgaacatcagcgaaatgctcgccgaacaggtgcagcgcctgttcgccgaccgcatcaaccgcgaggcctgggtcgatgccgaggatggccagctgaaccagggcctctggcaggacatcgaggccttgggcatcaccctcgctctcggcagcgaggacgccggcggcgccggcctcagctgggccgagagcgagccgatgctgcgcctctgcggcacccacgccacgccgctgccggtcggtgaaaccagcattgccgcctgggcgctgtcccgtgcggggctggaggtaccgcaaggcatgctggccatctgcgacgaagtcttccagctggacgccctcggcaggctgcaaggccaggctgcccaggtgagctggctgccaatggccggccatgtgctgctcgccgcccagcgcgagggcctcatgcatctctgcctggtacgcagcgacgccgggcatcaacaggccatcgacacgctcgaccgcctgccctgcgcccgcttcgaactggaagacgccatccccctgcaaagcgccacggcgccgttcctcgacgagctgggtctgcgcccctatctcgccacgctgcgcggcatgcagatggcaggagctctaacccaggtgctcgatctctgtgtggaatacgccaacacccgcgtgcagttcggcaggcccatcggcaagttccaggcgatccagcaaatggtcgccgaacttgcctcccagaccgccgccgcccaggtcgccggcctctatgccgcccgccaggtggatgccggcaacgccagctacggcgccgctgtggccaagagcctggtcggccgcgccgctacccgcgcggccgccatcgctcaccaggtgttcggcgccatcggcgtaaccgacgagcacagcctgcactactacacccgccgtctctggcaatggcgggccgaggccggcagcgagcattggtggtcggagcggattgggcggcaggtgctggcacaggatggcacccagctatggcagcgactgaccacacctgtcagcgcatga

SEQ ID NO: 350275 - DNA, 372 bp, Pseudomonas aeruginosa
atggcgggcctacaacctggcatggcgcgcatccgtgtcaagaatctgagtttgcgcacccatatcggcatcaaggaagaggagattctcaataagcaggatgtgctgattaacctgactatcctttatcccgccgctgaggcggtgcgggacaacgatatcgaacatgcattgaactatcgcaccatcaccaaggcgatcatcggccatgtcgagggcaatcgtttcgccttgctggagcgcctgactcaggagattctcgatttggcgatgcgggatccgcgtgtgcgttacgctgaagtggaggtggataaaccgcacgccctgcgcttcgccgagtcggtttcgataacgctggctggcaagcgctga

SEQ ID NO: 350276 - DNA, 558 bp, Pseudomonas aeruginosa
atgagcgaatccatgccccagcactaccgggagatattgctcggtatcggggagaaccccgctcgtgaaggcctgctggacacccccaagcgcgctgccaaggccatgcagtacctctgtcacggctaccggcagacgctggaggaagtcaccaacggcgcactgttcagctccgacaacagcgaaatggtgctggtgaagaacatcgagctgtactcgctgtgcgagcatcatatgctgccgttcatcggcaaggctcacgtcgcctacattcccaacggcaaggtgctcggcctgtccaaggtggcgcgcatcgtcgacatgttcgcccgccgcctgcagatccaggaaaatctcagccggcagatcgccgaagccatcgaacaggtcaccggcgccctcggcgtggcggtggtgatcgaggcgcagcacatgtgcatgatgatgcgcggtgtggagaagcagaactcgtccatggtcacctcggtgatgctcggtgagttccgcaacaacccggcaacccgcagcgagttcctccaactgatcggacgaaagtag

SEQ ID NO: 350277 - DNA, 1188 bp, Pseudomonas aeruginosa
atgagcaacaaggtactggtcgccggtgtggggatggtcaagttcaccaagcccggcaagagcgagatgtatgacgtgatgggtggcgatgccgccgccctggcgctgaaggacgccggcatcgactattccgaagtgcagcaggccttcgccggcttcgttgccggggacacctgttccgggcagaccgcgttgtaccgtgtcggcatcaccggcattccggtaatcaacgtcaacaatgcctgtgccagtggatcttctgccttgttcctagcgcgtcaggctgtggccagcggtgtggtcgacgtggccctggcggtcggcttcgagcagatgaacccgggggccatgtccaccggtgacgcggcgctgcgcacaccgatcacggtgaagatcgacgaggcggtgcgcaagatccgtggctgggacgacaacgccccgagcgggccgcagtacttcggcggtgcgggtgccgaatacctggaaaagtacaacgtttccgccgatctgttcggccgcgtttcggtcaaggcgcgcagccatgcgctgcgcaacccttatgcactgttcaccgagccgctgaccctggagcaggtgatgacctcgccgcagatcttcggcccggtcacgcgcctaatgtgctgcccgccaacctgtggcggggcagctgtggtggtggtttccgaggcgtatgcgcgcaagcatggcctgcgcaactgcgtggaaatcgccggcatgagcctaaccaccgacacggccgatagcttcgattccggcagcatgctcaacgtggtcggcgcgggcatgacccgtcgcgcggcggcccaggcctacgagcaggccggcgtgggggcggaggacatcgatgtactcgagttgcacgactgtttctcgcccaacgaggtcatcacctatgaggcgctcggcgtgtgcgaggagggtggtgccgagaaattcgttctcgacggacagaatacctatggcggtcgtgtggtcaccaacccgtccggcggcctgttgtccaagggccatcccctgggcgctaccggcctggcgcagattaccgagctgacctggcacctgcgaggccaggctggtgatcgccaggtggagaatgcccgcgtcgccctgcagcacaacatcggcctggggggcgccggggtagtcaccatcctcaagcgcatctga

SEQ ID NO: 350278 - DNA, 864 bp, Pseudomonas aeruginosa
atggctctacttgaaggaaaagtcgcgatcatcactggtgcagggcgtggcctgggtgcctcttatgcacagctcctggcggctgagggcgcggccgtggtggtcaacgacctggggcgtgacgagagcggcggctataccgccgaggcggtggtcgcagccgtgcgcgccgccggtggccgcgccgtggcgcatacccgggacatctccacggtggagggtggccagtcgctgttgaccaccgccctggatgcgttcggtcgtgccgatatcctgatcaacaatgccggcatcctgcgcgacaagtcgttcctcaaactggccgaggaagactgggacgcggtgctcaaggtcaacctgaagagtatgtacgccgtcacccagccggtcttcgcctggatgaaggaaaacggcggtggggtgatcgtcaataccgcctccacttcggggttggtggggaacttcggccagagcaactatgcggcggccaagtgcggtgcctgggggttgtccaacgtgctggccatcgagggggccaagttcggtatccgcgtctggaccctggcgccggctgccatttccgccctcaccgcgccgttgatggacgaggcgaccaaggccgagatggcaccccagttcgtggcccaggtggtgctgtacatggtcagcgaactgtccggccagcgcaccggccattgcctgttcgcttccgggcagagtgtgcgcgagctgaagctggtatcggccgagggcattcccggtggtggtaaggatgcggcctttgatgcccgcagcctggcggcggccgagagcaaggtgttccgccccgaggcagcgttgaccatcatggacttcgccaagtaa

SEQ ID NO: 350279 - DNA, 870 bp, Pseudomonas aeruginosa
gtgcctctcgactaccaacgcatcaagaactggcccatcggcgaaggccggcagagctacagcactcgcgacaccatcctctatgccctgggcgtaggcgccgcgaccagcaacccgctgcctgccgaagacctgcaattcgtctacgagaaaggcctcaaggccctgccgaccatggccaccatcatggccagtggcgagttctggatggccgatccgcaagccggcatcgacctgagcaaggtgttgcacggcgagcagttcctgcgcatccacaagcccctgccagcacagggcaccctgatcggccgtgacagcgtcgacgagatctacgacaagggcgcggacaagggtgcggtgatgtacatgtcgcgccgtatctacgatgccaacaccgaagaactgttggccacgtccagctggtccaccttcatgcgcggcaatggcggcttcggcggcaccgccgaaggccagcccagaccccatgcgctgccggaagaccgccccttcgacctcagcatcgagctgcccagtcgtccggagcaggcgaccatctaccgcctctccggcgatctcaaccctctgcacatcgacccggccttcgccgcccgggcggggttcgacaaaccgattctgcacggcatgagcagctacggcatggcaggtcgggcgctggtcaaactgttgtgcgacaaccagcctgaacgcctgcaggtgctcaacctgcgcttcgccgcacccatgtacccgggcgaaacgctcaagctcgaagtgtggctggaaggcccgggcaaagccggtttccgggcgcgcgtggtagagcgcgacctgatcattctcaacaatggctatgtggaattcgctgcctag

SEQ ID NO: 350280 - DNA, 801 bp, Pseudomonas aeruginosa
atgaactactcggaaatcacttacgaagtcctcggcccggtagccaggatctgccacaaccgcccagcccaggccaacgcggaaaccgagaacctgctggccgagcttgaccacgccctggatcgcgccaagcgcgacgacgccatccgcgtgctgatcatcggcgccaacggcaagcatttctccgcgggccacgacctgatggacggcatggaaaagcgcggcgactactcgcccgaacaacactggctgtgggaaagcgagcactacctgggcaacgccctgcgcatctgggacttccccaaaccgaccatcgcccaggtacagggtgcctgcatcgccggcggcttcatggtcgccaacatgtgcgacatgctggtcgccgccgatgacgcttttttcagcgacccggtaggtcacagcctggccgccgcctcggtggaagctttggtacacccctgggtgatgggtacgcgcaaggccaaggagtttctcttcacaggccagcgcctgccagccgccgaagccaaggagtggggcatggtcaatcatgtggttccccgcgccgaactggagcagttcaccctggatctggccaatcgcatcgcggcagccccgcccatcggcattcgcatgctcaagcgctcgctcaaccgcacggcggacatcatgggcttccgcaactcgatcatggcgcatttcgacacccacatcctcagcacctcgaccaaggagcacttcgaggtcgcggccgccggcatgcgggcatcgatggaagcagccaagaaagcccagtcctga

SEQ ID NO: 350281 - DNA, 849 bp, Pseudomonas aeruginosa
gtgtccctcttctatcaaacacttatcgactggcccttccccgccgtgacccgccgttacggtcaggaagactgcatccgttttgctcgcggcttcggcgcgggcgcatcgaaggaatgggccacagccgaccgcccctacctcgaacccggcccggagctgcaggtattgccgatgtccgcggtagccctggccgatggcgagttctggcagaaggatccacgcaccggtatcgcctggcaacagatcgtccacacccaggaaaccctgcgcgtgcatcgcccactggccagcgaaggtgaactggtggtcacccagacgatcgacgaggtctttgatcgcggcaccgagagaggcgccgtcatgctgcagacgctgacactcagcgaaccggccggcgaaaccgtagccaccatagaagtcaccaccgtcctgcgcggtaacggtggatttggcgggaagccgcaagatacaccgcgccccatgccattgccggagcgccccgcggatcaggtattggaaattctcacgccaagggaagcggatacacccttccgcctctccgcggatatcgccatcgcggcgcaaacccaaggcacgacccaggcgatgattcgtggcgtcggctgtttcggcctagccggtcgcggtgtactgcagatggcctgcgacaatgacgccacgcgcctgcgcagcctgtcggtgcgctatgccggcccgatgtacagcggcgagaccatgcgcatcgagctatggcggatcgaaccaggcctcgcgttgttccgcatgcatgcggttgagcgcgacaagccggtactcagccatggcctcatcgagttcgaagcctga

SEQ ID NO: 350282 - DNA, 729 bp, Pseudomonas aeruginosa
atggcgtatgaaatcagcatgaacaagcaggggcaggtgctgggccgtaagggccaggaaacacgccagcgcttgatggccgctactcggcgcctgcttttcacccatccattggtggacatcacggccgttgccatctccaaggctgcaggtacgtcctctgccagcttctacatgtacttcgatgatgttcaggatgtgctctattcgctggccctggaggccggtgaagatatggccaatgtatcgaagctgcttgaggagccttggcctgtcgagcgattcgaggaggaggccctgcgcttgattgaagcgttgaacggggtctggagtcgtcatcgagaagtgctgcgctaccgcaacctcgaggctgatcggggggatccgcgttttgaggaactgcggatgaacacctatattccgttcatcgagcgttttgccaagctgattcttgccgtcaatccggcagttggcagccgaaagaaaagtgatgcttatgccgaagccactgtgctgcaggcggcgatggagcgcttggcttcgactgacccggtggtgatggagcgcgggctgggttccaagcgaatcaacgcggccattgcgcgcatcgtggtgcagaccttgcgctccggcatgcctgatgaggctgctggcaccgccccgactcctcgtgcccgcaagccgcgcgtcaccagggcctcggctgcgaaagcgacgaccgagggctga

SEQ ID NO: 350283 - DNA, 903 bp, Pseudomonas aeruginosa
atgccgaacatggttgcagaaaaagtcgtagtcattaccggggccgggagcggtataggccgggagttcgccctggccttcgcggcacagggcgcacgtgtcgtggtcaacgacctgggccgaaccgagtcggggagtagcgcagccgaggtggtggccgaggagattcgcgcagcgggcggcgaggccgtggcgagtaccgacagtgtctccgagtgggtatccgcgcagcgcatcgtgcaaaccgccatggatcacttcggcaaagtggattgcgtggtcaacaatgccggcatcgtccgcgaccgcttcttcttcaagatgagcctcgaagaatggcaagccgtgatcgacgtccatctcaatggctccttttatgtcgctcgtgccgcggctccgtacttcaaggcccagaacagcggcgcctatatccacatgacctccaccagtgggctgatcggcaaccctgggcaggccaactactcggcagccaagctgggccttgtgggcctgtcgaagagcattgccctcgatatggcgcgctacaacgtgcgctccaactgcatcgctccctttgcctggaccgccatgaccgcctcggttcccaccgacgatccggaaaccgccgcgcgcatggagaaactcaagaccatggagccccgcaagatcgcgcccttggcggtttacctggccagcgatgcaggcgccggcgtatccgggcaggtcttcggcgtgcgagccaacgagatctacctctattcccagccccgcgtgctccgctcggtacatcgtagcgatggctggacgccggaaagcatcgccgaacacgccatccccgcgatgaaaaattccttttacgagaacattccctcgccccagctcaccacctgggatccgatctga

SEQ ID NO: 350284 - DNA, 477 bp, Pseudomonas aeruginosa
atgagcgagatcgaaaccatcggcactggcttcacctgggacgaactgccagtaggccgcaggttcaagacctacggccgcaccatcaccgaagcggacatcgtcaacttcatttccgccaccggcatgctggaagtgctgttcaccaaccaggagttcctgcgcgacgcgggcttcgacggccggctggtgcccggcggccaggtcttctgcatggccgagggcctgctgttccagacggccctgcagggcgtgggggtggccttcctgaacatggagctggacatcaagggcccgaccttcgccggtgacaccctgcatgtcgaggtggaggtaatcgagtcccgcccgagcaagggcaagcccggcatgggcctggtacgcacccgtaaccaggtgatcaaacaggatggcagcgtggtcatggtgtataccccgctgcgcctggtgaaaggccgcgagaacctgcaggcctga

SEQ ID NO: 350285 - DNA, 1020 bp, Pseudomonas aeruginosa
  misc_feature (764)..(764): n is a, c, g, or t
atgaaacaagtccgtttgtacggcccgcaggatctgcgcatcgacgacgtaccgatgcctcaggccggttcacaggacgtggtggtcaaggtcgctgtgttcggcatctgcggcagcgacctcaacttcgccaggaatggctacatcggcagcccgagtccgcaaccgatgcccctcgggcatgaactggcaggcaccgtataccaggtgggtgaggcggtgcgggacatcgcgatcggccagcgcgtcgtggttcacccgatgaaggggagcaatcgcattggcactggcgaccccgaacatggcggctttgccgaattcctgctggtacgcgatgcggttctgggcgaatcgatcttccccattcccgacagcctggcgttcgagcgcgccgtcctgaccgagcccgtcgcagtcggcgttcacggtctgaacctgtgccaggccgaacctggcgaccgggtcgtcctgttcggtgccggccccatcggcctcggcgtcgttgccgccctcaaacatcgtggcgtcgagcgaatagccgtggtcgacattgtcgacgagcgactggaacgcgcccgacagctcggcgccgagcagaccatcaatccggcacgggaagcactggagaccgcgctgcagaagagcttcggcaccgtccccggcaagctcacgggacaacccctggtggactgctccctgtacatcgactgcgccggacaaggcgcactgctccagcagacggtcggcatggccaaggacatggnccgtatcctgatactggccacccacaaacagccggtagagctggacatggttcagatcctgatcaaggagctcgccattcacggctccctgtcctaccccaacgagttcccggaagtcctcgcgatgctgggtgacgagcgcctgacgctcgaaggcatgtgcagccacacgttcaagttcaaccgcttcgccgaagcctttgccatggcacaggatccgcaccagtccgccaaggtactggtgcatatcgactga

SEQ ID NO: 350286 - DNA, 168 bp, Pseudomonas aeruginosa
atgaagaagtggcaatgctttttctgcagtttcatttatgacgaggccctgggcctgcctgatgaaggcatcgcgcccggtacccgctgggaagatgttccggaggactggatctgccctgaatgcggggcaaccaaggaagacttcgccatgctggaaatagactga

SEQ ID NO: 350287 - DNA, 1263 bp, Pseudomonas aeruginosa
atgaaaacctcccacccacaggcctgcgccttgatcgtcggcggtggccacgccggtagcgaggctgccgtctcgttgcgccagaacggttttgaagggcgcatcctgatcgtcagcaatgaacccggtctgccttaccagcgcccaccgttgtccaaggcgttcctagacggaaccctcgccgcagaagccctgcccattcgcccggccgcagcctatgagaaagccgccatcgagatgttgaatggggtggaggtcagcagcctgaacctcgacgaacggtacgttcgccttgccgatggacgggagttgccctggaaccacctgatcctggccaccggcagccgggcacggcggctcgatatcaccggagcaggcgagcgccaagcggacaacctgcactacctgcgtagccaggcggacgccgagcgccttcgcgatcaactggtggagggccagcgcctggtgatcgtcggcggaggctacatcggcctggaggtcgctgccgccgcccgcaaaaacgggctgcaggtcacggtattggaggcccagactcgcgtgctggcacgcgttacggccgccgaagtatcgagcttctacgaacaggtacaccgtgccgccggcatcgaactgcatgtgaacgcccaactggagcagctctgcctcgacgcctcgggccggaaagtggagtccctggtcactatcgacggcacacgcattccgctcgacctcgtgctgatcggcgtaggtgccatagccaacaccgcattggccgaacaggctggccttgcggtggagaatggcatactggtggacgaccattcccgcaccagcgccaccgatgtctacgcaatcggcgactgcagcaatcatctcaatgagcactacagctgccgcatgcgcctggagtccatccccaacgccattgaacaggcacgcgccgcagccgcggccattgtcggcaaacaggccccctaccgctcgctaccctggttctggtcggatcagtacgatctaaagctgcagattgccggcatcagccagggctacgaccaggtactgctgcgaggctctagggcgttgcgctctttcgtggccttctatgcgcgtgaaggacgcctgatcgcggccgactgcgtcaaccggcagcaggagttcatggccatcaagaaactcgtacagatgggattctccggcgcgctcgaaaccctgtccgacgagtcggtcagcctcaaggatctggcggccagcctcgcaagctga

SEQ ID NO: 350288 - DNA, 585 bp, Pseudomonas aeruginosa
atgtccaggatcgaagagatcagatccaacgccatccagttgatcgcactgcacggcttcggggctgtttcgctgcgacaactggcgaagagctgcggcctgcaggcgggctcactctatgcctactacaggagcaaggatgatctcctgctcgacctgatcaccagttatatggaggatctgctgcagtcctggcaagacttcgccagacagtcgcgcaacccgcggcattgtcttgaagcctttgtcgctcaccacctgtctttccagagcgagcgaaaggccgaaagcctgatcgccagcatggacttgcgcagcctcccggaagacagccgacaacatatcatcgcgatcaaggcctgctatgaacgggaactgaagaacctactcgcctcaggtgcagaccagggccttttcgcgcagaacaacttggcaagtacggctattctctccatgctgacgggactcggaatctggcaggaaggctgtgatggcgacccacaagcccttattcccctctgccaacggatcgccctgcagatagccggcgccgagactcgaactcacctaccggcattctcgtag

SEQ ID NO: 350289 - DNA, 873 bp, Pseudomonas aeruginosa
atgaccgctatgggttcaggaaaggttctgtgctgggttggtctgctggtggggttggtggtcgctacgggggccagtgctgttcccgatggttatcaagcggatgagggtgaggcgcgagagctgctggaaagcgccgtggcctactatcgagagcacagaacgcaagccttgcctgtattcagtcggcaaggggctttcgtgcgtggcagccactatgtctatgtgctggatgtgaacggcgtgatgttggccagcggcgggccttctgccagccttattggcagtaatctgctggcacagctgccatcggatctgaagaagtccttcactgaagcgctcgaggtgcaggaggggcaggggattcaagaggcggagtatcgctggagaaactggcaaaccggccgtgtcgaacgcaagcgggttctctttcagcgtgttggcgatgtgcttctgggggccggatatttcgtctcgagagcatcccaggccaatgccctggagttgctggaaaaggctgccacagcggtggcttccgagccgcaacagacctttacggcgatcaacactgagaatctggctttccttcaggatgatctgtacgtctttgtggtcgacatgagcacatcacgctatgtggctcatggctataaccggcgcgtggtcggtaccgactttcgccgggtgaaggatccccagggcaagccggttgggcaggcaatgctggacgcggcggagaaaaacagcaccggggagtacgactatctctgggagaatccactgagccgaaaaatcgagcgcaagcacgcctattttcggcgagtagggacgtacctggtatcggttggttactacgagaatgccggtaggtga

SEQ ID NO: 350290 - DNA, 1338 bp, Pseudomonas aeruginosa
atgaaactcgatgatctcattcttgtcagcgtcgacgaccatatcgtcgagccacctaccatgttcgagcagcacctcaccactgcccagaaagccttcgcccccaaggtactgaaagacaagaacggtgccgattactggctctttgaaggccgtcgcgccggcaatatcgggctcaacgccgtggtcggccgtttgcgcgaagaatatggctgcgagccgatttccttcgaccagatgcgcaagggcgcctgggatatccacgcccgtatcgacgacatgaacgccaacggtctgctcgcttcgctgaacttccccagcgtggtgaccttcgatggcagcctgttccaccagttcaacaataagcagaatgccctggctctgttgcaggcctacaacgactggcatatcgacgaatggtgcggcagttacccggggcgcaacatccccaacgccatagtgccctactgggacatcaacgccaccgttgcggagatcaaacgcgtcgtagccaagggctgccatgccatctccttctccgacaacccctcgctgaaaggccagccgagcatccatgacgcccactgggagccgctgtggaaggtctgtgcggaaaacaaggtggtgatcaacatccatatcggctccggcgcccaggcccctcacgcctcgatgaactcgccgatcgatgcctggatcatcaccatgccgatttccatcgtcaactcggcggccgactggctgcacctcaaggccctgcaccgctatccggacctgaagatatccctgtccgaaggcggtatcggctggattccctacttcctcgagcgcgccgacttcgtccacgagcaccacaaggcctggacctatgccgacttcggcaacaagaagcccagtgacgtgttccgcgagcacttccagacctgcttcatcgacgaccgcttcggcctgaagaatctcgatgagatcggcgaagacaacgtttcctatgaatgcgactacccgcattccgacactgtctggccggaatccgccgacatgctgctggagtccttgggcggcctgtcggacactgcgatcgacaagatcacccatggcaacgccctgcgcctgtacaacttcgacgccttcggcaagatgggcggtcgcgacaagtgcaccgtcggagcgctacgtgccttggctcagaacgtcgataccgaacccaagtcctatggcgggccggccccactggccgaaggtgaagtacgccgccgagtgacctctggcgacatcatcaagatgttcacagcagtgggcaaggcagacggccagatcatggccgaagaagaagcctga

SEQ ID NO: 350291 - DNA, 2601 bp, Pseudomonas aeruginosa
gtgctcgagtcctatatccaacacgtaaaagcacgcgagaaggaaggtcttcctcccctggccctgaccgcagagcaaaccgccggtctggtcgaattgctgaggaacccgcccgccttcgaagaacctttccttctcgacttgctgaccaactgcgtaccgcccggcgtcgacgaggctgcctacgtcaaggccggcttcctctcggccatcgccaagggcgaggacagctccccactgatcggcaagttccgagccatcgagctgctgggcaccatgcagggcggctacaacatcgccaccctggtcgaactgctggatcatgccgagctggcggaagccgccgccgaacagctcaagcacaccttactgatgttcgacgccttccacgacgtggccgaaaaagccagggccggcaatgccaacgccaagaccgtgctgcagtcctgggccgatggagaatggttccggatgcgtcccgccctggccgagaaaatcaccctggccgtattcaaggtgcctggtgaaaccaacaccgacgacctgtcccccgctcccgatgcctggtcgcgccccgacatcccgctgcacgccctggccatgctgaaaatggcccgcgacggcatcacccccgagcagcccggcgcggtcggcccgctcaagcagatcgaagaagtccgcgccaagggcttcccggtggcctacgtcggtgacgtggtcggtaccggttcctcgcgcaagtccgccaccaactcggtgctgtggttcttcggcgacgacatcccctatgtgccgaacaagcgcgctggcggcttctgcttcggcaccaagatcgccccgatcttctacaacaccatggaagacgctggcgccctaccgatcgaattcgactgcaccgacctggccatgggcgacgtcatcgacgtctacccattcaaaggcgaagtgcgccgccacggcagcgacgagctggtcaccaccttcaccctgaagaccgaagtgctgctcgacgaagttcgcgcaggcggccgtatcccgctgatcgtcggccgtggcctgaccgataaggcacgcgccgagctgggcctgggcccagccaacctgttcaagctgccggaagcccccgtcgacaccggcaagggctacaccctggcgcagaaaatggtcggcaaggcctgcggcgtcgaaggcgtacgtccgggcacctactgcgaaccgaagatgaccactgtcggctcccaggacaccactggcccgatgacccgtgacgagctgaaagacctggcgtgcctgggcttctccgccgacctggtgatgcagtccttctgccacaccgctgcctatccgaagccgatcgacgtcaccacccaccacaccctgccggatttcatccgcactcgtggcggcgtgtccctgcgtccgggcgacggcatcatccacagctggctgaaccgcatgctgctgccagataccgtcggcaccggtggcgactcgcacacccgcttcccgatcggtatttccttcccggccggctccggcctggtggccttcgccgccgccaccggcgtgatgccgctggacatgccggaatccgttctggttcgcttcaagggcaagatgcaaccgggtatcaccctgcgtgacctggtccatgccatcccctactacgccatccagaaaggcctgctgaccgtcgagaagaaaggcaagaagaacatcttctccggccgcatcctcgagatcgaaggtctggacaacctgaccgtcgagcaggcgttcgagctgtccgacgcctccgccgagcgttcggctgccggctgcaccatcaagctgccggaagcggccatcgccgagtacctgaagtccaacatcaccctgctgcgctggatgatcagcgaaggctacggcgatgcccgcaccctggagcgtcgtgctcaggcgatggaagcctggctggccaagccggacctgctgcaagccgacgtcgacgccgagtacgccgcgatcatcgagatcgacctggccgacgtcaaggagcccgtgctctgcgcgccgaacgacccggacgacgcccgtctgctgtccaccgtggccggcgacaagatcgacgaagtgttcatcggctcctgcatgaccaacatcggccacttccgcgctgccggcaagctgctggacaaggtcaagggcggcattccgacccgtctgtggctggctccgccgaccaagatggacgctcaccagctgaccgaggaaggctactacggcatctacggcaaggccggtgcgcgcatggaaatgccgggctgctcgctgtgcatgggtaaccaggcgcgtgtgcagaccggttcgaccgtggtctccacctcgacccgtaacttccccaaccgcctgggcgacgccaccaacgtctacctggcttcggccgagctggctgcggtcgcttcgatcatcggcaagctgccgaccgtcgaggagtacatgcagtacgcgaaggacatcgacagcatggctgccgacgtctaccgctacctgagcttcgaccagatcgccgacttccgcgaagccgcggcgaacgcccagatcccggtcgttcaagcatga

SEQ ID NO: 350292 - DNA, 849 bp, Pseudomonas aeruginosa
atgaacgaccatcccactcgtcaacgcgtctggctgattacgggaagctcacggggccttggcgcagaagtcgtggcggccgccctggccaatggagacgcgatagtcgccaccacccgggacgcacggtccgtgacccggcgcttcggctcctccgaatcactgctcgccctcgatctggacgtccgtgatgaagcggcggccaggcgggccgtacaggacggcatcgcgcgtttcggacgtatcgacgtcgtggtgaacaatgccggttacgggattctgggggctatcgaggaggccagcgcggaagaggtcagtgcaattttcgcgaccaatgtcttcggcctgctcaatgtcacacgcgccgtactccctcggttgcgagaacaacgctcgggccacatcatcaatatatcttcggtcgggggctaccaatcaggccccgggttcggcatctactgctcgaccaagttcgcggtggaagggctttcagaggcattgcacggagaactattgccgctgggcatcaaggttaccctgctagagcccggacatttccgcaccgactttctcgacacctcctcgatcatcccctcgcagagtctgatcgaagactatgcagggacggcggggcttgcccgagaagtgggcatcagccataaccataagcaatccggtgaccccaagaaactggctcaggctctactgcagttggtaactgccgataagccgccactacgtatccagttcggccgcgacgcactgcgtatcgtccaggccaagaacgcatttgtcgaaagagagcaactgcaatggcaggcgctggccacagccaccgactatctctga

SEQ ID NO: 350293 - DNA, 864 bp, Pseudomonas aeruginosa
atgatcatcaccggcagcatcgaagaattacgcaccattctgcacagtattcgggagcagaacaggcccatcggcctggttccaaccatgggtaacctacaccagggccatctttccctcctggaaatggctcgcagggaaagcggctttgtggtcaccagtatcttcgtcaacccacttcagttcggccccagggaggatctgcaggcctatccgagaacaccgcgagaggatcgggaaaccctggctcgagcgggatgtgacctgctattcatcccaggcaccgaagagatgtacccgaacgggctacaaagccactgcagcgtgtcggttcccgaggtatccaaagacctgtgcggcaatagccgtcctggacatttcgaaggagtggcaaccgtggtcagtaaactgttcaatatcgtacagcccaatgtcgcgatattcggtcagaaggactaccagcaactggccgtaatccgagccatggcccaggatctgaactttcccgtccgcatcctgggcgcaccgacagtccgagcagccgacggccttgcgctctcttcgcgcaatggctacctcagtccggccgagcgcaatatcgcccccctcttgtacgaaaacctcaagaggatggtggaaaccattaagagaggcgagaaggatctttccgccttgatccaaagcaccggtacagcactggagcaggccggtttcaacttggactacctggatatccgctcagcgcgaacgctgcaggcagccgctgccacagaccaagatctggtgattctggtagcagcgttcctcggcaagacacgcctgatcgataacctggaatgtcgccggcctgccccatccgaatga

SEQ ID NO: 350294 - DNA, 183 bp, Pseudomonas aeruginosa
atgaaatcactcttcaccaccgtagcatgcctgctcttcctgctggccgggtgctccgaattcaggctcggcgctaaggtgccaccgcaaaactcggcgaccgagagttactgcaatactccagcgcactactgcaaccctccgctgccacaggtcgtctccctgaataatatgttcaggtga

SEQ ID NO: 350295 - DNA, 282 bp, Pseudomonas aeruginosa
atgttcaacgaggtcgaagagctgatcgaagcgccggccgaagccgaagccgaagaagtcgttgcgccggtcaagcgccgtggcaaacgcaagccgctgccggccaacctgccgcgtatggaggtcatccatgagctgcccgagcatgagctgacctgcgcctgcggtgcctgcaagcaggtgatcggcgaggagaccagcgagcagctggagatcatcccgatgcaggtgcgggtcatccgccacatccgccaacaatcgagcatgaagtccgcgacctag

SEQ ID NO: 350296 - DNA, 285 bp, Pseudomonas aeruginosa
atgggcaccgcgcggatcgagaacaacagggacttcgccgccgccatcgccccggcggtgggcttcgacagcggcttgctgtggcgcaacccgttgggcaacctgaccctggaggccaagggcgactacttccacaacggcgaagtgcgccgcagcctgggcttcgtccagcaggtggagctgggccgcgacctcggcctgcgcctgagcgccgaacgcgagttcagccatgtcggcaagccgatcaacgaggtcaagctggagctgcgctggtactactactga

SEQ ID NO: 350297 - DNA, 399 bp, Pseudomonas aeruginosa
atggcggcagagctaactatcggcaagctggcaaatgcggctggcgtgaacatcgagacgatccggtactaccagaggcgaggcttgctggatgagccacccaagcctctgggcggtcatcgccgctatgcgccgcagcaagtcaagcgtctacgatttatccgccgcgcgcaggttctaggattcacactggacgagatcgccggtctcttgaggctcgaggaagcgtgcgcatgcgcagagacgctcgaccttgctgctcacaagctccaaatcattgatgccaagctcgcggacttgactgcgatgcgcaaggcgcttgctgacctgatgcgcgagtgcgaatcgtctggcatgaaaggggcatgcccgatcattcacacactggcagcagactga

SEQ ID NO: 350298 - DNA, 1206 bp, Pseudomonas aeruginosa
atgcaacttcgtgcagcagtctccggtctgcttctggccctcctggccggccaaactgtggcagcaagctttgactgctccaaggccagcagcttccccgaaacagaaatctgccgtgatggctacctgtccgggttggacgagtggttagctagatcctataagaccgccctggaggtaaatcctggccagtctgatgcggtccgtcagtcgcaacgtgaatggctcgcgacaaggaatgcgtgtactgaccagcagtgcctcgacagcactatcggcgcccgcatccaggcgcttgatcaatatgtgacggcggagaagggtaaggctgcatcggctttagcccatgcccagctgaacaagcatcaggaagcggaggccatcaggcagcggcaaactgcggagcgtctagggactgaagaagcagctcgacaggcgcagatcgagaatcagcgccagttggcaatcatcgaactccagcagcgtggtcaggccgcccaagcgctcgaaactcaacgtgctggagagcaccagcaggtaccagcccagatcccgcagtaccaaccccctcaaaaggttgcgccagcttcgagtgcaacctcgtcctcgccgtcataccgctcgccggagaaaactctgtggcagcagttcaaatctagcccggcctggaagtacttgctgctggcgggggcacttctgacagcttgggcgatgtggagacaccatcaggggcaaacaaccatctacaacgactacacggatgccgcgattacgaacctcttgccggctgcaggcgtggtactggccttcttgatgaactggctcgagctgcctcgtcaactcgcaatggtggcaggcgtcacgggtttcatgcttgcattgatgttcgcggtgtatgcgtcggtgcgaaccaatcagggatggatgagcatcagcttgtcgctcatcgccaagatgactctggtgtcagtattctatgcagtaataggcgcactggtggcatcgctattcttaagcaccaagtacaaaggggagtcccaggcgagagcgaatgcaaggaaccgacgggagaagaaagaaacgatggccatgatctccgtgctcactactgcctacaccttcctttcggcttggctgtgccgacggcaagagttcatctctgtttctgaatgcctagcttttgactcgaccgcaagcgttgcttaa

SEQ ID NO: 350299 - DNA, 744 bp, Pseudomonas aeruginosa
atgacactcatgaactgcgatccggccaccggcagttgccggattcccgacgctgctcccatcctcccccagggggcgaagcaggcccctggcggcgaagtcacgctcaggtacatcggcgaccccatgtgctcctggtgctggggtatttcctccacgctcgaagaactcgcacggtactgcgaacagaagggtatcggcttcaccctcaccatgggcggcctgcgcgcgggcgggggcgacgcatgggggccggagttccgggagtttctacgccgggaatggacccatatcgccaaggtcaccggtcaaccattcggtttttccctgctgtcggcaaagcatttcgactatgacacggagcctgcctgccgagccgttgtggtcgccgagcaaatgctcgaccagaagcggcctgtcgcctccgcgaccctggcatttttctctgccgtgcagcgcaagttctatgtcgaaggcgaggaccccaagaacgtggacttttatagatccatttgcgaagacgcttcgctatcgttcgaagacttccgcgcgcatttcgccactgccgctgcacggcaagccgtctatcggcaattcgcccagtgtggagagtggggcgtacgcgcattccccacccttctgcttgacctggctggtgatctgaagcaactgagttcaggcgccaccacagcggcaagcgtgatcgaacggatcgaacatctgctgggcgcgcgcaccgactga

SEQ ID NO: 350300 - DNA, 555 bp, Pseudomonas aeruginosa
atgtcaaaagcagtcgttgtttatttctccggatatggccataccaagcgcgtagcacaagcggcggcggaaggcgcacaggcttcgctgatcgagatcgatagcgagggcaacattcccgaggcagcctgggacctgctcgaccaggcgcaatccatcctcttcggcgcgcccacgtacatgggctcggtgccttggcaattcaagaagttcgcggacgccacttccaggaagtggtttgttcggcagtggcaggacaaggtcttcggcggcttcaccaacagcgcaagcctgaacggcgacaagcaggtttccctgatcctcatgcacacgctggcgtcccagcacggcggcatctgggtcagcctgggcctggctcccgccaacacctcggcctcgagccgcgcggatatcaacaacctcggcgcctcggtcggcgcgctggtgcagtcgccgtccgacgcggatgcccaggccattcccagcggcgatctcgagaccgtgaagctctacgccgctcgcgtcgccaggatcggacaacagctgcacgcctga

SEQ ID NO: 350301 - DNA, 234 bp, Pseudomonas aeruginosa
atgggaatcagaagtcttgtgcaaaatctccccaaagaccccgacaatcttggatgggttctgggctgggcagttgtccaaagctctccttggaggttcgtggatatttacgcctctgaagccactgccctagcggaagctgcgtcacgtggcgtcgggttcgcagtcgagtacggctcgcatcaggtgggcaccgataacttcgtcggcggcctcacccctccgacagattaa

SEQ ID NO: 350302 - DNA, 1287 bp, Pseudomonas aeruginosa
atggccgctccgaccgaggccgatctgcgggccatcttcgccctgcggccggccgccgccatcgagtacctggagcgcaagggcttcgcgatcacctggaactggcatgacgttgacgcggccacccacgcccgcgctctgaccgttgccagagcagcacgcctggacgtgttccaggacattcgcgacgccctggtcgagaacctggagcgcggcgaaacgctacgagatttcaagcgcaacctgcggccgaccctggaagcgaagggctggtggggtcgccaggtggtagtcgcgccggatggcggcgccgaggtcgcgcaactgggcagcccgcgccgcctggataccatctaccagaccaacatgcagtcggcctacatggcagggcgctacgcggccgcctacgaagccagggaaacccacccttactggatgtatgtggcggtgatggatggcgttacccggcccagccatgccgccctgcatgggaaagtgttcaggtggaacgatccgatctggcagcacatcaccccgcccaatggctacaactgccggtgccggatcgttgccttgacggaggccgctgtccgccgtcgaggcctgaccgtcgaatccagcctcggccggacgggccaggtcaccgtcgaaaccggggttgacaagcggacgggggagattcgggaacagaccctgaccaccctggagacgaccgaccgggccgggcggaagatccaattccgtcccgatgccggctttgacggcagtcccgtacagagtcacctgatggaccaggtgctgtacgacaaagccgagcgtaccctgggggcaccggctgctatcgacgaggtacggggtgtgctgctggacccggtccgccagcgcgcctgggaggccttcgtagatcgcgccgcgtccccccagggacagaccatgtccatcggcgtgctcgatccgaccgatgtcacctacgccgtcgcccagggcgcccaattgcgcgctggcgtggtcgccaccagcgataccgcgattcgtaacagcgccgtcgctcgcgagcagctcgccaacctgccgcagcgcttcgcccagcctgacctggtgctgtgggagcgtggcagcgagtcgttggtctacgtcgtccaggccgatggtgccgccctggctatccgtctgcgcggcgagatatacggacccggccaactggaaaatgtcggccaggttatggagatcaccatggatagcatccaggatggcctggcgacgggccgctacaggagagtgcgctaa

SEQ ID NO: 350303 - DNA, 468 bp, Pseudomonas aeruginosa
atgacaactaggatcgacgtcgagctggacgaccaggaggttcgccagcgcctggcggtgctgatgcgctcggtgaccgatacgctgccggtcatgcgtggcatcgctgccgagctgctcgcggaaactgagttcgcctttatggacgaggggccgggctggccgcagctcagccccgcgaccgtcgccgctcgcgaggctaaggggcgtggtccccacccgatcctccaggtcacaaacgccctggctcgctcggtcacgacctgggcggatcgcaacgaggcgggaatcgggtccaacctggtctatgcggccatccaccaatttggtggcgacgccggccggggtcaccaggtcgaagttcctgcacggcggtatctgccgttcgacgaaaacggccaactggcggccggcgctcggcagtccattctggaggtcgtcctaacagccttgagccgaaatcggtag

SEQ ID NO: 350304 - DNA, 168 bp, Pseudomonas aeruginosa
atgaatcacgccattgcccacctggacatcgccgcgcagatcgccgagcacaacgcgccaatcagcgaggctcagggtgaagccgctcaggcggagctacagcaccaggtcgccgccgactgccgcgaggcgctcgacgtcctggaacagttggagtcgcaactgtga

SEQ ID NO: 350305 - DNA, 888 bp, Pseudomonas aeruginosa
atgtccgtttcccttccggcgccagcgcgcgccgacgttcccttgcagatccgtgccctcgatgccgcgttcggcgccgaggtgctcggcctcgacctcgggttgcccctggccgccgaggacttccgccgtatccaccgggcgcacctggaccaccatgtgctggtgttccgcgagcagcgcatcaccccggcgcagcagatcgccttcagccggcgcttcggtgagttgcagatccatgtgctgaagcagttcctgctcccagggcatccggagatcctcatcgtttccaacatcgtcgagaacggccagcccgtcggtctcggcgatgccggcaagttctggcactccgacctttcctataaggagctgccgagcctcggctcgatgctgcatgcccaggagctgccggaggagggcggcgatactctgttcgccgacatgcacaaggcctgggacagcctgccggaggccctgcgcaaggcgatcgagggacgcacggcggcgcattcctataccgcccgctacagcgaaccgcgcttcgagggcaactggcggccgaccctgagcgccgcccagctcgccgaggtgcgcgaagtggtccatccgatcgtgcgcacccacccggaaagcgggcgcaaggcgctgttcgtcagcgaaggtttcaccacccgcatcctcggcctgccggccgacgagagcgcccaactgctcgccgagctgtatgcgcacagcgtgcgccccgagcacatctaccggcatcgctggcaggcgcatgacctggtgttctgggacaaccgctcgctgatccatctcgctggcggttgcccggcccacctgcggcgcaagctctaccgcaccaccatccagggcgacgcgccgttctga

SEQ ID NO: 350306 - DNA, 297 bp, Pseudomonas aeruginosa
gtgatcagtatggaaatgatgggcaaaatccgccggatgtatttccgcgacaagctgtcgctgcatgagatagccaagcgcaccgggttggcgcgcaacacgattcgcaagtgggtcagagcacctgaggccaagccgccggtctaccaacgccgcgcgatcttcaacaaactcagcccttttcacgccacgctggagcaggcgctaaaagccgattcgctgcggcccaagcaacagcggcgcagtgccaaggcgctgttggcgcaaatcaaagccgaaggttatgacggtggctag

SEQ ID NO: 350307 - DNA, 240 bp, Pseudomonas aeruginosa
atggcggatcggttgcacaaggtttgtgagcatttgggcgtcaccgtaggggcttatttgaagcaggccattggtgagtctgtttgccggcacgaaatgactctgttccccaagcagcagggacaagatatgcaggccatgctcgcgaagttttttgaagaggtcgccgaggcggccggggaggaattgaatgcccaagcagaacggcccaagcgtcagcgtgcggttaaggccaagtga

SEQ ID NO: 350308 - DNA, 768 bp, Pseudomonas aeruginosa
atgggtgtgtggatgccagccattgcgcagcccatgagtgacctccagggagcgcaccaggccctggaaccccagggactgcttgaacctggtaaaggggctcccgcggcggaaccgaaggaacgcgtcagcctggcgatcgagcagatcagtcagcgtgtcgaagctggtatgcgggaatgtgaacgtgaccatgatcgcctgcaggccgctgtcctctgcccactgcaccaggtgctcgagctcgaggcggcgacgttcctggatcacgctggcacacaccgggcaggcccacaccgagccacaggtggcgatcccacggtagtgcgcttggaaatactccggccggtagtgcagccccacgaagtgcgctgtacgcacatggcggcagtcgaatgtgcggtagacgttgcccggaaactgctcctcaggcttgaacacgttgacccgccgacccatccaggaacgggcctgagcgagggccgcataacgctctacgcgagcagcacgggcacccaaatcacggtcaggggggggagaggatttcgcagttataccaagaggagcccccgaggcccccctaaccccccctctagagtcgctctgagacgatgcttgacagcgcccctcaagggcatctgctggcccgtatacgggctcttcgagtttgctatgatgcacaaagtgtcctatgcggatgcaccctcaaaaagcccccgatcgccgccaagcctagggggctttttctttggtgcggttatcgcctaa

SEQ ID NO: 350309 - DNA, 225 bp, Pseudomonas aeruginosa
gtgcccttgtccccggcggtggcggtgccccagttcccggcggtggcggtgcccttgtccccggcggtggcggtgcccttgtccccggcggtggcggtgcccttgtccccggcggtggcggtgcccttgtccccggcggtggcggtgccccagtccccggcggtggcggtgcccttgtccccggcggtggcggtgccccagttcccggcggtggcggtgccatag

SEQ ID NO: 350310 - DNA, 333 bp, Pseudomonas aeruginosa
atgatctctaagggccgcgttcgcccctctatccatatgccgcgttgggcctcccgcatcctgctggagatcaccgctgttcgcgtcgagcgcctgcagggcggcgacggcgaaacagcgtttgagagtcgctacctggccgagggcgtcaaccggattcaccatggcgatggtgagtattactacagcgccttccgtaatgagcctcacccgaagaattggtgcgatccgttcgatgcctggcgcgagctttgggtgtcgatcaatggcattgagtcctgggaggccaatccgtgggtctgggtcgttgagttcaagcgggtgacgccgtga

SEQ ID NO: 350311 - DNA, 1746 bp, Pseudomonas aeruginosa
atgacgttcaaggatctccgcgatttcatcgcccagctggagcagcgcggtgcgttgaagcgcatccaggtgccgatttcccccgtgctcgagatgaccgaggtgtgcgaccgcacgttgcgcgccaagggcccggcattgctgttcgaaaagccgaccggcttcgacatgccggtactcggcaacctgttcggtacgccggagcgcgtggcgctgggcatgggcgccgaggacgtcggcgcgctgcgcgagatcggcaagttgctggcgcaactcaaggagcccgagccgccgaagggcctcaaggacgcctgggccaagctgccgatgtacaggaaggtcctgtccatggcgccgaaggtgctcaaggacgccccctgccaggaagtggtcgaggagggcgaggacgtcgacctcggccggctaccggtccagacctgctggccgggcgatgtcgggccgctgatcacctggggcctgaccgttacccgcgggccgaacaaggaacggcagaacctgggcatctaccgccagcaggtgatcggccgcaacaaggtgatcatgcgctggctcagccatcgcggcggcgcactggactaccgcgagtggtgccagaagcatccgggccagccctatccggtagccgtggcgctgggcgccgatccggcgaccatcctcggtgcggtgacgccggtgccggacaccctttccgaatacgctttcgccggcctgttgcgcgggcatcgtaccgagctggtcaagtgtcgcggtagcgacttgcaggtgccggccagcgccgagatcgtcctcgaaggggtgatccaccccggcgagatggccgacgaaggtccctatggcgatcacaccggctactacaacgaggtcgatcgcttcccggtgttcaccgtcgagcgcgtcacccgccggcagaaaccgatctaccacagcacctacaccgggcgtccgccggacgagccggcgatcctcggggtggcactgaacgaagtgttcgtgccgatcctgcagaagcagttcccggaaatcgtcgatttctacctgccgccggaaggttgctcctaccggatggcggtggtgaccatgaagaagcagtacccagggcacgccaagcgcgtgatgctcggggtctggtcgttcctgcggcagttcatgtacaccaagttcgtcatcgtcaccgacgatgacatcgatgcgcgcgactggaacgatgtgatctgggccatcaccacgcggatggaccccaagcgcgacacggtgatgatcgacaacacgcccatcgactacctcgacttcgcctcgccggtctccggcctcggctcgaagatggggcttgatgccacccacaagtggccgggcgagaccagccgcgaatgggggcgcgccatcgtcaaggacgaagcggtgacacggcgcatcgacgcgctctggtcgagcctcgggatcgacttatgcgtatcgtcctgcaaccgtccggcgcctgcctcgagctgctgccgggggaacgcatcctcgatggcgcccggcggcttggctacgactgtccgcagagctgccgcaacggcaactgccatatctgcgcggcgctgctggtggaggggcgggtacgccagaacggcgaggtacgcgatcatggcgaactcttcacctgcctcgccgagccgctggaagactgcgtgctgcattgggacggggtgctggcgccgggtgaactgcctctgcgcaagctga

SEQ ID NO: 350312 - DNA, 654 bp, Pseudomonas aeruginosa
atgaaactgaactacaccgccatcagcgccaacgcctgggctttctacgccgccgacgtgatggtccgtatcgacgccatgctcgcagaggaagagcgtcaaatgcgtgagtgcatgggaaaccgcgacaactacgaccttcagggcatcaaagacgtgatcgcctgcaacgagaaaaacggctggacccgtcgcgcaaacatcgcccgcgcaatcttggccgaacgtctggctgaaatcgaagtgcattcggtagatatcgcgttcgctaccgagtcggaagtctcagaaatccaccgggttgaggcacacaacgaaaaggcttcgaccatgcgccagttgatcgaactgcgcgataagtgggaaagcaaaggccgtgccgatttgcatgcgcaagctgtggagctgatcaataagtgggcagcggtcatgctggccgaacaggcgcaagccccggccgtcgaagtgccgtccatgcgccagctagccgacaaggctttgcatgaggccgggtttcgtgactacgcgctcaaagtgaaagagtgcaagggtgccagcttccccgcctatgacgtatgggtccgcccggcaggcgcggcacgcggccggctgttcatgaccctgatttaccccgacttctacgtaaccgcctaa

SEQ ID NO: 350313 - DNA, 555 bp, Pseudomonas aeruginosa
atggaacgcatagagctgaacatcggcggcaaagactttgttttcgccgtggacttcgaagacgactatgacgcgggcgccccgtgggaaatggcggacggtcacggccccgtttccaattggaccgagcgcgacaagcggccaggtgaactgctgctgaacagccggagccgaaacactttcacctcctgccgctattacgacttcgccgaagcctgccgcatcgcgttacgcgatggttgggacgcggccccgtataacgacggcacggaaactaagcgccagcaggccgcaagggccgcccgcgccgacttcgaatatctgcgcgcgtggtgcaatgacgaatggcgctatgtgggcgtagtggtcacgttgctggacccccaaggcgagaaaaccgaggtatcggatagcctctggtccgtggaaaccctcggtgatcatcaccacgaaacggcgcgccagttagtcgatgaactggcgcacggctacggcgtccgctggaccgaggccgaaaaaccgacctacgaatatcttgcacgggagggcgcgtaa

SEQ ID NO: 350314 - DNA, 1149 bp, Pseudomonas aeruginosa
atgactctctatatggggccgaacactggcctactgatcaatggcgcccccggtgaggggcattacagcgaactgatccgcatgttgcgctgggatgacttcctgcgccaaccggtcgtcaaggggcgcgtcgccacattaccgacctccggcctagcagagggcgacgtctatatcgtcaccggctcgggtgccagccagaaccgccttgccagatggtgggtggtaggcgccacggctggcacctgggagtacctcactccgaagctgggctggcgggttcaggttgcgaacgaggccacgcctgctggccaggtcaagacgtatgagttcggggccagtggctggacggaactggtgggcgggatggccgacgcgccgagcgacggaaaagcatatgcccgcgaaagcggcgcgtggacggagctgggatcggcagcgaaatcggcgctcaacgttctgccgttcatgaacctgatgcccgacatgggccgcttcgcgggaaccgcagccaaccctctggctacgatgttcacaacgtcatggactccaagcaccttcatcaatggctggaacggcgccaccctcgcagatgggggcaagtttgtgttcgacaacagcacgaacggcggggcggggccggcgctcaatgcgcgggtgcaggcgcttctcgcggcaatgggccggacgtggacgtcagtgtcccgatacggggtcgagttcttcaccacggtgctgacagcgggatcgcagacaactaccggctcggccggcgcggatggggttacgcggtatctgtgctgctccaacggcagtaagaccgttttcaacgcgggcgcgtgggcgacggtggtcatgtggttgcgggtcgaaagcggctcggctcatatctcgtcggcgccttatacgacccatcgcctttggatcaatggcgctgtcgctgctcctggcgtggtgctgcctgcgaaccaatgggtgcatctgcggttctcgatgcagtcatacaacggctatgacaacgcgtgtccgtacatctacgcatcctccggggctcagatcgcgtttgcatgcccggcgtggttcggtggcctcgtcgatccgggtatccacgttgcacccatcctgacaatcaacggagcaagcgcatga

SEQ ID NO: 350315 - DNA, 654 bp, Pseudomonas aeruginosa
atggctgcgaaggtgttcgcgatactgaatcagaagggcggcacgtcgaaaacgaccaccgccaccaacgtggccagctgcctggccgtaaagcatggattccgcgtgctgcttgtcgacctcgaccagcagggctcggctaccgactgggcggcgtccaggcccgaggccgaggaggatgccggggtgatcccgaccgtctcgatgggcaaggcgctggcgcgcgacctgcctcgcgtagcgggcggctatgactacgtcctggtcgacggcgtgccccagatcagcgagctgaccgccgctgccatccgggccgccgatgccgtgctgattcccgtgcagccgagccagtacgacatctgggcatgcggcgacctggtgcagctggtgaaagaccgccaggagatcgccgacgggcggccagtagcggcgatgatgatcgcccgcgctatcccgggcacggtgctcgagcgcgacgtgcgcagcaccctcgaggcctaccagctgcccatcctgcgcagccagacctgccagcggcagtcctacgtcgccggcatcgagcagggccgcagcgtcatggatctgcccgaggacaacaaggcccgcctcgagatcgaagcggtaaccgccgaactgctggagctgacccaatga

SEQ ID NO: 350316 - DNA, 312 bp, Pseudomonas aeruginosa
atgaccaccatcagcaagcccaccaccgcccgcccgagccgagccagccagctggcagaggagcacgtcgagaaggcccgccgcgcagtggtggccgacgagggcgagaagcagctcaaggtgctggccgcgcccaagtaccacaagggcatggccgagctgaaaaacatgacgaccgagggcgtgccggtgaagcacctgctgctcgaggcgatcgaggatctgttcgagaagtacgggcggggagacggccggttcaaggtcgacgacgtgcccgagctgcgtcgacgccttgaggcgctgatgaagtga

SEQ ID NO: 350317 - DNA, 150 bp, Pseudomonas aeruginosa
atgtccgcccgcgactataccaccgcggcaagcctgccgctctacctcgcgcgagatccgcgctatcgcgacctggtgcgccaattcgccgagcagcaatgcttgacggcctggcacggcatcctgcgcatgatcggggaggcagcctga

SEQ ID NO: 350318 - DNA, 291 bp, Pseudomonas aeruginosa
atgaataccgccctagagaccgcctcgagcaccatcgagccggaagacgtccaccgcgtccgcgcgatcgcctcggcgctgctcgagcaccagggctaccgggcgtgcgagctgctcgacctagtcatcaccgaggaggccccagcgagcaccatcacgccccgccgcgctcgagccgagagcgccgtgcgcctggccgcgaccatcgtcaactacctgcgcggcgagtggggcatcgagaccatcgaccacgagctcctgcaggcgctgcgccgggaggccggtctatga

SEQ ID NO: 350319 - DNA, 165 bp, Pseudomonas aeruginosa
atgagccgccacacctccagcccagccgagcagctgctgggcctgctgttcggtgccggtgccaccctggtggccggcctggcccttctctaccgcctcgccgccacctggctgcaggagatccacgacgagcaggagagcgccgccgatgacgaccgccgttga

SEQ ID NO: 350320 - DNA, 924 bp, Pseudomonas aeruginosa
atgacgaccgccgttgatctgttcgccggcctgggaggctggtctaccggcgcccgcatggctggcgtcgacgtgctatgggcggccaaccactggcaagccgccgtcgaatggcacagcgcaaaccacccggacacgctccacgtctgccaggatctccaccaggccgactggtcgcgcgtccctgcccatgacctgctgctcgcgtcgccgtgctgccagggccacagcaaagcccgcggcaagctgtccggcaatccgcagcacgacgcctccaggtctaccgcctgggcggtggtttcggccctcgagttccatcgcccagagggcgccctggtcgagaacgtgcgcgagttcttgagctgggccttgtacccagcttgggcgatggccatcgaggcgctcgggtactccatcgcaccccacctggtcgactgcgccgacctgggcgtgccacagaatcgcgagcggcttttcctggtactgaccaagagcaaggcgccgctgcgcctgcagcttccacgcctcgagcacacgcccgcctcgagctttatcgacttcgaggccggcacctggtcgcagatccacaagcccgggagatcgcccgccaccctgcagcgcgtagcgaacggccgccaggcgttcggcgagcgcttcgtcatgccctactacgggaaaggctcgggcactaccggccggagcctggcccgcccgatcggcaccctgaccacccgcgaccgctgggcagtcgtcgacggagaccgcatgcgcatgctgacggccgacgaggtgctgcttgggcagtcattccccaccggcaccaagcgcccgccacagcacgccctgaccgtccacctggccggcaatgcggtgccaccgctggccggcgccgcagtcatcaccgcgctgcaggctgccgcatga

SEQ ID NO: 350321 - DNA, 327 bp, Pseudomonas aeruginosa
atgatgctgaccaatctcccgaactgccctcgccccttctgcgacgggccaggcgcccacgaggaagacgagggcttccaccggatccactgcgctaagtgcggcttcttcctcagcgtgcggcgggatccgtcgccggccgagctcgaagacctggcgaagcgctggagcgaccgcgacagctacgcccccagcaccttgcccgccaagctgcgcgccatggccaatctgcgcagcttcgaggagcgctgggcgctgctcgatgcggcggcgatgctcgaggccaccaaccaccccgaaacgaaacaggaggcgccccatgcctga

SEQ ID NO: 350322 - DNA, 366 bp, Pseudomonas aeruginosa
atgaagaaaagcaccaagattgtgctcggccttggcgccgtggcgatcgccatcggcgcctacaaagacctctcgggccgagagaccaacgggctggccaatgcccacaaggcggccggctatgaccccgcgtgcgagaccctgcaggccgacggcgagacctgggcgctctgcgcgatcgggcaaggcgcgccggccgtatggctgcagcgcggcgaagcctgggcgaccggcaacggcgtggcccagggcgtggcccagcgcctcgaggcgaacggccctggcccctaccagcacctgccgcgcctgtacgtcgaccgcgagcgccccgtcatcatgccggcgctggtgcgcgccaggctgtag

SEQ ID NO: 350323 - DNA, 288 bp, Pseudomonas aeruginosa
atgtctatgtttaaccccccgcacccgggcgagactctgctcgaggacgtgctgccggcgctgaatatgaaggtcgccgagtttgcgcgtcgccttggctatggccgcgagcacctgtcgcgcgttgtgcacggccgggcgccgataagcccggacctcgcggtacgcctcgaacgggccggcattggcagcgcgcggacctggctggcggtgcaggctgactatgacctatggcaggctgaacgccgtgagcagccgccgattgagcgcttcgccaagatcgcctga

SEQ ID NO: 350324 - DNA, 279 bp, Pseudomonas aeruginosa
atgattaagagcttccagcacaagggccttcgggtcttctacgaaaccgggtcgaccaaaggcatccgggccgaccatgccaagcgcctggcccgcgtgctgccctttctggatcgcgccgccgctccggcagacgtggatttcccgggctggcggcttcatcagctgaaaggtgacatggccggctattggtcgatcaccatcagcggtaactggcgggttgtcttccgcttcgtcggcaccgacgtagagctggtcgattacctggactatcactga

SEQ ID NO: 350325 - DNA, 1020 bp, Pseudomonas aeruginosa
atgtcgatagggtacaccccggcggtggagatctacggcgccaactcggcgctgattaacgcgcgcctggtcgattgggagcacgtcgacgcggccggcatcgaatcggacaccctcaagctgacggtgaacatcgaaggcctcgaggggctgcccagcgtcgacggcaagatcggcctgcgcgtgggctacaaggaaacggggctggtcgacaagggcgagttcgtcgtcacgcgcaccacgccccagctgttcccggccctgctgctgatcgtggccaccgcggcgccgttcaaggtgaaggacgagaccggcttcaaggcccgccgctcggccagctacgccatgacgacgctcggccaggtcttccgccagctgaccaccaagcacggcttctcgccgcgcgtggcggctgagctggacgcgatcccgatcgttcacgtcgaccagtcgaacgaaacggacatgggttttctgacgcgcctcgcgcggcgttacgacgccgtgacgaagccggtcaacgacctgtatgtgctggcccgccgcggccaggtcaagtcgctgagcggaaagcccctgcccccggtcaccctttcggtgacgaaggacaaccggccgggcgatcgcgcgttcatcgcggctagcatcgaccaagacagccggatccgcttcaagggctgcaagaccacctggtgggacggcagcgccggcaaggaatgcgtggtggaggtgggcgaggcgcccttcaagacggtgcgccagcgctaccaggacgaagctgaggcgaaggccgcggctgagggcgagcaccgcaagacgaagcgcgaggcggcaaagctgcggatcgactgcccgggcaacccggcgttcggtgccgaggggctgctcgaactcgacgacagctggcccagcttcatgcgtggcacctggtcgatcgacaaggtgaccgccagcggatcccgccagcagagctaccgctgcactatcgaggcgtcctaccctgacgggaggcaggagtga

SEQ ID NO: 350326 - DNA, 228 bp, Pseudomonas aeruginosa
atgtcagaagagaagtcattcccgccgctgagctctactgagctcgagagcatcatcggaatgcagatccggcgcgacattgacgccgtgcgtgcgcgccagttctggcggcgggcgctggcaagtgtgccacccgaggagctggtcgagggcctggtaatggcgctttcgacggggcgctatcaggaggtgccgcgctgccgctgtggtggtggcctatgtcgatag

SEQ ID NO: 350327 - DNA, 213 bp, Pseudomonas aeruginosa
atgcgacgggttagaaccatcgccggagactcggcaaacgtgctgctttaccgggagctgggacgctccgacgacgaggccgaggaggccttctggctggtcaacccggggctagccgagcacggcgcggccctgccggccggcctctgggtcaacctgcccgagctggccagcaagccggcccaggccgcaccgcttaccgcgtgggattaa

SEQ ID NO: 350328 - DNA, 390 bp, Pseudomonas aeruginosa
atgcgacagcagatggcgctgggcgagttcgttttcgggctcgcgaccggcttcccgtatgagcgcctctcgcgcaagacaacgggcggctgggtagatctggacatcatcagcagcaagccgatgtcgcacaacaccggccagggcctggagtccctgcgcctgagcggcaaggcccagctgggcgccggcatggccaagctcgacgagctgcgcgccatggccgacgcccgccagccctacaccctggtcgacggaatcggccgggtgtggggccgctggcgaatcgacgccgtcaacgaagaccaggagcgggtgatcgacgacggcaccgccacgctgctgtcgtggacgctcgagctgcaggagttcgtcaatgcgacgggttag

SEQ ID NO: 350329 - DNA, 2568 bp, Pseudomonas aeruginosa
atggctgacaccaagtcgaagtactcgctgcggctggccgccgtggacgcctactcgaagacgttcggtgacttctcgaagaaagccgagcagctgcaggacgagatcaagggccagcgcgccgagctcgacaagctcaaccgcgcagcccgctcggccgacggctacaccaagctgaccgagaagctcgacaagaccaaggccgccctgcaggcggccaaggtcgagcaggccagcctggccaagacgcaccaggtcgccaccgccacggtggcacgcctcgagcaggaatatggccaggccgcggcaacgctcaaggcgctggaaggcaccgaggcggccagcacggcccaggtcaaggcggcccgcgtcgagcagaaccggctcggccgcgagctggccagcgccacggccgaggtcaaacgtctggataacgcccaggacaagaacaccgccagcctgcgcaccctggaggcggcgcagcgcgctgagcgtaaccagctcaagggtctgcaagccgacctgaccaaggctggggtggacaccagtcagctggccgccgagcagaagcgtctcgagacggccacggaacgggccagcgcggccctgcaggcgcagcgcgcacggctagaggccgtgagcagagcccaggggcgtatcgaggccaatcggggcgctcgcgcggatctgcgcgggcagatgctggagaccgccgccatcggctacctggccgccaagccggtagaccaggcgatgaacctcgaggtggccatggccgacgtggccaaggtcatcaacttcgaggagggccagcgcgaagcgatggcgcaggagaacctgcgcatggccagcgaccggctgatctcctcggccggtatcaccgcggtggatctcgccaagatccagtacgccgcgggccagtccaacatcggcggcgacgagaagaccagcgagggcaagcagcgggcggtgatggagttcacccgcgacgcggcgatcatgggcgcggcgttcgacatcgacgcccagacggccggcgagaccatggccggctggcgggcctcgatgaagctcgaccgggccggcacgctcgacctggccaacgccaccaaccacctggggaaccagttcaacgccacgccggccgacattgcggcggtggttaagcgctacggcgcgatcggtagcgcctcgggtctgagtcctgagcagagcgcggcgctgtcgacggcgttcctcaacccgggtaccgagaaggaaatcgccggcaccggatttaagaacttcctcggtgccctgaccaagggcaaggcagccaccaagggtcagcgtgagacctgggatgctctgggttttgatcccgaggatctggccaggggcatgcagcagaacgcaccggagacgatccggtcggtgctgcaggcgctcaagcaacagcccgaggaagagcagaacgcgctggccacccagctgttcggctccgagtctatcggcgccatcatgccgctgctgggcaacctcgaggaggtcgaccgggccttcgcggcggtggccaacggcgccgaccgggccggctcgatgatgaaagaggccgagggagtggccggcacctcgcgagccggctggaacggattcgtggccaagctgacgcggctctcgactctcgtcggcaccgccatgctgcccgcccttgacgccgtcctggtgcctctgggcgccctggtcgacggcctgagctgggcggctgagaccttccccaacgtgacggcggccattgcggtggccggtggtgcgctggcggcgatgaaggtcggcgcgctcggtctcaagttcgccggcttgctggttggccaggctttcaacaaggccgggctggcccgggccaagctcgacgccaccaccgcccgcacggcggtgacggccgacggcgcggtcatgcgcctgaacgctgccatggcccgccttggcgctggcggcggggtcggtgacctgggcgggcggggtggtcgcggcggtcgaggtggccgcggtggccgcggtggtcgcctcggtcgcggcctgggcatgaagggcggcggcgcgctgatgctggcggccggcgcggtggatctcgcccaggtggtgatggatgacgaatcgaccggcgaggactacggcgagtcgatcggctcgaccgcgggcggcatgggcggcatgtgggccggtgctgctgcaggcgctgcgctgggctcggtggtgccggtcatcggtaccgctatcggcgggatcctcggcggcgccctgggcgcctggttgggcagtgaggccggcggcgccctgggcggcatggccggatccgcggtcgatcgcctgcgcagccccgacgaggtcgcggcggcggtgaccaatgccgacaaccggcagatcaccttcgcgccccagatccaagtcaacggcgccgaccaggccaccagcgaggcgctggccaaccaggtgatggcgaaaatgcgcggcgagttcgtgccgctgatgatggccgacccgctcgccgtgcggcgcggggcggcgctgaccgatgggagtgactga

SEQ ID NO: 350330 - DNA, 129 bp, Pseudomonas aeruginosa
gtgatcctcgatgtcgtgcccctcgtttaccacgtgagcgaggcggagattctggagtgggatgccggcaaagggctgcgccgctacgagctggccatggcgcgcctgggcgcgaagcaaaaggggtag

SEQ ID NO: 350331 - DNA, 567 bp, Pseudomonas aeruginosa
atgacctggaaacccgaaccgcatccgctgcgctggcctgtcaccaccgagtgcggcgagaccctgaccagcatcgagctgcgcgccctgaccgtcgaggagcaccgcgccgccctggccaccgtcggcgacgacgaagacgaccagttcgaggccttgctgctggccgccaccggcctgtcgctgtcggtgctcgagcagatcaagcgccccgactacgtgagcctggtcaagcgcatgcacgagtacgtcaacctcccggccagctacttcctgggccgcaagcccgaggaccccgacgacgccgagctcctggtgccgatcaaggcgatcggccgcacggtcgaccgcctggctctgcaggtgccggcgatgaaggcgaccaaggtcatgcgcaagctcaaggctgacgccgagcgcgcggacttcatcagcgcgcactgcaccggcctgtcgaccgtggaaatcgtgcggctgagcctgcccgattggacgcagctgcaggagcgcctgcacgcttttttgaacaaaccggcggactactttccgaacgcgacatcgaagtga

SEQ ID NO: 350332 - DNA, 507 bp, Pseudomonas aeruginosa
atgcttaccaaccgagtgcggcagatcatcaccgcaaccctgcaaggcctgccgcttaacgcgaccatcgacgactacgatcccccggtgatcgagttcgacatggaggagatgcgcggcgggcgctacatccccgaggagatggccaccggcatgaaggccctgaccggcaagctgacgctgcagggcgtcggcctgccgatcatggcggccctgggcgtcagcggcggcgacgaggtgctgttgacggtgcaggaagccggcgtcgaccaggacgataacgagtggttcacctaccacgtgcagggcggcaagctgaaaaagctcgaggagaagaccctcaagatgggcgacaagccggtcaccgtgctggagatcgctctgcgcacctacacccgcatggaaatgggcgtgccggtgatcgacatcgacacccgcacccagaaggtggtggtcaacggcgtggatctgctcaagggcgcccgccgcctggccctgatggtgtaa

SEQ ID NO: 350333 - DNA, 1167 bp, Pseudomonas aeruginosa
atggccgaggtaaccaatttcgagcacaacggcgtctccgtcgagacgaccgaatccccggaggccatgggcggccttggcgacaacgtcgtgggcctggtcggtaccgcgcccaaggctgacgccagcgtgccgcgcaacgccccgttccgcatcaacaccttcaccctggccgcgctgctggatccgaccggcaccgaggccggctcgctgtatcacaccgtccaccagatcctgaaagtggtgaaggtgccggtctatgtgatcgtggtcgaggagggcgccaccccggccgacaccctcaacaacgtgatcggcggcgtcgacgcgacgtcgggccaggtgaccggcctcggcgccctggctctgtgcgctgaggtgccgaccatcatcggcgccccgggtttctccgatgcccaggcggtgcatagtgagctggccagcctgggcaagcggatccgcgcgcgggtggtcttcgacggcctggacaccgacgtggccggccaggtggtcaacagccaggcaatcggcggcgccgagttgggctacgaccgctgctacatggttcaccagatgccggcggtctactccaaggcggccaaggctaacgtgttcctgccgccctcgagcctggccattgccgccatggccgcggtcaagcagtgggagagcccgggcaaccaggtgacctacgcggccgacgtctcgcgctctgtcgagtacaacatcctcgacaagtcgaccgagggcgacctgctcaaccgctacggcgtcagctactacgcccgcaccaccctgggcggcttctcgctgctgggcaaccgctcgatcaccggcaagttcatcagctacgtgggcctcgaggacgcgatcacccgcaagctggtgaaggcggcgcagaaggtcatggccaagaacctgaccaagaccttcatggagcaggaggtcaagcggatcaacgactggattcagaccctggtggccgacgagaccatcccgggcggcaaggtgtacctgcaccccgagctgaacagcgtcgagaagtacaagaacggcacctggtacctgtgcatcgactacggtcgctacgcgcccaacgagcacatgatttaccagctcaatgcgtctgacgcgatcatcgaagagtttctggaggacgttctctga

SEQ ID NO: 350334 - DNA, 201 bp, Pseudomonas aeruginosa
atggcagaccgcaagaactacaccgtgctcgtgccctatcccaagggcggcggccactggacgcgcaagggcgacaagatcgacctgctcgaggtcgaggccctggccctgcgccaggccggccgcatcaagctgaccgccgagctcgaggccgaacaggccgcgtcggctaccaccaagaaaaccgccgctaaggactga

SEQ ID NO: 350335 - DNA, 678 bp, Pseudomonas aeruginosa
atgtcgatcacaacccctgcgccggccgccggctggcgtgcttggtttttgccgcttcacctggtgctgttcgtgctgcagctggcggtgctcctgccgctgcgcgtggccttcatcctggccggcttcatcgtggtgccgctggccctgccgttccgcacccgtcacgccgacactgccgagcgtttcagccaggccgccggcacctggtacctggtgacgctgccgcgctgggcctggccctggagcaatgaccgcgacggcgccctgggcgatcgccgcggctggtggcataccaatgccccgttcggcctcggcgcttaccactggttttccatgctggtctggctcgcctaccgcaacccggccaacaacctgcgcttcacgcgcctgttcggctgcccggtgacgcgcaccgcctgtacctggtggggccgtgaggaggtggaagacgacccgggcaagggcggcgtgcgcttcctgatggcccgcgccggcctgctctggcgcttctacgggctgtattgggtctggcagtggagtgccagccgcgccctggtggtgcagctgggcttcaagcctgagccgtccgactggctcgagagctatgccggcgatgagcagcgccagtggaagggcttcacgttcgagatcaaccccatcaaggcgatcggctga

SEQ ID NO: 350336 - DNA, 246 bp, Pseudomonas aeruginosa
atgattgagcaagagttggtccagccagggccggagcagatcaagagtatgcaatgggcggctgtgcgcgctcggcgcgaccagctgctccgcgcgacggactttacgcaaacggccgacagtccgttgagcgaggcgcagcgcgccgaggtggccatctatcgccaggctctgcgcgacgtgccagaggatggcccggacccgttctcggtggtctggccggaaaggccggcatatctgaaataa

SEQ ID NO: 350337 - DNA, 621 bp, Pseudomonas aeruginosa
gtgagcctagagactcagatcgccgccttggtaacggcggccaataacctgacggccgccgtcaatggaaaaatcggtgccatcgacgcgcggatggacacggctgaagccgagttcgacgagtggcgcaaccagaaggacgtcgagggctccttgggtgcttttggcacaattcgccgcaacatgttccaaggctttattcagtctctcggaggccccgctggcgtcgctgttaactcgggtttcgataccgtcgatctcggaacgaatttaaacgtttatgcgcacttcaaggtgccgctaaacgttaacgtcaattcagaaatgttctggttcaacatcaagggttacagctacggcgcggcggcgatcgtcgacgaaaccctggtcggttactgctacaaaccagaactggcgctgaaaagcgttgcgacgttcgggagcatgacgccagcagtctacaaggatgccaatggcaacgtggtgttgcggatcctgttgacgaatgcctactacacgacgctgaggatcgacaccatgcgcgttggcaatgggcggctgttcaacgtcggcgatttacagacgaagttgtcattggccgatactgtggtctggaactga

SEQ ID NO: 350338 - DNA, 663 bp, Pseudomonas aeruginosa
atgagcctgctaacccagctcgagacgctgctcgcctcggtcaacaacctgatgggcgtgatcgacggcaagctgcgcaacaaggccaacaaggccgagacttacaccaaggcggaattggccgacccgctgctgaccctcggcgccaatgcggcgacggcctcgaggctcaaggtcacacgcttgctgaccctgaccggcgaggcgaccggcgaggtcggtttcgatggatccggcaacgtcaccctgatggtgaccgtgccggggctgctggataaggcggacaaggtcgacaccttgaccccggcgcagatcgacgcccggatccaggccctgataggggcggcacctgctgctctggacaccctcaatgagctggcggcagcgctgggcaacgacccgaacttcgccactagcatggccacggcgctggcggccaaggctgaccaggccactacctacaccatcgcccaagccgacggaaagttcctgctcaagacgggcaaggcggccgattcgtcgctgctgggcggcaatgccccggcctattacgcttcggcggccagcgtctcgacgctcgaggccggggtggccgatgggttccagcgactcgctgcggcattcaatgccggagcgactcagatcaacgcaacgggagtttga

SEQ ID NO: 350339 - DNA, 312 bp, Pseudomonas aeruginosa
atgagcggcgccgtcgagcgggtggtggttacccgtggcgtcgagcgagtggtcacggtgcgccaggccggtcgggtggtggaggttcgccagctgctctcgccgcgcgtgacggtggtcagcgcgggtgtgcaggggccggtgggcgccctggccgagaacgttttgcagcgcaccctacaggccgaagaggatgcccgcgaggctttagccctggccagcgatgccagcgccgccatgggcaccctgctcaaggatctgcagggcgctttcgattaccacgcgggggctatctccgcgcaagggggctag

SEQ ID NO: 350340 - DNA, 348 bp, Pseudomonas aeruginosa
atgaatgggccgactctggagctgatcgagggcaccaccttcggcgtcgaagtgacctggtcggacagcgcgggcgcgccgattgacgtcaccggctgcgcggcgcgtttcgtgatctgcccggcggacagcgtccggccgctggtggagtgcagcaccgaggacggcggcatcagcctcggcggcgctgcgggcaccgtggcggtcagcctggccccaggcaagacggccggcaagcacagcaagcagtggcagggtgcgcgctatgagctgcgggtcgagtaccccagcggcgacacctacagcctgctgcgcggcaccgtggcgctgtcgccggggctgctatga

SEQ ID NO: 350341 - DNA, 531 bp, Pseudomonas aeruginosa
atgacagacctcacccgcctggtgcgatttaccaccgccggcctggccgaactggtgcaggccaaaaaccagggattgaagggggcgatcacccacatcgccgccggcacctcgcgatacaccccgaccggcgccgagacggcgctcaaggccgagcggcagcgcgtgaacattgccgagtatgaagacctgggaagcggcgagattcgcgtcgctggcgtgttcaagggcgcccttgagtatgaggtcggcgagttcggtttcttcctcgagagtggcacgctgctggcggtgtactcggtcgctggccagttgctgacctacaaggcggccaccgccaccctggtacagaagttcaccctggatatttccgcgctgccgagtaacagcgtgaccgtcaacgtgggcagcgagaacctcaacatcatgttgaccgaggagctggccacggtcgcgacggcgaacatcgacaacatggcccgccacgtcggtctgctgttccgcgtcatggaactggaggccagggcatga

SEQ ID NO: 350342 - DNA, 645 bp, Pseudomonas aeruginosa
atgagtgatgacagcgccccgcgactgagcctgctaccggccaaccgctcgccactcgaggcgggcctcgacctggctttcgccaagttgctcgagcgcatcgagccgccattccccgggctgatggatccggcggccaccccgaccgcgttcctgccgtatctggccgccgatcgcggcgtgagcgattgggatccggcggcgccggaaagtgagctgcgcctgaccacggctctggcctgggcgatcaagcgccaggccggcacgcgccgcgccctggtgcacgcggtcgagtctatggagctgggcgcccaggtcaccagctggcacgagaagccggccggcgtgccgtacaccttcacggtcgaggccacggtcgagcggccctggctgccgggcgacttcccgcggctgtggcggcggctgaacgatgccaagagcgagcgcgacaacctcgacctgattctggtgcatgagaccagcggcggcttgcgcgccgcggctgcagccggcacgccgctggccatcggcgacctggacctggccggtgcgctgcccgagctggatctgcgcggcgagctgggcggcgcgggtgcggcgcagcactacaccatcaacgattacgacctcgaggcgcagacatga

SEQ ID NO: 350343 - DNA, 990 bp, Pseudomonas aeruginosa
atgcttatcccggggctcaaccaactggccgagccagagatcgtcaaggtcgagcagttcgagcccctgctggccgagttcaaggccgaggtgctggcctacgtggccgcgcgggatcctgagaaggccgcgcgcctcgaggagaccctggccaatgacagcgagctgctgacgatggcgctcgaggccttcaccgtgcgtctgcaaacgcatgaacgcaaatacaacgcccgcatcaagcagatgctggcctggtgggccgagggctcgaacctcgacgcccgcctggccgatatgggcctggagcggcggacgatcgccgagggcgatccgaacgccttcccgccgatctcggccgagctcgagactgatgacgacgcgcggatccgctactaccttgccccgcacgccccggccgctggctcgcgcctgcagtaccggcgcgaggccatgaccctgggcgagcgcgccgcggtcagcgtggactcgcccgaggcgggcaaggtggtggtgacctacaccttcgccgcggacgccaacgcggccaaggtgaaggacgccaacggccggcagacggccctcggcgaggtgacggtcacccagctgtcgcgcgagggcgacggcacgccgagcgcggcgctgctggcggccacccgggcgcacttcgcgcgcgacgacgtgcggcccgagaccgacaaggtgatcgtgcaggcggccgagatcctgccgtatcggatccgcgcggtggtctacatcaataccggcccggacacccaactgaccaaggccaacgccgagcaggccctggcggcctacgccgccgagcgccatcgcctcgagggctacgtcgatccgagccggatcgactacgtgctgcacgctgccggcgccgagcgcctgcagctgctcgagccgctcgcgcccatcgaatgcgcggcccaccaggcgccctactgcacggcgatcgacgtcgaggtgcgcacgctatga

SEQ ID NO: 350344 - DNA, 333 bp, Pseudomonas aeruginosa
atgatcggaatagaccgcgacaccggggccgccgtcgacgactggccccaattcgtgcagcgcgccacccgcgcgctgacgactccgctcggcacccgccagaagcgccctctgtatggctgcaggctgccgacgcgcctcgcccgcaacttgggcgaccaactgctgatcctcgcccaggccgacgccgtcgacgccttctacaacgaagctaacggcatcggcgacttcacgcccgaggtggtggtcgccagccgggaaggtgctggcctgcgcctgcgcctggcgggcacctggcacaaccgcaagatgacgttcgaggtggtcacgtga

SEQ ID NO: 350345 - DNA, 612 bp, Pseudomonas aeruginosa
atgttcgacgcctatctgcgcctgcagctggggccgctgatcgagcgcctggcggcgctggagaccgagctcgaggatctgcgccgccgtgccgaagggcacaaccgcatcggcacggtggcggcggtggatccgttgaagggcgtctgccaggtcagtcatggcgagctgcgctcgccctggatcaagtacggcaacctggccgccggcgaggtcagcgagacgcgccacccatcggtgggcgagcagtgcctgctggtcaattacggcggcggcgacggcagcgcccaggcggtggccatcctcggcctgccgtcggcgcagtttccgccggtgtccgaccgcgccgagctgcaccgccgcacctaccctgacggcaccgaaagcagctatgaccacgtcgcccatgccctggaatggaagaacggcccgaccacggtcaaggccgaccaggccggcatcgagctgctgagcaatggcagcggcgtgcgtatcgacgccgcgggcgtccacctggtcgggccgctggtcgatcacgccggcaagaacatcggcaaggatcacaagcacctgaactcgggcggcccgagcatcggtggagagcctgcatga

SEQ ID NO: 350346 - DNA, 519 bp, Pseudomonas aeruginosa
atgtcctacagaccgcttaaccaggtttccgacctgttcttcgccatcggcgacgccatccacgccgcgggcctgggcgtcgacgtggccaactacgacgaatgggacggcaaggtgcgccatgcctcggtgctgatcgagctcgagcgcaccaccccggccgtcaggcaaaacgacgggcgttacacgcacgccgtcaccgtaaccctgcacgccgttgtcggccggtggcgtaagcattcggcgctcgaggcggtcaacctggctacctgcctggagcgcctggccgatcgcaaccgttggggcttccacggtcgcaactgcgagcaaccctgcgagatgcgcagcggcccctcgatgttccagcgaggagccgacggctacgacgcctggggcgtcacgctcaagcaggtggtgacacctggcgagccgacgcccgagatcctgctcaacaccgcccccttggttgcgtacagctggcaggtcgacgacctagacaacccggagaactaccactag

SEQ ID NO: 350347 - DNA, 525 bp, Pseudomonas aeruginosa
gtggcaggcttccaactgaattttgaggtggacggctggggcgacgtggagcgcgccctggccgacgccccgcgcaagctggacgttgccgccgcccgcgccttgcgtaagacggcgcagtggctgcgcacgcatagctcgagggagatcgcccgcgagctcggcatcacgcaaagcccgatccggcaccgctacaacatctacagccagtcgacggcccgcgaggtgaagctctgggtcggcctgcagccgatcggcgttcactacctgggcacgccccggcagacccgcacgggcgtgaaggtcggccaccgggagtacgacgcggcattcatctcgccgatgaagtccacccagcgcctagtcttccgccgcaagggtcgcgagcgcttgcccatcgagaaggtgaccgaggactgggaaggcccggcagtcagcgccctggagcgctgggagcgccgcgccctggagcgcttcatggagctgttcgagcaggaggcgcgctatgtcctacagaccgcttaa

SEQ ID NO: 350348 - DNA, 381 bp, Pseudomonas aeruginosa
gtgatcggcgccgaggatctcggcgacttcttcgaccccgacgagttcggtaccaccgtgcagctgctcgagcccgggcagcctgcgcgcaccgtgcgcgccctcgagggggcgccgggcggatccggccggctgtatcggtcgggcgtggatccgaacgcctcgagcctgcgcgtcaggcccgaccaggtgaagctgcagctggcccgggctgatgccccggccgactggaagctgaccaaggcgctgctcgctgggtcagattactcgatcgccaacgtggaaccgctgggccggctgcgagtgctgctgaccctgatcccctacggtgaccgctcggctccggccggggagcgtggaaagtggcaggcttccaactga

SEQ ID NO: 350349 - DNA, 414 bp, Pseudomonas aeruginosa
atgtctaccactcaagcccgcaccgccctggtggtgctgctgacggatctcaccgtgcacggtgacgtaatccccgaaaacaccacgctcgaggtcgagcgcgccatccgcaacgactggttcggctcgaagctgtgccgcgacgcgaccgaaaaggagatcgccgagtaccgcgcccaggagggcgccgccgacggttacgacgagcagctgcagctcgaccaggcgcagctgatcgccgacatcgaggcgaagaagggcgacctggtcaccctgcaggccttggtcgagcagctggccgagcagcgcaccaccctgcaggccgaggtcgacgacctgggcaagcagaagaaggccctggctgatgaagtcgcggctctggaaaaggccaaggccgcggcggctaagaagtga

SEQ ID NO: 350350 - DNA, 1875 bp, Pseudomonas aeruginosa
atgccgaagagctcgactccgacgagtagcgcgccgctgcctgtcattcgccagatcgaagggcagcagctgcagcgctcgcttgccgtggacatcggcaccctggacaccgaacagcgcaccgtcgaggtcgcggtatccagcgaataccccgtgcggcgctggttcggcatggaagtgctcgaccactcgcccgactcgatcgacctcacccgcctgcatgccggcgcgccgctgctcgaccagcactggcggcagatcggcgtagtcgagaaggcctggctggacggcgaccgcaagctgcgcgccctggtgcgcttctcccgcgggcagtacgccgaggagatctggcaggacgtcgccgacgggatccgccgcaacatcagctgcggctacctggtgcatgaaatggtgctcgagcgttcggagaacggcctcgatcactaccgcgttacccgctgggagccctacgaggtttccagcgtttccgtgcctgccgacccgaccgtcggggtggggcgctccaacgatgcaacaaccaacaccatcaccattcgaggtattgcaatgccgaagccgaacgaaccccaagacgacggtcagacccgcgagcagccggccgttaccaccgacccggtgctgctggagcgtcagcgcatcgccgacatcaacatcctgggcgagcgctacaaccagcgcgagctggccgccagcgcggtgagctccggccagtcgatcgaccaattccgcgccgtgctgctcgagcgcgccatgccgggccagccgaagccgctcgcgcccaaggctccgaaggacggcgagcgcgacctgccgggcttcgtcaaggatgtttccgcgcgcggcatgggcatgaccgaaaaggaaatggatcagttctcgctgatgcgtgccctgaacgcctacgccgagaaggactggtcgaaggccggcctcgagcgcgaagtcagcctggccctggccgataccctcaagaaagaggcccgcggcttcttcgtgccgcatgacctgctcgtgcgtggtatgtcgaagggcgaagcgggcaagggcggcgagctggtggccaccgagctgcgagtcgaccagttcatcgacatcctgcgcaacaagaccatgatggccaagctgggcatgcgcatgctcggcggcttggtcggcgacctggatctgccgaagaaggtcaacggctccaacttctactggctgggcgaaggtgacaacgtcaccccgagcgacttcgacctgaccaccatcgcgctgtcgccgaagaccatcgcgggcgcgatcccggtcacccgcaagctgcgcaagcaggcggcgaagtcggtcgaggcgctcatcatcagcgacttggtcgagggcctgggcgttgccatcgacctggccatgctgcgcggtaccggcgccgacaaccagccgctgggcctgctgaaccaggtcggcctgccgtcggtgacctacccggcaaccggcattgattgggattccgtcgtcgagatggagaccaaggcggccaccttcaacgtcgagggcagtggcctggcctacctgaccagcccggtgcagcgcggcgcggcgaagaagcggcaggtcttcgagaataccggcgagcggatctggcaaggcggcgaggtcaacggctacgccgcccacgcgaccaaccagatgccggccaacgactggctctacggcgacttctcgcagctggtgtgcggcctgtggggcgtgctggatctcaagcccgacccgtatgccctggctggcagcgacggcctgatgctgcgcgtcttccaagacgtcgacgccgccgtgcgccgcaaggaagccttttgcgtcggcaagaaagccgccgcctaa

SEQ ID NO: 350351 - DNA, 1425 bp, Pseudomonas aeruginosa
gtggggcggcgccgcggcttcaagatggccagcggcgggcgcctggcgaaggcctggtcgggccgcacgagcggcaccgatgccgaccagctgatcttcgccgaccacgagaccctgcggcagcgggctcgagagcagtcgatcaacacctcctacctcaagcgcttctaccgcctgctgcggcagaacgtcatcgggccgtatggcattcgcctgcagtccaaggctgtgctgcaggacggcaaggccgaccggatcacccggcgcctgatcgaaaaggagtggcgcaagttctgcaaaaagggcgtcttcgacgtcaccggacgctatagctacgtcaccttctcctggctgtggctcgacaccctggcccgcgatggcgaggtgctcgtgcgcctggtgcgcaactggccgaaccgctggggcttcgcgctgcagatcctcgaggccgatcgcctcgatctgcacctcaacgagctgctggacaacggcaaccgcatcaggatgggtgtcgagatcgacgagtgggagcgccccgtcgcgtactggatgctgagagaccaccccggcgacatcctgcgccgcgccgaggagcgctacgagcggatcccggccagcgagctgatccacaccttcgacccgtggcggcctcaccagtcccgagggttcacctggacgcatgccgcggcggtggacatccaccacctgggcgagtttcgctcggcgaccctggtcaaggccgagcacggcgcgaagatcacgggcttctatgagcaggacgccgagtggctggatccgcccgacgagggcgaagacgtcgacgtgctcgaggaggtcgaggccggtaccaccaaggtgctgccctacggcttgacctacaagccgcaccagaacgcctcgcccggtagcgactacgcgccgttcgtgaaggacaccctacgcggcggcgctgccggcctggggccgagctacaaccgcctggccaacgacctggagggcgtcagctactcctcgctgcgctccggcgagctggacgagcgcgacttctacaagtgctgccaggagttcgtcatcagcgagctgctcgagcgcgtgggcgaggagtggttcaactgctccttgctcaagggcgcgatcaagatcgccccgcgcgatctggcccgctgcagcgaccaggaatggcaggcccgtggctgggattgggtcgaccccttgaaagactcgaaagcggcgaccgagagcatcggcaaccgcaccaagtcgcgcgcctattacatccgcctcaatggcgacgaccccgacgagatcttcgaggagatcgaggccgaggagcagctgctccgcgagaaggggctgctcgctgatcccaacaaaccgaaagcagaggagccggccaatgccgaagagctcgactccgacgagtag

SEQ ID NO: 350352 - DNA, 516 bp, Pseudomonas aeruginosa
atggaaccgacacaactgcacgcgggcgattccgtcgcctgggagcgcaacgtgccggaatatccggcatcggccggctggtcgctgcgctatgtgctgagcgggccagaccggcacgtgatcgaggcccaggcgggcgccccgtaccgggtcgagatcgccgccgagacaaccgccagctgggcgccagggctgtatcgctgggtggccctggccatcaaggcgggccagcgcctgacgctcgacagcggcacgctggagatcggcgccaacctcgagacggccgaaccatcggacgtgcgcagccatgcccagcgcatgctcgcgctgatcgaggccgcgctcgagaagcggatcccgaaagaccagcagagctacgagatcgacggcatgcggctcgaccggattccgatcgagcgcctcgacgctctgcgcagtaagtaccggcgcgagctgcagcgcgagaagaaccgccgctggccgaccggccgggtggtcaaattgtccatggggtag

SEQ ID NO: 350353 - DNA, 2013 bp, Pseudomonas aeruginosa
atggtgcaggcgccgccgccgaggactagcgacgagtgggcgcgcgacaagcgggtgatgccgccgagcgcgccgatacctgggccgttcaaccccgacaccaacccctatatgcgcccggtggcctgggccttcgcgcagccgtgcttttcccgggtgaccttcgtcatgggcacccagatgggcaagtcggtgacgatggagaacattatcggccaccggctcgacgaggatccgacgccgtgcctgtacgtggcgccgacgaagccgctgattagcggcacggtcgagcccaagttcatggccatgtttaccgagtgcgagtcgctggcggcgaagtatgaggcgcgcagcacccagacggttaagtggctgggcggtaccaagttccgcttcgcctgggcaggctcgccgactgagctcgccgccgactctgctggcctggtgatggtcgacgaggtcgaccgcatcgtgaacacgggcgaaggcgacaccaccgaaatcatcgaggcgcggggtgatgcctacgccgactcgaaagtgggctacaccgccacccctacggcgggcaaggtcgagcgtcgcgcggatccgcgcagcgggctctggcattgggtagtcggcaagacccaggcgatcagctcgaagatctggcagctctggcagagcggcacgcgccacgagtgggcggtaccgtgcccgcattgcggcgagtacttcgtgccctggtcggatctgctgtggtggcccggcaagggctcgccagatgaatgcacacccgacgaggccttcaagcatgcgcgcctggcctgcccaggtaacggctgcatgatcgaggacaaatggcgcccctggatgaatcagcgcggcgtggcggtcgccccgggcgagtcggtcagcaaggccggcgagatccgcggcgaagccgacaccgcgggcttcacccactactcgatatgggtctccgggctgtgctcgtttgccgtcaagaagtcctacgggtttctggccaagaagctgctggcggcgcaagtctccggcgaccctgccaagctgcaggcggtctacaacaccggcttcggcgagtgctacgccgaggcgggcgatgcgcccagctgggaggaggttcgcgcccagtgctatggctacgcggccggcgagctgctgctcgagccgctgcggatcttctgcaccgtggacgtgcagaaaaaccgcctggtgtacgtgatccgcgcctggtacgccggcctcggctcgatgctcctcgagcacggcgagctctggggcgagaccgaccaggacgccgtctgggagcagcttagcgagctgatcgacaccgactacgacgggcacccgatcacccagaccggcatcgacatcggttaccgcgacgaccaggtctaccgctttatcaacgagcacaagggcagggccatggctctgcgcggtcgcgaccgcctcgacaagccgttccgcaaggaaatggtcgaggtcgaccgcaagggcaagacccgcaagcgcggcgacgcccgctgggccttcgactcgcccctggccaagcgctgggtgcatagccgtttcggtcgccctgacacccgcccgggctggtggcttctgcatcagcaggtcaccgacgactactgcaagcagttggtcggcgaggagtggcgcgaaggggagggcaagttccaccaggtcggcgagaaccactacctggactgcgaggctatgcaatacatcatggccatgcacgccaagctgcaccgccgcaagacgggccagttgaccaaggcgcagctgcgcgaggcgatcaaggccggcccgctggccgatcgcctgcccgacgagcccgccccggtcgctgacgcagaccagaaggagccggccgaggatctgcagggagccgaggaggccgccaagccggtggccaagcccgcggcggcccgcaaggcagatgccccgaaggccaaggccaagtcccgcttcaacatcatcaggaagccccggcggtga

SEQ ID NO: 350354 - DNA, 570 bp, Pseudomonas aeruginosa
atggccaagatcatcagcaagaaagacctggccgacctgctgggcaagtcagagcgctggatctcgaagctgatcgaggagggcctgcccacatgcggcggcggtggtcgcggcgtggccgtgcagatcgacagccaggctgccatcgagtggctgatcgcccgtgaagtccggcgcgagctgggcgaggagggcgacgacgacgaaggcgccggctcggcctcgaccgaggagcgcctgctcaagcgcgcccgacgcgagaagctgcagatcgagatcgacaaagagcgcgggcggcttgtgccgatcgacgccgttatcactcttgccaccagcattgcggcggtctacgcgacccagctcgactccctgccaagccggtgcgcctctgacctggcggtgctcgatgaccctgccacaatccgagctcgactacttgaggagacgcggcgaatccgcgcggctacagccgaccgcctcgaacatcgcgcacgcgccttcgctgcagaagctggcgagctcgattcacttcgtcgcgacgatggtgcaggcgccgccgccgaggactag

SEQ ID NO: 350355 - DNA, 573 bp, Pseudomonas aeruginosa
atgaccccaagcgaacaagacaaggccctcgaggcgcagatcctggccaagggcttgaccgccccgcgcgtgctgcccgagcagatcgacgacctggtcaaccaactgagtttccacacctacgtgatccccggcaccactgtgacggtggcggcggccatcgccccgggcaacatcgtggtggccctgggcaagtctggcgctgcaagcgctgcgaacttcgacgagatggtcgggcgcaatcgcgcgatctcccgggcgaaggatgcggcccgcggtcagctgtgggagctcgagggttaccgcttgaagcgcaacctactcgacctgcaggagctcggcggcctcgaccaggtgctcgaggtggctgccaacatgccgcccgagctggccgacgtgtgggccgcctcggccgttccgttcgtggcgattcatcagaccgcgccctgcgcagaatgccaggggcagtgccagcccggcgccatcgtcgagctcgatccgaccgagtcgatctgctcatgctcgcgctgcaaagccccgaaggtcgaagcccagcccgcgccaggggtttag

SEQ ID NO: 350356 - DNA, 507 bp, Pseudomonas aeruginosa
atgaagtcgagaatcgccgccctcgcgggcttgctggtcattgccgggctgatctacctcctgggctggactcgaggcgcaagccacgagcaggtccaggcgaaggccctcgagcacgagcagctgcgccaggccttcgagcaaggccgacagctgggcacggtgcgcgatcgcgtcgtcaccgagtacgtcgatcgcgttcaagtcatcgagaagcgcggccagaccatcatcaaagaggtgcccatctatgtctccgaagctgccgaccgcgcttgccctgtccctgctggctttgtccggctgcacgacgcagtcgcggcaggattgccagcccctggatctgccggcgctgctgatgaagccgcctcgggagttgcgctctctgccgtcgccggcaccgtcgccgaaaactacaccgcctgccacgcaaacgccgagcagctgagcaagctgcaggagtacctgcgcgagcaccaggcgatcaccagcaaacagccacaatag

SEQ ID NO: 350357 - DNA, 552 bp, Pseudomonas aeruginosa
atgaagggcctgattaagcgcatggtcgccgcggtgaccctgacgcttgccgcggccggcttcacggtgaacgaaacgggcctgccggcgccggtcgagcgcgcggccatcgtcgccgccctgctggtgatgacgccggaaatggagggcacggtctacgaggcctaccccgattccggcggcgtctggacgatctgtaccggccacacgaaaggcgtcaggcgcggcgacgtggccacgcctgagcagtgcgaggcctacctgcaggccgacctgggccaggcggtggactacgtcatgcgcgcggcgccagacgccccgctattcgccaagatcgccatggccgacttcgcctacaacgtgggcatcggcgcgctggcccgctcgacgctgctgcagctggctaaggccggcatgcacgagcgcgcggccgagcagttcatgcgctggatgttcgtcgccggcctcgattgccgggatccgaaaaacaactgccgcggcatcccggtgcgccgggagctgcagcgctctgtctacctggtgcgcctatga

SEQ ID NO: 350358 - DNA, 240 bp, Pseudomonas aeruginosa
atggctgctgacgacgtcgcgctcgctggggcgctcaagatcgaggccgccaaggcggcgccgttcggcgcgtctctggtgctgtgggggctgaccctgcaggagtggacgctcgttttcggctgcctgtacgcggccggcctgttccttgatctggtggtgcgccgctggctgatcccgctcgtgcgccatatgcgcagccgccgagatccgccagcctgccgccaggtggagccatga

SEQ ID NO: 350359 - DNA, 252 bp, Pseudomonas aeruginosa
atgaaggggcgggcgctgagggtcaccaactgccgtgacccgcacatgtggtacgcgggcctgatcggccaggtggtgccgctggttcgcgaggaggcggactgctactggtcgcgggagcctgccggctacgtcaatatcgtgcacaaggcagacgccgagttggtcgaggtcaattgtaccaatggccaaaagtgcatttgccaaagcggccttttgcgaaaatgtgcaaatgaccccttgcaaaagtaa

SEQ ID NO: 350360 - DNA, 324 bp, Pseudomonas aeruginosa
atgaccatggccgccgtgctctgcatccattgccaggtgccgcccgaacggcgtcagcaggagggcaccgggctggtcatgtggatctgtccggtgtgcaataaccgcggcgaggtgacgccaagcgagggccgggccttggccagctggaacctggtcaacgacgaggatatgccgcggcacacctgcatagaccagggcgtgccgcgcttcttcatcagtggcggcaaatggggcagccgctgcccgtgctgcgacttcgtcgaccatggttatggctcgctcgagggtgctcgggctggctgggcgagggctacgcgatga

SEQ ID NO: 350361 - DNA, 318 bp, Pseudomonas aeruginosa
atgttcggatggatcaagcggcgcctgttggcgcgcaaggcacgcaagtctctggatagcgttcgccagttcgaggccgcgcggctcgaccaggcgcgcacccggccggtaccgccggcctatagcccgtcgccggcctactcgacgccggtacaccagggcgacccgttgggcgtcaaccaggcgctgctgatgtcggccgtgcttgatgatgatcgccgctctgtcagctgctcgagcagcttcgcctctgacagcacctcgagctggtcggggtctgactcctcgagcagctgcagctcgagctcctgggaatga

SEQ ID NO: 350362 - DNA, 819 bp, Pseudomonas aeruginosa
atgaccttcgccctcgagatccgccacgctgcgccgacttcgtcggcggctgagtgctgggtcgagctggaagatgctgcgcccctgtcccgccgcccgcgccgcgcctggcgcgtgccggaagtcaccctgcaggatctgcagtggctgcgcgagcgcctgatgttcgccttcctggccccgagcgactaccgcgacgacaggccgccccagaagatcctgggcgcctacgacaccagctgcacccgtgacgcttttccgcgctggcgggccgaggagctggccgagtgcccggccgacggcggccaggccaagcgcctgcccctcgactacgtggccagcctggccagggataccacccgcgtgactgtcagcgagacccgcaagaaaaagaccagctccgacccgctgccgccgagcgccttcgacgacgcgcgcctggtgcgcatcgtggccgcccaggcgtcggcctaccgccactggctgcgctatgcctacgccgactcgaaagagtgggccgacgaggccggcgcagtggtcgagctgtgggcgcgcgtggcccctgggctgggcaagatgcaggccaagacgctggccaaggccaagggcctggcgcacctcgctgtgcagcatggcaagcgctacgcgaacgccggcaccgagctgtactcggccgcccgcctggctgagctgctgggcgttaccacgagcaactacgaccagcactggcgcccccgctggaaggcgctcctcgaggcgctcgagcgcctggacgaggaggccctgcgggcggtgctgcagcagtacaacgacaagtga

SEQ ID NO: 350363 - DNA, 174 bp, Pseudomonas aeruginosa
atgctgacgcatgagcccgcccctctcgagctgcgctcggcctcgagcccccgccccttctgcctgggctgcggtcgcgacatcgacaaggctcgcctggcggttttcgccaaggcccgccgctgctcgacctgcgccggcatcccgtgcctggccaggaggcgcgcgctatga

SEQ ID NO: 350364 - DNA, 390 bp, Pseudomonas aeruginosa
atgtcggctttgcgccttgcgacccaggatggcgccccggtaccgaccggcgcggatctgcacgaccacttccacgcccctgcaggtgagagcaaagaggatcgcgagcgccgcctggcgcgcgaccgaaagcgcgcgcaacgcgcccgcgaggcccaggcgaagctgaaagccgaggccgtgaaggtgccgctcgagctgtatcaaggcaccgtcaaggccctgcaggcggtgatcgctgccggcggcttcgacggcccccaggcggccgaggaggccatcaccctgctgctgcatggtgccgccgctttggcggcgcgtgacagtcacgctttcgcgcagttgatcgcgccgccgtcacaccaggttgtcgccgatgctgacgcatga

SEQ ID NO: 350365 - DNA, 591 bp, Pseudomonas aeruginosa
atgcgaacggaacgcgagatcgttgtcgatcagactagccgctggttcaccaattcggagtggtcgctcgagcgcttcgccagcgagcgcctggcgccggccctgtccgccgctgggctgattgaccccgtcggggatcccgaggacgtcgccgagtatctgcgcagccgcaaggcctggggcattcgtatcggccggatcttccacggcacccagcctttcccgctcgagtggaagtgggtctggctgtcctgcctgcccgaggagtaccagcgcgccgcgcgtcacgagctgctggccatggccggttgcttcgacgtgcgcctgcctgagttcgtcggcggcatggcgctggaggccacccaggcacgcctgggcgaagtaacccgcgagctcggcgacttcatcgccgcggccaccccggcacacaatggacgctacgaccgcaccgacgacccggccgccgtcgaccgcatgctgcgcgaaggcgccgaggcgatcgccgcgatggtcaacgagatgatcgccgtctcgacgggtaccggccgcccgctgccgctgctggtgctcggcaagatcgagggccgctga

SEQ ID NO: 350366 - DNA, 666 bp, Pseudomonas aeruginosa
atgtcacgcgactaccgaataggcgcagccataaggaagcggcggcaagcccttggctggggcctacaaagactgatcgacgcggccgggggcgatatgtccaccggctatctgtcgaccctagaaacgacggacgtcgccccgagcgtctacgtcgccgacaacctggcaaaagccctgggcacgtccgtggatacgctcctggccgaggcccgcgaccctgacagcatcaccccgccgggcgagccggcccagcgggtgccgctgatcgcctgggaaatggccgcagaatgggcacgcaaccccgatgccaagcgcctgccggcgggcacctgctggatcatgccgagcgagacgccacccgggagggtgttcgccctggtcgtgcgcgacgagctcatgcaggcgccgaccggggtcagcttcccgcgcggctacaccattttcgtcgacccgatgcgcaaggcggcgcctggtgacttcatcatcgggcacctgggggatccggcctcgccggtcttcaagaagctgaccagggacggcgccatgctctacctgcgcgccctgaatccgcagtttccgatgcagcaggttggtgatactttcgaggtcgtcggggtcgtcgtaggagtgcgggcgacgttcgacaaaggagaggttctataa

SEQ ID NO: 350367 - DNA, 3885 bp, Pseudomonas aeruginosa
atgacaaacgtacaacagggcaaggggctaggggccttctacaaagagcgattcaacgccgacccatacgccctcgccgactactgtcacgacgagatcgccgccgccgcggccgacgcctacgtcgactggtcttcaatctgcaacgccatccactacaacggcgagcgactgaagaagtactcgaaggtcaagatcaaggccaccgatgccaagtacaacggcaaggtgatggcctggggcgacctcaagaccgcccgcggtaacgccgagctcgaggccttcgactacccctttctgaccttctcgaacaacgccagaaaccccagcacctggtcaggcttcgcggccctggccgagatctacgaacgcgagggcggcaagctcaccgacgcccgccacctcgagtggaaacagcgccaggagcagcgccgcgccgagcgcgaagcgcgcaagctcgaagacgagcgccaggcccgcgagaaggccgaacggatccacgccgagcgcctcgcctatgaccgcgcctggctgactggcgagacctgcaccttcctctatgagcacggcgaccagatccgcgagggcacggtcgaagtgatcggggccgaggatggcaccgccccgtacctggtcaagaaacaggtcggcgccatcgcgtcacgcttcaaaatgcagcgtatgcgtgaccgtcacggtgtattcacagcggtgccgatgcacgacatcgacggcaacttcctgggcctgcagcgcctctatgccgacaagaaactgcagggcaccggggtgaagatggacggcgcgcattgcgtcctgggcgacctcgagaacgccaagcgccgctactcggccgagggcttcgcgaccggcgccagcatctacctggccgagctcgaggccggccgcggcgacgaggtcgccgtggtcatcgcgttcaacgtcgacaacctgctcaaggtgctgcgcgcctacgccaagcgctaccccgcctggcgcttccacaacgccgccgacaatgaccagtggaaagacggcaacgccggcctgctggccgcgctcgagatccaccgcgaccttcaccaccagggcatcgtcccgaacttttccgcccacctcgagctgctcgagtgcagcgctcaggcaatcgccgagctcagagcccagaacagggcgaccgtgatcggcttctgcgccgaggagctcgccgccttcaaggccgcgggcaaaggccccaccgactggaacgactaccactgcctgttcggcctcgaggcgactgccaaggccctgcgcgcacgcgacagcgtgttccgtgcggaaaaggactggttcgcctactgcctgcagcgcctgcagtacagcggcaagcgcctgggcgagaagaacgccatggccgcggtggcggccggcatgatgctctccccgatcaagtacagctacgaccaggtcgtgcaggcgatcctcaaggcactaccggcagccgtcgacagcaccagccgcttcaagatccgcagccgcgcccactggctggccaagcaaaagctgcagcaggcgcgccagctgcgcggcttctccaccgcagcgctggccaagccaaacgtgcaacacctcagcatcgagggcgtgcgagccgcgcacggtggcatcgagctgccggcgcacatggccgccctggtcgaatcgatcgagggcgtcatcatcgtgcgcgcgccgatgggctcggggaaaaccgagaagctgatcgcgccgctgatgcaggcctccagccgcgccgcctacgttgcgcaccggatctcgctcctcgatgacgctgccgcccgcctgggcgtcgagcactacaaacaggtctttgcctggcagatgcagcacgtctcgcacctggcctgctgcgtcaacagcctgaccaagcccatgttctacaacgccgaggagcgcagctggtttaccaccctcgagacgctgtgcatcgacgaggccagccaggtgctgcgccacaccaccaccggcccggtcgagggtcgggtcaaagtcatggatgcgctgatcgacgccgtcggcgccgccaagcgcgtgctgctctgcgacgccgacgccaacgacagcctgatcgagttctgcgagctcgcccgcccaggcgagacgatcaccatcctcgaggtcggcggatccgccgagcacatccgcatcgaccacgccgaggacgaggccgtctggcagctggcgatcgacaacgtgaaggccggcaagcgcgtgctggtcgccaacgactcggccgagtcggccaagaaaatggccgccctgatcgaagccatggtcgaggagggcgagatcaagcccgtgcgcatgctcctggtgcatgccgacagcaaggccgaccaggacgtcgaggccttcctctgcgaccccaacgccgaggcgatcaagtacgacgtgctgatctactcgcccgcgatctcctcgggcgtgtcgatgaccaccccgcacttcgacgcccacttcggcctgttcagcggtaacacggtcggcccgtccgacgccgtgcagatgctgcgccgcgaccgcaccgcccgccactacgtgatcggcatcggccacaccagcgcccaacgcgaaaccgaccgggagaagatctggcgcggccacatgaaggccgacgaggtcgcctgcgagttcgaggagaccagcgaggagatcatcctgcgccgtcgcaagaccgcgttcgaccacctctacctggccaccgtcaccgccgagaacgcggcccggaacaacttcgccaacaacctgctgctgatgctctacgccgacggctacaacgtgcagcgcctcgacatcgccggccttggctacgacgaggaggccctcaccaaggaatcgcgcagcaaccgcaaggtggccggcgcgattgtgttcgacaagcgcatggatctgatcgagagcgtccagacgcccgacgaggagcagttcctcaagctcagccggcaggaggtgcgaagcgaggccgagagcgcccagctcgaccgctaccacatcgagcaccagctcggcgtcgacgagatcaccgccgacgacgtggccttctacgatgaccgcggcatttccaaggtggtggccatggagctgctgcaggccgacgaggagcaggccaggaactacgacaaggcgcagcgcaaggcgaaggtaaccctcaccctgcaccgctggaaaacgcccgcgcacgcgctcctggggcgcgtcttcgagatcctcggcgtcgatcgcttcacgggcgagggcgagttcacgtcagagcaatgccgccaggtgctcgagtacctcaccaccagcgccgaccaggtcgagctctacaacgccctcaagctggggcgctacatccccagcaccagcgcgcgcatgtgcgccactaccttggtcaagtcgattttcgagcgcctcggcctcgctatcacaaagcgcaagacgaacggtgtgcacttgttctcagtaaacccggacaattggcagttcatcatggcctattgccagcgacgcgcagcgaagaacgtccactcgctgaccacccacgagcacgacgcggcccaccagcccaagctcgcgccagagccccaggcagatgcccaggccacgcctggcgcggcttccagcgacagggatactttgcagtgtgatggtgtaagcgagagtggaaagtatcccttgagcgtgcgggagagaatcttcgccgttgcttctcgcttcgccgcacccgccggtatctctctgacgcgactcgtgggggcgctgacgccggaggtggcgggcagcctggccaagccgggagcggagcagagccgaacgctagggttcacccttgcgtatgcggccaagctgctgcgatcctag

SEQ ID NO: 350368 - DNA, 264 bp, Pseudomonas aeruginosa
ttgcaatgccgtgaaaagatggacagagcgtccgccaaactcagccgcgccaggtcggcgctaacgctggccatgaaggccggccccgaggctaccaagggcgagctgctggacgcagtcctagccgccctcgagcacattgatgccgctgacgcggcgctgggagatgaggaaacgcgagcaggtcggccgggggatatagccccggcgaccgaggcaggtcacccgcggctagtcgtcgccgccacctggagcgcctcgtaa

SEQ ID NO: 350369 - DNA, 1674 bp, Pseudomonas aeruginosa
atggcgaagaaagcggcaactaaaaaggcggtcgaccaggtgacggaatcggccaagggtgaggaagcgatcgaccatcgcgagcgggtcagcttcggcaactacggcggggccacccggcagaaggtcgagctgcagccgttgatcgacaagctgctcgaggacgtgaaggcgatcgacaacgacgacagcctgagccgcggcgacaagaccaagcgcctgtcgcgcctggccgatcgcctgaaaaacaagctgtacgaggatcggcgccgcaaggatgcggacaagctcaaggcctcgagctaccgccgctacctgaccaccgtccgcaaggcgatcaccgcgcagaactggcgccaccactccatcgaggagagcgcccagcgcctggccaagcatcacccgcgctatgccgagcagctgctagccatggtcgacctggtcgacatcaccgagctgcgcctggcccatcgcgacctgctggcgcagatccgccaggatcgcgacgacgacgcctacgaggcggtcaagggcatgaagctcgaccacgagatcatgcgccacctgaccctgccggcggcgaccaaggcccagctggccaccgacgcagtcgagacgctcgagcaccgcgccaccaacaccatctcgatcaactaccactggctggtcgagaccatccgcgagctgctggccgcgaccgagatccgcgccgatggcaccgcggtgcccttcttctcctacctggccctggggctggcgctggcgaccggacggcgcgaggtggagatcctcaagctggcgcgcttcgagaaggtcggcgagttcgagctcgagttctcgggccaggccaagcgccggggcggggtggactacggcgacagctaccggatctacaccctcctgcaggccgacgtcgtgctcgaggccttcgccaagctgcgcgccatgcccgaggtgctcgagctgcagcacctggacaacaccgaggtgaaccgccgggtggccaagaccctaaacacccaggccaagcgcgtattcggcaaccaggagcgggtcttcaaggatagccgcgccatctgggcgcgggtggtcttcgagctgcacttcacccgcgacgcccgctgggcgaaggtcaacgagacagtgttctggcgcgagatgctgggccacgaggatatggacacccaggagagctacaaggccttcaagatcgactacaccccgccggcgaagccgacggcgccggccagcaaatacggcagccgcctcgaggcgctcgaggccctggacgagcacgagcagatcgccggccgcgaggcgatgcagaagatccaccgctgggtgaaagagaccgtgaaggcggcgcccgaggcgcggatctcgcagaaggcgatcgcgaccaatgtcggcagctaccgcccggtcatcaaggagtatctcgagctggcggccgaggcgcttgccagtccggcgcgacctgtcgaggagatcgccccggctgtaccggctgaggtggtgaaggctaagccgcggatctcggtcagcgaggtatccagcggcaagtgggtggcggtggcccgcgtgaatggcgtcgaggtggcgcgcggtgagggggccgaccgggctgcagcttacgaggcgctccaggtggcggcgacgactagccgcgggtga

SEQ ID NO: 350370 - DNA, 1674 bp, Pseudomonas aeruginosa; identical to SEQ ID NO: 350369

SEQ ID NO: 350371 - DNA, 264 bp, Pseudomonas aeruginosa; identical to SEQ ID NO: 350368

SEQ ID NO: 350372 - DNA, 3885 bp, Pseudomonas aeruginosa; identical to SEQ ID NO: 350367

SEQ ID NO: 350373 - DNA, 666 bp, Pseudomonas aeruginosa; identical to SEQ ID NO: 350366

SEQ ID NO: 350374 - DNA, 591 bp, Pseudomonas aeruginosa; identical to SEQ ID NO: 350365

SEQ ID NO: 350375 - DNA, 390 bp, Pseudomonas aeruginosa; identical to SEQ ID NO: 350364

SEQ ID NO: 350376 - DNA, 174 bp, Pseudomonas aeruginosa; identical to SEQ ID NO: 350363

SEQ ID NO: 350377 - DNA, 819 bp, Pseudomonas aeruginosa; identical to SEQ ID NO: 350362

SEQ ID NO: 350378 - DNA, 318 bp, Pseudomonas aeruginosa; identical to SEQ ID NO: 350361

SEQ ID NO: 350379 - DNA, 324 bp, Pseudomonas aeruginosa; identical to SEQ ID NO: 350360

SEQ ID NO: 350380 - DNA, 252 bp, Pseudomonas aeruginosa; identical to SEQ ID NO: 350359

SEQ ID NO: 350381 - DNA, 240 bp, Pseudomonas aeruginosa; identical to SEQ ID NO: 350358

SEQ ID NO: 350382 - DNA, 552 bp, Pseudomonas aeruginosa; identical to SEQ ID NO: 350357

SEQ ID NO: 350383 - DNA, 573 bp, Pseudomonas aeruginosa; identical to SEQ ID NO: 350355

SEQ ID NO: 350384 - DNA, 570 bp, Pseudomonas aeruginosa; identical to SEQ ID NO: 350354

SEQ ID NO: 350385 - DNA, 2013 bp, Pseudomonas aeruginosa; identical to SEQ ID NO: 350353

SEQ ID NO: 350386 - DNA, 516 bp, Pseudomonas aeruginosa; identical to SEQ ID NO: 350352

SEQ ID NO: 350387 - DNA, 1425 bp, Pseudomonas aeruginosa; identical to SEQ ID NO: 350351

SEQ ID NO: 350388 - DNA, 414 bp, Pseudomonas aeruginosa; identical to SEQ ID NO: 350349

SEQ ID NO: 350389 - DNA, 612 bp, Pseudomonas aeruginosa; identical to SEQ ID NO: 350345

SEQ ID NO: 350390 - DNA, 990 bp, Pseudomonas aeruginosa; identical to SEQ ID NO: 350343

SEQ ID NO: 350391 - DNA, 531 bp, Pseudomonas aeruginosa; identical to SEQ ID NO: 350341

SEQ ID NO: 350392 - DNA, 348 bp, Pseudomonas aeruginosa; identical to SEQ ID NO: 350340

SEQ ID NO: 350393 - DNA, 312 bp, Pseudomonas aeruginosa; identical to SEQ ID NO: 350339

SEQ ID NO: 350394 - DNA, 663 bp, Pseudomonas aeruginosa; identical to SEQ ID NO: 350338

SEQ ID NO: 350395 - DNA, 246 bp, Pseudomonas aeruginosa; identical to SEQ ID NO: 350336

SEQ ID NO: 350396 - DNA, 678 bp, Pseudomonas aeruginosa; identical to SEQ ID NO: 350335

SEQ ID NO: 350397 - DNA, 507 bp, Pseudomonas aeruginosa; identical to SEQ ID NO: 350332

SEQ ID NO: 350398 - DNA, 567 bp, Pseudomonas aeruginosa; identical to SEQ ID NO: 350331

SEQ ID NO: 350399 - DNA, 228 bp, Pseudomonas aeruginosa; identical to SEQ ID NO: 350326

SEQ ID NO: 350400 - DNA, 327 bp, Pseudomonas aeruginosa; identical to SEQ ID NO: 350321

SEQ ID NO: 350401 - DNA, 924 bp, Pseudomonas aeruginosa; identical to SEQ ID NO: 350320

SEQ ID NO: 350402 - DNA, 291 bp, Pseudomonas aeruginosa; identical to SEQ ID NO: 350318

SEQ ID NO: 350403 - DNA, 312 bp, Pseudomonas aeruginosa; identical to SEQ ID NO: 350316

SEQ ID NO: 350404 - DNA, 654 bp, Pseudomonas aeruginosa; identical to SEQ ID NO: 350315

SEQ ID NO: 350405 - DNA, 195 bp, Pseudomonas aeruginosa; identical to SEQ ID NO: 350082

SEQ ID NO: 350406 - DNA, 2709 bp, Pseudomonas aeruginosa
atgagtgagatcagtcgcgttgcgctgttcggcaagctgaacagcctggcctacaaggccatcgaggccgccacggtattctgcaagctgcgcggcaatccctatgtcgagctggtgcactggttccaccagatcctccagttgccggactcggacctgcaccagatcgtccgccagtccgggatcgacccggcgcgcctggccaaggacctgaccgaggccctcgaccgtctgccgcgcggctcgacctcgatcaccgacctgtcctcccatgtcgaggaagcggtggagcgcggctgggtctacggcagcctgatgttcggcgagagccaggtgcgcaccggctacctggtgatcggcatcctcaagacgccgagcctgcgccatgccctcaccgggctgtcggcggaattcgccaagctcaaggtcgaggcgctcaccgagcgcttcgacgagtacgtcggcgcctcgccggagaacggcctgtcggccagcgacggcttcaacgccggcgccgccccgggcgaggccagcggcgccctggcgccgagcgcgatgggcaagcaggaggcgctcaagcgctttaccgtggacctcaccgagcaggcccgcagcggcaagctcgaccccatcgtcgggcgtgacgaggagatccgccagttggtggacatcctcatgcgccgccggcagaacaacccgatcctcaccggcgaggccggcgtcggcaagaccgcggtggtggaaggcttcgccctgcgcatcgtcgccggcgacgtcccgccggcgctgaaggacgtcgaactgcgcgccctcgacgtcggcctgctgcaggccggggcgagcatgaagggcgagttcgagcagcgcctgcgccaggtgatcgaagacgtgcagagttccgagaagccgatcatcctgttcatcgacgaagcccacaccctggtcggcgccggtggcgcggccggcaccggcgacgccgccaacctgctcaagccggccctggcgcgcggcaccctgcgcaccgtggcggcgaccacctgggccgagtacaagaagcacatcgagaaggacccggcgctgacccggcgtttccaggtggtgcaggtggacgagccgtccgagcacaaggccatcctgatgatgcgcggtgtcgcgtcgaccatggagaagcaccaccaggtgcagatcctcgacgaggcgctggaggcggcggtccggctgtcgcaccgctacatcccggcgcgccagctgccggacaagtcggtgagcctgctggataccgcctgcgcgcgcaccgccatcagcctgcacgcggtgccggccgaggtcgacgatagccgccggcgcatcgaggcgctggaaaccgagctggcgatcatccgccgcgagagcgccatcggcgtcgccaccgccgaacgccagcgcaacgccgagaccctgctggccgaggagcgcgagcgcctggccgccctggagcagcgctgggccgaggaaaaacgcctggtcgacgaactgctggagacccgcgcccgtctgcgcgccgccgccgaagcggtggacgccggcggcgcgccgctgggcgaaggcgaggcgcgtctcgacgaggaacagcgccaggcgctgcatgcacggctggccgaactgcaggcgcaactgagcgcgttgcagggcgaagagccgctgatcctgccgaccgtggactaccaggcggtggcctcggtggtcgccgactggaccggcatcccggtcggccgcatggcgcgcaacgagatcgacaccgtgctcaacctcgaccggcacctgaagaagcgcatcatcggccaggaccacgcgctggagatgatcgccaagcgcatccagacttcccgcgccggcctcgacaacccgagcaagccgatcggcgtgttcatgctcgccggcacctccggggtgggcaagaccgagaccgcgctggcgctggccgaggccatgtacggcggcgagcagaatgtcatcaccatcaacatgagcgagttccaggaagcccacaccgtctccaccctcaagggcgccccgcccggctacatcggctacggcgagggtggcgtgctgaccgaggcggtgcgtcgcaagccctacagcgtggtgctgctggatgaagtggagaaggcccacccggatgtccacgagatcttcttccaggtcttcgacaagggcgtgatggaggacggcgaaggccgggtgatcgacttcaagaacaccctgatcctgctcaccaccaacgccggcaccgagatgatcgccagcctctgcgccgatccggaactgatgcccgagccggaagccatcgccaagtcgctgcgcgaaccgctgctgaagatcttcccgccggcgctgctcggccgcctggtgaccatcccctactacccgctcagcgacgacatgctcaaggccatctcgcgcctgcaactggggcggatcaagaagcgcgtggaggcgacccacaaggtgccgttcgagttcgacgagggcgtcgtcgacctgatcgtctcgcgctgcaccgagaccgagagcggcggccggatgatcgacgcgatcctcaccaacacgctgttgccggacatgagccgcgagttcctcacccgcatgctcgaaggcaagccgttggccggggtacgtatcagtagccgcgacaaccagttccactacgacttcgccgaggccgagtga

SEQ ID NO: 350407 - DNA, 1002 bp, Pseudomonas aeruginosa
atggatgcagtgaccgagcatctgcgacaggtcggtgccgcctcggtacgtcggttggcactgaaggtgtttcagcaacgaccggggatcagtggtgagcgcccgacttttacggctggcggcgagtggtccgagggggacgatgccgccgacgcgctcgccaagggatggactgccgctcacctggccgagttgggacggaccggcgagttgttcatgctggagccttctgagccacagcaatcgacgaccaccaccaaagcgaagcccttgaaggtgatcacgcgcaacagcggcgcggagaagcccgctccagcgccgaacggcttccgcgtgacagatgacggagtgttctatgtgggggatgacgatcaaccccgctcggtatgctcacgcctggatatccttgcacgcacgcgcgacgacaaagggcataactggggcctgctagtggagttcgacgacccagacggtgatcgcaagcgctggaacatcccgcaacgcagcatggcaggagacttcggcaaagaggtgcttggtccattggtggatatgggattacgcctggcccccgtgcggacggctcgtaacgcccgcaacgatctacagagctacttgcagagctacgacagcagcgaacgggctcgcctggtcacgcgccttggatggcatggggatgcctatctgctaccagatcaacaggtagggcggagtgctgaacacctgcacttctacgaagccggagcccagctcccccccattagccaggcaggcaccctggagcagtggcagcagcagataggtgcgctgtgcgtgggcaacaaccgcttagcattcgtggtgtctgtagcctttgcaggcccgctactgcaactgctggggcatgagtcaggcggcttccatctgtacggcgacagctcggggggggaaaaccacacacttgcaggtggccgcctcggtctggggcgggccgcgcctggtgcgttcctggcgctccactga

SEQ ID NO: 350408 - DNA, 1386 bp, Pseudomonas aeruginosa
  misc_feature (1164)..(1189): n is a, c, g, or t
atgtgcaggcgcgttaatcgtgcggcggcactctattgccgttcgaaaaaacacttcatcacgggcgtcgccctgatggttaccgcaacaggcgtggctcacgctgcaaacacggtcgactccaggttcacgaacaccgttgtgaccggcgacggcaacagcgtaaccggcaaccgcgatacccatttctccggggcaacttcggctaatgaccaggttatcgtcggcaaccacaacaccctaaacaacactatgtcgtcggagatcatcggcaactacaacaccgtcaacaacagcgacatcgttgttcgcggcgaaagtaacacagtgtcgaacgcatacggccaagtgtcaggggactcgaacaagatcgatgcggcgaacgggacaacaacggtcattggctccagcaacaccgtcaccgggcagagcaacactgccgttggcaacgggaacacgatgaccggccggggatccgtggcgatcggtgaggcgaccacgacgacggccagcaacagcgtcaccctcggcacagggtcgagcaacaaccgcgacaacaccgtgtctgtcggcgccgtgggcggcgaacggcagatcacgaacgttgctggtggatccgcgcgaaccgatgcatcgaaccttggccaagttcaggacggtgacgccgcgacactggccgcggcgaagggctacaccgacacccaggtgagcgcagaggcgcagaagcgggcagacgaggataaccgggttctcggcacggccacgaaccacacgaaccaggcggtggccaacgaagcgcaaacacgcggacaagaggacgcacgcgtcctcggcgaggcgatcgatcatgcgaatcagcaagtagcggccgaggctcaggcccgccacgccggcgacgccgcgacgttggccagcgcgaacaatcacactgacagcgcgatcaagactgaggcgaaagcccgggaagatgccgacgcggccgaggccaaagcccgggcggatggcgatgcggcgaccctggcgagcgcgaaccagcactcgcagcagctggtggacgccgaagcgaaggctcgcgccgatgccgacgcggctgaagccaaggcccggacggatggcgatgcggcgaccctggccagcgcgaaccagcactcgcagcagctggtnnnnnnnnnnnnnnnnnnnnnnnnnnagcgcgaaccagcactcgcagcagctggtggacgccgaagcgaaggctcgcgtcgatgccgacgcggccgaggccaaggccagggtggatggcgatgccgcgacgttggccagcgccaagaaccatacggaggattactcggttgcgcgaggagtagaggccggggacggctcggtcgctgtaggcaaaggatctaa

SEQ ID NO: 350409 - DNA, 543 bp, Pseudomonas aeruginosa
gtgtctgtcggcgccgccggcggcggcgaacggcagatcacgaatgttcgtgccggcacggccggcaccgatgccgtgaatctctcgcagatgcaggccgccgacttgcagacgctgaatagcgcgaaccactacaccgacagccgggaggtggcgatccggcaggacatgtacgccggcgacgtgaacacgctgaacagcgcgaatcattacaccgaccagcgcatcgatgccctcgacagctcgttcaacgacgctctcgccggcgcctacagatatgtccgcaaagagaaccagcagatgcggcaggagtaccgtgcgattggcgcgctggccatggccacggcggcaatcggcattggccccaaggatctcggccgctcgcagttcgggttcggcatggggacggtgcagagcgcgtcagcgatggccatcggcttgaaccactacgtgaacgactcgaccgtggtcacgttccgcggcgctatcggtacgagcaaagcggtgtcgggcgcgtcgttcggcgtcgtgaaaggatggtga

SEQ ID NO: 350410 - DNA, 165 bp, Pseudomonas aeruginosa
atggatccgcagcaccaggtgctcggcgccgccggcgccgatggccacctgcagggcgtgatcgaggtcgacgtgctccaccagctgctcaccggccgcgccgggtggatccgcagcaccaggtgctcggcgccgccggcgccgatggccacctgcagggcgtga

SEQ ID NO: 350411 - DNA, 258 bp, Pseudomonas aeruginosa
atgaaacctggaaccgccaaagactcctttctgacaccaggagaagtcgacccgcggcattttgaactgctcttggaaggcacttctatccgagcgcagccgttgatcgatgcgcttcgcgaacacctggtcaatggcgtaaaggccagtgaggcctggacgaagtatggagtgaacatgagccagttctcgcggcgcctagcggtgctgcggaaagaaagtcagcgtgcagccgagttaagcagattttacctttaa

SEQ ID NO: 350412 - DNA, 2295 bp, Pseudomonas aeruginosa
atgccgctctccccgcccttcgccctgcgcccctgcctggccctgctgttgctcagcccttccctggccctggcggggaacgccgtcccgctgaccccgaccaccatcaccgccactcgtaccgagcaggcagtggattcggtgccaagcaccgtcagcgtgcagacccgcgaacaactggaccggcagaacgtcaacaacatcaaggaactggtgcgctacgaaccgggagtctcggtcggcggcgccggccagcgtgccgggatcaccggctacaacatccgcggcatcgacgggaaccgcatccttacgcagatcgacggggtcgaactgcccaacgacttcttcagcggcccctacgcgcagacccaccgcaactacgtcgatccggacatcgtaaagcgcgtggaaatccttcgcggcccggcctcggcgctgtacggcagcaacgccatcggcggcgcggtgagctacttcaccctcgacccgtcggacatcatcaaggacggcaaggacgtcggcgcccggctgaaggccggctacgagtcggcaagccactcctggctgacctcggccaccgtcgccggccgcgccgacgacttcgacggcctgctgcattatggctaccgccagggccacgagaccgaatccaacggcggccacggcggtaccgggctctcgcgcagcgaagccaacccggaagacgccgacagctacagcctgctcggcaagctgggctggaactacgccgagggcagccgcttcgggctggtcttcgagaagtacaagagcgacgtcgataccgaccagaagagcgcctatggcggcccgtacgacaagggcaagccggccatcccaccgagcatgctgccgggcggcatgtaccagtggcgcaagggcaacgacaccctgactcgcgagcgctacggcctggagcaccatttcctgctcgacagcccggtcgccgatcgcatccagtggagcctgaactaccagttggcgaagaccgaccaggcgacccgcgagttctactacccgatcacccgcaaggtcctgcgcacccgcgacactacctacaaggagcgcctgtgggtcttcgacagccagttggacaagagcttcgccatcggcgagaccgagcacctgctgagctacgggatcaatctcaagcaccagaaggtcaccggcatgcgcagcggcaccggcaccaacctggacaccggcgcggacagcccgcgcgatgccctggaacgcagcagcgactttcccgatccgacggtgaagacctacgccctgttcgcccaggacagcatcagctggaacgactggaccttcactcccggcctgcgttacgactacacgcgcatggagccgcacatcaccgacgagttcctgcgcaccatgaagcagagccagaacaccgcggtcgacgagtcggacaagaaatggcaccgggtttcgcccaagttcggcgtgacctacgacttcgcccagcactacacctggtacggccaatacgcccagggcttccgcacgcccaccgccaaggcgctgtacggtcgattcgagaacctgcaggcgggctaccacatcgagcctaaccccaacctcaagccggaaaagagccagagcttcgagaccgggctgcgcggcaagttcgacgaaggcagcttcggcgtggcggtgttctacaacaaatatcgcgacttcatcgacgaagacgccctgaataccgatagcaccggcggcaacggccagaccttccagtccaacaacatcgagcgtgcggtgatcaagggcgtcgagctcaagggccgcctggagctgggcgccttcggcgcgccgcagggactctacacccagggcagcgtggcctacgcctacggtcgcaacaaggacaacggcgagccgatcaacagcgtcaacccactcaccggagtgttcggcctgggctacgacgaagcagacggcaactacggcgggctgctcagctggaccctggtcaaacgcaaggatcgcgtcgacgacagcaccttccacaccccggatggcaccgccagccagttcaagcccccgggcttcggcgtcctcgacctcagcgcctactacaggctgagcaaggacctgaccctcaacgccggtctctacaatctgaccgacaagaaatactggctgtgggatgacgtgcgcggctacgacagcgtcggcgaggcttcggcgctggccccggccaacatcgaccggctgtcccagccaggccgtaatttcgcggtcaacctggtctgggacatctga

SEQ ID NO: 350413 - DNA, 237 bp, Pseudomonas aeruginosa
atggataacgtattcatactccaccatacatacggagactctgaaagtgaaagctataagcttctaggagtattcagcacagaggacagggcaaactcagaaatccccaaatacctaaagctcccagggttcaaagagttccctgacggatttactgtaaccaagtactcccttgatgaaccacattggttaagcggtttcgaaggagcagagtctagcgttatagaagataagtaa

SEQ ID NO: 350414 - DNA, 1347 bp, Pseudomonas aeruginosa
  misc_feature (421)..(421): n is a, c, g, or t
atgaggattgaaaagcgtgcgcgttggttcgccctggtgcgtcaggtctgcgccgtgttgctggtgttgtgtagctggagtgcctacgcggagccttattactggcaattaaacggcccgactgctcctgaccggtttaccagtcctagtgcggcttgtgaggtcgggctgggaatgtataaggctcaatatcccacggttgaaatggtgatcaattcgcgggagatgaggagctcgaccaactatgtgtgcacggtgtttcgttatttcaacgggaatcgtattgagccgaatttcactatttccgtcatgcgcaagggcaccggttgtgctgagggctccacgtataacgcgcaaacgggagtgtgtgaaacgccgccggaaaacaactgcatcaaagggctgacggatctgttcagtncaccgccctcgaacatcttcgtgtcgggcggcagaaacttcgtgaatagctcgccgcccactgcctgcaagaatggttgtcagtacctgccgaccacctcgaagaccaccagttgctatcgctatcccggcagcgacaaccaaggcttctgcaactacgtgttgatgacggacggtagtgcctgcgccgctgactccggcaatcccggcatgaccggtccctcgttgaacgacacgccgccgaccaatcccgacgaaccgccgtccgacccgaatgaccctggctgtcctcccggctatagctggtccgggacgacttgcgtcaagacgcccacggatccgactgagccggggggcgatggcggtgatggtggtgatggcggtaacaccggtggcggcgatggcgggggcgacaacggcggcggcaatgacaacgggggtggcgacggcggcaccggtggctccgatgggagcggcggcaatggggagggcggcggcgatggaagcgggggaggcgacggcagcggcggcggaaccggtggcggcgatggcggcgatggcggcgatggcggcaactgcgacccggcgaaacaggactgctcccccggtcctgccggccccggcggcgaactcaaggaacccaagcccggcacctgggatgacgccatcgccacctgggaacagaaggtcgagcaggccaagaaagaactcaaggacaaggtccgggccaacgtcgatcagatgaagggcgcgttcgacctcaacctggcggaaggcggcggccagcttccctgcgagtccgtgaccatttggggccgatcctactccctctgcgtcgctgactacgccgaccagctctccaacctgcgtgtggcgctgctgctgatggccgcgctgatcgccgctttcatactgctgagggactga

SEQ ID NO: 350415 - DNA, 303 bp, Pseudomonas aeruginosa
atggccaagaccaacgcccagcgccagcgggagaagcgccagcgccagcgacaggccggcatccccgagcgcaagctaccctcaccgcccgcaatcgacgcagcgtttgagcgcctgcaggcggtcggcgatttcgaggactggcgagaagcgttctcgacgcttctactcaacgcctcagccctacccgatgccgatctcctgcctcttctcgtcgtgtcgcgacacgaatacacgccaagcgaaaacgtgtcgcgacaactactcgccgccggactctccgtagccgacgacgaacagtaa

SEQ ID NO: 350416 - DNA, 1635 bp, Pseudomonas aeruginosa
gtgcagacgccgatccttggcctgatcgtgagtcgatatctcgcacacacggctcacaagggctctttctactacaacgtatcggcagcgctggactttaagggtcggatccgggggcgtctgctggtcgcggatgacgctccgactgacgaaaaggggcggatcctcgaagagagttatgccaacggcatcgcgagcgcgtgtcgcggccagccgggcctagtcgtgtcggtcatccaggaagagaaatcgcaggtcgcaccgttgccattttcgctgctggacctgcaggcgcagatgagccgtgaacatgggatcaatgcggaaaagaccttggcgatcacccaggcgctgcgcgagaagcacaaggcgatcacgtacaaccgctcggactgcaactacttgtccaccgagcagcataccgaggcgccgggaacgctggcggcgctatcgcaagcactaccggagctgcggacgaccttcgagcagcttgacccaggacgtaagggacgggctttcaacgattcgaaagtgtcggcgcataccgcgatcatcccgaccgcggtagtggtggacatgaatgcactgagcgccgacgagcaagcggtctacctggcgatcgtcaggcagtacctggtgcagttcatgagcgagaagcggtatttggccgtgaaggcgctgtttgaggtgcagggtcatgtgtttgaggcgagcgcgaccaagaccacggcgccgggctggacccagttgctgcgcgaggtagccgatgaggcgagccaggccggcgaagaggatgagggcgaggtggaagctacgcagttcgaggagctgtcggctctcgctggaggggagcaaggccattgcctggatgcatcggtttccagggcgaagaccaagccgttaccgctgtataccgaggcgaccttgctgaaagaccttaagcaggtggccaagtacgtgcaggaccagcgcatcaaggcgctgttgctggaccgcgacgatggcaaggctggagagcgtggcggcatcggcaccccggccacccgggcggcgatgttgggcaagctgcaggagcgcggtttctacacgatcgagaagaagaagctggttccgacggccctcggagtggccttcatccaggcgctaccgcggatcgcaacgaccccagacatgacggcgctgtggcatgagcagcaggtgatgatcgagcgtggcgagctgtccgtcgatgccttcctggacgagctggaggccttcatcggtgagcaggtcagcacgatcgatctcggcgacatgcccattgccggacgtgctggggtcgagccgctggcggcgcgctgccccatgtgcggtggcgagctggccagaacggcaaaggtggtggggtgcaaggggtgcgagtttcgcgtgtacccgagcatcgccggcaaagagctgaccaccagtcacctcgaaagcctgctcagcaagggcaagaccagtttgatcaagggattcaagagcaaagagggcaaggccttcgacgccgccctgctcctcaatggccaaggaaaggttgtgttcgatttcccgaagaccagcaagaccagcaagaccagcaagaccagcaagaccagcgggaagcgttacgcgtaa

SEQ ID NO: 350417 - DNA, 489 bp, Pseudomonas aeruginosa; identical to SEQ ID NO: 331456

SEQ ID NO: 350418 - DNA, 231 bp, Pseudomonas aeruginosa; identical to SEQ ID NO: 324249

SEQ ID NO: 350419 - DNA, 273 bp, Pseudomonas aeruginosa
gtggggctgatcgacgcgagcgcaaacgagctgaacagctcgaccacccctgtgccctgcgccatctatgcgttcggcgctcagcagcgctcgcggtacgtgggcgaggtgccggactttggcatatgcaacatggcgttcctcgcgcctggcgatccgctggtgatcggcagcgacacttggcgcgtctatccgttgctccaacgcggaagcgctaccgatttcggcaacaccagcgcctgggtcggctactgcttccgggtacttgagtaa

SEQ ID NO: 350420 - DNA, 312 bp, Pseudomonas aeruginosa
atgagcgaacccatgttcacgctgtgcggccaggtggccaacgtgtacgtccagccgggtggcacctcgaagaagaccggcgaggcgttcgaccctcgcgacaaggtgcagatcctcgggcacctccccctccccaccgggggccacaagctggagctggtgaccctcaacgtcgaagacgcccgcctgttccaggccgcgctcaacaagaccatccgcgttcctgtgggggtctacgccatcggcaaaacggtcggctacttcatcccccagggcgcaaagccccagcttcagcagcctgttcagaagtag

SEQ ID NO: 350421 - DNA, 366 bp, Pseudomonas aeruginosa
atgactcacttcgaacagttcatccagtaccgcgccctgtctttcaagttcaagaccacgggcggcatgtccctcggccagatggagcgcatgctggccggcggctccatcggcaccaaccaggacggcaccttcgtgcctgccaccagcctggaagaggtgttgccgttcaaggtgcagaacgtctgcgccaagctcgctcagcccctggttgatcgcctggacgaagcgctcggcgtcctgggcatgaccaagcgcgacttcatcgagctggccctgatcgaggccctggacaaggttgaccaggtgctgaaggacaccgacgccttcgagtacgtcgacgcacgcgcagagggggacgagtga

SEQ ID NO: 350422 - DNA, 456 bp, Pseudomonas aeruginosa
gtggtgggttcctaccgtggcgacgtcgccacccgctggtcagacgtcagcgaccggcacagaggcatcagcagcccctacgagcgcagttgctatctccgcgatcccgccgggcgctggctcggtttcactgtcgcaggtgggtcagccaacgagtccgactacagcaatcggaccctgctgccgcttggctgcggtcgctatgcgggtggtagcgacactgtgatcaaccagctccgcgactctttcagcaagttcccgctgaaagctttgcagttcgtcacccgcgaaaccgaggggcgccgctatctgggcgatttcgacggcgccttctacgtgccgacgctcaactcgggcgctgaagacgtgattgtcgaggacggtgtggaccacgtcgttttccaaaccgcttggcgtagcggtaacccttggctctacgcgatcaggaaggactga

SEQ ID NO: 350423 - DNA, 624 bp, Pseudomonas aeruginosa
atggctgaacaagcagtgcatgttcccgccgggtaccgcatggacgccaaggggcgcctggtacctgaagaaatgatcaagcccattgacctggagcgcgaccgccttgtgcaggagatcgttgccaaggggaaggttctgaacaaggcgttgctggatttcaaactggccacattcggcgatatcgaagccttcatcaccctgtcggccgagcagtaccaggcgaaggtaggaggcaagaagggcaacgcctctctggtcagcttcgacggtcgctacaaggtcattcgggccatggccgacaacatcgccttcgacgagcgcctgcaggcggccaaggcgctgatcgacgagtgcctccacgaatggacggaaggtgctcgcgcggaggtcatcacgctgatcaacgatgcgttccgcgtggaccaagctgggaacatccgtaccggcagcgtgcttgccctgcgccgcctgcagatcgatgacgaacgttggcagcgtgcaatgcaggccatcggcgaggctgtccaggtcgtgagcaccaaggcgtacgtgcgtatccaggagcgggtcggggacaccgaccagtaccgctccattcctcttgatatcgcgggggtgtga

SEQ ID NO: 350424 - DNA, 195 bp, Pseudomonas aeruginosa
atgcttggcgggtacggtatcggcgcagccgcgcgccagggtgaccgtgccgctggcgtagttgaccgcatcgacccggactatctcgtcgtccacgactgcggcctggccgacagtgacgtcttccagccggctggcgttcgtcagcgtgacgacgctcgggccggccgccagcggcagctcggcggcgagtag

SEQ ID NO: 350425 - DNA, 195 bp, Pseudomonas aeruginosa
atgcttggccggtacggtatcggcgcagccgcgcgcgagggtgaccgtgccgctggcgtagttgaccgcatcgacccggactatctcgtcgtccacgactgcggcctggccgacagtgacgtcctccagccggctggcgttggtcagcgtgacgacgctcgggccggccgccagcggcagctcggcggcgagtag

SEQ ID NO: 350426 - DNA, 231 bp, Pseudomonas aeruginosa
atggctaccgccaattctatccagtacctcgggcttctcgggaagaccgttcacctggtcgagcacatccgccaccctgagctgaccctggactgcccacatcggggccgagtcctggccgtggtggttcccctccccggctctggggtatccctctcgctgctgttggacgagaacggtcaggccgactactacgacgtcccagactgcacgctgctcgaaatcctgtaa

SEQ ID NO: 350427 - DNA, 291 bp, Pseudomonas aeruginosa; identical to SEQ ID NO: 343737

SEQ ID NO: 350428 - DNA, 183 bp, Pseudomonas aeruginosa
ttgctgctggtcgagcagcgcggcgaggtcctgcaggttgcggcctccttgctgttgttgctggtcgagcagtgcgacgaggtcctgcaggttgcgacttccctgctgttgttgctggtcgaggacagcggccaggtcctggaggaactgccggcccttctgctgttgttgctggtcgagtag

SEQ ID NO: 350429 - DNA, 231 bp, Pseudomonas aeruginosa; identical to SEQ ID NO: 350426

SEQ ID NO: 350430 - DNA, 231 bp, Pseudomonas aeruginosa; identical to SEQ ID NO: 350426

SEQ ID NO: 350431 - DNA, 432 bp, Pseudomonas aeruginosa
gtgctggttcgcgctcgccagggtcgccgcatcgccatccgcccgggctttggcctcggccgcgtcggcatcggcgcgagctttcgcttcggcatcgacgcgctgattggtgtggtccttcgcgctcgccagggtcgccgcatcgccatccgctcgggctttggcctcggccgcgtcggcatcggcgcgagctttcgcttcggcatcgacgcgctgattggtgtggtccttcgcgctcgccaacgtcgcggcatcgccatccaccctggccttggcctcggccgcgtcggcatcggcgcgagccttcgcttcggcgtccaccagctgctgcgagtgctggttcgcgctcgccagggtcgccgcatcgccatccgctcgggcctgggcctcggtggccaccgtctgatcggtgtgggccttggcgtcggctag

SEQ ID NO: 350432 - DNA, 315 bp, Pseudomonas aeruginosa; identical to SEQ ID NO: 324246

SEQ ID NO: 350433 - DNA, 315 bp, Pseudomonas aeruginosa; identical to SEQ ID NO: 326731

SEQ ID NO: 350434 - DNA, 615 bp, Pseudomonas aeruginosa
  misc_feature (595)..(604): n is a, c, g, or t
gtgcgttctagcatcagccttccagttattgagcggttggtaatccggaacttctcactctaccctggtgagcatggcaatggactggacattgcattcgaaaatggcatcagtgtgattgcaggtatcaatggtattggcaaaaccacattgctaaccctattgttaaggttattgctcgggccgagtaacccggaaaaggcgaccaagaatgtggggcgggtaagccagcgacgcttggttgagccaaagaagtttgacttcttctcaagccgggttcctgaaaaactggacgatgatgcctacgccactttgtatttcagcgtggggcagaggaaagtggaggtctcgcgatacatgcgagatatgcgtataaagggagtgaaggtttccggacgcaagtatacaccagcaggtgagacggcatttattgaagagctggcctccatgagtggactactatcagcgtacgactttcacatggtagtcagatatcttcagtttttcggtgaggaccgtttgccgttgctatgggagccgtcggctcagtttgaattctttaagatactattctttgacgagtcagtggccgaannnnnnnnnnaaatattctaa

SEQ ID NO: 350435 - DNA, 684 bp, Pseudomonas aeruginosa
atggcgttgtactcccgtgacgtgaataactacatagccttgaaacagaagtgggatgttgagcgaaagtgttgggttgaagaggtcgatggagtgaagttgaagggcgcctatgcgccacctggcctgcagaagaacccgaccgcgcaaatctctgttgatgccgctgtcgagtaccttcgccgcggcacctctctgcaggagagcgtaaccgtctgtgaggatattcgaaagttcgttacggtgcgacaagtcaacggcggagcaatccaaggttactcaaagttcaacaacaaggccttggtgccggagaagcgcgcagtagttgagggggtaggctggacgcagatcgacaggaagtcgtggcgatctcccgatgaatttgacgcaaggtcatactcgctcgatgaagcctacaccctggcaaccgaaatacgggatgccgtctacctaggtaaagctgtgcgctggtactacgcattgggtgagagtcgtgacattcgttacaagaggcagaatgtcagcggcaaccacaacaaggttcctcgtactgagggggctcgcccattgatggagcttcctgaagaatttccggatgacgttgactatgactggtatgtgagggaagcggtaagcatcctcaaggatgttggtgttgattacatagagggcgacgacttatga

SEQ ID NO: 350436 - DNA, 1620 bp, Pseudomonas aeruginosa
  misc_feature (6)..(15): n is a, c, g, or t
ttgagnnnnnnnnnncttgagttcgtcaagctcgtcctcacccactttgacggctcgatacgtaacgacccgaagaccggtcgtttccaaattcggttaatccgaaacgattacgacgtcgccacgctcgataaagagctgagccccgcgaacgtgatcaagctgtcatcgttccagcgcactgcgtggggtgacaccgcgaatgaggtcatcgtcaagtacaccgaccgtgaccagaatgaagtgcctgctccagcggtccatgatttagccagtatccaagctcaaggtgccgtcatctcggtcacgaggtcctaccctggcatacgtgaaccgagccttgctgtccgcgtcgcgatgcgcgacttgaacaacgtctccaccccgctcgccaagatcacggtcatggtcaaccgcgtcgcgtgggactgggacgtgaccgatgtcttcaagttcacatggccgaagctcggcctcaacggggtgccattcaggatcatcaagatcaacaagggcaacctgctcgacgggacgatcactatcgaggccctggaggacattttcgggctgccagctaacgcatacgtcgcgcagcaaccgtcaggctgggaggaccccatcaacgatcctctgccagttgtcgcgccgcgggcaatcgaggcaccgtactgggacgtggtccagaacctggatcccgctgacatcgcctacctacccgacgactatgcgtttggtgaaaccctggccgtaaagccgactgcggacgcgtacgactacgacctccacgcgagcgcaaacaactctgcgttcaccgacgtgggcgacggggacttcacgccgagcgggacgatcactgccgacatccccctcggtggcgccccgatatcggtgacgatcaacaacatgaacggcgtggatcgagtcggcctgcagagctacgcatacatcgacaacgaagcgttcatcgtcactgcggtcaacccgagtaccggggtgctcgcccttcagcgcggcaccctagacaccgtcccagctcggcacttagctggggcgcgcatctactttgcggacaacggtttcgcagggtacgaccagacgcagcgcactatcagcgagcgcacctactacaaggcgctgacgcgtaccggtaaaggcaccttgaagctcgcgcagaccacctcgttcgacgttgtgttctctggacgcgcccagcgaccttacccgcccggtaactggacgatcaacggcgcctacttccccactgcgatctacggcccgctggcgtcgtcctgggctcaccgagaccgcactcagcagaccgtgagcctggtgcctttcactacgagcagcatcggacctgagaccggaacgacctacacgttccaggtgtacagcgggtcagtgttgaagcgcacttattcgggtctcaccagtacgagctggaactacccactagccgacgacaccgccgacggcgtcctgcaggacctaagactcgttctgcagaccgttcgaggtacgggcgccacttcgacgtcctggcagcggcatgaccatgtgattgacagacacggcctgggcttccacctgggcgaggaattaggaggcgtagcaccatga

SEQ ID NO: 350437 - DNA, 165 bp, Pseudomonas aeruginosa
gtggatccgttcggccttctcgcgggcctggcgctcgtcttcgagcttgcgcgcttcgcgctcggcgcggcgctgctcctggcgctgtttccactcgaggtggcgggcgtcggtgagcttgccgccctcgcgttcgtagatctcggccagggccgcgaagcctga

SEQ ID NO: 350438 - DNA, 291 bp, Pseudomonas aeruginosa; identical to SEQ ID NO: 350318

SEQ ID NO: 350439 - DNA, 165 bp, Pseudomonas aeruginosa; identical to SEQ ID NO: 350319

SEQ ID NO: 350440 - DNA, 327 bp, Pseudomonas aeruginosa; identical to SEQ ID NO: 350321

SEQ ID NO: 350441 - DNA, 366 bp, Pseudomonas aeruginosa; identical to SEQ ID NO: 350322

SEQ ID NO: 350442 - DNA, 288 bp, Pseudomonas aeruginosa; identical to SEQ ID NO: 350323

SEQ ID NO: 350443 - DNA, 279 bp, Pseudomonas aeruginosa; identical to SEQ ID NO: 350324

SEQ ID NO: 350444 - DNA, 228 bp, Pseudomonas aeruginosa; identical to SEQ ID NO: 350326

SEQ ID NO: 350445 - DNA, 1167 bp, Pseudomonas aeruginosa; identical to SEQ ID NO: 350333

SEQ ID NO: 350446 - DNA, 246 bp, Pseudomonas aeruginosa; identical to SEQ ID NO: 350336

SEQ ID NO: 350447 - DNA, 621 bp, Pseudomonas aeruginosa; identical to SEQ ID NO: 350337

SEQ ID NO: 350448 - DNA, 531 bp, Pseudomonas aeruginosa; identical to SEQ ID NO: 350341

SEQ ID NO: 350449 - DNA, 333 bp, Pseudomonas aeruginosa; identical to SEQ ID NO: 350344

SEQ ID NO: 350450 - DNA, 612 bp, Pseudomonas aeruginosa; identical to SEQ ID NO: 350345

SEQ ID NO: 350451 - DNA, 525 bp, Pseudomonas aeruginosa; identical to SEQ ID NO: 350347

SEQ ID NO: 350452 - DNA, 381 bp, Pseudomonas aeruginosa; identical to SEQ ID NO: 350348

SEQ ID NO: 350453 - DNA, 414 bp, Pseudomonas aeruginosa; identical to SEQ ID NO: 350349

SEQ ID NO: 350454 - DNA, 1425 bp, Pseudomonas aeruginosa; identical to SEQ ID NO: 350351

SEQ ID NO: 350455 - DNA, 2013 bp, Pseudomonas aeruginosa; identical to SEQ ID NO: 350353

SEQ ID NO: 350456 - DNA, 570 bp, Pseudomonas aeruginosa; identical to SEQ ID NO: 350354

SEQ ID NO: 350457 - DNA, 507 bp, Pseudomonas aeruginosa; identical to SEQ ID NO: 350356

SEQ ID NO: 350458 - DNA, 552 bp, Pseudomonas aeruginosa; identical to SEQ ID NO: 350357

SEQ ID NO: 350459 - DNA, 240 bp, Pseudomonas aeruginosa; identical to SEQ ID NO: 350358

SEQ ID NO: 350460 - DNA, 252 bp, Pseudomonas aeruginosa; identical to SEQ ID NO: 350359

SEQ ID NO: 350461 - DNA, 324 bp, Pseudomonas aeruginosa; identical to SEQ ID NO: 350360

SEQ ID NO: 350462 - DNA, 318 bp, Pseudomonas aeruginosa; identical to SEQ ID NO: 350361

SEQ ID NO: 350463 - DNA, 819 bp, Pseudomonas aeruginosa; identical to SEQ ID NO: 350362

SEQ ID NO: 350464 - DNA, 174 bp, Pseudomonas aeruginosa; identical to SEQ ID NO: 350363

SEQ ID NO: 350465 - DNA, 666 bp, Pseudomonas aeruginosa; identical to SEQ ID NO: 350366

SEQ ID NO: 350466 - DNA, 165 bp, Pseudomonas aeruginosa; identical to SEQ ID NO: 350437

SEQ ID NO: 350467 - DNA, 621 bp, Pseudomonas aeruginosa
atgttcacaacgtcatggactccaagcaccttcatcaatggctggaacggcgccagcctcgcagatgggggaaagttcgcattcgacaacagcacaaatggtggggcagggccggcgctcaatgcgcgggtgcaagcactgctggctgcgatgggccgcacctggacatccgtttcaaggtacggggtcgagttcttcacgacagtgctgacagcggggacacagacaactaccggctcggccggcgcggatggggttacgcggtatctatgctgctcaaacggcagcaaaacagttttcaacgcgggcgcatgggcgactgtcgtcatgtggctgcgtgtcgaaagcggctcggctcatatctcctctgcgccctatacgacccatcgcctttggatcaatggggctgtggccgctccgggagttgtgttgccggcgggccagtgggtgcatctcaggttttcgatgcagtcgtataacggctatgacaacgcgtgcccgtatatctacgcggccgcaggggctcagatcgcgctcgcctgtccggcgtggttcggtggcctcgtcgatccgggtatccatgttgcacccatcctgacaatcaacggagcaagcgcatga

SEQ ID NO: 350468 - DNA, 1566 bp, Pseudomonas aeruginosa
atggacaaggacaacagcatgtctcgaaacaatccttcgcgtcattcaatactcgtcacttccaacataaacgcggccaatgatgcgaatcgtctttccgagctttgtcgacaactggaaatacgcggctatcggctcttccaggcgccaagccgcaaggtcgccctggattttctcggcaacgccgcgcaccccgccggcatcctcctgctcgtcgcggagccgacaggcgagaacgaagccgcacaattggcggcgctcgatgaactccgccaggtcgcgccgtccatcccgctgttcctgttgtttcgtcaactgcgcatcgagcagttgtccagccagctactggacgaggtccagggatgcttcaacctggccgccggccccgcacgcttcatcgccgagcgcatcgacagcgacctgcgcgaatggcgcgccccggcgggccccaggcggctgcgcgactatgccccgccggtcccgcgcacgccggtgagcgcccgctacaacggccgcgcacgcctcgatctggcgccggccaagcagtggcggatcggctcggagaacaccgcggagcacctggcgacgccgctgaacgacctctccacggcctaccgcaagacgtccgcaggagccccggcggcgcacgccggcgacatcgccgaggcctttcgccgggcgctctgggaagccgccgcacggctcgccagggaggatggcgatacgtggttcttcgagatactgcggggcaacccggggcctggcatcgaggccggccgggagacgccggcgaagcgctggcacgggctcgccgagacactcgacagcagtcctcggctggacccgctgcgcgtcgccctgagcgcccccggcctcgattcgcgcggtcgcccggccagcttcggagtacccgccgcggtggtctgccgctacctgcgccggcacggcatcgccccgttgcgcaccggcgactatcgcttcctgctgctgtttccccagggcgccagggcggaacacgcgcagccgctggtggacaggctgtgcgaattcaaacgctggcacgacgacgatgcgccgctgaagcaggtgttgccggagttgctcgacagctcgccgctgtaccgctacatcggcctgcgcgaactctgcgcgatgatccacgaagccagcctgcggctgcacctgaccgccctcgccgacgccgccgccagggctgccggccacgccgcgctggcgccggccacggtctatgggcacctggtcagggacgaaaccgaagcggtggcgatcgacaggctcggcggccgtgtggtcgccagcctggtcggcgtccatccggcggccgcgccgctgctgttgcccggcgaacgggtggccgatgaatcgccggcgctgatcgactacctgctggccttgcaggccttcggcgagcactttcccggtttcgctcccgagttgcagggcatcgagatcgatgagcgcggccgctaccgggtccgttgcgtcaggccggccgccctcgcccgcggctccggcctgcgcctggccacgcgccggccggactga

SEQ ID NO: 350469 - DNA, 1674 bp, Pseudomonas aeruginosa; identical to SEQ ID NO: 350369

SEQ ID NO: 350470 - DNA, 264 bp, Pseudomonas aeruginosa; identical to SEQ ID NO: 350368

SEQ ID NO: 350471 - DNA, 1812 bp, Pseudomonas aeruginosa
gtgctgctctgcgacgccgacgccaacgacagcctgatcgagttctgcgagctcgcccgcccaggcgagacgatcaccatcctcgaggtcggcggatccgccgagcacatccgcatcgaccacgccgaggacgaggccgtctggcagctggcgatcgacaacgtgaaggccggcaagcgcgtgctggtcgccaacgactcggccgagtcggccaagaaaatggccgccctgatcgaagccatggtcgaggagggcgagatcaagcccgtgcgcatgctcctggtgcatgccgacagcaaggccgaccaggacgtcgaggccttcctctgcgaccccaacgccgaggcgatcaagtacgacgtgctgatctactcgcccgcgatctcctcgggcgtgtcgatgaccaccccgcacttcgacgcccacttcggcctgttcagcggtaacacggtcggcccgtccgacgccgtgcagatgctgcgccgcgaccgcaccgcccgccactacgtgatcggcatcggccacaccagcgcccaacgcgaaaccgaccgggagaagatctggcgcggccacatgaaggccgacgaggtcgcctgcgagttcgaggagaccagcgaggagatcatcctgcgccgtcgcaagaccgcgttcgaccacctctacctggccaccgtcaccgccgagaacgcggcccggaacaacttcgccaacaacctgctgctgatgctctacgccgacggctacaacgtgcagcgcctcgacatcgccggccttggctacgacgaggaggccctcaccaaggaatcgcgcagcaaccgcaaggtggccggcgcgattgtgttcgacaagcgcatggatctgatcgagagcgtccagacgcccgacgaggagcagttcctcaagctcagccggcaggaggtgcgaagcgaggccgagagcgcccagctcgaccgctaccacatcgagcaccagctcggcgtcgacgagatcaccgccgacgacgtggccttctacgatgaccgcggcatttccaaggtggtggccatggagctgctgcaggccgacgaggagcaggccaggaactacgacaaggcgcagcgcaaggcgaaggtaaccctcaccctgcaccgctggaaaacgcccgcgcacgcgctcctggggcgcgtcttcgagatcctcggcgtcgatcgcttcacgggcgagggcgagttcacgtcagagcaatgccgccaggtgctcgagtacctcaccaccagcgccgaccaggtcgagctctacaacgccctcaagctggggcgctacatccccagcaccagcgcgcgcatgtgcgccactaccttggtcaagtcgattttcgagcgcctcggcctcgctatcacaaagcgcaagacgaacggtgtgcacttgttctcagtaaacccggacaattggcagttcatcatggcctattgccagcgacgcgcagcgaagaacgtccactcgctgaccacccacgagcacgacgcggcccaccagcccaagctcgcgccagagccccaggcagatgcccaggccacgcctggcgcggcttccagcgacagggatactttgcagtgtgatggtgtaagcgagagtggaaagtatcccttgagcgtgcgggagagaatcttcgccgttgcttctcgcttcgccgcacccgccggtatctctctgacgcgactcgtgggggcgctgacgccggaggtggcgggcagcctggccaagccgggagcggagcagagccgaacgctagggttcacccttgcgtatgcggccaagctgctgcgatcctag

SEQ ID NO: 350472 - DNA, 195 bp, Pseudomonas aeruginosa; identical to SEQ ID NO: 350424

SEQ ID NO: 350473 - DNA, 1704 bp, Pseudomonas aeruginosa
atggcgacgtttccggggttccaggtgccaaagccgctggtggggatcgttgccggcattacgccgaacatcgacgccctggagctgaatcaggacatcagcctggcagcggtcggggcctcgacgtgggccggcgtctacgcggcgcatcagccggtagaggtgatccattcgtcgtacccagccgtccaccagagcgctctggaagacaactattacaaccggctgtggctgatccctacgactatggagctgggcaacgtcgtcagcactcaggtacgccctgcatctgtctggaacgcttatttcagtccgcgcacgctgaccgccatcgaccgcgaagccgcagacggcattacgctgtctggccaggcgtcgccgccgctgggttttgctgccctggaggaacgcacctggacggtcagcatcggcaccgacggcccgcccgtggtcaatgcacgcatcgtctggaggctcttgggcgagccggacctggtcctggtcatcaccggcaatcggatcatcgcctggacgttcgccccggactggggcgacagcatcgtcgagcgcctgagcgcctcgacaaatatcctgcaaagcgaatcagccgtgacccagcgccgggctatgcgcctggcgccgcgccgggagttcgaagcgaacatgtacgcggtggaccgcgagcggcagctactggacatgacgctgtttggctggggcgcgcgcgtttgggcgctgccgatctggcctgatatacaactgctccaggaaccgctggcggccggctcgctgaacatttcgtgcgacacggccggcctcgacttccgcgacggcggcctggcgatgctgcgcggcgaggacgcttttacttatgaggtcgtcgaggtcaagacggtgaccgccagcggcctggacctggttcggcccgtccaggccgcctggggaactggctcgcgactgtacccggtgcgcaccgcacagctgaccgaacagcccacgctgacccggctgaccgataccgcgcagtctgcgcgggtgtcgttcctgataatggagcccagcgcctggcccgaggtaatgccggcgacgacctacaggggtcggccagtgctggagcagcgcccggacgaaagcaaagacctgacgtcgagctatcagcgcctgctgtccaccctcgacaacggcagcgcgattccccgcgtgaccgacgtcgccggcatggcgctgcccgtcatcggccatcgctggatcggcatgggccgagccgagcggtcggcgttccgtagcctggtctatgcgctgcgcggccagcagaagccgctatgggtgccgacccacgccgacgacctgacgcttgtcggaaccgtgtcccagctgtccaccgcgctggacgtgcgcaatatcggctatgcccgtttcgccaacggccggccgggccgtcgcgatatccgcatcgagctatacgacggcacggtctatcaccgccgcatcctcaccagcaccgagctggacgccgacaccgagcgcctggccatcgacgctgccctgggccgactggtcgagcccggcgacgtggcgcgcatctgtttcatggcgctctgtagcgccgccagcgacgtggtcgagattgagcacgtcaccgatagcgagggcgtcgcaactgccgcgctgacattcaaaggggttcgtgacgatgagttttaa

SEQ ID NO: 350474 - DNA, 231 bp, Pseudomonas aeruginosa; identical to SEQ ID NO: 350426

SEQ ID NO: 350475 - DNA, 969 bp, Pseudomonas aeruginosa
atggccaaaaagaaaacccccgtaggcgctgtcaacttggcggaagaggcgcatacaggggtcgatgaagctgaaaacttcggtgagagaatagcacgctacggccaggcgcacgcaaggtcactgctgatgctggagcaccttcggggcgctccatcacccgaagcgatcaagacagccgcaggcctcgccacctgcgggaactacctgcacttccgggagtatttcacggtgggcaaggtcaggctccacaacgccaccttctgcaagcagcacctggtctgcccgctctgcgccatccgccgaggggccaaggccctgggcgcgtacctgacgcgctggcaggtcatccaggaagaacgccccgacctgcgcccctacctggtcactctgaccgtgaagaacggccccgacctggacgagcgccaggcgcacctcacgaagtccctccgcaagctcctggatcgccgccgcaacttcaacgcgggcgtgcctcgtgccccctggacggagctgtgcaaggtcgagggcgctgtctacaccctggaactgaccaacaagggcaacggctggcaccctcactgccacatgatcgctctagcggcctctgcgccctctcagagcgcgatcagtgccgagtggctgtccatcaccggggatagcatgatcgtcgattgtaggcccatcacaggcgatcctagcgaggggttcatggaggtgttcaagtacgccgtgaagttctctgacctgtccctcgacgacaactggcacgccgcccaggtactcaagggcaagcgcctgctcaacagcttcggcctgttccgaggcgtacagattcctgagtcgctcctggacgagccactcgacgaactgccgtattgggatcggttctaccggtacctgggcggggagtaccaattcaccggcgagagccccaaggcaccgggggccggtaaggaatttccgtaa

SEQ ID NO: 350476 - DNA, 228 bp, Pseudomonas aeruginosa
atggcctgtgctgaagacatgggtgactattatcgtatccccccagatttgcgtgatctgaactatagtaagtttgtggagcaaggcgaggaaaaaattactcatacagaggactataattctcataataccaaacgtctggatatcgaaggaatgaaaaagctgttgctgaagttggatttcattcgtgctattcagcgtggcgagagtgccagtccagaggaataa

SEQ ID NO: 350477 - DNA, 672 bp, Pseudomonas aeruginosa
atggctgttagcaagccttttgtctgcgttaacgaaaaggaccatctaccccctctggacccgcaggccgatgcttggtatcgcgaagcggcgaccctggccaagcccgataccttgcgtccgtggcctcgtatcgtcgggttgtacagcaaagcggccgagcgcggccactggaaggcgatgcataacctggcgaatctttatcgtacagggtggcccggaggagtagaaaaagatacgcagaaggcattggatctctatcaaaagatgatagatctggatgtgcctcaggggttctatgatatgggggcaatgattggtaatcgtgccggtgttaagaaccctgctaccgatggtctgaccttcttggataaagccgctagtttggggaacccgccagcactgaccgagttgggtaaactctatatttatgtggccaaggaaaaggaattgggggtggtgtataccagttgtgcttccagtcaaggttatgctccggcgagctatgagcttggaagctactatgagttggttgagcataattatccaaaggcacttggctactatcaagtctccgtctctcaaggcggcaggagcgcagccttttttctctcgcgcgtcttcggaaagaggacgcctccttcaagtgcaatgtggtatacgccgggatga

SEQ ID NO: 350478 - DNA, 330 bp, Pseudomonas aeruginosa
gtgatccagggtatcaagcgcatcgtcgccatcgaaggcgaaccctctcccaactgccccagcagcaattccaccttcacctacgacgaacgcggactgctcaccagcaaacgcgacaacaacggcaacctgaccacctaccagtacaacgcccgtggcctggagacctcgcgcaccgaggccgccggcactgcgcaggcgcgcaccatcacaaccgactggcacccgaccctgttcctcccggtgcaggtcagcgagcccggccggatcacccgctaccagtacgacgccgagggacggaaaactggcgaaacggttattgaaaattga

SEQ ID NO: 350479 - DNA, 621 bp, Pseudomonas aeruginosa; identical to SEQ ID NO: 350467

SEQ ID NO: 350480 - DNA, 192 bp, Pseudomonas aeruginosa
ttgcagcgacgcggcgacgacctgttcggccgcacctttcccttgcaccgggcgatcgtcggcgggctcggcgagctgcgcgtcgaggacgcgttatggctggtcagcggtcccgacctgccgcgcggcgccctggtccgggtcaccggccaggacggcgccctgctgcacgtcgagcctgccgcgccctga

SEQ ID NO: 350481 - DNA, 366 bp, Pseudomonas aeruginosa
atgcctaggcaagggcgagtggttttaccgaattatccgcttcacgtggtccagcggggacacaatcggcaagtggtattcgccgaggacgaggactaccagcgttacctctccgatctacgggacctcaaggatgcctttggtatcaaggtctacgcattttgcctgatgaccaaccatgtccatctgctcttggcgcctggtgattcgctgtctggcttggcgcaactgatgaaaacgctggcggcgcgcacgacacgatatcggaatcgcttggagggccgttccggaacgttgtgggaaagtcgctataagtcgtacagagcgatgcctacctgctggcgtgttgccggtacatcgaactga

SEQ ID NO: 350482 - DNA, 282 bp, Pseudomonas aeruginosa; identical to SEQ ID NO: 331489

SEQ ID NO: 350483 - DNA, 261 bp, Pseudomonas aeruginosa
atgtcgtcgcagcgtgccaccttcgtcgggctggtggacggcctggtgcgccgggacatccgccgcttcggcgcgggacgcgaatcggggttcatctatcaccgcgccagggccagcctgatcccgctggccgtactgccgtgggtgacttacctggcactgccggtcagcgtgaacccgctgctgatcctgctgcccagcgccgcattgctcggcgtggcggtgtgcattgcggcggcgacgttcaagaagtatctgtaa

SEQ ID NO: 350484 - DNA, 456 bp, Pseudomonas aeruginosa; identical to SEQ ID NO: 339352

SEQ ID NO: 350485 - DNA, 348 bp, Pseudomonas aeruginosa
atgaacgcactcaccaccgagggcgagcgcgagcaactgctcgccaacggcgaggcccgtgccgctggccgggtcatcgacccggtgcccgtggtgcggctgttcacgccggacgcgcatgtgacctggctgttggccgcactcgatcccgccgatggcgacaccgcctggggactcatcgacctgggaatcgggatgccgacgccgggaaccgtcaagctgtccgagctggccggcatcgtcgggccgcgccagcagcccgtgatgcgcgacctctatttccgccccacgcgcacgctgtcggaatacacccggctggccgagcgtgacggagcgatcccggactga

SEQ ID NO: 350486 - DNA, 1290 bp, Pseudomonas aeruginosa
atggccaagatcaagctcaccaaatccgtggtcgattcggcggaacccgaagcccacgacgttgaactgcgcgacaccctcgtgcccggctttctctgcaaggtcacgcctgccgggcgcaaggtgttcatgctccagtaccgtaccaatgccggcgaccgccgcaagccctcgctcggcctgttcggcgaactgaccgtcgagcaggcccgcgccaaggcgcagaactggctggcggaagtccgccagggccgcgaccctggagcggccaagaccgaggcgcgcaaggtgccgacgatgaaggagttgtgcaagcgattcatggacgagcactccaagcgccacaacaagaagtcgtcgcagaagacctaccagacctacatcgacaaccacatcatcccgaagctcggcaagctcaaagtctccgaggtcaagcgcgccgacattgccgcgatgatgaagaagatggagcacatcccgacctgcggcaatcgcacctactcgctgctgcgggtgatgttcaacctggccgaagtgtggggctaccggcccgaaggctccaatccgtgccgccacatcaaggggctgcccgagaagggcgaatcgcggctcatcaccgacgaggaaatgggcaagctgttcggctacctcgaccaagcggaaatcgagcgcaccgtccgccccgaaaccctgctggcgatccgcctgcaattcgagttcgcggcacgcatgtcggaagtcctcgctctccaatgggactggatcgacttcgagaaccgccgcattaactggccggacagcaagaccggccccatgtccaagcccatgagcgaggaagcgcagcggctgctgacccatgccacgcgctacgaggattcgccctacgtcatcacggccgcacgcgaccacaagcggcccatgtccaagggcgtttactaccatgcgtgggtcacgatcgccaagcgcgccggtctggcgcatgtcggcacccacggcatccgccaccgctcggcgactgacattgccaattccggcgtgccgatcaaggtgggcatggcgctgacggcgcacaagaccgtgggcatgttcatgcgctacgtccacacccaggatcaggaagaacgcgaggccagcgacgtggtggcgaagctgcgcaagctgatcgccagcggccagcaggccgcgccagcgaaggccgaggaagcgccggaacttccgcaggcgctggccgaactgttcaagctgctcaagcgttcgcccgaactgctggaaaagctggaagccgcgtaa

SEQ ID NO: 350487 - DNA, 180 bp, Pseudomonas aeruginosa
atgcagccgcccgccgacttccttaaagaacaggggcaggccgccaaggacattgccactgaagccggcttggagcaacccccaatagccgacgggcagcgtgtagcgggcatctaccatcacagcgccaagctcgccagccggcgctgcgcgatgctcaacgatgacaggggagtttag

SEQ ID NO: 350488 - DNA, 372 bp, Pseudomonas aeruginosa
atgcacatcttcaaaacccgtcacttccagcggtggatgcgcaagacggcattgagcgattctgatctgcgcaaggctgtccttgagatggccgccgggctgatcgacgctgacctcggcggtggcgtggtgaagaaacgcatcggattggccgggcgcggcaagcgcggcggagtgagaacgctggtcgccaccaacaagggcaaccgctggttcttcgtattcgggtttgagaaaaacgagcgggacaacatcagcgacgccgagctgcaagccttgcaggactacgccgccgatttgttggagcgcacggccgcgcaactggatgcagccgctgccgacggcactttgctggagatcaccgatgactga

SEQ ID NO: 350489 - DNA, 324 bp, Pseudomonas aeruginosa
atgactgaaaaaacccaacccaagagccgaattctggaagcggtgcatgaaggcgcccgcgacctgcaccgcctggggttcatcgacaagcgcaagatgcagaagtacgacctgctgtgcctggagccggtgcaggactacgatgccgccaggatcaaggcgctgcgcgagcgcctgcaactgagccaggccgtgctggcctcggtgctcaacaccagcgcgtccaccgtccgcaagtgggaagtgggcgacaagcgccccagcggcccgtcgcagaagctgctggacatcatcgaacgcaagggcctggaagccgtgctctga

SEQ ID NO: 350490 - DNA, 786 bp, Pseudomonas aeruginosa
atgtcagcacagtccattccgtgggggccagtccgctcgacactgactgaaaagttcactttcggtgacattaagcagatcgtcggctacggcgacctagatatgtccaggcttgcacacctcgaacagaaaccgcagaacggcgcctcgaaatcgcagctcttgagcgagatcgacaggcaggtcggcgcaatggacgacaagcgccgcagcgcctttgtctccatctgctgcgaagaaatgatgcgccgtaagcccgacgtcattgaggaactggaacgtgtgctgtccagggtgggctggaagttctccggtacggcactcatacctatcgagattttcgatgttgccgagttggccagcctccccgacgccgcagcggcagacatccagaaagcggccactaggctgcgtgatggcgacctcagcggcgcgttgtctgcggcctgcggtgctctcgatgccgtgaccagcgacatttacagccgccacggtctgggcgatgcaggcaaggcgtcatttcaggagcgcatcaggaagtctctcgatgccttgcaggtgaaagaccgcctgatcggtgagttgaccgacatcggctgggctgagcccgactacaagccactgtctgccaacatcgacggttccttgaaccaggcggccttcgtgatgcaaaagctgcgggccgacatgggcgacgtgcatggaaccaaacccgtcattgccgccctggtctatgacgccatcaaatggtcatccttgttactcaggatgctggcaactcgatga

SEQ ID NO: 350491 - DNA, 936 bp, Pseudomonas aeruginosa
atgcccttaaccctgccacagctagaacgccacctcttcaaagccgccgacatcctgcgcggcaagatggatgcctccgaattcaaggaatacatcttcgggatgctcttcctcaagcgctgctccgacgtgttcgaccagcaccgcgagaagatcatccaggaggaaatggcagctggcttgaccgaagccgaggccatcgagagtgccgatcaaaaagactggtacatggaagaaggctcgttttgggtgccgccgcagtcacggtacgaatacctgctgaacgatgcacaccaaaatgtcggtgattttctgaacaaggcgctggccggactggaaaccggcaacaccagcctctacgacgtgctcgaacacatcaacttcacccgcaaggtcggacagagcaagattcccgacatcaaactgcgacagttgatcacccatttcagcctgcaccgcctgcgcaatgaggatttcgagttccccgatttgctgggtgctgcctatgaattcttgatcggtgactttgcggattccgccggcaagaaaggtggcgagttctatacgccacgcacggtcgtgagcatgatggtgcgcctgatcaaaccggagttgcagcaccacatttacgacccctgctgtggctccggcggcatgctgatcgcagccaaggaatacatcgacgaacaaggtcaggaaggccgcaaggctaacctgtacgggcaagaggccaacgggaccgtgtggtccatcgccaagatgaacatgctgctgcatggcatcagtaccgccgacctgcacaacgaagacacgctggccaaaccccagcacgtcaagggcggcgagttgcgccgctttgaccgcatcctaaccaatccaccgttttccatcccctggggcaccaccgacaaagaccaaagtggtcagtccacctag

SEQ ID NO: 350492 - DNA, 1176 bp, Pseudomonas aeruginosa
gtgctgcggctgctcgatggcctggcggacctcggccagcaggcgcgccttgtcggcacccagttcgcccttgagcaccagatagttggaagcgtggtcgctgcgaaataccgtgtcttcgagctccaaaccctgcaacaggcgttcgacctcgacgaacagggcacgccgatccagcgcctcgaaatcggcgaagccagcacggaaacgctgctcgccggtagggaaactcaccaccagggtcgacaggtactccggctgggcggcgttcatcaggcgcgcggagttgtccgcgtgctgcgcgctcagggtcattccgcccagaccgttgaggatcatcaccgaacgactgatccccgcctcgccaagcttttccagcgcatccagggtagaggaataggtctcgcccttgttgacccgcgccagcacttcgtcgtcgccggactcggcgccgacataggccattcgcagcccggcgtcggccagttcgcgcaactcgtcgaccgacttcctgcgcaggttgcgcggcaggcagtagctggatacccgctccacctccggcaagtgctcgcgaatcgcctgcagcaccgcgagcagccggcgggtcggcaataccagggcgtcgccatcggcgagaaacacccgcttgacgatcaggcgctcgccgcagcggcggatctcctccagtacctcgttctcgtcgcgggcgcgaaatttcttttgcggctgggtatacatctcgcaaaagccgcatttgttccaggaacagccattggtcaccgggaggatcagcgaatgcgcctcgctcgggggccggaacaccggttcgatgtagtggatggggaattcacggacactcatcggagaactcctgaacgaacgtggagccaccggcggattcgccggaaatgggcagccgacgtcccgccggcggatcgatgggcgacgagtatatccctgccggcaaagagtgcgcggggcgcagtgactgcgtcccggcaccacaggtatcaggcgctgggagcgtcgccttcgcgcttgcgcttgttgcccatgcgcacgccgatatccatcaggaagtggaagaaaccttcctggtcttccagcacctcgcgccagaacggcgagtggtacagcgccacggcgccatgcaccaacgcccaggcagcgcaataa

SEQ ID NO: 350493 - DNA, 648 bp, Pseudomonas aeruginosa
ttgtcagttcagattaatggtttttatgctagggagattactgttttctccactggtatagttgtgggtatggctataatgcttatctatctctggcttataaaaaacggttatgagaggcttggttggatgtttgtcgcgactgtggcgagtgtagttgcgacattgtttgtggttagtcgaatattgcgagatggtacggacctcggtagggagcggggtggtgaagtggaagctgatagaatgagagatgagttggcaagatataaagccgttcttggacgcgaggtgggcatgactgaagatgatttaaataagtttgattttgctacaggccagaaaatctcagagggaggtacgcataatgagctgtctgatgaggggctggtctcaaacatatttgccggttcagaacctataggaggctcagcccctatgggattgactttcccatatgccactaaggcgttagaagctgcccgctgtgcggctatcaaatattggctggattacgagccgagtagcgttccgcttcagaaggttgtcaccagttttatagttgagcgtggagttcccaataggcaggcgcaagagctggctaatgcgataaagcctgacgcgttgaaaagtagtgacacgtcgatatga

SEQ ID NO: 350494 - DNA, 576 bp, Pseudomonas aeruginosa
atggcgatcctggagtactacgcattcgaatccagaactctcaaccagcaggcatctgacaactaccggcgctttgccgcctatggcttgcagcgcttcatttatgattcgctcaactacacgccaggggacaagtggcaatatcatcacgaacgggtatctctactagcaaatagctcgccagatggctacttcatcgtattccacgagatcacaggcttgatcgtcgacctgatcaatgccgacttgaccgttaaccataagaccattccggatataagcgttggcctcatgtggtctaaacactggaaagccaacaatctcgcttccatgcacggcgaacgaatcccatgggagcataatttcccgccccgttatcctcaggcgcaaagcaaccctcaggaagccaatgcttaccccaatactgcgctagcggaattccgcagatggttcaggaacgactatctggcaaccaaattccccgcatatatcttgaagaaatcccaccttctccagggtggcaaggacgaggctcttcagatcggatcaatgtatacgctaaagcaaattcagtaa

SEQ ID NO: 350495 - DNA, 162 bp, Pseudomonas aeruginosa
atgcgcgccagtgacgagggcgagccctcgctgagtaagaaatggaatgccgttttccagcacgcccatctcaatcccatttacgtcacgttgaacctcaacgccaaggtcaagtatgaactgttttgggccggccaccgtaaagctcctttttcgatgtaa

SEQ ID NO: 350496 - DNA, 1968 bp, Pseudomonas aeruginosa
gtgctcgactacctgaaggccgagaacgcctacctggatagcgaactggccgaccaggccgggttgcgcgagaccctgttcgaggagatcaggggacgcatccgcgagaccgacctgtcgttgcccagtccgtggggtccgtggctgtactaccagcgcaccaccgccggcgacgaatacccgcgccactaccgctgcccacgtccggaggacggcagcctggcggtcgacgaaggcgccgagcaactgttgctcgatcccaaccagttggccgacggcggcttcctctccctcggcgccttcagcatcagccccgaccagagcctgctggcctacagcctggacaccagcggcgacgagatctaccgcctgttcgtcaaggatctcgccagcggcgcggtgcaggccctgcccttcgaggactgcgacggcagcctgacctgggccaacgacaaccgcacgctgttcttcggtgaactggatgacacccaccgcccgcacaagctctatcgccaccgcctgggcgaggccggcgccgagctggtgttcgaggaaggcgacgggcgcttcttcctgcactgctaccgctccagctcggaacgccagctgatcctcctgctcaacagcaagaccaccagcgaggcctgggtgctcgacgccgaccagccgcagggaacgttccgttgcctggcgccgcgcgaggaaggccacgagtactaccccgaccacggtcgcctcgacggccggggcctgtggctgatccgcagcaaccaggcggggatcaacttcgccctctaccaggccgaggagccgcggtcgactcgcgagcactggcaactgcgcgtggcccacgacccgcagcggaccctggaagatgtcagcctgaacgccgaggcggtgatcctcggcctgcgcgatggcggcctgccggttatcgaggtgcaaccgcagggcctgccggcctaccgcgtgcagttgccggacgccgcctacagcctctacgtgcaggacagcctggaattcgacagcccctgcgtgcgactgcgctacgaggccctgaaccgtccggcgcaggtacgccagctgaacctcgccgatggcacgcagaccgtcctcaagcagaccccggtggaaggccccttcgacgccgacgcctacgccagccggcgcatctgggccagcagcggcgacggcacgcaggtgccggtcagcctggtggcgcgcaaggaagtcctcgacggcatcgccgccgggcgccccgcgccgctctatctctatggctacggcgcctacgggcatagcctcgatccctggttctcccacgcccgcctgagcctgctcgaacgcggcttcgtcttcgccatcgcccatgtccgtggcggcggcgaactgggcgaagcctggtaccgggccggcaagctggaacacaagcagaacagcttcgacgacttcatcgcctgcgccgagcacctgctcgccgagggctactgccgtcccgagggtctcgccatcagcggcggcagcgccggcgggctgttgatcggcgcggtgctcaaccagcgcccgcaactgttcggcgcggccatcgccgaggtgcctttcgtcgacgtgctgaacagcatgctcaatccggacctgccgctgaccgtcaccgaatacgatgagtggggcaacccgcaggagcccgaggtgcatgcgcggatcgccgcctacgcgccctacgagaacgtcagggcccaggactacccgcacctgctggtggtcgccggctacaacgacagccgcgtgcagtactgggaagccgccaagtgggtggcgaaactgcgggcgaccaggaccgacgccaacctgctgctgctcaagaccgacctcggcgccggccacggcggcatgagcggccgctaccaggggctgaaggacgtggcgctggaatacgccttcctgctcaaggtcctcggcctggtatga

SEQ ID NO: 350497 - DNA, 474 bp, Pseudomonas aeruginosa
atgaatgaacaagactatctgatcgcctggggcgcctacgccatcgccggacttggtctgatgctggtgttctggctgatgaccggctggatgtggcgctggctgcgcgaacccctgcggctgatcgtcttcatcctgctgttcacgccgactccggtggacccgcagaacgacctctacgccccggccatcgccatcaccgcgctggatgtcgtgttcaaggtcggcaacaacgcctggcgcgcggtctctgacctggccctggtggcgctgctcggtttcggcctgtacctgctgatcgccgccatccgctggccgctggagcgggcctggaagaatcgtcggcatccgtcgcaggacgccgaggacgagccgaccctgcggcagatgttgcagcccgagttgatgccggacgtcgacacccgcaccgacgagcacggcgaccggcgcatgcgcatcgagccgcgcctgtag

SEQ ID NO: 350498 - DNA, 744 bp, Pseudomonas aeruginosa
  misc_feature (94)..(103): n is a, c, g, or t
  misc_feature (720)..(729): n is a, c, g, or t
atgagtagtcggcagctgttagagcatcgcgaaaatacaaaaattattacgctaaatgagttggttcaggagttttccgaacctgagcgtttgnnnnnnnnnngattgcagctgaccgttaaggttaaaaagaagccgttagatattggtagttttgcatatctcattcgtggtaagaataaaagtgttcatgatgatcgcgggacgccattggtgattgagtcgttcgttgaaagtcgtcgtgagctgattgtgagagttttggagtcttttgtcggtctgcgtgataagtcagtcttggcaaatttcttccataccgaatattttattgattggttgaacgctgagggttaccgagaaatattttccagtagcgtggatgctcaaaaggcatatcgagattatacagcgcatctaaatcaaaaaatatccgataaaaagctgaagccccggaccgcgtcaagctaccaaactagagcatccagcctgatcaaattactttatccagataatagtgtccatattcttgctggtgcagtaaggattgttccagatagaggttctgcaacagcaggcgctgctcatgtcgagttgtatagagatgtttgctttgccattgcccagcagtgcagtgattttatcttgaataaaaaaccttacccgctcgtggttggagttagagattatgaagttgttatatttccgtccaaccgaggcgcnnnnnnnnnntgctccttcatataa

SEQ ID NO: 350499 - DNA, 150 bp, Pseudomonas aeruginosa
atgacgccaagccccgccagggccatcctcggcatcgagcatcacaaacgacaaccccgtacgccgcaaaaagtacgcggttgtcaacgcggcttggccgccgccgatgatgactacatcccacttattttcagggcgagcttccactga

SEQ ID NO: 350500 - DNA, 873 bp, Pseudomonas aeruginosa
atgatgccgccagttcaagagggttacccgacgcgtgatcacgtcatcgactacctgacacgctatgaggcgcgttaccagttcccggtcgagcgaccagtgcgagtcacctcggtcgaacgcatcaatggcgcgctgcgcgtccatgccgagcaagggcattgggatgccaaggcagtggtcagtgctactggtacctggagcaatccccatatccccaactatacgggtaccgagttgttccgcggccagcagttgcattcggcccactatgtcgaggcccagccgttcgcaggcaaacgggtgctggtggtaggcggtggaaactccggggcacagatcctggcagaggtctccaaagtggccgacgccacctgggtgacgcccaccgagccgctgtttctgcccgatgatgtcgatggtcgtgtgttgttcgagcgagcgaccgaccgctggaaagcccagcaggaaggtcgcgtcatcgaacaaccagtgggcgggctgggcgatgtggtgatggtaccgcccgtggtcgaagcgcgtgaacgtggcgtcttgcacgcagttcgccccttcacacgcttcacccgtaatggtgtggtttggcccgatggcacggagaccatggtcgatacagtgatctggtgcaccggcttcaaacccgcgttgggtcacctgaccaacctggggctgatcaacgatgaggggcgagtcgaggttgaggggactcgcgccgtccacgaacccaggctctggctggtgggctatggcgaatggacgggctcggcttctgcaaccctgattggggtgacccgtacggcacgaagcacggcaaccgagatcgaacagtttttggcaacggcggaggcctga

SEQ ID NO: 350501 - DNA, 1230 bp, Pseudomonas aeruginosa
atgaaggcgttgtcagccctttccccggaagtgcgccagtacctgctggtcaccggcaattactgggcctttaccctcaccgatggcgcgttgcgcatgttggtggtgctgcacttccacacgttgggctacacgccgctgcaaatcgccgcgctgttcctgttctacgagatcttcggcgttatcaccaacttggtgggcggctatctcggtgcacgcctgggcctgaatcgcaccatgaacattggcttgggcctacagattgtggcgttgttgatgctcactgtgcccgccgcctggctaaccatcccttgggtgatgggcgcgcaggccatgtcgggtatcgccaaagacctcaacaagatgagcgccaagagttcgatcaagctgttggtgcctgacaaccagcaaggcacgctctacaagtgggtggcgatcctcactggctcgaagaatgcgctgaaaggcgttggctttttcctcggcggtgcgttgctggcattgatggggttcacgggcgcagtgctggcgatggccgccgtactggccctgatctggatagctagcctgttcctgctgaagaaagacctgggcaaggccaaagccaagcccaagttccgcgacatcctctccaagagccgggcgatcaacattctctctgcggcccggctgttcctcttcggtgcccgtgatgtgtggttcgtggtggccttgccggtctacctgagtacggtgtttggctgggacttctggctggtgggcggcttcctggcggcttgggtcatcggctacggcatcgtgcagtcgttcgccccgagcatcacaggaaaaaaacgtggccacgtccctgatgggcgagcagctttcgtttgggcggcactgctggcgggcctgcctgcggcgatcgccctcggtctttcggcggggttgtcgcctcaggctgtgctgctgggtgggctgatgctgttcggcgttctgttcgctgtgaactcgtcgctgcacagctacctgatcgtcagctacgccaaggaggatggcgtgtcgctggatgtgggcttttactacatgtccaacgcgctggggcgactgatcggtacgttactctcgggctgggtattccaggcctatgggctggaggcctgcctgtgggtttccagtgcgtttgtgctggccgctgcgctgatatcgattgctttgcccaggcaccacgaggctactcagcaggcttga

SEQ ID NO: 350502 - DNA, 507 bp, Pseudomonas aeruginosa
gtgcaacagcatccgtactccgtgctgacctccgagcaggtcaaaggccaactgattttcacgccgtgccctggtaccaaagacacatcggtcgctgaggcgctggacactctcaaagaggccggtgcttcagccttgctgaccctgatgcccaccgaagaactgacccagaacgaagtcgaaaatctgcctgggcagtgtcagcagcgcgacatcgagtggttccacctgccggtggaggacgatcaggcgcccggtgagcgattccaggcggcgtgggacgttaatcgcgagcggatcaagcagttgctcacggaaggtaagaacattgccattcactgcaaaggcgggtcgggtcgtaccggtctgattgccgcacagctgctgatcgagtgcggggtgccattgcgcgaggcagtcagtgaagtgcaggcgctgcgcccccgtgcgattcagcacccagcgcatacccactacatcagccagtttgactccgcccagtcgtaa

SEQ ID NO: 350503 - DNA, 1062 bp, Pseudomonas aeruginosa
atgagcaaaagccgcctttcatttctggatcgctacctgacgatctggatctttctcgccatggccattggggtcagcctgggtagcctgttcgagggcctaccggcctggctcaacagcttgtcggtaggctcgaccaatatcccgatcgccattggcctgatcgtgatgatgtacccgccgttggccaaggtcaggtatgaagagctacccgaggtgttcaaggacaagcgcattctcgcgctgtcgctgatccagaactgggtgattggcccggtactgatgttcgccctggcggtgatcttcctgcgcgattaccccgagtacatgacaggcctgatccttatcggcctggcgcgctgcattgccatggtactggtgtggaaccagatcgcagggggtaataaccagtacgttgctggcctggtcgcgttcaatagcatcttccagatcgtgtttttcagcctgtatgcctggatcttcctcggcctgctgccacctttgttcggactacagggcagcgtgatcgacgtgagctttgtcagcatcgccgagtccgtactgatctatctcggcattccgtttctggctggtttcatgacgcgcaagctcctgatcagccgcaaaggcgaagagtggttcaaccagcgtttcatcccccgcatcagcccgctgacgctggtcgctttgctgctgactatcgtggcgatgttcagcctcaagggcgacatggtgctgcaactgccgctggatgtgctgcgcatcgccatcccgctgaccatttacttcgtggtgatgttcttcatcagtttctggatgggcaagctgttggaggctgactacccacgtactaccgcgctggcctttaccgctgccagcaacaacttcgaactggctattgctgtggctattgccacgttcggtctggcttcgccggtggcctttgccacggtgatcggccctctggtggaagtgccggtgctgatcgcccttgtcggggtggcgctgtggctcaagcgccgctggttcgaccagcctcgcgcagtactcgctcaggagtag

SEQ ID NO: 350504 - DNA, 468 bp, Pseudomonas aeruginosa
atgaaaattttgtttctatgcaccgccaacagttgccgcagcattctttgcgaggctgtgttcaatcacttggcaccggcaggcatgaaagcctacagcgccggcagccagcctaaaggtgtagtgcatccattgagcctgaaaacgctgcaaaacgccggtatctcgaccgcaggactctccagcaaatccagcgatgttcatgagggcctagccccagacttcgtgatcacggtctgcgacaaggctgccggcgaagcctgtccggtgtttttcggccccgcgaccaaggcccattgggggctggctgatccatcggaataccagggcagtgaggacgagatcgaagccgcttttgccgccaccctggagcagattagaacccgcattgaagccttcctggctttaccgctgcagatggatgccgagcaactcaaggctgagctggccttgatcggcacgctctaa

SEQ ID NO: 350505 - DNA, 357 bp, Pseudomonas aeruginosa
atggctgaccacctgacaccgaccaccgtattcaaatgcctggctgacgagacccgcgttcgcctgatgctgctcatcacccgcgaggatgagttgtgcgtctgtgagctgacctgcgcgctggatgaaagccagccgaaggtttcccgccacctggcacaactgcgcaactgcggcctgctggaagatcgccggcaaggtcagtgggtctattaccgcctgcaccccagcctgccggactgggtgatcgccatcctgaaaatcactctggatgccaatcagcactggctcagcccagatgccaaacgcctcgatgtgatgggcgaccgcccgcaacgtcttgcggcctgctgctga

SEQ ID NO: 350506 - DNA, 414 bp, Pseudomonas aeruginosa
atgtctaacaagacccgcgtgctgttcgtttgtgtggctaacgctgctcgctcgcagctggctgaagcgctgctgcgacacactgattccgaacgtttcgaggcattcagcgccggcactgagcctggtgaggttgatccgcgcaccctggatgcgcttgagcaccttggcgtaagcaccgaggggctccgcagcaagtccattgatgagtttgccggcgagcgtttcgaatacgtcatcacactgtgcgataagtcgtctttggagtgccaggcccttccaggtgctggtgaggtactggcgtgggactttgaagacccggtgaccagcacccagcccgacgcattccgccacacccttcacgagatacacgagcgcatcaagatgttcgtgctggtgaaaactaaatgttga

SEQ ID NO: 350507 - DNA, 273 bp, Pseudomonas aeruginosa
atgaaaaaaatgacttcgactgcaatgctgttgaccagcctgttcgccaccgccgccttcgccagtcagtacgacaagcctggctttgtcaccgaagtcgaagatggccgcctgtgggtgttccgcgaaggctccaaggaactggaagaattcaagaaaaccggcgagccggccaagcagttcaccgacatcggtagcggcccgaatggcatgacggttaaatctgcggacgatcagaccctgaaggactacctgcaatcgctgaagaagtaa

SEQ ID NO: 350508 - DNA, 300 bp, Pseudomonas aeruginosa
atgccctggccgtcattcctggccactgagactctgatccgcttcgagcaggtaagcggtctggcctgcttactcaggggttttggtgtattgcgctccagcctcaatgaggcctatcagggcccgcgtcggttatgcaggctgttggatgccaagctcttcgggctctcgcacggcaagtcatgggttgccatcatcgaggatacgattaggcaggagcagccatttcctcaggactggctcgggcagcgcgtctgctatgtctacgatgaacccattatcgagggcgtgactctgtga

SEQ ID NO: 350509 - DNA, 861 bp, Pseudomonas aeruginosa
atgcccatccgccccttaattgaagagcggaatggtggggttctggatgtcgcgcgatactttgccgtaagtcgcgcctcgccccttgatctccatcttcatcttggcggtcagccgaataatatttttgctcgctatggcctgacggaagaggatcgatcactgagcctgaatacacactccctgcgccatctgcaaaatggtgaactatttaggctaggagttgcggacaccattatcactaagcgcttcaatcgccgcagtgtcgctcagagccatgtgtatgatcatcgtagcctaacagaagcgctttcagatattgatctacccgccggggctgacactatttctccgcgcgctcaagaaacactacgtatgatattggccaataagatacgaggaccgatagtagacgagtttttagagattcagaaagagatgggggatgatgtggcattccagtttttgtccgcagaggcggatggtctgcatgcaacgccatatggcttttgcgttaatagcttcacggtggacccctgccccaaacaccttcaatgttataatggctgccggcatttaactcgttcaggaattgaagaggagaaccaaagcttaaaaaaactaagagggcgacttcaggaagctgtagagttaattaataagaccccaatagagtctcgaaacattggatggcagaatcagttgcgccatgccgaaaacagcctggctaacttagacaaggccatttcaactgctccaggtaataatccatttcctgatgggccagacctctaccgatccgtagatgcggcacgaggaacgaccttgatggactccgcaataataaggagtaaagaatga

SEQ ID NO: 350510 - DNA, 672 bp, Pseudomonas aeruginosa; identical to SEQ ID NO: 333034

SEQ ID NO: 350511 - DNA, 747 bp, Pseudomonas aeruginosa
atgtccgaaaccttcaaacccgcccccggtgacgtcgagctcgtgcagcgcgaggaatgcttccgcggcttctatcgtctcgatcgcctgcgcctgcggcatcgccagttcgacggcagcatgggccgggaaatcagtcgggaactgttcgtccgccatgacgcggtctgcgtgctgccctacgacccgcagcgcgattgcgtggtgctcatcgagcaattccgcgtcggggcgatgcagaagctcgccaacccctggctgctggagctggtcgccggcctgatcgacaaggacgagcaaccggaggaagtggcccatcgcgaggcgatggaggaggccgggctgactctcggtgcgctctggccgataacccagtacctgccgtcgccgggcggcaccgacgaagtggtgcacctgttcgtcggccgttgcgacagcgaaggcgtcggcggcgtgcatggcttgccggaggagggcgaggacatccgcgtccacgtctggccgttggaagatgcgctgcaggccgtgcgcgacgggcggatcaacaacgcggcgagcatcatcgccctgcagtggctggccctgaaccgggccgaggtgcgtgggctatgggcctcaacctgctgcgcgagcgctaccgggtcgacctggccagcctgcaggcgacctgcgaagcgaactacgcgcggctcatgcgcctgctcccggacatgcgcgaggcgcaggcctcgcgccgggtcgcgctga

SEQ ID NO: 350512 - DNA, 1074 bp, Pseudomonas aeruginosa
atgacaaaggctaacgagatcgaaaccgcgaaggtcaagcagttttcagcacggatcatggaggactacggcaataccctgcgcggcgcgatgctctacatcggcgaccgcctggggctgttcaaggcgctcgcccatggccaatgggtgaccctggaagagctggcgcagcagaccggctacaccacccgctacctgcgcgaatggctgggcagcatggtcaccggcaactacctggcctacgatccgcagagcaggagctatcggttgccggccgagttcgtcccggtgctcgccgacgaggactcgccttatttcgccggcgggatcatccagttgagcgtgcccttcgtgagcatggcgccgaagatcatcgaggccttccgctgcggcggcggttgccccgaggaatccttcccgctggaaacctgggaaggcatggagcgcatgaccatgccctggtacaagcacttcctcgtgcaacactggattccttcgctggatggcgtcaaggaaaagctccaggcgggtggcagcgtgctcgatttcggctgcggcagcgggctggccgcgatcatgatggccaaggcgttccccgaagcccaggtctatggctgtgacttccacgcgccgtccatcgaacgcgcgcgggcgaacgccgaggccgcgggggtcggcgaccgggtgtgcttcgaggtcagcgattccgatgcgctggcgggcaagaagttcgacttcgtcacgaccttcgtggtcatccacgacgcgaccgacccgcagcagatgatgaaggacctgcgcgagtcgaccgccgacgatgggacctacctgatggtggaactcaacctgtcgcaggaactgcacgagaacatgaacctgttcggtcgcgtgatgtacccgcagagcacgctgtattgcatgacctgttcgctgtcccacggcggcgagggcctcggcgccttcatgggcgaggaccgcgcgcggcagatggccgaggccgccggcttcagtcgcttccgcaaggtgccttcggagtggccgccgctgccggcgctgttcgaactgcgaccctga

SEQ ID NO: 350513 - DNA, 231 bp, Pseudomonas aeruginosa
atgaaagacaacggtggacaagcgtttccctcggaatcgatgtacacgtccgaagcgggaatgaccctgcgcgactacttcgcggcaaaggccatgcaggcttggatatcaacctatggggacactgatcgtcatcctgcaacaaatggcacctgcgaccacgttgcagagcaggcctatcaggttgccgacgccatgctaaaggccaggaaggttggaggtacggagtga

SEQ ID NO: 350514 - DNA, 267 bp, Pseudomonas aeruginosa
atggagcaagcaatgagagaagagtttgaagcgtggtggaatttgccggcgcaatcggaacttcgcaaatcctgcgcaaggggatgggccgaggtcatctggaaagccagccgcgcggctctgaaggtggagcttccggagaagatcggcccgcacaacatggtcggtcgtcacgtgctaccagaagccgcgggctacgacgatgccatcgacgactgccgtgaagccctccagcaagccggaatcgaggtgaagcagaatggatga

SEQ ID NO: 350515 - DNA, 624 bp, Pseudomonas aeruginosa
atggagcagcgtagtgatgaatggttttccgcaaggctgggaaaggtaacggcgagcaaggtcaaggatgtaatggcaaaggggcgcggcagcgccccttctgctacccgtcagaactacatgatgcagttgctgtgcgaacgccttaccggaaagcgagaagaaggcttcaccagtgctgctatgcagcgcggaactgaacttgagccaatcgcccgctcagcctacgagttcaatgctggcgtcatgaccgtagaaaccggactgatcgaacatcatcgcatcaccggcttcgcagcttctcccgatggcgttgttggcactgacgggttgctagagatcaagtgcccgaacacggcgcagcacatcgcaatcatccagtctggcgctcacgacacgacctacgaatggcagatgctggcacagatggcgtgcagcggccgcgagtgggtcgacttcgtgagcttcgatgatcgcctgccggaagaactgcaatacgtctgcttccgctatcaccgcgacgaggcacgcatccgcgagatggaggctgaggttatggcgttcctggaagagttggcagagcttgaacatcagatgcgagagcgcatgaggaaagcagcatga

SEQ ID NO: 350516 - DNA, 744 bp, Pseudomonas aeruginosa
atgagcacagcattgacgccgctgctgaataagttcgcgcagcgttacgagatgggcgctactccggcagaagtcgcaaacaccctcaagcagacctgcttcaagggccaggtaagcgacgcacagatggtcgccctgctgatcgttgccgaccagtacaagctgaacccattcacgaaggaactgtacgccttcccggacaagaacaacgggatcgttccagtggtaggcctggacggatggtcacgcatcatcaatgagcacccgcagttcgacggcatggatttcgagatgccagccgatggcagcgagtacacatgccggatctaccggaaagaccgcaaacacccgaccagcattaccgagtacatgtccgagtgtaagcgcaacacccagccgtggcagtcgcaccctaaacgcatgctgcgacacaaggccatgattcagtgcgcacgtctggcatttggtttcgctggtatctacgaccaagacgaggcagagcgcatcgtcgagcgtgatgtgacgccagccgaggaagttgaggacgtgtcgcaatccgtcacggccattagcaacgcaacaagcatcgaggtactgcaagaggtgttcggtgccgcctggcgcacctacaagtccaagggtgcccgtgatcagttgaccactgccaaggacgagcgcaagaagtttctgctggatcagcctgtcgaagctgaatacgaggaggtgcaagatggagcagcgtag

SEQ ID NO: 350517 - DNA, 528 bp, Pseudomonas aeruginosa
atgagcattgactggagcacggcaccggagggtgcgactcattgggagccgagtggacctgatttcaataaaggctggatgaagaaagaagggaatgaatggtttttttggagcgaaggatccaacagatggttacaagggaagttttcctgcaatgtgtccgcagatcgtgaggcgacattcgaggctagaccgcaagaggcctggggcggccaggggctgccgccggtgggtgcaaagtgcctgaccgatcgtaacgatttcctacgagaggtaacaatcctttgtcatggaaaaactcggactttcgttttcgaccacgtcagtcaagaagagatttgtctggtgctgaaggatcgtgctttcttgcccatccgcacccccgagcagatcgccgccgaggagcgtcgcaagagcatcctccacttagcaaacctcctgatagacagtcggggccaatgcaacgaatacagtcaggctgaagcgatatttgacgctggctaccgccgccaggaggaagggaaatga

SEQ ID NO: 350518 - DNA, 1056 bp, Pseudomonas aeruginosa
atggacctggaacggaatctcatcaacctgcacgaggacctggtgtccggctcctaccgcccaggtcgatcaatctgtttcgtggtcacccgaccgaaggcccgggaagtttgggccgccgctttccgggaccggatcgtccaccaccttctctacaaccacatcggcgccagcattgaagcgaagttcatcgctgacagctgcgcctgcatccctgggcgcggcacgctgtacgccgccgagcgtttggaggcgaaggtgcggagcgtgacacagaactggaggcgaccggcacactacctgaagatggacttggcgaacttcttcgtcaccatcgacaagcgcgtgctgcacaagcagatcgcgcgcctgatcgatgagccatggtggcgcaacttagcgctccagattctctggcacgatcctcgcgcagacttcgaggttcgcagcccgagagggctgttcaacaaggttccacagcacaagaggctgacggcgcaggcggcgcacctcgggcttcccatcggcaacctgagcagccagttcttcgcgaacatctacctgaacgaccttgatcagttcgtgaagcaccaattgcgggtgaagcactacatccgctacgtcgacgacttcgtactactgcacgaatcgccgcagcagttgaacgaatggctggcggcgatagaggtcttccttcctgggcttggcgcaaggctgaacccatcgaagaccatcctgcagccggtcgatcgaggcatcgacttcgtgggacacgtcatcaagccctggcggcgcactacccggaaacggacagtgaaggaagctatgcgccgagtcgccgtggcgtccgatgaagacctacgcacgctcgccaacagctatctgggcctgttccgtcaggccacccattcacacaaagaccgcgccgccgtcgccagagccctgctccgcagaggattttcggtagatgccgcgctaacgaaaaccttccctcccaggaggaatccatgccagaccttggcgagttcgcagcgctgttcgttgtgctgtttctga

SEQ ID NO: 350519 - DNA, 1173 bp, Pseudomonas aeruginosa
atggacgcagttactaacccatacgcacccggggctggaaccaggccgcctgaactcgctggcagggatgatatccgctctcgggttgcggtctgcattgctcgccttcagaaaggaaggcatgacaaaagcatcctgatggtaggtttacggggcgtaggcaagacggtgctgctcgaccagatgcggcatgacgccgaggcagctggagcgcatacactcagaatcgaagcccctgaagatcgctcactcccagccattcttgctccccaattgcggatcgcactcctccgactgagccgcattgaagccgctaaggattttgccattcggggtttgaaggctctcgctggctttgcaggggctctgaaggtcagctatgcggatatcgaagtggggattgatgcagaggccatcccaggcctagctgataatggtgatctggaaagcgacctgggagcgcttctgtgcgaagccggtcaagctgctcaaaaagctggaactgtgctcgtgatgttcattgatgagatgcagtacatcgcagaggatcagtttggcgcactgatatccgctctacatcgctgcaaccatgagggcctaccgataaccctagtgggagcagggcttcctcaattattggctagggctggcaatgcaaaatcctatgctgagagactgtttgactttcccatgatcggagccttggacagggcttcagcttcacgagcgattacgaagcccgcagaagacgaaggggtagcgtatgaccctgacgcagtggatcagattgtcgatcagacacatggttacccctactttctacaagagtggggcaagcattcatgggatgcggcgccaaatagccctattagcgctaatgacgtggggaacgccactcagactgctttggctgccctcgacgagagctttttcagggtgcgcttggatcgacttacaccggccgagaagcgctacctcagagcgatggctgaacttggacctggacctcacagatccggggacatcgcagagcaacttaaaactaaggttcagtctgtagctccgacgcgaaacggtcttatcacaaagggcatgatctggagccctagccatggggatacggcattcaccgttccacttttcgacgaattcatgaaacgcataatgccttga

SEQ ID NO: 350520 - DNA, 399 bp, Pseudomonas aeruginosa
atgaactacgggttcatctactgcctgtccaatccttcgatgcctggcatctacaaggttggaaagactgatcgggcgccatcacagcggtgctttgaactctccaactcaacttcggtcccggagcctttcttcatcctgttctacgtagaggtggataacgccttacagactgagagggcactccatcgtgacctggatgattttcgggtttctccgaatcgtgagtttttcaattgcgatccggtggctatctacaactggctgctcagcaactgcgatatcgaaactgaatggctggacggcgaaatgcaatacgagctggtcaaggagcggaatgcaaagactgccaccgcagttccccagatagctctagctgacaccggggaggactggtaa

SEQ ID NO: 350521 - DNA, 1068 bp, Pseudomonas aeruginosa
atgtttcctctagaattccccacgggaatactaaaaaaacatagtaatgataaaccagttgtgctcgacccattttgcggccgaggcacaaccctgttctctgcgcgtaaattcggattatctgcctggggtattgactcatctcctgttgctgtcgcaatcgcaagagcaaaacttgccagctgcaacgtggaggcgcctcttaagctcgcgtctgaattgatatcaggcattgagccagccgaacttccagacaccccatttttcaactctgcatatcaccaatctacgctccgcgatatttgcgccttgcgtgagggactactcacccttgctaacgaaacagatgcgtcgtccattttacgcgcagcggcgcttggatgtttgcatggcccactccccaagcatgttgagaacgccggttatttttccaaccaaatgcctaggacttacgcgtcaaagcctgattacgctgtaagattctggagagagcggaatcttaatccaccaaagatagatgtgctccgcgtgcttcgtcgcaagattgagcgattagtgggtctagaggaaccttcgccgtgctcaatctctcaagttttgcatggcgacgctcagtcggaagacttattccggtcaattaaaactgcgccatcgattgtgattacatctccgccgtattacggaatgcggacatatgtccaagatcaatggctaagaaactggcttctaggtgggcctagctccatagactattcagccggatcgcaacttgaccatggcggacagaaaacatttgccgcatctctcggaaaagtttggagaaatatagctaatagagctgatccatcagggtcgctacatatgtacgttcgattcggaataattccatccgcactagttgatgcgaagaaactcttcagaaactcactggacgagtctggagttaattggcgcttggtgtctacccgctccgcaaattcagcagatgtcggcaagcggcaagcagatcagatgaaggctgagtctgctgccgctgtcgagtttgattttcacgtcgaaagagtttga

SEQ ID NO: 350522 - DNA, 4134 bp, Pseudomonas aeruginosa
atgcctgtgccactgcaagctaggcctgggattggtgtattgcaaacggcaggtcgagattttgaggatgaacgtaatgatcaactgattcaggcatttggtgcgctcgtcatctatcaacctgacagggcgggcacgaacaagcctgtcaaagcccctcttgcgtcactgctcggaaaggtttccgcgctcccctcgatcatcctgcaggctaagttcgaaccatcgtcttttcagaatgatgtaatggctaacatcggactgcaacgggcgcaggttgctcaagttccaccaatcgcaggactgatacctgacatcatcgttgttcgccaagcaaaggctgatgacgaacaggtttgtccgaacggatctagacagccgattgatcttgcgttcgagacgcgaagcgcgttgagtatcattgacgtcaagcataccagtgaagcaaaccctagctactcagccgaggtcgctctttatgcgctttttcttgctaactggatcgtcgaccagggactacaggatcgttattttgtaacgattcgaagctatttgtggactcggtttaagcaagggcaatctgcgtttgatggattgctttctggctcctcggcgacaccagatcagtatctggatgcgttaattgtcgacagcgaagatgcgaatctacgcttttacctgccgacggtactgcatttcttccgtgaggatttgcttcgggttatcgctcttggcgatggtgcgccgaacggctgggcaagccttgagtggcacgtggacggtcgctgcagcgcctgtgactggcttgggcatgaaaagtgggccaattcgaaggataaagcgagaattgcagcgcaaccaacccattactgttaccccgctgcgaggctcaccggtcacttaagccaaattgcaggcatgactcgtggcgcgaggaaaacgcttcaggctaatgctattcaggacactgcgggagtggctgttgccccttctctgcatcctgcttttcaggagcacagccatctcaagaaggagcgaagccggattccagctcgtgcgaacgcactaatcacctcaacgactaccgtggataattctgcggtgcttgcaagcctggcgcctgcgccgcagctccatgttgctatcacggtgaatttcgacccaagcgctggactactcacgggcttgtcgatattgggtcgcgcgacggcctacgtaagcggacaaacgccacgtcagtttgtgccgaagtgctttattgtcgatcagaaggatttgtctgacgaatgggttgccctggaggggctgttgtcaactctgtcggacatggtcgatcaggcagaaacatttgttcgtgcagcaggaaagacaccgctgaccgcgcagatctccttttgggaacagcggcagttccaagagctatgtgcggcgatggggcggcatttgcccagggtgctaggcctgacgaatcggaaaacaaaagcactagcttggctatttcctgccgatgagctgatcgagaagccggacggtgcagtcagcccgtgcattgtctttgtcgacgaaattgttcgacgagtagtcttcgcgccgacaccccacgtcattaccttgttcgacacggctgaaacctacttctctgggatgggacctgttcgtctaggggatgcttactaccgggagttcctgaccaacggtatcccgagagagcggatctatgaaatctggagcgacgctaccaccattagacgtggttcagtcactgtccctcgaaacacggtaattcaggagttcggtaatgcattggaaaaacaatgcagggcgttgaacagtgtggtcgagcggttgcgaactgacttcagaggtcaattaaaagctaatgcccccaagctttcgctttctataccgcagggtagtcgcgatgtcgccttcgatagcaaactgtgggtttggtgggaagagctgcaattccagaccagaaagcttgagtcacatcagcgactcgcgcttgatgctgaggcgttggaggcaagctacgaagctgtacgcctgaccaatggccgcgccaccggtactccgaacgagtacatctatgatgtcctccctggatcaactgaagccaagctggacgacaatgagggttatctagctttgggtaaagagggatacccaggactgccacttcagcgtggcagggatctgattcctatcactgcccctgcttattctgggcagggtgacactttactcagcccgttgtggtcagctctctccgtgacgctggtgtcattcgaccgtggtatgcgtaaagcagtcttgaagctgactaactggcgtgaggcgacattcgctccttatctgctcgccaattcaactgtcgacctgctcaacgacattttcattaccaaaggtcagggttcattcaagtggtacgaaactgtcaaaaaaatcctagcctctgttggtaatccatcgattgccattgccgataggaatgcagctaatgcaatgggcgctaatgcagcaaggccaggtaccgcggccatcacaccacttgctcgtattctctggaaggccgatgttgtccatgcgacatcggttgttacctcatcacaggccgcatctgtggctgcctacgccaaggttaagcacaatctgaatcccagtcagactgatgctgttgcccacgcaacggaaaaaggcttgaccattatttggggaccgcccgggactggaaagacccagacgcttgccggatgcattcatgggttagtccatgatgctgtgcaaaggagtcagcctttgaaggtgctggtcgccggaccgacctacaaagcggtagaagaaatcattggtcgtgtagttgaggcgttagatgccgacccgacatgccccgcagaggtatttgtgggatattcatcgtcgcatccacctaagccctttgcggtaaccaactctcacttgcatgttgactcatttaatctcagtcagaccaatcaagaaacactggactgtctcgccagtttggcgaacgctgatatagtcactgttgtcgccacttcgacaatgcaggcatacaagttcgcagactggagttgcgggaattgtgttggcccaattttcgatgtcgtgatcgttgacgaaagctcgcaggtccaggtgagcacggcaatttctccgcttgcgactctaaaagaggatgcgcgactaatcattgccggcgaccatcttcagatgccacctatcatggcgctggagccacccaaaggtgctgaatacttggtaggcagcattcagaaatacctgctcgagcggccgtttggtaatcagatcattccatgtccattggaagagaactatcgctcggctgaggacatcgttgcctacgcccgtaccattggttatcgaacgactctacacgccgcaaacgctactacggcgcttcaattactggcagcaccgccaactcccgcctccggatttcccttaagcatgccttggtcttccctatggccgcacattctagatcccgagaataaagttttgacgttgctgcataacgatgacctatcgtcacaaagcaattccttcgaggctaagatcgtcgccgctttgacttggtgtctcaggcaaacggcgagtgccgaacttgatggccggggctcggtcacgcatagagtgccgcaaccagatcaattttggggtcaatgtgttggaattgttacgccgcaccgcgcgcaacgtgcattggtgatccgtgagctgagagcgatttttccatctgacccacctgacttgatcgactcagccgttgataccgtggaaaaattccaaggtgggcagcgtcacacaatcatcgtcacttttggggtcggcgatgccgacgtgatcatgggggaggaagcctttctcatgcagctagagcgaacaaacgttgcgatctcccgcgcaatggcgaaatgtctggttgtcatgccaatgaccctggcgggtcacgtccctcaagacaagaaggcgcttgagactgcacacgcgatcaaagactacgttgatgagttctgtaaccaggaaatcaccgatcagatctcgctcggatcaatgattaggcaagctaaactccgctaccaccggtag

SEQ ID NO: 350523 - DNA, 1944 bp, Pseudomonas aeruginosa
atgaacaagaacaccctcgtgcaggaaagcctggaactggccacacccgatggtggcaccaccaacgtcgagaagtacgaattcgagccgattaagggatacccgatgctcaactggcgcggcaagcgcccgtacacctcgacgcagtattacccggcacagttgaaggaagttcacggcgaagaggtagatggctggcgcaacaagattttctggggcgacaacctgcaggtgatgagccacctgctgaaggagttccggggcaaggtcgatctgatctacattgatccgccattcgattcaggcgctgattaccgtaggaaggttgtggtcaaaggtaagactacaaccgccgatcaacttgccttcgaagagaagcaatatggcgatatttggtcaaacgacgagtatctccagttcatgtacgaacgcctcacagtgcttcgagagttgctgtcaccgcaaggaagtatcttcttgcactgcgatcctcgcagaagccactacctgaagatatgtctcgacgaaatcttcgggcgcgagtcgtttgtaaacgaaattatctggaagcgttctggcgtgcatgcttccacgcgtggattcggacccgttcatgacgtcattctgttttacggtaaaaaatcagactttacttggtacccacaatacgcaccctacgatgacgattacatcgaagggtggttcaagaaaacagatgaggcaggtcgtaaatatgggttggtggtgctatctgcgccaggagagaggcaaggaacgaaagctcattatgcaatcaatggacgattcccgccgccgggcaggcattgggcaatcacagaggactcgttcaatgacctgttatcaaaggggctgattgagttctcttctaccggcgttccttatgtaaggaaatacctcgatgagagcaaagggataccagtaaacgatatttggacggatacaggtcacatcaagtcgcaatcgaaagaaaatgttgagtacccgactcagaaacctgagcgcttacttgagcgagttattcaagcaacgacggcgccgggggcaatcgtttttgactgttttatgggctccggcaccacccagtctgtggccatgaagctaggtcgccgcttcattggtgcagatatcaatttgggcgctatccaaacgacgacaaagcgcttggttaaagtggctgatgagttgcgccaaaagtctctcgaccagacagataagcattacaccgggttcgagcttcacaacgtcaaccactacgatatcttccgcaaccccgttcaggccaaagaactgctgctcgaggcgctggaagtacagaagcttgagttcgctactgtgtttgagggagagaaggatgggcgcatggtcaagatcatgcccgtcaaccgcatcgccacgcgcgccgacctgaacgagctgatcgcgggattcgactacaaggcctgggaacgcaaacagaacgaaagcccgaaccgtccggtcgagaagatcaccctcgtctgtatggggcacgagccagatttagccgcgcaattggagctggccgcaatgccgttcaagatcgacgtcgaggtggtggacattctgcgcgacaaagccgatctggagttcaagcgcgattcgcaagccaaggtcggtatcaagaacggtgagctgatcatcgagcggttctacccgatgaacctgctgcaaaagctctcgctgcagaaagagtcggttgaggactggaaggagctggtcgagtcggtgctgatcgactggaactacgacggcgcggtgctgcaaccgacggtggtggacattccaggcaaaaccgagatggtcagtggcgtctacaaggtgccgggcgacgcgggaaccattcgcgtgaagatcactgacctgctctcggagtcgtgggaagggagtgccagcaatggcgactaa

SEQ ID NO: 350524 - DNA, 213 bp, Pseudomonas aeruginosa
atgagcgaccagccagatgagatcctcacgattgacgaggttgctgcctatttaaaggcaggtaagcgcacggtctatcgcctggctgccagtggcaagctcccggccttcaagctcggtggtacgtggcgttttcggcgctgcgatctggacaactggattgccagccgcatcggcaaggcgacgatggatgacaatgagggggctgaatga

SEQ ID NO: 350525 - DNA, 3285 bp, Pseudomonas aeruginosa
gtggcgtcgaactacgaggcaatttgcgaggaaaaccgggagagctacggcaccaagggcgctcaaaagtctgggaagctggccgccggcctgtacgatgaccgaacgcacttcatattcgaactgctacaaaacgccgaggatgccctcggtagacgcggcgactggcacggctcgcgaaaggttgccttctccctgagcgcagaccgcctcacactctcccacttcggcaagccgttcgatgaggctgacgtccgaagcgtctgcgacatcgccgagagcactaagaacgagtcctcgattggtcgctttggcctcggtttcaagtcggtctacaccgtcactgatcttccggagattcactctggcgatgaagacttcgccattgagaactacgtctttcccaagcgcatggcgcgttcggcgcgcgcgacggaggaaacgcagatcatcctgccgctgaagccagaggacacgagcgcagcccaggacatcacggccgggttccgccacctgggcccgggcgcgctgctgttcctgcgccacatcgacgaaatcaactggagtgtcgagggcggcgcgtccgggttctacctgcgcaacagccccgaaatactcggacccaatgtccagcgcatcacggtaataggcaacgaggatgatcgacccgacgtcgatcagaactggctcgtgttccaccgcgacgtattttctgccgagcagcaaaaggtcgggcgagtggaaatcgcgttctcgttggtcgtgttaaaagactctcccggccgctgggcagtgcagccactagccaagtcaccactggtggtatttttcccgaccgtggttgagagccaccttggttttctcgtgcaggggccgtaccgcaccacgcccagccgcgacaatatcccgcctggtgagcagtggaatcagcatctggtcagggaaacatccagcctgctggtggaagcaatgcgctggttgcgcgatgaggcgatgctggatgtatcggcgctgcgttgcctgccactcgaccgcgaaaagttcccgcaagactcgcggttcgcaccgatgttcgatgccgtccaacaggcctttgaggaagaggagctgcttccggccttcgacggcaggcatgtaaccgcccatcaggccaagctggcgcgcacgcaggagttacgcgaactgttgagcccggaccaggttgcagcgctgttcggctcggacatcgtcgcttggttatctggcgatatcacacaggacaaggcccctgagattcgacagtacctgatgcgcgaactcgacatcgacgaaatcacgccgacaaaattggtgccgagcctgaccaagtcattccttgaggcgcaatctgatgagtgggtgttgcggctgtatgaatttctgagcggccaggagaaggctctgcgtcgccacctcgacacagttccgctcatccgccttgatgatggcgcccatgtcgtcgcccgtgagaacgggaaagccaaggctttcctacccagcgctatcgccaccagcttcccgacgatgcgccgaacggtgtgtgcgacacccgaggcgcgtttgttcctaagttcgctgggcatcactgaacccgatccagtagatgacgtgatctggaacctactaccgaaataccagcggggcgaagtggacgtggatgacgacacctacgcagaagacatcgagcgcatccgcactgcctttggcaccgactccgcagcgcaaaaggaaaagctcagagccgcgttgcgagaagcatcgtttgtgatggtggtcgacaccggcgacggcaaagcctacgtcgccaagccaggagacatctacatcgccaccgaccgcctgcagcagcttttcgccggtgtacgcgacatcctaatcgtcgacaacgagtacgactgcctgcgcggcgaagacattcgcgacctattagtgtcatgtggcgcaagtcgttacctcataccgcaagcaacgccgtcggggctggggcataacgaaaaaacgcagattcgcagagaagcaggacttgaacgtgcaagctgggaaattccgccagaagacttcacacttcgcgggcttacgcagctgttggagtttttgtcgacactggcgcccgaggagactgcagccagagtaaaagtactgtgggacgcgctggctgaccttgaggcacgcggcacggctcccttctacggcacctacaaatggggctactcccacgaggcaaaatctgcccgatttgatgccgccttcatccggatgctcaatcaggccgcatgggtgccaaactccaatggtgagctcgttctccccagcctcgttgtgttcgaggaacttggctggaagcccaatccgttccttcagaccaaaatcgcctttaaaccaccgattatcgatcaactggcgaaggaggcaggtatcgacccggcgattcttgatctactgcgcagagaccccgctattgtcgccgagctggcatcccgattgaacaccagcccgacacaagagcctgagccgtcgacagcccccgagccggaggtcgacgcctcctcggaaagcgacgtatacgacgacgcgagagacttgtacggagatgaaatgccgcatatcccgcccggcacgcctgatcccgatggtggtgacgatgtgggtaatggagtgggacgcggggggcaagccgggtctggcagcggacaaccacgcggcaatggccaaggcaacagtggtggcgcacagggtggctcaggtagccacggtgcatctggtggcaaaggaaatggaaatggaaatggcggtgctcatggaaaaaggacacccggacagaccggatcgcgccccttcatttcctacgtcggcgcacacccggaagacgatggcccagatccagatggcctcgatcaagtggcacgaatgcaaatcgaagggcacgccattgacctgatcatcgaccttgagccaacgctgtgccgcacgccagacggtaaccccggctttgacctctacgaggccgacagcactggccggtcgattcggtgggtcgaggtgaaatcgatgacgggcagcctggaagatcgccctgttggactatcacacacgcaattcgactacgcgcgcgaaaagggtgatgcgtactggctgtatgtggtcgagcacgcaaccgacccggcacaagctcgagtactcaggattcagaaccccatcgcacacgcccggacgttcacgttcgacagcggctggagccagatcgcccaaacagagctacctcactga

SEQ ID NO: 350526 - DNA, 231 bp, Pseudomonas aeruginosa
atgccggtgcaagggttcactgtggtcgatttgggctaccagaagggtaatgcactttctagcatcgttacccgcttcaatgagccagcccacacgggtatgttccttagcctgttcgaacagatctggagtggccaggaaaaactggaagacgtcaccgcgcgtctttgtggccgcattgcttcggtgtgtcaaagccgacaacaagaagtgggtatgaggcgtgtctag

SEQ ID NO: 350527 - DNA, 561 bp, Pseudomonas aeruginosa; identical to SEQ ID NO: 328154

SEQ ID NO: 350528 - DNA, 1755 bp, Pseudomonas aeruginosa
gtgagaccaaacattgaaaactcgattgtcaactcagctctttgggcagccgcagcagacgcgttgggttggattactgagctcgtggacaaaaaaggtgtagtgcgacgtaccggcaaaggcaaggtattgcggactgtaccatggaaacgaaaaattggaggcattgctggagtaactgttgagctaccggcaggtacttattcagatgacacacagttgcgactggcaatctgccggagtattcaaggcgacggtttttttgatgttgaagcatttgccaaggtagagctctcaacttggtcctcctatgcgcttggagctggtcgcggaacgaaagtggccgctgctaatattgcgaagcgggacgttaattggttttctaacttctactctcagggcgatcaaatatatttccaggggggcggaaatggggccgcaatgagaatccagccccacgtttggaggcgatctcgtggacctaatagagactaccttgctgatgttataaaagatagcatagtaacccatggacatatgcgtggggtatgtggtgctgtctttcatgcggactgtttagcctacattctagaaacgggtcatatcccgggacctgaggagtggattggcttcgtagcaagttttgatgagattctgagtgctgttagatccgatttccagctaggtaaattttggttgagtgcttgggagcagggaagcggttctgatctcggggtagcaatcgaagccgtctcaaacgaaatgagatcatatatctcgcgccttggtgaattccccgttgatgttgaatccggttataccaatgcgcttgaagtgctgggttgtttaagtgatagagttggtacaggaacaaacaccgcgctagcggcagcttaccttgcttgggtgggtcaagatcagccaattgagatgactatacagttggcggtgaatacgttgggtagtgatacggacactattggtacaatggtgggtgcactactaggtgggatcgccatgaaccctccatcttggccaatacaagatgaggcgtatattcgttatcaagccgttaggatgtctcgcatcgctcaagggataagcgatgaaggtttccgttatcctgatttgatgacttggcagccaccatcaagtcaaagtaatgcgctccagtttaatgagagaggctacttcctgaacggttttggcaatcttgagtctataagtaaaagttggaattctggttcgtttgcgtgggaatggtttaagatgccatttgggcagactattctatgtaagcatcgtttacgtaagccggtttatgagaaagagagtgaagcgcttattctttctagaaaaagcccgcactttagtgacctgcatcgttcagagcgaatgagttcagcgcaagttgagcacggagaccaaaatttggatctgccattgttcgcggatcaagctgtaaccaatagtgaagttacgcttaaagaacaagggaagcctacagattttcaatattcagacaaagctggctcgtctggctcgatcaagcagtcggccgtttcttcagaaactcgtagtgttggcgaacttacagatcttgtgattaaaagcaattttgatagcgccgtccttgggaaatgcttcttggagtgcgtgacaggagagctagcgatagagaatgctatcgcattctctgccataatcgctaaggcgattgatgtaaggcaaaaaaagaatagttccggcagatag

SEQ ID NO: 350529 - DNA, 675 bp, Pseudomonas aeruginosa
atgactttagatgtcactattgaagatattgtggctgctagggggatctctgagatattacatttcacaagcaatcacggtttggtcgggatctttacgcttggatgcgttttatctcgacgcgcccttccgggcgaagatcatttagcacatgttgcagcaccgacgtctgcgacacggcaagaggctgcgagttattttgacaaagaacaagactggttagactatatcaatctctccatatctgagattaatagaagttactttaaatttgcttctcagcgttggcacacgacgggtgatagatggtgggtgatacttgcgttcaagccgtctatattgagttttgatggtgtatattttagcaccacaaacaatgtttatgaaaatacatcccgggcgtccggtgctgaaggtcttaaagctttattttcggataaaacggatcgaaagccaggttggacggtcaaaaggctaagtcgagctgctaatctaaccacttgtgaacaagcagaggtgctttttcctaatccattagagttgtctcatcttcaggctatatatgttgcgaacgaagatcactcagatttggtggaaggttggcttgcgtattataagattttaggtgtttctgttatcataaacgaaggtaagtttttagggcagcccaactga

SEQ ID NO: 350530 - DNA, 1407 bp, Pseudomonas aeruginosa
atgctagtactccaacctcacaaagcaacatctgagcagcttccgatcatcagtggcacgaaaatggggatcgaggtaatcagaggcgcagctggtagcgggaaaactacaaccgcgctccttaggctagagtcacttgcccacacatttatggccaggcgtagacgacttgcagttgagaagcccgtaaaagttttagtaattacatttaatagaactctggcgggatatgttgaacatctcgcgtctgttcagctgggtacaatgccagatgtaagttatgatgtcgcaacatttgccaaatgggccagtgataatctcaacaacccgccgatcattgatgacaagacacgggaggcaatgctgcgtcgagcatgttctgatattcgactgccttctgacttcgcgctttcagaaatggaatatattattggaaggtttgagaaagaaaagcggcaagactatatagcccttgaacggaccggtagaggcgcaagcccggcagtcccacgtaccctgcggcctcaatttttagaagccattgaaaagtacgaagaagctctatcatgttacaagggaggggtatatgaggattgggcctccctttgcgacaagatgctaaagctagagagcttggagtatgatgttataataatagacgaagctcaagacttttcggctaatcaaattcgggccttgaaacatcatctggcttctccgcactgcattactttagttcttgatacagcgcaaagactttatcctagaggatttacttgggctgaaaccgggctggatatgcaagcttgtgtttatcatcgcttgaaggtaaatcatcggaataccaaacagattgcggagttcgccaggggagtgctagacggcttacaaatggatgaagacggtactttaccagatttccaggctgcgatgagagtgggtgaaactccagtagtcgtcaaaggtaaatacagtcagcaactagcttatgccatcgattggatccagaagaatgtagatttggatagggaaacagtagccttcttaaaacctagaggtaaaggttggtttaacgatgccaagaaagggttgggtgctgctgggttacagtattttgatttgtcacgttgtcgttattggccgagcggaggggggaacatcgcactttgtacgatgcactctgcaaaaggcttagagtttgatcatgttatcgtcattgggttatgtgcgaaaaataccccgcatggtaacgagcaggatgatgatgagcttcttcgtctgcgtcgattgttaggtatggccttggggcgtgctaaaaaaacggttatggttggctataagccggatgaagagtctggtctaattaaatatttcaaacctggtacgttttcagaggtcgaactatga

SEQ ID NO: 350531 - DNA, 573 bp, Pseudomonas aeruginosa
atgaacagcaacagatatcccttgccggcgcagaccggcctggtggtggctcccggcctgccgccgaagaactccaccctgcgtccggaccagctcaacaagcgcctgagcagcgcctggcaccatctctacgacctttgcccggaactgctgaagatcgatccgccggatggcctgaccatcctccgtggtttcctgcaatgggcggccgagcagaaggccgcctggaactgggcgatgcacctgcgcctgtactgctggctgttgcagtcgccgttcggcgccaaggtgaccgacgagcatctggaggtgctgatggacgcctccgccgcgcgctggacggtggacgacaccagcgccaaccgcggcatcctcctggccagccagggcggtgcgcacatcacccaggactggaaggcgccgcaggccggcgccggcacgcgtgtgccgctggagcgcctggacctgccggcgccgaactggacattcgcctattgcgcggtgcccgacccgcggctgcgcgagttcccgggctggaagccgttgccggcgcgcggctcgctggtcggctga

SEQ ID NO: 350532 - DNA, 1074 bp, Pseudomonas aeruginosa
gtgttccgctctcccctgccggcaatatgtgacactttttggcatctcggaatcgtcggtttggcagcctttggcatctgcgttataagtctcgctccaagccttcttcagatgttccccaatgaacgattccacgcctctcagcggccttgccaagcaactggtcctgaacgaactcctcgacgaaaagaccgcccgccaggcccaggtgcaggccgcgcgcaacaagcagtcgctggtcagccacctggtccaggccaagctggtgcagagccgggcgctggtcgaggtggccgccgagcagttcggcatcgcctattgcgacctgaacagcctggatcgggaaagcattccgaaggatgtcatcagcgagcgcctggtccgccagcaccgcgtgttgccgctgtggaaacgcggcaacaaactgttcatcggtctctccgacccgaccaaccatcaggcggtcaccgatatccagttcagcaccggcctcaccaccgaagccctgctggtagaggacgacaagctcggcgtagccatcgagaagctttacgagggcgccatggacgccctcggcgacctcggcgatatcgatctcgacggggtcgatgtcggcaaggcggaaagcgccagccaggacgacggcggcgacgatgccgaagacgcccccgtggtgcgcttcgtcaacaagatgctgctcgacgccatccgcggcggctcttccgacctgcacttcgagccctacgaaaagacctatcgggtgcgcttccgtaccgacggcatgctccacgaagtggccaagccgccgatccagttggccagtcgtatctctgctcgtctcaaggtaatggccggcctggatatctccgaacgacgcaaaccgcaggacggacggatcaagatgcgcgtatcgaagaacaagtccatcgacttccgcgtcaacaccctgccgaccctgtggggcgagaagatcgtgatgcggatcctcgactcctccagcgcgcagatgggcatcgacgcactgggcccagaaggaactctacctggccgcgctcaagcagccacagggcatga

SEQ ID NO: 350533 - DNA, 1776 bp, Pseudomonas aeruginosa
atgacaggcattcacggtctgacggcagagcaggaagcatttgccgcacacgttggcggtgccttcgttcatgcttgtccaggcgctggaaagacccgcacgatcattgctcgcctagctaggatcgccgccacgttgccaccacgctgtggtgtggcagtactctcgttcacaaactctgccgtcgatgagtttcgcgaacgctgccaggccgcagggcttgactcgctcttgaagcatcctagtttcatgggaacgcttgatgctttcgtcaggcatttcgtggtactgccaagttgcgcggcaagaagcccgacgcgaccaatcatcctcgatagttgggacactctaggcatagaaatccggctgtctgggcaattcgcctttcgaggtgatccggtgagcctagatttgttcgacccggaaaccaatatcattgatccagagaggatcggacacgccgggttgcagaatcatgtgcggcagcatcaggtgcgatatcaacagactgcggcgcaccggcgacgcggcttgttgcaagcaggctacatgagtgccggcgatgcccgcgtccaaatgttaaggttgattcgtgatccagtgaacggcggcgcactcggtcgcgcaatggcagcacgtttccacgaagtcatggtggatgaggggcaggattgcaatccgcttgatctgcagatcctgtcctggctcagagcgcatggcgtacatgtcaccttcgtgtgcgaccccgatcaggcgatctacgaatttcgtaacggcaatcctgcagggattcaacaattcaaggaaacgtatcccgttgagtcgcatcgcgggttaacgggcaattttcgcagtagccctgcggtctgccggttagccgccacacttaggaatgctggccaagtagatgagcctgtcggtgacactgcaaatgttgaacatccagttttgcttctgacatacggtggccgaggcccaacagcgatgatcggccaggctttccttgatcgggttactgaacttggcttggattcggcgaatgcaattatcctggcgcattcaggcaaagttgcgcagcgagctgttggcgcaccctccaataacttgaacggaagctcccggatcgagtcattggctcggaaagtggcagagttctggtcacccgcagcaacggcgcgatctagagaggctgtacttcaagcagtggagacgacgctgctggatctcatggagctacgccaacccaatgagcatctattgagaaccgtggaacgccttgacatagatcgtcgagcacatcgaagacgttcgctgagtttcctcatgagtcttcctaaggagtgcggggataccgatgctgaccggcttgcctggataggctatgtgcatgagggggtggaacgattggaactttcactaccggccggtatgaccgtgcgtagttttttccggcgaccaaccaatgcgcaatggtcgaatcatcttcaaataccgaccgatcttggcctcaaatgcgcaaagattcatgaagtaaaaggccgtgagtatggcgcggtgtgcgtcgttgttccgcctaatcgcgctcctgaaaaccggattgaagctctatttgactcttgggaattacgtgcagatgcagaggccaagcgcgtgctctacgttgggctgacgcgcgccaagcacctgggagcacttgcagtacctgtcgcctttgctgatcgttgcgccgccgtgctgatcgctggtcaggtgccatacacaagaagagacttgtag

SEQ ID NO: 350534 - DNA, 1752 bp, Pseudomonas aeruginosa
atgtatttgggcggtttaacaatttcgcgctttcgatcttgcgacaatgtgtccatcagtctccgtcccgacttgacggtcttggtcggtgagaataatggcggcaaatccaatgtcgtagatgctatccggttgctcaccttgccgttgagcgggcgccgggagcggtatccagaggatgaagatgtacgacgccacgcggctgtcccgaacttcgagattcaaggtgttttccgaggactcagcgacacgctgaaaggactactgatctcggcagtcccagatcctagcaagagcgaagctgtattcggctatcggtatgagtcacggtccgagcgcgcgccgcgtgggaagaccacggtttgggccgggcgcttcgacaacaacgagccggaggccggctcctctgaactgattcggcatgtctacctgcctcctttacgcgatgcgcatcaagcgctcggcactggcagcggtacacgggtcatggcgctcctgcgcaacttcttgcccaaggatcaagaacaagatttcctagctggcgtcaggcgcgcggatgaacggcccgacatcctgaccacgatgaacacggagatcggcacagccctaggcttgctgaccaatggggtacgcccgcaaacagcagcgctggacttcggcgccgaaactctactagatgtcgcacgcgacttgaggtttcgtctcgcagactctgggctggtacccgaagatatccgggcgtctggtctgggctactccaatctactctacatggccacagtggtggtcgaactggccaaagccaaagaagccgacctcacgattttcctcgttgaagaacctgaagcgcatctgcacccgcagttgcaagtgcttgtgctcgaattcctactagaccaagcacgccaatcggctgatcgtgtcattgagcctggcaagccggaaggccgcatccaaatcgtcgtgacgacccattcgccgaacctgacggcatgggtctctccaacgcatctagtggtcatgcgttcacgtcgtcgtgaccacgacggggtggcggtttcagaatcagtcagcgtgcccattgccgaaattggaatcaagccaaagacactggataagatcagccgctatttggacgtgacgcgctctgcgttgctgttcggcaatagagctatcttagtggaaggaattgcggaggcgctgctgttgcccgtgttggcgcagaagattgttcttgccggtgataccgatgaatggcttcggttcaagggcgcggtcatcgtgccgatcgaaggcgtggacttccgcccctacgtagaggtgctgctgcgcccatatggcgatgcacgcatcgctgaccggctgattgtgattaccgatgcggacccaactgtgttgggaaatcggaaagtggatttggaaaacctcgccgcaacgcatggtgcgccgcaggcactgaccgtgctaaccaatcaacacactttggagcacgagatattcagtgctggaaacgaatccttcctcaagagtgtgtttcttcgcctgcatcgcaactcgcgtcgcgactgggaggatcaaatcgagagagtcgcagtgcaagatcgttccgatgcatttctcaggctgattgaggcgaaaaaaacccgcaaaggggacttggcccaggccatggcttcgcgtattgcggcgggcgagccatttgtcgtgccgccctatctcgccgatgcaattcgtggcgcgtcacaagcatga

SEQ ID NO: 350535 - DNA, 879 bp, Pseudomonas aeruginosa
gtgaagtacttcttcgagtcgattaggacaagggcctattggcgctacgcgctcttctccggtgaggcgattggcaagttcttcgcagtcatgggcattctgtacctgtgcgttgacttggcggacgccttcaacatctacaagaaggaccagtacagctactacgggttgattttcttggtcgtgctcgcgctgctgtacgtgctgtccacgcgacggccgctctcgcgtatcagctacaagattccgcagaaggacttcgcagtagaagttttgatcggcgatctcttcaaaattcccggtgaggtcatcatcagcaccagctcgacattcgacacggacatgtcgtcagggctgatcgccgcgtccagcttgcaaggtcagttggcgacgaactacttcaacggccagaccacggagattgatcggcagatcgaggtctcgcttgaaaaagagcagttcaccatcaacgagaagaggccaggcaagaagaaggagtatccaatcggcactgttgcccgcgtaagcgcgcacagcaagaatttctacctcgtggcgatgtcacacatggaagagaacaagaacgcccgatctgacttgaagatgatcgacgaggcgcttgagaagctgtgggtgaacttagcggccaaggccgaggtgggcgatatcgtgatgccgttgatgggcacggggcgcgggcgggttccctatcccagaaagaagatgatcgagcgcattgctcaatccttcgcagacgctgcgagcgaacgggcgttctccaacaaacttattatcgttgtacgtcccgaagatgcctcgatgttctcgttaaatctgttccaggttcgggattacttgggacagagccttcacacctag

SEQ ID NO: 350536 - DNA, 501 bp, Pseudomonas aeruginosa
atggcataccgaaataagacctacatcgcctttgacggtgacaatgacatgcactactaccgtctcatgacggcatggaaggcaaacgacgggttttcgctcaactttcataacgcccacgacctgaacacggcgcgggattccagcctggaagagagcatcaagcgccaactccgcgagcgcttctccaattccaagcagctcgtggtactcatcggggccaacactaagtacctgacgaagttcgtcaagtgggagatggaggtggctttacggctcgggctgcccatcatcggcgtgaacttgaacggtagccggcagatggacgaccgttgcccgcccacgatccgagatcaactcgtggtctacacctcgttcaaccacaacatcatcgagcacgcgatggaccattggcccaccaatttccagagcctgcgtgccgctggcacgactgccccccatttctacaacgatgacgtgtacaggcggctcggcctgtga

SEQ ID NO: 350537 - DNA, 789 bp, Pseudomonas aeruginosa
atgcgtgaattggaggcgcaggtcggtattcgcctgctcaatcgaaccacgcgcaatgtctcacctaccgaagcgggcgaacacctgttgggcaggctcagcccagccttcaccgacattgccgccgcgctggacagcctcaatgccttccgcgacaagctccagggcatcgtgcgcatcaacgcgccccgcatggccatcgaactggtgctggcgccgcgcttcgctgaactggcacgcgattttcctggcatcaccctcgaagtggtggccgaggagggttttgtggatatcgtcgagcatggcttcgatgccggcatccgcctcggagaagacttgcacaacggcatgcttcaggtgcgcgtcagtgctgatctacggctggcgatcgtggcgacgccggcctacttccgccagcacggccgccccgcaacaccgcatgaattgagccagcatcgctgcatcggatggcgcaaagtctcatcgggcgagcgctatcagtgggaattccagcaaaaggggcattccttcggcgtcgcagtggagggacctctcgtcctggatgatgccaacctcatggtgcgcgctgcgctcgatcacatcggcattgccttcgcgctagaagatcaggtgactgagcacatcgcttcaggccgcttggttcgtgtgctggacgattggtgcgagccattcccaggcttccacctctattacccaaatcgcaggaaccactcggcggcactggcagctatcattgacagattacgtttcgacggaaagagaacgtaa

SEQ ID NO: 350538 - DNA, 822 bp, Pseudomonas aeruginosa
atgacccagcgcaccgcagctttacctgtctcatccacccaatacgcggcactccggcgcttgaacggcaaggttgcgttggtgaccggcggcggtacaggcatcggccgcgccgctgccttggcctatgcccgagagggcgctcgtgtggtgttggccgggcgtcgcaaggccgagattgaatcggtggcccatgagatcactacggcgggaggccaagcgctggccgtgccagccgatgtggcgcaggaagaagaggtacgccgcctgatcggtacggtcatcgaacactacggtcagttggatgtcgccttcaataatgccggcgtattgggcaacgttgcccccattaccgagctgagcagcgccgatttcgacacagtgatgaccatcaacatgcgtggcatatggctgtcgatcaagtatgagatcgaagccatgctggctcagggtagcggcggcgccattgtcaacacctcatcgtggcttgcccacggtgcaatggctggcacgtcggcttattcggccagcaagggagcgcttgacgcgctaatccgcgccgtatcgcttgagtacggcccgcaaggcatccggatcaacaacatcaaccccggcatcatcgacacaccaatggcgcgtggcagcttgaacgatgatgattcggccttcgtgcccttcatcgagcacacgccggccaagcgcgtggggcagcccgatgatgcgggagatgtggcggtctggctctcgacggacgagtcgcgctttgtcaccgggcagaacattctggtcgatggcggctacaccatcgccggtctgcgctga

SEQ ID NO: 350539 - DNA, 1089 bp, Pseudomonas aeruginosa
atgcgcagcatcgaatggaaagcttgtctgctgggtgccacgatgcttctagcggtcgccgcacaggcgcgggatgcacagagcatcgtattcaccccccaaccccgcgttgggtatcccgaggggattgcctggaatgagcgtaccggtgcgtttctggtctcgtcgctgcggggtggacaggttggtcaggtctctttgaacggacgatattcgcgcttctcatcctaccgctccttgatcaccacatccggcattactgtcgatgccgcgcgtaaccgtgtgctggtgtgcaatgaagatgtcggtatttcgcacaaatcttcacccagcacccacaaccgcgtggcgcaggtggtcgagttcgatctcgacacaggtgcgctgcggcatgtctatgatttctctcggctgagcaaggggccgacgcttgccaacgatctgaccgtcgacacgcaaggtaacgtctacgttacggacagcttccagccgcagatatacaagatcgaccaggcaaccggggatgtgtcggtactggtgcgttccgaacgtttgatgcccgccggccctgccaaagcaatggggacacagccctacctcaacgggatcgtttaccaccctgacggctttctgatcgtcgcggactattccagggggctgctttggaagattccgttggatcagccacagaggttggccgaaatcaggctgccgcagcgtctgaaaggaccggatggactactgctcaagagcccgactgaactggtggccgtgcagtccttcccgagtcgggatcaaggcatgtcgggagaggtaacgctgctgacctcatccgatgcctggggcagtgcccgaatcgcagcggttgcgaccccaccaggattggatgggccaaccacagcgacattgaaggatggcgaggtctgggtggtcaactctcgctacccccgcctttttgctgacctcaccacggtggatcgggtccgggaattcaccattgtcagggcgaatttcaagtccacgggggcggcggaaagcgctcgatcggatgcagtctttagccccgctcacgagtctgggtcgcactga

SEQ ID NO: 350540 - DNA, 972 bp, Pseudomonas aeruginosa
atggactacgttcgccttgggagcaccggactgaagatttcgcggttgtgcgtcggatgcatgacgtatggagaccccgcctggcgaccgtgggtgcttcgcgaagaacaatcccgcccacttatccggcaagctctggaggctggcatcaacttcttcgataccgccaacatctactccatgggtgagagcgagcgcatcgttgggcgcgcgatccgtgatttcgctcgacgcgaggaggtggtgatcgccaccaaagccttctttccgatgagcgacaagcccaatgaccgcgggctctcgcgcaagcacattcttgccagcgtagatgcatcgctggaacgtctggggacggactacatcgaccttttcgtgatccaccgtttcgatcccgagacgcctattgaggaaacggcagaagcactggatgcggttgtgcgtgccggtaaggttcgttatctcggcgcgtcctccatgcacgcttggcgcttcatgaagctactggccttccaacggcaacaccgcctggccgaattcatctccatgcagagtcaatacagcctcattgtccgcgaggacgaagaggagatgattcctctttgccgcgaagaaggcgttggcttgacgccttggtccccactgggccgagggattctgacgggagcgagaaggagcggaacaccgcgcgccaccaccgacgagcagatcgtgcagtggtacaacgggcgtgaggatgtggagcagaccgtgtcagcgctggaggctgtcgcacaagcacgtggggttccaccggcccaaatcgcgcttgcctgggtgctggcaaaaccgggcatcacggcgccgctcattggcatttctaagcctgggcatctggtggacgcccttgatgcgctgcggttgacgctatccgatgaggagatgttctctctggaggcgccgatcaatgcgtctgcgcgcgtctcgcgttggtag

SEQ ID NO: 350541 - DNA, 3198 bp, Pseudomonas aeruginosa
gtgtggatcgttcgttacgccttgaatcgacgctataccatcgccgtggttgcgttactgattctgatctttggcatccgttccgccaaggatatgtctaccgacattctgccggatgtcggcatcccctcggtcaatgtgctttggtcctacacggggcttccggcagaggaaatggcggccaagatcacctccctgtcggagtcttccatcttcaacaacgtggacgacctgcgcgaggtccgttcggaaaccactgctgggattggcctcgttcgcattgagttccagccgggtgtcaatctggaacgcgctctggtgcagatcaccgcggtatcgcaaaccatcctgcgcttcatgccgccgggcacatccccccctgttgtggtacgcaacaacgtgtccagcacgccagtgctgcaactggcgctgtcttccgacagcctgaccgatgcgcaattgtacgactacgcaagggtgcaactacgcacgcagattcagtcgattcctggcattcgcttgacccttccctacggtggcgcgccgcggcagatcatggtcgatctcgatccgtcagcccttaacgcctatggcctttcgccccaggatgtgaccaacgcactcacccgaggcagcccgaccctaccgagcgggagcatgcgcgtgggcctgcgcgagatgcagatcacgcttaacagcagtccacgggacattgaggctttcctagacctgcccgtgggcaacagtcgagacggtagcgtcgtattgctgcgtaatgtggcctcgatcagggatggagccgccttgcagaccagtctggcgcggctggatggcgccaatgcggtgtccgtcatgctgatcaagctcggcaatgcctcggcggtagatatcgttcggcaggtgcgcgaaagacttcccgagatacgcgcctccgcgccgctggggacacggatcgaaccgatcttcgaccagtcggtattcgtcgacaatgcgatcggttcgattcgtaccgaagccgtgctggtcggcttgctggtagcgctggtggtgctgttgttcgtcgggtcatggcgctccagcctgatcgtacttgccaatgtgccgctggcgctgctggcttctgtcacaacgctggaattgctcggctacaccttcaacgtcatgacgctcggcgggctggctctggccattggtatcctggtggacaacgcggtggttgacgtggagaacaccaaccgccacatcgccatgggaaaaccagtccgcaccgcgatcctggccagtgcgcgcgaggtggtgtttcccgagttcgtctcgacgctttccatctgcgtggtgatgacgcctatcctgctgctcaccggcctatcgtcctgggtcttcacgccgttagcgctggcagtgatcttcgcgcttctcgcttcgttcctgttgtcgcgcacgctggtgccggtgttgtgcgcgttgttgctgccggccgacatacagagccattccacgccgaagcggctggagcggcttcttctggcgctgcatcacgggcttgaagcacgccttgattccctacgggacgcacatggacggctaattcggtggctgaccggaaatggcatgctgttgtggatgtctgccgttctgctcgtgggtctgggcgccatggccttgcttcagagcggacgcgaatacttcccacaggtcgatgcagggcaattgcgtctgcatgttcgccttcccactggaatccgaatcgaggaaagcgcccggcgcattgccgagattcaggaagaaatccgcagggtgatccccgccgacgaactgcaaactgcctacgagcagatcggtatccccaatccggtcatccttgccatggtcgagaccgcagtgacgggcgctttcgaggccgagatcatgttgcaacttcgctcgccacatggatcgacgtcggactatctggctgagatccgacggcgggttgcgcagcgctttcccgacgtgcgcctcttcgaacgtccaccggacgcgatgcgccggacgctggctggatcggcaatgggtgcagtcgaagcccgcgtgatgggccgggatgctgtaggcaatatggtcgtcgcccacgacatcgtccgacgtcttgcgcaggtgcctggcgccgcagatgtcatgatccgacagatccccgacctgcccgagtatcagttgaacattgaccgtgtccgtgcggcgcagttgggcgtggataccgagcaggcggcgcgtgcagtactcggcctgctcggcaacgccggcagcgtgagcccggtctattggatcgaccgcgccagcgccatgtcctacgttgttcaggtacaggctctaccgcatcaactggccgaccttgagaccttgctcaatacacctgtgcacgtcgatgctcagggcaatccaatcctgttgcgcagcatcgctagagtcgaggagcgcaacgtgccagccagcatcgagcgcgccatgatggcgccggttatcagtgtcgtcgccaacgtccagggggctgatcttggcagcgtacaccgccatctgaaggagatcgccgagtcgttgcagccaagcctgaagccgggcaaccgcatcgagttaggcggtcaggcgcgcgagatggagagcgcttacgctgcgctgggcggaggaatgctgttggctgtggctctggtcttcctgctcctggtcgtcaactttcaatcttggctctacccgctagtcgctatgtcgggcttgccgatcgcgatggcaggtgcggccgtcagcctgtggttgagcggcacagccttgtcggttaccgcgctgatgggcgcgctgatggtgattggcgtttccacggccaatagcgtgctggtggtcagcttcgcccgcgatttgattcaggccggtggcaatgccgtggaggctgcctacgaagccgccgcagtgcgtctgcgcccggtgttgatgacggcgtccgccatgctgctcggcatcatccccatggctttggggatgggtgaaggcggcgaacagaacgcgccgctgggacgagcggtcattggtgggttgctgttcggtacaggagccacgctactgctggtgcccgccctgctagcagctctggcacagcgccgaattcgcaggacgcgcgcggcggcgtcatcggcgccgctggctgaaccacccgaggagaatcgataa

SEQ ID NO: 350542 - DNA, 1125 bp, Pseudomonas aeruginosa
atgatgcactttgccaatggcaaatggggtcgcattgccacgttgtatgcgctcctgaccgccttgggcggctgcggcaacggacagcaagatgccgcgcagagcactgcggagcccgaggtgaagaccgtggaagcggccgccgcttctgatagccacagcctgaggctgcccatgcgagcggaggccggacggcttgtacgcatccacgcacgcgccaccggcatggtcgcagaacgtcgggtagatctaggtgacgctgtggttgcaggtcaggtactggcggtgatacgcgcgccagaggtcgaccaggccgcccgcggggcagaagccgaacagcaactggcgagggccaatctcaagctggcgcgtacccattacctgcgtgcacgccgattgattgagtccaatgccatctcccgggagctgtatgacgaacgcgagggtgcgttcgaggtggcacaggccaatttggcctctgccactgcacgattgtcgaacctacgcgagcagcaaggctttcagagcattcgtgcgcccattgccggcgtcatcaccactcgcaacatcgaacagggggatcgcgtgattgccgatcagggtgccgctgccacgccgctgttcgagctgagtacgctcgatccgctgcgcgtcatcgtcgacatacctcaggacgcgctaccccagatcgccgagggtgatcgcgcgcagatcatgttctccgggttcgatgaagcgggccgtgacgcaacgatcacccgtctgggacaacgtgtatcgccgtcgacgggtgcgatgcgcgtcgaactggacctgcccaaccccgatcgccgcttccggccaggaatgacggggcaggtgctgtttaccttggatcgcccgcaatcggttgcactgataccgatcagttcgcttgtgcagaacggtacgcaagcccaagtcatacgtgtcagcgaggcggggacgcttgactttaggactgtgcgactggggcgcaacctgggcaaccaggtcgagattaccgaaggcattgctgccggagacaggattgtcatcacgcccaatgctcggctgagacctaaggacaaggtgcgcgctcgggcgagtgacgatggaggggcttag

SEQ ID NO: 350543 - DNA, 1023 bp, Pseudomonas aeruginosa
atgaaagctattggtctctacagtgcacttcccattgaagatgcccaggcgctcattgaacaggacgttcccagaccctccatcggcgatgaagatctgctggtgcgggtagaagcgatttcggtcaaccccgtagattggcgggtgcgcaagcgcaaggtcgatgacggacagttccaggtgcttgggtgggatgtggcgggagaggttgtcgaagttggtgcattggtcaagggctttgacgtaggcgacagcgtttactatgcgggtgacctgacccgaccgggcgcgaacagcgagttccatgccgtcgatgccgccatcgtggggcatcgtcccgcatcgttgtcggcagccgaagcagccgcccttccgttgactgtgctgacggcatgggaagcgctgttcgaagggctgggaataccgttcgacggcacgcgagttgagcgcacgctgctgatcgttggtggagccggcggcgtgggctcgatcgccatccaactggcttgtctggtgcccggccttaccgtgatcgcaaccgcttccagacaggagtcgcaggactggtgcaagacactgggtgcccacgccgtcattgaccacttctccgacatggcgacccagttgcagacgctgggaaaggactcgccagactttgtcctgctaatcaacgcgcctgatcatcattggtccatggtgacagagcttttggctccgcaaggagcaatctgctccatcgtgtctttcgaccacgccgtcgatttcaaccctatcatgctcaagagcgcacgattctcttgggaattcatgttcacgcgttccatgttcaacaccaacgacaaaaccagacagcgggaaatccttgatcacaccgcgacactgatcgatgaaggaaaactgcggtcgacggtcactcaatcgcttgggactatcaatgcggccaacctgcgcaaggcacatgcacagcttgaaagtggcaggatgattggaaagcttgttctttctggctttgacgctgattga

SEQ ID NO: 350544 - DNA, 945 bp, Pseudomonas aeruginosa
atggaaatccgccatcttcgttgtttcatggcagtcgccgaagaacttcactttgcccgcgccgcagagaagctgcacatcgaacagtcgccgctgtcgcgggcgatcaaggagttggaggaggatatcggtgcccagctctttgtgcgtactacacgcagcactcgcctgactcctgcgggcaagttattcctggaacatatgccgcgcatctttaccgcgttgcagcaggcacgcgacagcgtgaaatctgtggccaatggtttttatgggcagttgcgcgtggcattgtccgacagtgtcaccccatcacggctttctgcgttgcttgcactatgccgccaggaagaacctgaagtcgagatccgcctcttcgaggtatccttatcacagcagatcaaaggactgcatgacgatctgtacgacatagggtttgcccaatcggacgaggtaggcaacggcatcgtcgctttgcgcgcgtggagcgatgtgttgatggtagcggtgccggtacggcatccactgctggctcacaaacgcattcctttggacgaattgctgcgctatccactggtcttgtgcgatccgcaagcctgcgaaggccatgctcgacacgttgaaaaagtgctgcgccgcgcggacatggaaccgttgattgtagaacgggtggcgtcctacgacctgatgatggtgctggtatcagcgggcctcgcgcttgggttgatcggtggtgcgcgtattgaggccaaccgcgagctaggcgtcgtggcccgcccgctagcatcgcgcgttccgccgctcatgacctatttgctgcgaatcgaccgagacccatccgccgaacttgcgcggttcattgagcgcgtacaggccattgagcttgcggagaaccccagccccatacgacgacgaaaccctaattccccagaggagctgacgccatga

SEQ ID NO: 350545 - DNA, 279 bp, Pseudomonas aeruginosa
atgaagaagatcattccgttcttgctcgcgtccctcttggttgcctgcggccagtccgaagcaccacagaaggccaccgattcgaaactgaacttcccctcggtggaagagctggtggccaaccccgagcgactcaaggaattgcggcagcagtgcaagaccaaccgcgccaagctgggcgacgtgctgtgcaaccgggtggccgaggccacgcacaagcggttctatggcgacggcgaaacgccgtacacaccaccgaggggaccgcctaagttctga

SEQ ID NO: 350546 - DNA, 339 bp, Pseudomonas aeruginosa
atgcgatgcgttcctgtcctgctggtcgtgctgatgaccgcgtgcggccagccatccgacccgcaaagggccgaggacctggccgccaccttggccgccgatcccgtacggctcaaggcactgcgcgcccaatgcgcaaccgaccggcaagccaagggcgaagacacctgccgcaccgccgccgaagccttccggcgacgcttcttttccggccagagcgggccggacgaataccagacactggccgacctgccaccgattccggcgagcttcgacacacctgccgacgacgcgcccgaaggtgatgcgcctctcgctgctgcggaggacacgccatga

SEQ ID NO: 350547 - DNA, 1194 bp, Pseudomonas aeruginosa
atgcgtcttctgtgcacttctgctgtggcggcgatctatgcctgcactccccaggcaaactcgccattggcggaagcgtcgccgagcgagattgccagggctgttgtagacgacggcacttatcttgagcgcatcgatccacttggcggtcaatggcgtgtacggcagattggcgaagaggacctcacccgtttcaaggcgtgggtaaccttcagtgctggcgggttcctcaatcacggtgcgggttgtagcggcggctatccggcgttctatcggctcgacggcgagcggttgacgatcacacggcgcgtgaaagcccagattggcaaatgtggctctgccgttccgacgcagcgcaccgccgcaatcggcagcgaacgtcgactcacggcctttctggatcaagctgccacatggagccgactcgatgatcaaacgttggtcctcgcagcaagggacggaacacgcgcggtgcttacacggccgattgagccgcatcccgaactcgccgggcgttggctgatagagagtattgccggcaagccgtttgtaaccaaaccccgccaggcaacgttgtcgatctctcagggatcgataggcgcttccgcgaactgcaacagcatggggggggaattcacccgttcggcgccaggccggattactgtgaccggcccgctggtgtcgaccgcgataggctgtccacccaaggaggccgccgaggatgcgctgatggctcaggcaatgggctccgtgacggcgtatcggtttgacggcgaccgcctagtgctcaccggaggcccaggtctagtactacaccgcccctcaaagccgaagcgccagctcacgggcgagtacgaagcgtgcggcaacacgctgcttggtggctatcacacgggaccgatcacgctggtgatcgacgagcgcacaatgctcgacaatgcgagctgcacagccagctatcgcgcagatggtccaagattgaccctgcgactcgaggacgggcaggcttgcacaaatctggaggcgccattcgtacccggtgagccggtccctatcggaggcaagatttcgatgcttgccgtcgcgcaacccgacgggtttggtttcgacgaccaagggcggctgatcttacgtacgagtcgcggactcctgacgatgtgccgcaagagctcggccccgccatctggcagttga

SEQ ID NO: 350548 - DNA, 684 bp, Pseudomonas aeruginosa
atgataagaaaacccgatctgtcaggcctctcggccttcgtcgccattgcccaagaacgcagcttccggcgggcggccgtcaggctgggcgtgacgccctccacgctgagccacgccatgcgtgaattggaggctcaggtgggtattcgcctactcaatcggaccacccgtaatgtctcgcccactgaagcgggcgaacacctcttgggcagactcagcccggccttcaccgacattgccgccgcgctggacagcctcaatgccttccgcgacaagccccagggcatcgtacgcatcaacgcgccccgcatggctatcgaactggtgctggcgccgcgtttcgctgaattggcgcacgactatccgggcatcactctcgaagtggtggccgatgagggatttgtggatatcgtcgagcatggctttgatgccggaatccgcctcggagaggatttgcacaacggcatgctccaagtccgcgtaagtgccgatctccggctggcaatcgttgcgacaccgacgtacttccgacaacacggtcgcccgatgacgccccatgagctgcatcagcaccgctgtatcggatggcgcaaagtttcgtcaggcgagcgatatcaatggaagttccaacaggggggggcattcattcgctgtcgcagtggacgggccgcttgtcctggatga

SEQ ID NO: 350549 - DNA, 822 bp, Pseudomonas aeruginosa
atgacccagaggaccacattctcatccgttcgatccattcaacacgggccgccccggcgtctggacggcaaggttgcgctggtgaccggcggcggcacgggtatcggccgctctgccgctctggcctatgcccgtgagggggctcgtgttgtgctggccgggcgccgcaaggccgagattgaagcggtggtccatgaaatcgctgcggcgggaggccaagcgctggccgtgtccgccgatgtggcgcaggaagaagaggtacgccgcctgatcggcgcggtcatcggacactatggtcagttgaatattgccttcaacaatgccggcgtattgggcaacgtcgcgcccattgccgagctgagcagcaccgatttcgacaaggtgatgaccatcaacctgcgtggcatatggctatcaatcaagtatgagatcgaagccatggtggctcagggcagcggtggcgccattgtcaatacctcatcctggcttgcccacggcgcgctggccggcacatcggtctattcggccagcaagggtgcgctcgacgcgctgatccgcgccgtggcgattgagtacggtccgcagggcatccgtatcaacaatatcaaccccggcatcatcgacacaccgatggcacgcggcagcctgaatgatgatgattcggccttcgtgcccttcatcgaacacaccccggccaagcgtgtcggccaacccgatgatgcgggagatgtagcggtctggctctcgacggacgagtcgcgtttcgtcaccgggcagaacattctggtggatggcggctacaccatcgccgggctgcgctga

SEQ ID NO: 350550 - DNA, 1092 bp, Pseudomonas aeruginosa
atgcgcagtatcgaatggaaaacctacttgctgggcgcggcgatgctttttgcagtcgccgcgcgggcccaggatgtgcagagcatcgtattcactccacagttccccgctgggtatcccgaaggcattgcctggaatgagcgtgctggtgcgtttctggtctcgtcgctgcgtggcgggcagattggccaggttgccttggacggacgatatgcgagcttttcgtccgaccgatccctgatcactacatcaggcatcaccatcgataccgcgcgtaaccgcgtgctggtgtgcaatgaggatgtaggtatttcgcacaactcttcgcccagtacgcacaatcgcgtggcgcaggtgctcgagttcgaactcgacacgggtgcgctgcagcatgtccatgacttctcgcggctgaccagcgggccgactcttgccaacgatctgaccatcgatacgcagggcaacgtctacgtcactgacagcttccagccgcagatctacaaggtcgacgctgcaaccagggaggtgtcggtgctggtgcgctccgaacgtctgatgcccgccgatcccgtcaaggctgtaggtacgcagccctatctcaacgggatcgtttaccaccctgacgggtttctgatcgtcgcggactattccaggggcctgctttggaaggttccgctgaatgagccgaaggcgttggctgaaatcaggctgccgcggcgcctgaaaggtccggatgggctgctactcaaaagccccactgagctggtggccgtgcagtcatttccgagtcgggagcaaggcatgtcgggggacgtgacgctgcttacctcatccgatgcctggagcagtgcccgaaccgaagcggttgcgaccccgccgggactggatgggccgaccacggcgacactgaaggatggtgacgtctgggttatcaactctcgttacccccgcctttttgccgacatcaccactgcggatcaagtccgggagttcaccattctcagggcggatttcaagttcacggggggcgtggaaagcgtgcggcctaacgctgcccctcgcatcccaggcgacaaacccgggtcgcactga

SEQ ID NO: 350551 - DNA, 972 bp, Pseudomonas aeruginosa
atggactacgtacgcctcggtagcgccggattgaaggtctcgcggttgtgcgtgggatgcatgacgtatggagatcccgtctggcggccatgggtgcttcgcgaagatcaatctcgcccgctgatccggcaggctttggaagccggcatcaactttttcgacaccgccaacatctactccatgggcgagagcgaacgtatcgttgggcaggcaatccgagatttcgcccaacgcgaggaggtggtgatcgccaccaaagccttctttcccatgagcgagaagcccaatgaccagggtctttcgcgcaaacacattctcgccagcgtcgatgcctcgctggaacgtctggggacggattacatcgacctcttcgtgattcaccgcttcgatcccgagactcccatcgaggagacggcagaagcactggatgcagtcgtgcgcgccggcaaggtccgctatctcggtgcatcttccatgcatgcttggcgcttcatgaagctgctggctttccagcgacaacagcgcctggccgagttcatttcgatgcaaagtcaatacagcctcatcgttcgcgaagatgaagaggagatgattcccctttgccgcgaagaaggcattggattgactccttggtcaccactgggccgagggattctgacgggtgctcggaggaccgaaactcggcgcgcgaccactgacgaacagatcgtgcagtggtatgacggacgtgacgacgtgaggcggaccgtttcggcgctggatgccgtcgcgcaagcgcgtggggttccgcctgcgcagatcgctcttgcatgggcattgacgaagccaggcatcaccgcaccgatcattgggatttccaagcctgagcatttgatgggcgccactgatgcgttgtcgttgacgctgtccgatgaggaggttgctgctctggaagcgccgatcaatgagtctgctcacgctccacgttggtag

SEQ ID NO: 350552 - DNA, 999 bp, Pseudomonas aeruginosa
atgaaaaatcagttgagccggattgtcgctgcctttctggcagtaattccgtcatttgggatgatccatccgctatcagcccaggagcgcgctggacacagtgattcatgtgtggcgggcgaacttgttttgccatcaggcgagctttacccaaatggcattgcctggctttctgatgggacgctctatgtcggccacgtcaccagtggtcgcattctacgcaagcgactgggtgaaaactggagattgtttttcgccggggccgaggaagtatttgccgcgaacagcttgcgattggatgagaggcatggacttttatgggggacatcgcctgactttcttccgtcgggtcaggtccgtccacatcgcgtctttgcgctcgatcttgcgactggcgagatccgccgttccttgaccctgcctgggggaggaatgccgaatgatacctttgtgacgtcggatgggattgtgtatttaaccgacactagttatggcgcaatactgcgacttcggcccaaggataaaaaattcgatgtcgtatatcaggacgaacgtctgaccggtccgagccgcatcggtgctgcggggatcgttcgcacgcaagacggcacattgatagtgaacaatttcgggacggggaaaatctatatccttgatgaggtgagccgcaaggctccggaattgcgcgaactattgctgccccgactgattgaaaaccccgatgggatgggactggcgccagatggttccctcatcgttctggagaatgctatcgagagcggcgcgggcaagatactgcggatagcagatccacttttgcccgggccacgcaacattgaagtccttcgcaaaggactggaatctccggtcaatttgaccattacgccaaacggctgcgcgttcatcacggaatcacgaatccggcatcgtcttctgccagggcatgaagaagagactcctgatcgatttcgcatacttcaaatcccgctcggtcattga

SEQ ID NO: 350553 - DNA, 1017 bp, Pseudomonas aeruginosa
atgcatgcttatcagttgattgccggacagggtgtttccagcctgcgccgcatcgaaaccaccctgcgcgagcctggcccgcacgaggttcgggttcgcatacgagcagtgtcgctgaactaccgcgatctgatggtggctcatggcaattacgtgcaggtctcaggcgagccagtcgtgccggtcggagatggtgctggcgacgtggtggccgtgggttcggcggttactcgctttcgcgcgggcgatcgtgtgatcaatacattctttcccgcctggcttgatggcgcaccgtcagctgagaaaacggcgcagaccttcggcgcggattccgacggcgtactagctgaggaggtctgtgtgccggaggcagccttggtcaccattccggcgcatctcgactacgcggaggccgctagcatgccgtgtgcggctatcactgcctggaacgccctctttgtcacgggtggcctcaagccgggcgacagcgtactgttgctcggcaccggcggcgtgtcgatctgggcattgcagttggccaaggccgctgggttgcgtgtgatcatcacgtcctccagtgacgacaagttgcagcgcgcccgtgccttgggcgctgatgagatcatcaactatcgcgcaacgcccgaatggcaggagcaggtactcaaactcacccatggtcacggcgtaaacctggttgcggaggtgggtggcgagggtacgctggctaagtcgatcgccgcgactgcgatcggcggcaccatagccatcgtcggtggcgttacaggcttcgcggggacgccgatcgacccactcgccctgatcggcggtgccaggcgcctggtgggaatatttgtcggcagtcgcaccatgttggaggatgtgtgtcgctttgtcgccgtgaatcagctccgaccggtagtggaccgcgcgttttccttcgatcaagcgccagacgcctacgagtacctggaggccggtcggcactttggcaaagtggtgatccatgtcaactga

SEQ ID NO: 350554 - DNA, 906 bp, Pseudomonas aeruginosa
atggatgctgcttcgtctgccaccgacggcccgcccctggacaccgtgctgctgcgcactttcctcgaaatcgtggacagcggcagctttgcggcggccgccgagcgtctggcgctgacgccctcggccatcagcggacacatacggcgactggagcagatcgtcggcgccagcctgctggcgcgtaccacgcgccgcctggagctgacgcaggcgggcgacaccctgtacgcctacagccgcaacatcctctatctggagcgcgaggcccgcgccaagctgcgaggcacaccgctgcgtggaaggctgcgcatcggtgcgtcggaagactttgccggagcctggctgccccaggtgctgcaacgctttcgccagtggcaccccgacacaacaatcgatctgaaggtcggcatcaccgccgacctgctgcgccagcaggagcgcggccgcctggatctcgtgttcggcaagcaatgcagtcgggtcaaaggtggcggcacattgctgtgggaagaacctctgatttgggtctacgcgacgggtcagtccttaccggcgggtcagccgctgccgttggcggtcttccccgagccgtgcatctatcgtgagtctgccgtcacggcgctgggcaaaacggagcagacgtggcgcatcgtcttcgagagcagcagtatggctggttgcctatccgcagcgcgctcgggttttgccgttaccgtcatcgcggacagccagcgaagcgaaggtctgcgcgtgctgggtagtgaggatggtttaccggaactgccttcggcacgcttctacgctttcgaccgcgaggtcagcgccgccagtgccgcgctgatcgaagcggcccgccgtgcgggacagcaaggccgcttcggtttgcgcgggttgcgcgattga

SEQ ID NO: 350555 - DNA, 888 bp, Pseudomonas aeruginosa
atgagcgcctaccagcacacactgaccgaccggctggacattgcctatctcgaatggaatccgcagggcggtcgaactgtcatcctgctgcacggctggccggacagccccgaatgctggaaggccgtggcgtccggcctcgccgatgccggctaccgggtcctggcgccggcgctgcgcggcttcgcgccgacccggtttcgcgatgccgccactccgcgcagcggccagttgtctgcgttggggcgcgatttgctggacttcatcgacgcgctggggctggagcgcccggcgctgatcggtcatgactggggtgcacgggccgccgccaatgcctgcggcttgagggatggtgtggcctcgcacctggcgatgctgtcggtcggctacggcaccaatgatccgaaccagccgctgtccttggcacaggcgcgcaactactggtaccactggtacatggccacgtcgcgcggcgagcacgtggtgcgggaggaacgcgaggcgttcacccgacagatgtgggacacttgggcgccggccggctggtacgagccggctgatttcgacgaggcggcgcgtgccttcgagggcgaggactgggccgggatcgtgctgcactcctaccgtcaccgctggggcttcgccgaaggcgacccggcctacgcggaagacgaggcacgcctgaaccccgcgcctatgctgtcggtgccgaccttggtgttgcatggaggggccgatacctgcaaccaccccgacagttccaaggggcgggagacgttctttacgggccgctacgagcggcaagtgttcgatggtatcggccacttcccacaacgcgaagcaccgcaatccgttgccgatgccatcctgcaattctgccgtatgtaa

SEQ ID NO: 350556 - DNA, 1242 bp, Pseudomonas aeruginosa
atgcacgaatcgtcgaatcccccaattggccggcatagcctccgctgccggttcaatcacggtgttttggagattcccgtgcattatatgaggggaggcacttcgacaggggtagtgatctgggagcctctggttcccagtgctcaaaaactgcgcgctgagctgctccgtcatctgatgggagtgccccaatccggccaagcgccggggaaccatcaggtatcgggattggggcgcggccctgcgaccagcaataaagtgttcctggctaaagtcgaagcgactccctctggccaccgagtggtcagcacgcttgctcagcttgccagcagtcatggcgaaatcgactggagtgtgaactgcgggaatatgtcgtcgtcattgccactgtgggcaattgatagcggcatgctcgataccccaactaccggtgtctgcgagattgagatcaagaacaccaatactggggtcgtcaccatcagccgtatgatgcgagacaatgatgggcgctttaccctagctgaaattcccggagtcctaggcgaatttccacaggtagatctattccttcaatctccggtgggcaataaaacgggagcgttgttgccaacaggctcggttgtggacgtcattcgaggcattgaggtctcctgcgtggatgtcgcagtgccaatggtgattgccgctgccgagagcttcggcaaaacgggccacgaggctatggccgaccttgaaagcgatgcagcatttaatgcgcgacttcgatccgtttgggtggaggccggcctaaaaatgaagctccgccggcgtgacggtgggttgatgagccgggaggagatagagcgaagcgagaccatccccaaggtatgcatagtaggagctcctcgaaatggcggtagcatttcggtgcgctacttcaccccgcagactgggcactcttctatggctgtatcggggggatgctgcttggctgcagcgtgtcttctgcctggcagcacagcgaacaaggttgcggttggcgtcaatgagacaggggaggcgttcgcagacattgaagtcagcattgaaaaccccgctggtaagctggatgcgactgttacggctaagcgctcacatgagcaaatcgatatttcggcggcggcatatcgccggagtgctcaagtgttgatgcgtggggttgtgcctctctatggggcctccgtcgagctagcagaagcactgttaaaaccattagaggactga

SEQ ID NO: 350557 - DNA, 693 bp, Pseudomonas aeruginosa
atgaagtatgaaacttccgtcgtttatctagagcaagtgccaaaagttacggtagatacaggttttgatttggctacctttttaagcttcatggcgacaatcgctgtctttgccattggtacttggttgacgatatggaataccaataagagctttaagaaacagcgggagatgttcgatgaggcggcgcagaatcagaggactgatttggaccgcactatcgttaaccaaaatcaggcgcttgaacgcactattgcaagtcaggagcttgtggcgcggcagaactcgctcaaggcgagcaggcaggcatggatcaatgatctgcgcgatgtgtgtgctgactatgtcgcagccgtgatgaatatccagcgactcaacaactattgggagggatcgaaaggcgcaattcagagtaagctgcttacggaccctccgctcgcccatcaaatgcaaactgagtgggcggactcacatattggtgcgatgaaggaggcaaagcgcctgaagtgcaagatagaacttctgctgaatccagaggaagaagactctaaacaacttatgggcgcggccgaggacgcactcagagagtgcgataagcctggtgctgctgctgatgagcattgcgctattttggtcgaatattgccaaacgatacttaagcaagaatgggagaaggcgaaggtcggacgataa

SEQ ID NO: 350558 - DNA, 759 bp, Pseudomonas aeruginosa; identical to SEQ ID NO: 344013

SEQ ID NO: 350559 - DNA, 1161 bp, Pseudomonas aeruginosa
gtggcgggcctcgatgcggccttcgtagccttcgttcttgaaggtggtgccggtctcgccatcctcgatttccttgtgctcgtacttggtataggcggcgtccagcttcagcgaggtgaacgggccttcgaggtcgcggatctcggaggcgaaggcgtagcggtcctgctgcatcttcaggcgcacgtcgtcctcggccggcgagccatagttgctgtcgtagccgctgtaggagaggccggcgtaaccgtgctcccagtgataggagccaccgacggcgccgccgtcctggcggccgtcgctgttctgcacccgatgcttgccggtgtcgccgtcgatctgccgctggcggctggaatgggcgtagccgggaatcctgacgtcgttgaactcgcggctggcggcgtccacgtgcagggcgaagttgccgtcgccggcctccagtgcgccggagcggctacgggtggtgtcggcgccgccgtagcgcagttcgccgctgccgtggatgccgtcgacgggttcgctggggatgcggttgtcgaagctgttcaccaccccgccgatggcattgccgccgtagagcagggcggccgggccgcgtaccacttccaggcgctcgacgctgttggggtcttccggcaccgcgtggtcgtaggacagcgacgaggcgtcgagcgcaccgacgccgttgcgcagcaggcggatgcgatcaccgtccatgccgcggatcaccggtcggctggcgcccggtccgaagtaggtggaggacaccccgggcaggccgttgagggtttcgccgaggctgcctttctgtcgcagggtcagctcgtcgccttcgagcacgctgctgggcgtggcgggagattcgttgcccagcgggttggcggtgatcacctgggagggcaattcgctggggcggccgtcggcgccgagcgtttcccccgaaacaatcaggcaggccagcgccagtggcgtgagaggccagagcggacgggaagggaaaaagccggaagaggacattgcgggctccatggtcatgggtcggacttttttcaggccaaagcgaacccaggcccttcccggaggaagggcgacggggtcggatcggcgtatttattgggatgttatattatttctttttgtgtcggtagacccgcgtag

SEQ ID NO: 350560 - DNA, 990 bp, Pseudomonas aeruginosa
atgacgcccttcgcctatgccaagccggccgacatcgagcaggcgctgggcctcgccggcccggagtcgcgctacatcgccggtggcaccaacctgctcgacctgatgaaggaaaacgttgccaggccccggcgactcatcgacatcaccggcctcccgctgcgcgacatccgccggacgcccaccggcggcctgctggtcggagccctggtcagcaacgccgaactggcctggaatcccgccgtggaggcggactatcccttgctagcccaggcgatcctcgccggcgcctcgccgcagttgcgcaacatggccagcaccggcggcaacctgttgcagcgtacccgctgccagtatttctacgacaccggcacgccatgcaacaagcgcgagccgggcagcggatgccccgcgcgcagcgggctgaaccgcaaccatgcgatcctcggcgccagcgaacactgcgtggcggtacatccatccgacctgtgcgtggcgctggcggcgctggaggctcaggtactggtgcgcggccgcgctggcgagcggcgggtcgctttcgccgacttccatcgcctgccggcggacacgcccgagcgcgacaactgcctggccgtcgacgaactggtcaccgccatcgagctgccagcaccgcgcttcgcccggcattgccactacctgaaggtgcgcgaccgggcctcctacgccttcgccctggtctcggtggcggcggccctggaaccggacggcgagcgcattggcgaactgcgcctggcgctcggcggcgtggcccacaagccatggcgcgtcgcagagctggaggaacgtttcaggggccacccggcgaaccgggacagctatgtccgcttcgccgaagcgctgctgcgtgacgccaggccgctggcccacaacgccttcaagatcggattggcgcgcaacgccatcgttcgcgcactggaagaagcccactcgggagggatcggccaatga

SEQ ID NO: 350561 - DNA, 948 bp, Pseudomonas aeruginosa
atgtttcaatctaggttaggcctatttgacgggaattcttgggagtcgctattacagcgaatactcaagcatcgacacggagcagatggctatgtcgaaatgcccgcttcacctggggactggggaattgaagggtatgtagctaacggcatagctttccaatgctattgtcctaacaagcactacaaccctgacatgctatatataaagcaaagagacaaaatcacaaaagacattggcaagttgcgaacaaatgaggcggagctttttgcgcgactcggcgacacccgtataaaaaactggtgttttgtcacgccagaaatttcggataataagctaataaaacatgcaaaagcaaaggaagccgaggctagagcctggaatctttccatacttagcccagacttcaggatagatctgcacaccgcagagcactatgaagccgacatccatgcatttcaagcattagaaggaaaagcccttcacattcctggcattactttagacttgccattctttgacatggaaagcataagttacgaagaaaacatattgcgaaagtctatcgccagagtagcagcgggctttcagaaagttgtactagacatggagaacggcgctcacaaggccaaggtggaacgcctctattcatcaacgcttgagggctttcttaaatatagccgcttccatgacgaactgaacaaggcctcacctttactataccaaaaggttaagcgtattctctcagtgttccacaagcatgtggaagagtggtcagatacactcaacgctacacccgacgtactcactgaaaaaatcagaactgaactaactgaccttctgattcgagagcttaacccatcagttgactatgctcttgcctcgcaaatagtggctaatgagatttcatactggctgggtgcctgccaactcgactacagtgagtaa

SEQ ID NO: 350562 - DNA, 2085 bp, Pseudomonas aeruginosa
atgcatatcaaatcttttcgcatagacatctcctgttcaggagcacagtttggcttttctacaacctttcaaaaaggtctgaatattattcgcggatccaactcctcgggcaaaagcaccatcgtaaactgcctactatactcgcttgggatggaggagcttgtaggcggcaagggggaggcagcactatcttatgctgttagagattatgttattcatgacgaaaaaaaacatcacataactgagtcctatgtcaccgtagaaatagaaaatcatcttggcgagacgagcacgatcaggcgctggatcaaaagcgaaactcacaatacaaaattagcagaagtaatagaatcccacatgcctaactcaggcacgcgcggcaccagttataaatttattcacgacaactacagcgccgtttaccaagaaggctttttcacttatcttgagaattttttaggtctcaacctccccaagattcacgactccaacggaaagcgggttaaactttacctccaagctatttttgctgcgattgcaattgaacaaaaacgtggctggacagactatatagcgaatataccctactatagcgtcagcaatgcgcgcgtgcgcgttgtcgaatacttgcttggcctaggtgtcttcgatcaagaatcccaaaggatggagttggatttggagtccattagtctcaacaatgattggacatccaagcaaaaagaactctcctctcaagcagcacttctacgcctaaatctaactggaatcccaaacaagatagcttctgatttcgaccaaaataacgtgcaagcgttgcgcagtgcgaacggtgaacagtcaaacctttacacaaccatcgcaacactgaagagacagtacagagaccttgagctggctatcaatcctgacggtggttctccgaactctccaatatccgaggagctgcaacaacagacggcaatcgtcactaggctggtgggcgattatgaaacatcactgagcaatttgacgatattcaattcaactctaagcacccacattcagctcaagacacaaactcaggaagaactgacacgtaacaaaaccacgaaaaagcttagggaatacggtgcaagcaagcacctgcatgccgcaagcgactcttgcccgacgtgccaccaacacattgaggattcactgatcagtattaatctgaccgggtccgcaatggatattgagacgaacatccattatctagaaagccaggcaaaaatgctcgccaaacaagaagcgggcctggaactgaaaattcgtgacgctgaaattatatgccaaaatttttcagctcagcttgagaaagagcgctccgtactttcgtccctgcgcaaagatgcagctaaaggcaacatagtctctcaagctgctgtgaaaaagcaggttttgctggagtgggagatagagcgtttggaggaattctccgacaaacttgaagacgcacttgcagatatggcaaaactcgccaccgcattcaaggcaaaccaagacaagagaaagctactccccaaagatagatattctgaagaggataaaaggcgtatccaaagattcgcgcaacacttcaggggcaacgcgggagagttcgactaccatagcgcggatgtcgcggatattgttttcaacgaagactcacttctgccccagctatcacgactagaactgcgagaaatcgtggactcgccttcagatgccaagtctaaagcgcaggctgttcgcaatgggaatatggcgcaaaattctagtgcaagtgacttcgttcgcttaatctggagttacatcatggctctctatcaaacagcatcaagcagagacattaacggaaatcacctcggtttcatcatgatggacgagcctggccagcactccatggccacaaaaagccaacaagcgctatttcgcatgcttgccagtcaaaataacttccaggcaatagttgcggcttcttttgatgaccttgatgccgttttcaaagaatcgaccgagggtgtgaaatttaaatacatccatctagaagaaaagtgcatcgcgccgcttaaagtcgtatag

SEQ ID NO: 350563 - DNA, 204 bp, Pseudomonas aeruginosa
atgaatcgccagatccttgctgccgccatactcagtttgttttccctcgcattttcccaggccggtttcgccgaagagtcctcgctgatgaccaaccgcatggtcgacgccaaccagcaggccatcgagcaccagcaggccatcgagcaccagcaggaactttccgcctccgccgcgcaggccggggcccgcagcgactcctga

SEQ ID NO: 350564 - DNA, 243 bp, Pseudomonas aeruginosa
atgaacaacgttttggagagttacgacatgcgcaagctatcaatgatcagcttactgctgacttggctgctgctcggcagcggctgcgggtccgtatcacccgcgccacttgttccgctaccggcctgtcagccggaaccgttggcgccggcctggatgatggagccgagtacgccgaacttcacccagcgactgcggcagatcttgcccgtcttgcaggcgatgccgatcagtgtgccttga

SEQ ID NO: 350565 - DNA, 2598 bp, Pseudomonas aeruginosa
atgacaatatccgaatttattcaatccattgtgcttatcgacaacatccaggtcgaggttaagtacgcacatcccacgctgtatatcctgtgtgtcgccgattcattcgagggcatgactactgatagccggttcatcgcgttttgtgaggctatccgtacttcgacggatgatgtcgcctcgattatcgcgagtccaatgatcgattttgtactgctcacagaacgggagcgtcaggagcatttcagctttctggactcaattgacactggaaccagttggctgagcgcattcaccccggccagcaatgctaaagctgcactaccagccattgcacctgctcaagacgatctccccagcaatctcccccatagccagaacactgcgaaagcggttcatttttacggatacaagggaggccaagggcgatcgaccgtattggtagcgctggcgaaggtgctggctgatgctggctaccgcgtgcttacagtggatgccgatattgaagcgccatctttagacgcaatgtttagcgtcgcagctgcggacatcgaggcaacgttaatgggcctgacgacgccaggcgcggcattgaagccgcttccgcgcacctacgttggtgcatcagtctctgggttcgttgatcttatacctgcacggcctgtcgccgcccgctttgacatggactttgccgccttcttgctaaacgcatcgctggatgcctcggtgctggagctggcagtgaagactctccggcagcatatcgccacagatgtcgagagctcttatgatgttgtgctttttgatcatcgcactggtcttgccccctccgttctgcccatcatggaggcgtggcctgggcctgcagtaatttttgtccgtccagacggcatggcacggcatatacaggactcacgactactcgatacattgctagcccacgatccggaatccccaggagcgtttgtcagcttttctctagaccccaagaagacagcaaaagatactcgcaaccagaacgcacgatttatcgagggcctgcttagcaaaatcgctgatgcaatgcaggtagaagatggagatgcggtcgacccccagaatttagatccctactgggtgttctggaggcacgatcagagtttcgtcgacggattgcagccgaacccacgcgacatgtcgggcaccagccgcgatgccattggccaactacgctccgtgcttggccttagcggtagccctactatccagattcagcaaggtgctttgacaagtagcggctcaacagatgatgggacgtttattctaacaccgggactagccaaattattcagcgcagatagtccctatacatacatatttggtcgtaaagggactggaaagactagattgttgtccgaactcgtgcgccgcgatttagctgaaccgttgctcgtcgctaacgactcacgcgacggcggattgccaagcgcaaactttctttttcagtccgcattagctgcatgcaaccgagactttgagaaattctggtggctattattaagtgccgcactttcgactccaaacaccaaaggtgaaggagttttagagatcgcccttcaaagacagatcgaacagcttggcgacatctctaaggacatcagtcgcctcagtataaacaacatttcgggcaatgcgaaaaaacgtgtattcgtgatagacggtgtggagacagcagttccagctaatgaccttcgttcttttgttgaagctctcttccgttttttagcggcagtccagttcgacaggacttactcgaagcaactcacgatacgactgctactgcgctccgatcttgtaacaggagcggcagagaacgtcgaacaacaaattgaaggtgccgcgctgtatttgcactggaataagaccactattcttaactttgcccttgcaagaatcataagcctcccttggttccagcaaaactttcctgaggtgtgccgtcgtattgagaagcgggctgacagcatttcgcacggagccttgccggatgatgagtctgagtctttgctattagaaattttccccgcaggcttggagcgcaatcgcctgaaaactacaacattctttgccgcatacttctcggacgcgggcggagacacaggcaccgactcggccttttacccaaggctattcgatggattcttacgaacactggcgggcaacgctgaagagcggaccgaattgatcgatggccgactatctagtaagagtgtactactcgcctacgatcaggcatctaagtctttcattagcgatgtaagaaccgaactgtattcattcctcgacatcgagcctaacatcgacgataaccgatcagctgtagatcggttaatttcagcttttgatggtcttcaaacgccattttccattgaagccataattaaatctttgaaagatcggacgagtattccagcagaagtgatacgacgctctctgaccagcatgcagaaaattgggatgttcgaggctcgagcaggatattcaggtgaactgcgggcccgacagctatacaaggcaggcctaggaatgaagtatgtgagaaagaaaacacaagaatga

SEQ ID NO: 350566 - DNA, 624 bp, Pseudomonas aeruginosa
atgttcgaactggattcgacgctggcgcagcacatcgtcgatcgggcgatggcgatcctgccgcacaacatcaatgtgatggatgcccagggcatgatcatcggcagcggcgatccatcgcgcctgcatacccgccacgaaggggcgcaactggtgctggccaaccggcgggtggtggaaatcgacgagcaggccgccgcctgcctgcgcggggtgcggccaggggtgaacctgccgttgctgcacgccgagcggctggtcggcgtgctcggcatcaccggcgcgccggaggtggtccggccctatgccgagctggtgcggatggcagcggaaatgctcatggaacagcgccagatgcaggacgagcgacactggcaacgccagcgtcacgaagcctggctgcgccagttgctcgatcccggccacggcctcggggcgctggcggccgatgccgaacacctggggctggccatgcactggccgcgcaggcggtcttcctggagctgcccgagcatgccgatccgctgccttgccaggctcgcctgctggcggcactcggcggccgggcggagcactggagcgcggcgctgggcgagcgcctggtgttctggtgccggccggtag

SEQ ID NO: 350567 - DNA, 321 bp, Pseudomonas aeruginosa
atgcaactggcggacagcgactggcacgaactgacccgcccctggagcgccccgccgcccagcggcgcgcaccaggccgtgggttgcctggagtgccgcgacaccggctatcgcgggcgcgccggcgtctatgaaatcatgctgctcagcgatagcctgaaagaactgatcaccgccgacaccgacctggtcgccctgcgccgccaggcgtacaaggaaggcacccgcagcctgcgcctgtccggcgcgcagaaggtcgccgcaggtatcagtacgctggaggaagtactgcgggtgaccccgcagagcgaacagaagtag

SEQ ID NO: 350568 - DNA, 924 bp, Pseudomonas aeruginosa
atgctgagcgccggcgctgtcggtgaagtcctgcagggcggtgccccaggcgagggaccaggacgcaacaacgtcggacagctcgcgctgcaggcgcacgtccagccatgcggtggacggcagcgccggcgccgccacggacacgtccgccgtggtggtgacgcggaccccttcgacgtaggccagtccggctttcagccggtagttcgtggtcgctttctccagcagcaggccggcgttgaagaaggtcgcccgcccgaagatatcccggttgctccggcgttcgcgctcgtcgatcccggacagtcgcacggtgaagtcgtgctgccaggtgctggcgtcgattgtcagcgcggtcagatcctgggcgccgtcgaacatcaccaagatgttccgggtcacgttgttgccgatctgcagcggcggtttgttcttgcgcttctgctggaccggcacccaggcgacggcgaacagaacgccctcggcggactcaaggcccatccagttccagtcgaagtcgccgacgtcgctacccatcatcaggctgtaaacgatctggttcgggttcacgtacccggccttggtcacgttggcggtgtagacgatctggttggccggcggcttggccgcgtcgcggtctaccggcttgctcggatccaggcctggcaccagggcgagcacgacgcggctgatttccaggatcttcttttcgcccagcttctgggcaatcaaacgttcgccggcggcggtgatgcgtgccatgcgtggctcctacagggtagcgaccagggtctgctggtcgtcgttgaagtcggcggcgacgatgtgcagcgtcaccggggtgatggtctggaagtcgtagcggcggcaggtgcgtccgtactgctggatcagtacgcgcagcagctcgggattggccgatag

SEQ ID NO: 350569 - DNA, 348 bp, Pseudomonas aeruginosa
atgaaccaatccctgagcaccgccctggccaaggccatggcctaccagcagcaacgccctgccctggccaccgccggcgtacaggccctcaaccgcctggtgcccgtcgccttgaacttcacttccgggggacgcgcggtcggccgcttcctgctcggcctctacaacggcgaggagttcccttttgacctgactgacctccgcggcttggacctggatctgtttcaggactgcctggcggtcctagtcatggactacagccccgagctggaggtccacgagcgggtccccaacggcaatgccatctggcagcgcctgatcgagctgtgggccccggaagcggcttaa

SEQ ID NO: 350570 - DNA, 408 bp, Pseudomonas aeruginosa
atggaaaacgaacagcagtacctgcaggaaaacgcccagcaataccgggatcaacagttggccttcgatgccttccgcgacttcgcccgggggcgtatcgcctcccacctgctggagcgcgacggcctgcgcttcacccactccaccgtccagttggtgtttgaagccttctgtgttggccaggcgcgcaccgttggccagcagctctatgccggcatcaaggagaccagccgctacgccggccagatcgaaccgaacaaacaaagcggctatggctaccccttccctgttcactttcagaccgacgtggccggctacgtgatcaagggcggtttcggcggccagtaccgcatggcagacgtcgagctgtacgtgatgttcgacggcgagctgcaccgcgttttctga

SEQ ID NO: 350571 - DNA, 495 bp, Pseudomonas aeruginosa
atgtcagcaatcatcagtgaatgcggccggtatcggtaccggctggagcgagattgctgcccgccttttgaggggagcaaggtgtacgcatattttggggtcaaccccagcaccgcggacgccagcatcgacgatgcaacggtacgcaagtggcgcggcttcactctgcgcaacggaggtcaccggttcatcgtcggcaatgtgttctgctaccgcgccactgacgtgaaagagctccgcaggcaggatgatccgtttggcccgctgagcacggaacacttccgcgccatcgtcgcagacgcagacattctggttccgtgttggggaagcctctcgaaaatgccgcgtgatctgcggggcgcacctccccagctccttcaatggctgatccgatctggaaagccagtcatgtgcttcggagtaacaagctgtggacaacccaagcaccccctcatgcttggatacgacacacccctgaccgcgtggccgtcatag

SEQ ID NO: 350572 - DNA, 723 bp, Pseudomonas aeruginosa
atggctaaagatgattctacatcaatccaagaaatcagcataaacgaggccatcaaacaaggtctccgccactacttcactggccggccatgtgtgaggggtggaatcgccaggcggcgtgtttcagataggaaatgcacatgcaaggagtgcagttacattgaggcgcagaagtcaagaaagacaaagctcgcgagaagagcgatggggcttaggtatagctacccatacaaatatcgacaactctctgaggaggcaaaagaaaaaagggcagcggccaggaaggcaaggtatgagcagtgcaagcagcaagagatagccaaggtaatggcctggcaggcgcttaacatggaccgcatcaagcaacgctatagagagagcgccgctgagaggcgcgcttatcaagcacagtacagggctgataacgctgcgaaagttcacgagtgcaggtctaggcgtagaaaggcccaggcacttagaactcctatttggtatggggagtttgatgagttcgtaatagtcgaggctgctggcctggcggtttgtcgacaagaggtgactggtcttgcatggcatgttgaccatatgattccgctaatgggtaagtttgcttctggtctccattgcggcgccaacattcaagtactgccagcaaatatcaaccttgcgaaggggaactcaaagttcctaatagagccagatgagtggctctctatgctttga

SEQ ID NO: 350573 - DNA, 432 bp, Pseudomonas aeruginosa
atgagcaagcatacagtcggtgcgctgcgtgtattttctggaaaatgctgcctgtgtgatgttggcattccggttggcgcaacaagcacctacggagatccgattgagattcacactggcgacatcgtgatcatttggcatgccaattatcttggcaccgaccttgagacatggatcccaaccgacggcttaacagctgtcgtgtcgcgtgactatcagagcttttccgacggaacggtccaggtgctagatacggtgtctgaggccttcgcgatgggaatcaagggctgcggatttcgtcatccagagtggcgggttcaagtcgtgaagaaatactcggatgtcatccccggagagcactggcctgagttcggcttctcctacgcatacagcgaagctgctgactacgccatagcacaggccacctcctaa

SEQ ID NO: 350574 - DNA, 174 bp, Pseudomonas aeruginosa
atgggcttgcacgacagggaatggttcaacgaaagccggcacaagcccaaaaacgccaccagcgcaccgcagcggcctcgcagagtcctgttcatccactacctggccgggttctggccgggcgtcctcatgggcttcctggcaggcctgactgtcggcctgctgatcagctag

SEQ ID NO: 350575 - DNA, 366 bp, Pseudomonas aeruginosa; identical to SEQ ID NO: 349242

SEQ ID NO: 350576 - DNA, 237 bp, Pseudomonas aeruginosa; identical to SEQ ID NO: 349243

SEQ ID NO: 350577 - DNA, 351 bp, Pseudomonas aeruginosa; identical to SEQ ID NO: 349245

SEQ ID NO: 350578 - DNA, 951 bp, Pseudomonas aeruginosa
atgaacacccataagcatgcccgacttacctttgcccgccgactcgagatggtcaagcagatgacgctggaaggcttggatgccgtgcgagccgcagccgcgcacggcgtcactgcgccaacggccaggaagtggctcggtcgttacctggccggtggccaagccgccttggccgatgcctcttccaggccgctgcgatcgcccagggccatcgatgcgggcaaggctttgctcatcgtcgagctgcgcaaacgtcgaatgctgcaggctcgcatcgcacgcagtgtgggcgtctcggagtccacggtcagccgcgttctggcgcgagcgggcatgtccaggttgagcgacctggagcccgtcgaagccgttgtgcgctacgagcacgaggcgcccggggacctgctgcacatcgacaccaagaagctcgggcgcatcgtgcggcccagccaccgcgtcacaggcaaccgtcgcgactcggtcgatggtgcaggctgggagacgctgttcgtggccatcgatgatcacgcaaggttggcgttcaccgccatgcatcccgatgagaagacggcgcaggcggtcctgttcctgcgcaatgccgtggcctattacgcccgcctgggcatcaccgtgcagcgactgctgacggacaacggcgcggcgttccgctcgcgtgagttcaggtcaacctgcgtcgagctgggcatcaagcacaacttcacgcgaccctatcgacctcaaacaaacggcaaggccgagaggttcatccagtcagcgttgcgcgagtgggcctacggctggacctaccagaactcagcccatcgaaccgatgccctggcaagctggcaacaccactacaactggcatcgcccgcacagcggcatcggcggcatcgcgcctatgtccagactcaactcgtcaagaaataacctcttgacgcttcacagctag

SEQ ID NO: 350579 - DNA, 621 bp, Pseudomonas aeruginosa
atggccacactcacatcgaaagctcgcgaaccttggaacaagggcaaactggtcggccaaaaagcaccgctgcgacttcgggacatttgggctatcagagtgcgactggaaatcgcaaacaaggatcgtgatctggcgctgttcaaccttgccatcgacagcaagcttcgagcttgcgatttaacgaagctgcgcgtcagggacatagctcatggtgatcacgtgtcgacgcgcgcgatcgtgatgcagcagaagacccagcgcccggtgcaattcgaaatcaccgctcagacgagagcatcagttgaagcttggatcagtgctgctcgccgtcgcaacgacgattttcttttccccagtcgtgctcgtcgctcagctcacatatccacaaggcagtacgcccgcattgtgaaagcctgggtaaccacaatcggtctcgaccccacgctctacggaacccatacgcttcgtcgaaccaaagcatcactgatctatcgcagaacgaaaaacctgagagcagtgcagttgctgctcggccatacaaagctggagagcactgtcaggtacttgggtatcgaggttgatgacgctctggaaatggcggagcagactgaggtttga

SEQ ID NO: 350580 - DNA, 828 bp, Pseudomonas aeruginosa
atgaccgatttcgatccctcggcatggctggggcgtacccaggaagtgcacgaccagctcagccgcaacctcgtgcagcgcatcgcggccaccttcagtgcaacggcgccggcccacggcgaagagctgccgtggctctggcactggtgcttcttcaacgatcaggtggccggcaatcgcctcggcccggacggccacccaaccctgggtaccttcatgccgccggcccacgggcgcaatcgcatgtgggccggcggccggctggagtttctcgaacccttgcgcgtcggcgccgaagccttccgcaagacgcgcatcgagcgcatcgaggaaaaagccgggcgcaccggctcgctactgttcgtgaccctcgcccatgagtactggcagggccagcagctgtgcctgcgcgaggcacaggacatcgtctaccgcgagcccacgccgcccaagctgagagccggtgaagccgctccgctggcggactgggaggaaagcgtcgcgcccgatccgaccctgttgttccgctactcggcggtgaccttcaacgcccaccgcatccacttcgactggccctacgtcaccgccagcgagggctatccggggctggtggtacacggcccgctgacggccaccctgagcctggccgcgttcgtgcgcgccaacccgctggcccgcgtgcggcgcttcagcttccgtggcctgcgcccactgatcgcgcccgaacccttccgtgttgccggccgccacaccgagcccggcgtggccgagctgtgggccgccaattccggcggcgtgagccagcgcgccgacgttctgttcgactga

SEQ ID NO: 350581 - DNA, 1164 bp, Pseudomonas aeruginosa
atgacccaccgcaacatcgacgaactcaacgccatccgtgaaggcgtgcgcgctctctgcgcggaattccccgccgaatactggcgcaggatcgacgaagaaaagggcttccccgaagccttcgtgagcgccatgaccgaagccggctggctctcggcgatgatcccggaagaatacggcggctccggcctgggcctggccgaggcctcggtgatccttgaagaagtgaaccgctgcggcggcaactccgggaccatccacgggcagatgtacaacatgttcaccctgctgcggaacggtagcgccgagcagaaagcctactacctgcccaagctcgccagcggcgaactgcgcctgcaatccatgggcgtcaccgagcccaccaccggcaccgacaccaccaagatcaagaccaccgccgtgcgtaagggcgacaagtacgtgatcaacggccagaaggtgtggatctcgcgcatccagcattccgacctgatgatcctgctggcccgcaccacgccgctggccgaggtgaagaagaagtccgagggcatgtcgatcttcctcgtcgacctgcgcgaggccgtcggcaacggcctgaccgtgcagcccatcgccaacatggtcaaccacgaaaccaacgagctgttcttcgacaacctggaaatccccgccggccacctgatcggcgaagagggcaagggcttcaagtacatcctcgacggcctcaacgccgagcgcacgctgatcgccgccgagtgcatcggcgatggccgctggttcaccgagaaatccgcgcagtacgcccgcgaccgcgtggtgttcggccggtccatcgggcagaaccagggtgtgcagttccctatcgccgaggcgcacatcgagatcgaggccgccgacctgatgcgctggcgcgcctgcgaggaatacgacagcggccagaacgccggcgccgccgccaacatggccaagtacctggcggccaaggccagctgggaagcggccaacgcctgcctgcagacccacggcggcttcggcttcgccaacgagtacgacgttgaacgcaagttccgcgagacccgtctttaccaggtggcgccgatctccaccaacctgatcctctcctacgtggccgagcacctgctcgaactgccgcgctctttctga

SEQ ID NO: 350582 - DNA, 816 bp, Pseudomonas aeruginosa
atggataggcccctggaaaaactgcgcagcgcgctgttcgtgcccggcgaccgcccggagcgtttcgccaaggctctggccagcggcgccgacgcggttatcgtcgacctggaggacgccgtgcaggcgtccgccaaggcgcaggcgcgcgagcacctgcgcgccttcctcgatgcacactccgaggccggcgtctgggtacgggtgaacatggccggacacctggagcacaacgacgacttggaactctgccgccaccccggcgtgctcggcatcctgctgcccaaggcggaaagcgtggagcaagtggtcaacgccgccgctatcggcaagccgctgctacccatcatcgaaagcgctccggggctggcagcgctggcggaaatagcgcgggtgcccggtgtgcagcgcctcaccttcggcgggctggacctgtgcctggacctgggcatgagcgccggcagcgcagccgccgcgcggctgctcgaccaggtgcgctacgagctactgctgcaaacccgcctggccggtctcgccgcgccgctggacacggtgtttcccgacatcgccgacctcgacggcctttcgcgctttgcccgcgacgcccgcgatgccggcttcgccggcatgctctgcatccacccacggcaggtcctgggcgtacaccagtcgctggcgccgacccgcgagcagctggactgggcgcagaagatcgtcggcgcggcgcgcggcaatggcgcgttccagctggacggccagatggtcgacgcgccggtgatagaacgcgcacgacgcctgctcgcgctgcacgactga

SEQ ID NO: 350583 - DNA, 1239 bp, Pseudomonas aeruginosa
atgcacaatccctccctggcgcagctcttcggtctgcttgcgctgcctcccgcgctggcgctgccggcactggcccatgccgatttcatcaaggacagcagcgtcaacctcacgctgcgcaacatctatttcaaccgtgattttcgccaggacaacgctccacaatccaagcgcgaagagtgggcccagggcttcatgttcagcgccaagtccggctacaccgaaggcaccgtgggcgtggggctggagctctacagcgcgctgggtctgaagctggactcctccgatgcgcgcgccggcaccggcctactgcccaaccgcttcggcgactccgggccgggcagctacagcgacctctccggcgtggcgaaaatgaagatcgccaagaccgagctgaaggtcggcggcttcacccccaagataccggtgctgctctccagcgatgcgcgcctgctgccgccgatctacaacggcgcgaccctgagctccaccgagatcgacaacctgaccctggacctggggcgtttcgacaaggtcaacttccgtaactccagcggcaaccacgacgagattctcgccggcaactacggcgtcagcggcgatcacttcgactacttcggcgccacctacgccttctcgccgacggtcaacgtcgcctactggcgtgccgaactgcaggacgtctaccagcagaactacctgggcttccagggcagccgcaaggccggcgactgggtgctcagcgccaacgtgggctacttcgattcttccgagaatggcgcagcccgtggcggcgacatcgacaacggcctgaccaccgcgatgctctcggccaactacggcgcgcagaccttccgcgtcggctaccaggacaacagcggcgacagccccttcccgtacctgcaggacgccgatacctacggcgccaacgtggtgcagatcctcgatttcacccgcgcccgcgagacctcctggcagctgcgccacgacctcgacttcgctgcattcggcgtgcccggcctggtcatgatcaaccgctatatccgtggcgatggctacgagatcggcggccaatccggcaaggaatgggaacgcaacctggacatcacctacgtggtgcagagcggcccgatgaagaacttcggcgtgcgctggcgcaacgccacggtgcgctccgatggcgccggcgagctggacgagaaccgcctgatcctctcctacacgctgccgctcaagtga

SEQ ID NO: 350584 - DNA, 1197 bp, Pseudomonas aeruginosa
atgcacgacgcgctgatcgtttcccccctgcgaacccccatcggcaagttcggcggtgccctcgccgcgctgagcgccgaccagctcgccgccggcatcatccatgcactgctgcaacgggtggacattcccccggcaacgctggacgaagtgatcgtggcgcagtcctacgcctccagtgaggcaccctgcatgggccgctacgccgccctcgccgccggcctgccggtggaagtgcccggctacacactcgaccgccgctgcggctccggcctgcaggcagtgatcgacgcggcgatgcacgtgcagaccggtgccgcccaggcggtgctggtagtcggcgtggagagcatgagcaacatcgagtactacagcaccgacatgcgctggggcgcccgcgccggcagcgtgaagttccacgaccgcctggagcgcggccgcgaacgctcgcagccgcaggagcgcttcgggcgcatttccggcatgcccgagaccgccgagaacctggcccgcgattacgccatcagccgcgaggaggccgaccgcttcgccgtgcgcagccaccagaacgccgccagcgcctggcgcgagggccgcttcgccaatgaagtggtgccggtgaccgtaccgggcaagcgcggcagccagaccgtggtgtcgatggacgaaggtatccgccaggaggccagcctggacggcatggccggtctgcgcacgctgctgcccgagggggtctgcactgccggcaactccagccagcagaacgatgcggcggcggcctgcctagtggtctcgcgcgagtacgccgaacgccatcgcctggagcccatcgcccgtttggtggactgggcggctgccggctgcgaaccggcgcgcatgggcatcggcccggtgccggcagtggagaagctgctgcaacgcacccagcgcacgctggcggaaatggacctgatcgaagtcaacgaagccttcgccgcccaggccctggccgtgctcaaggcctggggcctggagaacgacgagcgggtcaacgtcaacggctcgggcatctccctcggccacccgatcggcgccaccggggtgcgcatcatgactaccctgctccacgagatgcagcgccgcggctcgcgctacggcctggagaccatgtgcatcggcggcggccagggcctggcggcgctgttcgagcgcgtgtga

SEQ ID NO: 350585 - DNA, 870 bp, Pseudomonas aeruginosa
atgaactggatcgaagtcaaccagacggccctgcgctaccagctgctgccagcgcgccgcgctgacgccccggtgctggtgctggtgcacgaaatgggcggcagcctggaaagctgggacgggctgtgctccacgctctacggcgagctgacgctgctgcgctacgacacccgctgcgccggcctgtcggagaaaatccccggcgcgctggaaatcgacgcccacgtcgccgacctggctgcgctactcgatacgctggccatcgatgtgccggtggcactgatgggggtcgccgtgggcgccgccatcgccattcgcttcgccgcccggcatccgcagcgctgcaagcaactggtcgccctcgccccggcctgtggcgtgccggccgccgctcgcgacgctacccggcaacgcgccgcagccctgcgcgaagaaggcctgggcgaactggtccccgccctgctggaaaaaacctggccggagccgctgcgcaccgatgccgacaccttcgaggccttccgcctgcgctggcgcgccgccgatccgcagggcttcgccgccaccttcgcgatgctctccgggctggaactggaagcggatctgccccgccttccgccgcgcacgctgttcgtcgccggtgaatacgacgcgctgaggccacccgcggagatcgaccgcctggccggtttcgccgcacagatcgaagctttgccggtagcctccgggcatttcatgccgttgcaaagcccccgcctggtggcggcgctggtgcgcggttacctgtgcgacggacaaagcggagcggcggtctaccgggacttcatcgcccagccggaacaccgcgtcggcgctgccggccacgcggcctga

SEQ ID NO: 350586 - DNA, 891 bp, Pseudomonas aeruginosa
atgatgcagtcgcgcatgatcggtgacatcaaggtcacccgcattctcgagtacgccggcccaacccacgacccggccttcctcttcccgcagatggacccgagcgtgctcacggaccatcgcgagctgatggcacccaaccactggatcgagcacatgaacaagctcatcgtcaccatccagttctggatcgtgcacgtgggcaacgagatcgtggtgatcgacaccggcgtcggcaacttcaagccgcgcccgggcatcgcgcggatgaacatgctcaacggcctggtacgcgagtggatgatcgccgccggcgcgccgccggagaaagtcacccacgtggtgatcactcatctgcattccgaccatgtgggctggaacaccacctggaaggatggccgctgggaaccgaccttccccaacgccacctaccacttccccaaggacgacttcgacttctgccaccagggcaagaacaaggaaggcggcgtcatcgatgtgttcggcgaatccttcttcgacagcgtgatgcccatcgtcgatgcgggcctggcgaagatgatgctgcccggcgaggaaatcgccgactgcctgcaagtgcaggcggcacccggccacagccccggccaggtgatcttcaaggtgcgctccggcggcgaggaaggcatcttctgcggcgacatcctgcacagcccggtgcagatcgtccgcccggagatcaactccggctactgcatctgggaagacaccgcccgtcagacgcgtctggccttcctcaacgacgcggccgactccggcgcactgatcctgccggtgcatttcggcgaaccacactgcggcttcatccgccgccagggctcgggtttcgccttcgaagcggcccactggtga

SEQ ID NO: 350587 - DNA, 903 bp, Pseudomonas aeruginosa
atggcgatgcatttcgatatcacggatttccgcttgttcatcaacatcgcggaaaccagcagcctcacccgcggcgcggagcgctccttcctctccgtaccggccaccagcaaccgcatcaagaacctcgaggacaacctcggcatgcgtctgctggagcgctcgccccagggcgtgacgctgaccaacgccggcaagacctacctgcagcacgcgcgcatcatcctctcccagttggagatgctcaccggcgacctgcagcagtacgccgaaggcctcaagggccagctgcgcctgctggccaacaccaccgcgatcaccgagtacctgccgccggtggtgggcgaatacctcaagacccaccccgacgtgcacatcgacatgcgcgagcgcctttccgacgacatcgtgcgctgcatccgcgatggcagcgcggacctgggcatcgtctccggcagcgtggtcaccgacgggctgcagagcgtaccgctggtgagcagtcggctgatggtcatcgccccggaaggccacccgatcctcgaaggcggcgaggtacatttcaaggaggcgctgcaatacgccttcgtctcgctgctcgaaggcagcgccatccatgtcttcctcagccgcgccgcctcggcgctgcacatcccgctgaccatccgcgtgcaggtcgccagctccgacgcgatcttccgcatggtcgaggccggtgccggcatcgccatcgtgccccaggccggtttcgagcgcctcaagggcagccagaagatcggctcgtgcaagctgctcgacccctgggcggtgcgcaccttccagctctgcgcgcaggatttcgacggcctctcggccttcgcccgcgacttcgccgacagcctgatcgactgctaccgcgcagcttaa

SEQ ID NO: 350588 - DNA, 1053 bp, Pseudomonas aeruginosa
atggccgaaccacgctggaagaaacgccccgagggctccaactggggcgacttcggccccgacgaccagaggggccggctgaacctgctgacgccggaaaaggtgctgcagggcatcgccgaagtgcgcgaaggcctggccttctgcctcagcctgccgctggactaccccggcggcaacgcgatgaacgtcaaccgcctgccgccgatcctgcgcccgctgctgcgcaagggcggcgtcaacatgaactaccagtaccagtggatccaggaaggccgccccgacgtgctcagcgacgacctggcgatcctccacctgcagtactccacacaatgggatgcgctctcccacgtcggtgcgctgttcgacgccaacgatgacggcgtacccgagccgctgtactacaacggcttcagcgccggcggcgacgtcgaaggccccagcgcactggaagactgcggcatcgccggcgcgatcaagccccacagcacctcctgcgctcacgccctgggcatcgagcggatggccgagacctgcgtgcagggccgcggcgtgatgatcgacctgcaccaccacttcggcctcgaccgcacgcacatcggctacgacgaactgatgcgcgtgctcgaagccgaccgcgtggaagtagaggccggtgacatcgtctgcctgcacaccggctacgccgaagccctgctggggatgaaccgcaaccccgacccggcagtgctggagcgcctggccgccgtgctcgatggcaacgacagccgcctgctgaactggatcaccgacagcaacctggtggccatcgccgccgacaactactcggtggaaatcttccccgccggccacgccggcgactgctgctcggtgatgccgctgcaccaccactgcctgttcaagctcggcgtacacctgggcgaactgtggcacctcacgccgctggccaactggctgcgcgccaacggccgcaaccgcttcctgctcaccgccccgccgctgcgcctgcccggcgccgtcggcgcgccgctcaatcccatcgccaccgtctga

SEQ ID NO: 350589 - DNA, 702 bp, Pseudomonas aeruginosa
gtgcccaaagaacgcgtactcatcaccggaggcgcctccggtatcggcgccgccatcgcccaacgctgccgcgagaacggctatgagccggtgatcatcgaccgcatcggcgacggcctgatcgccgacctcaccgacaccgccgccaccgccgccgcgctgcaacaggccctggccgacgggccgatcacccgcctggtgaacaacgtcggcatggtctgccccaacccggcggacgagcagagcttcgaggaactggagcgggtgtgggcgctgaatgtgcgctgctcgctgcagtgcatgcaggcgctgctgccgggcatgaaggaagcgggcttcgggcgcatcctcaacatgtcctcgcgcgccgcgctgggcaaggaactgcgtaccgcctatgccgccaccaaggccgggctgctgggcatgacccgcgtctgggcgctggaactgggccgccacggcatcaccgccaacgccatcgggccggggccgatccgcaccgaactgttcgagcgcgccaacccgccggacagcccgcgtacccaggcgatcatcgacagtgtgccggtcaagcgcctcggcatgccggacgacatcgcccaggccgcctcgttcttcctcgatcagcgcgccggtttcgtcaccggccaggtgctctacgtctgcggcggtatgaccgtcggcgtggccgccgtctga

SEQ ID NO: 350590 - DNA, 690 bp, Pseudomonas aeruginosa
atgatcgacaagttttgccccagcgccgcccaggcgctggccgagattcccgacggcgcgaccatcgccgtgggcggcttcggcggcgccgggatgcccgaggacctgatcgacgcgctgatcgcccagggcgcacgcgacctcaccctggtgagcaacaacgccggccagggcgacaccggtctggctgccctgctcaaggccggccaggtgcgccggattctctgctcctacccgcgcatggtcggctcccacgtcttcgaggagctgtaccgcgccggcaggatcgagctggaaatcgtcccccagggcaatctcgccgaacgcctgcgcgctgccggctgcggcatcggcggcttcttcacccccaccggctacggcaccctgctggccgagggcaaggaaacccgcctcatcgacggccgccactacgtgctggagtcgccgatccacgtcgactacgcgctgatcaatgccgagctcggcgatcgctggggcaacctcacctaccgcaagaccgcgcgcaacttcagcccggtgatggccatggccgcgcgccacaccatcgcctcggtgggccgcgtctgcgaactgggcgaaatcgacccggaacacgtggtcacccccggcatcttcgtcaaacacatcgtgcagcgcagcgccgccgccgatcagcgccaggcaggttga

SEQ ID NO: 350591 - DNA, 705 bp, Pseudomonas aeruginosa
atggacaaacagacccgcaacgccatggccgcccgcgtggcccgcgacatccccgaaggcgcctacgtcaacctcggcatcggcctgcccacgctggtggccaaccacctgccggcggacaaggacatcttcctgcacagcgagaacggcgtgctcggccgctggaccggggccaagcccggcgaggaagactgggacatgatcaacgccggcaaggagccgatcagcctggcgccgggtgcggcgtttttccaccacgctgactccttcggcatgatgcgcggcggccacttggacatatgcgtgctcggcgccttccaggtcgcggccaacggtgatctcgccaactggcacaccggcgcgccggatgcgattcccgccgttggcggcgcgatggacctggccatcggcgccaagcgcatcttcgtgatgatggagcacctggccaagaacggcgaaagcaagctgatcgagcgctgcacttatccgctcaccgggatcggctgcgtcagccgcgtctacaccgacctggccaccctggagatcaccgccgaaggcgtgcaggtcctcgaactggtgggcgaaaccacggccgagacgctacaggcggtcacgccgatcccactggatttttccaccctgcccgaccgccccgcgcgcgccctgagcccaagcgccgagcgcgtcctgggcagctccgcctga

SEQ ID NO: 350592 - DNA, 885 bp, Pseudomonas aeruginosa
atggccaaccaccattccagagcctgggaccagggcgacctgacggaactgctgagcctggaagacgggccgcaggacaccttccgcagcacggtcaatgaccgcaacgtcaacggtcgcatctatgccgggcaactgctcggccaggcgctctgggccgccgcccggaccacgccgcaacgcgtgcccagcaccttgcaggcgaccttcctgcaaggcgcccggcccacggatgcgctcgaatacaaggtcgaggcattgcaggatggccggcgtttttccacccgccacgtctatggcgtgcagggtacggcgctggtgctcagcgcccatgtgaccttccagacgccgggcgaaccgcaggaacccataccacgcctggaacgccccgtgcccgccccggaaagcctgccggacctgcgccagttggccgagcgctaccccggccaggccgacgccttgcaggtgcgcttcaccgggcagccgctgctggacattcgcctggtcgatccccaggcatatttcgacggcgcggcgccacccagcgaaatcctctactgggtccgcctgctgcaaccgctgaccgccgaacgctgcctgcaacatgcggccctggcttacctctccgactgctggctgcacatcggcctcgcgccgccggctcaaggcggcgacgcctggcagcaccactacgtcgccaacctcaaccacacgttgtggttccacaccccggagcctgcctgcgacgactggctgctgttcgtcagcaacgccagccgaggccttgccgggcgcggcctggcgcaggcgcacatctaccgccgcgacgggcgcctggtggccagcctggcccaggacctgctgacttcgccgaggaccgactga

SEQ ID NO: 350593 - DNA, 1299 bp, Pseudomonas aeruginosa
atgttcgactggtacaagactggctcgcgccaggagcgcaagaccttctgggcctgcttctccggctgggcgctggatacctacgacgcgcagatgttcagcttcctgctgccggcgctgatggcggtctggcggatctccaagggcgaggccggcgtggtcggcaccgccgcgctgctctcggcatccctgggcggctggatcgccggcatcctcagcgaccgctatggccgcgtacgcatcctgatcttcaccatctgctggttcaccctgttcggcttcatcgccggcttcgcccagagctacgagcagatgctggtgatccgcaccctgcaaggcctgggctttggcggtgaatgggcggtgggcgcggcgctgatggccgaggtcatccgtcccgaacaccgtggcaaggcgctgggcttcgtgcagagcggcttcgccctcggctgggcgggcgccgcggtgatcatgaccggcctgctcgcctggctgccgcaggacctggcctggcgcgtagcgttctgggtcggcgtgattccggccggcttcgtgctgttcatccgccgtcacgtcaaggatccggagatctaccagcaggccaccgccaaggtcgaggaaaaggcctcgatgctgtcggccttccgtcccgcggtgatccgcctgaccctgctcgccgccgtgctggtcaccggcctgcaagctgccgcctacaccatcatggcctggctgccgacgctgatggtctccgagcggggcctcaagcccggcccggtgatcttcaccatgctgatcatgtgcgcgggcgccttcgccggcttcatggtcaccgcttggatcgccgaccgctacggccgccgtcccgccctgctgctgttcagcgtcggcgcgtggatcttcaccgtggtctacatgctggtgccgatgagcaccgagttgctgatggtcatggccttcccggtgggcgccttcgccaccggcatcttcgcggtgctcggcccgttcctcagcgagctcttccccacccacgtacgcaccacctgcataggcttctcctacaacctgggcaaatccctcggcgcgctgtccatcgccggcgtcggcgtgctctccgagaagctcggcctggcccagtccatcggcaccttctgcctggtggcctacgcgctgtccgtcactgccgtgctgctgctcccggaaacccgtggcgtgcgcctgcaggacgtcgacgccaaggccctgaacgacgacgagccgcaagcctccggcagcgcccagctgtcccaaagcaaatcctga

SEQ ID NO: 350594 - DNA, 279 bp, Pseudomonas aeruginosa
atgctgtactgcgtaaaaatggacgtgaacattccccgcgacattcccagcgacgaagtcgaggcgatcaaggccgccgagaaggcccgcgccaccgacatccagcgctcggggaaatggccgcacctgtggcgcgtcgtcggccagtactcgaacatcagcgtgttcgacgtcgagagcaatgacgagctgcatgcgctgctctccagcctgccgctgttcccgttcatgaccatccaggtcaccccgctggcgaagcacccctcctccatcgtctga

SEQ ID NO: 350595 - DNA, 1242 bp, Pseudomonas aeruginosa
atgaaactgctgcaagcggatgcgttcgacctcagtgagctgatccgccccggcgacaccgtgctctggggccaggccaacgccgagcccctgccgctgaccgcggcactgatggcgcagcgcgcgcgcatcggccgcttccgggtgatgctcggcatcgccaacaacgccacctgccggcccgagcacgccgaccacatcgacctgctcgcgtactgcggcgccggcgccaaccgcgagctggccaacgccggggtgctcgacatcctgccctgccactattcgcagctgccggcgatgatcgagactggcgccctgcgcatcgacgtcctcctgctgcaactggccccggcggacgtcaatggccgctacagtctgagcatcgcccacgaatacctgctgcccgcgctggaccgcgcgcgggtggtgatcgccgaggtgaaccagcaggcgccgcgcacctttggcgaacgcacgctgggcagcgaagacctcgacgccatcctctacaccgaccgcccaccgctggagaatccgcccgcgcgcatccgcgaggccgatgtccgcatcgccgcgcacatcgccgagctgatcgaggacggcgctaccctgcagatgggcatcggcgccattcccgacgccgtgctcggcgcgctgcgccagcaccgcgacctgggcgtgcactcgggcagtctgggcgatggcgtcgcgcagctgatgcaggctggcgtcatcaccaatgcgcgcaagaaccgcgaccgcggcgtgagcatcggcggcgtgctgctgggcagccgggtgatccacgagtttgcccacgacaacccggcgatccagttgcgctccactgcttacacccacgacgccgatgtgctggccagcctgaaccagctcgtggcgattaactccgccgtggaagtggacctcaccggccaggtcaattccgaagttgccgctggcagctacgttggcgcagtgggcggcgcgctggacttcctgcgcggcgcggcgcgctcgcgcggcggtctgccgatcatcgccctgcccaccacggccggcgccagcagccgtatcgtcacccggctaactggcccggtgaccatcccgcgcagtgatgccgggctgatcgtcaccgaatacggcgtcgccgacctgcgcggcaagaacctgcgccagcgtgtggaatgcctgctgaaaatcgctgccccgcagcatcgatcggcgcttgaagcacagttgtaa

SEQ ID NO: 350596 - DNA, 720 bp, Pseudomonas aeruginosa
gtggttcagatcaacatgactcgcgacgagaaagacgcggtgaatgaaatcgataggagccagctgcagaagctgatcgaccaatgcatctatgaggagcgaactggagggattcatggcattggactcagccgttgcggggcgtatgtagccgcaatgcttcgcgattttgagcgtgctctgggggactactgtaaagcgagatcctccaaaaagcgcgaggagacgagaaccaccgtgctgcgagctggaagcaacttggtacacgccgtccaaaccatgaaggatcgagcagcaatcgagcagcaagatggccagttctattacgtcgaagatcagataccgtcgcccgtgagccttcgcgaacagttgacggttcggatcagctacaaatggcggcgttctgtcgaggacaactggacccacagcagcatcatcttttcacacaccgcagcatctcgcccgaattacagccaacctgcccccttgcggaaaccaagtgctgaaaaggtgcgtcaggagcgcgaggcgaggctctatcgagaatgggagcacctgcgggatctggcgctctgttccgttcgagacttctttaaaaacgggggggacggagactcaatcccgacggcgtattcggctcagcccgataaccatagtggtgggctcaataactacagtgcagatttttggcgtgatcgcgtcacagctaaagatgactga

SEQ ID NO: 350597 - DNA, 684 bp, Pseudomonas aeruginosa
atgagcacttcatcagtactggacggacttgttgaatcgttgaggacgcatgcttcgttgctgatcagatcctcggagattgaagcaacaggagcacccgatcctcgcgacaactttgttcgtcaagagctgaggcgagcagccgagctggtgagcggagcggcagctttgggcgccattgcaaaccctgcctgcttgggaatcttgagccgaagtctgctggagcagttgataacggtcttgtggggcattcgatccattgagaatgcagagtcgcaaagcaacgctggtactgctcaattggcaaaagcgttcaagatgaacttagaagcaggtaccgcccaggtcttcgatcggagcacaggtgaggaagtaacggctcgatacctagagcgcgaacaggtgaagcgaagctccccacccagtattcagcagaaagccaaggaggcagacgttgcggacctgtacaccgttttctacagatttttatcgcttgagacgcatggtcacagcgaaagccccagagaaaaatcagaaatcgtggatctgagcgttatccacctacaaggcataggtggcataagtcgagccatcgggcagggctgcgtttggtggctgattcatcgccactggcctgataacgagtcacttcgcgaagtgttaggcctcaatgcgaaagcgtag

SEQ ID NO: 350598 - DNA, 1008 bp, Pseudomonas aeruginosa; identical to SEQ ID NO: 338877

SEQ ID NO: 350599 - DNA, 912 bp, Pseudomonas aeruginosa
atgcatatcgatctccgccagctccgccacttcatcgcccttcacgagcaccgcagcttcgtcgccgcggcgctggcggttaacctttcgcaatcggccttcagccgcagcatccaggcgctcgaacacagcgctggctgccgcctggtggaccgcgcggccaaggacctgcgtccgaccaagcagggcctgatcgtcctcgaacatgcgcgccggctggtcagcggcgcgcacaacctggccaacgagatcgccctgttcaacggcctggaggccggcgaactgcgcttcggcgccggaccggctcccgccacctggctggtgccgcgtgcggtagggcgcttcaacgtgcgttatccgaaggcgcgggtgagtttccaggtcgaacactggcaggcgctgaaccgccgcctgcaggccgaggagttcgagttcttcgtcgccgacacccggcatttcgaggccgacccgcaataccggacctcgcgcctgcgtccccggcgctggcatttctgctgccgcgaggggcatccgctggccgctcgcgagagcgtttccgccgaggagctgttgagcttcccgctggcgaccaacatcagcccgccgaacatccgcaaggtgctggtggacctcagcgggcgtcccgacttccgcccggccatcgagtgcgagaacggccatagcctgctcggcgtggttctcgcctcggatgccatcggcatcagcagcggcctcggcgacctggcgccgccgggacagggaggcctgcgtccgctgcgggtgcgcgagctgcccgacgacctcgacgaactgcatacccgctacggcatcgtcagccgcgccggctacagcctgtcgccgctggcggaggcgatgatcgacgaactgaagcgggtcgacgacgccacctga

SEQ ID NO: 350600 - DNA, 1425 bp, Pseudomonas aeruginosa
gtgccgccacctgaaatagacattattcaagcgcgcctaggctcagtcactgcaccggcgggatgcggcaagacccaactcatcgcggatgcgctgagtcaatacaccgacagcaagccagtcttggtgttgacgcacacaaacgctggcgccactgctctgcgcactaggctccagcgcggtggcgtccccacctcagcgtacagagtatctaccatcgacggctttgcgatgcggctagcgggcaagtttccgctccgagcgggcctcgacgcgcgtgttctcgaactggccaatccgaacgcggactaccctgccattcgaggggccgtgcaaggtcttctgcagaccggtcacatcagtgaccccataacgtcgacatattcgcgcttgttggtcgacgagtaccaggactgcaacaccgcacagcatgccctcgtctgcgccctagcgcggattctgccaacttgcatccttggtgacccgatgcaggcgatattcggcttccgcgacccattggtgcactgggagctggaggctcaggctgagttcccgcctatcggcacactgcagaccccttggcgatggcgcctcgcaggtatggacgcgctgggagcttggctacttcatgcccgcgtatcattgcaggctggtcaacctgtggacctgcgtggagcgccggagggagtccagtgggttcaattaacccaaggcatggaattgcagcagcgactggttgcagcccgaacagaagcaccaaaccgtgacggccgcgttctcgtcattggcgactccatcaatgttaatggtcgccatcaactgaccatgcagacgccgggcgccactgccgttgaagcggtcgacctgaaagatcttgtgaacttcgctcgccggttcgatttggcgagtcccaatgcgttgcgccagattgccgagtttgccacttcactgatgactggagtgggtgctgcaaacttgctcgcgcgagtcgaaacgatacgaggcggccgggctcgcacgcccgcgactcctacagaagcctcagcagtggctttcatagcggctcccaactacgcgacttcaattgacctgctccagtccctcgcggaccaacacggtgcgcgtgtctaccgacccgaagtgctgcactgctgtatttcagcgctgagatccgccgaggacggaggtgggttcattggcgcggcaattcaagcccgcgagcgaaaccgccatttgagtcggccactgggcaggcgcgcagttggaagcacgcttcttctgaaagggctggaggcggacgtcgcggtcattcttgagcccgagcgtatgacggctcaacacctctacgtagctctcacccgaggtgcaaggcgagtcgtggtctgctcgtcgacaccattgctaacgcctgccgcaggccgctag

SEQ ID NO: 350601 - DNA, 1734 bp, Pseudomonas aeruginosa
  misc_feature (722)..(722): n is a, c, g, or t
atgacgcgagtccgtcatcttgaaattcgcaatttccgatcgatacaagcgctcgattggacaccgtccaacggcgtgaactgcctaattggcccgggagacagcggcaagtcaagcatcctggatgccatagacctgtgccttggagcgcgaagaagcgcacctttcggcgacacggacttcttcggactagacgtcactcggaccatcgtgattgcagtcacgctcggcgcactacccgacgagctgaaaaacatcgacacctacggagagttccttcgcgggtttgaccttggcactgggcagctagaagacgagccgcgggcaggcctggaaacggttctgacgctgaagctcgaggtcgcgagcgacctcgagccgagctggacgctttactccaatcgagccgatcaacaacgactggaacggtctctagcttggaaggatcgaagtctcctggcaccagcccgaatcggcacctacgcaaacacgaacctttcctgggctaggggatcggtgttgaaccggctcacggaggagcgcgcgaaccttggctcggaactcgccagcgcggctcgcgccgcccgggccaccttcggcgcacaggctggccctcaactcgctcagaccctgcaagtggtcacccagacagctaccggcctgggtgttgcaatcggtgcgagcgctcaggcactacttgatgctcattcggtgtcgattgncgatggtgctattgcgcttcacagcgaggccggcattcctctgcggtcgctgggcaccggttctgggcggctccttgtagcaggattgcaaagggccgcagcagcggctgccaccgttgccctagtagatgaagtcgagtatggacttgagccgcacaggctcatgcgcctgctcgactcactcggtgcgaaggacgaggcccagccgctacaggtctttatgacgacccattcgccggtgacgcttagggagcttgctgctaaacagcttttcgtcgtgcgccagcgtttgggcgttcactcggccacatgcgccggtacggacgacggtatccagggcaccttgcgcaaggcggccgaggcctttctgtccaaatccgtcatcgtctgcgaaggcgccagcgaggtcggattcgctcgcgggatggaccagtggtgggtcaactgtggcgcgacctcgttccttgctcatggaggctcgtacgtggacgcaggtggaggaagccccgaccaatgcttcacacgcggggaggcgttcctcaagttgggctatcgcgtcctcgtcttcgtggacgcagacaagcctgttgcaactgtcggacttgtcgagagattcactgcggctggcggccagtacatcacgtggcgccccggtctggcgcttgaggacgagctatttctccactcaagcaatgacgcggtgcatgcgctgctgaataaggcagacgagatggtcggccgggacctcatggctgagcacatcaagtcgaagtcgagcggccaagtcaccttggaggccatagaggccgaacggacgaatggcggttactcacctgcaagccgagctttgctcggacttgccgctcgcaacaacaaaaacggctggttcaagtcagtgagcggtttccaggaaattgccaaagacatcgtcggccctcacatacggaatgcagagccgggcttcgtcgacattactaaccagctctggaggtggacaagtgccgccacctga

SEQ ID NO: 350602 - DNA, 501 bp, Pseudomonas aeruginosa; identical to SEQ ID NO: 341455

SEQ ID NO: 350603 - DNA, 234 bp, Pseudomonas aeruginosa
gtgccggaggagttcagcttcgagtatcgccaccccaatggcgagtgccacacggtaacggtaagccgggagcaggtgatcaatgagatgcccgacttcctgttcgaagcgctgtgcagcaagttctgcaactgcgagccggtgggcgagacgaacgttgtcgagtgtcgctgcgacgagtacgcggaggaattcaaactgctcgccgccgcgcccggcaaggaggggttgtga

SEQ ID NO: 350604 - DNA, 276 bp, Pseudomonas aeruginosa
atgacggtcagcgaggggctattgcggggtatggccgcattcgcacaggagatcatcagcggagccctggaaggcggcagcttcgatggggcggacatccaggaaagtgccgaacgccatgggttgatcgccaagcagatgatgcgcgagccatgccgcggcccagaagagtactgcgcatgcgcctggtctacctcgttcccgactgaatgctaccggataacggcagagcttcgcgccctgctcagccaggacaaggagaacggcaatggctga

SEQ ID NO: 350605 - DNA, 330 bp, Pseudomonas aeruginosa
gtgatccagggcatcaaacgcatcgtcgccatcgaaggcgaaccctctcccaactgccccagcagcaattccaccttcacctacgacgaacgcggcctgctcagcagcaaacgcgacaacaacggcaacctgaccacctaccagtacaacgcccgtggcctggagacctcgcgcaccgaggccgccggcactgcgcaggcgcgcaccatcacaaccgactggcacccgaccctgttcctcccggtgcaggtcagcgagcccggccggatcacccgctaccagtacgacgccgagggacgcaagaccggcgagaccgtcaccacccgctga

SEQ ID NO: 350606 - DNA, 357 bp, Pseudomonas aeruginosa
atgaacagaaccgaaatcccacgcgacaacaacgtccgctgggagtggatcaaataccaactccgcgccaggggatcgtccctggccgaggtggcccgctccctcgacgtctccagcccggcagtcaaaaacgccaagctgaacccctaccctcgggtagagcgcgccatcgctgccgtgctcgacctcagccccctggtgctgtggcctgagcgctggctcgacgacgagaatccgaagcggcaacggccgaatcgttcggaaaccctcaaggcatatgacagtgtcatatgccgatccgggaaaaataccagatacgctgaccaagcgcagcgtaaagccgacgcgggggcttga

SEQ ID NO: 350607 - DNA, 258 bp, Pseudomonas aeruginosa
atggcgtcgttccgtaccctggccgtggtcgctttctgcgtcgtcctggctgcctgcagcaagatcaaccaggaaaactattccaagctcaaggccggcatgagcaaggccgaggtcgaggcgatcctcggcaagcccaccgagtgctccggcgcgctgggcatgtccagctgcacctggggcgacgagaaggctttcatcagcgtgcagtacgcggccgacaaggcgctgctcttctccggccaggggctcaagtga

SEQ ID NO: 350608 - DNA, 603 bp, Pseudomonas aeruginosa
atgagcgcgccctgggagaccctgctcgactggtggttcggcacctccagcgatgccgccgaggtggttgcccagcgcaacggcctgtggttcggcaagaacgtctgccaggacgccgatgccggcggccgtttcggcgacctggtgaaccaggcgctggacggcggcttgcaggagtggacggccgaggccgatggctggctggcgctgatcctgttgctcgaccagttgccgcggatgatctaccgcgacacgccgcgcgcctacgccggcgacgcccgggcgcaacgggtggtgcgcgagggcctggaaaaaggcttcgaccgccagttgccgccggtgcgccgggtgttcgcctacctggtcctggagcacgccgaggacctgcccagccaggagcgggcggtagcctgcttccgcgacctgcgcgatcaggtcggtggcagcgtgcgcaagcccttcgacgatttctacgactatgccgagcggcatcatgcggtagtcgcccgcttcggtcgctttccccatcgcaacgccattctcggccgcccctccagcgaggaggagacggcgttcctcagggaacccggttcgcgtttctga

SEQ ID NO: 350609 - DNA, 1683 bp, Pseudomonas aeruginosa
atgagcaaacaaaaactcgaactcacctggatcggcaaggagaagcggcccaagctggagccgcgtatcctgctggaagatccggaaaagtcgtatcacgccaagcatcgcgtgacggacaacgacatcttcgacaaccggctgatcttcggtgacaacctgctggcgctgaaggccttggaacaggaattctccggcaaggtgaagtgtgtatttattgatccgccgtacaacactggcagtgcattcaagcattacgacgacggcctggagcattcgatctggctcggtttgatgcgtgatcgtctggaaatcattcggcgcttgctatctgaagatggttcactgtggatcacgattgacgataatgaagcgcactacctcaaggttctgtgcgacgagattttcggccgcgccaactttttagcttgctcgatttggaatcacagcgttcaatctaaggggtatagcgggaagttttctgttcaccataactacgtccttgtttatcaaagaaccccttattttcagctgaaggatttgccacgagaagacgcgcataacgtcaattattccaatcccgacaatgatccgcgcggcccttggcgttcgggagatgtgagaaactcgctcgtccgacccaacttgatgtatgacatcaagactccaagcggaaaggttattaagcatcctccaaaagggtggcgttttagtcgcgagactttcgagaaggagcttgctgaaggaaaaatcaaattttccagtgacgaaactcgaattatccggaagatctatttggcggaccaagaaggtcgcgtcccggaaactatttggtttgctcaagatgtaggaactacacgcgaagcaaatggtgaggttcgggcgttcgttgagggtgatttctttgatacacctaagccagagcgattgcttgagcgcgtcttaatgcttgcgaccaaccccggtgatcttgtgcttgattccttcgctggttccggcaccaccggcgctgtcgctcacaaaatgggccgtcgctggatcatggtggagctgggcgagcattgccatacgcacatcatcccgcgccttaaaaaggtgattgacggcgaggacaagggtggcatcaccgagagcgtgggttggcaaggcggcggcggcttccgctattaccgccttgcccccagcctgatcgtcaacgaccgctggggcaacccggtcatcaatccggagtacaacgcggcgatgctggccgaggcgctggccaagctggagggctttacctacgcgccgtcggaaatgcactggtggcagcatggccattccagcgagcgagacttcatttacgtcaccacgcagaacctctccgcagaacagttgcaggctctggccgatgaagtcggtccggagcgcagcctgctggtgtgctgcgcggctttccatggcgttaccgcgaccaaggcggcggagcgctggccgaacctgacgctgaagaagattccgaagatggtgctggcccgttgcgaatgggggcgtgacgactacagcctgaacgtggcgaacctgccgatggccaagcctgatcccgttgagccttcggctcaggctgaaacgagcagaaaaaaaagtagaaaagcgtcggctgaggatgcgagccaaggcgcgttgtttggggaggatgaatga

SEQ ID NO: 350610 - DNA, 789 bp, Pseudomonas aeruginosa
atgttctggagcggagacaagctcaatgaagagctgaagaatatagtaaaaaacgaagacggcagcacaaacaacataaaagttgattgcgctgccgtttcacttactgtcggcgacgaagtctatattacacccagcgacccagataacagcaaagatacgggtgtaaaaaagaaactaacagaagaaaaatctcagtttttaatcccaaaagggcagttcgcattcctgctaacaaatgaaataatctctgtcccagacaatgccctcgccttaatatccttcaaagcaacttataagttcaaaggtctcataaacgtatccggctttcatgtagacccaggctggagcggaagactaactttttcggtctataatgcaggcccgctagacatcaccttagagaagggcgacgcttttgcgctcatctggtttgcagacctcgaccgcgcctctagcgataagtacaaaaagaaaccaaccacaccgctgccgaagactcttaacagcaatctcatttccaatatgactggagaagtcttctcccccaccaagctcaaaagtgaaattgacgccttaaagaaagaaatattaactcttgaaagcaaaatagttacaagatactcaactgtaatttttgcaatatttattgccatcctaggcttcggcatgagagatataatttttaaggccataaatgattttactggcacacagcttcttgccgtccaacaaaccacccccctcgaatcagacccacaaaaaggaactgtcagcgatagcaaatag

SEQ ID NO: 350611 - DNA, 858 bp, Pseudomonas aeruginosa; identical to SEQ ID NO: 324555

SEQ ID NO: 350612 - DNA, 339 bp, Pseudomonas aeruginosa
  misc_feature (119)..(119): n is a, c, g, or t
atgctgatcaaacttcccgactttgacgacgatctggccgagcggctgaagagtcgtactggccagaacactggctccaaggctgtgctgcgtgctgctgaggagtatttgcctcttcngctgaagctggaacatcgcgaccggcagattgccgagcttgaagagcggttgcgagtggcaagtcaggtgatcgagggcgctcgctcggctgctgcgctgctgcttgaaaagaccgctcagggcgatttgctcgccgctccggcatcaagcaagccgcgcatgaccggtgaagagatgttgaacgaactgcgccgcagtgcgggcttgcgtcagcgttga

SEQ ID NO: 350613 - DNA, 231 bp, Pseudomonas aeruginosa
atgaaacaactgaaacaactgttctccctgggcaaacgtgaagccgttatcggtggctcgttgctgatgacgtccggcctttcgatggccgctgagggcgatatcgacactaccaaggccctggcctatatcgcgggcggcctgactgcggcggcggctgtgaccggtgccatgttcggcctggtggccctgatcggtgccgccaagaaagcccagcgcgcagggacctaa

SEQ ID NO: 350614 - DNA, 1389 bp, Pseudomonas aeruginosa
atgaatgacgtgacagtgatcgaccgattcctcgctaccttctcgcgctacatcgactcgggctttgggctgctgcagggcgaagtcgcgttcctgaccgccacgctgatcgtcatcgacatgaccatcgctgggctgtactgggcgatgagccacgccaccggccagggcgatgacttgatcgcaaaactgctgcgcaaggtgctttacgtcggcgccttcgcctacatcatcaacaacttcaactggctggccagcatcgtcttccgctcgttcgcgggcctgggcctaacggccagcggctcgacgatgagcatgggcgaatttctgcaaccgggccgcctggccaagaccggcatcgacgcggcagcgccgattcttgagcagatcagcgacatggcgggctttcccgaggtgttcgtgaacatgacgcccatcgtggtcatgttcctggcctgggccgtggtgatcctgtgcttcttcgtgctggcgatccagcttttcatcacgttgatcgagttcaagctgaccacgctggcgggcttcgtgctggtgcctttcgccttgtggaacaagacctcgttcctcgccgaaaaggtgctgggcaacgtggtgtcctcgggcatcaaggtgctggtgctggccgtcatcgttggcatcggctcgggcctgtttgccgagttccaagtgcatccggccgagccgtccatcgaccatgcggtggtcatcatgctggcctcgctcacgctgctggcgttggggatcttcgggccgggcattgccaccgggctggtatccggtgcaccgcagcttggcgcaggcgcgatggctggtgctgcgattggtgccgcaggcgcggcggttgccgtaggtgccgcagccaccggcgtgggcggtgctgtgatggccggtgcgcgcatggcaccggctgccgccaagctcgccgggtctggtgcgcgggctgcaacctcggcggctggcagcgcgaagtcggctttccaggccggttccgccgctgcgggcggcggagccaagggcgcgatggccgggctgggcagtgttgccaagggcggcgcacaggccgctggccagcgcgctggtgctggcatcaaggcagcagcggccaaggctgcagcgccattcaaagcaggctggcaaggctctggtgccgatggcggctcaggcggtggcactgcggggccagccgccgcaggcgatgccgctggcaacacagccaacgcgcaaaaacaagagcagcccggttgggccaaaaacctgcaacgccgccaacgactcatccaggccaccactacggccgcgcacacgctgcgcggtggcgacggcggcggttcgggccaaggcccgagcctgcgggattccgatagctga

SEQ ID NO: 350615 - DNA, 267 bp, Pseudomonas aeruginosa
ttgagccaggaagcgttctccgacgtgtccagccgcacctatatgagtgcgctggagcgcgacctgaaaagccccaccatccacaagttggccgagctgtgcgaggtgatgcaagtccatccgctcacgctgctaacgttggcctatgtcggtgacagtgacttgcaggcagatcagcttctagcgctggtacgtcaggagctagaagaaatagaatcgaacgatcgcacacgggcatctaaaaagcgggggaaaaatggattttga

SEQ ID NO: 350616 - DNA, 1911 bp, Pseudomonas aeruginosa
atgggcatagctgctcgcagccttcctgtcaacttaatgcgtgttgagaaaatgctgagtctgagcgaagagattgaacgcctttacagagatcaagggaaatatgccagaatattccctggatatattactcacatccgttttccacgctacaaaaatatcgtggacgggactcgtatagatttcacatttccaatcactgcgcttgttggatcaaacggatcaggtaaaacttccatactgaatgctctgtacggagcgcctgcacgtaaatccactggtcagtattggtttagcactaaagttgaccccattgaagaaggcgaaggaagcccaagtcgattcatctacggccatcacaactcgacattaaagtcggttgtagaaacaagaaaagccagggtgaggaaagtccgctctgggcgcctcgacccaaactattgggagccaaccaaagaaagccctggtgacggcatgagcgacccggaattgcaagccggaaaagcctatgcaggtcgcagcaaagatcgctggaatccagtgtctcgcgatgttctttacatcaatttccgcaaagaacttagcgcattcgataaatatttttatttcggcaaagatcctgctccacaaacttccacggcaaagacaaaacaaaatcctgggaaatctgtctcgcgtcgtatcacgagcaagatggatcaagttcgacgcgacgccgaacttttagcgagagtgattgaatcgggcgacacatcatatctataccacaaacgcaaagtagcgactgaaaatagacttcttacccaagatgagctagatacagtgagcttcgttttgggaaggaaatatgaggaggctcgctggattcgccatcgactctttaagggagacggtgggcttagtgtggtctttaagacccaacacggaagatattctgaggcttttgctggtagcggtgaggtggcagtgacaagctgcgtcgttcaagttctaaaggccgccaaagggacactcattctgctggatgagcctgaagtttctttgcaccctggcgcccaagagcggctgcttgcattcttggcgcatagggctcgaatccgtcaactccagattatattttccacccactcgcctcactttctagccgccttgccaaacgacgcaattaaaacctttcatcagctagatgatggccggttttctgtcattccatcaacacatccttatgccgcattccaaaggctaggtgtggtagacagccataagattcgcgtgatagttgaagatcgcttggcagaagaggtcgtgaaacaagcgcttttgaccctgcctgataccgctgcgcgtgaagtgttccatgttgagtaccccagcggtggagccgatgccatcttagcgtaccagatccccgtattacttgatgcaccaggaaacacgctgattctcctagacggggataagcggaaggcagatcatttcatagatccagacacaatacccgcctcagaaaacgacactcttcaggaaaagatcaaggaaaccacgggagttgatccaaaattaaccgtcgatggtggttctggcagggcaaatgaaacacaactgatcgaaaccaggcgtaaatatttagcttgggttcgaaagaacgtggatttcattccaaccctctgtcctgaagaactggtgttgcgcgcagcaggcaaaaacaagccgtctgcaacgacgtcccagcaccataaagatcatcttagagccttggcggtagagctctttggggcggacgtgacgaataaacgcactgatgatcatggggtaacattgcttgctagcaacagaaaagattctgcagagctttcttcgcttgcaagcatactaaaatgctacctcgaatcggttcggtcaggaaattag

SEQ ID NO: 350617 - DNA, 1047 bp, Pseudomonas aeruginosa
atgaaaacgacaaatctgacagcgattgacctattctgtggtgcaggcggactaacccttggcctcaaacaggctggctttcgcgttgtggcaggggtggagttaaacgcgatcgccgccgaaacttatcggctcaaccacgaagatgttgatgtttatgaaaaagacatttgcgatatcaacccatccgagattcttgaaaaattcaacttgaagccaggcgaactcgatttgctggcaggctgcccgccttgccagggtttttcgagccagcgaacgcgaaataaaacaaatgcacagcttgatccacgcaatgaattaatatttgaatttctccgatttgtggaagttttgttgccaaaaacaataatgctggagaatgttcctgccttggcaaaaaactggagaatatttaaattaaaggaaagcctagagcagctaggttatgttgttgatgagaattcgatctctatacatgacgccgccgattacggggttcctcagcgacgccgtcgccttctcttcaaagcatcaaggcttggggttatttcagatgcaccgaaaagcaaaaaaaggataactgtcaaagaatccatttttgacctaaagccggcaggattcagcggggatgaactccatgatcttggagaagataggagtgaaaaggtaaaaaaaataatgtctcttgttccaaaagacgggggatcaagaactgacttgcctaaagagtattggcttgagtgtcacaagagaagccctgggggctatcgtgacgtatacggaagaatgaaatgggacgatgtttctcccactataacaggcggctgccataatccatccaaggggcgattcattcacccagagtttgatagggcgataactcttcgcgaggctgcattactgcagacatttccaatgaattataaattttcattggcacgaggaaaagattccgtcgcactcatgataggcaatgctcttcctccgaatttcatagaaaatcacgccagacaatacgtccttcatatcaaggaagcacagcaatga

SEQ ID NO: 350618 - DNA, 1623 bp, Pseudomonas aeruginosa
atgagcctggaattgaaatttgacccaagaaccattgaacatcttggcgtgaaaatgtattcaactctacctcctgctctagcagagttgatatcaaattcttatgacgcggactctccaggggtggttgttgagtttaccgaaataaacaaaactccaaaaagcattgttattaaggacgaaggcgaagggatgtcgctggacgacattcagaataaattcttagttataggtagaaatcgtcgaaatgatgatggagataaaccatctgataaattcagccgactccccacaggaaaaaaaggcttaggaaagctggctctcttcgggctggctaatgaaatcgtcgttgacaccatcaaagacggactgagaaatcggtttcggttaaattggacggagctgctatcatcgaactcaatttataacccaaagattgaacttcaagaccagccaattgaccgaccaaatagaacgcaaatacaactatccgatctaaagagaaaatctcagttcgaccttgattctttggcagatagtcttgcaaaaatattctcctccgacccatcgttctccattgttttaaaaaagggagagatcgtcgtccctgtggatggcaatcgcagatacaaagatataacgccacaatttaaatggacggaaaaagacctaataaatgacggaagcccttatcaagggaaggtatctctaacacttgttactgctgaaactccaatccctccatcaactggtctgaggggggtgacgatattctcacgaggaaagctagtcaacgcaccagagtatttttcagaaagcacatccagtcattttttccagtatttgacgggctcaatcaatgctgacttcattgatctattgagcgaagatgtcatatctacgaatcgccagtcaattaactgggatcagccagacatgatggcttttagggagtatctcagcagccttattgcagaaacggctagagactggagaaaaaaaagaacggaaagtaaagaaagagacgtgcgagtggcgacgggaattgacactgatcagtggatgagcactttgcctgaaaatgtaaaagactcagttcagtcgattattacacacatgacaaagaatgaggagatctccgaaagtttgaagcccgttgtaaaagccctctacgatatagttcccgaatatcctaacttacattggcgacatcttcatcccagcataaaggatggagtttctgaattttatagaaattctcaatacggcctcgcagcagaccaagcaacaaaaatgtacgcggccagaattagagagatagcaaaaattgatgaggatgggactcgcttggccgatgttttttcttcgtccaagggtgcccctgctattgcaatcaatgaccttagcacgtcttctttcaaaaatatgcaagaaggacagggccacctaacacgaggactcatgcaggggttccgcaacccaataaatcatgccccggtagacaaagtcgttccagaaataatttcagagcttgattgcttgaacatactcagccttgtttcttatcttggtgggaaactcgactatgctgaaaaagcagtaaccaaaattgatgaagattag

SEQ ID NO: 350619 - DNA, 501 bp, Pseudomonas aeruginosa
atgaagaagatccttgccacgctggcattttgcacggcgttcgcgactcaagcctgggccgccgggctgatcgttgtcgaagacctcggcggcgcctcggcgctcccctactaccagggcctggatccgcagccatccgctgccgcaccaggacctggcgacctgggcgtccgtggctcaggtgcgtttccagttcgctccgcccgtctttcgccaggacaggtccaggggcgcgccatcaacgctccaggcctgcaaccgctgttcctgatcggcgacgacacgctgtctcaaacctggctgaaagagcgaggcgacgagctccgagacctccaagccgtgggcctggcagtgaacgtggccagcgaagcgcgcctgacggaaatccgggcctgggggaaaggacttcagatattgccggcgccggcggacgacctggtcgaccggctagggctgcagcattaccccgccctcatcacatccaccgccatccggcagtag

SEQ ID NO: 350620 - DNA, 3579 bp, Pseudomonas aeruginosa
gtgacccgcctggaaaacgacgctggcacgctgatcgccgaacgcggcctgaagctggcggccgatgaggcgaacaattccaaggggcgtatcgtcgccaaggatgatctgcgtgccaaactcggtgcgctggtgcagaacgggggagagctgacgactcagggcgcgctggccctcgacgccgacaaagtcgacaacggcgctggtcgcatcgccggcaaccgaggtgtggtcatcgatgtccggcaggtggacaaccgtgccggcgagattgccagccagggcgtggcgacgctgaacctcactgaacaactggacaaccgtggcggcaagatcgtcggtgacagtggtctgggcatcaccgcgccacgcgtgctcaaccaggacaagggagtactcgccagccgcgatgggctgcgcctgagtggtaccgaattgttcaatggcaatgccggactgctcagcagtcagagacatatagaggtcactctggacggcgtgctggacaatcagggcaagggcgcgctgctcagcgacggtaccctgacggtgagcgccgggcgcatacacaaccaggacgccactctgtccagcgccggtgcgctgagactgagcagccaggaggcggtggacaaccgtggcggcaagttggtgacggactccagcctgcgcctgaccagcgccagcctggacaacagccgatcagggatcatcagtgccaacgctgcggcggagatccataccggggttctgaacaacagccagaaaggcaatcttggcagtaatgacgggctcggcctgattgctactgaggtggataacagccaggaaggtcggatcactgccaaaggcatgatcgacgcaaatatcaagggactcgatcagcaggggaaagggcggctggtcagtaatgccggcatcatactcgacctgaacgagggaaccctggccaatggcgctcagggcctgatcgccacgcctggaaccttgctcctgcgccaactcggcatggtggacaacagcggcggggaaatttccagcgaccgagccttcacactcaccacctccgcgctgaccaaccagggtggccgcctgcgcagcggcggtgtactgacgttgcgcatcgcccaggctctggacaacagcctcgaaggtgttctctccggcaccggaggcctggatatccgggcgcttgccctggacaaccgcagtggctccatcggcagcaagggcgccgtcgatatcgacgtgtcccgtttggaaaacgatgacggcgacctgcttagcgaagctcgtctgaaactgactgccgagcgagcgaacagtgtcaggggacggatcgcggccaggggtgacctgcacgccagcgtgacagcctttaaccaggcgggtggcgaattgagcagcgagggtgcgctgatgctcgaggccgatagcctcgacaaccgcagcggcggtctggtcagtgctgatggcaacctcaccgtttccgcccggaggatcgacaaccgtgcgggcgaaatcgccggcccgggccaggtgacactggacgtcgccgagcagttggacaaccgaggcggcaaggccatcggcgatagcggacttcgcctcgccgcgccacgggtactcaaccaggacggcggggtactcgccagtcgtgatgggctgcgcctgaatggcgccgaactgttcaatggcaacggcggcctgctcagcagccagcaaagcatcgacgtcattctggacggcgtattgggcaatcaggcgggcagcttgagcagccagggacgcctgagcgtgaagagcggtcggctggacaaccagggcggtgcagtcttcagcgccgggaccttgtcgctttccagccagggtgcgttgaacaaccaggggggcagggtggtcaccgacgccggtgccgtcctgcgcagcgccagcctcgacaacagccagggcggcatcgtcagcgccaagggggccgcggagatccgtactggcagcctcaacaatagccagaagggcggcataggcagcggtgccgggctcgcgctggtcgcggacctggtggacaacagtcagaacggccggatcactgccaagggtgcgatcgatgccaacctgaaggggctggatcagcagggcagcggcaggctggtcagcgatacggccatcgcgctcgatctgcgcgggggagaactggtcaaccgtgctcagggcctgatcgccacgcctggagccttgctgctgcggcaactgggtgtcgtggacaacagtggcggtggcgagatctccagcgatcgaagctttaccctcgccgcgaccgcgctgagcaaccggggtggccgcgtgatcagcggcgactccctgaccctgcgcatcgcccaggcactggacaacagcctccaaggcgttctttccgcaagcggagggctggatgtcgctgcactcgtcttcgacaaccatagcggcatcgttggtagcaagggcgatacacacatcggggtgaaccgcctggagaacgaggcaggccgcgtggtcagcgaaggcgccctggatctgaccgccaagcaggtgagcagcgccaaggggcgcattgccgcgaagggcgatctgcaggtcacggttggcaccctggagcagcagggtggagaactagccagtcaggggacgctgactctcgacgccgatagcctggataaccgcaatggcggcctggtgagcgccgatggcggggtcaccgccgaggcacgccagatcgataaccgcggtggggaaatatccagcgtggccaaggtggctctggctgtccgggaacaactggacaaccgggggggcaaggtgatcggcgacagtgagctgagcctaaccgtgcagcgcctgctgaaccaggccaagggtgtgctcgccagtcgcgatggattgcacctggacggcgcggaactgctcaatggcgatggcggcctgctcagcagccaacgcctggtggatgtaacgctcagtggtgcattggacaaccaggggagcggtgcactggtcagcgaagggtcgctgacagtgaaggccgaccaggtcaataaccaggcggggactttctccagtgcgggtagcctgctcgttaccagccggggcgagttgaacaaccagggtggcaggttggtgaccgatgctggagccaccctgaacagcactggcttcgacaacagccgtgcgggcctggtcagtgcgaaaggggctgtggccattcgtaccggagccctgaacaacagtcagaagggatccattggcggcaatacgggcgtcaccctggtcgccgggttggtcgacaacggccgggaaggacggatcagcaccaagggtacgctcgacgccaacctgaaagggttgcttcagcagggggaggctcgctggtcggcgagcgcggtgtcaccctcgacctcaacggtggcaccctggacaaccacgacctcggtctggtttcaacgcctggcgcgctcctgctgcgccaactcggcatggtggacaacagcgtcggcggagagatatccagcgaccgtgctttcaccctcgccgccaacacactga

SEQ ID NO: 350621 - DNA, 501 bp, Pseudomonas aeruginosa
atgtccatcaccggcaccaagcagggcctgatcaccgccggcgccttcaccgaggattcggtcggcaacacctaccaggaaggccacgaggaccaggtgatggtccagggcttcaaccacgaagtgatcatcccgcgcgacccgcagtccggccagccgaccggtcagcgcgtgcacaagccggtggtcatcaccaaggtcttcgacaaggcctcgccgctgctgctggccgccctgacctccggcgagcgcctgaccaaggtcgagatccagtggtaccgcacctccgccgccggcacccaggagcactactacaccaccgtcctggaagacgcgatcatcgtcgacatcaaggactacatgcacaactgccaggacccgggcaacgcccacttcacccacctggaagacgtgcacttcacctaccgcaagatcacctggacccacgaagtctccggcacctccggctccgacgactggcgctccccggtcgccggctga

SEQ ID NO: 350622 - DNA, 669 bp, Pseudomonas aeruginosa
atgcgtcccaaggtgcgccttttgggacgccatttcatgctctgctccagcttccctcgctgcttcgccagtccgcttgccgtcactttctccgatagcttttcttgccgcccggcgtcaggcagtacacccctccgcgcgggcccgtgcagaacgagccgctgcacaggcacagccctgcgtcgtgccttgcagacgctgtacggcgggttgtccggtacgtccgccggcgttgccgaagtaggccgcgcaactgcgcttcgaggcgctgatggagccgtcgttgcagaggaagatatcgccgtcgcaaccggcgataccgcctttctttcccgagcaggggctattggcggccagcgccggaagtgcgcagaccgacaggaggaagagggcgatcgaggcgaagagtccgaatttcattggcgaagcttccgtgcgaatgatggctgcatgctatctcaggcgcgcgccgtgcgctttcgcgagcggcgccgattacatggccttacccgagccttgacaggtcttttcgacggggcttataagtggcgccatcaggtcatgcgcatcagcgtcgatgtcgcgggaccgaacctaacgcatacgcacagagcaaatgggctctcccggggttacccgggagggccttttttcgtcccgaaaaaataa

SEQ ID NO: 350623 - DNA, 2448 bp, Pseudomonas aeruginosa
atgcaaaatactgtcgtagtgtgtgacgagatacagctaataggagatgagaaccgaggtcagaatgtagaggttcttctcactttgatgaaaaatgccggttggcgccaatttgtcggactttcagccgtgcttttgcagaaagatgccgaggaactcgctaactggttagatgtgaagctacttaaggagcatcgacgcgagaagcatctccgttatgaatgctggagcgggggaaggatagtatcagttagcagctctgatccagatacgattgattcaaaaggacttgctccagtcggtgtcggttccaataccatttcgatcctttccttcctccttaggcagaagaatcctccgttgccaattatagtcttctgcatgaagaagaaagatacttatgatttggcggaagagtttataaggacttattatccaggtaagaaagggcagttgtctcttgagtttgatgcattgcctgagacttcagctaatactcttcttgctcgaacattagagtttcgagttgctagccataatgcggatcttacagatgaggaaagaagtatcgtagagcggtatttgctcgaaggtaaactggatgtagtttttgccactactacattagcggcaggcgtgaattttccgctaggggctgccgtttttgctgactggcagcgatgggatagtgcgcagcgccagtatgtgccgattgaggccgcagattttcataatatggctggacgtgttgggcgaatggggttcgaacacgaagaagggcgggtgatatatttctcaaatggggcctctcaagcgcaggctctgaagtatctttctattggtgatttgccccagattaatagtcgagttacgcctgatcgattcaatcagttggccttacagttgctggcatcaggtttgtgttcgaataggggagagctggaagctttgatttgtaaaactttcagcgcgcttagagaagaagatcgaaatactacgtcgttcgccaagtggccgcaaaaaatctcagaggcggttgatagtctcataggttctggattcgtaatccagaatggggctggtgtgctgagtgttacccctgttgggaaggctgttggatttagtgggttacttccggagacgggaacattccttgttaattatctggcgcgggaagctttgtatcttacaggtcttctagattctttagatcaggtcggaaataaagagcagctggagatgttgttgttttccgcgtgcttgtccagtccagaatttaggccgcagtcaggagttaaacaatctagatttttaccataccctatgcagaaccaaattctctacgatgcagacgctatagccgatcatttgccagagagggtatggcaagtagatccaatgccaattacagcgtcttggttgtgtgagaagtggatagctggtgtcgagattagaagtcttgaacgagagctaaatgcattaagtgcgggtatgcttaatgatatgtttaggaatttgtcctggattttgcagggtttggcagcaattgccatggctgcgggagataagcgtgtccacttgtctctgcgccccgcagcactaaatgtgtctgagaatgtgctgggtgccatatcgaagctgacaagaatcctcagacggttggcgtttagagttcaagagggtctgtctgacgatatactttggatggtagggctttgtccgccaggcgcagaatatcgcttagggcgccatgagatactagcgctaaagaaacatggaattataactcctcagcagctaatgcttggaactatcgaggccgacgcggctcgaaatgctgcattcgcaaaagctaagccaagttctcaagctaagtcaaattgggttagagacgcatgtcgtaactggaagattgatcagaggaagcgagctgcggagaggcatacaaagagagctaataggtgccagaatgctagcttggtggaggagtattactctgccaagggggatgcgtttgaaacggcatttgagaatattctcaaccagttaggagtagcgttcaagcgtctcgatgataagaagaaaactggggctccagattatttgttagaattcaaagattctagtccgatagtggttgagcttaagtcgaaagaaggtgacaagctggtagattataataaagcggtggaagtgctcgctgcttctgaaatacatgggtataaagacgcattctgtgtgacgctttgtcacccaggtgttgatccgagtgtgccacaagctattattccgtgcgggcgattgtgcgttgtcgaaagtggcgatctaggagaggccttacttcgtatttgcgagggggcgctgtccgaaccgcaagcttggcaatggctttgtacgccagggcaggctgttgcagaagacctcccttatcgtacctacgagaaatag

SEQ ID NO: 350624 - DNA, 1392 bp, Pseudomonas aeruginosa
atgtacctttcagaaccggttattaaaaagggcttttttttcactccactagagcccaacaaaaagtaccccggtgtcatgacaatttccgatggaggaaatattgaagtagaactcaccgccgacgactctgcattcacttcttttgacgatatggagatcggtcgtcttataggtatcgtcgaagggggctatttgaccctcgaaggttgtggttacaggaaaaagagcatgtcgttccctggcttacccgccacgtcatatattgatgcaaagatggccttcgtgggtgtagggctagaggaaccaggtgaatttctttcgatgcaatttggtgtggatggcttaagcgaatggtggaatcagtcagccttcaaatttgatataggacgtgacttccaagactttaagttatctgtagaaatcccgccccctgttgagttcctccttccagatggaactcaatttaaaatatccattgatgccagaattccaggtggtagaaagtttcctacttttgaatttttccaccaagctgttattcaattaactcctccagagccgaagccctttgactatttcacaggactatctcatcgaatcacccgcttcttcgcctttttaattggaaacccagtagccattcactcgctttccgcaaaactcaacgacccccaactcgacccgttacatcaatggctacaggtatacttcagaagtttgaataaccccactaaaaaaagagacaagccatttcggtctcttgagatgctcctgccctattcaagcgttgaaagtggcctgcaatccttactatcaaaatggctggaagaatacgagaatcttgggcccgccctacaccattactaccttatccaagatggatcgcaccgttatatcgacaccaaatttatttcaatggcacaggcgctagaagctttccatcgacgtactacagagatgaccagatggccaaaatcagaatataagttgaaggttgaagcgattattgaaagctgcccagacacggacaaagagtggcttaaggaaaaattgaattttggaaatgaagtaacacttgctgaccgtctaagagatatgctcgaaccatactcgtcagtttttggaggcgaagactctgtagccaatatcgtaaagcagaccaaagacacgagaaattaccatgcgcactacgacgaaaaaggggcaagaaaagcgacaaagggagccgcacttgtagctctgacctttagacttcaggttttatttactctttgcatagtggtgcgcttaggcttaaaagtggaggaagctttaaatctcgtcaaaacagaggctttggctcgcttacttaagtcagcaaacaatattgatgaaaacgcgggaaagtga

SEQ ID NO: 350625 - DNA, 561 bp, Pseudomonas aeruginosa
atgaaccggatactcgacattctgattccccgcttcatcaccgagcgggtggcgctgatcgacgcaaacggccaactcgaaatcgcctgcgccctctccaacgtgcggccgaacgagcggttcgatggaatcgccaccatacgatccttcaacctggcgggcttcgccttgttccccaggatggtggacggcccccacccatggccagtgcaactccacccgagcaacaaggactcggcgaatgtgatcaatctcccgccctgcccctggtgcgagggccctccagtcgtgctggtcgctcgcacgttctcaccgttcggaacggtccgggaaatgacgacctacggctgcgagggcctggacgtcgacgcctatgtgttctgccacgaatgcggctgcgaaggcccgaagtgcgaagacgtgatcttcgacgccgaagacttccgccgcgtggaacgcgaaggcgcccgcctctggtctgagcggaccagcaggaaccggcatctattcgactcgaacgcggccgatggccactgcgcctacccgaggagcgcccaatga

SEQ ID NO: 350626 - DNA, 825 bp, Pseudomonas aeruginosa
atgactctccccctccaatacgccttcgaaggtaccgaagtgcgcgtcgtgatgatcagcggcgagccgtggttcgttgccagcgacgtgtgcgcagcactgaacctccccaacactactatggccctgagccggctcgacgccgacgaacaagccctcatttcaattgagggcatctctcgcggtaacaacaaagccaacgtcgtcaacgaaccgggcctgtataccctcgtcctgggcagccgcaagcccgaagccaagcgtttcaagcgctgggtgacccacgaagtgctccctgctattcgccaacacggcgcctatagcccgtccccaattgagcaagaccaaagaggcactgccgcgtcggtagccagcaacatcgaccccgacgcgctggttagcgctggaaaggtattcaacaccctcttccgcacagctcgacatatgggcatgacccgccaaatcgccgccggccgggccagtgaagccgcccaacgctccaccggagttgatctaatcaccgaacttgctcccagcacgtggctgaacagcagcgaactatcgaagctcccacttcgcgtttctcgcgataacactggactccagcagcgtatccatagccatttggaggcgcacggctggccccaagcattcactggtcaacaactgatagaggagcttggcctagttgacgacagagccaatcaatcagcagtcgggaagtgcctgtcggcgctgaattaccgtcgcacccggctttcgacgcaaggccgcccctgggtctacacccgtccgaccgcgttaaaaggaggggatttggcatga

SEQ ID NO: 350627 - DNA, 1284 bp, Pseudomonas aeruginosa
atgtctgtcgtgaaacgtcactggcgccgttttctggtcgccgccctggtgctgatcgtcggtgccgccctgctgctctggagccgaccggcggcccaggcgaaactggaagccctggacctcgacgacggcggccacgccacccttgccgaacccggcgagaagccgcgctcgcgggtggtggtgatcgccgcccccgaacagcaactgaacgacgcccagatgctgaacctggctcacgacagcgccgcccgggtgatccagtacttccccccggaaaacggcgattgcagggcgcagcagtcccggctcgaagcggtcattgcccgcctcggcggcaagccgaacctagtcgccggcatcggcccaggctcgaccaccgcctggcgctggctcgccagccaggacgacgacaaggccaaggcgctctcggtcggcttcgacattgccctggccgagcgcgactgcgacgccccgctgccgcaccaggcgtcgcacggccagtggctgctggcctggaacgacaacccggacgacgacaccgcagtcttcgtccgcaagcagtcgagcgcggaaaccagcatcagcgactacgacaccccgctgtccgacgtgctcgcccatcagttgcgcctgcaactgcaaggcaacgccgaggccctgccggtactcgaggtccccgcggcgaaaccctcggacatcgtcaccctgttctattccggcgacggcggctggcgcgacctggacaaggactctgccgagcatatggccagcatgggctacccggtggtcggcatcgacaccctgcgctactactggcaacacaagagcccggaacagagcgccgccgacctctccaagctgatgcaacactaccgcgagaagtggggcgcgaaacgtttcgtcctggccggctactcgttcggcgctgacatcctgccggcgatctacaaccgcctgcccggaaaggaccagcagcaagtgaaagccatgctgctgctggcgctggcgcggaccggcagcttcgagatcgaagtggaaggctggctgggcaaggccggcgaggaagccgccaccggcccggagatggccaggttgccggcggccaaggtgttctgcatctatggcgccgaagaaaaggacgaaagcggctgtacccaatcccaggccgtcggcgagaagctcgaactgccgggcgggcaccacttcgacgaggactacctgtccctggcgaagaagatgctccaggccatccgcgaccgcgagaacgctcccgacgcctga

SEQ ID NO: 350628 - DNA, 198 bp, Pseudomonas aeruginosa
atggctggagagaacagggatcgcgagcttatcgctaaagcagcggcggaatatgacgttccctttgagttactcgaagagctgctgggagtagccgagaatttcaccggtcatgctgcgtatggggccaagaccgatttttcgcgtcgaatagcacagattctggatagggccgcccagcagcaggcccaatcgtga

SEQ ID NO: 350629 - DNA, 3831 bp, Pseudomonas aeruginosa
atgcaatttgttgctaatgggccagacattcctgatgagctattgcaggctcatgaagaaggtcgagtcgtatttttctgcggtgcaggtatttcctatcccgcagggctgcctggctttaaagggttggtggaacagatatatcagctaactggcacaactctctcagccatcgagcaggaggcattcggccgaggccagttcgatgccacgctcgacttgctggagcggcgcttgccagggcagcgtctcgctgttcggcaagccttagcgcaggttttgaagcccaagttgcgccgccaaggtgcaacagaaacacatgcagccctgttgagattagcccgcagccgcgagggggctttgcgcctcgtgaccaccaacttcgatcgcgtgtttgacacggcagccaaacgcacgggacaagtattccaggcatattccgcgccgatgctacccattcctaagaacagtcgctggaatgggctggtctacctgcacggcctattacccaaaaaggcggatgacactgcattgaatcggctggtgatgaccagcggtgatttcggcctggcatacctcacggaacgctgggcggctcgcttcgtgagcgaactcttccgcaactatgtggtgtgctttgtcgggtacagcatcaatgacccggtgctgcgctacatgatggatgcgctggctgctgaccgaatgctgggtgaaactacgccgcaggcttgggcattgggcgattgtgagccagggcaagaacatggtaagaccatcgagtgggaagctaagggcgttaaacccatcctttacgatgtccccgctggcagttatgaccactcagcgctgcacaagaccttgcacgcttggggggaaacctaccgtgacggcgtgatgggcaaggagcgcatcgtcgtcagtcatgccctagcgcggccatcggccagtacgcgacaagatgattttgttggccggatgttgtgggctctgtctgataaatccggactgccagccaggcagttcgcagacttcaaccccaccccgtcgctagactggcttctagatgcgttctcacaggaccgctatcaacacggtgatctcacccgcttcggtgtgccaccaagcgatgagattgatgccaagctgcgctttagcttagttcgccgtccgacaccatactcgcttgcaccaccaatgatgctggtatccggtggcatctcggcttccaagttggacgccgtcatgtatcaacttgtccgctggttggtgagacatttgaatgatccgcagttgatcatttggatcgtgcaacaaggggggcaactgcatgacagctggcactggctgatcgaggaccggctgaatgagtttgctcgccttgagcgcgagggaaaaacatccgagttggatgaagttcgcagccacgcacccaacgccatacctggaccacagatgcgaaccttgtggcacctgctcctcagcgggcgggtaaagtcgtcgtggcgcgacccggatgtataccgctggaaagagcgcttgaagcgggatgggctgacagcgactttgcgactcgacctccgtgagctacttgcgcccaagattaggttgaaaaagccactccgctggggcgaagagtcccaaatcaccggtgagcccgctcgcatacggcagttagtggactgggacttggtgctggccgccgatgatgttcactcgatgcttcgagaccttacaggcgacggctgggagtcagacttaccgtcattattggaggacttccagaaactgctgcgcgatgcgctagatctgctatgcgcgctaggcgaagctgatgatcgtagcgatcgatctcattgggatctgccatctatcactccgcattggcagaaccgtggcttccgcgactgggtttcgctgatcgagcttctgcgcgatgcatggctggctgttcgcggcgctaatgctgcccaagctacgcggatcgcgcagtcgtggtttgaactcccgtacccaacattcaagcgtctggctttttttgcagccagccaggacggctgcatcgctcccgagcagtgggtggattggctgctgagcgatggagcttggtggctgtgggcatcggacacgatgcgagaggtattccggctgctggttcttcaaggtcaccgattggcgcagcccgaccgggatcggctggaggcggctatcttgagtggcccgctgcgtgagatgtaccgagatgatcttgacccggatcgttggcaaggcttggtcgagcgatctgtgtggttgcatctctccaaactgaacgcgtcagggcttgcgctaagcgctgccgcaacggtgagattggagggcctatctcgtgcttatccgcagtggcaactggcggccaacgagcgtgacgagttctcacattggatgagtggcaccggcgacccggactatgaggacagccgtgaagtcgatattgcgccacacaagcggcacgagctagtgcagtggctcaagcagccactctctgaccagcaccccttctacgaggatacctggcgcgaggtctgtcgaaagcatctattgaacagcctgttcgcgttgagcgacttggcgcaagaaggtgtttggcctgtagaacgatggcgtaaggcgctgcaagtctggagcgaaaagggtcgggtgttgcgatcttggcgctacgccacaccgctgatacagaacatgccggacgctgtactgttggatgttgtgcatagtgtgacgcactggttggaggaagtttccaagtcggtcgaccatcaacatgaggacatcctactgggcctatgccgtcgtgtattgagcctaccgcttgatgctgcctctggcatgacgcgaaatggcgagccactcaacgagcctgttacggaggcgattaatcacccaataggtcacgtcgcacaggttttgctgaacctttggttaaagcgtgagccgagcgacaacgatcagcttccagcaggaatcgaacctttcttcactgagctttgcaatgttcgggtagatcgatttcgccacggcagggtactgcttgggtcgaggctaattgcactcttccgcgtggaccgttcatggaccgagcagcatttgttgccacttttcaattgggcggtcgatgtggcagaggccaaggctgtatgggagggtttcttgtggtcgcctcgtttgtatcggccattgctcatcgcattcaaatcacagttcctcgaaacagcgcgtcactacgccaatttgggtgagcatgcccagcagttcgcggcttttctgacctatgcagcgttaggaccgactgatggctacacgatggaagagttccgagacgcgattgcagcgctgccccaagagggacttcaggaatctgcacaagcgctctcgcaggcccttgaaggggctgctgatcaacgagaggagtactggaggaaccgcattcagccattctggcagcacgtctggccgaaatcgcgagaccttgccaccccccgcattgctgaatctctcgctcgtttgagcattgctgcgggtgctgaattccctgctgccttgagggcagtccaagattggttgcgtccaatcgagcatccgcactacgtcgtgcacagactgcaagagtctggactatgcggccggtatccagtggaagttttgcgattgctgaatgtaatcatcgatgaccagccgtggacaactcgtgaggtggagcaatgcctggaggcaatcgtgcaggcaactccggggcttgcccaggatgcccaatatcgacgactccttgaatattcccgtcggcgaggatggtga

SEQ ID NO: 350630 - DNA, 621 bp, Pseudomonas aeruginosa
gtgggtccaggtgatcttgcggtaggtgaagtgcacgtcttccaggtgggtgaagtgggcgttgcccgggtcctggcagttgtgcatgtagtccttgatgtcgacgatgatcgcgtcttccaggacggtggtgtagtagtgctcctgggtgccggcggcggaggtgcggtaccactggatctcgaccttggtcaggcgctcgccggaggtcagggcggccagcagcagcggcgaggccttgtcgaagaccttggtgatgaccaccggcttgtgcacgcgctggccggtcggctggccggactgcgggtcgcgcgggatgatcacttcgtggttgaagccctggaccatcacctggtcctcgtggccttcctggtaggtgttgccgaccgaatcctcggtgaaggcgccggcggtgatcaggccctgcttggtgccggtgatggacatataggcgggggttgccatggatgctctccttgcgtgagtagaaatcccgcgggttggaccacccctcgggcaacttcacctaacaattctcatgccagtgttttaactatccttataaatcaaacgcatccgacggataattgttatccatgtctcgttttgaatgaaaaataa

SEQ ID NO: 350631 - DNA, 2880 bp, Pseudomonas aeruginosa
atgaccgataacctgaacctcggcgccatcgacctgggcaccgacgacgaattcatcgcccgccatatcggcccgcgtgccgccgacacccaggccatgctccagcgcctgggctacgactcgctggacgcgctgatcggcaacgtgatccccgacagcatcaagggcagcagcgtgctcgacctgccggccggcatgggcgaggccgaggcgctggccagcctgaaggcgatcgccgcgcgcaatcgcgcgttgcgttccttcatcggccagggctactacaactgccacaccccggcaccgatcctgcgcaacctcctggagaacccggcctggtacaccgcctacacgccgtaccagccggaaatctcccagggccgcctggaggcgctgctgaacttccagaccctggtcagcgacctgtccggcctgccgatcgccaacgcctcgatgctcgacgaggcgaccgccgccgccgaggccatgaccttctgcaagcgtctgtcgaagaaccgcaccagccaggcattcttcgcctcccgccattgccacccgcagaccctcgacgtgctgcgcacccgtgccgagccgctgggcatcgaggtggtggtcggcgacgagagcgccatcgaagacttctccgcctacttcggcgcgttgctgcaataccccacctgcgacggcgagatcgtcgactatcgcgaactggtcagccgcttccatgcggtcgatgcgctggtcgcggtggccgccgacctgctggcgctgaccctgctgaccccgccgggcgagttcggcgctgacgtagccatcggcagcgcccagcgcttcggcgtgccgctcggcttcggcggcccgcacgcggcctatttcgccacccgcgacgccttcaagcgggacatgccgggacgcctggtcggcgtctccatcgaccgccacggcaagccggcctaccgcctggccatgcagacccgcgagcagcacatccgccgcgagaaggccaccagcaacatctgcaccgcccaggtactgctggccaacatcgccagcatgttcgccgtctaccacggcccgcagggcctgctgcgcatcgcccggcgcacccaccggctgaccgcgatcctcgccgccggcctggagcgcctgggcgtggccgtcgagcagaagcacttcttcgacaccctgagcctggccaccggcgcgcgtaccgcggcgatccatgccaaggcccgcgccgccgggatcaacctgcgcgagatcgatgccggccgtctcggcctgtcgctcgacgagaccgtccgccaggccgacgtggagaccctctggggcctgctggccgaagagggccaggcgctcccggacttcgccgcccttgccgccagcagcggggaccgcctgccggtcgagctgctgcgccagtcggcgatcctcagccacccgatcttcaaccgccatcactcggaaaccgagctgatgcgctacctgcgcaagctggcggacaaggacctggcgctggaccgcacgatgatcccgctgggctcctgcaccatgaagctgaacgccgccagcgagatgatcccggtgacctgggccgaattcggcaacctgcacccgttcgccccggccgagcagagcgaaggctaccgccagctcaccgacgaactggaggcgatgctctgttccgccaccggctacgacgccgtgtcgttgcagcccaacgccggctcccagggcgagtacgccggcctgctggcgatccgtgcctaccaccagagccgcggcgacagccagcgcgacatctgtctgatcccgtcctccgcccacggtaccaacccggctaccgccagcatggtcggcatgcgcgtggtggtggtggcctgcgacgcgcgcggcaacgtcgacgtcgaggacctgcgcaacaaggccagcgagcacaaggaacgcctggccgcgctgatgatcacctatccgtccacccacggcgtgttcgaggaagcgatccgcgagatctgcgccatcgtccacgactgtggcggccaggtgtacatcgacggcgccaacatgaacgccatggtcggcctgtgcgccccgggcaagttcggtggcgacgtttcccacctgaacctgcacaagaccttctgcatcccccacggcggcggcggcccgggcgtcggcccgatcggcgtgcgcgcgcacctggcgccgttcctccccggccacgctcgcggcgagcgcaaggaaggcgcggtgagcgcggcgccgtacggcagcgcgagcatcctgccgatcacctggatgtacatccgcatgatgggcggcgaaggcctcaagcgcgcctcggaaatggccatcctcaatgccaactacatcgcccatcgcctggaggagcactacccggtgctctacgccggcggcaacggcctggtcgcccacgaatgcatcctcgacctgcgtccgctcaaggacagcagcgggatcagcgtcgacgacgtggccaagcgcctgatggacttcggcttccatgcgccgaccatgtccttcccggtggccggcacgctgatgatcgagcccaccgagagcgagtcgaaggccgagctggatcgtttctgcgacgcgatgatccgcatccgcgaggaaatccgcgcggtggaacgcggcgagctggacaaggaagacaacccgctgaagaacgcgccgcacaccgccgccgaactgctcggcgaatggaaccacacctacagccgcgagcaggccgcctatccgctggccagcctggtggaggccaagtactggccgccggtgggccgcgtcgacaacgtctacggcgaccgcaacctgacctgctcctgcccgcccatcgaggcgtacagcgaggagtga

SEQ ID NO: 350632 - DNA, 909 bp, Pseudomonas aeruginosa
  misc_feature (51)..(60): n is a, c, g, or t
atgtggcgggcgccgatttcctcgggagcgatgcgccaggcgggtttcggnnnnnnnnnnccaggcggttttcggcgcttcgcggtagaagcccagcagcgactcgatgctgcgtcgggacatcatttcatcgtcggtgaacgacagcgacacgatgggcgtgcgtacggcggagaaggcgcggcggatagcctcgccatccgcgagggcgtactgcggatgcaggcaccagcgtcgccattgttcgatcaccccgcgcggcaggtcgccgaccatgcccaggcggcgcccgggaaaatagccgagcagcggcgtcagcaggggcgcgacgaggtaccagaacaaccagaccttgttgcgcaaccgcgggctgttttccttccagtagccactgccgctggcgatgctgaagaccctctcgatacgctcgcgcccttcgacgaagggcaggatctggccgcccaggctatggccgatccagtacaggggcttgctcccgctctcggcgagcgcggcggcgagcatggcgctgcagtcatgacgggcccaacccagcacatcgacctcgagaccgcgcagcgagccgttgcgcgattgccccatgcccaggtagtcgaaggtgatggccaggtagccgcgctctgccagccaggcggcgaagggcgcgtagaaccgctgttccacgcccatcgccgggacgatcaggagatagccgcgcggctccccggcaggccggtaccaatggctggccagcggatggccgttgccgttatcgatgaggcgtggttgcggagggttcatgccggtctccgtggtctgttcgcggcttcgagaatagggctggtcgccagggcgcctccagccggccgaaagcacggccggggcgccctggcggtcaggcctggctga

SEQ ID NO: 350633 - DNA, 840 bp, Pseudomonas aeruginosa; identical to SEQ ID NO: 6027

SEQ ID NO: 350634 - DNA, 501 bp, Pseudomonas aeruginosa; identical to SEQ ID NO: 83644

SEQ ID NO: 350635 - DNA, 993 bp, Pseudomonas aeruginosa; identical to SEQ ID NO: 96021

SEQ ID NO: 350636 - DNA, 1680 bp, Pseudomonas aeruginosa; identical to SEQ ID NO: 10332

SEQ ID NO: 350637 - DNA, 207 bp, Pseudomonas aeruginosa
atgcaaaagatgaaacaactgatggttcgtggcggtgtcgttctcggctcgttgggtctgctggctggtcaggcgatggcggaagttccggctggagctacttcggcgttgaacgaggccaaggctgatggtgttgccattggcggtgtcgtcctgggcgtcatcatcgcgattgcggcgttcaagtacattcgtcgcgcactctaa

SEQ ID NO: 350638 - DNA, 657 bp, Pseudomonas aeruginosa; identical to SEQ ID NO: 328350

SEQ ID NO: 350639 - DNA, 951 bp, Pseudomonas aeruginosa; identical to SEQ ID NO: 340786

SEQ ID NO: 350640 - DNA, 225 bp, Pseudomonas aeruginosa
atggagatcgtcacccttgtccaaatcagcttgaaccgcataggaacagccagcggcgtcgggggcggcttcaggcctaccctgtcgcgcgtggtgtttgcagaagctaaagatgcggaaattcagactttgcgcgacgtggttatcaaggcagccggggagaacggagaggcgggagcgctcgatgatctcaagcaccggccatcctatggaccaggggtatag

SEQ ID NO: 350641 - DNA, 1668 bp, Pseudomonas aeruginosa
atggacaagcaaagctcgacgaacaacgatgtgatttctgtattggaggtatgggaggccatcggccacgacggcggcgtgagcccaagcaagggcgaattgctggagtctcttcgcaacatggcggcgatttgcgatgcgcacggcaatgacatgcctgctcagtcagcgatcgatcagcgcaaggttattgcagatgccatcaccggcgcattagcgttcggcgcgctggcaagccggccgcccgcgaaggatcactggcttcgtccgttctacgacctcggcgcggccgagggacagcgtacccgtgacctggcgatgcttgtgcgtatgctagccagtaccctgaagcgacacgctccggacagtagtctcgtggagcgcgcggcaaactacctggctgccaagggtctggtcggtactccattgcgcagcactccggaaccggaaaagcagggagatggagatgagcgggcggagctgccggaggtggtggcctatgccgatccggtagcgttcgccaggttcaaggaacgcggccatgagggcggcgtggcaggacgagagtggatgtgggcggaaccgactcccggtctcgttgcgatgagccgaactgatgagtgcgagcgcatcatcggtgcgctgatcagcaaactcgacgctctgttgcaggcggtgcagtacaagaccggaatttgggcagacaacgaatcgtttgcagctgtgatcaaggaagtttcaccgatgcgccaagcgatggcggacgccagaggtgaggtgcaaaatctggcgagcgctctatgggaagtgaaggaagagcgcgacgccgccctggccgagatcgcgcagctggagaaaaagctggcgatggcactcgacgccgcttccaagggtgatgccgcgcgccatgcggcctgcggcatggaaatggagattcgggagctgaaagccaagctggccgagttggagaagcaggagccactgctacatatcaaccctcttgtggtggacgagttgttgggacgggcaaagcgctcgcctggtggccttacttggtcgaagggacggtgcgggtcttggacgctccctctctacgccgcccctgtggcccaggctcagcacagcgatcaatcggaactgcgccgaattgcagtcgcactcacgaacccactgctgaacggccaagaggcctcggacctgatggtgcgttacgaggcgttgaccatgcctgatcacatcatcgcgctgattgacagccaggctcagtacattgcgcctgatgaactacgcgcaatctgcatgctcgttgcggaagccggaatcaagtacgggcgcggccgtgatagggcggtcgcatcagacgagtgtcgagaggtagttgattccgttcttcctcttgagccatctccgagcaactctgagcaacactgcgagccggaaatcatggcggtagccgaaggggtgctgaccttcatgcgcagcgagaaagaaggttcgcactgcacctgctgcaacggcccgcacatcttctgccgctacttcgagggaatgtctgacttcgatgacatcactcgaaaagcaaggtttcgaaacgatcttgaagggcgaaccttccgcctggtgcttgaactgctgccagcggccttgtccggcaaggagggggtgtga

SEQ ID NO: 350642 - DNA, 276 bp, Pseudomonas aeruginosa
atgcgtaacgcccttatctataccgccgcacttgcctccgcaataacgtttggtacggcttccgttgctattgccgaggcgtccaaggataccgccaagagcggttccgagatgatgatgggagaaggcatgcacatgatggacggcaataaaatgccaatgatgggaatgatgcaggagatgaattcaatgatgaagaactgcaacgaaatgatggaaaacatgaacaagcagatgagtaaggaggcgggtcaaggcgacagcaaggcgcagtaa

SEQ ID NO: 350643 - DNA, 285 bp, Pseudomonas aeruginosa
atgatcaagaacacgacgctttacctaaaaggcttgttgcagcaccacccactgattgcgggacttgcggttgccgtagcgttcactctgctgtttaacctgggcggcctgtttgctgtagccaccctgcctgttctgctttctgttctgccgtgcctggtgatggtctggctctgcatgaagagcatgggtggcgagacctgcaaacaagaagttccagagcaatcatcgctaacccgaatgaacgaaaccactgttgtcgatcaggagaaccgccatgcgtaa

SEQ ID NO: 350644 - DNA, 435 bp, Pseudomonas aeruginosa; identical to SEQ ID NO: 339293

SEQ ID NO: 350645 - DNA, 723 bp, Pseudomonas aeruginosa
gtggcaacacccagttcgctggcggtgccgtggttgatccctggtggagtgattccagtggaatcacccagctcgccggcggcaccgaggtcggctcctgctggactgttgccagtggcaacacccagttcactggcggtgccgtggttgatccctggtggagtgattccagtggaatcacccagctcgccggcggcaccgaggtcggctcctgctggagtgttgccagtggcaacacccagttcgctggcggtgccgtggttgatccctggtggagtgattccagtggaatcacccagctcgccggcggcaccgaggtcggctcctgctggagtgttgccagtggcaacacccagttcgctggcggtgccgtggttgatccctgctggagtgttgccagtggcatcacccagctcgccggcggcaccgaggtcggctcctgctggactgttgccagtggcaacacccagttcactggcggcgccatggttgattcttagcgaagtgttgctagtggcaacacccagtccgccggcggcgccgtggttgatccttggtggagtgttgcgggccgcaacactaaaaaaacacgacgcccgaccgagactttctcatggcttatcaccccgctcggatggcacgctcgatccgtgtctgggccgaatgaggtccttgagccggctgaggacctcgctccctgtccgggtatcaccccgcatttga

SEQ ID NO: 350646 - DNA, 264 bp, Pseudomonas aeruginosa; identical to SEQ ID NO: 342486

SEQ ID NO: 350647 - DNA, 867 bp, Pseudomonas aeruginosa
atgaatatacaagtgaagatgcgcggaataaaacttgagctcccctctcatgttttggttctactatctattacatctgtccagattgggacagcaattgctattataatgtttcatgccgttcccgctgggggggcagccttttttaatgcgtttttctcaacattgatgcttggtcttttttctctgaaatacaaactgccaaaaacattcagagcttgggtagcagccttcgtttttggtgtaatgatatcgggaatgtttctgacgttcttctatgctgtagaacgcatacctatggctattgcttctactatagagtttatggggccattgtctttatcagtcataatgtcacgcaggccaattcattttatattcattgggatggcgattctagggatcgcattagcctcgcctaatttcgactcatcattggataagctcggcctactatttgcggttctatctgcagtattttgggcagcattcgttctcctctctcccgttatatctcgcctcttcgagggcgagtctggactaatggcaggaatggccttcgcaagtctgctaacatttccattctttcttagtcagacagacaatgtagtattgtcgccatcagtgatatttgcagagttcttgatggccgcattttctactgtcttgccactttccttagagtactttgcacttagaaatatgagcgctcggactttcggagtgctcgtttctctagaacctgttgcagcaaccttaataggattcttgctattgtctcagcccttgaaatcaataatgcttatttcaattctggccgtaactattgcggcaattggaataagcttaaccgaaaagtctaaatag

SEQ ID NO: 350648 - DNA, 681 bp, Pseudomonas aeruginosa; identical to SEQ ID NO: 336068

SEQ ID NO: 350649 - DNA, 2571 bp, Pseudomonas aeruginosa
atggatgttctgactagccacagcagcccgctgatcatcgcgtctgtgcaaggcgttgcctgcaatggaactgtgggcatgactctttgccctggcaagcagcaacccaacgcgctctcgggagccttccagcgcgacctttctcttgatctagacagggttcagtcgtggggcgctgcagctgttgtgaccctaatgtcgcaggacgagctctccgctttgaaggtcgctcagcttggtgatgaagtcgaaaaccggggaatgctctggtttcagctgccagtagccaatcaccatcttcctgatgcagatttcgagcggcagtgggtatatgccggtgttcggctgcgcggcctactgagggcaggcaaaaaggtgcttgtgcattgcggtagtggtctcggtcgtacgggagtcatcgccgctcggttgctcgtggaattgggcgactcaaatcagcaagcgattgcaaaagtgcgtgaggcccggtcaggggctctgcaggagagcgcgcacgtgcagtacctggagcactgccaattggcctccaatgacgcgtggctagatcgggtgcttggctgtctgctgggtggtgctgtgggcgatgcattcggctacgcagttgaattcgactcgcttgcaaagatccgcgagtgcttcggcgagcaaggactgactcggcctgtctttcaggacggcaaactggtggtcagcgatgacacccagatgaccttgttcacactagaaggaatcctgcgcagtacggatgtgaacggtgagcccacttcctccgtattgctggatgaggttcgccacgcctaccttgactggtatgacacccagctaggtaagcaatctgcttcttcagttttgcatggccgcctagcggcgaggcctgcgttgagggttaagcgcgctccagggaacacctgcctgtcagccctcaaatcgggggggcagggcagcatcgagcgccgaatcaatcagtcgaaaggctgtggtggcgtgatgcgcacggcaccgctgggcttccttcaggacgttgattggttcgatctaggtgctcgggttgctgctttgacgcatgggcacgtcgagggttgggctccggcaggtattcttccgcgcatcgtcgccagactgatcaagggcgaagaaaagtttctggcggtaagaaatggattcagcgacgcctgcgagtgggggcatgtctacggtgagtcggcgggtactgagcgatacctactggctcgaaagcttgcacggaaaatgcgcttcaacgcgcacgaagccattcgccagcttggccagggttgggtcggtgacgaggctctggccattgccatgtacgctttcctctcggctcgtagttacaccgatgcgattggcagggccaccaatcatgatggtgatagcgactccactgcttccatagcgggccagctatggggggctcaacacggcgttagtgacatcccgcatgcctggattcgtcgtctcgatgtgcttgatgaggttctattgctggttcagcagatgcagtcctggcggcgtcttgtcggaagcgatagctacggtcagcctacagtgtctgccgaaatcgagccctgtatacgcttgatcgagatgactcatgagcttcatacgctgggctatcaacagattcgcattttcccctacatggcaccgtccggatgctcttggcgggtggagtgggctcctgccagtgctttccgttcttctgtagagccgcccagcgtcgagtcggagcgtgagcttgtgcgatatagcagcggctctggctggaagccctttgagtggcaaggtgtgcaggagctgacggctctgaatatggcgcagcagttcgtgcggcagtttcccgaactggctcgttctggccagggggatgattggtgctatgccggttggctagcgcgtctgcttggcgaggttcgacgcggacgactgccctacatgttggcggattggccgatagatctcgcacgtggagtgccgatgacctctggtgatccttttcctctgccgccgaccttgggtcgcgagccagagtttggccataaccccgaggatgatttggctgatgaggagcttctttcggaagggctgtttgagcaagctgagtccccggtagaccatgttgacgatgagcccactccggatcagttcgatttcacagatctgtatggccgcacccatggactggttgctttctaccatcagggcgctccgtacctgctacaggtcacgcagttgatctggcaacagctccctgcgcctcgcgaagagtcatctagtcaattgtgtttgctcgcagggtggccaggtgaaggcaaacttggcgtgcacaacttgcttgaaaactatctgaaggtagcggaccaagcgtgcgaaatggccgctgaggccactgatcaagactggaaaagcgaaagtggagtactggactggagcaaggttgagcacacctttgccgagatggataaggcattgctggcgactgcatttcaactcagtcaactgatcgagcacatagcccaagcagcaggttga

SEQ ID NO: 350650 - DNA, 765 bp, Pseudomonas aeruginosa
gtgaggcagacgctgcgccagggcgcgctaggcgtcgccgggctgttgacgctgttcgccctgtggtggctcggcgtggccctgttcggcgccgccgacggcctttcggcacgcttctcgccgcaggcgacgttgctcagcctgggtgaactgctggaacgccgcgaactctacgagcacgtgctggtgagcctgaaacgggtcctgctgggcttgttcctggcgctgctggtgggagtgccgctggggctgctggtgggcgcctcgcgcaacctggaagcggcgaccactccggcgtttcagttcctgcggatgatctcgccgctgtcgtggatgcccatcgcggtgatgctgatgggcgtgggcgaccagccgatctatttcctgctggccttcgccgcgctctggccgatcctgctgaataccgccgccggcgtgcgccagctcgacccgcgctggctgcaactgagccgcagcctcgccgccacgccctgggaaaccctgcgccgggtgatcctgccgggtatcctcggccatgtgctgaccggcgtgcgcctggccatcggcatcctctggatcgtcctggtgccctgcgagatgcttggcgtcagcgccgggctcggctactacatcctcgacacccgcgaccgcctggcgtactccgagctgatggcgatggtgctgctgatcggcctgctcggctacctgctcgacgcggcggcgcgcggactctaccggcgctgggcgcacggggcgctcgggtag

SEQ ID NO: 350651 - DNA, 1857 bp, Pseudomonas aeruginosa; identical to SEQ ID NO: 329583

SEQ ID NO: 350652 - DNA, 1836 bp, Pseudomonas aeruginosa
gtgaccttcgaggcggtgaaggacctgcaccaggagagccatgagaagagcaagggcgacctggcgtggaacagcgccaaggggaaggggcagaccgatgaaacgcttcggcagacccagatcgtcgctcagggaaatctggcgatcaaagcagcggacgggctgaagatcgatgtgaagcatatcgaccagaagaccgtttccgagaccatcgatgtcatggtcaaggccgatccgagcctcgcctggttgcgggaggccgaaaaacagggtgacgtcgattggcgcaaagtccgggaagtacatgacagcttcaagtacagccattcggggttgggcgctggcgcggcattggccatcgccattgtggttacctacctgacctggggtgcgggtagttcgatggcaggcgtcgcggccaaaagcgcaacaggtgtcgctgccaactccgtcgccagtgccgtagccaccaacgcggcgatcagcacggtgaataaccgcggcaaccttggcgcggtggcgaaagacgtgacctccagcgacagcctgaagggctacgcggtcgccggtatcagcggcggcttcatgcccagcagtctgggtgcccagcttgccgttcgctccgcgctgaacaccgtggtgaacggtggcaagttcagggacaacgtcgcgcaagctgccatcagtatggcggcggacgcgctaagcggcgcgatcttcgacaaggtcggagatgcgttggtcggcagcggccttcccaagaaggtagcggtccatgcgattgtcggcgggttgatcggcgaggctgccggcggcgatttccgtaccgcagccctggctgctggcgccaacgaggcattggtaagcctcgtcggtgaaaagatcttccctggcgaggctcatgagcgcgtgctggcgatgacctcgcagttgatagggatgacagtggctgcggcggccggaggcgataccaaggcccaagagaaagccgcctgggtggctcagcaggccacggtgtacaacaacctgaatcacgcggcggcggagagcctgctcaaggagatcaaggattgtcgcgcggcaggcggctgtggcgaggagaagttgcaaggcatcctcggcaagtacgaaaagctgtcggccgagcgttcaaacgctatcggccagtgtgcttcgcgccagtgtgtggacgacatcgtcgacagttcgatccggatggacgatccggtttccaaagagctgctcagcctactgcggcaaaccacctacgatacacccggcttgttgcagggcaatcctgatgcgatcgtgtcgcagacgccgaatccaagtggctggggagatctctttgccctggacaagcaactggcgttcgccaagaacctcaaggaaggctggctgacaccggaggaaacggctgatctggatcgctggaatgcgtccacttcctggctggatcgcactgctggccgacaactggatcccaaggagaaggcttacctgctctcggagctggggggcgcggcggctatggcgcttcttggggggagggggagtgttgggagtggagcaggtggaataaggaacacatattcttcaataaaagaggctcctaaatacccccagggatttaaagatattaagaatggtacgcagaaatataagattaacaatcaagatgttttggaaagtttgagaggtgtagagccaggtaagtgggttaaggtgtatagggatggtttcgattctgctgggaataaaatttctgtacactactttcaaagtcaaagtggcaaagtttttgatgtgaaggttaaatcgggttggagtaactga

SEQ ID NO: 350653 - DNA, 138 bp, Pseudomonas aeruginosa
atgtcgcgtccggcctggacgttcaggctgttcgccgcctccacccgcgcggcgctgtcggcgaagctgcgctcccaggtgcggccctggatcagcgcaccgttgggtgccagccgaccctccgcctgggccaggtag

SEQ ID NO: 350654 - DNA, 225 bp, Pseudomonas aeruginosa
atggatgtggaagaaacccccttcgagatgccggacctctcaagccccccgccaatgatgccctggagagactttgccaactggatacgtatgggtgactgccatgacgttgtctggggctggattcgcaatggctacattccgtcccagaagtacggcaaacacatgatggtcaacctgaccgcgctgaatagccaactgctggagaaaggagaacgaatgtga

SEQ ID NO: 350655 - DNA, 546 bp, Pseudomonas aeruginosa
gtgccgaagcggccccccccgccgccgccctcggcggaagccctggctgagtggcggcagcattgcgccgagttgctccgcgagcccagcccgttcagcaacgtggtgcagctcaccgcctgtgcccgcgatgcgctgcgcgcctgcggcctgcaaaggatgctgctgctggtggccgatcgcacccaggtacacgtgctggcgcagcagagcgccggactcgaaccgggccaggagaaattgcaactggagattgccagcagcccgctgctgaagaaactgttccagcaacccgccctgctgcgcatcggcccgaacaaccaggaccagttgctgccggccctcggcgaacccttgcgccaactgttccccgggcctcacctgctgctgcgctcgctgggcaacggctcgcgggtggtgatgctggtcctggccgacctcggcggccagccgttcagcgacctgcatgcccaggccttcgccaagaccgcccagtgcaccgagcgcgcgatccagcagttcggccgccagcgccgcacggaatga

SEQ ID NO: 350656 - DNA, 1227 bp, Pseudomonas aeruginosa
atgaccgccaccagcgacctgatcgagtcactgatttcctatagctgggacgactggcaggtgacccgccaggaagcccgccgggtgatcgccgcgatccgcaacgacaacgtgcccgatgcgaccatcgccgcactcgacaagagcggctcgctgatcaagctgttccagcgggtgggcccgccggaactggcgcgctcgctgatcgccagcatcgccgggcgcaccaccatgcagcgctaccaggcacgcaatgccttgatccgcagcctgatcaacaatcccctgggcacccagaccgacaactggatctacttccccaccatcaccttcttcgacatctgcgccgacctcgccgacgccgctggccgcctgggcttcgccgcggccggcgccaccggggtggccagccaggcgatccagggtccgttcagcggggtcggcgccaccggcgtcaatccgaccgacctgccgtccattgccttcggcgaccagctcaagctgctcaacaaggacccggcgaccgtcaccaagtacagcaacccgctcggcgacctgggcgcctacctgagccagctttcgccgcaagacaagctgaaccaggcacagacgctggtcggccagccgatcagcacgctgttccccgacgcctatccgggcaacccgccgtcgcgggccaaggtcatgtccgcggccgcgcgcaagtacgacctgacgccgcaactgatcggcgcgatcatcctcgccgagcagcgtgaccagacccgcgacgaagacgccaaggactatcaggcggcagtcagcatcaagagcgccaacacctccatcggcctcggccaggtggtggtctccaccgcgatcaagtacgagctgttcaccgacctgctcggccagccggtgcgccgcggtctgtcgcgcaaggcggtcgccaccctgctggcttccgacgaattcaacatcttcgccaccgcccgttacatccgctacgtcgccaacctcgcgtcgcaacaggacctgcgcaagttgccgaagacccgcggcgcatttccctccatcgatctccgcgcctacgccggcaatccgcgcaactggccgcgggacaatgtccgcgcgctggcctcggaatacacctcgcggccctgggacgacaacctgtcgccgggctggccgatgttcgtcgacgatgcctacgccaccttcctcgaccctggaatgaggttcccatga

SEQ ID NO: 350657 - DNA, 1329 bp, Pseudomonas aeruginosa
atgagcctcacagtcatcacggaagaacggaacatcgccaacgcgctcatctcgggccttgccaacatggccgagacgccgacgcgcgagcaggtggaggagaaggcgagacagatcgccgcgatcttcggctatacgggtgatctccgcaatatcgtcaccgaggcgatgatctcggtcgacacgcgcatgggtgccggtgtttcgctggtggatgtcactgcgaagcatgatgatcagtgggtccacaagcgtgaggatgtcgcctggacctatgcggaatcctatggaaactttcttctcaaggaaggttggccaccgcagatggtccagtcgctgagcgatgtgacgacccgcattctcggccacctgcaggacccgttgagcgagggcacaacttggaaccgtcgcggacttgtcatcggtcatgtgcagtcgggcaagacggccaactacaccggcctgatagcacgcgccgccgacgctggctacaagttcatcatcgtcgtcgccggcattcacaacaatctgcgcaagcagacgcagcagcgcatcgatgaggctttcatcggccgatccagcgatcccgaggatcgtcgcaacatcggtgtcggcctcgcgccgggctatccgcatccggccaccctcaccaacatcaacgaggacttcaacaagaacacggcggaaaagagcggctggaagatcaacgacttcagcaagccgatcattctggtcatcaagaagaacgtcacgacgctcacggctcttcacaagtggctgaaggagctgaacgccgagggcgatggccggatttccgacgtgccgatgctgctgattgacgacgaggccgacaacgcgtcgatcaacacgaacaaggaggatctggatccgacccgaacgaatgcgatgatccggcgcatcctcgggctgttcgcgaaatcgtgctatgtcggctacacggcgacaccgttcgccaacatcttcatcaaccccgacgcctatggcgatgatgtgcgtgaggagctgttcccgcgcgacttcatctattgcctggacgcgccaacgacgtacttcggtgccgagaaggtgttcctcgacgaggcgaccagtcaatcgatcgtgaggccgatcgacgattgcgaggatctcatcccgtacgcccacaagcgtgacgatcccgtccacgagttgcccccccagcctctatcgcgcactcgacgaattcatcgtcgcccgcgccatccggaacctgcgtgggcagaccagcaagcattgctcaatgatggtcaatgtgtcgcgcttcgtgcccgttcagaaggccgtgcgtga

SEQ ID NO: 350658 - DNA, 540 bp, Pseudomonas aeruginosa; identical to SEQ ID NO: 322840

SEQ ID NO: 350659 - DNA, 375 bp, Pseudomonas aeruginosa; identical to SEQ ID NO: 324754

SEQ ID NO: 350660 - DNA, 237 bp, Pseudomonas aeruginosa
atgaagtctggcttcgacttttactttggcggtcgagttagctcccgccaggaaatgcaacagcgcctgcgcaatctcagaactgagggcagcgttatggatgatctggagaaagttctttcgtccagaactccggttgaacaagtccaggccgctgaggatttcaataaggcgaatcgttctaagttgattagcaacaagaaaggcactctttatttgggggatgtattcgaatga

SEQ ID NO: 350661 - DNA, 303 bp, Pseudomonas aeruginosa
atgaagtcaacaggccgcaatccatttcaggtcttccgtgaccaatgggccatcatgagtttttacgagcgcttcgagcaggtcgtcgcgctcgtgctgtcggcggtgattgccgtcatcatcgtggtgtcgctgttccagctcatctccatcgtcttcacgctgctggttctcgatgccttcaatcccctggatcacaaggtattccagagtgtgttcggcatgatcatgacgctcttgatcgcgatggagttcaagcattccatcgtgcgcgtggcgctgcgtcgggacagcatcatctag

SEQ ID NO: 350662 - DNA, 225 bp, Pseudomonas aeruginosa; identical to SEQ ID NO: 326796

SEQ ID NO: 350663 - DNA, 183 bp, Pseudomonas aeruginosa; identical to SEQ ID NO: 341360

SEQ ID NO: 350664 - DNA, 162 bp, Pseudomonas aeruginosa
atgttgcgccagaaggtatcggccatggccgagcccagcggcagggcggcgatgaccagggtggcggcggcgagtttgacggaacgcatgggggaactcctgatagggggctgcgtgttacatcagatcgcgtttgccgtcccggagttccagcggggatga

SEQ ID NO: 350665 - DNA, 540 bp, Pseudomonas aeruginosa; identical to SEQ ID NO: 322840

SEQ ID NO: 350666 - DNA, 558 bp, Pseudomonas aeruginosa
atgaaattcaccctccgccagctcgaggtgttcgtcgccgtggcccagcaggagagcgtctcccgtgccgccgaggggctgtcgctgtcgcagtcggcgaccagcacctcgctcggcgagctggagcggcagttcgactgcaagctgttcgaccgcgccggcaagcgcctgaccctcaatgccctcggccgccaactgctgccgcaggcggtggcgctgctcgaccgcggcgaggaaatcgagaacctgctcaacggcaagaccgccttcggctccctcgacctcggcgccaccctgaccatcggcaactacctggccacgctgctgatcggcgccttcatgcagcgccagccggactgccgggtgcgcctgcacgtgcacaacaccgcccaggtggtgcagcaggtcgcccactacgagctggacctgggcctgatcgagggcgactgccggcatccggacatcgaggtgcaaccctggatggaggacgaactggtggtgttctgcgcccccagcatccgctggcgcggcggggcggcgccgacctggaacggctga

SEQ ID NO: 350667 - DNA, 2079 bp, Pseudomonas aeruginosa; identical to SEQ ID NO: 324704

SEQ ID NO: 350668 - DNA, 1803 bp, Pseudomonas aeruginosa
gtgcctgttcgacgcgcgcggggaaaaggagatcgagcgcatcgaattgcccgagtacaccgacgagatctggcacggctacctgcccgacgcccacccggggcagatctacggctaccgggtgcacggtccctacgagccggatgccggccaccgcttcaatcccaacaaattgctcctcgatccctacgccaagcagttggtcggccgcctgcgctggtccgaggcgctgttcggctacaccatcggctcggccgacgccgacctcagcttcgacgagcgcgacagcgcgcccttcgtgcccaagtcgaaggtcatcgatccggccttcacctgggccgagcgtccgccggtacgcgtcccctgggaccgcacggtgatctacgaagcccacctgcgcggcctcagcatgcgccatccgcaggtcccggaggcggttcgcgggaccttcgccgggctgatgaacgccgacctgctggcgcacatccgccggctcggggtgaccagcgtcgagctgctgccgatccacggtttcgtcgacgacaagcacctgctggaaaacggtatgagcaattactggggctacaacagcatcgccttcttcgccccgcacccggcctacctcgccagcggccaggtcaacgagttcaaggagatggtcgcgcacctccacgacgccggactggagctgatcctcgacgtggtctacaaccacaccgcggaaggcaacgagctgggtccgaccctgtgcatgcgcggcatcgacaacgcctcgtactaccgcctgatgcccgaccagcgccgctactacatcaacgattccggcaccggcaacaccctcgacctcagccacccctgcgtgttgcagatggtcaccgactcgctgcgctactgggccacggagatgcgcgtggacggcttccgcttcgacctggcgaccatcctcggccgccatccggacggtttcgacgagcgccacggcttcctcgtcgcctgccgccaggacccggtgctgagcaagtgcaagctgatcgccgaaccctgggattgcggccccggcggctaccaggtaggcggcttcccgcccggctgggcggaatggaacgaccgtttccgcgattgcgtgcgcgcctactggcgcggcgacgacggcatgctgccggaactggcgcggcgcctaaccgcctccggcgatctctacgaccagcgtggacggcggccctacgcgtcggtgaacttcgtcaccgcccacgacggtttcaccctgcgcgacgtggtttcctacgatcacaagcacaacgaggccaacggcgagaacaacgccgacggcagcgaccacaacctgtcctggaaccacggctgcgagggccccaccgacgacccggagatccgcgccctgcgcctgcgccagatgcgcaacctgctgtccaccctgctgctgtcccagggcaccccgatgctggtcgccggcgacgagttcagccgcacccagcagggcaacaacaatgtctattgccaggacaacgaactgggctggatcgactggcggctggacgacgagggccgttcgctgctggccttcacccagcgcctgctggccctgcgccaacgctatccgatcctgcgcagggggcgcttcctggtcggcgagtacaacgaggcgctgggtgtcaaggacgtcacctggctggcgcccggcggcgaggagatgaccgaggaacactggcacgacgagcacgcccgctgtctcggcgtgctcctcgatggccgcgcgcaacccaccgggatcctgcgcagcggtga

SEQ ID NO: 350669 - DNA, 1440 bp, Pseudomonas aeruginosa
atgacgcaatccgatcagaaagcgccgccgtattacccgaaaagccacttgttggccgccagcggtgttgcagcgctcctcagtttggcactactggtgttcccctcgagcgaagtcgaggccaagaggaccacgctcaatctggagcttgaaagcaacaccgatcgcctccttcaggagaaagacgacctcctgccgcaatcggtcaccaattccagcgacgaaggcacgcctttcgctcaggtagaaggcgcctccgacgacaacaccgccgagcaagactcggacaagccgggcgcatctgtagccgatgccgacaccaagcccgtcgatcccgagtggaagaccatcaccgtcgccagtggcgatacgctgtcgaccgtattcaccaaggcaggcctttccacctcggccatgcacgacatgctgaccagcagcaaggatgccaagcgcttcacccatctgaaggtcggccaggaggtcaagctcaagctcgaccccaaaggagagctgcaggcactgcgagtcaagcagagcgaactcgagaccatcggcctggacaagaccgacaagggctactccttcaaacgcgagaaggcccagatcgacctgcataccgcctatgcccatggccgcatcaccagctcgctgttcgttgccggtcgtaacgccggcctgccctataacctggtcacgtcgctgtcgaacatcttcggctacgacatcgacttcgccctcgatctgcgtgaaggcgacgagttcgacgtgatctacgaacaacacaaggtcaacggcaagcaagtggcgaccggcaatatcctcgccgcccgcttcgtcaaccgtggcaagacctacaccgccgtgcgctataccaacaagcagggcaataccagctactaccgcgccgacggctccagcatgcgcaaggcattcatccgtacgccggtggatttcgcccgtatcagctcgcgcttctccctgggccgccgccacccgatcctgaacaagatccgcgcacacaagggcgtcgactacgcagcccccatcggcacaccgatcaaggccaccggagacggcaagatcctcgaagccggacgcaaggggggctacggcaacgccgtggtgatccagcacggccagcgctatcggaccatctacggacacatgagccgcttcgccaagggtatccgcgccggtaccagcgtgaagcagggccagatcatcggttacgtaggcatgacgggcctggccaccggcccgcacctgcactacgagttccagatcaatggccgtcacgtcgatccgctgagcgccaagctgcccatggcggacccgctcggtggcgcagatcgcaagcgcttcatggcgcagacccagccgatgatcgcgcgcatggatcaggagaagaaaaccctcctggccctgaacaagcagcgctga

SEQ ID NO: 350670 - DNA, 702 bp, Pseudomonas aeruginosa
gtggccgaggccaagccgatcctggccggtatccgcgacgccgcaccggccgcctcgttccgcatcaagggcctcaagctggcccgcgaaccgcaccgctacagcgggcgcaccgccatgcgcgccaacatcagcgtgcacgaaccgcgcaccccgcaggacatcgactcggcgttcgccttctccatggaaggctactccggcagccaggaagaccgtcagcagatcccgttcgcctggtcgccgggctggaactcgccgcaggcctggaacaagttccaggacgaggtcggcggccacctgcgcgccggcgaccccggcgtgcgcctgatcgaaccgaagggcgaaggcctcgactggttccaggccgtgccggtgccgttcagcgccaaggccgacagctggaaggtagtgccgctgtaccacctgttcggtagcgaggaaaacagctcgcgggccgcgccgatccagcagcgcatcccggagacctacgtcgccctgtccaaggaagacgcggaccgcctcggcgtcaacgacggcgcgaccctcggcttccagctcaagggccaggccctgcgcctgccgctgcgcatcgatgaacaactcggcgccggcctgatcggcctgccggtcggcttcgccggcatcccggcggcgatcgccggctgctccgtggaaggtctgcaggaggctgcacaatga

SEQ ID NO: 350671 - DNA, 1020 bp, Pseudomonas aeruginosa; identical to SEQ ID NO: 324557

SEQ ID NO: 350672 - DNA, 1506 bp, Pseudomonas aeruginosa
gtggcggcgcgtcctctcctgctctcgctgcacggtggcgccggcgcgctgttcggcgtgctgctgttcgtggtgctgttcagtggcgcctggagtcttggccacgacgacctgcgcgagtggctgcgggccccggcgcaggcgggaggagaagcccttgcgctggagcgcctgctcgaacgggcgggcgaggaaggcgtcgacatcggcgatgcgaccctgctgctgcccgctcccggccatgccgccttcagcgtctgcgatgcgcgcctggactgccggctggacctcgacccggccagcggccgggtgctgccaccgacgccggcgctggacctcctgctgaacctgcacaagagcctgttcgtcggcttccccgggcgggtgctggtcagcttgttcggcgtatcgctgttgctgctgtgcctggccggcgtgctgctgcacagccgccgctggcgcgacctgcggcgttggcggcgggatcgcgggctgcgcctggcgctgttcgacctgcatggcctgatcggcatctggggactgccctggctgctgttgttcggtttcaccggcgcgctcagcgggctgggcgctctcgggaccctgctgctggcgccggtggcctacccgcaggaaccgaaccgggtgttcgtcgagttgatgggaccgccgccgcccgccgccgaggggcggccattggcgtcccgcatcgatctcgaccgcctgcttgccggcgatgccgtgcgggcgcccggcttcgttgcccagcgtttgagcctcagccatgccggggatgtcgccggcagcgtggagatcgccggtatccagcgtggcctgccgagtaccgcgaacttcgagcggcaccgctatcggctggccgacggcgccctgctcgacgagcgcagctcggcgcagcgcgggttctggctgcgcgccttcatcgccgtgcagccgttgcatttcgcccagtaccagtggctcgggccgggctggtccgccgcgttgcgcggcctgcacctggcgatgggcctcggcgcctgcctgctctgcgccagcggcctgtacctgtggctgcaacgacgcgcctcggcgccggacgcccgcgtacggctcttgcagcgcctgagccagggtttctgtgccggcctggtggcggcggccgcgttgctcctgctggggctgcaactcgccccctcggagctactcgccggaccctggccggggcggctgttccttgtcctgtgggccgccgctggcctggcggcgttgctgctgccgggcgactggccgctggcgcgcgggttgctcggcgtcgccgggttggcctgcctggcggccgccgtcgcgcacctggcgccctggctcatgcgcggccggctgccggccctgggccccgacctcaccttgatcctctgcggcgcgctgctcatccggcacgcctggatgcaggcgcgcgccgccgcgccacccgcccacccccgtgtcaccggagaccaccatgcttga

SEQ ID NO: 350673 - DNA, 3579 bp, Pseudomonas aeruginosa; identical to SEQ ID NO: 350620

SEQ ID NO: 350674 - DNA, 339 bp, Pseudomonas aeruginosa
atgctgatcaaacttcccgactttgacgacgatctggccgagcggctgaagagtcgtactggccagaacactggctccaaggctgtgctgcgtgctgctgaggagtatttgcctcttctgctgaagctggaacatcgcgaccggcagattgccgagcttgaagagcggttgcgagtggcaagtcaggtgatcgagggcgctcgctcggctgctgcgctgctgcttgaaaagaccgctcagggcgatttgctcgccgctccggcatcaagcaagccgcgcatgaccggtgaagagatgttgaacgaactgcgccgcagtgcgggcttgcgtcagcgttga

SEQ ID NO: 350675 - DNA, 627 bp, Pseudomonas aeruginosa
atgacgcagatgcatgcattcaaatttgttgatctctttgccggattgggtggttttcatctggcgttagctcgtatgggggggcagtgtgtgtttgctgctgagtggaaggagcatttgcgggatctttatgagacgaaccacggtttgaaacctgctggcgacattactcttgtccagccgaaggatgttcccgaccatgatgtcttaactgctgggttcccttgccagcccttttcaaaggcaggagaacagcttggctttgagtgtaccgagcagggcaatttgttcttcaatgttgctgcgattctgaaagagaagaagccgacctattttatcctcgaaaatgtaccgaacctgttaaaacacgatggggggcgcacttgggaggaaattcagaagatcttgggggctggtgaagaggggctaggttacaatatacgagctgagcgtctttctccacaccactttgggattccgcagattcgtgagcgtgtgtacatcgtagggtcgctgttgtcgctcgatgattttgtgtggcctgagaaaagtaatgctgagaccaatatcagtacagtgcctgtctcttatacacatctgacgctgccgacgatatgcagtgtgtag

SEQ ID NO: 350676 - DNA, 312 bp, Pseudomonas aeruginosa
atgccgttactgattggggtactactgcgggccatcggctggtcgctgatcccgctgggttggaagctgctgcgcggcttggggttcaccgctgttgccttcgtcggcgtcaaagcggtgatggatcaggccaaggactacgtgttcagcagtctcggcggcgtgcctgcgcagtggctccaggtcctggggcttctgcaagttgacgtgtgtatcaacatcctgttctccgcgtacatcgcccgcgccgtgctgtggggtatggacaagtctggcggcaagtccggcatgcgctggaccgggccgaagtaa

SEQ ID NO: 350677 - DNA, 2457 bp, Pseudomonas aeruginosa
atggaaagtccacacgatgtagcgattcgtatttccaagatggatagcagtgatagagttttcaatgaagctgatacaagacataaaataatcgatcaaatcctgcacggggtcctcagttggcctgtaagtcaaactatgcacgagagctacatatcaccaggcttcgcagactaccgactcaaacgaagcaacggcgatgacttactttttctcgaagcaaaaaaagaaggtgtgtatttttcaatccccaaaacctttaacagtaacaaaacacaccaacacgttacgatccaaactcttttgaccgatgcaaacatcagggcagcaatagagcaggtaagagaatactgcatggaagaaggatgcagttttgcaggaattaccaatgggcacgagtggatcttcttcaaaaccttcgaggcaggaaagaactggcgcaacctgaaggcattagtaatacatggtaacaaatattttgctgagtgctttactgaggcaactaacatcttgggctacagctcaatcaaggaaggatcattaaaaacctctctcggaagtataaacaggaataatagagaaattttttaccctaaggataaaatctcatcttatgatcacgaggttaattcaaatgggtacgcccgggaactccgcccccttgcgaataaatattttggcagtatagatgtatctgaaccagtattcatggacgcatgctatgtcagccaacgtgactatgaaaacgcgttctccaattttagattaatcatcaaagactccctcaccccttacatggctgatcgtggcatccaacattccgatgacaatgagaaaggcggatcatttggaaatagaatcgcgaaaagcttaaaagacaaaaagtcgggcgaggtcatagtattatttggaggcaagggagcaggaaagtctacattcctacgaaaacttttataccacaacccgcctcaatacttgtctaaatattctagagttgcaattgcagatcttctgaatactcccgaagaagaaacaaaaatttatgagaaaatctggagtgaaatcatacgctgcctagacgtcgactgcctactggaatcagatcgcgcaagcctattgcagctttttgaggaccggtttgaacttgcaaaaaaacaagttctttttggcctggcagaaacttcggaagcgttcaacatggcgctcaatagccttgtcgaaacatggcttggtgacaaaaaatatgtcgctaagcgtttggttgcttactggaagctcaagcacaaaggttgtgttgtagcgatagataacacggaccaactgccacataatttacaagacttttgtttcacaacttcgcaggaaatctctgaccatctcggttgcctagttattatttcgatgcgtgaagagcggtttcatgcctctcgaatccacggcacactagatgcttatcagaattcaggcttccatataggctccccagtagcgcaagcagtatttgaaaagcgaatcaaattcgttcaacttatgcttgaagatcggaatttttgcactgacttatttggggaagaatttgaagaaaagtcaaaagttttcaagattttgtttcgaatatttgccaacgagtttcgtcaaggtaacgattccccgctgaatgaatttctgagtgcatgtgcacacggcaatatacggctcgctctagaactatttagggattttttgaaatccggttataccggtgttgacgaaatggtctcagcgaagggcggactttggaaaatgaagattcaccaggtacttaaacctgtgatgattccttatcgcttcttttacgaagaatcacaaagcagtattccaaaccttttccaaatcagaagcaagtccaatgggtctcatttcaccggcatgagaatcttacaaaaactctctgacggaatcgacccatcgaatccattttatatatcaataagcgaacttaaagactacttctccgaaaacttcaacatggtcgaagaccttgaaaagaatctcgatgtgtttttgaagtgggacttgatcgaatctaacaatcgagtggacttctattgcgaggcggtagacagcttaaaaatcacgacctatggcttgtacatttttaatgtactatcttcgttcttcacgtatatcgaactcgtttccacagattgcggcatcttcaacgaatccaaagctcacgaaatggtagagctatccaatgaagattttagattattcaatgcaagaaagcgcttagagcgcattaagacacgtatcgcgaaggctgaagccttcatttcatatcttgagaatgaagaagagcaggagctcaatttcttcggccctaacctgcatagatttacaccgaaaatccgagcctctttcgaaattgaaaaacaagaggtcctgaacagtgctcagaaaaaaagaaatagataa

SEQ ID NO: 350678 - DNA, 906 bp, Pseudomonas aeruginosa
ttgaaactagaagaaaagcttgagggtataacccctcgagctttagtcaaatggatagcttggatactggggattgcaacaggcctcttcggctttgtgcttgccttgtatcttatggaattcaacaacgggttcagcaatgaaaattcagactggggtacatttggagacttcctcggcgggacattaaatcccatatttggctttttaagtctgattgcgcttttattaacaatcgtattacaaagcaaagagcttgagtcaaccagaatcgagcttgagcgatccgcatctgcgcaagagaaaaccgaggcagcgctaaacaaacaatccgatacacaagcaaaacagcagtttgaaaacactttcttttcgttactcgatcaacacaacaaagctctcgaaaaaatatccacaccaactggaaaatatacagaaggccgatcagacttagacatggttagaatttccgtattttcggagaaaaactcaaatctgcaagacgcaaagaattcgctagaaaaacacaatggtatttgcggtcactattttagagtcttatatcaagtcctaaaatttattgccacaaacgtccctgatggaaatattggctcagaattcagccaagacacactatccaaataccagcttgctccaagtgagaaaatgtacagcaatatcgtaaggtcatttctcagctatgacgccacccaactcctagccattaactgctattgtgcaaacagctccgacacctactggaactttaagttacttatcgagcgctactcattccttgagcacatgcccttcaaaatcaaagaaaatgatcatgtgctattagtttccaccaaggagttttatgaaaaaaatgctttcgggcgtacccagttcaaggtcagttag

SEQ ID NO: 350679 - DNA, 633 bp, Pseudomonas aeruginosa
gtgccactcagccaagaagcgcatcaatttctgacaaatgaaatgtgtatagacatccaagatttgacagagaagatcaacagtttagattgcggcagtcaggtgcgcgacatttacacaatgattgagaacttcttcatctctttaaataaagaggatgccgaagaggaaattcagagaatctttttagattacgagcacctgtttgacaatgaacatgcttacgcactcatcgatccaattcggcatgccttttctggatttgcgtacggagggcttctccaactcttcactagacaagagaacgaagcatggtacccaagagtacttttaaccacagagctaaagcctaacgacatcgcaaaccttggggaaactattgaaatctaccgagggtgcagcatgaacgaacacataacccagaaatatggccaatcttggtctacttctaaagatgtagctgaacaatttgcttattttcactatcaaaatcaaccatggtttaacctccaagaccgagtagtcctgcagtccaaagttcccaagacagctattttctactctaagcaggaatgtgagttcgaaattgtggtaaacgtgaatttactagacaaagttcgagtatgcccatag

SEQ ID NO: 350680 - DNA, 1128 bp, Pseudomonas aeruginosa
atgagcaactcaattaacgaccgtatcaatcgtctccgctccaggcgctcagggctcgatagatcctccgtgatcgcattggatgcgaaagacttcattgtgaatcgtagcctcaatcaggagcggtgggaggggcgggcaaaagacaagccctacacgacatttgtactgggggccatgcaggaagtcgatcccacctacactcgcatcagcctcgaaacggcagatcgggttagcaatcaactggcaaagcgaatgtccgggaacatggagttcgagttgcagggatctgtacccctgaatgtccatatccgtggtgtcagcgatgttgacctattggcattggaggccgacttctgcacctacgacagacgtggagctatgagtaccggtgggcaatacagctcgcccaccacgcgcacttctgttggcgtgttaactgctagaagagcggaaataagtcgagttcttcgtgaggcatttccagccgcgactgtggatacctctggatccaaagccatcaagctatttggcggctctttggctcgccccgtggatgtcgtgccctcccattggcacgacaccattgagtatcaagcatcccgccagaaacatgatcgtgcagtcactattcttgatgtacataaaggtgtcactgctgataactggcctttcctgcatatcaaaagagtgcgtgagcgctgtgagagtactgggggcggtctgcgtaaatcaatcaggctgtgtaagaacttgaaggccgagctagaggctgaaggtcaaaacgtgaccatttcaagtttcgatatagcctcggttatgtatcatgccaatatgtctagcctcaccgttggcgcactctacgagctggcaattctggcagagactcaaaggcatttggattatttggtaaacgacaaagaagcggccaggcgcctaatggttccagatggatcacgtagtatatttaatgaggagagtaagtttgccgggctgctgcgtctttctattgccatggacaacctgctgcgcgaggtagcgaaagagcaaagctacttgctgaggctgtccgagacaccgatgctggatgcaagccgagcgactgtgattaagtcagcaatattctaa

SEQ ID NO: 350681 - DNA, 645 bp, Pseudomonas aeruginosa
atgattcacgatcatgaatatagtttgcttggtggtgtcaatcgggcattgattgggcgatacctaacgatactggcgagcgctatttctggcgttgcagtttttttgttgctctcagccgaagatttggcgaagagatacaatctgcctgtaaatcttccaccaactgccctctcattgctgggtgcgggcgtagtttttgctctgctatacaccctgtttaataaaacggtgtggaaatggccatgggccgtaaaatatctaaaggttcctgatctgtcaggagagtggttgtgcaatggaaccacgctagatgcgtcaggaaatccagtacacaaatgggaggcaaatgtttacatctgtcaaacctgggacaagatcagggtgcgattgaaaacaaaccagtctggatcaaatagcatcactgcggcgttggtttacgacgaggctgatggttaccgtcttctttataactaccggaatgaccctaatcctggcgaaccagaacttagggggcatgtaggtagtgcaaatctgctgttcacgaagtcattagatggtgcagcgggtgactatttcaatggttacggacgccctacctatgggcgtatggagctgaggaggaaaaatgagcaactcaattaa

SEQ ID NO: 350682 - DNA, 255 bp, Pseudomonas aeruginosa
gtgccgaaaaatacgaagcaaacatcgtcccaggtagccagtctggcttccaaagtcctccgcagcgacagttcctcggccattcagaaagaactggcgggatcggctatgtcgcaagcatcgagcagtaagcaaaccggtgcggacatggaggccaaggccagccgcgtgctggatagcgacaagtacaacgccacaaccaaggcccttgcggcttcggtactcgcccaatcgaacaaagagcggggtgaatga

SEQ ID NO: 350683 - DNA, 612 bp, Pseudomonas aeruginosa
gtgtattggcagatagtgaccagtagatccttccggacacttaaaacgcttaggccaagcagggccctgagcctgcacatctccgcggggacaaggtggttggccaggatgataagtcccaatagcctcttggcctgccgcagcacacgaaaggaggttgtccggactttggtggaaacgtggccaggagaaccatacacgacgtccgcacggttgacgcatctcagccagagtagcgggcagtcgatgaatgactgcaattggccgtatacagcccttccctccctaagccatagcgctttcccatacctgaacggcacacctattgccacccgcagaaccacaacctcccccactgctaaccgcaatagctgcggcttgagtggtgcggattcgttttttggaatctggtgttggcaggcattgtgctactggcccttaccccaaccctctcccgcacgcgggaggggtggggcgagccttgtgggtcgagcgcctcgctcgggcgcagcctggagcgatgtctaccctcccctagccccgggcatctggaatctggaattcggcccccagcccaggcaaccagaagcaccggaaacgcgccctgaatga

SEQ ID NO: 350684 - DNA, 1953 bp, Pseudomonas aeruginosa
atgcaggagttgaccaattggtgcgctgaaaaatacatccaatgctatgtgctaaaaaaacctcttattgaggttaaatccgattacgagggcggcgatagctacgcagttctaattccaaagagaaaaatcctttttgtaaatttcgatcaaaacaataacgccttcgaagaatatgttgaagattttatcgaagacattggatacatctcaaacaaatacaactacaaagaaaaaattggccgccccaaaagctggactaatgatttaactgttaaaatacaggttaaggaaagtttgggaattggtgaatatcttgagaacaccgatcttaacgacctctttcaccaacggatttcagagcttttagtttcactcgtcaccggcagcattaacgatattgaccgcgtaggcataaatgtccccgaaaacgaccttgaccgtataaaaagaaacatcctactatttgatggcgatcaaactcgctttgtttatcagagcctaaaacaaaaagtagtccgaatccagggcctatcaggaacaggaaaaactgagcttcttttgcacaagcttaaagagctatatgtttccgaagggaaaagcaaaataataatgacatgccacaataaaatattggctgccaatttacgacgaagaatccctggcttcttcaacttcatgaaagttgaacaacaaattgagtgggacaaaagactatattgtgtccacggctggggctctcaaaacgatccaacgagcggatcgtatgctgcaatatgcggccattacaatctaactttttacccttggtcgaaactgatggacttcgatagggtatgcaagttagcgctcaaagagcttggcgaaaaagaagtcgcagaaggcgattacgcctttgattacatgctaatagatgagagtcaagacttcccagagagtttttttgagctttgcggaaaagtcacgagaaattcaatttatattgcgggcgatatattccagagcatttttgatgaacgaaaggaagctggcggacaaccagaattcatcctaagcaaatgttacagaactgctccggccaccctcatgttcgcacaggcgttgggcatggggtactttgagccgaaaaagcttaattggctgtctaacgaggacctagaggcgtgcggctatctgagcaagacagatgccgccacgaaagaaataattctcaagcgcgagcctattagcagattcgaagacattaaagacgagaacgaaagtgtcagcttaattagaatcagcggaaattatattgcacagtgctcaaccaaaataattgaatgtctccatgagataaaaaaatcttatccaaatgttgagccagcagacatcggaattatcatgattgacagaggaaaatcttcatatgaaatttccgaccgactcaccacgatgattccacgagagatgggctggccagtaaacaaggcgtatgaaactcgccaaccaagtagaccgggagagatattcctaagcaacactaatcatgttaaaggccttgagttcccattcgttatctgcgctactcacagtctctccgattcgttcagccatcgaaactccttgtacatggctattactcgatcattcttaaaaacctatttcattgtaaaagaagactcaaacacagaagccctcaacaacattcaagccggccttgataacattataaaagagcatgtactccgagtgactccgccttcagaagccgagcaagagcaaataaaggccaaagttaaatggcaaggaagcttaaaaacattcgacgaagtggccatggaggtcctaattgagctcaatgttaccgggaaaaatgcggataaactcctgagcgcaatgaagataatgctcgatgcgaattcggaaagggatgagatccttaaacttgcaaaaaaactgatctcagaatag

SEQ ID NO: 350685 - DNA, 639 bp, Pseudomonas aeruginosa
atgacttcctactcattcgatatagatcaattccaatacgcgagagccgtcaaggcaattcgcagcagatttgatgttctagaagtttggatggaactagcaaagctcataataaactactacccaccgaacagaaattccattcacgcgtcaatagaaataatttgcactcgaatgaaccgtgtctttgtgcgcacggacgaaaaagtattttcaattgcatttccgttccgaatagcacaggaaggagaacaatatcagctaacctcctctcaaggcgtgcagattgacagcaaagtcacatccgaagtcctcctggcactttcggcattcaagggagggggaattcaaactgagtgggatttagtacaatacttcgacgaccaaggcggggcatccgagggattttggactttactcacagagatgcttgattctgaggacggttatttaagatttgaccacgacccattccaggaagacggccatattcaccctctcaatcatgccgatattttctatacaaaccgatcaactttcaaagtcggatttaaagaacggccaaacatagaaagaatgattgacattctcaatagagagacggactgccactaccttgaattgccacagagagagtga

SEQ ID NO: 350686 - DNA, 1806 bp, Pseudomonas aeruginosa
atgccagacaccttcggacttaaaaaaatccttaatacagaatatttaaaatctgtaattccggacgcaataaaaattagcgacacagaattcaaaagatatcaggtaaagcttgagagctgtttcaaaaaatatatcacaagaacccacagcaaatattcaaaaataaaaacccttctatatagagacaaacctgtaaagctactggaccattacgtccccaccaatttcaaatgcggaaaaaaaatccacgatggtggcgaaatattttatgaactcaaaaaaaataagcgaaatgtaatattaggaacagccggatcaggaaagtcggtacttcttagaaagatcgtaatcgacataataaataataaagaaggcacaataccagccctcctagagctaaggctactcataacaaaagaaaaatcagaaaccatactagaccacttatacagaagtatatcagatcaagacgaaggctttacaaaagaccagctaattacatccctaaaaattggaaaaattgctttatttctagatggtttcgacgaaatcgattatgaaaaaagacaaacatacgagcgtgaaatactagaaatatctgacaaatatccgaacactatactagttatctcaagccgcccagatgagttatttaactcatgggaagagtttcatattttctccgcccttcctttaaacgaaaaacagtccattgaactagtcagcaaaattgattatgaaaagagcgtaaaggaaacctttataacccaattgaaagacggattatttaaaaagcatattgacttcctctccagtcctcttctactaactatgatgctactgacctttgaacagctagcagaaataccagagaaaatacatattttttatgagcaagcattcgacacgctctaccataaacatgacgccctaaaaagccagtacaaaagaaagtcttacagcaatcttcctatcgacgacttcaaaaggctattttccgcattttgcataatcactttctacgaaagaaagatgatatttagcgacacagagatactagaatatttggcagaagccgttaacacagaagacataacctgcgagcctacaaaaatatttaacgacttattaaagtcagtctgcataattcaaaaagatggcaatacctacacattctctcacagatcattccaagaatacttcgcagcagtattcctttcgcgatcacaaacaatagacttacctaaagccctaaatctaatttcgatccgccatcacacagacaacgtcatttcactagcttgggaactaaatagagagcgactagaaactttgtggatacagccaaagttaaagagaataactagagaggcatcaaaattcatttcaagcaatgacccccaaggatttctcgcactcttctacagcgcaattgtcccccacagcgcggggaatattgcatacaagctatcagaaaataaggttaatggttttttctactcatggctcgtaaaattgtacaacgacatttccataaaatattggccaagggatgaagcatccaaaaaagaatgggaaaaaatgagccgagacttcttgaatgcactaccatctttaaaagaaaagaatggttactttgaaatccctctatcaaagagttcaaaaacactccctgaaacagaaatcattcttaaggactgtaaaaagagacttgaattcctcttggaacttgaaaggcacatcattgaaaaatataacaagaaagagaagacgctaactaaactcctaaaaagagctaagtaa

SEQ ID NO: 350687 - DNA, 669 bp, Pseudomonas aeruginosa
atggggaaatcggcggaaacggagcacgaagtggaaaaggaaaagcgaaagattgtcgtgctgcatagcggtggattggactccactgtctgcttactacttgcacactcgcgtggccacgaggtcgttagccttggagtcagctacaaccagcatcaccacgtcgagctcgactacgcagcagcgcagtgcgctcgctacggcattgagcgaaagattgtgtcggtcgcttggagcaagcccgcacgtgtgatcccgaaaaaccgctcgatggcagaaatcaagaagggggtttcgagtgccttccttccaggccgcaatggtattttcctcatgctggcttcggccgaagcggccgggattggcgctgacgaagtgtggacaggaatcaactcggttgatttctccggttatcctgattgccgccctgagttcatcgaaagtttcagaaagatgctctcgtacgccattcccaaggggccgaaactctccgcgccgctgcaaaagaagtcgaagcctcagatcgccaagcttgctcaccgtctgggcttgcagcgccatgacacatggagctgctacaggccaaagattgcggaggctggattcgtaccgtgcggcgcgtgcgacgcgtgcaaactccatgagtttgcttggcaaggtattaagtga

SEQ ID NO: 350688 - DNA, 1212 bp, Pseudomonas aeruginosa
gtgaatacagtttgcttggtcgcctgtaccagtaaaaagagtgaccagccgacagcagcggagtttatctaccggtctccgctcttcttagctgcgcgcagctacgctcaacggcgcgcagatcaatggttcatactttccgcgaagcatggactgctgtctcccgaggaaataatcgccccctacaacgagtcgctcctaaatcaaagcgaggcgcaacgacaggcgtgggctgcagatgtccatagaaccttgaatgctcgtgtgcccgcgggagggcgaatcatatttttggcgggatctgcgtatcgctcgtatcttgctcctgcattcgaggcagacgggcgcgaaactgcagctccaatgtcatcgctggggatcggtagccaagtatcttggctgcagaaagttgaaagcgaacacgtacggctgtcccacattgaccgtttttatgcgcttctggaacgtgtcacagctttgaatactagcttgagccgaaagctatctcagcagaccgctgcgtctgttcgacacaagcgcgggatctacttcttctttgaagatggcgagatgcgcatgactgccccattccagcaccgggttgttcgagtcggcactcatgcggtcagtgaggggtcaaaagccaccctttggaaccgcctacgcacgcatcgaggggtaggcaacggtcttggcaatcaccgcggatcgatctttcgccttcatataggcgaatccctaataaggcgtggcgcgcttgagtcaaacttccctacctggggcaaggggcagtctgcatcggctgaggttcgttcggcagaagaagagattgaactcgcagtctccgagcacatcgggggcatgcaagtagcatggttggaggtacctgacacaccgtcggctgatagtgatcgtggctatttggaacggaatttcattgcgctcctggctggtgcaacggggccactggatctaccaagtgggaactggcttggtcgctggagcactcgcgaagccgtcaagaattcagggctctggaacgtaaaccacgtgtatgaaacgtttgatgcaacatccttagacgtattcgaacaacacatcgaagtcgccgaggggctgcgtgctagaacggagcagtcattagcgccgagcggatggcgccttcgtatcaaagagcgcgataacgcgagcggacaaattgatttgttatag

SEQ ID NO: 350689 - DNA, 1674 bp, Pseudomonas aeruginosa
atggccaaggacaaagaaaacgataaagataaggacttttgcgatctgctgaagcggtacccccgcgccattgtacacttacgatcccaggtccgtaagcaacgcttcggaacaatccttggtgcagggattagcgttgattttggggctccgcagtgggataaattaatcaatgatatcgcttctgatccggctgtggacgcaaaagatattgtagaaggtagagcgttcaaaggcatggcggccccctaccagaccgaaattctctatcaaaagtttcggggaaagttttatgaaaattcaacggatctatccccggcggaacagttaaactctgcaacggcagagtggctcacaatttgccaaaagtatttatacaagacgccaccgatcgacttggctgctgaactgcccaagcatccgtatatggaagagttgatcccgctcgttcaaaatagcgcactaactgttaattttaacttcgatgactatctcgagcgggcactcgcggaaagaaagcgaaacaaagacaagagtaatcgcggcttcgaggttgtcactgatccttggccacaatttcggcggcaagactgtgtgatttatcatattcacggatatgtccccgaagggcttatggaaaaaactgtcgaccgatttgttttttcagaggcttcatactcaaagcaatatgtcgggtctcgtggccatgattcgtcatttcttctggctcacttagctagaaacacctgcctactaatcggttgttcgctggaagcagaacttagaaatgttttaatgcgaggtgccgaaacaaatcctggaaacttccactactattgccattggattaagaatcaggaggctctttccgaagtcgagcgacagctgatttctgagaccaatttcaaagtttataatttaataacgctttttctaacttcctcggaggttaggttgctgctgaaattaattaacgaagatgctatatcggacggtaagcttagtgacttggcgacacgcagcgctactccgctgcagtacactttctatatgactggttccctaggagttggtaagagtacgactactagccatcttcgcaatctgaacgttttggatgagtggctcgaacctcggcctgaggtgttaagtatcccgtgggacaaactgacggatgaagagaaagcttttgcggacaattggatcgcagatcaatttacacaaaagaatgacacgctaaggcatgagaaacgggccgtgatcagtgtcgttgaccgtccaccgctagacccattagttttcactccgaatagtgaacggtccgccaaggcagagttcttagcgaatcacatatgccctgatgatggaaacggcggctacggtatcgaaaaaggcgttgtcatcctgttgctaggtgaccccaaggagctgtcttcccgggtgcgcgccacaggcaggcaaaaatatacatcggataaattagatgacatgcaaaaggacatgagggcgctatacgagcccatgccgggaactgtcactatcgatacccagtttatgagtatagcggagctaacgaagcgagtcgctgaagtaatacatcgccagaaatacgagccggcagatttgactaaaaagctgcgtagctacataggtgcaaacagtgaatttgtttga

SEQ ID NO: 350690 - DNA, 1347 bp, Pseudomonas aeruginosa
atgcccgagcgcgccgacgtcctggaaaaagtccagcttggtgacgtcgggatactgctcgtctccccagaacagttccgcaacaaggctttccgacgcgccatcgcccaaagacagatcggtgcctggattttcgatgaggcccactgtctgtcgaagtggggcaacgacttccgccctgactaccagtacgtttctcggttcatcaaagaattcacggatgacggcccgcttgcctccattggttgtttcaccgcgactgcaaagcccgacgtgctcgatgacatctgcgagcacttccgggagcaactgggcattgagttcaagtccttcttaggcacccatgaacggaccaacctttcattcgaagtgtttccgtgcacacgggcagagaaatggcaccgtacccatcagctgctccaggacgaactgaacggccaagacggtggagcagttatcttcgtctctagtcgtaaaggtgcggaggagctctctgacttcctcattgggcaagcttgggcctgcaagcatttccatgctggcttggagcctcacgacaagaaagacatccaagacgagttcaaagccggcagcttgcgcgtcatcgtggccacaaacgccttcggtatgggggtagacaaagcggatatccgcctagtcgtacacgcagacatccccggttcgctcgagaactacctccaagaggcaggtcgtgctggccgtgaccaagggcaggcacggtgtgtattgctctacgacgcgcaagacatcgagacccagttcggcatgtgtgagggctcaaagctcaccctgcgggacattcaacaaatcctgcacaagctccggaaagagtacaaacggcgcaagggcggaaagctcgtaatcaccgctggcgaagtcctcatggatgagcaggttgacaccagctttgaagcaggggagcgtgacgcagaaactaaggtggtaaccgcggtggcttggcttgagcgtggtcagttcctcaagcgcgaggaaaatcaaacacagatcttcccagccagcctgaagctcaaaaaagaggacgcagataagcgactcgcaactgctcaactcccgccccgacggctcgaggagtttaaagccattctggattacctgtacggagccagtgccgatcaacgaatcgacactgacgctctgatggctctgaccagctctacatctgaggaagtgaccgccacgttgcggcagatggaagatctaggcctgcttatcaacgactccaagctgacactctacgttcgccatggcgtcgtaggagcctcaaatcagcgacttgtggcgactctcgagctagaggctgcgtag

SEQ ID NO: 350691 - DNA, 798 bp, Pseudomonas aeruginosa
atggcattgttcacgcaagaccaacttgaggccattgcaggtgctctcggtgacacgggagcagggctaacagggactgaaatccagcagctcctgaccacagctaaaatgaaagacccggggccattcacgaagcgcattcgactttacaacgcttttgtggaaagccagaacactaagcgaaatcgtacccacgtcctggaattcatccgacaagcaatgaagccagcacgttacatccgtgatgccgagcgttatgagcctctccgtgctctgttgaatcaagcactagcctttgcagggttggttgttgaacagtcgggtgagctttcttcagtagcgattgtgcagacgcttccagaggcaaggcgcagagcgcaggaactgagagcggatatggagggccgtggagttcatcctgacgtcatgaggttctgccgcgaggaactgttggctgataattactttcacgccgtccaggaagcggtgaagagtgttgccgacaaaattagaatcctcacaggccttgcggatgatggtgtcgccttggtagatcgagcgcttgccggtgatgctccactgcttgcaatcaatccccgacagaccgctagtgagcgaagtgagcaaagtggatttgccaatctgatccgtggaacattcgggatgtttcgcaacccgactgcgcatgaagcgaggatctcatgggagatgtcgaaggaggatgctgaagatctgctaaccatcgtttcgttgattcacaggcgtcttgatcgagcccacctgcttctgcgtgtgtag

SEQ ID NO: 350692 - DNA, 1584 bp, Pseudomonas aeruginosa
atgcgcgagtacgtgcacagtgacggctcatggaatttcgatttcgccaggacttatggccggccctctcgtgcgacgaaacacgatcacattcggccagatgggaagctcatccggttgagtgatccccagcatcgcttgatcgaaaccatccgcgctaaccccgaagactccatcgagactcaggcttatgcgggctctggaaagacattcgtactgaaggaaattggtagcattctgcacgacaaaaagtgcctcttcttggccgacgtcgagagcaagctgtggccggtccagaagcaattctccaaagagaagatccatgcactgaccttccacaagctcgccagcttattgctgtcccgtggcaatccctttctggaggagaggatcaaagcagccgccaacaggcgcatttctgatgaaagcgtcgcggagcggttaaacgtctcttctgtgggcggcctgaatggtcagcaaatcgttcgcgcgttgcgtcctgcaatcaataaattctgcctttcgagcgacacagtaatcagcgtgaggcacttgccctcccccctgctagcgtcggtctctcccgctcagcaacagttgctggtcgcaatcgcccatcagctttggtcagcaatgatcgatctcgatcgacaagacctggccatccgggtcactggctggcaccgcctaaagcaaatagccctgatggggctcaacatcccagcttcgtaccaggcggtgatcatcgacgaagggcatgacctgattagccctctggttgaaatcctcgatcgctcgccgcaggtagtgatcaccttgggggatcaattccaaaatctccaaggccgctacatttctcatgccgctaagattcgtcatcgcgagatgacgctctcactgcgtgcggggccacagattgccgattacctgaacccactgatcgacgtctttccggacacacgggtcgagccgtttattgggaacgccgagaaggaaacgctgaccgccgaatatcgcgcagagcagtttccgccagaaccctcggccatcctggtggcggatgaatggggcgtgttcgactggctgatccgcaaccggcatcttggggcaggtgcagcagtagctcacagcgtggaccttgggaccttcttggaagattgcctcagcctctataccggcctggcgagcccgcagcacgtcaagcttgcagcctatcgctcatggggcgaattgcgggctggcatgacctggaaccacgccttcctacgagtcgaagactggctggaaaaggtcggtacgaagtttggggtgtcaggcctgcaccacggcgccaagctggacgaacttggcgggggtattccgagccgccacctgatcgtgacggtagctgcagcaaagaactttgagctaccaagggtggccatctccgaggatctctattacttcgacgatttgcgcggcaagcgcgaaatgtcgcgaaagctcgccttgctctacaccgcaatcactcgttgctctggaaagatcttcttccctagtacacatcacgactggatcaactgcgttatgcaatccaggcactga

SEQ ID NO: 350693 - DNA, 1026 bp, Pseudomonas aeruginosa
atggtgtcctggctcatcttcgacctggaccacgcgaatgctttgatctgggaagaggcaggcctacctcctcccaacctggtcgtgcgcaatcgcaagaacggccactcgcacgtctactacgcgatcgttccagtctgcaccactgagaacgggcgctctgcgcccatcagctacatgaaggccgtctacgaagcgtttgctctgcagctcaaagctgacatcgagtacggcggtggccctgtggccaaaacacctggtcatccttggtgggagacgtccgaataccacgaccacgtttacgacctgggggagctggcagaggcagttgaactgcctcaggcgaagccgtggagcaaaggcccacgccttgatgatgcggcacattcgcgtcactgcattttgttcgagcggatgcgctactacgcgtactcgatcgtcaacgaagaacgcgcgtcgggctctttccagcatttcgttcgtcgcctggaggccttcgccttcaacaacaacgacttcaaagcgtatggctttgcggagagtctgccgctttcgtcattgcgcgcgacagttaactccatctcacgctggacctgggaccgctataggggcagtgcacgctgccaccgaggagtgatggctctgccagcagaaatgctgctccaagagaagcagcgcctggccgcccttcgtactcacggcatccgccagaaatccaccgagtccaaggtacgcgcagcttgccgacgcctgattgaggcgggcgaacaactacgtgttacggctgttgcccgtgtggcgaaaatctcaaggcagaccattaccgcctacaagcatgtcatgcatgaggtgctgggcgccgcggtagcgagctcagccagcgtcgcgaaaacggatgtcaaatatggtgtacatcagatacctgcggcgcttaacgcctaccttcctgctttaatgggctcggagggaacagctctgcttagagtaaaaagcttgccaacgaagaagccggacagacttcgctag

SEQ ID NO: 350694 - DNA, 195 bp, Pseudomonas aeruginosa
atggagcgcctgttccgcagtctgaagtcggagtgggtcccgtcaacgggttacctgacggcgcaggaggcccaacgggacatcaatcattacctgatgcaccgctacaactggatcaggccgcatcaattcaacgacgggctaccgcctgcggtggccgaagaaaaactcaacccactgtccgggatgggttga

SEQ ID NO: 350695 - DNA, 252 bp, Pseudomonas aeruginosa
atggaaggatctgtatcggttcaagtgtgcaagacctgggtccagaacgcggacggcacggttggctgtacgcaccttgagtggatacagacctacctgctgccgcctgaggcagagggctatttgactctgctgatgggtggtttcgacccgtcggccttccgcctcggtttcgccgggaccatcgggctgttcgccgttggtttgggggctggcttgatcatttccgccatgcgcaaagcgcgcaattaa

SEQ ID NO: 350696 - DNA, 1560 bp, Pseudomonas aeruginosa
atgtcgattgaagaaaatctcacggaaattctcaaggctcgtagtgctggagcatttctcttcatcggatcaggtttttcacgtcgttatcttggtttagaagactgggctggtttgctttctagattctgcgttactggtaaaccattcgaatattatcgagccaccgctaatggaaattttccagaagctgcaagattgctcgcggttgaatttaatgaatattggtggggggctgaagtttataaagatagtgttgccgctaacaaggagaaaattcaggacgcgacatcggctcttagaatagagatctgtaattacttggcgagccttgatcccgctgtggcaattaaggacgggtatgctgaggagattgagttactttccggtctgaacgtggatggaatcattaccactaactgggatttgtttttagaaagtttatttccggattataagacatatattggtcagaatgagctgctgttctccaatcctcaggaaatctgtgagatatataaaattcacggatgtgctacagagccgaactctcttgttttgacttcgggtgattactccgaatttaatgatagaaatccttatcttgctgcgaagttaattacggtttttgtcgagcatcctatagtttttcttggatactcactttccgattcgaacatatctggccttttaagggctatatcgctatgcatcggaaaggagcaaatagagcagcttaggcagaatctcatatttgtacagcgacctaaggatacggagcagccagggatttctgatacttacctgacgattgatggcgttcaaattccgttgatacttgttaggacgaatgattttactgacgtatacaaggccctggcagctacacgaagaaaaattccagcgcgcgttctacgctattgcaaggagcaactttacgaattggttagatcgctagagccagagaagaaattgtgtgtggttgatattgatgaaattgaaaataaggaggacgtagagtttctcgtgggagtaggcgttgcatcccatgagcctgctgatattggtgccgttggctatgatgcaattatggttagagatcttattgctgatgcgctacacgaaaatagaaattacgatgcgcaaaaaataatacagtccactataccgcgcgcgggtcgaaatactccgtatgtgccagtttataaatatttgcgcgagattggtgtggatagtgaggaggcatacaaagctagtgggctggatttgtctaagtggatttcttacgatgaaagtaaatttcgagttaaagcatttgaagcaatgtatttgaaacgcaaggatgacagtctaaaagatctgatcgaaggtctaacacctgaaagtgcagcaactctaattccatttttgccaaaagagaaaattgatctgcagctactgcgtgaatttttaattctacatgaagataaaatggagaacaataattacgcctcttatttcaagaagctggttgctctatatgaccggttgaaatttgggtggggtagtgcgaaggtgtaa

SEQ ID NO: 350697 - DNA, 225 bp, Pseudomonas aeruginosa
atggatgtggaaggaagcaacctatatcagaaccccctagcgacgtcgcctccgttaatgccctggagagagttcgcggactggattcgtatgggagatagccatgttgttgtgtggggttggattcgcaatggctatatcccgtcgcaaaagtacggcaaacatatgatggtcaacgttgcgcaattgaccgctcaattaatggaaaagggagaacaactgtga

SEQ ID NO: 350698 - DNA, 174 bp, Pseudomonas aeruginosa
atgagcctagagggactgatcaacgtcgttgctctcgtgctgatgacctacctcctcgacggcggcggccagctcaatcagtccgtgatcccttcctgttggttcagcccggctcagctggagtgctggacgttcgccgcgacgccggccgggagcgcaaggcatgagcggtag

SEQ ID NO: 350699 - DNA, 333 bp, Pseudomonas aeruginosa
atgagattcgcaaaggtattcctttccttcggcgtcattgtcctctgcgtgctcctcattggcggcaccagcgcggccattcaaaaacacgtcgcaaagtccatctacgattcttcccccgaagccagggcgaccatctcgcgcgtgtccacgttagtgaagagcggtgaccctgccgagcagaagcaggccatcgaagagtaccggccgtaccgcgagaagagcgaacaggcatacaggatgatcttctgggggcaagtgggggcttatctggtccttatgctggccgctaccttcctttaccttcgcatcaaccccaagcgagctgagtga

SEQ ID NO: 350700 - DNA, 231 bp, Pseudomonas aeruginosa
atgggctggtacatccagaagagccaacgggtcaacggcgtctccaagtgggacgcctacggccagtacctgaactaccacgagggctggggcggctaccgcaaccgcagctacgacgccaagccatggctgaagaacgtctcgcagaaggtccagtcccgcgcctcgctgttcggcgcccagtaccgcagttgccagcaggagctgtcgcgcggcggctggttctggtag

SEQ ID NO: 350701 - DNA, 309 bp, Pseudomonas aeruginosa; identical to SEQ ID NO: 323887

SEQ ID NO: 350702 - DNA, 264 bp, Pseudomonas aeruginosa
atgaccggaaaccgcaagtcgaacagacagagttatatctgcagcagggatctcaagccgtataaacttacttacttcctcctcctgatcaatagcaaactcttttatattaaaatcagagtacgcctcaaaaatatcgcttgccgacttaataggattcataaagtaactagggaggactctagacaaactatttacaagcctaatttcctcaatcgaagcaacatcccaagcttgaccgccactgcgtataatttcttctaa

SEQ ID NO: 350703 - DNA, 459 bp, Pseudomonas aeruginosa
atggctgacagcctcgaagctctggaagactgggcagggccgattctccgcgccctcgagccaggccctcgtgctgccctcgcgcgttcgctggcccgcgatctacggcgcagccaacagaagcgcgtgatggcacagcacaaccccgacggcagcgcctacgagcctcgcaagaaacgcgaactgcgcggcaaacagggccgtattcggcgcaagatcaagatgttccagaagctgcgcacggtgcgctatctgcgcgccaagggcgacgcccaggcgatcacggtttccttcgccggccgggtcacgcggatcgcgcgagtccaccagtacgggctgaaggatcgcgccgagcgcggcgccccagaggtccgttatgcgcagcggcgtctactcggtttcaccgaagccgaccttgagatgatccgtgaggggctgctcgctcacattccaacctga

SEQ ID NO: 350704 - DNA, 279 bp, Pseudomonas aeruginosa
atggcgatgagtgcggtagcgaccggctgggtgtccaagcctggcgcgccgaggatacgcggcaccacgcccaagcgggccttggcggcgagcaaggccttcatgccggtgtacttgccttcggtgctgacgccaccgatgacggcgctgttggtcgttgcttcatcttcgcccggcttcacccgcaccaccacagtggcggcgttggactggtcggcgatcgcctgcaggctggcggccagcgtaccgctagtgccagccttaccgatggcggcctga

SEQ ID NO: 350705 - DNA, 294 bp, Pseudomonas aeruginosa
atgctgctgaccattcgcgacgttcccgaatacttggtgcgtcaggccaagcttgcgaccggcaagggcaccggcagtcaggcgttcatcgccggcatcgagcttatgatccgtcagcgtgatcggatcgaggcgatggaagaggagattcggtcgctgcgcgagaccctcggtgtgttccagggcgtgcttgctgatgctcatgctgccgctgtgcaactggctgagattgccgggcagcgcgatatgctggtgtccgacaacccgctgcggcctgggtatcgtcgccgctag

SEQ ID NO: 350706 - DNA, 336 bp, Pseudomonas aeruginosa
atggcagtcagcgaaaacctaaggaacctcagagaatccaggggtttgagccaagaacaggtcgccgaactatgcggccagtcaaagtcgtcctggatcaaatgggaacacggcgatgcccagccgggcgctagtaagatcagggagatagcaaaaggccttcaggtatctaccgatgaaatcatcctagagccaggggagcgctcggtcagacaagacttgcgcaagctcatgcaaaaaatcgaggcgcttccggagcaccgccaggctgagatacggagggcgctaaaaggccatctaatgatcctggaacaggaagaactcgacgaggagtag

SEQ ID NO: 350707 - DNA, 294 bp, Pseudomonas aeruginosa; identical to SEQ ID NO: 350705

SEQ ID NO: 350708 - DNA, 336 bp, Pseudomonas aeruginosa; identical to SEQ ID NO: 350706

SEQ ID NO: 350709 - DNA, 1020 bp, Pseudomonas aeruginosa
atgatcgaactgcaccacgcgcctttgagcagtggggcggtggtctgtatcgaggctgacggcacggttgcttgggaaaccccgcgcaagatgctggtccgtggttcccatgactcgacgatccatatccggagcgtaggaggggacgggcagggcaacgcgactcatctgtacatcgacggcaacccaagcaagtggttgcaaggacataaccttgttggttcctgtgatctcgttgccctcgtctgggatgcttttcaacgcctctgcgccctggtgggccttgagccgactgactttgagcgtcagaaggtcagggcagggcagtaccgcgtcactcgcgtcgattacaaccgaatgttcgaacttccaagccgggccgatgttcgagcctggctgcgtgcgggcgagttcaaatgtaagtctcgtcatggtcgtccggtaaacaatcgcgggactctaactttcggcaaaggctcaagtcattggtcgattgtttgttattgcaaggccgatgaaataacttccggtggttcgcacaagttgccggaagagtttcaccagtatcccgaaatctatcagtggatagataacaaactccgcgttgaacttcggttgcgctcaaggaagctcaaggcgctgggccttgaatatgcctctcaactcacccccacggttctttggaagctctaccgtgatttcattggggaacttgacatgtcagagcaaatagaactcaagtccgatgaggtgatgaacctcccgaactggcttcgtggcacgtatatgctttggaaacaaggtcatgacctgcgcgatagtctttctcacaatacttactatcgccatcgccgtgagctattggcgcttggcgttgatatcaatatccgctgtgatcgccgcgacgatagcaatgttgtgccgatgattcggattcttgaggctaagcctgcggcgattccgaacttcttctttgaaaggggactgattcataagtcagcccgtcaggtggctgtatga

SEQ ID NO: 350710 - DNA, 237 bp, Pseudomonas aeruginosa
atgaagtctggcttcgacttttatttcggcggtcgagttagctcccgccaagaaatgcaacagcgcctgcgcaatctcagaactgagggcagcgttatggatgatctggagaaagttctttcgtccaggactccggccgatcaagtccaggccgctgaggatttcaataaggcgaatcgttctaagttgatcagcaacaagaaaggcactctttatttgggggatgtattcaaatga

SEQ ID NO: 350711 - DNA, 840 bp, Pseudomonas aeruginosa; identical to SEQ ID NO: 6027

SEQ ID NO: 350712 - DNA, 501 bp, Pseudomonas aeruginosa; identical to SEQ ID NO: 83644

SEQ ID NO: 350713 - DNA, 282 bp, Pseudomonas aeruginosa
atgggcatgttcgacagctgggtcagccagcggcgcaggcccgccttggtcatcttcgacgggtcctggccttcctcgtccgcccggccgagcagcttccacaggaaggtgatcagcgtggacttgccggcaccggcctcgccggtggcctcgaggaacggaaaggactggaactcggcgcggatctgctccgcgaacagcgagccgaaccagaatgccagcgccaccaggcccttggcgccgaagcaggtccacagccagtccagccactcggggcggtag

SEQ ID NO: 350714 - DNA, 444 bp, Pseudomonas aeruginosa; identical to SEQ ID NO: 337940

SEQ ID NO: 350715 - DNA, 798 bp, Pseudomonas aeruginosa
atgcttcttggcttgtctcgttccttgtggggctatcgtggcttcgttctcggcagcgtcaagcgcgagttccagtcgcgctaccgcgggtcgctgttcggcgcgttgtggacggtgctcaatccgctgtcgatgatcgtcgtctacacggtgatcttctcccaggtgatgcgcgcgcgcctgccgggggtcgacgacggcctggcctacagcgtctatctctgcgccggcctgctgacctggggcctgttcgcggaaatcacctcgcgcagccagagcatgttcatcgagaacgccaacctgctgaagaagatcagcttcccgcgcatctgcctgccggtcatcgtactgctcaacgccggggtcaatttcgccatcatcctcgccttgttcctcggctttctcgcactcagcgggcgcctgccgggcgcggcattgctcgcgctggtgccgctgctggcgatccaggtgctgttcgcggcgggactggggatgatcctcggggtgctcaacgtgttcttccgcgacgtcggccagttgttcggcatctgcctgcagttctggttctggctgacgccgatcgtctatccgatcggcatcctgcccgagggtatccgctcgctgatcgaactcaacccgatgaccgcgctgatgcgcagctaccagcagctgttcctccacgggcaatggccggactggccttcattgctgccgatcaccctgctggcgctgctgctgtgcgcgctcggcctgcgtctgttccgccagcgggtcggcgaaatggtggatgaactctga

SEQ ID NO: 350716 - DNA, 1383 bp, Pseudomonas aeruginosa
atgacgcgtctgttggtcgaatgcacctatgtgttcgagcatcccaaggtcaattccggtattcagcgggtggtgcgcaacgtcatccgcgagttgccggaagccgacgagacggtggagtgcatcccggtggcaatgctcgacggcaccctgtatcaggtccacagcctggcgccgctggacccacggccgcattcgccgctggtacgcctgcgcatcctggtggagcgagccgccaactacttctggctgggccagcgcaccctggaaaagcgccgcccgttccgttcctcgccgtgggcccggcgccttctctatgtagcctgccgcctgttcgccttcgccttcctcagcattccgctgcgcctgctcgaccgcatcctcggcaagcagcagcctgcacccgtgcgcgcgaccccgctcgaacatcgggccggcgaccaactggtcttgctggactcctcctggcacgccgatttcttcccgctggcggaacgcctcaagagcgagggcgtgggcatcgtctcggtgatctacgacctgattcccctgacccatccgcaattctgcgatgccggcctggtcaaggtgttcaaccactggttcgactggatcgcggccaccgccgacggctacgtcgcgatttccgagaccatccgcgacgaagtgcgcgcggagatgctgcggcgcatcggcccggagaaggtcgcgcaacgctggttcgattatttccacctgggttcggagctggacctggtggaggacggcgcctccgtcgagcccgacctgctgcgcatgttcaaggccaaggcgccggtattcctgatggtcagcaccatcgagccgcggaagaaccacggttacctgctggatgccttcgagcgcgcctgggcccagggttcgcaggtgcggttgtgcatcgccggacgcatcggctggaagtgcgaggcgctggtggaacgggtgcggcagcatccggagctgaacaagcgcctgttcatgttcaacgacctctccgacaagagcctggagtacgcatactcccatgccgcatcgctggtcttcccgtcctatgtggaaggtttcggcctgccgctggtggaggccatgcagcgcggcctgccggcgatgggcagcgacatcccggtgttccgcgagatcggcggcgaattcatggcctacttcgaccttgccgatccgcagaccctggcgaacctggtcacccgcttcgaagccacgggcgagttcccggccgagcgaccggtcggcgaatggcgctggatcggctggcacgaagcgagtcggcaactgatcgcgcggatcctgctcgccctcggcaaggccccgacgcatggcgaggcagtacatgcggattgcggttaa

SEQ ID NO: 350717 - DNA, 540 bp, Pseudomonas aeruginosa
atgagcgatacccattcggccgcggaactcccggaccgggcccgccggatacgcctggcgatcttcgacgtcgacggcgtgctgaccgacggcaagctgtatttcctcgtcgacggcagcgagttcaagaccttcaataccctggacggacatggcatcaagatgctcatcgcctccggcgtgcgcaccgccatcatcaccggccgcgacactccggtggtcgaacggcgcgcgcgcaacctgggcatccagcacctctatcagggccgggaagacaagctcgccgtcctcgacgaacttctcggcgaactcggactaggctatgagcaagtcgcctaccttggcgacgacctgcccgatctgccggtgatccgccgcgtcggcctgggcatggcggtagccagtgccgacccgttcgtgcgccagcatgcccatggcgtcaccgcggcccgcggcggcgaaggcgccgcccgcgagttctgcgaactgatcatgcgcgcccagggtacgctcgaagccgcccagggcgcctatctgtag

SEQ ID NO: 350718 - DNA, 3063 bp, Pseudomonas aeruginosa
gtgaacgtacaacagagcaagttcaggctgagccgctgggcgggcgcgacactggcgctcggactgctgctgtccgggctgggcgcctgggggctggcgctggtcaacgagcaacaggcgcggatggcgctggaacgcgaggcggaactgctggccgaggcggtgacccgccgcgtggaactctaccagtatggcttgcgtggggtgcgcggtgccttgctgacggcgggcgaggcgcacatcgaccgcgaactgttccgccgctacagcctgacccgcgacatcgaccgcgagtttcccggcgcccgcggcttcggcttcatccgccgggtggcggccgccgacgaggccgggttcctgcgccaggcgcgggccgacggccagccggagttccgcatccagcaactgactccgcacgatggcgagcgctacgtcatccagtacatcgagccggtggcgcgcaacggccaggcgctgggcctggacatcgcctcggaagccaatcgccgggaggccgcccgcgccgccctggagaccgggcaggtgcgcctgacggggccgatcaccctggtccaggccagcggcttgcgccagcaatcgttcctcatcctgatgccgatctaccgcagcggcatcactccaccgccggggccccagcgcgaactcgaaggcttcggctggagctatgcgccgctgctgaccggcgaggtgctggccgggttgcccatcgacaacgcggcgatccacctcgaactcagcgacgtcaccggcgacggcgctgccgtgcccttcttcgtcaacggcgccgcggcgccggctcaacgcctgttcggccacatgctgcggcgggagatctacggtcggcactggcagatggcgttcagcgcactgccgctgttcgtccagcgcctgcaccagccttcgccgcgcatcctgttcctggccggcagcctggtcagcctgttgctggcggcgctggtcaacgccagcgccctcggccgccagcgccggcatcgggaggcggcgacccaggcgcgactggcggcgatcgtcggcaattcggcggacggcatcatcggcgtcggcctcgacggcgtcatcagcgactggaatcgcggggccgaggcgttgttcggctaccgcgaggagcaggcggtcgggcggcgggtggtggacctgctggtgccgccatccaaggagaacgaggaactcgacatcctcgcccgcatcgcccgtaaagaacaggtggtcagcttcgataccgtgcgccggcaccaggatggccacctgctcgacgtggcggtgaccgtctcgccgatcctcggtccggacggcggcgtggtcggcgcctcgaagaccgtacgcgacatctccgcgaagaaggccgccgaggcccgcatccgcgaactcaataccggtctggagcaccagatcgccgagcgtaccgccgaactgcgtcggttgaacgtactgctcggcagcgtgctgcaggcggcgtccgaggtgtcgatcatcaccctcgaccgcgacggcatcatcagcggcttcaatctcggtgccgagcggatgctcggctaccgcgccgacgaggtggtcggcaaggcctcgccgaccctgctgcacagcgagcgggagttgctcgcccgcggccaggagctgggcgaggagggtttccgcgtgctggtggcgcgggccgaacaggagggcgccgagacccgcgaatggacctatctgcgcaaggacggctcgccgctcagcgtgacgctttcggttaccgtcctgcgcgacgaggctggggcgatcaacggctacctgggcatcgccgtcgatgtcaccgaatggcgcaacgccgagcgcgagatggccgcggcgcgcgaccagttgcaaatggccgccgacgtggcgcgcctgggcatctggcgctggaacctggccgacgacagcctgcagtggaacgagcgcatgtgcgagctgtatggccagccgctggcgttgcgcgacggcggcctggtctacgagcattggcgcagccgcctgcatccggaagacctcgagcgcaccgaggccagcctgcgcgcggcggtggaggggcgcggcaactacgatgtgatcttccgcgtggtgctgcccgacggcggcatccgcttcatccaggccggcgcgcaggtcgagcgcgacgccgacggcaacccgctgcaggtcaccgggatcaatatcgatatcaccagcgaccagcaactgcaggcgcgcctgcgcgaggccaaggagcaggcggacgccgccagcgcggcgaagtcgtcgttcctggcgaacatgagccacgagatccgcacgccgatgaatgccgtgctgggcatgctgcaactggcccggcagactgatctcaacgaacgccagcgcgactacctggacaaggccagctcggcggcaacctcgttgctcggcctgctcaacgacatcctcgactactcgaagatcgaggccggcaaactggtcctggaaatgctccccttcgagctggagccgctgatgcaggacctggccgtggtgctctccggcaaccagggcgacaaggacgtcgaggtgatcttcgacatcgatcccgagctgcccagcgcggtggtcggcgaccgcctgcgcctgcagcagatcctcatcaacctggccggcaacgcactgaagttcaccgcccgcgggcacgtcctggtgagcttgcggcgtctggcgcacgacgcccacctggtgcgcctgcgggtgctggtggcggacaccggcatcggcatcagcgcggaacagcagcagcgcatcttcgaaggtttcacccaggccgaggcgtccacctcgcgacgcttcggcggcaccggcctcggcctgttcatctgcaagcgcctggtcgacctgatgggcggcgagttgcgggtcgagagcgcgccgggcagcggtagccggttctggttcgacctggacctcgacgtcgcccacgaccaaccggcagcggcagcgaggcggtggcgcgggtccaggcggcgatggccgagggccgtcgctacgacgtggtgctga

SEQ ID NO: 350719 - DNA, 582 bp, Pseudomonas aeruginosa
atgctgttccgacgcccggcgctggtttgcctgtacgtgctgaccgtggtggtgatcagcgcccagttcaccgcctacagctacatcgagcccttcgccaagcaggtggcgcagatgagcggcgaggcgaccaccctgctgttgctgttgttcggcggcgccgggatcttcggttcgatcctcttcagccgctacagcgaggctttcccgcgaggcttcctgctggccgcgatcctcgccttgggcagcagcctggcgctgctgttgccgctgtccgcgcagccgacctggctgatggcgctcagcctgctctggggcatgtcgatcatgtgcttcggcctggcccagcagtcccgcgtcctgcgcctcgcctcggacgccaccgacgtggccatggcgctgttctccggcctgtacaacgtcggcatcggcgccggcgcgctgctcggcagcgtggtcagcgaacgcatgggcctggcctcgatcggcaacgtcggcgccgcgctggcgctggccggcctgctgctcgccctgttcgccgcactgcgctacgcggaggcgctgaaaaccacgtcgttgtga

SEQ ID NO: 350720 - DNA, 165 bp, Pseudomonas aeruginosa
atgcgacgcgaaccgatcgtgctgttcgacaacggcagccaccagtgcctgtgtttcgatgacctcgtcagcggcgaaggggtccagtccaaccagttcctgattgtcgactgtagcgcggcgcgaaatttggcgcggatttgcgcaataaatgacgcgccctaa

SEQ ID NO: 350721 - DNA, 225 bp, Pseudomonas aeruginosa
atggatgaggtgcttagacgaaggctgcgggcggagctgcttgaggtggggtttctcaaccagtgctgcctcgatctgatggaagctatggattccgagttcagtctcaccgaggaccagcgcgaatgcatcgagcagctcggccgattcctgcgggagggcatcggcaagctgaccgctctgtctgagcgggtagccgatggcgatatcgtcgtgctgtgctga

SEQ ID NO: 350722 - DNA, 288 bp, Pseudomonas aeruginosa
  misc_feature (50)..(50): n is a, c, g, or t
atgatgaagcgggttctctacaaaggggcgttcttcactgagtgggacgncccgctggcggccatcgctgaaactgccggggtgagcctggacgatcttacgttccaccctggcgacgcgctggccgaggtccaggggctgcgccggcaggcataccgggacgaggctgacccgctgcgcttggaggccgagtatgacgccatcgctaccggtacagagccggacctgtcggcctgggtcgaagctgtcaaagcgatcaaagaacgctatccgctcccccagtcctaa

SEQ ID NO: 350723 - DNA, 231 bp, Pseudomonas aeruginosa; identical to SEQ ID NO: 334743

SEQ ID NO: 350724 - DNA, 1686 bp, Pseudomonas aeruginosa
atgacccatctaaaaatcaccggcatgacttgcgactcgtgcgcggcgcacgtcaaggaagcgctggaaaaagtgccaggcgtgcagtcggcgctggtgtcctatccgaagggcacagcgcaactcgccatcgtgccgggcacatcgccggacgcgctgactgccgccgtggccggactgggctacaaggcaacgctagccgatgcgccactggcggacaaccgcgtcggactgctcgacaaggtgcggggatggatggccgccgccgaaaagcacagtggcaacgagcccccggtgcaggtagcggtcattggcagcggtggagccgcgatggcggcggcgctgaaggccgtcgagcaaggcgcgcaggtcacgctgatcgagcgcggcaccatcggcggcacctgcgtcaatgtcggctgtgtgccgtccaagatcatgatccgcgccgcccacatcgcccatctgcgccgggaaagcccgttcgatggcggtattgcggcaactgtgcctacgattgaccgcagtaagctgctggcccagcagcaggcccgcgtcgacgaactgcggcacgccaagtacgaaggcatcctgggcggtaatccggccatcaccgttgtgcacggtgaggcgcgcttcaaggacgaccagagccttaccgtccgtttgaacgagggtggcgagcgcgtcgtgatgttcgaccgctgcctggtcgccacgggtgccagcccggcggtcccgccgattccgggcttgaaagagtcaccctactggacttccaccgaggccctggcgagcgacaccattcccgaacgccttgccgtaatcggctcgtcggtggtggcgctggagctggcgcaagcctttgcccggctgggcagcaaggtcacggtcctggcgcgcaataccttgttcttccgtgaagacccggccatcggcgaggcggtgacagccgctttccgtgccgagggcatcgaggtgctggagcacacgcaagccagccaggtcgcccatatggacggtgaattcgtgctgaccaccacgcacggtgaattgcgcgccgacaaactgctggttgccaccggtcggacaccgaacacgcgcagcctcgcgctggacgcagcgggggtcactgtcaatgcgcaaggtgccatcgtcatcgaccaaggcatgcgcacgagcaacccgaacatctacgcggccggcgactgcaccgaccagccgcagttcgtctatgtggcggcagcggccggcacccgtgccgcgatcaacatgaccggcggcgatgcggcgctcgacctgaccgcaatgccggccgtggtgttcaccgatccgcaagtggcgaccgtgggctacagcgaggcggaagcccaccacgacgggatcgagaccgacagccgcaccttgaccttggacaacgtgccgcgtgcgctcgccaacttcgacacacgcggcttcatcaagttggttatcgaggaaggcagccatcggctgatcggcgtacaggcggtcgcgccggaagcgggtgaactgatccagacggcggctctggccattcgcaaccgcatgacggtgcaggaactggccgaccagttgttcccctacctgacgatggtcgaggggttgaagctcgcggcgcagaccttcaacaaggatgtgaagcagctttcctgctgcgccgggtga

SEQ ID NO: 350725 - DNA, 915 bp, Pseudomonas aeruginosa
gtgaatctctggtacgccggcttcaggtccgaagtggtcactgtgctcgaggcctgggaggcaatcggacacgatatcggcatgaacccaagcaagggcgaactgctcgattcgctgcgctacatgctggagaaatgcgaagcacatgacgatgccctggccagggtcaaagcactcgaagccctggtcgccgcgcgcatcaaggatgttcccgtagacgctccagtaattgccgtggtcggcgacttcaacgaagaacaggttcacgaatgcaagcggttccatgacgccattcgggcgcaacgcaaccccaaggcgattgtggttttcctaaactctaaaaatgacatccaggcagtggacgaagctgccatgtgcgctgccggctgggttcgcgccgaagcccctgtggctcaggccgagcaggcagaggcggagcgaccggaagttgttgcattccgctaccgctgcaccaatgccgagggagagccgcttccgggctggttctatagcgatgatgcaggaacgctcggtctgcgcgaaccgctgacaaccgtcgccgagtgcgatcgcatcgtcggggcggtgctgcgccaaaagcatgaagccgacaccgcgttggcatgggctactcggcactaccagacggttgagcaacagcgcgacgcagccctggccagggtcgatgcgctcgcagtgcaggtgttgaagctcggcgggactatcagcttcgcccactacccggccgcccaggctgggcaggtgccggaggtgtcagggatcggacgcgacaccggccatccgcgtgccgtcgttctgtacctacacaaagagccgaccgacgatgacctgcgagccattcaggatggtctgcgctcactcgccgctgcgcctcagccagcaggaggtgagtaa

SEQ ID NO: 350726 - DNA, 1140 bp, Pseudomonas aeruginosa
gtgtgtcccgaaaacggtgaaaccggcatcgtctccacccaggttgagggtcagcgatcccaggttttgcatggctgccggcggattcgcctgctgaagcgccgcagtcggaatctcgggtatctcggggagagttcgttgatacctctgcgacatctgcagcgactgcaccgcgttgaagatgcgctctcctccgcgcatcatcatcaactccggcccacgctccccaacccaagccatgccagggggagcgctctgcgtaccagtggcaaacccgggtatcttgggggtgatgctgggcacgcccggcaagcccatctccggaggcggaaccagcgtgataggtatcacgagttgctcagccaggccggcggcgatgtcggcgacctgttgcttcaaggtctccgcgctttcgaagtccatcccgaacgacacctcgacgttttgcacagccttgatgcgctcctcaaggtcggccaggttcaggcggttgacgtcatccgcagccttggcattaccagcctcgacctctgcggccttgttggcgatgcgctccacctccttggccacgccttcgaagccgtagctgttcgcgccagcgtccttcagttgctgaaggatctgaagcgcgcggcgcgcctcctcgatcgccttttggttgttgccagcggtcagggcgttgcgagccgaggcctgggccgcagtggcatcaccgaaggtctgcgttccggaggtgggcgtcgcctggatgcccttcaccagatcggcaaactccttgcggacatctgcctggcgcgaaagcgcgtcgttgaggttcttggtggactgctcaaggagggccttggtccgcacaacctcagattggaggtcggcgacattctgatcccgagcccgcttcagagcatcgttctgtcgcttcacgatctgctcttggcgcgccttctcggcggcgagggtggctgtgaggctgccctccccctttttcaccagcgtattcgccgtgttgatgttcttggcaacatcgttcaactggttcgcaacccagtcgacgacgcctgtttccttcgcgcgacgtccccagtatttctgggtttcggaaaagatccggttcagccccgcaccaatctccggggcaaatga

SEQ ID NO: 350727 - DNA, 321 bp, Pseudomonas aeruginosa; identical to SEQ ID NO: 324255

SEQ ID NO: 350728 - DNA, 303 bp, Pseudomonas aeruginosa; identical to SEQ ID NO: 324256

SEQ ID NO: 350729 - DNA, 549 bp, Pseudomonas aeruginosa; identical to SEQ ID NO: 324257

SEQ ID NO: 350730 - DNA, 1674 bp, Pseudomonas aeruginosa; identical to SEQ ID NO: 324258

SEQ ID NO: 350731 - DNA, 1575 bp, Pseudomonas aeruginosa
atggtgactatgacccggattctcggccccgacggccagccgctgcgcctgaacgagatccgtgagccccagaccgcccaactgaccagcctgcaccatgaggtcgctggtcacccatctcgtggactcacgccttcaaggcttgcctcgctcctcgactccgccgagcaaggtgacatcgtcgcccaatatgagctgttcgaagatatggaggagaaggatggccatatccacgccgagatgtccaagcggcgccgcgcggtggctcagttggactgggacatcgttccacccgacaacgcaacagctaaggagaaggaagctgcggcggccttgtacaacctcatgcaaggtctggacgactttgaagaggtaatcttcgataccaccgacgccatcggcaagggcttcgcctgccaggagttcgacggctggcaacgcgttgatggtaactggctccccaaggcgatcatccatcgcccccagtcatggttccaactaccgcgaggcgttcggcaagagatccggttgcgtggtccgtcgggagggacgccgttgcaacccttcggttggatcacgcacgttcacaagtccaagagcggttatctggagcgctcggctctgttccgtgtcctggtctggccctacctgttcaagaactactcggtaggcgacctggccgagtttctggagatctacggcatccccatgcgggtcggtaaatacccgaccggtgccaccgagaaagagaagctcacactgctgcgcgccctggccgcacttgggcacaacgctgccgggatcatccctcttggcatggagctggattttctgaacgcagcccagggcgatccggccgcgttccagttgatgatcgagtggtgcgaacgaactcagtcaaaagccatcctcggtggcacgttgaccagccaagcagatggaaagacctccaccaacgccctgggcaatgtccacaacgaggtacgcaaggacttgcgggacgccgacgcgaaactgttggcgaaaacactcagtcgtgacctggtctacccgattgccgtcctgaatgggcttgtcgacagctgggcacgttgtccccggctggtcttcgacgtccaggaggccgaagacctcagcgcctacgccacagctcttccaccattggtgaagctcgggatgcagatccctcgcagttgggcgcaacagcgcctggcaatcccggagccagccgagggcgaggaagtgctcgcgaccgtgatcgagccggtcgtaccgccggcgcaggtacccacacgtgccttgggaaaagcggtggccaccgctgagacacctccgccgaagaccgccgaccagcagttggatgacgcgctccgcccgaccaccgaccgatggatcgaccaagtccgtgcgctggtgcagagtgcatccagcctggatgaaatccgtgatggcctggagcaactgcttccggacatgaccctggaacagtacgcggatgcgatggcgcaggccctggccgctgcggcgctacaggggcgagtcgagatcctgcaggaggtggccggtggcgcttag

SEQ ID NO: 350732 - DNA, 1239 bp, Pseudomonas aeruginosa
gtggcgcttagagcaacctcactgcctttcgccgagcagaaccagttcttccggcgcaagctcaatctaccgaccaacgcctggacggacatctacacccgcgagcatgactatgccttcgtcgtcgccggcgccaaccgcgacgacctggtgcaggacttccgtcaggcagtggagaaggcaatagccgatggcactacgctggaggagttccgccgtgacttcgaccgtatcgtcgccaagtacggctggagctaccggggcgggcgcaactggcgcagtcgagtgatctacgagaccaacatgcgcagcagctacatggccggtcgcctggagcagctcatggctgtgcgcgaggaacgtccttactggcaatacctgcacagcgatgctgttgagcatccgagaccgaagcatgagtcctggaatggcctggtcctgcgttgggacgatccttggtggcaataccatttcccgatcaatgcctggggatgccagtgcagcgtgcgcgcgctcagcgaggatgacctacgccgtatgggcaaggatggcccggacgaggcaccaccgattgtgtggcaggcccggaccatcggccagaacagcccagacgggccgcgagtggtcgaagtaccagaaggcattgatcccggcttcgagtacatgccgggccaagccagactggacactgcggtgcctcagcctcgcaatggcgggcctacgcctccggccggtctaccaagcactccggcttctgacccgctgcctgcgcctcgtcctgttccgaccaaccagttgctggaccaggacatgctcgatgccgacgcgatcaaacgcttcctgcggccgttcggcgcgaccctggataagccggctgtcttccaggatgtagtcggccagcgcgtagtggtggggcgcgagatgtttgtcagccgggccggcggtgatctgctagtagcggaatccggcatgtcgaagaagtggttgatgctggcggctgaagcactgcggcgtccggcagagatatgggtacggctggattgggtcgaatctctgaaaaaggctgtggtccgtcgacgttacctggccagcctgcaggtaagcggcgaagcggctcccgtccaggttgttgtcgagctggacgccaacggctgggcagcgagcgccgcggtcgtccagccagggcagcaaccgctggcaccatatcgccaaggtgttcggctgtaccaggagacgtga

SEQ ID NO: 350733 - DNA, 576 bp, Pseudomonas aeruginosa
gtggctggagtaacccttgaatacagcagtgagaaggtacttgaggcgctgagggcagccgctgatctcatgcgctccccggccccgatgttccgtgatatgggcgagtacatgctcatcgccctggacgaacgcttcgagagccagagcgcacctgacggtacgccttggcaggcgttgtccccgacctatcagcggcgaaagcggaagaaccaggacaagatcctggtgctcgatggctatctgaaaaacaccatccgatatcaggccagcgacgacgaactggcggtcgggtccaaccgtgcctatgcagcgattcatcaattcggtggtgaaatacagattgcggctcgcagccagcaagcgtatttccggcatgacgccaagaccaacgaggtcagcccccagttcgtgaacagacgtcgggcgaacttctctcagtgggtgtccctcggtccctacactatcaagatcccggctcggccgtggctaggcaccagcaaccgcgacgatgacgagctgctagcgatcgcacagaagcacctcgatcgagcgctttccgggaaaagctcctga

SEQ ID NO: 350734 - DNA, 1110 bp, Pseudomonas aeruginosa; identical to SEQ ID NO: 324262

SEQ ID NO: 350735 - DNA, 405 bp, Pseudomonas aeruginosa; identical to SEQ ID NO: 324263

SEQ ID NO: 350736 - DNA, 897 bp, Pseudomonas aeruginosa; identical to SEQ ID NO: 324264

SEQ ID NO: 350737 - DNA, 516 bp, Pseudomonas aeruginosa; identical to SEQ ID NO: 324265

SEQ ID NO: 350738 - DNA, 453 bp, Pseudomonas aeruginosa; identical to SEQ ID NO: 324266

SEQ ID NO: 350739 - DNA, 204 bp, Pseudomonas aeruginosa; identical to SEQ ID NO: 324267

SEQ ID NO: 350740 - DNA, 741 bp, Pseudomonas aeruginosa; identical to SEQ ID NO: 324268

SEQ ID NO: 350741 - DNA, 234 bp, Pseudomonas aeruginosa
atgatcgattggagccaggtaaagaccgctgaacagcaggcgcaagaacgctggcaggccgcatacgacactgcgattgcagcgcgaatcctcgcttacgaaaaagaaagcgatccgctcaaggccgaggccgagttcgatgcgatcaaggccggcgtggaaccgaactactctgcctgggtcgccaaggtcgaggagatcaaggccaggtatccgctgccggacgcgggttag

SEQ ID NO: 350742 - DNA, 1074 bp, Pseudomonas aeruginosa
atgcgccgcctccagcgcgatgcgttcgcgcgccgccaggctctgccggttgaccagttcctccgcgctgcggatctcggcgctgccgccggcgtaggtcttgccgttcagctccacggcctgggccgcgatcttcaggtcgccctggctggaggcctgggccaggctcagcttgccgctggcgtcgatgcggatgtcgccgccgctggcggccatgtcgccggccagcttcacccccacgccctgctcggtgccgaccaggcggatcgccccggcgtacatcccgcccagcgccgagctgtcgatcgccagctgtggcttctcgctgccatcggcggcgcgcggcgtggcctgcaggctgtcggcctggacgtcgttgcggccggtgacgatgttgaggttcttcgcgtagagcttggcgttgagcttggcgctgcgggtgatcaggtcgaactgttcgaggttgccgacgttcagttcggcgccttcgacgacgatgtcgccgccgtccacctggaagcgctccaggcgctggccgtccatgatcggcttgccggtggtgagggtcgcgcgcggcgtgttgatgaagccgcagccctggcaggtgatgccgtgcgggttggcgacgatcacccgcgccgactgcccggccacctcggtgtagccggccagggtgctgcggttgccgccagtgacctggttgaggatcacctgcgccgcctggcccttgaggttggggttgccgaggatgatcccgccgagctgggtaccctgggtcttgccggtagcgttgttgaggatcagcccgttggcgccgacgttgtagtcgcggaaatggttgttcgacagcccggcgccgttgggcgtggcgatattgacgatgggcacgccgttgcccgcctggcccaggccggtgttgccgccggcggccttgtccagcgccagccccgccgccgcggcgacgatcgggttgaggaacaggatgccggccagggacagggcgatgcactggttcagcgggctgcggatgtccatatcgttactccttggcgggtaggggcccggcgaggttaa

SEQ ID NO: 350743 - DNA, 546 bp, Pseudomonas aeruginosa
atggcaactattacgcacgtcctgtccggcgctggggagccgctcgatccgcctccaagcatcggtgctcactacgtgaacacgaacaacggcgcgctataccttgcgaagggcatctcgagcggtgccgattgggtgaagctgggtagtggcggtggcagcgttccgagcgaggtgctgcatgtcaacaccgacggccagttccttctcgagcctcaacactcatttgttgaggcccgtctgttcgcaattcccgagctcggcactgccgcaattggaatcgatcccagcacatcccgacagttcgacctgaatatcaggaccgcgggtccgagcgggcagcaactgcagatcagagttacgtccggtgaattgcccggagggctgtcgatcgttggcacaaccaggcagtgggctgttcaggagtcgtatggattcttgatcaatgcaaatgacctcaacggcgaagtgtgggcgcgcgtctatttcgatgctgacgaactcactctgtcgatgctcgtgttcagcgatgtgccgaacgcgtag

SEQ ID NO: 350744 - DNA, 231 bp, Pseudomonas aeruginosa; identical to SEQ ID NO: 326738

SEQ ID NO: 350745 - DNA, 498 bp, Pseudomonas aeruginosa; identical to SEQ ID NO: 345577

SEQ ID NO: 350746 - DNA, 297 bp, Pseudomonas aeruginosa; identical to SEQ ID NO: 324251

SEQ ID NO: 350747 - DNA, 654 bp, Pseudomonas aeruginosa
atgcgctcggtgagccaccagatgaacatggccaagctgccgatgcaccgcgacctggccggcttcgacttcagcgcctccagcgcagacgctcgtttgatcagcgaactggccagtctggcctttaccgacaccgcgcagaacgtggtgctgatcggtgggcctggcaccggtaaaacccacctggccactgcgctggccgtgtccggcatcacccggcacggcaagcgcgtgcgcttctactccacggtcgatctggtcaatctgctggagcgcgaaaagcacgacggcaaagccgggcggatcgcccaagctctgctgcgcatggatctggtcatcctcgacgaactgggttatctgcccttcagccaggccggcggtgcgttgctgtttcacctgctatccaagctgtacgaacacaccagcgtggtgatcaccaccaacctgagcttcgccgaatggtcgagcgtgttcggcgacgccaagatgaccaccgccctgctggatcggctgacccaccactgccacatcgtcgaaaccggtaacgagtcctatcgcctgcaacacagtagcttggcggcccaggccaagatcaaatcacgggagcgaaagcgtaagggcggccaggaaccggaggacgatgagccgttctga

SEQ ID NO: 350748 - DNA, 924 bp, Pseudomonas aeruginosa; identical to SEQ ID NO: 324272

SEQ ID NO: 350749 - DNA, 837 bp, Pseudomonas aeruginosa; identical to SEQ ID NO: 331027

SEQ ID NO: 350750 - DNA, 255 bp, Pseudomonas aeruginosa; identical to SEQ ID NO: 331028

SEQ ID NO: 350751 - DNA, 234 bp, Pseudomonas aeruginosa; identical to SEQ ID NO: 331029

SEQ ID NO: 350752 - DNA, 288 bp, Pseudomonas aeruginosa
atgatgaagcgggttctctacaaaggggcgttcttcactgagtgggacggcccgctggcggccatcgctgaaactgccggggtgagcctggacgatcttacgttccaccctggcgacgcgctggccgaggtccaggggctgcgccggcaggcataccgggacgaggctgacccgctgcgcttggaggccgagtatgacgccatcgctaccggtacagagccggacctgtcggcctgggtcgaagctgtcaaagcgatcaaagaacgctatccgctcccccagtcctaa

SEQ ID NO: 350753 - DNA, 225 bp, Pseudomonas aeruginosa; identical to SEQ ID NO: 350721

SEQ ID NO: 350754 - DNA, 201 bp, Pseudomonas aeruginosa
atggctgatgttttggagatcgactgctccgagtgcagcacgccgtaccccgaaatcaccgcgcgctctgcagctcatgacccgagcctgatcgacctggtgatcacctgcagcaactgcggacacatcctgaatgcgttcgtctccctggctgagatgagcgttgtaccgaatcccgaagaggaaacctcccatggctga

SEQ ID NO: 350755 - DNA, 222 bp, Pseudomonas aeruginosa; identical to SEQ ID NO: 334796

SEQ ID NO: 350756 - DNA, 315 bp, Pseudomonas aeruginosa
atgagcaccgagaaataccgctccgagcaggtccagcgaaccctgcgggtcatgctggccctcgccgccaacgaattccgggggctgctgctgaaggaggtggcggtcgccgccgagtgcgacgccagcgccgccctgcgcgccctggaaaacctgcgcatcgccggcttggccgaccgcagcccgcatgacgacaagcgctggctgctcggaccgcgcctggtccaggtggcctttggattcgacgaagccctgcgccgcggccagaacgaactcaacgagcgtcgccaacgctacacccgtcttccgaactaa

SEQ ID NO: 350757 - DNA, 315 bp, Pseudomonas aeruginosa
atgagcaccgaaaaataccgctccgagcaggtccagcgaaccctacgggtcatgctggccctcgccgccaacgaattccgggggctgctgctgaaggaggtggcggtcgccgccgagtgcgacgccagcgccgccctgcgcgccctggaaaacctgcgcatcgccggcttggccgaccgcagcccgcatgacgacaagcgctggctgctcggaccgcgcctggtccaggtggcctttggcttcgacgaagccctgcgccgcggccaggacgaactcaacgagcgtcgccaacgctacacccgtctcccgaactaa

SEQ ID NO: 350758 - DNA, 282 bp, Pseudomonas aeruginosa; identical to SEQ ID NO: 331489

SEQ ID NO: 350759 - DNA, 561 bp, Pseudomonas aeruginosa
  misc_feature (405)..(405): n is a, c, g, or t
atggcccagattcgatttttcaaagtggcgaccctgccgggtacgctggagccggacagcttctacttcgtggagaacagcaacttcgccgaatcgtatttgacgaactcggcgggtgtggcgcgctcgatcggcaacagcgcgatgatcaatgcgctgatcaacgaggcgttggccagcctgcccggcaccggcgcgccgatcctgttcgttgtggatatcgccgcgcgcgacgccctggagcctgagggcgcaatcttcgtcctggttcaggatgcgagcgcggaccctacagtcgaatccggagctgcgctgtacgcatggaaccctgcgaccagcgcctggctgaaggtggccgagtatgagtcgatggacgtcgagctcaactgggacgcgatcaacggncggccgacctcgacgccggcgcagatcgacactgccgtttcccaggcgcacacgcacgcgaacaagtcgacgctggacaagttcggtgaggcttctggcctggtgcgcttcaacggccagccgatcccggccgagtggaatgggacggcctggtaa

SEQ ID NO: 350760 - DNA, 372 bp, Pseudomonas aeruginosa; identical to SEQ ID NO: 334795

SEQ ID NO: 350761 - DNA, 414 bp, Pseudomonas aeruginosa
atgcagcgctacaaccgcgggatcgagcggcttgccacagaccatctgtgccagaacaacgccagcaccctctacaaatggatgggtaatggccgcctgccgctgaccatggtgctgtcattggagaaagcctgcggcctgccgctgatcactcgctacctggccgccgctcacggcaagctcctggtcgacatcccggttggcaaggcttgcaacgccagcgaccttcagcagctgcagggcgtgctgcacagcgctaccggcgcgttgatggccttctacgacggcaagcaatccgccgaacagaccctggacgccatccgcgctggccttgaatccctcgcctggcaccacggcaacgtcgcccaggcagaaacccctcaactggactttggagtggctgacgatgagtga

SEQ ID NO: 350762 - DNA, 282 bp, Pseudomonas aeruginosa
atggccgtcctccagacccacaaggtcgtcgcgcaactgcctgccgcgctggagtcgaacgcgatctacttcgtccggcgcagcaccggctacgaccagttcgtcaccaacggcgcgggcgtggtggtggcctatccgatgaacgtccgtatccccgcggccgttcctgggtacctcgcagatggctccatgctgaggctcacgatgaaccctgacggccaactgccggcgtacaccgacggcggcgcaactctcaacctgcaggtgcttttcaatggctga

SEQ ID NO: 350763 - DNA, 282 bp, Pseudomonas aeruginosa; identical to SEQ ID NO: 341783

SEQ ID NO: 350764 - DNA, 183 bp, Pseudomonas aeruginosa; identical to SEQ ID NO: 341360

SEQ ID NO: 350765 - DNA, 969 bp, Pseudomonas aeruginosa
atgctcctggccggccccgcgctggccgacaccgtatggctggacaacggcgaccgcctgtccggcgagatcgtgctgatggacggcggcaagctggcgctgaagacccgttatgccggccaggtgctgatcgattggaaggatatcgacaccatcagttccgacaaacccctgctgatcaagcagcagggcgtatccgggcagcgtagccgaaccctggaggcggcgggcaagggcatggtgcggatcgtcgatggcggcagccataccgtcccgctggccagtattcgccagatggtgccgccgcgaccgctggtggaggacctggtctgggagggcaatctcgacgtcaagctggatagcaagcgcaacgacagcgacaaggacgaatggaagctcaagggcgatacccggcttcgccacggtgcctggcgccatgtgctggcgggggaagtggagcgggaaaagaaggacgggcgcaaggtcgaggacaactgggagctggactacgacctcgatcgcttcttcggcgaacactggttctggcgcggcagctattcgcagaagcacgatgcgatcgacaacctggagcgccagagcgcgctgggaaccggccccggctaccagttctgggacgacgaactcgggcgtttcgacctggtcgccgagatcagtcgctggcaactggagtggcgcgatcagccgcgcgaggatttcacctcctattcgctggagtgggactacaagcggctgctcgccggcacccggctggagctgtacagcaagggaaccgtgctggttcccggcatcgagcggatcgactacctgctcgacagcgaatacggcctgcgctatcgcctgaacagttgggcgcgtctttcgttcctctatgaactggaccagttgcgcaccgaggggggcacccagtccgaccggcattacctgatcggggtcggcgtcggctggtga

SEQ ID NO: 350766 - DNA, 723 bp, Pseudomonas aeruginosa
atgcatcgcggcggcgaactcggccttgcgcggatcggcctcgtaggcgcggcggaacatgtcggtgtcgatcaccgccggacacacggcgttgacgcggatgcccttcttcgcgtactcgatcgccgccgatttggtcaggccgatcaccgcgtgcttggaagcagcgtagatgctcatcttcggcgccgcgccgagcccggcgaccgaggcggtgttgacgatcgcgccaccgccctgggccagcatcagcgggatctggtgcttcatgcacaaccagacgcccttcacgttgacagccatgatggcgtcgaactcggcttcgttgccgtcggccagcttgccctgctcgatctcgataccggcgttgttgaaggcatagtcgagacggccgtaggccgctgcgcaaccctctaccagcgccttgacctcggcgtcgcgggtgacgtcgcagcgaatgaagagggcttcgcctcccgcctggcggatcgcctcgaccgtgccctcgccgccggcgctgtccaggtcggcgaccaccaccttgaccccggcggcggcgaaggccagcgcggtagcgcggccgatgcccgccgcaccgccagtgaccagtgcgacctggccggaaagaagtttgctcatctgctgctcctcggaaaatcgccttccgccaaccgcgacggaaccgggccgcgccagtctagccagggccggcgcaaggcatag

SEQ ID NO: 350767 - DNA, 309 bp, Pseudomonas aeruginosa
atgcgcgttggggaacagcaggcgcgccggctggccttcttcccaggcggcgagcaggccgccggcgtggtcgaagtgcaggtgggtgagcagcaccacgtcgatgtcggcgtcgtccaggccgaccgcggcgaggctgtcgagcagtacgtggcgctcttcctggacgccgtagcgctggcgcagggcgggcgggaagaacgcgccgatgccggcctccaccagtacgttgcgctcgccgtcgcgcaccagcagggcacggcagccgaggtcgatgcggttctccgcatcgggctgcatccagcgtga

SEQ ID NO: 350768 - DNA, 1953 bp, Pseudomonas aeruginosa; identical to SEQ ID NO: 323871

SEQ ID NO: 350769 - DNA, 840 bp, Pseudomonas aeruginosa; identical to SEQ ID NO: 330482

SEQ ID NO: 350770 - DNA, 264 bp, Pseudomonas aeruginosa; identical to SEQ ID NO: 330483

SEQ ID NO: 350771 - DNA, 756 bp, Pseudomonas aeruginosa
atggcgggcaatacggggttcgataacagcctggcgtggaacgcgcagcccggtaactcggtgcagaacaacccttattcgtcgaaggggccgaccgtcgcacagctgagcggtgggccgttcacgcgctaccacctgtttgccacggcggcttatctgcacctgcacgtcgagattgcggccggtcagttccggccggtgatgattggctcgctcaacaagcgcggagtcgaatacagcggcggccagtacgtatgcggctccgtaatctatcaggcgggccagatgctgacatcgagctggtcctgtcatccgttcgacggctatcacgttcgctatagcgacggtggttgcgtactgcgtgtggatggcctggatggcggcccctcgcccgactggctgccattcgactacacgacgaacatcccccggcgggtcatcgggccaggccgtggaaactacagaagtcagtaccatcctgacgtcggactgatcgacgccagcgcaaacgagctgaacagctcgaccaccactgtgccgtgcgccatctatgcgttcggcgctcagcagcgctcgcgctacgtgggcgaagtgccggactttggcatatgcaacatggccttcctcgcgcctggtgatccgcttgtcgtcggtagcgacacttggcgcgtctatccgttgctccaacgcggaaccgctaccgacttcgacagcaccagcgcctgggtcggctattgcttccgggtggtcgagtga

SEQ ID NO: 350772 - DNA, 696 bp, Pseudomonas aeruginosa
gtgcagaacaacccgtattcgtcgaaagaagcaaccatagcgcagctcagcgccgggccatttacgcgctatcacctgttcgccaccgctgcctatctgcacctgcacgtcgaaatcgctgccggtcagtttcgtccagtgatgatcggctccctcaacaagcgtggcgtcggctatacgggcggccagtatgtttgcggctcgttcctctacagctctggccaggcgctcacaaacaactggtcatcgcatccattcgatggttaccacattcgatacagcggcggcggcagcatgctgcggctagatagcctcgacggtagcccatcgccggactggttgccgttcgactacacaacgaacgtctcccggcgcgtcgtcggccccggtcgcggaaactacagcagtcagtaccatccagacgtggggctgatcgacgcgagcgcaaacgagctgaacagctcgaccacccctgtgccctgcgccatctatgcgttcggcgctcagcagcgctcgcggtacgtgggcgaggtgccggactttggcatatgcaacatggcgttcctcgcgcctggcgatccgctggtgatcggcagcgacacttggcgcgtctatccgttgctccaacgcggaagcgctaccgatttcggcaacaccagcgcctgggtcggctactgcttccgagtgcttgagtaa

SEQ ID NO: 350773 - DNA, 378 bp, Pseudomonas aeruginosa
gtgccgacccacgccgacgacctgaccctggtcgccaccgtctcgcagctgtccaccgcgctggacgtgcgcaatatcggctatgcccgtttcgccaatggtcggccgggccgtcgcgatatccgcatcgagctgtacgacggcaccgtctatcaccgacgcatccttaccagcaccgagctggacgccgacaccgagcgcttggccatcgacgccgccctgggccggctggtcgagcctggcgacgtggcgcgcatttgtttcatggcgctctgtagcgccgccaccgacgtggtcgagatcgagcacgtcactgatagcgagggcgtagcaactgccgccctgacgttcaaaggggttcgtgacgatgagttttaa

SEQ ID NO: 350774 - DNA, 516 bp, Pseudomonas aeruginosa
atgaaccagacccggaccattcgcttgccgatccatgtggtcaaggagctcaacgtctacctgcgtgcggcgcgggaactgacccacaagctcgaccacgaaccttcccccgaagaaatcgccaacctgctggagaagccggtcgccgaggtcaagcgcatgctcggcctgaacgaacgggtgacttcggtagacgtctctcttggtccggactcggacaagaccctgctggatacgctcaccgacgatcgccccaccgacccgtgcgagctgctgcaggatgacgatctcagcgaaagcatcgaccagtggctgacggaactcaccgacaagcagcgtgaggtggtgattcgccgcttcggcttgcgcgggcacgaaagcagcacgctggaagaggtcggccaggaaatcggcctgacccgcgagcgggttcgtcagatccaggtcgaggcgctgaagcgcctgcgggagatcctggagaagaatggcctgtcgagtgacgcgctgttccagtga

SEQ ID NO: 350775 - DNA, 681 bp, Pseudomonas aeruginosa
gtgagcgagttctttgaccgtacgggccccttgcaggaggcgggaagctatccgcagtgggcgcagcaactgatcgtcgactgccaggcgagcaaggaccgggtttccggtcacgagctgtaccggcgcatgcgcgacgccgagctgagcccggcgctgatgcgcctgtacctgatcggcggctggccggtggtcgagcagttccccttgtacatgtcgcagaacctgctgaagacccgtttcgcccgccatcccggcgaagacatggcgcgccgctggctgatgcgcaacattcgggtcgaactcaaccacgccgactactggctgcactgggccgaggcccacggcgtgagcctggccgagatccaggcgcaagacgtgccggccgaactgcacgcgctcagccactggtgctggcacacctgcgccagcgactcactggcggtggccatggccgccaccaactacgccatcgaaggcgtcaccggcgagtggtcggcgctggtctgttcgaacggcgtctacgaaaacgccttccccaaggaaggccgcaagcgcgccatgaagtggctcaagctccacgcccagtacgacgacgactacatgtacctgttcctcgagcgctgcatgcagctggaggaggcgcgcagcgcccgcaagctcgcggtcggcgcggagtag

SEQ ID NO: 350776 - DNA, 492 bp, Pseudomonas aeruginosa
atggacaagatgggctatgaacgcggcctggtgcgctacacctcggaacgcgccctggaaggtggccagacccgcttcctgcgtccacgcctggtcggctacgcggcggtgatgctggcgatgatcggcgccttcgtcgtcgccctggatgcccgcccgctggcctcgctggacgtgacccgcgaccgtgggctgttccgcgagaacgccgccgggcagatcgagaacatctacaccctcaaggtcatcaacaagacccagcagccgcagcgctatcgcctgcaactcgacgacgcgccggagttccgcctgcagggcgagcacaccctgagcctgaagcccggcgagatcctcgacttcccggtgtcggtggcctctaccgccgaacgcgccagggccggctcgcaaccgctggcgttcagcctgcgcggcatcgacgacccgagcctggcggtcggcagcaccagcaccttcgtttcgccggcgcgctga

SEQ ID NO: 350777 - DNA, 2472 bp, Pseudomonas aeruginosa
atgctgaacctcgccgaataccgccagcgcccggcgctgctcgccgactggctgccctgggccgggttggtcgcgccgggcgtcgtcttgaacaaagacggcagtttccagcgcacggcccggtttcgcgggcctgacctcaacagcgccacgcaaagcgagttgatcgccacgtcagcgcgattgaacaacgcgctgcggcggctgggttcgggctgggcgctgttcatcgaagccgagcgctgcgctgccgccgactatccgcactcggagttccccgagccgctttcgtggctggtggacgaggaacgccgcgcagcgttcgaggaatcgggcaaccatttcgagagcggctatcacctgacgctggtgtacctgccgcccgaggaatcgcgcgcgcgtgcggcggggatgctgtacgagaaccggcccaccgaaggcgtggattggcgtgagcgcctgcaagccttcgtcgcggagacggatcgcgtctttgacctgctcgatggcgtgatgccggaaatcgcatggctcgatgacagccagacgctgacctacctgcacgccaccatctcgacgcggcgctattcgctggcggtgcccgaggtgccgttccacatcgacgcgctgctgaccgattccgtgatggtcggcggcctcgcaccgatgctgggcgaccagcacctgcgcgtggtgtcggtgcggggcttcccgacctcgacctggccagggattctggacgacctcaaccgcctgggctttgcgtatcgctggagtacgcgcttcctgtgcctggacaaagccgaggcggaaaaagaactcacccggctgcgccgccagtggttcgcaaaaaggaagaacgtcatcgcgctactgcgcgaaacgatcttccagcaggaaagcccgctggtcgataccgatgccagcaataaagccgccgacgcggacgcggcgttgcaggagctgggcagcgatcaagtcgccttcggctacctcaccgccacggtgacggtgctcgatgctgacccagccgcagccgacgagaagctgcgcatggtggagcgcgtcatccaggggcgcgggttcgtgaccattcccgaaacgctcaacgccgtggatgcgtggctgtcctcgctccccggcaacgcctacgccaacgtgcgccagcccatcgtctcgacgctgaacctggcgcacatgatgccggtgtcggcggtatgggccgggccggagaagaatgaccacttgggcggcccgccgctgatcgtcacgcgcaccgatggcgcgacgccgttccggctggtgacgcacatcggcgacgtgggccacacgctggtcgccggcccgaccggcatgggcaagtcggtcttgctcgccacgctggcgatgcagttccgccgctatcgcggctcgcgcatcttcgtgttcgacatggggcgttccatgcgagccacgatcctcgggctgggcggcgagcactacgacctgggcacggatggcgaaatcgccttccagccgctcgcccgcatcgaccgcgagggctaccgcacctgggccgccgaatggatcgaaggccgcttgctgcatgagggcgtggcggtcggcccggacgagaaggccgccatatggtcggcactcggcagcctcgccggtgctccgttggagcagcgcacgatgacgggcttgtcggtactgctgcaatcgaacgcgctgcgtcaggcgctcgcgccctatgtgctcggcggcgcgcacggcaagctgctggacgccgaccacgaccggctgggcaacgccgacgtgcagggcttcgagatggaggagctgatgcacagcaaggccgccgtcatggccgtgctgcattacctctttgcgcgcttcgatgaacgcttcgacggcgcgcccacgctgctgatcctcgatgaagcgtggctgtttctggatgacccggtgttcgcggcccgcatccggcaatggctcaagacgctgcgcaagaagaatgtctcggtcatcttcgccacccagagcctggccgacatcaaggattcgagcatcgcgcccgcgatcatcgaaagctgcgccagccgcatcttcctgccgaacccgcaggcgaccgagccgcagattcgcacgatctacgagggcttcggcctcaaccggcggcagatcgaaatcgtcgccaccgcgcagcccaagcgcgactactactaccaatcccgcctcggcaaccgtctgttcgacctctacctggggccggcgacgctggccttcgcgggcgcttccacgccgcaagaccagcgcgccattgatgacgttcttggccgcgtgccgccggacgccggcgcacccggcttcgcgggcgcctggctgcgccatcgcggcctcgattgggcggccgacctgctgccctcgtttcccggccttgtgccgggttccctccgtactaccgaccacccacaggagagcctgtcatga

SEQ ID NO: 350778 - DNA, 945 bp, Pseudomonas aeruginosa
atgaacctgcataaacatgcccgtttgagccctcgcggtcgagccctgcttgtggaccgcatccttgttcaaggcctacgcgccgaagaggcggcccatgccgccggcgtcagcgtgcgcaccgcctacaaatggctcaagcgtttcagccaggaagggccggatggcctgctcgatcgctcctcccgtcctcatcactgtccgcatgcaacaccgcaggcggtagtggatcgggtgtttgaacagcgacgtgcgcgccagacctatcgccagatcgccgaacagttgccggtggcgccgagcacgattgcccgcctgctgcggcgcgctggtttgcaccggctggccgagttggagcccgcaccgccgaccaaccgctacgaatacgcccggcccggccagttgctgcatttggatatcaagaaactggggcgcttccgccagcccggccatcgcgttaccggcaatcgtcagatcaactctcgtggcggcggttgggagtatgtccatctggccatcgacgaccactcgcgcgtggcctttgcctccatcgagccggatgagcgcgcccgcagtgccggccgggccctgttgctggccgtgcgttactaccgtgggctgggcgtgcgcttcgagcgcgtgctgaccgacaacggcgcctgttacagatcacgcagcttccgccgtctcgtgcgccggctcggtatgcaccacctgcgcacccggccctacacgccgcgcaccaacggcaaagccgagcgcctggtgcagaccagtctgcgcgagtgggcctacgcacgcgcctatgacagctccgaacagcgcgcccatgcgctcgggccgtggctgcatcactacaactggcaccggcgccatgccagcctcggctacaaaccacctatttcccgaattccactgaacaacgtgttgggtttacacaactag

SEQ ID NO: 350779 - DNA, 162 bp, Pseudomonas aeruginosa
atgcctctgatgaaatgggcgcggcttacgctgcggggtatgcacgcggcaagccgaaaactgcgggtgattcctgcgcactgcgggcgcttcggcttgcaggcccatgcgggcctgccatcgccgggcgggaagcccggtcacgtcaacgccgccgcctga

SEQ ID NO: 350780 - DNA, 321 bp, Pseudomonas aeruginosa
atgcgatgcgtcctcgtcctgtgtgtcgcgctgctggccgcttgcggcgagcagccggccgaccaccttgccgatgccctggccgccgatcccgtgcggctgaaggcattgcgcgcgcaatgcgcggccgaccggcaggccacgggcgaggatgcttgccgtgccgccgccgaagccttccggcggcgcttcttctccggccaggccgggccggatgagtaccagacgctggccgacctgccgccgatcccgccgagcttcgaggagccggccgatggcatggcgccggccgatcccgccgaaccggaggacacgccatga

SEQ ID NO: 350781 - DNA, 1626 bp, Pseudomonas aeruginosa
atgtctttgcgcagtatgcccatcgcgacccgtgccgccctgagtttcgccctgatcaccgctctgctggtcatcaccggcatcttttccctgaaccggatgggttcgctcaacgaagcctcttcggacatcagcgacaactggctgcctagcgtccgcgaaagcgccgagttgaacgttctgctcgccgaactgcggcaggtgcaactggcccatgtgctggcggcggacgatagcagcaagcgcttcctggaaagccgcatgacggaaatcggcaaggaactgaccgatcgcgagggcgcctaccaacggctgatcagtggtgccgacgagcgctcgatctacgagcgctacctggctacccggcagacgctcctgcaaagccagcagaccctggtgcagatgtcgcgcagcaagccgctggaagagacccgccagtacaccgaaagcaccttgctcgaccagtaccgcgccacccagcagcaactgcaggcgctgatcgacttcaacgtcaagggcgccagccaggccagccacacggccgatgaggtctatgacagcgccttcgccgcagtgatcggcgtactgctggtcgccggcctcgctaccgtggtactggcctggctgttcacccgcagcatcacccaaccgatcggcgaggcgctgcgagtggccgaggtgatcgcttccggtgacctcaccagccgcatcgacacctctggccgcgacgaaccggccaagctgctggtcgccctccagggcatgcaggcacaactgcgccagaccatccagcagatcggcagctcggcgacccaactggcctccgccgcggaggaactcagcgccgtcaccgagcagggcaaccgctcgctgacccagcagaacgacgaaatccagatggccgccaccgcggtcaacgagatgaccgccgccgtcgaggaagtggcgcgcaacgccagctccacctcggacgcctcgtccgcctccgagcaatcggcgcagaacggacgccagcgggtactggagacggtccaggcgatccgcctgatgagcgaagaagtggacaatacctcggcgctggtcggcggcctggcggaaaaggcccaggacatttccaaggtcctcgacgtgatccgcggtatcgccgaacagaccaatctcctggcgctcaacgcggccatcgaggcggctcgcgccggcgagcagggccgcggtttcgccgtggtcgccgacgaggttcgcgccctcgcccatcgcacccaggaatccacccgcgagatcgagcagatgatcgccaacatccaggaaggcaccggcgccgcggtcggcgccatggacagcagcagcgtacgcgcccgcaacatgctggagatcgccgaagccgccggcctggcgctgaacgagatcgcggagcgggtcggccagatcaacgagcgtacactggtgatcgccagcgcctccgagcagcaggcccaggtggcccgcgaggtcgaccgcaacctggtgaacatccgcgacatctcgctgcagacgtccgccggctccaaccagaccgccgccgccagccaggaactgtcgcaactggccatcgacctgaacaacatggtcacccgcttcgtcgtctga

SEQ ID NO: 350782 - DNA, 501 bp, Pseudomonas aeruginosa
atggccgtgatcacccaagccgtgctggccgaggcggcgatcgccgtcgacgcgatgggcttggccgagcaggcgcagctcgccgacgaggtcttcgcccatcaacccaacctgctggcctcggtcctggtcttgcagcgaatgggagtcagcctcccacagatggacgtgccgatacacatcctgctcgtggcctaccaggcgatgaagacgtcagggcatacctggccggtgatctccgaggacacccaggaaagctgtctgcggcgcctgacgcggcgaattcgatcgactcacgggtcgggtcgccggtcgctgcaacgaacgatccagcactacatcgacgagcatcgagagccctacctgcttgcgttcgcgtacggctacctggaggagaacgatctgctcggggtcaggaccgacgcagagaagtccttgctgctcgccacgctcaatctcgtggagtgcatcgcctacgctgccgtgccgactcggccgtga

SEQ ID NO: 350783 - DNA, 1653 bp, Pseudomonas aeruginosa
atgtcgatcgcgcagccccaacgagtgctcaatgccgccgaggtggccgcactcgatgcgcaacaagtcgcgcgaatgctgctgggcaaggacggcacgatcaatcagctcaaggagcaggtccagacgctgcagcgccagctcgagtggttcaagcgccagctgttcggcagcaagagcgagcgcttcgcgccgacgcccgaccctcagcagatgcacctcggtcaggtgctcggacaggatctgcccgtgtcgccgggtgacggcaccggcgagcagcaggtgccgtcgcacacgcggcgccggccgcgcagcgacttcaccgacgacagctcgagcgctccgttcttcgatgccagcaaggtccccgttctcacgatcgaggtgcccaatcccgaagtgaaggatctcggccccgggcagtacgaggtcgtcggccagaagaccagccaccgcctggcgcagcgtccgggcagctacgtggtgctcaagtatgtgcgcccgctgatcaagcggctggacacgcaaaccctgcactgcccgccggcgcctgcgggcgtcatcgagggcagccgcgccgatgtgagctttatcgccggtgtgctggtcgacaagttcgcctggcaccttccgctgtaccgccagcaccagcggctcacggctgcgggcttcaagctcagccggccgtggctgacgcagatcgtgcagcaaggcgcaaagctgctgagggccatctacgaggcccagctggcctcgatctgcgccagccgcgtcaaggccatggacgaggtgccaatcaaggctggtcgtgccgggccgggcaagatgaacgcagcgtacttctggccgatctacggcgagcacgacgaggtgtgcttcccgttcttcgactcgcgccgtcacgagaacgtggaacaggcgctggggctcgagcagcccggcggcgcggtgctgctcagcgacggttacgcggcctacgcgaactacacgaagaaggctggcgtgacccacgcccaatgctgggcgcactcgaggaggacgttcttcgaagcgcaagatgccgagccgcaggccgcggccgaggcgctgcgccagatcggcgcgctgtacgacatcgaacgcgagatccgcaggcgcgagctcaagggcgagaacaagcggctgcaccggctgacgcacagcaagccgctggtggacgccttcttcgactgggtcgatcgccggttcgagcagcaagggctgctgccgagcaacccgctgacgaaggcgttggcctacgtgcgcgagcgccgcgcgggcctggaggtgttcctcggcgaccccggcgtgccaatggacacgaaccatctcgaacgcacgctgcgtgcgatcccgatgggaagaaggaattggctcttctgctggaccgaggtcggcgcagaacatgccggcatcgtgcagagtctgatcgcgacctgccggctgcacggcatcgacccgtacacctaccttgtggacgtcttgcagcgcgtgggcgaacacccggcctcgcgcgtgaccgagttgacgccgcgtctgtggaagcagcacttcgcggccgacccgctgcgctcggatctgaaccgcctcgacgggggaacgatcaccgcgggcgccgcacttgccgcgcagtag

SEQ ID NO: 350784 - DNA, 387 bp, Pseudomonas aeruginosa
atgttcttccccgagggccacattcgcgtgttcctgtacgggttgccgaccaacatgcgcaagtccttcgacggcctgtacgcgctggctcgacacgacctgcagcaggacccgctgagcgggcacctgttcgtgttcgtcaaccgtcgcggcacccagatgaaggtgctgtacttcgatcgcagcggctggtgtctttgggcgaagaggctcgaggccggtcgcttcgccgtcgactggagtgacgttcgccatcgcgagatggactggacgtcgctcaagctcatgctcgaggggttcgaggtgaagcgccggctgaagcgatatcggcgttcgggcaatgaggttcaataccgtggcgacaaccgcgcagcgtcgataccatga

SEQ ID NO: 350785 - DNA, 336 bp, Pseudomonas aeruginosa
atggatggaatcgtcgaacgcgtcgtcaagcggcgccggcgtctgaacgaagcggcttgggccgaactgctcgaacgcttcggcacggcccggctgagcgtcgaggagttttgtcgacgcgaaggcgtgtgccgcagcagcttcaatcgctggcgcacgcggctgcagcctggcgcaacgacactcccggcgcccatgcagccacctggcgagaagcgagcgtcttcattcgtggacttgggcgtgctgggtgcggattccggcggcgcgaccggaggcgtggaactgcgcatcgagctgggccgcggagtgacgttgctgctggcgaggcgctga

SEQ ID NO: 350786 - DNA, 198 bp, Pseudomonas aeruginosa; identical to SEQ ID NO: 335860

SEQ ID NO: 350787 - DNA, 1212 bp, Pseudomonas aeruginosa
atgaacaacagcttctggaaggccggccatgcgccgaccctgttcgcggcgtttctctatttcgacctgagcttcatggtctggtacgtgctcggcccactgggcgtgcagatcgccggcgacctgcaactgagcacccagcagcgcgcgatgatggtcgccacgccgatcctcgccggcgccgtgctgcgcttcctgctcggcatgctggccgatcgctggtcgccgaagagcaccggcattctcgcccaggtcatcgtcatcgccgccctggcggccgcctggctgctgggcgtgaacagctatccacaggcgctgctgctggggctgttcctcggcttcgccggggcgtccttcgccgtggccctgccgctcgcttcgcaatggtatccgccgcagcaccagggcaaggccatgggcatcgccggcgcgggcaactccggcaccgtgctcgccgccctcttcgcccccggcctggccgccgcgttcggctggaacaacgtgttcggcttcgccctgctgcctctcgtcctgaccctgctggtgttcgccatggtcgcgcgcaacgccccgcagcggccggcgcccaaggccatgggcgactacctgaaggccctcggcgaccgcgacagctggtggttcatgttcttctacagcgtcaccttcggcggcttcctcggcctggccagcaccctgcccggctacttccacgaccagtacggcctgaacccggtgaccgccggctactacaccgccgcctgcgtcttcgccggcagcctgatgcgcccgctcggcggcgccctggccgatcgcatcggcggcatccgcagcctgctgatggtctacaccctggctgccatctgcatcgccgcggtcggcttccacctgcccagcgcgatggccgcgctcggtctcttcgtggtcgccatgctcagcctcggcgccggcaatggcgcggtattccagctggtaccgcagcgcttccacaaggaaatcggcgtgatgaccgggctgatcggcatggccggcggcatcggcggcttctgcctgaccgccggcctcggcgcgatcaagcaaggcaccggcgactaccagctcggcctgtggctgttcgccagccttggcgtgctggcctggttcggcctccatggggtcaagcggcgctggcgcaccacctggggctcggcggcggtcaccgtcgcgcgggtctga

SEQ ID NO: 350788 - DNA, 303 bp, Pseudomonas aeruginosa
gtgatcggcggcgcgagcctggcgcaaggcatccaggctggccagcaggccttcctgcgcggcgcgctgctgggcgagctcgccaccgaggcgggtgatgatggcggcctgctgggcattgtgctccagggtggcctggagcttgtcctctgcgcgcgccgcgcgggcctgctcggcctggagcttctggtaggtgccccagagcagcagggccagggcgccgagcagggcgaggccgtacagagcctggcgcagcgtgctcaagcggcgctctccctcatggcttcgctgtgccgggcatag

SEQ ID NO: 350789 - DNA, 843 bp, Pseudomonas aeruginosa
atgaccgccgccctccccgagctgaacttccatcccgcctggcacgcccagctggaactggcctatgcccgcgccggcgacgccacccgtccggtgacgcggcgccacgccgggccgttgcgggtgcagaagcacctgtacggcgaaggcccggaagtctgccagcacatcctcgtgcatccgcccggcggcatcgccggcggcgacagcctggccttcgacgtgcgcctcggcgaacgcgcctgggcccagctcaccagccccggcgcggccaagtggtaccgcgccgcctgcccgtcgcggcagaccctggagatccacctggagcccggcgccaccctggaatggctgccgcaggaaaccatcgtcttcgctggcgcccaggccgaactggaaacccgcatccagctacgcggcgacgcccgcctgttctactgggacatggtcgcgctcggccgcccggccagcggcgagcgcttcgccagcggccatttcgtcgcggccctggacatccgccgcgacgagaacctgctctggcacgagcgccagcgcatcgacggcggcgaccgcctgctcgactcgccgatcggcctcggcgggcacccggtgctggccaccctcatcgccagcggcgagatcgacaccgacctgctgcaacgctgccgcgcgctcccctgcgctggccgcggcaacctcagccagttgcctggcggcctgctggtggcgcgctgcctggccgacgaggcgctgcacgcgcgagcctggctgatcgaactctggcgcctgctgcggccggcgctgctcggccgcgaggccgttcccccacgcatctggagcacctga

SEQ ID NO: 350790 - DNA, 1077 bp, Pseudomonas aeruginosa
ttgaaccagccactcaccgtcagcctcgcccgcaaggccggcgtccgcgtcaccggcatcgcgctcggcgcggccttcgccgtgctgctggcgatgccgctgctgcacctgctgccgccggacagcgcgcttcatgtctccgcctacagcctgaccctgaccggcaagatcctctgctacgccatcgtcgcgctggccctcgacctggtctggggctacgccggcctgctgtccctcggccacgggctgttcttcgccctcggcggctacgccatgggcatgtacctgatgcgccaggccgccggcgacagccttccggcattcatgagcttcctttcctggaacgaactgccctggtactgggccggcacccagcacttcctctgggcgctgtgcctggtggtgctggtgcccggcgcgctggccttcgtcttcggctacttcgccttccgttcgcggatccgcggcgtgtacttctcgatcatgacccaggccctgaccttcgccggcatgctgctgttcttccgcaacgagaccggtttcggcggcaacaacggcttcaccgatttccgcagcatcctcggcttcccgatcaccgcgccgggcacccgcgccgcgctgttcctcgccaccgtcgcgctgctcgcggccagcctgctgctcggctggcgcctggcgcggagcaagttcggccgggtcctcaccgcgctgcgcgacgccgagaaccgcctgatgttctgcggctacgacccgcgcggctacaagctcttcgtctggaccctgagcgcggtgctctgcggcctcgccggcgcgctgttcgtgccgcaggttgggatcgtcaaccccagcgagatgtcgccgaccaactccatcgaggccgccgtctgggtcgccctcggcgggcgcggcaccctgctcgggccgctgctcggcgccggcgtggtgaacggcgcgaagagctggttcaccgtggccttcccggaatactggctgttcttcctcggcgcgctgttcatcctcgtcaccctgtacctgccgcgcggcctgctcggcctgctgcgcaaggagaaggagtaa

SEQ ID NO: 350791 - DNA, 966 bp, Pseudomonas aeruginosa; identical to SEQ ID NO: 346387

SEQ ID NO: 350792 - DNA, 750 bp, Pseudomonas aeruginosa
atgttgcaggtattcctgcaacaacgggccagcctgttcctcgccgaccagcagccccaggcgcagcgcggcgcaccagccgccgctgcgctcgagcagcgcaacggcagcgtcggcgtcggcgcgacgtccatgcaggcgcagcaggtcggcgacttccgtgaggtcgaaggccagctggccggcgtcgacctcgcgcagctcgccttccagcagcaggcgggtcaggttgcattgcggccgtcgccggctcgccagccaccagctgacccgaggggaagccgcgctcagcaggcgatcgagacaggcgtccagcgccggatcgggacagcgtgggtaatcgtcgagcagcagccacagcgcggatgcgttgcgcagccgtcggcacagttgcgcctcgtcgccgtcctcgggcagaccgagggcgccggccaggcggcggcggaaggtcgcggggtccagcgcttccccgcccagcgccagccaggccacctgcacgccgggcggcgcctgccgcgcgcactcccccaggagcacggtcttgccgctgccggcgggcgcgcagagcaggcgcaggcggcattcgccgcgcagcagcggctggtgcaaacggggccgcggcaggtgctgcggcggcagccgcggcaaggcggcgggcagctcggtcggctcggtcatggcagtgctcttgttctgtcgaagcgccttgccgggagcctagaccgagcccgccacgcggctgaacgatga

SEQ ID NO: 350793 - DNA, 1755 bp, Pseudomonas aeruginosa
  misc_feature (6)..(15): n is a, c, g, or t
atgtcnnnnnnnnnngtcggcagcgggctgttccgccgcctgttcgagtccctgccgcaggggctggacgagctgctcgcgcgtggcttcccgttgcaggccgacggcctccagcgctatcgcctgccggcggcgatccgcgaagtctggcgcacatcgccgcaccggccgcaggcggcgttccaccgctgcgcctgccactggttcgccgagcatggcgaaacccgcgaggcggtcgaccaggccctggccgccgacgagccggagaccgccgccgcgctgttgcagaagcttaccgaggagcaactgctgcacggccacaacatcggcctggtcctggccctgcgcgacgagcttccggcggcgctgctggccagcacgccgcgcctggtgatcctgaatgcctgggcgctgctatatgccgggcgcctggccgaggccgaggcttgcatcgagcaactggcgcgcttccagccgatgccttcggccgcccgccagaggtcgctgctggcgcaatggcaggggctgtacgggatcctcctgcactgccggggcgagcgtggcgccgccgggcagttgcgcgaggccctggaacacctgccggaagacgcctggtcgcaggggctgatctgccattcggcgctgatgcagctggcgatgatcgagggacggatggaccaggcgcggctggtcggtcgcgacgccctgcgcctggcgcgcgagcacgatagcctgatcttcgaggcgctgatcgagctggatcgcgcgcagtggctggaatcgcgtggcgaactggtgcgcgcggagagcgttctcgaccgcgcccagcgctacctcgaggacctcggccagcagggcagcccgatgctcggccggatcaccctgcgtcgcgcgcgcctgtgcctgcaacaggggcgcgacggcgaagcagggcagtggtaccggcaggggctggagcaggcacgggccaaccgcgatccctgggtgctctacggctatctcgggctggccttgctggaggcgggccagggcgacctggacgcggcgttcaaccgcctgctggaggtcgaacggttgatgcagcagcgtcacgtgcccgactcgctgtaccgcggcgccctgctgctggtcagcgccgcgctgaccttgcagcagggccgtccgcaccaggcgcgggagatccttctgcgggtgcgtgcctacttccagccggggcgcgcgcgcctgtcgccgccttcggagccggagctggaggcgcgggtggaacaccagttggcgctggccgaactctatggcggcgacagcgccgccgccgaggcgcgcctgcgcggattgctcgcggtactcgaggcacagggccggcagacgctgctctgcgaggtgcgcatggccatcgccgagtgccagttcctcgccggccagctgacccaggcccagcaatcgctgcgcagcggcctggaactggccgggcggcttggcctgcagttgccgcaacggcgcctgcggcaacgccagccgcagctgttcgccgccctgccgggcgaggacgaggaagggctcagcccgctcagttgccgggagctggcggttctcggactgatcgcccagggctgctccaaccaggagatcggcgagcagctgttcatttcgctgcacacggtgaagacccacgcccggcgcatcaacggcaagctcggcgtggcccggcggacccaggcggtggcgcgggccaaggccctcggcctgctcgcctga

SEQ ID NO: 350794 - DNA, 1053 bp, Pseudomonas aeruginosa
atgaaaaccctggcgaaactccccgtcaccatcgtcaccggcttcctcggtgccggcaagaccaccttgctccggcacatgctggaccacgccgaaggccggcgcatcgcggtgatcgtcaacgagttcggcgaactcggcatcgacggcgagatcctcaagcaatgctccatcggttgtagcgaggaggaggcgcagggccgggtcttcgaactggccaacggctgcctgtgctgcaccgtgcaggaagagttcttcccggtgatgcgcgagctggtggcgcgccgcggcgaccttgaccagatcctcatcgagaccagcggcctggccctgcccaagccgctggtgcaggccttccagtggccggaaatccgcaacgcctgcacggtcgacgcggtgatcaccgtggtcgacagcccggcggtggcggccggcaccttcgccgcccatcccgagcaggtcgaccagcaacgccgccaggaccccaacctcgaccatgaatcgccgctgcacgaactgttcgaggaccagttggccagcgccgacctggtgatcctgaacaaggccgaccagctcgacgccgaggccctggcgcgggtccgcgcggagatcgccggggagctgccggcggcggtgaagatcgtcgaggcgagccggggcgagctgccgctctcggtcctgctgggactcaacgccgaggccgagctgcacatcgaccgccggcccacccatcacgaccacgaaggccacgaggaccacgaccacgacgagttcgactccttccacgtcgatctccccgaggtggaggaaggcgcgctgctcgaggccctcggcgagctggtggagcgtcacgacatacttcgcatcaaggggttcgccgccattccggacaagcccatgcgcctgctggtgcagggtgtcggcaagcgtttcgacaggcacttcgatcgccagtggctggccgacgaagtccgcagcacccggctggtggtgatcggccaggagctggaccaggccgccattgccaaccagctgcgcacagcgcttgcctga

SEQ ID NO: 350795 - DNA, 240 bp, Pseudomonas aeruginosa
atgatcgactggagcaaggtaaagaccgctgaacagcaggcgcaagagcgcaggcaggctgagtacgatgccgcagccgtggcgcgggcaaatgcataccgcctggagagtgacccgctcaagaccgaggctgaattcgatgcgatcaaggccggtaccgagccggactacagcgcctggatcgccaaggtcgaggagatcaaggccaggtatccgcttccggacgcgggcggcgtgtag

SEQ ID NO: 350796 - DNA, 159 bp, Pseudomonas aeruginosa
atgaatgcaaaccagcagattgaagccttcttcctggaccgcaaagcagaggggcgcggcaatagcgccgctttggattcgaccgtagagcacttcgctcaatacaacccgatgtacgtgcgtactcacattcgccactgcgcgctttgggcagcctaa

SEQ ID NO: 350797 - DNA, 159 bp, Pseudomonas aeruginosa; identical to SEQ ID NO: 326795

SEQ ID NO: 350798 - DNA, 987 bp, Pseudomonas aeruginosa
atgacccaatcgcatgagatacgggtcggtgattgcctggacgctctccgggcaatgcccgaccagtcttttcactgctgcatcaccagcccgccctacttcggcctgcgcgactacggcatggccggccagatcggcttggagcagacgcccgccgagttcgtcacccgcctggtggaggtgttccgcgaggtgcgccgagtgctgcgcgatgacggaaccctctgggtcaacatgggcgacagctatgcaggcggtggcggcgggaactacagcaaaagcgtcaagcaaaccggacatggcgagcacatcactaacgtccgaaacaggggtagttggctcgactcggctggagtaaaggccaaagacctgatgggcatcccctggcgcctcgccttcgccctacaggacgacggttggtacctgcgccaggacatcatctggcacaagccgaacccgatgcctgagagcgtgcgcgacaggtgcaccaaagcgcacgaatacgttttcatgctctccaagtcgccgcgctactactacgaccatgaggccgtgaaggaagatgccgtaagcgatcaccccagcggcaatggcttcaagcgcgacgcgcgcgagtcctacaaaaatctggatggcacagcgcgcggcaatgacgagcagtggacgggcgtaggcggcaagcgcaaccgccgcagcgtctggaccgtgcccaccgccggtttcaagggcgcgcacttcgcaactttcccgcccgacctgatccggccatgcgttcttgcgggggcgccgcggggaggcctggtacttgatcccttcggcggcgccggcaccactgccctcgtcgccatgcaggaaggccgccggtcggtactcctcgaactcaaccctgaatacgcgtccatcgcccgccaccgcctggcttcagcctggctggagggcgccgcgcaactcgatcttctccacgatcagaaggagtccgtcgcatga

SEQ ID NO: 350799 - DNA, 1491 bp, Pseudomonas aeruginosa
  misc_feature (181)..(181): n is a, c, g, or t
atgcgcggattgttcctcggcatcgattgcggcacccagggcagcaaggcgctgctgctcgacgccggcagcggccgcacgctgggcctgggcagcgccgcgcagcgcccgccggaaggccgcgacggacgccgcgaacaggacccggcggactggctggaagccatggccagcgcggtangcatggccctggaggaagccgcggtggacggccgggaggtccgcgccctggcggtttccgcccagcagcatgggctgctcctgctcgacgccgagggccgggcgttgcgcccggccaagctctggtgcgacaccgagagcacagaggagaaccgcgagctgctggaagccctcggcggcccggccggctcgctggaacgcctgggactggtgctcgcgccgggctacacgctgtccaagctgctctggagcaggcgccgctttcccgagctgttcgcccgcgtcgcgcacatcctcctgccccacgactacctcaaccactggctcaccggccgcgcctgcagcgaagcgggcgacgcctccggcagcggctacttcgacgtgcgccggcgcacctgggccagcgacgtgctggagctggtcgagccgggcggacgcctggcggcagcgctgccggagctgatcgagcccggcgcctgcatcggcaacctgcgccccgaagcggccgccgccctcggcctggctccccacacgcgggtggccggcggcggcggcgacaacatgctcgccgctatcggcaccggcaacatccgccccggcctgctcaccgccagcctgggcacctccggcaccctggccgcctatgccgagcggcccctggtcagcccgcacggtgagctggcgagcttctgcgcctcgtccggcggctggctgccgctagcctgcacgatgaacctcaccggtgcctgcggcctggtacaggacctgctgcatctcgacctcgacgaattctcccggctggcggcccaggcgccggtcggcgccgagggcctgctgatgctgccgttcttcgacggcgagcgggttccggcgctaccgcaggccagcgccagcctgcacggcatgaccgcggccaacctgagccgcgccaatctttgccgggcggtgctcgaaggcaccgccttcggcctgcgctacggcctcgacctgctgcgcgccagcggcctgccgggcgaggaaatccgcctggtcggcggcgcggcgaagagcccgctgtggcggcggacgctcgccgacctgctcggcctgccgctggtctgtccacggcagaccgaggccgccgcccttggcgcggcgctccaggcggcctggagcctgggccgcgaaagcggcgccggtgaaagcctggaagccctgtgccagcgctgcgtggcactcgacgagtcgacccgcacccgcccccaggcgcgacaacaggcggcttacgaacaggcctaccggcgttacctggagcacctgcctgcgcgataa

SEQ ID NO: 350800 - DNA, 381 bp, Pseudomonas aeruginosa
gtgccccagtccccggcggtggcggtgcccttgtacccggcggtggcggtgcccttgtacccggcggtggcggtgcccttgtacccggcggtggcggtgcccttgtacccggcggtggcggtgcccttgtacccggcggtggcggtgcccttgtacccggcggtggcggtgcccttgtacccggcggtggcggtgcccttgtacccggcggtggcggtgcccttgtacccggcggtggcggtgcccttgtacccggcggtggcggtgcccttgtacccggcggtggcggtgccctcgtacccggcggtggcggtgccccagtccccggcggtggcggtgcccttgtacccggcggtggcggtgccatatgcgcctacctga

SEQ ID NO: 350801 - DNA, 687 bp, Pseudomonas aeruginosa
atggggcagctcctattgagctgggttgtggttagcgggtcgtgggtgttgcaagcacctgcggcccgcgtcgtttctggcgctggagcgcatcttggaagatggtcttggcgacccctccatcatcctcctactgggtttttatccaattcctgggcgtccgaaagaggctggggaaatgttcgggggagttgtccggcgtttccggggcgtgtagggcgaatagcgccatgggcggcatccgccgataccccggataagcggcggataaccgcaagcggttatccgccctacggaaccaggcaccggcctgcggagatctggcaggcacgaagacctgcttactcgccaggtggtggggcggcgaacccgccccgtcaggaggccgagcggaatcgttgcgcagggggacgagcggcaggacgccgcgagagccgccccggtccacgaaggaccgtggcggcgggcctccgggagcaacgatgcagcgagggtaccccagccgagaagcggctggggccggatgtcggggcgagtcttttggttccttttggacgcttgcaaaaggaactcgcctgggaaggcgaaacaagaagtcgaggcaggcacgacaagcagctagatcacccaacatcaggctcgctcaagttccaaacaacagcggccttatcgttcactgccgtgtag

SEQ ID NO: 350802 - DNA, 1407 bp, Pseudomonas aeruginosa
atgggcatgatcgccaatacccaactgaaagccgcacggggaccgctgctgctcgactggcgccccgaggaccccgagttctgggcgcgcagcggcaagcgcatcgccagccgcaacctgtggatctcgattcccgcgctgctgctcgccttcgccgtgtggatgatctggagcacggtgaccgtgcgcctgaacagcgccggcttcgccttcagcaacgaccagctgttcctgctcgcggcgctgccgtcgatctccggcgccaccctgcgggtgttctattcgttcatggtgccgatcttcggcggccgtcgctggaccgccctgagcaccgcctcgatgctgatcccgtgcatctggctgggcttcgccgtgcaggacccgagcaccccgtactgggtgttcgccctgatcgcgctgctctgcggcttcggcggcggcaacttcgcctcgagcatgtccaacatcagcttcttctatccgaagagccagcagggcaccgccctcggcctgaacgccgggctcggcaacctcggcgtctcggtgatgcagttcgccgtgccgctggcggtggccggcggcctgttcggcgccttcggcggcgagccgcagcagctcggcgacggcggccgcctgtggctgcagaacgccggctggatctgggtgccgttcatcgccgtggtatcggtcgcggcctggttcgggatgaacgacatcgccgacgccaaggcctcgttccgcgaccaggcggtgatcttcaagcgcaagcacaactggctgatgtgctggctgtacgtggccaccttcggctccttcatcggcttctcggccggcttcgcgatgctcagcaagacccagttccccgacgtcaacccgctgcaatatgccttcctcggtccgctggtgggcgccctcagccggcccctgggcggctggctggcggacaagttcggcggcgcgcggatcaccctgtggaactacgcgctgatgatcggcggggtgttcgcggtgatcgccttcctgccgggcgacggcggccagggcaacttcttcggcttccttggcgccttcatcctgctgttcttcttcgccggtatcggcaacggctccaccttccgcatgatcccggtgatcttccgcaacgagtgggcccggcgggtgcgcgacggccaggccgacgaagccggcgcggcgcgcaacgcgagcatggagtcggccgcggtgatcggcttctccgccgccatcggcgccttcggcgggttcttcatcccgaaggcgttcggcacctcgctgcacatgaccggcagcgccgagggcgccctctacgtgttcatcgcctactacctgagctgcatcgtcgccacctggtggtggtacgcgcgcaagggtgcggagagtccctgttga

SEQ ID NO: 350803 - DNA, 666 bp, Pseudomonas aeruginosa
atgagttttggcgtagctattcgtggagctatggggcagacgttgattgacgacgtgaatccgtgcctacatcttgcggcgaccggaagctatgggggccagagcatgaacgagatggttgtcatgtacccggcggcaattaattcaccatacgagccatatgtattcttccggccgaatgggccgcatcagatatacttgtttcgccacctagggtctccagggaactggactggtttcgcgttctggcagttgatttatcgtgataccgacccgccggtgtggggaggggtgtggaaggcatgcgcagttatgcagccgcctacgggtggttggggaatgcaggtgtttgatggacagcatcggattatgtttgatagtaatagggacatcgtccaggtcgtgggaggtgctcagacttggaatagatattcttataatccaaactggccaggcggccagcgtcttcaaacatgggcgctaccctatacgtacgggaactcaacttactttctcgcgtcacatttcaatctaaagtcctctaacatgctccatccgcctgccgtcggatttctttatggggcgatgacgacaatattcgtatctgcatttgtctctgaagagcagagttggccgttcaattggccgctaatggtgattgcttag

SEQ ID NO: 350804 - DNA, 252 bp, Pseudomonas aeruginosa
atgcgaacccaaccacaccccgaaggtgttgtgatcgactcgcagcggccatggggaccgcaagacgtgaagggatacagcgaggaagtggtcaatgccatgaatctgctggagccgcttctgcgggctggactgttggctctggtgcctgaccagtggagcggcgggaggctgacctttctcaccccttcgagggccgcgaggcagggatgggaaccgccacagatcgaccagacggcagaggcacgctag

SEQ ID NO: 350805 - DNA, 243 bp, Pseudomonas aeruginosa
atgatcgactggagccaggtaaagaccgctgaacagcaggcgcaagagcgtaggcaggctgagtgcgatgccgcagccgtggcgcgagcaaatgcctaccgcctggagagtgacccgctcaagaccgaggccgagttcgatgcgatcaaggccggtaccgaaccggactacagcgcctgggtcgccaaggtcgaggagatcaaggccagatatccgctgcccttggcggccaaggtcgaatag

SEQ ID NO: 350806 - DNA, 828 bp, Pseudomonas aeruginosa
atggcggcgcaggcgatcctggcccttggtattcatgtatttttctacggtggagcgattcttttcgcgaagttgctcggtttcgctgtagttggaaaggctggtcgtgtcgggcatctttgctactccatggcggtcgatgacattcgaactgggaaggccttcacgttgtatagaaggcacgggaattcccagggcgcggaacttctgcaacgggttcatgaactcgcgattgcgttttatccggccgctctcgagttcgaaggaatggatgtagtggttctcgcaatagccctccgggtagccgggcagcagcaccttgccgcgtccgtcgcactccacccagaagtggttcggatcctcggtctcgaagatccgcacgttgtgccactgccagtcgggaaagcactcctcgagccagcgctcgagccgcgccaggctctcgtggccttggaaaaccaggggctcgccgctgtcggtggtccagttcccggcgcagccatcggcgtggaacaggcggtgccgctgcagccgctcggcgcccttcagcgccatgtagcgctccaccgtggcgcgattcaggcgccgcattcgctggatgtcgaccggggtatcgctgtagcgctggccgctcatgcctgcctccgggaggtctctcgggtatgccggggggaaaacttcttccatgcggcagtcgtcattcgtcgaggcgcgggagttcgtcgctccgcaaaggagcgagattcgatgcgcacactatttacaggggccttgaaatcccgcgttacatgtcgtcgttcgcgttttcgacttttcgaaaggcaatag

SEQ ID NO: 350807 - DNA, 696 bp, Pseudomonas aeruginosa
atgcgcaagaacggggcgacagccgaggatatcacccaggcgcaacgtgatctggcccagggacagggcttcgatggcgtacagccagcgaatgagttcatcaaggcctggggcgaggccatggttgcggaggctgccggccttgggattgttgcggggttgggtaggtttgggttgtgggttgggaaaggggagcaggctgcaaaagcgactgggaatccggtagttgatgctgaaaaagctgccctggaccgcattgcacagaaccccaaaagccctgatctggcaggcaagcagcctggcactgtgctgcaaacgcaatcacagaagagaattgatgatctcgctgtgcaatacaacaccaagtcaattgagccgaaggattttcaattgaatttgggtggtaaggtattgaagaccgatcctcaggttagcaagggggcaccggtctatatgggggctaccacatccgatgtgatgtcttactttaggcagttggctggggttgaaaatatgcctgcagctaaagttatccctgggaagggggcaatatatacagccaaaactgacgccggagctcgaataacccttcgagacttttccacgtcttcgcagcagacgggggcttcttggactatagatgttatggataagtccattaatggcggaagaatggtggagatcaagttcaaatga

SEQ ID NO: 350808 - DNA, 321 bp, Pseudomonas aeruginosa; identical to SEQ ID NO: 322269

SEQ ID NO: 350809 - DNA, 279 bp, Pseudomonas aeruginosa
ttgtgcgcggtcaagccccacgtgctgcgctactgggagcaggagttcccgcagctcaacccggtgaagcgccgcggaaaccgccgctattatcagcgccaggacgtgctgatgatccgccagatccgcgcgctcctctacgaccagggcttcaccatcggcggggcgcgccagcgcctctccggcgacgaggccaaggacgacgtcacccagtacaagcagctcatccgccagatgatcgccgagctggaggaagtcctgctggtcctgaagaagtga

SEQ ID NO: 350810 - DNA, 252 bp, Pseudomonas aeruginosa
atgtatggatggcatcgctacgatgcatcgcaacgacctctaggaagccgttccacccgccccccccccggaggcctgcccgggagcggtgcgctcgaggtcgacgagcagcacgtgttcgtgagcgagaacaaggtcgaaacgagcctgccccagcgcctggccatcctgcacgacggacaggttttcgatgggtgtcaggcgcagcaggctggccttcagcacgcgcaggcgctcgccggcattgcctga

SEQ ID NO: 350811 - DNA, 879 bp, Pseudomonas aeruginosa
atgtcgcctcgcgatttgcagatcgactggctcaaatgctttgtcgccgccgttgatacaggctcgctgtcgagcgccgcgatcgaggtgcaccggtcccagtccgctgtcagcatgcaactcaagaaactggaagcagcacttggccgagaggttctcaaacgggggccacgctaccttgagttgaccgaggatgggcagatgctgctgggctatgcacggcgtatgctcgcgctgcacgcgcaaacccaggccgcgttccatggtgagatacttgctgggcgagttcggcttggcgtggcagaagactatgcatcgcattacctcacgccgatactcaagcgtttcggtccgaggcatgagggagtagagatcgagttgacgtgtgagcaatctacaactctgataccacgggtagacagcggcgacctcgaccttgccctgatctccagcgacaaccctcggcgagattctgttctctttcaggaacccatggtatgggtaggatcgccccaattcgaactctgggcacgagatccattgccaatcgccgtttacgaggccggaagcctggctcgtcttggcgcactcggttccttggctaggcaagggcgcgattataaagtggtctacaacagctccagcctggctggtcagatcgttgcagttgagagcggattggcagttgctgttctcacacggtgcagtgtccccgcgcattgtcagatcttgggtgcggtgcacgggctggggccgcttgaacccatgaatgttgcagtttatagaagcaaggcgtcacaaggctctaatgcggtggacggcctgcggcgtttcattattcagtcccttgatgcttcgctccccagacaaacaacttag

SEQ ID NO: 350812 - DNA, 606 bp, Pseudomonas aeruginosa
atgcagctcgatacctggttgctttatctgatgacatgctgcggtatggcagtggtccccggcccaaatgcgctgctggtccttacccatggcgctttgcatggaagaagaggggcgctcttcaccatcagcgggggcgtgatcggctttatcgggatgatcgtgctctgcgtgcttggcttgggcgccctgcttcagacttcgatgctgtggctgacggtgctgaaggtcggcggcggcctttacctgatttggctaggtatcatgctgtggcgatcagagccgattacgctggccaacagggggcactctggctctggcagttggacgcgtttctatcaggggctgctcagcgcggtttccaatccgaaagcactgctgctgttcacggcattcattacacccttcatcgacccccgcggagatctcgtgacccaagcggcgattatgtcagtgacatatgcggtggtggaatttggggtcgaactaggtgtagcaagtgctgcgcacaaagtgaggccttggctggctcagacggggcgtcgattcaatcaagtgtgcggagggttcttcgtgatcttcggtgtgctgatccctgcgcattag

SEQ ID NO: 350813 - DNA, 1011 bp, Pseudomonas aeruginosa
atggcaaaaacaaaaaccgaaaaagaatttgaaatcttaaacagaatttttaagagggacgatcactgcaaagtaataaaatctgaaatgccagattttattctggaatataaaaatacaaatttaggagatatattaattggcgttgaaattaccgagctgtatcttgatggagcaacggctcgattggtaaacatgccagattacgcaaaaaaaatcatggacggcacctatatacacaaagatgacaagcttaaattaaggcctcaacgcgttacatattttggcaaaagcaacaactaccaaccgatcaagaccaagattctacacctgccaaactataccttgaaggatttccaaaatgctttcttggattctttgaaagataaaaatgaacgacttaaaaagtacaggaaggatgtcgggcaatgctgcttagtagtttacgactcatttcaatttatgaaaaagcgtaagcgagagaattttggggcggatttttttacaagcgaggtattaagcgcgattcgtaaatcttcttatcacgaaatttatcttgtcgctggcttcgatggaagtgacgatgagttttacattcagttaaaggcctgggatttaatatccgagtctgcgagagccggcgcctaccttacatatcccccacatctgaaaaagctaaacagtcttaatctgagccataacgaggtatttgccgagattttgttaaggcgcgggctcacaaacattcaaagatcaagcgtagactcgacctccactgtaatgtgcaatagatatgagctatcaattaacgatggtaggacaccattttttgataacttcccttttttgaaatctggcctgggactttatagccttaacgaaaatagaaaaaactacttctcgtccaagtcattttctcactatgaaagcctttggaaaaagctgaatataaatacagactatggattccaagctctaaaaccgaaacagtctgatattcccccggaataa

SEQ ID NO: 350814 - DNA, 1029 bp, Pseudomonas aeruginosa
atgaaacgaaagaaatttgatattgatgcatttttggacgctatgcagctatcggaagacttgagaaaggctagacctaaagatgcctctaagatagcgttagcattaagcctaaagctgtgtcatccgggctttgcttcggagcctcttgagactgctgaggaaatgctttattcgcttgatgatagcgttgaacagagggtgtgcgaactgattggggaaaaagcaagtaaacatgaagtttctaaaagatttgattccgatatttattttagaaattttatgaactgcgttgcgatctcaagaagaagcctggttcaattgatagagtatattaagagtaatgagcctgattcgtcagcttttgaccttgctggtcaagttgtggaggtggtagaggactttaacaatgtcgtggtggccaacgatgtgctgcccctaattgagcgcggaatttatgcgtctgatattgcgctggcactggaagtttggtcaaaaaatcgagacctaatgaagggagatgagcgcttttggcagaaagaatttgaggagcggaaaggggtgctagagcgccttcttggagggcatgcagtactgctgcaaagcgaatttcatgttgggggtacaaatacatctggcgctggagatcttaggtctgactttgcttttctaaataaaattaacaatattagtttggttgagattaaggcgccagctaccaagctgttgggctctaagtaccgtggaacctacccgctctccaaggacgtatccggtgccatttctcaggttcttatacaacgcagtgagctaattaaatattacttccagaagaggtgtgactcacccgtgcctttcgaggttttttcacctcgttgcttcttgattgttggggatttgagtagtcttggatctgactctgaaaagttaaaagcatttgaggttcagcgccaggcagttgcgtcgcacgtgagtgttgtgacttttgatgagctttaccagcaatttgcaacgtttcatcagttgtaa

SEQ ID NO: 350815 - DNA, 678 bp, Pseudomonas aeruginosa
atgtcccagtccagcggcggggcaacctcggcgggaggagcgggaggcgtgtctgcgagcggctggtcgatgccggcggccggctcgggaacgctttcgggaaggtcctgcgcctggcgctccacgcgcagcaggcgctggtggatgacctcggtgccgcgctcgaagcgttcggcgaattcgctcatctgcttgcgcaggcgctcgttctgttgcgccaggttctgcagcgagacggcctgtcccagggccaggccggagagaccgccgaggagtgcgccgaccagcgattccccggcgaagccgccgaggatcaggcccaccagcatgaaaatccattgcatgcgtcgaatccttgatcaagaggtaccacgatccactgatacctgccctggccatcctgccagagcggaacccgcgccgggagtatacagcccgcattcccgagattcgacgcattccgacgcccgccccgtggcgagctacctcttcctggcgatgaactggaccacacaggccgcgccggtgtggaaacggccctcgaccacctcgcgctcgatttcccgcgccagcagcacctcgcactccggcagctccgcctccagcgccgcgcggctcaccagcatgtcgacgtccgccgggccgccggtgccgcggccgagctgttccggccgatag

SEQ ID NO: 350816 - DNA, 282 bp, Pseudomonas aeruginosa
atgcccgaggcattcgacttctgctttctggccttcgttctgcacgacatcgctatccgcttcggcgccggcatcgaatacccgaacctggctctcgcgctgccgtggccaggggactgccagtcggccgcgcgggttgtcgaggccgcggatcatgatggaggaaccattgttttttcgcccaacccgatgggccagggcttgcgcgccgacgatagtgtgcccatgggtggcacgctggcggtggggttggtctttgtcgacgggcttcgggcggggtag

SEQ ID NO: 350817 - DNA, 993 bp, Pseudomonas aeruginosa
atggcttttgttatcgacagctctgaatggaattttgacaattggccacctgagttaatagtcgaaaaactagaaaacattcttgaaagaatccatatagctttggaaagatctgagaacgtatggtttggagaagaactgcaaaacaaagagattcttcagggccatgacctctggagtttaagaagcgaagactctccattaaccctcccccccgaaatatgggaagagttagcagcttggctcggcagaggaaagtgctatttagacgaagactggccagataattttcccgaacattctgtcactcacttagacaacttatcaatcccagagaacatggatatagattgggctcaccataacactctaagtggaaaccctgtcgcctgcctcagccttaatcggaatggaatttatactactcaaagtaattcgggatcaatagatatacattggataaccagtgagactgacgctttaaaattttggagatcagcaatcgatatccaaggtgacaatgatcaatctctagaaaacctttcagcgcatgcctatccgtatttatactttcactctgaaatttggcatggcatccatagactaacaggtggctaccatgcaaatcgcaacaaaataaaaaaacacttagcaactctcaacgacttcggagaatgggccttcacagccccgcctccggcactgtcacctcaagaaccaagaggggaaagcactgaaaggccgtcaaatcaaataattgaaagacgctttcatggtctaaacataaccatggcacctgaaaatccaaatgttttcagaaactctcgatgcagagcagctcgtgagataaccatccaaagcagaaaaatatattgtgaatggcacgctaagattgagccccacaccaacagaatacatgtttaccctcccatacaggagtctaacaacagacttatcattgcaataatagacgcccatctagaattaccataa

SEQ ID NO: 350818 - DNA, 1107 bp, Pseudomonas aeruginosa
atgattacaaacctcagaattcgagcatttaagcgtttcgaagacgaaagcttctcccttcgcccattaacagttctaactggtttaaatggctcgggaaaaacctccgtaattcactctttacttctagcctgggaggcaacagctagcgcaccacatgaaacaatacgactaaacggcccatttggaatagaactcggcaccgccgaagaagttagaaactggagctcaagtaaaaatatagagatccatctagagtcagaaaataacaaaataaactcttggagcctaagcatccctaccagcgactcgctttatttatctgtatctgcacgcccagatacagatatccctgcgtttagctctaagccaagacattttacttatctatgcgctgaacgtttgggcccgagaagcctattaaattcatctcctatccctagcgaacgacttgagataggggtccaaggtgaatattgcgcgcaaatacttggcgcccttggaagcaaaccattcgaattccccgaacgactgcacccattgaaagataaagagccaagcttgcttctaaagtacgaagtagaaagctggctcgcagagatagtaaggccggtagagttggatacaatccattaccctggcacaactgttacggcaatgcagttccgtttcacagggcaagattgggttagagcaccaaatatgggcttcggtatttcctatgcgcttcccataattttagcaggactcacgacccctcctagcggcttattaatagtcgaaaatccggaggctcatctacatccggctggacagtcacgcatcggggcatttcttgcctggctcgcaaactgtggagttcaagtaatagtagagactcactcagaccacgtactcaacggaataaggagggctattggagattatagatatttatcccacagcaatgcgatagtacacttcttcgactctagccaaaatgatcagcctgacataaagaacttaaacttcaccaaaacaggtggaatctcgcattggccaaaaggtttttttgatcagtatcagattgacatagcctcgcttggaaaaataagaagaggaagataa

SEQ ID NO: 350819 - DNA, 1191 bp, Pseudomonas aeruginosa
atgaccgtaaaaagaaaaatcaagacagaccccgaaaatgagctatttctagaggaggattacttcgaccatgtagagatagaagacacaagccgtggcgacgcggcagccaaaccgtgggaccccaccaaaataagaataacaacaaagcacttctctttgcgcgacgtcgttgaccagataaatgacaaagaaatctatctatcaccagactttcaaagagattacatttggaaggaaagacaacgcacccgactaattgagtctattcttctaggaatccccctaccagccttttacttcaaccaagatattgatggaacatatcaggttgtcgatggagtacagcgcctctcaactgtagctagatttatgcaagataagcatactctagcagagcaagacttagaatatcttataaatctagatggaaccacgtactcaactctaagcccagcagagttgcgtcgattccgcagcacccaaattgttgttcacgttattgaaccacaaacacctgacgaagttaaatacgatatctttagtcgggtaaacactctaggcagcccactttcggctcaagaaatccggcacgccatgagcaaaagtagatcaagagatctactaaagaagctctctgagatgaaagagttcgacgaggccacggaatggcaatattggaaaaaaaatagcgccgagcaaacccgagatagcggaagaatgacaaaccgggagctcgcactgcgtttctgcgcctttcgaaactactctatcgaagagtatagagagcatccaagcctagatgcctttcttgtggcattcacaagaaaagttgatagcgacgaaaaactcattagcgatgcccaacttaaaagactggtatctgatttcaaacgagccatgaaaaatgcgaatgaaattctaggcccagctgctttcagacgctggcccccaaatcaatatcgcagaggccctttaaacagagcagtttttgaatcccaagcaatagctttagccgattacaggataacacaactaagaccttacaaagataaaatagagcttgcctttagaaaagcatttgatgactacgattactcaagagcagtaacagtgggcactggcgacccaagaaaagtagagttaagaattcaatacacaaaaaatatattaaaagaaattttgccatga

SEQ ID NO: 350820 - DNA, 1689 bp, Pseudomonas aeruginosa
atgtacatgaagagcactgaagagatattaggaatcattcaagcatgccagcacatcaatagtgagcttttagaaagcgaagaagtggagttcaaagaattctcaagcacagcatcattacatggctccaaagaactggcagaagaggtttcagccctcgcaaacaagaaaggcggcgtcataataattggtattagagacggcggaaacgtccagcatcagcagtgggctacacaactcgtcggatttgaactctcagataacatagagattgagcaacgaataaaaggcaagattcgcccaaacctggacatcagggctcagtacatagaatttgacggaaaaaactatctcacagtacatgttccccgacgcagagatacattagtttccactacaagtggcaagacatgtattcgtgatggccgctctagcaggccgatggaacccgaagaaattcgcttggcggtatcaggcttgcttaattatgactggactgccgaaacaatagatcacctacagtccacctcactcgatttaaccgcagttgaagatgcctatgacgactactgtttaaggaaaaaatatcctatagaccaacgccccactactaccagtttcctagaagcaatcggtgccacaacaaatggagtcgtaaccaaatccggactcctattcctcggtaaggctaatgaaatttctaagtggcttggcacctatgaataccgtttcacttggcgagaaaccaatggagagatacgccacaacgtggtttgggacgacaatctttggaagaccatacagcgcacaaaaagcttatttgacaactgcaattcggaaatctctctggagtatgcaggcaaaacccatccgtgcaaacttttagacaatatagcatttcatgaatgctttatgaatgccttggttcatcgcgactactcaattgagggaatggtggttgttgactataactttgaaagaatgatggttactaatccaggcgtattctatggaggcgtgacagcagaaaacatcacttctcatcaacctcgccatagaaataaagccctagccaaacttctaatgaactttcaactagtagaccgagctggcatgggtgtaaagagaatgcattttggctccctggcgtacgggagagagttccccaaattcagggaggtattcgatactgtagaggtttccttatctgcaaaagctattattcctgagatatttgtaaaagtgcaagccgcactcgaaaaattcagcgtagccgacttagttatttttaacagcttatataggatcggctatatggacgtaatagaacttgccaaacgtatccctacatacgatggaaatgcatggagcacaataaaagaatcggtgaaaaatcatagtgaattagaactatgcggcacaaacaagggaatcttcgtcagattcaaaccagcatgggccagctatttcaaagcacaaaatcctctaaaaataagtcaaacctcagctaagcatgtgaagttattcgactatctacaagagtttggcgaggcctcaaacgagaatatcacccacttactggagcacaaaaatactccacatacgagcgcattcttgagaaaagcttcctacgcaactcggactggaaatgggccaagtgccaagtggtcactgacaaagagaatctga

SEQ ID NO: 350821 - DNA, 627 bp, Pseudomonas aeruginosa
atggcgttattcgccctacacaccccgaaaacaccggaaagcgtccaggtccgtagggcgaataaccgatcgcggttatccgccgcttatccgcgacatcggcggataacgcccatggcgttattcgccctacacaccccgaaaacaccggaaagcgtccaggtccgtagggcgaataaccgatcgcggttatccgccgcttatccgcgacatcggcggataacgcccatggcgttattcgccctacacaccccgaaaacaccggaaagcgtccaggtccgtagggcgaataaccgatcgcggttatccgccgcttatccgcgacatcggcggataacgcccatggcgttattcgccctacacaccccgaaaacaccggaaagcgtccaggtccgtagggcgaataaccgatcgcggttatccgccgcttatccgcgacatcggcggataacgcccatggcgttattcgccctacacaccccgaaaacaccggaaagcgtccaggtccgtagggcgaataaccgatcgcggttatccgccgcttatccgcgacatcggcggataacgcccatggcgttatttgccctacgcaccccggaaacgccggacagcgtcccaactccgtag

SEQ ID NO: 350822 - DNA, 1008 bp, Pseudomonas aeruginosa
atgctgatccgcgtactgatgcaaccgctcaccgacatgggccgcgccatgcaggacatcgcccagggtgaaggcgacctgaccaagcgcctgaaagtcaccagcaacgatgaattcggtacgttggccaatgccttcaaccgcttcgtcgagcgtatccacgaatcgatccgcgaggtcgccggcaccgcccgtcaactgcacgacgtggcgcaactggtggtgaacgcctcgaactcctcgatggccaactccgacgagcagtccaaccgcaccaacagcgtcgcagcagcgatcaacgaactcggcgccgccgcccaggaaatcgcccgcaacgccgccgatgcctcgcaccatgcgtccgacgccaaccaccaggccgaagacggcaagcaggtggtcgagcagaccatccgcgcgatgaacgagctttccgagaagatcagcgcctcctgcgccaacatcgaggccctcaacagccgcacggtgaacatcggccagatcctcgaggtgatcaagggcatctccgagcagaccaacctgctcgccctcaacgccgccatcgaagccgcccgcgccggcgaggccggacgcggcttcgcggtggtcgccgacgaggtgcgcaacctggcccatcgcgcccaggagtcggcccagcagatccagaagatgatcgaagagctgcaagtcggcgcccgcgaggcggtggccaccatgaccgagagccagcgctacagcctggagagcgtggagatcgccaaccgtgccggcgaacgcctgagcagtgtcaccggacggatcgccgagatcgacgggatgaaccagtcggtggccaccgccaccgaggagcagaccgcggtggtcgattcgctgaacatggacatcaccgagatcaacaccctcaaccaggaaggcgtggagaacctccaggccaccctgcgcgcctgcggcgagctggaagcccaggccgggcgcctgcggcacctggtggacagcttcaagatctga

SEQ ID NO: 350823 - DNA, 312 bp, Pseudomonas aeruginosa
atgcaaacgatctatctagcgactgggcgtgagtccataggaacgctggggatgagagcctctgctacaccctaccgacaggaaatcgaagggtgtctcagaagaggggcaaaggtggcgatcgatttttctggtaaggatgccactcagtccttcgtggacgaactgattggtggggttgtgctcaggtacggtcgtaccgctctgtccagcctaacgttcaagaactgctctgaagatgtcaaaatgatcatcaaatttgtcatcaatgatcgagttcaccagaaggagtccgagcgagctatcgcttga

SEQ ID NO: 350824 - DNA, 984 bp, Pseudomonas aeruginosa
atgagtttttcggatgatgctatccctttcccgtcttcgttaagcgagtccgatccacgagcgttgttcgacttttgcgctaagctcaatgctggcgtcggagacgtccatttggacgcttctgctcttcaatttgtcgatccccttgggttagctgtgctgagggcgaccttggagtgccagccggcagaaaagacctttttcatccaattcatgcaggccaggatgattaggtacttcgtgcgtatggagtttttctcggggctgcgcgtcgaagggatcgacgttgagcaagggagaaacccggaaggtgagcccgacaggtgtgttgaactcattaaggtaggggatggtcaatcagaagcggtagcttcccgtctagtacaggcgatgaccggccaggccgctgatagtgacgatcctttgacggaggcgtataggcggccaattgagtatgctttgaaggaattgcttgaaaacgcctgctctcatgccaagaaggaaggcaacggcgcttcgtcagtttgggttgcttgtcaacactttcaatcgaacggtgtggtacggttggctatcgtcgacaacggttgtggttttttggcgacccttaaagggcatcctgcgctgaaagacccaacggatgctgctgcgattgccgcagccttggaagcgcgagtcagttgcaatcgtggtcccctcatcggctatgagaccgatagtcaaaatcaaggggtgggattgacgactacagctagaatagcccatgcggctagtggttttttagtcgtagccagcggaaacgcttggctaaggacggatttggggcagacggagagtagcggcttggccgattgcccctggaagggagtggcgatttccttccattgcaaccgtgaccagttacctcaggtagacattcctgccttgctgcctgcggtggaagacgacgtcggtgatgagatcaggttcgacgacgatctgtag

SEQ ID NO: 350825 - DNA, 375 bp, Pseudomonas aeruginosa
atgctgaacctcgccgaataccgccagcgcccggccttgcttgccgactggctgccctgggccgggctggtcgcaccgggcgtcgtcttgaacaaggacggcagtttccagcgcacggcccggtttcgcgggcctgacctcgacagcgcgacgcaaggcgagctaatcgccacgtcggcgcggttgaacaacgcgctgcgtcgcatgggatcgggctgggcgctgttcatcgaggccgagcgccgcgccgccgccgactatccgcgctcggagtttcccgagccgctttcgtggctggtggaggaagaacgccgggccgccttcgaggaatcgggcaatcacttcgagagcggctatcacctgacgctgctttag

SEQ ID NO: 350826 - DNA, 246 bp, Pseudomonas aeruginosa
atgatcggaaatcgactgagggaagaaaggcttcgactggaaagccgtgtgtcaaagaaagcgaccgataccgacaagctggacagacgacacttcaacgatccccaccggactgtacgggctattggtgctgaggccgcgcggaaagggctacgggtgttcgactgcccctacagtcatcctgcgatgcgggcgtcctggttgaaagggtttgcccaggagcagcaacagcagctcgacttctga

SEQ ID NO: 350827 - DNA, 645 bp, Pseudomonas aeruginosa
atgccaaattgggtaaccaacaaggttaaggctccgcaggaagtcatccaggcaatggtcagcgaagaaggccgcatcgatttcggaaaaatcatcaagttcggcggcgagtttccatggaacggtgtttcggtcgatgcagaaaccgctgctgagcgcgtactgaacctgccactgaattcgcatcccttggtcggcagcatgcagaaatccagtcgtgaccgcgttgacgtttcaaagctgagcgatgagagtttcgagcagttcatccagatgctgcgcaatcaccgccagaccggctacttgcacgacatggactttgccagatcggcctggggcaccaagtggaatgcctatgagtccagggttgacggacctgagtccgcaagctttgaaacagcatggtctttccctgagccgatcttcctcaagctgagctcgatgttccctgaggcaaccatcgaactcaactacgcagacgaagacatcggcagtaactgcggcacggtcaggttcaagggtggagaggcaatttatcgcgacgagtctgcgggctggaacagcatgtccggggccgaccgcgagaggtggaccagctttgcctacgaggtcaagggctgggagcgcgaccaagaagacgactga

SEQ ID NO: 350828 - DNA, 1206 bp, Pseudomonas aeruginosa
atgcgtagattcgtggctgctgacggcgagcggtttgcggtgctggtcgatggttcaggtatgcctctttactaccccactcttttcaccacgtggcatctgcggtcacgctccttggccgccaattcgattgcgaatgcgttgaacgcgatcaaggctctatacgcctgggaagctcaggtcggcatcgatctgatgtcactgttttcgcaaggtgagctacttggtgaagagcgagtgagggggctaagcgacttcttgcagcttgctctcgctcacgagcaccgagatagaaaggttgtcccgatcgctcgacgtccaaagacggtcggcaccagtaatcactatttcaggttaaccgttgtggctgactatctgggctttctggccaagcggctgtgcccatctagtcggggtgatagggaaatcaagctgatggtggcgtcgatcagggctagccgccccagcaagcccaacaaatcagtatcggacaaggacgaacgatatctggacgaggccgttgtggaggcattggaacaggcgcttaggcctggctcggaacacaatccggccaaggatcaggcagtgcaggtgcgcaatgcattgatgttcatgattctccgtctgactgggcttcgtcggggggagctgctgaacctcaaggtcgatgacgtggatttcgccaagaacactctgcgcgtggtgaggcgtcctgattcgaggggcgattcacggccccatcagcctacggccaagactcgtcaacgaaccattccactcgcgcaggaactcatcacccggatttacgaatatgtgcttcgctatcggaataaattgcctggggcgaagaggcatggatacttgtttgtgacccacaaggagggcccgactcaaggtcgcccgctctcgatctcagcctttcagaagtggatgttgggcgtcgcctctatcatcgaggactctggcgtccatgcgcatgccctccgacatcactggaattacgccttttcccagcacagcgacgcttcggaaatgtcctccgcgacagaagaaaaaattcgctcttatctgatggggtgggaagaatcctctggtacggcgcagacctacaacaagcgacacaccaaacaaaaagccgcagaagctgttcttgcccttcaaagcaagtacctgaaaaagtccagtgatgaggtggccggtgaataa

SEQ ID NO: 350829 - DNA, 1515 bp, Pseudomonas aeruginosa
gtgaataaaaatgctcttcaggcagctgtagttgatcgtttttactctagggacggctatctcgtgcaattcgatagctctcgatgggagcttagtaaggatatagccattccggttggctcactttcgcagtatttgggggaaagggattattcatttcggcgggttctggagttttacgcaagagcgggagcgccttcgcatgcgagaaatatttttaatcgttttttgcattactgcgagcagatgcaaggttccgagcttctttccgtcgcttcgttgatctcctaccgatcatctcttgataggaaaacagagtggtacatgggggtgttgcgcggggcgatccgccaatggtcgcggcttggatatccaggtatctctgatgaggttttgaccctgctgaataagtgggtcatcaaggggaacgagaaaggcttcgctgtccagtcgatgtgtcccgacgctgggcctctaaccgatattgaactccaaggggttatctctgcggtggtcgatgcattcaccgggcagcgactctccttggaggagacgtgcctatcaatgattttagccatgacggggcggcgccctgggcaaatcgcggcgctcaaagtcaaagacctgcagtccactgctccaggggcctattggatcaacttccccagggctaagcagcgcaatacgccatggcgctcctcgttcaatcgctttgcgattgttgaggatctttggttgctgttgcagcagcaagcggagtctgtgaagacggctttttccgagcaggcaggaggtccgctgcctcagaaagtacaggacgagttgccgttttttcccgtatcgcactcccttgagaccgattccgatgttgaggcattacttggcagcgaccggctgcatatcccctcccaagaggtgtatcaagcgatgttgggagttgccaggacgattgctgtcattagcgagcgcactggggcgcctatcgccctcaacccgaatcgcttccgctacacgcttggcacgaatctggcgcgtgaagggcgaggagagttggttattgctgaggcgctggatcattccgatacccagaacgtaggcgtgtacgtcaaaaacatcccggagattgtcgagcgcatcgataaggccgtcgctttgcagctcgcaccgtttgcccaggcgtttcgaggcgtccttgttacctcagagcgtgaggcacgccgaggcgatgatccgagcagccgaatctctaacggcagggccaacgtaggcacctgtggcagctatggcttctgtggcgcattggctcccatcgcttgttacacctgtgcccactttcagccttggctcgatggtcctcacgaagaggtcttggatcgcctaatcgaggagcgggatcgggttcgagaaaactgcggagatctgaagatcgcctcgaccaacgaccgattgatcttggccgtaagtgacgtaatcaaacgttgcaaagaggctaggggagaggttgtgtatggctga

SEQ ID NO: 350830 - DNA, 1992 bp, Pseudomonas aeruginosa
atggctgacctactgctgttcacccccaagcatcagcgtgacagccagaagaatctggacgatttcattgcgatgtgtcgtgaccgcctgacggtattcggggcagatttagactggtatgccaatgcctggcccaaggtcggcaactttacggtcatgggggcgcccgcgaggggctatacgactgatcaactcctgaattctgacatcattccctttgccaaagcttatgttcgctaccagcagggtcacacccccaccaagctcaaaaacgaattcaaggcgatccgctgcatcgagaaggctctgctgacggtcaagggcaaagcggacattacgcaggtagatcaactcgtcatggacgcagcgggtcaagttgcgagggagtatgaggctacgagctatcaggcaggtgtgagcttggtaaagcttgtggagttcctcaatgaaagtcggatcgtgcccgacccaattacctggcgaaatcccatctgcaagccaaaagagatagacaggacagacgcggaaggaaaaagaaaacgagcggaaaagctaccagaggatcgctggctggaagctatggcggagatgtttgccaacgatctcgtgagtgctcgggatcgtttcaccacgtccgtatttgcgctgctgatgtgtgcgccatctcgcgtgtcggaggttcaagacctgccggtgaattgcctgcatcctgatacagatgacaagggggtggaaagactagggctacggttttatgccggcaaaggttacgggtcggatattaagtggatcgcgaccatattcaaggatattgccactgaagccgtgcgtcggttgaccgagttgtctgctccagggcgggcgttggcgaaatggtatgaagaccaccctggcaggttttaccgccatgaagactgtcccaatgtacctgacaaccacccattaactgatgagcaagcttgcatggcgcttggcatcaagtcagtgaaaggtgcgttggactcgtttttttcgaaatacaaaccctatcgagctttgaagaaaaatggtgagtcactgacgctggcatttctaaatgactactgtcatagccaacttcctttcggatggccttggaagaaccgggagcgcaatatcaagtactcggaggccctttgctgttttagggctcacgaactccgttcggattttagtccgagccctatcaagatatggggccccggtaagagcacgtttaccactgacctgaacttcattgacggccaggagcgcagcatctggaagcgccacggttacaagaacccagatggcagtgaaatctcgatgacctctcaccaggtgcgtcatttcctcaataccgtggcacagcgtggcgcgttggggcagctagacatcgccaagtggtcagggcgggccaacatccatcagaacgctgtgtacaaccacatgagcgacgacgagtacgtcgagctggccaggaatgccggcgtcggtgggatactcgacaagatccaggccagcatgcccgttacctatgcggatctggaggttgtaggtgacggtatcgcccatgtcactgagtatggattctgcatacatgactactcgatgctgccttgccagaagcatcgggattgcttgaattgcaccgaacaggtttgcgtgaaaggcgacgtgaccaagcttgatcgtctcaggcagcagcgtagtttgacccatatgcaacttgaaaaggccgaggcggcagatacttcaggaacctatggcgccgaccgctggagccagcatcagatcaagaccttggagcgcctggatcagttgattcagatacttgaatcaccccacctcccggacggaacggccattcgactcagcaatgatcaagagtacaccccgttgaagcgagagcttgctgcccgccagtcctaccgctggctcccttcatcagagcccgacattgatgagctgcgaaatctgctgggggccttctag

SEQ ID NO: 350831 - DNA, 423 bp, Pseudomonas aeruginosa
atggccaagcatctaacgacaagagacattgagctgctggtcggcctgattgatgggtgggatggcaagcttacctgggatgctttgtgcaacgaagccgaaggcttgattggtacacgcccaacacggcagaccctcaatgcgcatgctcgaatcaagagcgcgttcggttataagaagacccagcagaaagcgggttttaagcccacgaagcgtccggaaagcctggctattgcggagcaacgcatccatcgtctggagaatgagaaccatcgtctgaaggctgagaataaccggctgctggaacgcttcgttcggtggcagtacaacgctcaaaagcgtggcctttcccaggcggtgcttgatgcccctctgccggagattgatcgagattctgcggagaaagttaaagcaaggcgataa

SEQ ID NO: 350832 - DNA, 2598 bp, Pseudomonas aeruginosa
atgtctgatctagcgaatgaagcggttggagtcagtgacttcgaaaagtggttgaatgaccgtaatggctggcttcagacagccgccaagcagctcatcgacaataagcgcttgccgaacgagggtgagcttgcagagctggttcgactctgcaagctggaggcggccaagcagggtgaccctgggttcctgaaggtggctcctggtgcattttcggctggggcggtgcaacgggttgtgcgggtcgaagaggtaacccaagtcttcggggttaacgcgattaagcctggtgcatctctaccattcggaacgggcagtttgactgtcatctacgggcaaaatggttcggggaaaagtggttttgctcgtctgctcaaacagctttgtggatctcgttcacgggacgaaatccgcccgaacgtattcagcgatgaagagcatgcttgcagtgctcaatgccgaatcacgattgatggaaattcccgagatatcaattggcatcctggtgtagagccccatgcgatgctcaagtacgcccaagtatttgattcgaaggccgcaactcagtacatggggcgcactgaatcaagctatgagccgagcagcatgcggttcatctccatgctcattcagatttcgggcatggtttctgatgagctggggcgggagaagggaacgctcgttagtgcccttccgcagttcccaggtgatctctcagaaaccgctgagaaggtctggttctcctctctcaaagcctccgtttctcctgagaagatcgaggcgtattgccggtatggaaaagatttggacgacgagcgggtcaaggctgaggcgctgctcgcggaaaaagatatcgcgggtcgcttggttgcgattggcaaggaaagtgttgccaccgaaagcatcaagcaggcaatgaaactgttgaaagaaggcctcacggacgagaaggctgatgagctgtcgaaggcgaaagtatcggcggttgcggcgagaaaggcggccaacgaagttgcgcagcaggcattcgcgaatgctcccctccaaggcgttggtgagacggcctggaagcttatgtgggagcaggcgcgcgcctattccgttgctcatgcataccatggtcacgaatttcccgttacttcagatggtgcgcactgcgtgctctgtcagcaagagcttacggctgaaggcgccactaggctcaaaagcttcgaggctttcgtcaccgcgggtctcgagactgcggcgaaaactgcggaggccgccagtgcggcactgatcgcgaaggtaattcaggtgccttcgattgaagactggattgcgcgcctggctcagttgcagttcgacgaagctacggcccgtgcctggtatgagtcgttgaagtctaggcgagcacagtttgtggaatgtgctgccgtgggagatatttctgcgttcgattgggctcctatcgatcaggcactggaaaaacgagctgccgacttgcttgctgagaagaccagcctcgcccagctgcagcaggatgggcagcggcagcaggtcgagaaacgagtgaagcaactcaaggcgcttcagtggctgtcccagaacaagccggcgattctcgcagagcgtgagcggctagtagctgtcgatctgctggataaagctattaagttaacggccaccaattcgttgacaaccaagcgcaccgagcttgggcgtaccgagcttgatgctggatatcaggcccgctttgatgcggagttgaagtcccttggtggacggcggttgccagttgtgccgcagagtagggctcaaggaaaaggagttatcacatttgggctcgcccttgtcggtgctcgggctggtttcactcctgatgtcgtactcagtgaaggcgaaacccgcattgttgcactggcggcattcctggccgacacaactggttcgaaccagcttgcccccttcatctttgacgacccgatttcgtctttagatcaggatttcgaggagagggttgttacccggcttgtcgagttggcgaagacccggcaggtcatcatcttcactcaccgcctctcgctgattgcactcgttgaggctgtaatcaaaaaacacggtgagaatccggctaacgagaaaattactcacaccgtgcagtcgcttcgacggctggataaggtttcgggaattctggcgcaacacagtctgcgggatgccaagcccgacaaggcacttaatgcggttagagatcacgtcatcccgaggctcaaaaagcatcaggccgatgccgacgccgacggttatgacctcaccgtgaagagcgcctgcagtgattttcggatcatcttggagcgaacagtggagctcatccttttgaatgacgtagttattcgtttcagacgggacgtcatgactaaaggaaagctaagaggtgttgccaaggtgatggcagaggactgcgattttatcgaccggttaatgaccaagtattcagtgtacgagcactcgcagtcagatgagctacctcaggttccggtcgagctcgatgagttcgagcgggatgtattggaactcattgcatggatggacgagttcaaaggtcgagccagttga

SEQ ID NO: 350833 - DNA, 1317 bp, Pseudomonas aeruginosa
atgattaaaaaagcgtcagaattactcgagcgcttcattgcggtggaagtcgagaagttgtctggtgtgaatatgttgcacatgccaactctaggtagtgcttacgaagaaattaccaggcaagggatatttcaggattacgctattccaaaagatttggatctaagagtggtttccggatttatctccgtaagtggtgagatgttgccggagcagattgactgcatgcttgttcatggcgatgggcagcagtatggtctaactcagcagtatatttacgatgttaataaagtgctttgtttttttgaggtaaagaaaaatctaaagaaggctgattatgctgatgccattgggcacttggctaagattcgaagaaaatttgcggatagctttgaagaaagattggtgagtgaagactatgagccagatatcactgttgccaggatgcgttttgcacagattaccgggagagccgcaccggaaaggtatcgcgatataaatggtctttcggtagctgatggcgttctgttttactgccttgtacaagagtcattggctccagtggcaataattcatgggtatgaagggtataaaacagagtacgggcttagaactgcttttatagattttctagatgagaataagagcaagggtggcgagggttttggagtacccagcattcccgctctggtgacctccaatcagttctgccttgttaaagctaacggtattccgttcttgggggtcggggagttcggtgagtgggtgccggtcgtctctacgcgctataactcggctaagctaatactggaaataatttggtcaaagatttctatttattttaatctaaagatgccgtgggatgatggtctgtacatagacaacgcagaaccgctgctaatcgcgaaggcggtagaagagggcgggtggttgctcaggccatatgagccgaaagaaagagatctcaaacgtgacgataacctctgctgggcgccagcaaaactgggggaagcagagatttcggctgtaaatattatggcgtttaaggctggatacttacctcttgataaagaaatggaggactaccttcaagagaagcacggcgtgccactgaagacagttgtggataatttggtgcggactcgtgagtttatgctggacggagattgtgttaggccagtgcatggcgttacgtatgtcttaacagctgatgatgggacagggtttgttgcgtcagaggttgagaggcttgatttgtggtgtgcggagaatgatgtcgaaccgcactatatgtccatgtggtttgttgatgagtga

SEQ ID NO: 350834 - DNA, 1119 bp, Pseudomonas aeruginosa
atgacagcccaacaagtagactcaattctgccccaaggggaagcacttcgcacatacctttcccaaccttacattggcaaaggggacttaaaaagcatcctaagaaatcgtggagtcttcctttccgaacaggaaaaagaacaaagcatcccagcacttaccttgactttgatcagaccaagcgaattcaccgagctgcaactggcctacacgtcaaaagaagataatcccaagatcacaacccaaacaataaagtggcaaggcagctcatctctgattgagagcattcctgatgaaatcaacataaacaagatactcgacttagacttcgaaaacttcaaagtattgggcgcgccaaatttctatccaataaatggaaatctagatgcaataagaatggactttacagtcgaacgcctagatcgctcaaaaagctgggctgaagaccgtaaaaacttcaaagcatcaatagagatcaagaagagccattccaaagatgaactgataatcatcagcacacatactgcgccagagacaaaaacaaccaacaaggccatttcaaaacacttaattattcattttaagtcaaaaaatcaaattgacgaaaatgaaaaaattcgaccaatacgctttggggatttcaccaatgaaaacagattcatatatctcctaggcctaaccaaagacagtcgcctagtaaccctttcatttgttgaaattgtcgatattggcttggcacctgacgtagatagaaccctaccttctgatcttaagtggatgaaggagcgcataagaagcctcgaccttaagggaattagcctggaagaatctgagttcttatcgaaccctgcatatcgtccgtgcctctacctgcaccgcctagatgccaaattccgctttagcacatcagcccttgatggtgagtgcgtaatctcgcttggattccctgagttctctgccgggcaaaacaaagatagcgaaattgaattgcggatcaagagcattacattcgataccatccaaagaggaatggacaagaatgaagcaaaagagacaatccttagagaacttgaatttgagaaaattgaaacctttaaaaagctttcaataaatccctag

SEQ ID NO: 350835 - DNA, 933 bp, Pseudomonas aeruginosa
atgggtgagtggtctaaaaagcttggtgagcatggtgaggatattgttgaagctctcatggatctaataggttggaaatcccccttgaagggcaccgacctagattgcgttaaaccgacaatccatggctcgtctgataaacccaggcgcactcacggcgtcgacttcattttctcctgcatatctccgctagaagacaacgtattaaaacatctgctgatatcttcaaaatttaaagcggatccctatcctccatccccgacgaacaccttcaaagattacttcatagatctggctatggctctagagtgtttcaagagatctagcaagagaaggcaaatcaactctggataccagcaagtaagttctgactcaatttccggcgtccttttttggttaagcggcaccgacgacacgaatgcagacatcgtccaaaaaatagccaacgccagaggactagacgatttcgcctacggcacgatatatgtaatcgacaactatcgcgcaagctttctattcgacagcataagccatgtcaatggaaagtacggaaccaacaacgtaaaatttgtttacccttccacgggaaaaaacatcagcgcaactagcagaattacgaccgggaaagtgcttcccccggaattcataaatagcgggataatcccattctacgcgaacgtatcaggccagaaaactctaataatctgctgccaggacgcctttaacgaggatgcctttaggcgactcatagggttctccatcaccattgcactagagtttccagacaagatatcgcttgccttcccagactacgactttgtcaagcacaaagagattgttgacattacaaagcttactttggccgacaaagaatttgccagcatagtagaagtttcctcctaccaaaaggactttagaggaatagcagaatga

SEQ ID NO: 350836 - DNA, 699 bp, Pseudomonas aeruginosa
atgtcctctacccaacaccaactgatcgagcagtgcgccatccgcctgcgcggcatcgtcgaagccctggacaacatccacgacagcacccagcaccgctccccgcaccgctgctcgacggacctcgacgacgttcactcctcagccgagagcctgctgtccctgatcaaggaccaggcgccgacgcaagctgcccagggcctggccggcgccgccctggcgcaaccctccccggcgcaggccgagcaggccaccgccgacgactacgaggaagtcctggccgatcaccgtcgtctggtgcgcgagttggacgtgctgctgaacggagaggaaggcgccgccaagcaggcaagcctctgcgatctggtcggacaggtgtccgccatcgtgcgcgagcgtcgcgtgcctctgctgtcccgttcgcaggcagaggatgctccggtaatcggatgcctctgcggcatgccgatgaccgagggccatcactcgccggacggttgcagcagccttggagagttcgcaacgcatgtggtggttccgcgggagttgctggagcgaatcaggtctcaactcgatcttcgagcggagttcgatcaaacatacccgccagagactcagccggtgaacgatgacgctcgcctgttcctggaactccgcgccctgctgagcgagcaggagggaggctccgaccatgcgtag

SEQ ID NO: 350837 - DNA, 765 bp, Pseudomonas aeruginosa
atgagccagaacaacgccgccttcctccacatgaccgccgacacgctcggcaagagcctgctgcagggcctgatccaggaaatccgcatcctgccggacgtttggcagaagctgtccgaagccaagcagaccgatgtgatcgagcgcctggagcagcaggtacgcaacgccgccaccatcgcggttcacaccattgccggtgccgagcgcgagaccgtctacggcaagctcgaatccatcgcggccaaggacaagatgaaggccgtcatcgtggtgaatcactccagcccgaacaagcacgaccttctggacgcggtgaacgaggactgcctgctgatcatcggcggcgccgctgagttcctcgacggcatgaaggatgtgaaggccgatccggaccagaacccgctggacctgaacggcggcgacggcgacatggaggaagacggcgcttggggcggcgagcagcagcccgacgatgatgtcgtagatgccgagttccaagagctgccgcaactcaccgtcgagcgcttcgccggccacaccctgggcgagatcgccatcggcgtcgccaccaagaaggacgtgttcgacgcggcctggctgcaatcgcgcttcgctctcaccaccgaggaagccgagcgcgtcgttctccaactgctggaccagggcgtcatcgtgctcgagcaggagaacgaggaatcccgcgagttgaacacttaccgcgtcgtcaagaagccgggggatatcgccctcgacctggagtga

SEQ ID NO: 350838 - DNA, 228 bp, Pseudomonas aeruginosa
atggaatgcaagatcaccccctcacgccgggcggaggatgctgcgcgcctggccgccctggtcgccgcatccggcattcagccggtgccggtcgccgggttcaccgaggtgaagccgctgccgccgcgctccaagcgtatcgaccctgacacagtcccgaaacgccgtcggcacggactcagccgcgctgagcggcgcgtgctgcgccaactcgcggaggccttatga

SEQ ID NO: 350839 - DNA, 462 bp, Pseudomonas aeruginosa
atgagcaagcggaagccccacaacattcgcgccaggatggagcgctcctgccgcgcactcctggccaccaaccacgtcgccgtggtcaacatcgacccgagcggccgccagggcatggtcaactggaagaactgcaagaacatcccgcccgggcagcgcatcgccgatgctgtctgcgacatcgcctatagctggaccatctacctcagcgccttctgcatcgatcagcgtggccagcgctactacaagtcggtcgagatcgccccgcagggcctgtaccgcgccgagcacctcaccgacccgatcgagacccactacaaggccttggtcggcgagtgcaaccccaaccacctgatcggctccggctggatcgccattccctccgccgtctcgctcgacgaagaccaggccgcgcgcgtgtttgacgccgtaggcgcctggagtcagcagcgggcggcgtag

SEQ ID NO: 350840 - DNA, 171 bp, Pseudomonas aeruginosa
atgaccaccaagaccgtgagcgccgccgtgccggcggccgtgaaggccgaagctgccgccgtcgcggccgcgcacggcatgagcatggccgcgctactgcgcgagctgctggcccgcgtagccgcccgcgatgctgaaacgctggcctggctcgataaggcccgccgatga

SEQ ID NO: 350841 - DNA, 294 bp, Pseudomonas aeruginosa
gtgccacaagtaatcgtcaccgaaggcgcggcggaaggcttggaacgatgccggcggttcctggccgtcaaggcaccggacgccgccaggcgtgccggccaggccatcgagcggcaattcctgctgctggagacggcccccgacattggccggccgttccctgaaatgcccgagctgcgcgagctggtgattgccttcggtgattccggctatgtggctttgtaccgccacgaaccggccgacgatgcggtgtatgttctggccttccggcaccagaaagaggcgggctactga

SEQ ID NO: 350842 - DNA, 273 bp, Pseudomonas aeruginosa
atggcaacgtctctcaagatcgacgacacgctgaaaggtcgcgtccagcacctcgccagccagcgccgccgctcgccccactggatcatgctcgaagcgatccagcagtacgtcgagcgcgaagaagcccgcgagagcttcaagcaggaagccttggcgtcctgggcggcctacaaggaaaccggccgccacctgaccggccaggaagttcgcacctggttgaacacctggggcaccaatgacgaaagggcggtgcctgagtgccacaagtaa

SEQ ID NO: 350843 - DNA, 276 bp, Pseudomonas aeruginosa
atggctgtttacatgatcggttacgacctaattacacccgggaaagactacaacactcttgtccaagcaattacccagactttccctacctactggcactgtctagactcgacatggttaatcgtaagcgacttaaatagccaacagatcagggactaccttttaacttttatagatagcaatgaccgcttgctagtcgcccagatgggtagaggtgccgcttggacaaactctttcaataccggctgccaaaactggcttagaacaaatctctga

SEQ ID NO: 350844 - DNA, 369 bp, Pseudomonas aeruginosa
atgcacagcggcttggttggtctcgcagtggctcagcacggcagcggccaagtcatccagcacaccctggaggatatgcggatcggcgccgtcgagggcatggggcgacacctcgatcttgaggtgcgagccaatggtgtcgaccttgatgttgtggttcttgatcagcaggatcaggcccatttcggcgttctgcaggcggtactgatagccggagtcccgaccgattcgacccttggaccactcgtagccggcgaactcgaccacatccaccgacagatcgaacagcgccatgacttccggccggagcttgccgttgtacaactgccgcaccgtatccacgccgcaccgcagaatgcgcacgcctga

SEQ ID NO: 350845 - DNA, 1011 bp, Pseudomonas aeruginosa
atgaccaagaagcgagaagggcagggcgcgcagcagatcggcgagatcatgggcgacctggtggcccaggcgcaggccaaggcagcattgccgccgccgaagcgccaaaccaagaagatcacgccggccggcctcatcttgaccggggccgaccagaagctgatcgaggccagcgcggagattgccaccaccccgccggccggcgaggacatggctttcactcatgcggtgctgtgccaggtcggtttgcctcgcgccaaggtcgaaggccgtgagttcatgcgacagtccggcgcggcctgggtcaatgtccaggccggctatctggacgaagggaaggggccggtgctgcaacctatcccctatggcgtcatgccccggcttggtctggcgtgggtttccaccttcgccgtgcgcaacaaggagcgggagattcccatcggcgacagtgccgccgagttcctgcggctgatggggatggagagcgacggccgccgctacacgacgctacggaagcagatgcacgcccttgccgccgctcgcctgcaactcgggttcaaggggcgcacctacaacggccagccggtgcagcaattcgacgcctgggtgtcgaacaaggacacgcagcagcgcgccctatggcccggcgtcatggtgctgtcagaggactactacggctccctgatcgaaagcgccgtgccgctggacaatcgcgctctgcacgccctgaaaggttccgcgctggccctggacgtgtatgcgtggctggcccaccgactgcaccgcatcgaaggccgaggtgtgacgttgcactggaaggcgctgcgcgagcagttcgcccaggagtaccgaggcaaagaccccgacaaggacttcaagaaggagtttttgccggcgctcaagaaggtgctggccgtctatccgcaagcgagggtgaagcctgtcaccggcggcgtgctgctgatcggctcgccaccgcccatcccctacaagggcggccccacggtttag

SEQ ID NO: 350846 - DNA, 252 bp, Pseudomonas aeruginosa
atggcagccaagaaacccgccgacctttccggcctggtcgcaaccaagggccaggccgcgccagttgccaacgtgccagcccgcagcgcagcgccggccgaggaagcagaggccaacaatgtgccgctgaactttcgcgtgtcggccgaccttcgccgccgcttccgcgtgttcgcagccaatcacgacctcaagctgaacgagctgctgcgcttggccttcgatgagtacgagaagcggcacggccattga

SEQ ID NO: 350847 - DNA, 651 bp, Pseudomonas aeruginosa
atgaaaaccatcgtcatagcaagccagaagggcggcgcgggcaagactacccttgccgctcacctggccgtcacagccgagcaggagggcgcagggccggcagtcctgatcgacaccgacccgcaaggctcgctgtcggcctggtggaactcgcgcgaggccgatacgcccgcgctggcatcggccagcctggccgagctggcgacgaagctagagggcctggcagcggcagggttcaagctggccgtcatcgacacgccgccggcgattacggccgccatccgcgacgtggtgaagctggccgacctggtgctgatcccgacgaggcccagcccgcacgacctgcgcgctgttggcagcaccgtggatattgctcaggaagccggccggccgttcgcctttgccgtcacccaggccaagccgaccgccaggctgaccgtgcaggccgtcgccgccctgtcagcgcatggggccgtggctccggcaatcgtgcatgaccgcgtggattacgcggcctcgatggtcgatggccgcacagtgagcgagacagacgccaagagccgaagcgccgaggaaatgcgacaattattgtctttcgtgcttgaacgcttgcacgtaaagacgaaaaccaaaaagaaggaaaccgtataa

SEQ ID NO: 350848 - DNA, 444 bp, Pseudomonas aeruginosa; identical to SEQ ID NO: 327304

SEQ ID NO: 350849 - DNA, 285 bp, Pseudomonas aeruginosa
atggttgatctggtgaccctgacggctgcggccgtctgcggcgctatcagttgccgcatcttcacgtaccagcgccacggcgccacgtaccggttcggcgtctcgctatgcgcgtacatcctcgccgctgggaccggcatgcaggcgctgtcgatcagcctggccgtgctgatggcgcgccacgcaacgccgatatcgccctacctgctagcggtcctgctggtgctgctggtgctggtctaccgcaacaagggcaacatcgcgcccatcctgaggctcagttga

SEQ ID NO: 350850 - DNA, 555 bp, Pseudomonas aeruginosa
atgtctgcgaacaacctctctataaccctccgcctcatgaccgagcacgacctaccgatgcttcacgactggctcaaccggccgcacatagttgagtggtggggtggcgaggagaagcgaccgactctcgatgatgtactggagcactatcaacccggagcgatggcagaagattccgtaataccgtacatcgcgatgctgggcgacgagccgatcggctatgcccagtcgtatgtcgcgctcggaagcggtgatggatggtgggaagatgaaactgatctaggagtgcgaggaatagatcagtctctggccaatccgacgcagttgaacaaaggtctagggacaaagcttgtccgcgcgctcgtcgaactattgttctcggaccccgccgtgacgaaaattcagaccgatccgagcccgaacaaccatcgagccatacgctgttatgagaaggcaggattcgtgcaggagaaggtcatcaccacgcctgacggaccggcgatttacatggttcaaacacgacaagccttcgagggccgacgcggtgttgcctaa

SEQ ID NO: 350851 - DNA, 339 bp, Pseudomonas aeruginosa
atgctcaagtggatgcaattacgcaacctgctgacccgcctggcgcgtgcccaggcctgggccctgaggcacccggaggcgttcgccgaggccctggccaaggatctgaacatgccgcgcgaagtcactcggcgctgggttggcgaggcgcgcatcagtcctgtggtcttcggtccggaggttgccgccaccttgcagaccgccgccgatttcttccatgccgaaggcgtgctgccgaagtcgctggaggtcgcccaggcgttcgacttcagcctgtccgccggtgccgccgaagtggcccgccagttgcccgccgacctccgcgtcggccagcgttga

SEQ ID NO: 350852 - DNA, 213 bp, Pseudomonas aeruginosa
atgtgcggcgtgctcgcgtccaccgccaccgccgcgccctgggcctcgcgccggttgcgggaggacatcatgcggaagaagatcaccccgcagcccagccccaccgattcgccgatggcccagaggccgccggccgaggcgcgggtggcgttgcccggtcgcttgtcgtcgaccacggcgatgcgcaggttgccgcgcctggacagttggtag

SEQ ID NO: 350853 - DNA, 3177 bp, Pseudomonas aeruginosa
atgaccaacactaaagattttttgtcccggataacgaatatctataacactggggcggccactgagcactcatatcgatcctgctttgaaagcttattcgaaagtctgagtaaaaatattaccgctttgaacgagcctaagcgtgttaagtgtggggctccggacttcattattaagaatggaaatcttgtaattggccacctggaggccaaggatttaggcgttgatattcgaaatctcaaagggtacggcaaagaacaacaaaagcgttatttggaagcgctgcctaatataatctacagcaacggacttgaatgggatttttaccgggatggtaaacttattgactcagtcactattgggacgctgggcaaggtaatcacgtcagatggtagtcaatacacaaagctggaatccttgctggagaattttattgcccagcgccccattagtatcaccagttctaaagagctggcggaacgtatggcaggtaaagcaaaacttattaagctggtattctgtaatgctttgaaagatgatcttgatggtggggttgatacggatttagagtctcaattcacaacctttaaagaaaatttaattcacgatataaacccggaagaatttgcagatatttacgcagaaactatttgctatggtatgttcgcggctcgtctgcacgatgacacattggagacgttcagtcgtcatgaggcattgcacaagctgcctaaaactaatcctttcctgaaaaatttgttcagctatgttgctggccctggactagatgaacgcattgcatggattattgatgatctggccgagattttccgtgcgactgatgtttcttctatcatggctggcttcggaaaactaacaggacgagcagacccgtttcttcatttttatgagacattccttgcggcttacaatccgagtaaacgaaaatctcggggtgtatggtataccccggaaccagtagttaactttattgtacgtgctgtggacgaggttctcaaaacggagtttggtctagttgatggcttggctgacacttctaagataaaaattgaatgggataccgggcagcgcaagttgacaaaaaaaggcaagccagcggcagatggaaaaaatgcgatcattgaaaaggacgttcaccgtgttcaagttcttgaccctgccacaggtactggcacgttcttggctgaagtaattaagcagattgctccaaagataaaaggcgtagcccctggtatgtggagtggctacattgaaaaagatcttatcccaaggatccacggctttgaaatattgatggcttcttatgctatgtgtcatatgaagctggatatggttctgacagagctgggttacatcccttccagcaatccaccacgtcagtcggtctatctgacaaactccttggaggagggtgacccgccaaactatgagcttccttttgcacgctggttatcaaatgaagtaaagctagcaaacaccattaagcgcgacatgcccatcatgtgtgtgattggaaatccaccttaccttggtgagggtggcgtttccgagggctggataggccaattgatggatgattacaaaatggagcctggtggtaaagttaagctcaaagagcgccagtccaaatggcttaacgatcactatgtgaagttcattcgcatgtcctctcacttgatcgaaaaaaacggtgaaggcgtgctaggctttataactaaccatggctacttagataatccgacattccgaggtatgcggtggcaccttcttaagacctttgatcagatttgggttctagacttgcatgggagctctaaaaagaaggagcttgatccaagtacgggaaggccagataaaaacgttttcgatatccaacaaggtgtggctgtaattattgcagtaaagagaaaatcaggaagtggtaatctggcgaatgtttcgcgcggagacttgtggggcgggcgagcagagaaatataagtgtcttgaaacgctcggcctttcggatgacctatttggatcaattgaatgcactgccccccactactcttttgttcgacaagatgaagaggcctctcgtctctataacgcaggcttttcagtagaagagttcatgcctgtcaattcagttggtatcgtcacggcgcgcgacaagctgacgattgattatcgccgcgaggatctatggaagcggatacaggattttgctttaattgacccagaaactgcgcgcaaaaaatacgaccttggcaatgatgcaagtcactggcacgtacaatgggcgcaaagcgatgtaaatagtaatcatgatcaaagcttactgacctccattgcttatcgtccttttgactttcgctggacatactatacagggaccaatcaggggcttatggcgagacccatgtctcgaattatgcgtcatatgcttaaggaaaatattgggattgcgttcactagaaaaatcgaaggagctcggaaatttgctgacgctctagtttttgatcgtccgatcacgcaccattctttaagtattaaagaagtaaatattttctgcccgttatatctttattcggaggatggcgacctacataaaactggtcgaagcgtgaactttgagccccagatctacgcccggttacaaaagctcgcaacttcctcaaaatacggtactcctgatgaattagccgtcttcgactatatctacggcatactatattgcccgaattatcgtgacgcttatgctagcttcctgaaatcggattttccacgcatcccttggccggccaatcccgaggaattttggtatgtatcttccaaaggtacagttctacgaagactgcacctgatggaaccagcaactgtgggagctacggagtatcctttcaaaggggagggtgaaaacgtggtggatagcattaataaaaaatcctaccgagacaacaaagtatggataaataacacgcaatatttttccggcatcacggcagctgcctgggacttctttatcggtggctttcaacctgcacaaaaatggctcaaagatcgcatggggcatgtcctgacatttgatgatgttcgacattatcagcgcataattaaagtgttggtcgagactgatcgcatcatgaatgaaatagatctcaaatttaaaaaatag

SEQ ID NO: 350854 - DNA, 192 bp, Pseudomonas aeruginosa; identical to SEQ ID NO: 344151

SEQ ID NO: 350855 - DNA, 1296 bp, Pseudomonas aeruginosa
ttgctcgacaaactgcacctcttcgttccgttccgcctcgagcacatccaactgctcggggtggaagggcgtgcggatccggtgcacgtcgtggatctggaaagcctgggcgtgccgctccaagggcagatcagccgaggggagggcggagagctacaggcggattacttgcggcacacctgggagtcactgagtacgggcttcacgcctttggcgttcaaggtgtttcaccagtccttgggtaagcgcctgatgcccggtgtagagctgaaggccagcccggcgaagttgctccaggggcacaacgtgtttggcccaacctgcatccagaagggggccgaggtgatgttcaagtggctagccggaagctacccggacctcttcgcgaagctcgatgtgtcagcgacgcaggtctacaccctggactgcacgtattccagccggctgccggacgaacgcacggcgctccaggtcatccaggcgctgaccaacgtcagcaacggccacaccaagagtcgcggcgacaactaccagacgtccgcgtactggggcgcgaaagaatcccgcctaaagcgcctgaaggcgtatctcaagcacaccgagtttcaggcccagttggacgaattgaagcgggcagggcgggccgatctgtcggctgctcggtctgctcgggtcatgtctgacccacggttgcaggagtgggtgcgctacctgctccgcatggaggccacggtaatgcaccggtggctggaacgccggggcatcccgtctcggcttgttgatctgatcgcctaccagcagcggctccaagaagaggggcgctgcctgattcaggagtgctggcaagcggttacagcggaccttttcgcggcctttgagggtatccagatgcgagtgattgatgatgaaaaagtgctggccgcactgctcgaaaagcacaccaaggaaggtaaggggaagtggaccaaggccaaggtcgatccctccactggggtgacaattcctccggtgtttgttcccggcaagcctaacgatagctatgccctgaatctctttcgcacataccgaagcctcaaggactacgggtgggaagagaccatggcgtctatggctcgccgaaccttctacgaccatatccgggacatctgcgctgcgggcctgtcgaaagccgccctgcagaagctccacgaagcggaccgggcgaacaacgtcgtaccgctgctgcggttcgtccaggtcgatttcagcgcccagcgccccgactggtacgtcgagccgaccgtggaggccgcgtga

SEQ ID NO: 350856 - DNA, 192 bp, Pseudomonas aeruginosa; identical to SEQ ID NO: 344151

SEQ ID NO: 350857 - DNA, 420 bp, Pseudomonas aeruginosa; identical to SEQ ID NO: 325843

SEQ ID NO: 350858 - DNA, 807 bp, Pseudomonas aeruginosa; identical to SEQ ID NO: 326074

SEQ ID NO: 350859 - DNA, 183 bp, Pseudomonas aeruginosa
atgaccaggcagttgaccactctcacgctgtgcctgctgctcgccagctgcacgacccacaaggccgagccggccaggccagccttcgacagcagccgcaatccagacctgctctctccggacctgtaccaaaacggtgtacatccgagaaatagccccagtgcaccatgggtgctgtgctag

SEQ ID NO: 350860 - DNA, 957 bp, Pseudomonas aeruginosa
atgatcgagatgaagatagccgatatggcagtggaagatgataagcccctcaaaagagggcgaaaatcaaacgtagtcccctacgtacaaactgacatgttccaggcgaacattgttgagtggccagtgaaggatgacctggccagcatggaatttccgctgttcagcctgtcgaccaaacctgatacgagcgttcgtgagtacagccagcccggcaccaacaagcgtgttcgcatcattccgcccgtgattggtgccgccaccgtattcgataaagacctgttgctgtttctcgggtcgcagatcatcgaagcccgaaaagcaggaatgccaatttccaagcgggttaagttcgatacgtacgattttttgacaggtacatcccgggatcccggtggaaacgcatattcgaacgttttggacatgcttcgacgattaaagggtactcagctcgaaaccaatatcgttactggtggtcaagagcagacgaaggggtttggctggatcgaagactacaccgtcaccaagaccgcatccaatggcaaaggcgtgttggaatgcgaagtcgtgctgtccgagtggatctacaacgctttcctgcattttgaagtgatgagcattgatcggcgctactttgggctgaggatgcctcttgaacggcggctatatgagctcgctcgtaaacacttgggaaacaagatgatttgggccgcagacattgttgcactgcagcaaaaatgtggctccaagcagagcctcacccactacagggccgagatccgcaagatcattcagcgtgacctgctgccggactatcacatggggctggataccagcgtgaagcctcatcgaatcgtgttttacacgcgtgatgagcaatcgctcctcgaggagctggcggtaaaaggggaaatggaatggttcgcttcgctagaaaagcgagacatggagagttga

SEQ ID NO: 350861 - DNA, 174 bp, Pseudomonas aeruginosa
atgacgtactttcagatcgtcgatgtggtcactatcgaaacccaaacgggcaagactcaaatcatcgccttccacaagggctcgattcgcagtgatcatcaccgatcgggcctcttccagtttttcgatttcatcatcaatgtggagggtatcgtcgcgatcaaccgactataa

SEQ ID NO: 350862 - DNA, 1140 bp, Pseudomonas aeruginosa
atgaactcgaatgtggaaatggtcgaagatgttgcaacctacgtggatttcaatgagttgtttttcacgccccgtttcgccgcagactgctttggtcttacgactcgacgcctgaaagacatcgaagaagcaaacaacatcgagatccgtcgcgtgccgcgcggaaccgtcacctctcgggtttatacgccttcggaccttttcgatttggcagcacttcgccgtgaacttgggcacttgaaaggcttggcgcgccaggtggtcatgtccacctacatctcgaaaggtggcaccaacaaaaccaccacagcagtcggccaggctattacctgttctttagccgggttgcgcgttcttctggtcgacaatgatccccagggtgatacgtcgagcatgctcggctacgacccggacgctactccagaagatttgcaggagcttggaatccctgctgaccgcatcgttgatggtcacctcggccacttgatcagcccaatgcttcgcatgcgatcgtttcaacccaaaacgcttgatgaagtcatcaagaaaccttttggtgaaagtggcccccacctgatccccgccgacgcatcgctagaagatctgggcgtggctttggacgcagccaataactcggacatgtggtacgcgaagtgggttgaagatggtaaagccggcaaaattccaggctgcgacctatcgcaatacgacgtcatcatttttgataatgcgcccgcaggttcgcgcctgaccaagaactcagtagccgcaagcgatctgctcatgagcccagtccgaatggacaaattctccttcaaggcgatcctgcgactgcatgactggtgcgctggtttcgcacgcgaatacggtttcgctcctgaactggtagctgtgccgaccatgtttgcaaaggggcgtcctcggatgctgaacaacctgtacaggttgaaccagcttttcccaggtcgggtgaccgaggaaaagatttttcactctgcagactatgtgaactccctcgatgacggtgtccccctgatgttctggaagggtgctaaccgggacaccatcgaaaacgctcgcgcagtgcatgccgaggttttggagaaaatccgccatgttgctgctcagccccaagagtga

SEQ ID NO: 350863 - DNA, 996 bp, Pseudomonas aeruginosa
atgaaatccaccgactacccaggcaagccaagcacggcaatggcatcactgcgcaagcctacggaaatgccgccgaccacaggtaaccgtggcagcagggcggcgatgctccaacaggccatgggatctgagcaagaggctgatacgaagcaactcattgctcaacacgctcaagaaggtcaactcatactcaaggacgaatggctcgaggaggtcccagttgagctgatcgatccctctccgtatcagccaaggatgttcttcgaccaagcaaagcttgaagagctcgctggctcgattgactctgtgggcctgggtaaaccgattacaatccggcctgtaggggagcgtttcgagcttatcggcggtgaatgccggtggcgggctcacaaaatgctgggccgcgacaaaatcatggctcatgttaagccaatgtcagacgacatggcgatgcttttggcaatcaccgacaaccttcaaaatgagctaacggattacgaaaaagctgtgagctatcaacgatatatgctgaaaggcgctgataaaagccagcgggcattggctcgacgccttggtgtagatcacacagtcgtgaaccgctgccttgacctaattcagctgcccgaacagatcaaggaaattctgaacaccaagccccacttgattacagcgaactatgcgaaaaagtttgtggagcattcaaaggcggatgtgaacatcgtccatcgcattgtaattcaaatggccgagaaggggactggccaggaagccgcacttcgcatgattgggcagaagcttgctgcttgtagcggtcctaagcccatgatgacagaacctcggaagctgcaaggggttggctcagttcgtttaaatgggcgcaagctggaattcaagattgataaggaagtggaccctcagaaaatcatggataagctcgcagccttccttgattcgattgatgcctctgaatttgctacacagggcacgcgaaattga

SEQ ID NO: 350864 - DNA, 471 bp, Pseudomonas aeruginosa
atgaccgacatgtcacaggtcaaggacgcctcggtggatgcgctgttttccagccacaacatcgagcacctgtacccgcacgaggtcccggtggcgctggcagaattcaagcgtgtgctcaagccaggcggcttcgtggtcatcacctgccccgacctgcaagcggtctgtgcgctggtggccgaagacaagctgaccgacgcggcctatgtctcgcccgccggcccgatcgcccccatcgacattctctacggccatcgcccagccatggccaacggcaacacctacatggcgcaccgttgcggcttcaccaagcgagcgctgaccggcaccctgcaggccgccggtttcgacctggtcctgccgatccagcgcacccacccggcctacgacctgtgggccatcgccgccctggcgccgatcacccacgaagaagtcgtggccctggccaaagagcatttctcggagtga

SEQ ID NO: 350865 - DNA, 1140 bp, Pseudomonas aeruginosa
atgcgcgttcttcatttcttcaagacctactacccggacaccaccggtggcatcgagcaggtgatgttccagctcagccagggctgccgctcgctgggcgtggacggccaggtgctgaccctgagcccgaaccccgtgccggagcgcatccaggtggccgaccatgaggtggtgcgggtcaaggagaacttcaacctggcctccacggggttttccctgacggtgttcaagcgcttcaaggacatggccgccgaggctgacctggtgcacttccactttccgtggccgatgatggacctggtgcacttcgccacccgccatggccgcccgacggtgctcagttatcactccgacatcatcaagcagcgcaccctgctgaagttctatgcgcccttgatgaaccgcatgctgggcagcatggaccgcattctggtggcctcgcccaattaccagcgcagcagcgaaacgctcaaaccgttcgccgacaagaccgtggtggttccctacgggttggacgaggcggcctacccgcaggtgtcggcgcagtgccaggcgcgttggcaggcgcagctgccggagaagttcttcctgttcgtcggcgtgctgcgctactacaagggcctgcacacgctgctcgatgccctggagggcgcggattacccggtgctgctattagggggcgggccgcaggaacaggaactcagggcccaggccgagcgcctggggctgcgcaacctgcgcttcctcgggcgcctggacgacgaagacaaggcctgcctgctgcagcgctgccatgcgctggtgttcccgtcgcacctgcgctccgaggcgttcggcatttccctgctggaagcggcgatgtatggcaagccgatgatctcttgcgagatcggcaccggcaccaccttcgtcaatatcgatggcgaaaccggccttgccgtgccgccagagaacccgacggcattgcgcgaagccatgcgccgcctgtgggacgagccgggcctggccgcgcgtttcggcgcccaggcccgggcgcgtttcgagaaggtgttcaccgccgaacgcatgtgcgcggcgacggtacaggtctacaaggaactgctggtgcccggcgcagtgccggttcgggctgacctgtag

SEQ ID NO: 350866 - DNA, 1737 bp, Pseudomonas aeruginosa
atgcagaaaaatcatgaaaacagcttgcaggctgcactaaaggcctgtaaaggcgctttcatatcagttggtgtcttcagcctctttgtcaacgccctgatgttggttccaaccttctacatgctgcaggtctacggtcgagtactgaccagcaacaacgtcaccaccctggtgatgctgaccatcatcatgtccatcctggtgatcacgtccgggaccctggagtgggtgcgctcgcgcatcatggtacgcgtcagcaccaagctcgacgtgctgctcagccgccacgtctacaaggccagcttcaagcgcgcgctggaaagcggcggcatggatgcctcggcccagcccatgaatgacctcaccagcctgcgccagttcctcaccggcaacggcgtgttcgcgtttttcgatgcgccctggctgccgatctacatcgccgtgatgttcatgttccacccgtactacggctgggtggccattgccagcgccatcgtcctgctgatcctcgcctatgccaacgagaaggtcaccggcaaggccctgggcgaagccaacaaggaaaacattgccgccacgctgaacaccaccaagaacctgcgcaacgccgaagtgatcgagtcgatgggcatgctcgacaccctgatcgcacgctggagccagcgccagcgcaaggtgctgctgctgcagtccaacgccagcgacaagggcggtgtggtcagcaccctgtccaagaccttccggtcttgggtgcagtcgctgatcctcggcctgggtgcctacctggcgatccagcacgaaatcaacgctggcctggtcatcgccggttccgtgctgctgggccgtgccctggcgccgatcgacctgatcatcggcagctggaaaggcttcatcagcgcgcgtacccagtacaaccgcctcaacgacatcctcgacaagatgcacgccgagccgcagcgcatgccgctgccggcgccgaagggcaacatccaggtcgagaacctgatcatcggcgcccccggctccaagaccccgatcctcaagggcatcggcttcggcgtaccggccggtgccgtggtcggcatcatcggccccagcgcctccggcaagtcgaccctggcccgtgccctgatgggcgtatgggcaccgcagcatggctcggtacgcctggacggcgccgacctgcaccagtgggacaaagagctgctcggcccgcacatcggctacctgccccaggacatcgaactgttcgaaggcagcatcagcgagaacatcgcacgctttgccaccatcgacccggaaaaagtcgtgcaggccgcgcagatcgccggcgtgcatgaaatgatcctgctcctgcccgaaggctacgacacggtgatcggcagcgacggcgtcaacctctccggtggccagcgccagcgcatcggtctggcccgtgccctgtacggcatccccaaggtgatcctgctcgacgaaccgaactccaacctcgacgaggtcggcgaacgcgccctggcgcatgccatccagtacctcaagcaggccggctcgaccgtcttcgtcatcacccaccgcaccagcatcctgtcccagctggaccgcctgctggtcatgcagaacggcgcaatcaccatgtacggtccacgtgaccaggtcatggaagagctcaacaagcaacagctggccgcgcagaagcaggcccaggtcagcgcaggcaccgcacaggccggtgcctga

SEQ ID NO: 350867 - DNA, 1323 bp, Pseudomonas aeruginosa
atgactcttattctcgcaggcaagaccgacaacttcgctgacctgccgacgtcggaccgtaagatccgcaacctcggcttcggcatcctcctggtggtattcggcattttcggcacctgggccgccgtggccccgctggacggcgcggtacacgcccccggcgtggtgaccgtgcagacctaccgcaagaccgtgcagcacctcgaaggcggcatcgtcaaagagattctcgtgcgcgacggcgacatggtgaaacgcggcgacccgctgatcatcctcgacgacggccagctgcgcgccgaatacgaagtggcccgcaaccagctgatcagcgcccaggccatggaggcgcggctgatcgccgagcgcgatggcaaggaccatgtcgatttcggcaatatgctcgaccctgaaagcgcccgtgccgccgaggcccgtgccagtgaaacccaggtgttcaacacccgccgcggcgcacgcctgggccaggtctcggtgctgcaggagcgcatcggccagctcaacgcgcagatcaagggcaccgaagcgatgatcgccaccaagaccagcctggagaaatcctacggcggcgagatcggcgaactgagcgaactgctgtccaagggcttcgtcgacaagcagcgcctgctcgaccagcagcgcaagctcgactcgctgcgttcggaaatcgccgagcatcgctcgaacatcacccgcacgcgcctgcagatcaacgaaaccgaactgcagatcctgcaggtcaacaaggacttcaactccgaagttgccaagcagctgaccgagacccaagccaagggctatgaactgcaagagcgcaccgccgccatccaggaccgcctgagccgcatcgtcatccgcgcccccgacgacggcatggtgatcggcatgaccgtgcacaccgtcggcggtgtggtgcgccaggccaccccactgctcgacgtggtgccatcggtgtccgagctgatcgtcgaagccgaagtgtcgccgcaggacatcaaccgcgtggccatcggcaagcacgccgacatccgcttcaccgccttcaacagcgccaccaccccggtgattccaggtgaagtcattcgtgtgtcggccgaccgcctgaccaacgaacgcaccggccagccgtactacctggtacgcgccaaggtcaccgaagaaggcctgcagaaactcgctggccgcaaactggtggccggtatgccggctgacgtactgatcaacaccggcgagcgcaccatgttgcaatacctgatgcagccggcgcgcaacgccatttctgaatcgatgatcgaggaatga

SEQ ID NO: 350868 - DNA, 1410 bp, Pseudomonas aeruginosa
atgattgtgcgcctgatcccctgtgtattgtcgggcatgctggtgctgcaggtgcacgcggccgagcccaagatcgccgtgccctcgacccccaaggcgccggccagcggcgtcagcgccaaggaatactccgccgacctgctgtccttatataaggaagcgcgcctggaagacccgcgcatcctctcggcctacgcgcgtgcccaggccggcaaggaacatgaacgcgaagccttcggcagcctgttgccgcagatctcggccaatgccggggccaaccgcatcaagcaggtcaacgaacaggtcgaccaggtctacaacagcgagaactacagcatcggcctgagccagatcctctataacaagaaggcctgggaaaactggcagcgctacaagagcctggccaagcagtcgttgtccgagtcggacgaagcccaggccgaagccaccgtcgacctggcgcagcgctacttcgctgccctggccgccgacgacgagctggaactgacccaggccgagcgccgcgccacgcagaagaatctcgaccaggtcagcgccctctacgagcgccagtacgccaagaagaccgacgtgctggaactgcaggcccgcgtcgacctgctggccgcccaggaagtggatgcgcgcaaccaggtgcgcgtgacccgcgccgcgctgtcggaaatcgtcgggcgtccggtgaccgaaaaactcagtcgcgtacgtgacgatgtgcaactgaaagtttcagacgaaagcctggaaagctgggtgcgcctggcgcagaacgaaaaccctgccatcaagtccaacctcagcgcggtggaagccgccgaggccggcgtacgcggcggcaaaggcgatcactaccccaccctgaacctgaacctgagcgcgcagaacaccaacgagggctacaacaacgccctggcaccgaagaccgacagttatgtcgtgggtgtcgccttatcggtacccatctatagtggtggttcgacctcggcgcgggtacgcgggctctaccaggatcaggtcgccgccgagcagcaactggaatacacccggcgtcaggtggtcaaggaaaccaccaatgcgtacttgaccgcagactccagcgtcgaaaaaatacgcgccaaccgcaatgccgtcgcttctgcggagcagtcgagcctggcgtcccaggaagcgttcaagtacggcgtggtcaatgccgtcgacgtgctgaccgcgacccagaacgagttcaaggcgcgtcgtgacctgctcaagacgcagtacgacttcataaccaatttgttcatcctcaatcgctgggccggcaaggtttcggctgacagcgtagaaagcgtgaacgtatggctgagcaacaacagcaagactgagccagccccagatcggaaaaccaaataa

SEQ ID NO: 350869 - DNA, 1047 bp, Pseudomonas aeruginosa
atgacccagacgcagaagacagcaatcatcaccggcatcaccggccaggacggcgcctacctcacccaattgctgttggaaaaaggctacaaggtctacggcacctaccgccgtaccagctcggtcaatttctggcgcctcgaagaagtcggcgcgctgaaccacccgaatctggaactggtcgagcacgacctcaccgacctgtcggccagcatccgcctgatgcagaaggccgagccaagcgaagtctacaacctggccgcgcagagcttcgtcggcgtgtccttcgaccagccgctgaccaccgccgagatcaccggcctgggcgcggtgaacctgctcgaagcgatccgcatcgtcaacccgaagatccgcttctaccaggcctccacctccgagatgttcggcatggtgcaggctgttccacaggtcgagagcaccccgttctacccgcgcagcccctacggcgtggccaagctgtacgcgcactggatgaccatcaactaccgcgagtcctacgacatctttggctccagcggcatcctgttcaaccacgagtcgccgctgcgcggcaaagagttcgtgacccgcaagatcaccgacggcgtggcgcgcatctcgctgggcatgcaggacgtgctggacctgggcaacctcgacgccaagcgcgactggggctttgccaaggaatacgtcgaaggcatgtggcgcatgctgcaagccgaccagcctgacaccttcgtgctggccaccaaccgtaccgagaccgtgcgtgacttcgtgtccatggcgttcaaggccgtcgacatccagctggaatggaaaggcagcgccgacaacgagcatggcatcgacaccaagaccggcaagaccgtcatccaggtcaacccgaagttctaccgccctgcggaagtggaactgctgatcggcaaccccgagcgcgctaaaaagctgctgggctgggaaccgaaaaccaccctggaagagctgtgcgacctgatggtcaaggccgacctggagcgggtcaagaccggcaaatcgttctga

SEQ ID NO: 350870 - DNA, 3354 bp, Pseudomonas aeruginosa
atgcacaacgaaacacaggtcaccctccaccaattcgcgaacagcgtcagtcgcggcgacggcatcagtaacggcatgatgctgacccgcaagctgctgcgtcaggccggcgtgaagtccgagatctactgcatcgaccccaagccagaggtggccggcgatgtgctgtgcatggacgactacgtacccggcagcgccgacgccctgctggtgcaccacggtatcggtaacccggtggagacctggctgcgtgaactgcccgaacgcaagttcatggtgttccacaacatcacccccggcggcatgttccccgccgaccacccgatccagccgatgctcgcccacggctgggagcaggtgaacacctggcggcactggttggccggcagcatcgccgactcgcggcagaacctgcaggaactgctgcagcgcggctaccgcccggacaacaccgtggaaattccgctgctggtcgacctggagcgcatccagccccacgccgccgagcgctgcgacacaccgcggccattcaccctgctgttcgtcggccgcctgatgccacacaagaaccagctgggcctggtcgaagccttcgccctgctgctgcgccgcgtccaggtgccgctgcaactgctgctggtcggcggcttcaccgtgccggcctacaaggaacgcatcgagcagcgcatcgccgagctgggcatcggcgactacgtcaccctcaccggcaaggtcgacgacccgaccctcgaagccctgtacagccgcagcgacctgttcgtctcgctcagccaccacgaaggcttcggcatgccgctgatcgaagccatggcccacggcctgccggtgctggccttcgatgcgccagacagcaacgtggtgcacaccctgggcagcgccggcctgctgctggaaagcgacgccccggaagtggtcgccgccaccatcgcccagctgatggaaaacccggcgctgcgccgcaacatccgccagcactccgccgcacgcctgcaggagttcggctaccaggcgctgtacgaccgcctgcgcagctacatggccggcttcgacattcacctgccggaacaccgcttccctaccctgcccaccccggccgccgtcgactgccgcatcgaaggcccgttcgacagcacctacagcctggccctggtcaaccgcgaactgggccgcgccctgcaagcccaaggcgcacagaccgccctgcgcgccagcgaaggcccggggccgatcccggtggatcagcagttcctgctcgacaaccccgactgcgccagcctgcatgcccgtgccgaacaaccggcgcgcaacgtgctgcgcctgatgtacccgccgcgggtcaccgacatggccggcgacctcaacgtcatgtcgtgctacggctgggaagagtcctgcctgccgcaggagtactgccacgacttcaaccaccagacccacctggtgaccagcatgtccggctgggtgacccgcaccctgcgcgacaatggcgtcaccgcgccgctggccaccgtgggcctgggcgccgaccacatcctgcgcgccccggtggatgccgccgccctgccggcactgcccaaggccactgctgaacgcctcaagctgctgcacgtttcgtcgtgcttcccgcgcaagggcgtcgacgtgctgctgcaggcctacggccaggccttcagcgccgagcaaccggtggtgctgatcatcaagaccttcgccaacccgcaccacgacatccagcaacaggtggccgactgggccgccaaactggccagcgcgccggcggtggaactcatcgttcaggacctgcccgacggcgccatgcgtgccctgtatgaactggccgacgtgctcattgcgccgtcgcgcggcgaaggcttcggcctgccgctggccgaagccatgctgcaccgcctgccagtgatcaccaccggcaacggtggccagcgcgacttctgcacccccgacaccgcctggctgatcgactaccgctacgagcgcgcgcgcacccacctcaaggccgccgcctcggtgtggttcgaacccagcgccgagcacctggccagcctgctgagtgagttccaccaggcctgggcccaaggccaactggccgccttcagcgccgccaaggttgccgccgccgaagcactgatcaaccagcgcttcacctgggccgccgtggcccgcgccagcctcgacgccttcgaagccgcccgccagcaaccgctgctgaaaaagcaacccaagctgggcagcgtcaccacctggaacagcgcctgcggcatcgccacctacagccagaaactcctggagccggccttcggccaggaatgcacggtgttcgccaacagcgatgccaccctcaccgccggcgacacgccgaatatccagcgctgctggcgcgccggcgatggcgacagcctcgacgaactcaagcaggcgatcatcgcctcgggcgtcgacaccctgctgctgcagttcaacttctcgttcttcaacctcaaggccttcgccagcctgctcgactgggcccacgcccggcagatacagaccctggtggtgttccactccaccgccgacgtgacccacggcgacaccctcaagtcgctgagccacattcgcgagtccctgcagggttgcgcgcgcctgctggtgcacagcgtcggcgacctgaaccgcctgaaggacttcggcctggtcgacaacctgctgatgttcccccacggcgtgatcgacaccccggcaccggccccaggcgctgcgcaaaaggccgcacgcctggacggcaagaccctcatcgccagctatggctttctgctgccgcacaagggcatgccggaactgatcgaggccttcgccctgctggccgccaaggaccgcaacctgcacctgctgctggtcaacgcccagtacccggtgcccgcctcggccgagctggccgacgcctgccgcgcgcgcattcagcagccggacctgcaaggccgggtgacgctgattaccgattacctcagcgacgagcagtcgttgtcgtggctgggcatggctgatgccattgtcttcccgtatcagcacacccaggagtcgtccagtgccgcagtgcgctgggggttgagtaccggtcgtccggttctttgcacgccgctgggcatattcgaagacgtcgccgacgccgtgaccttcctgccgggcaccagcagcgcggaaatggccgaaggtttgcgccgtgaactggccgccggccccaaggcgctgcagggcgattggctgcgcaaccacggctggacaagcgtttcagttcgcttgcgaaacattctcattgcgctgcagcaacaagaataa

SEQ ID NO: 350871 - DNA, 1779 bp, Pseudomonas aeruginosa
atggctactacttctgcacaagttcaacagctgtatgtcgcttacctgggccgcgccgccgacaaggctggcctggactactggctgggcgagttgaacgccactccagctaccatcaccctggagcaggttcgtgccaacttcgtcaacgagcagcctgagtatgccaacgcttacgctggcctgagccgtcaagataccgttgttaagatctacaacaacctgttcggtcgcgctcctgatgacgctggtctggcttactggaccactggcggcggtgcatctgttaacgctgatcaactgctgaccgctttcatcaacggcgcttcggctgccgacgctaaagtcatcaccaacaaggttctggtttctgaggtctacacctcagctgctggtactgcatacactttggatgacgctaaagccgttctgtccggtgttgacggcacccctgctagcgtttcggctgctctgactaaactggaagacggttccctgccaggcgtagctgttcctgctggcgttgccgctctgaaagcagaagctctggctcagaaatccctggacgacttcaaagctgctcaggtaacccctctgaacgacctgaacaaggccgttgttgagctgaatgacaagctggccgctcctgccattctggacgcgctggtaactcctccagctggtaccgctcagtcttacgatgacgttgaccaagcgatcaccaacgcctccgcagtacgtaccgctgtcagcagctcgaccactgttactctgcaagcgaacgctaccaaccaagctaccgcttacgccagtgctcgtgacaccttcactaaagctgatctgggtaacgttgacctcgtcaacacctacgaagcagctgtcaaaaccaacgctggcctgaaagccgccgatgctgatgccgtgaccctggctgaaggcaaagttcaagcagacttcaccgccgctaacactggcactgccctggctactgcaaacgcagctgctggcggtaccaccgttaccgacgctgcctctctgtatgctgctctgactgacggcaccaaaactgctgctcagatcaaagctgtttctgacgctttcaccaccttcctgggcagcgccggtgcaactgacttcaacaccctgaagtctctggccgctactgactacaccaagaacgccgccgttcaagccgaagccgacgctaaggccgatatcgctgctgttaccggtggtaatactttcctgaccgctttcgacaacaaagctaccgctgacaccactctggcaaacgctcaggctgccgacgctctggttaagcaagctaccgccatctctgacggcgtgaaggcgctgactgaggctgaagctgcaatcaaagttcctagctatgtgaaagacctcgctgccaacgatactggtgcagctggtgctgatctgttccacttcgctgatggcgttaaagccactgacgactggaccatcgcttcgttcgctaaaggtgatgctctgtacttcggtgaaggctacaccttcaacaacggcgctctgaccaccggcgacagcaacaagctggagtacttcttcgttcagaaaggcgcagacgtacaggttgttatcgaaaccaaagcgttcggtagcgccaacctggacaccaacgccactaccggtgaagtcaccgttaaagctggcgctgaagacgccgtagcaatcatcaccctgaccggtgtaactgctgccgagctgcaaaaccaagctggctacattgttcacgcttaa

SEQ ID NO: 350872 - DNA, 777 bp, Pseudomonas aeruginosa
atgaactggaacctgctgctcaacttcacccgccaggacctgatcgaccgccactcggcctcggtactcggcgcggcctggaccttcatcctgccgctgatcaacatcctcatcttcaccctggtgttctccaacatcatgggcatgcgcctcggcgggctgggccaggacctcggcaaatggggctacagcgtgtacctggtcagcggcctgctggcctggaactgcttcgccgccaccctcacccgcatcaccggcgtgttccatgaaaaggcccacctgatcggcaaggtgcgcctgtcgctgtggagcctgccgctgttcgtggtgctcagcgaaaccgtgcactacctgatcgccaccggcttcttcatggtctttctggtggccatcggcttcgacttttcctggcacctgctgtggtggattccgatcttcctctgccagcagctgctggcctatgccctgggcatcacctgcgcgattctctcagtgttcatccgcgacatcacccaggtggtcggcgtggtcacccagctgtggttctggctgacgcctatcgtgtatgtggcgaacattctgcccggcaccatccagcagctggtggcgctgaaccccttctaccatctggtgctggcctaccgcgccgcgctgatcggcggccaggccccgcacctgctgtccatcggcctgctggtggccttctccctggcgctgctgagcgtgtcgatcttcgttggccgcaagctggagcgcgatattcgcgacttcctttaa

SEQ ID NO: 350873 - DNA, 753 bp, Pseudomonas aeruginosa
ttgagcggcggcaccctgacttccacggtcgcctaccagaacggcctgtattacgaagtcaccgacctgaacagcgatgccctgaccatggccgggtacatcaatgacttcgatttcaagggcgccttgaacgaagtactcaagggcaacgacactctgatcggctcggacggcaacgatgtcctgaccggaggcgccggcaatgaccacttcgacggcggtgcgggcctggacaccgtcgcctacagcaacggccgcgcgaacgtcaccgccacggcggccgacggcggctacgtactgcagatgccgggcaagaccgacaccctggtgaacatcgagcgggccagcttcggtgatggctcgaccctggccctggacgtcgaccaaggccagaacgccggctccgcctaccgcctgtaccaggcggccttcgaccgcaagccggacaccggcgggctgaaatactggatcaacgacctggataagggcgccagcctccagcaagtggctaaaggtttcgtcgacagcgccgaattcaagcaactcaccccggccacggacaacaagtcgatcatcaacagcttctaccagcacgtgctgcatcgcgacgccgatgccggtggcttccagtactgggaagacgccatggcccagggcatgaccgccagtgaaatgctggtgtcgttctccgaaagcgcagagaacctgaacaacaccgccgccgacctcaatggcgggctgtggctggtctga

SEQ ID NO: 350874 - DNA, 894 bp, Pseudomonas aeruginosa
atggcaactattagctacaaaagccctttcgacgccaccgacctggatcgcgcctcccatgcgggcgttaacgggcaggtcgtcagcagcaacagcatgcgcatcgtttacgccgatggcgcctacaaagctgaagtcagcggcttcctcggctcgggtaatcctcaggtcgacaagttcaccggagtctcctactcgaagaacgacgtcgtgtttctcagcgtcactggcctggatatcaaggtcgccgacgcgtcgagcaccacgtcgttctatgacggtgacgacacctaccggggctcggcaggcaacgaccagttcatcgcttcgctgggcaacgacacctacttcggcggcgagggtaccgacaccgttcactacagcgcgctgagcagcgacttcaaagtcgattccctgggcagcaacctgaccaacatcgaaggcctgggcaagaaagacaccctgttcagcgtcgagcgcgtgcacttcacgcaggacgacaagaccgttgctctggacgtcggccagtggcagaacgccggcggcgcctaccgcctgtaccaggccgccttcgatcgcaagccggatatgaccggcctgaaatactggatcggcgacctggataacggcgccaccctgcagcaagtggcccagggcttcgtcgacagcgccgagttcaagaagctcaaccctggctctgacagcaagtccatcatcaacagcttctaccagcacgtgctgcatcgtgatgccgatgcagaaggcttcaagtactggaaagattccatggctcagggcatgaccgccagcgagatgctggtgtcgttttccgagagcacggaaaacatgaacaatgctgccgccgacctcaatggcgggttgtggctggtgtaa

SEQ ID NO: 350875 - DNA, 930 bp, Pseudomonas aeruginosa
atgaaggtcctggattatggcgctgagaggaaatggcagggcttaagtgcactttctgttccgttgctccccaaaccccatgacctgctcatcgccaccaatgccggctactttggcactctggttgcccagagcagcacccacttaaaagtcgtctacggcagttactcggcagaaatgtatggctcgtcactcaatggcagcgtgcgctacgcggtggtcgatagcctggtctattcgaagaatggcgagcctttcgcgaccatcaccggcatgaaccagcacctcaatgacagcaacccggccgcctacttgtatggcgatgatgtctataccggttcatggggtaacgatcacttctacgcgtggccgggtaacgactattacgatggcggcagtggtatcgacaccgttcattacaatgcacaggccagtgaactgaccgtggtcaataacggtaacttctacgccgtgggcatctggaacaaagtcgacaccctggtcaatatcgagcgcatccagttgggcgatgacggcgccgtcatggccctggatgtcggtcaatggcagaacaccggcggggcctatcgtctttaccaggcggccttcgaccgccaacccgacatggccgggctcaagtactggatctcggacctggacagaggcgtcagcctgcagcaggtcgccaaaggcttcgtcgacagtgccgaattcaaggcgcttaacccgggtaacgacaccgcgtcgatcatcaacaacctctacctcaatgttctgcaccgccaggccgatatcgatggcttcaattattggaaagactccatggccaagggtatgaccaccagcgagatgctggtgtcgttctctgaaagtgcggaaaacatcaataacgtcgccgctgatcttaatagtgggctgtggctggtgtga

SEQ ID NO: 350876 - DNA, 1197 bp, Pseudomonas aeruginosa
atggtttcgagcgtcaccggctacaccgatacacgtaaccgagcatggaccaacgaaggctacgacggcgtcgtgttgctcaccgtgggcaactaccagggcagtggcgcactgctatacggcgggcgcgcggtactgacggcggctcatctgttcgaggacggcgtcacttccgcccaagtgaccttccagaccgctacgggcacgcagaccctggccagcagcaaggtgtggatccacccggcctatgacgccgtgaacaccaacaacgacctggcaatcgtctggctcaccgaccaggcccccgcagcggccaaccgctacgacctgtaccgcagcagtgacgaagtcggccagacgatgacgctggtcggctatggcctgccgggcacaggtgccacggggacgttgacgaattacggtggcgcaccgattcgccagaaagccagcaataccttcgacagcgatgtcggcaggcttactacggtatatggcaacgacctgagctgggcgccgcaggcaggtacgcagttgctggccgatttcgataacggcagaagcaccaacgatgccctgggccgcctgctgggtctgagcaataccggcctgagcagcaacgaaggcatcatcacccctggcgacagcggcggccctgcgttcatcgctggcaaggtagcgggggtcgccagctacatcacctcgctgagcacctcaaccacgcaccccgacatcgatagtcagatcaacagcagctatggcgagatcgccgcatggcagagggtcagcgcctaccagcaggtcatcgaccagaccctgcgcgccaaccagcccggtgcaccgacccgtgccgaccaggtacaaagccatatcattgagggcgacagcggcctgagcctgggttatttctggatatcgctgccttttggccgccccaaccccagccagcagttgagcgtcacctatgccacccgtgacggcacggccaaaagcggtgaagactacctggccagcagcggcactctggtgttctaccccggtgaagaccatgtggcattgccagtggaagtcatcggcgacaccgcgcccgaacaggatgaatacttcttcctcgacgtaaccagcccgggtaacggcagcatcagccccatcaccctgagtgccatccgtatcatcgtcaacgacgatgtcttggcctga

SEQ ID NO: 350877 - DNA, 1239 bp, Pseudomonas aeruginosa
atgcttgaagtggaaaacgtctgcaaggagttcaagctgtacaacagaccctggcacagactcaaggaaatcgtcctgcgccgcagcttccaccgcacccaccgggccctggacgggatttcgttcaaggtcgccaaaggcgagaccctgggcatcctggggcgtaacggcgccggcaagtcgaccctgctgaagatgctcaacggcgtgctgctgcccgacgccggcaagatccatctcagcggccgggtcaccggcctgctggagctgggcaccggcttcgatcccaacctcagcggcttgcagaacatcaccggcaacggcctgctgctgggcatgacccgcgagcagatcgaggaacgccgccaggccatcgtcgagttctccgaactggggcagttcatccacgagccgatccgcacctactcctcgggcatgaacatgcgcctggcgttttccatcgccatccatgccgaccccgagaccttcctgatcgacgaagccctgtcggtgggcgacggccacttccagcagaagtgcatgcgccgcatcaaggagttccgcgcccgcggtggttcgatcatcttcgtgtcccacgacctcaacgcggtgaagatgatctgcgaccgcgccatcgtgctcagcgagggcaaggtggtcgccgactgcagccctgaagacgcggtcaacgtctacaaccagctgctgggcgccgacgacgaagaagagtacagcgaacgcccggtgaacgaggccggctatggttcgcgccaggccgtgctcgaagcggtcaccttcgcaggccaggcctcgcagagcaacatcctggccagcggcgacaccggcgtgctggacgtaaccatcgccgcccaggccgacctgcccgacgtggccctgggcctgatgatccgcgaccgcttcggccaggacatctacggcaccaacagccattacctggaacacccgatcgccctgcagcgtggtgaacggcgccacttgcgctaccgcctgccgatgcgcctggcaccaggcaaatacaccattaccctggccctgcacgaaggggccgaccacaccacccattgctaccactggcgtgacaacgccattggcttcgaagtggcgggcatcaacggccccttctttggcggtgtgtgcaacctggaaccggaactccaggaaatcgctctgtcctcctcgaccctgaatggaacctcgcgtaatgctcatacccaataa

SEQ ID NO: 350878 - DNA, 1434 bp, Pseudomonas aeruginosa
atgctcatacccaataatccggatctcgacttccaagagctcaaccgtcgtatcgaggccgaggtcgagcgttacaagcacaaagccgccgatcgcccgttgccggccttcaacccgctgccctcgaacaaccacgaccgtccgtacagctggctgcagctggttcagctcgaggacgaggcgctggtgcgcgccgccttcccgaccctgttgggacgcaaggccgaaagcgaggaactgcagcgctacctcaaccggctgcgctcgggctgggacaagttcgagatcctcgccgagctgcgcgactcgccggaaggcgtgcgccagaacaccccagtcgagggtctgcgccgcgcgcgcatgaagaaccgtatccggcgcattccgatactgggcaagctggccatgaccctctatggcctgctgcagagcgaacagcgcaaccgctactacgtggcccgcctggacctgctggcgcgccagaaccgcctgcaggtcagcgagctgcataccctgcgtgacctcagcaacgcccacgccagcctgctcgatgaccaccagacctatgccgaacagcaaagcctggcgctgcatcggcaggcggatgagcttcgtcgtctggaaagcgaactcaaggaagccaggaacgtgcagcaggagctgcgcatgcgcctgcagcaactggagcgccagccacgtaccgtcatggccgccccgggcgaagcccaggctgtcgtagccgtgcccgagatgcagcatcagagcggcatcccggacagcttctacctggccttcgagaaccgtttccgcggcgcggccgagaccattcgtgagcgccaggcctactacctgccgatcatcgacagcgtcgcgccgctcaaagccggcctgccgctggtggacatcggctgtgggcgtggtgaatggctgcagcagctacctgaacactgcgcacgcatcggcatcgacctcaactcgatgaacgtacagacctgcctggaccagggcctgaccgcccaccagcaggacgccctggtgtggctggccaaccagccggagaacagtctgggggcggtgagcgccttccacgtcatcgagcacctgagcttcgagcagttcaacaccctgctcgacgagtgcctgcgcgtactggcgcccggcggcatgatcatcttcgagacccccaacccggagaacatcgccaccgccgcgcattacttctggatggacccgacccacctgtcgccgctgccgccggccttcaccgagttcctggtgcagttcaagggcttcgaccaggtgcagatccaccgcctgcaaccgattcccgaagagcaccacgttcaagaggacagcgaagccgcacggcgcatcaacgcgctgttctacggggcgcaggactatgccgtcgtcgcgaccaagagcctgacatga

SEQ ID NO: 350879 - DNA, 1107 bp, Pseudomonas aeruginosa
atgacctcactgcgtatcgatcagttcgccgccaccgtcgcggtcggcgatggcgtcaccaacagcctgctgttcacccgcagcctgttgcgcagcctgggctaccagtcggacatctacagtttttcgattcctgccgcgctgaaaggcgaagtcctcagggctcacggcttcaaggattcggcctgcgacctgctgctgtatcaccactcgatgggtcacgaccatggcccctggttgctcgaccagcagtgccgcaaagccatcgtctaccacaacatcaccccgccggcgttcttccccaaggacagcgacctgcggcgttatgcgcagctgggcctgaaacagctcagagactggcgtgatgagttcattcacgccctcgccgtctcgccgctgaaccacagcgaactgatcgaggccgggtatccgtataccttcaccttgccgctgctggtcgactcccagcgcctggaaggccccacggccgtgcccggcttcatggccaggcaaaccgggcacttctatctggcggtcgggcggctggcggagaacaagcgtcagttcctgttgatcgaggccttttaccatctgctgcagctgcagaaagatcacggccagcaagcaccgcagcaacggctgatcgtggtcggcggcaccaccagcgagcactacgcccagggtcttgagcagtacatcttcgatcttggcctgcaaggccaggtgctattggctggcaagtgctcggacgccgaactgcgctggctttaccggcatgcccggcagtactggtgcgccagtgcccacgagggcttctgcatgccgctgctggaggcgaaccacgcttcgctgccggtggtcacccaggcacgctcgaacattcccgataccttgggcgaaggcggcctgctgatcgacagcgacgacccggtggtcttcgcggcggccagcaacctgctggaaaccgaacccggcctgcgtgaaaagaccatagccgccgggctgcgcaacctgcagcgctacgagcgcgagaacctcaagcagcagctgcagcaatggctggaccagctcggactctcatcatccagtgacggagtgaaaacctga

SEQ ID NO: 350880 - DNA, 951 bp, Pseudomonas aeruginosa
atgccacgcgtgttactgacgggcgccaacggcttcgttggcaagatcctcacccagcgtctgcgtgacgccggctaccatgtgaccgccctgagcagtagcgaaccacagcttggccaccccgccgaccagcaacgggtctgcgacatccgcgacgccgagggtgtccgccaggcggtggcccaggtgcggcccagccatgtgatccacctggcggcagtgtcccatgtgccgaccagcttccaggatccgctaggcacctggcagaccaacgtaatgggcagcatgaacctgctcgaggccctgcgcctggaggcgccggaggccttcgtgctgttctccagctcctcggaggtctacggcgcggcgttcaagtccggtcaggaagtcgacgaatacacccgctgccagccactgaacccctacgcagcgagcaaggtggccgccgaaagcgccttcaacgaatacttccgccagggcctcaagggtgtgattgcgcgaccgttcaaccacatcggtgcccagcagagccccaacttcgtcaccgcctccttcgcccgccagatcgctctgatcgaggccggccagcaggagccggtgctcaaggtcggcaacctggaagccaagcgcgatttcctcgacgtgcaggacgtgtgcagtgcctacctggaactgctcaagctggccgacagcacgcaggaatacccgcgctgcatgaacatcgccagcggccgttcgctgaagatccgcgaagtgctggacacgctgctgagcctgagccaggccagcatccaggtcgcccaggacccggaacgcctgcgcccttcggacatcccggtggccatcggcaacagcaccgcgctgacccgcagcaccggctggcaaccgcagatcccgctgcagcagaccctgcgcgagctgctcgactactggcggcaacaaacggtctga

SEQ ID NO: 350881 - DNA, 351 bp, Pseudomonas aeruginosa
ttggccaggcatacgtccagcatcgtcgatgcctacccgttcaatgccggcaccacggccaacgatgcgctgtggatgggcctgccggtgctgacccgttcaggccgcaccttcgcttcgcgcatggccggggcgctgttgactgccctggaactgccggagctgatcaccaccactcaggccgactacgaagcgcgtgccgtgcagctggccaccgacgcccaactgctgccgggcctgcgccagcgcctggccgccaaccgcgccacttcgccactgttcgataccccgcgcttcgtgcgcgacttcgaacaggcgatcgccagcgtggcaccggtggtcagcgcctga

SEQ ID NO: 350882 - DNA, 1032 bp, Pseudomonas aeruginosa
ttgctggtgacctggttgaccgaggcgatccaggccggggcccgtaagggcatggcgtgcagtgaggtcgggctatcgctcagaaccttgcagcgctggacggccaccgaggacatcagcgccgacgcacgcacgacgacagtgaggcctgttccgcgcaatgcgctgagcgacctcgaacgacaagcgatcatcgccctgtgcaacagcccggaatatgcgcacttgccgccgacccagatcgtcccgcgcctggcggatcaacagcgctatctggcgtcggagtcgacgctctaccgtgtcttgcgggccgcggggcaacaccatcaccgtggccgcagtcagcgccccggacgacatgctgcgcccacaacgcatgcggccaaggcgcccaatcgtgtctggtcgtgggacatcacttatctgccgtcgaaggtgcgcggccagtattactacctgtacctgatcgaagatatttacagccgcaaggcggtgggttgggaggttcatgaggccgagagtggtgagagcgccgccgcgctcttacagcgcagtgtgatcagcgagcgctgcctgtttgaaccgctggtgctgcactcggacaacggtgccccgatgaagtcggtgaccttgctgagcaagatgcacgacctgggcgtcacgccgtcacgcggacggccgagggtgagcaacgataacccgtactcggaatcgttgttccggacactgaaatactgcccgcagtggccgtcgagcggttttgccgacctggacgcggccagaagctgggtgagggacttcatgcgttggtacaaccacgagcaccggcatagccggatccgcttcgtgaccccggctgagcggcaccgtggacaggatcagcagatcctggcgcggcgtcatgagctgtacgaacaggcccggcaaaggaacccgcagcgctggtcaggccagacgcgaaactgggagccgattggagcggtgctgcttaaccctgaccgaggcgagcagcaggagaaacatgcggcatag

SEQ ID NO: 350883 - DNA, 1221 bp, Pseudomonas aeruginosa
gtgagcaacctcatcaccgcggcttcgacggcgcctgcacatcctggctacttccagccggtgtcagcaatgagccgtatccttgaagaggcctcctatctagcacgttgcagtgacaacaaaacggcaatgagagtacggccgcgtgaatacgcgatccgctacccctacatgcaggtaaatcgcccaggacgcgtgtcatggctcgttttcgatctcgaccatgccaactccctgatctgggacgagcatggcttgccaccgccaaacttcattgtgcgtaatcgcaactcaggcaactcacacatctactacgcgattgcccctgtgtgtaccaccgagcgagcccgtgaaaagccgatcctatacatgaaggctgtctacgacagcatggccgcactgctcaaggctgatccggattaccacagtggcccagttgccaagacacctggtcatccgtggtggatcaccaccgaattgcacaatcatgtctatgacttgggcgaactggctgaagaactcgacttggccaggccgatgcctttgtggtccaaaggacccgacatggacgcagtgtcacattccaggcattgcaccttgttcgaacgtgtccgtttttacgcttacagcatcgtcaatgctgagcgagctgatggttacttcgagtcgttctactctcgggtcctcgcgcaatgtcacaacgacaaccgttttcgcacgcgagagcgttacaacgacctgccccactcatcagtgcgcgccacggccaaatcgattgcccggtggacctgggctcattaccgcggtagcggcgactaccaccgaggtgtgatggagcttgatcgatcgctgccattggagaagcgccaaagcctggccgccaggcggacacatgcagtcagacaaaaccagaccgcacacaagatccgtggtgcttgccggcagttgatcgccaaaggggcacagcttacctacacggctatcgccctgactgcaggcgtatcacgacaaaccgtggccaagtacaaggcggtcatcacagaagcacagtcgccgtcggttgttccccttcgccctaagcagacgccccttacccccgcagcaccacaaccggccggtccaaacaatggggctgagccaatgaaagccggtgtaaagaatgctgtatatcaggtatctgcccctaccggggttgctttgctcccgccgttgcctgattag

SEQ ID NO: 350884 - DNA, 999 bp, Pseudomonas aeruginosa
atgaccaagcccactatcgcattgaccgagttggttgagaaaggggcagacgctgatctgctcaagcaaatgatccagttcgttgcccagcgcatgatggagttcgatgtcgaaggcctgtgcggcgcgggcttcgatgtcaaaagcccagaccggacaaatagccgtaatggctaccgtgatcgcctttggcaaacccgcgccggcgacgttgacctgaagatcccgaagctgcgccaaggcagctactttccgggcttcctcgaaccccgacgtacctccgagaaggccatggcgacggtgatccaggaagcctacatccaaggcgtttcaacgcgttcggtggacgagctggtcaaggccatgggcatgaccggtatctccaaaagccaggtttcacggctagctggtgagatcgatgagcgcgttcacgctttccttgatcgcccgcttgaaggcgactggccctatctctggatcgatgccacctacgtcaaggtgcgggaggccgggcgcatcgtctcggtcgccgtaataatcgccgtggccgtgaacaccgacggtggccgcgaagtcctgggcatgcgggttgggccgtcagaggctgagccgttctggacagacttcctgcgcaacctcatgcgacgtggcttacgtggcgtgaagcttgtcatctccgacgcccacgaagggctcaaggcggctgtttccaaggtattcaacgcaacctggcagcgctgccgtgtgcatttcatgcgcaatgccatggcccacgtcggcaaaggtcagcgcaccatggtagcggcgctgctgcgcacggtcttcgcccaggacagccgtgccgaatgccatcagcaatggcggttggtcgccgatcaactgcgcgaaaagtacccgaagatcgcgacgctcatggacggctgtgaggatgaagtgctggctcacatggcgtttcccaaggcacaccggcagcagttacacagcaccaaggggttgtaa

SEQ ID NO: 350885 - DNA, 1047 bp, Pseudomonas aeruginosa
gtgtgcagaacgctgcgttttcccatcttcgccctggccgccgcgcaagaggccctggcccaggccggctgggcgccgcagagcgccgaggcgcaggagcgcacggcgaccgtcatcgcctccggggtgggcggcttccatgccatcgccgaagcggtgcggaccacagacggcaagggaccgcgacgcctgtcgcccttcaccatcccgtcctttctctgcaacatggcggccgcccatgtgtcgatccgccatggcttcaagggaccgctgggcgccccggtgaccgcctgcgcggcgggcgtgcaagccatcggcgacgcggcgcggatgatccgcgcgggagaggtcgacgtggcgctctgcggcggcgcggaagcgaccgtccaccgggtcagcctggccggcttcgccgccgcgcgcgccctgtccagcgatttcaacgacagccccgaacgcgcctcgcgccccttcgaccaggcccgcgacggcttcgtcatgggcgaaggcgccggcctactggtcatcgaggaactggagcacgccctggcgcgcggcgccaggcccatcgccgagctggtgggctacggcaccagcgccgacgcctaccacatgaccgccgggccggaagatggcagcggtgcccgccgggccatgcagcaggcgctgcgccaggccggcgtggaagcggccgcggtgcagcacctgaatgcccacgccacctccacccaggtaggcgacaagggcgaactggccgccatcaaggccgtgttcggcaccggcagcgggctcgccatcagcgcgaccaaatctgccaccggccacctcctgggcgccgccggcggcatcgaggcgatcttcacggtcctggcactgcgcgaccagctcgcccccgccacgctcaacctggaaacgcccgacaccgacgccgagggcctcgacctggttcgcggcgaagcccagcgctggccgatggaacacgcgctgtccaatggcttcggcttcggcggggtaaatgccagcctgttgttccggcgttgggtgtag

SEQ ID NO: 350886 - DNA, 1419 bp, Pseudomonas aeruginosa
atgttcacccccgtaatcctggctggtggtagcggttcgcgtctgtggccgctgtcgcggcagagctttcccaagcagtttctggcgctggacggccaggaccagggaaccatgttccagcgcaccctggcgcgcctggacggcctggagcacgcaccggccctggtggtgagcaacgagaaccaccgcttcatcgtcgccgagcagctgcgcgtggcgcaaatcaccagccagcgcatcatcctcgagccgttggcccgcaacaccgcgccggccatcgccctggcggcgctgcaggccattgccgacggcagcgacccggtgctgctggtgctggccgccgaccaccacattcatgacgagcaggccttccgcgccgccgtgcaggtcgcccaggcccatgccgaggctggccgcctggtgaccttcggcattaccccgacccacgcggaaaccggtttcggctacatccagtgtggccaggccatcgagcagggcggcttcgccatcgcggcgttcaaggaaaagccgtcgccggagctggccgccgaatacctggcctcgggcgcctacctgtggaacagcggcatgttcatgttccgcgcctcgaagttcatcgccgagctgcaacgtcaccgcccggacatcctcagtgcctgccgcgtggccctgcagcaggcgcaggtcgacagctatttcacccatgtaccggccgagcagttcgcgctgtgcgacgacgagtcggtggactacgcggtgatggagcacaccgatgccggcctggtggtgccgctgaatgccggctggaacgacctgggcagctgggcggcgatctgggacgtcggcccgcatgacgaaaacgccaaccgtctggaaggcgacgtgctggccatcgacaccaaggactgcctggtgcagtcgcatcaccgcctggtggccaccgtgggcgtcgaggacctgatcgtcatcgagaccaaggacgccgtactggttgccaacaagcacgacagccagcaggtcaaggaagtggtcaagcgcctgcagaacgaggcgcggcccgagttcgtcacccatccgctggtcaaccgtccatggggtcactacgacaccatcgacatgggcgaccgctaccaggtcaagcgtatcttcgtgcgcccgggcgagtgcctgtcgctgcagatgcactaccaccgcgccgagcactggatcgtggtgtccggtaccgccagagtgatctgcgacgaccaggaactgatcctctccgagaaccagtcgacctacatccctctgggcgtcaagcactcgctgtccaaccccggcaaggtgccgctggaactgatcgaagtgcagtccggctcgtacctgggcgaagacgacatcgtacgtttcgaagaccgttacgggcgtctggccaagtaa

SEQ ID NO: 350887 - DNA, 1140 bp, Pseudomonas aeruginosa
atgaagattggcttgagttgtacggtctgggcaggcggcgaacgcgccggccacctggatggcatcggtacctattcgcgcgccctgtggggtggcctgaacgacctcacccagcagaccggcgaccagctcatcccctacgccttcggccgtgacctgccgcacatggcctgcggtacgccgcgccagctggccgaacgcttcccggtgcatgccctgctcagcggcattctcaagctgcccctggccaactcccgggccatcgccggcgaagtcgagctgttccatgccacggaccactatattccgcgcatcgccggcgtgccgaccgtggccacggtgatggacgtgatcccgatgctgcacccggaatggatcaagaacgacctgcgcagcctcaagagctggctgttcaagaccgcgatccgcaaggccgaccacatcatcaccatctccgaatacagcaagcaggacatggtcgagcacctgggcatcgccccgtcgcgcataagcgtcacgccgctgggcgtagagccggtgtatttcgagcgtatcgacgcggcgcacaagcaggcggtgctcgacaagcatggcctgaaacccggcttcttcctgttcgtcggcaccctgcagccacgcaagaacctgccgcgcatcctccaggccttcaagcaactgcccgccaccgtgcgccaggagcacccgctggtgatcgtcggccgcgacggctggaacaacgaagagctgctgccacagttggccgccctgcaacagcagggcgaaggtcgctggctcagctacctgccgcaagacgaagtgatggccctgctgcagagcgccgccgccctgaccttcccgtcgctgtacgaaggcttcggcctgccggtgatcgaagccttcgccgcgcagtgcccggtgctggcgtccaacagcacctcggtaccggaagtcgccggcgatgccagctgggccgtggacccctacgacgtggacagcatcagcagtgccatgcaggcgttgctggagcaggatgcgttgcgtgacgagaaggttcgcctgggcctggagcgtgcgcaccagtacacctggaaggaatgcgcgcggcagaccctggagatctaccgccaggtgcgcggctga

SEQ ID NO: 350888 - DNA, 936 bp, Pseudomonas aeruginosa
atgctcatggtttccacggtcacctcctatgccgattcacgcaacaaggctgcgccaggtcagggatatgacggcgtcgtaaaggtttccacaggaggtgtctatggaacgggcgtgttgctctacggcggccaggcgatcctgaccacggcgcatctgttcaagaacggcagcgcgccgagcaccgtgaccttcgagaccagcgccggggtcaagaccctcacatcgagcaaggccacgatcctgccgggctatgacgccagcagcctgaacaacgacctggccatcgtctggctcaatggccatgcgccggtcaccgcccagcgctacgacatctaccgggccagcgacgagattggccaagccatgaccttcgtcggttatggcaagccgggcaccggtgcggcgggaacgtccagcagctactcaggggcgccgatccgtcagaaggccagcaacacgttcgatgccgatgcctcggctctcaaggccaaggcgggtgcgatcatgccctgggcacccaaacccggtacccagttgatcgccgacttcgacaatggcagcagtgcccaggacgccctggggcgtttcctcaacctcaagcacaccggactggggcagagcgagggcatactcagcagcggtgacagcggtggcccggcgttcatcggtggcaaggtggccggtatcgccgcctggagaagctgcgcggcaagttggtcgaagtgctggaagccgcctggcggatggataacccgccggcgcaagtgccctatgcggaacagaaacgcatccgccaggaggtcgaccggctgctcgacagcgacacctggcgacacttcctgtgggcaggccagcgcaaggtcgaccggattgcggtggccgattacctgcgctcgctggagcattccgacgagcggtaagtcgtttttgtaa

SEQ ID NO: 350889 - DNA, 234 bp, Pseudomonas aeruginosa
atgacagccgttgtttctctccctctggaacccgagcaattcaagcgcctgcagcatctggcgcagatgacccgtcgtgaccaggcctggcacctgcgccaggcgctgaaccgctacctcgaacagcagaccgcgcccgatccggtcgaggaaggcctggccgatgttcgtgccggccgcctgctggacctcagcgatatcgaagccaagtggagacagaccccgacatgttga

SEQ ID NO: 350890 - DNA, 912 bp, Pseudomonas aeruginosa
atgttgaagctgacacgcaaggccagtgcggacctcgacgatatctacgagcattacaaggaacgcctcggcgccgagcaggcgcaggccatcgtgcatgatgtggtggccgaaagccgcatcctcgagcacaagccggccgccgccaagccgtctgccgagtcctccgggatcggggagctggctctcaagcgctggccgttcctgaccaccttccatgtcactcccgagtcggtgcagatcctgcgttttctgcaccgcagtggccagccgatcaaccaaccgctggagcaggagcccgaagcgcgggtgcattccgatgtggatgtatcgggcctgcgctgctacgaccgggcgattgatggtctgatctaccgcgtgccgcgcggtatcagccgcgacgcacgtggggccggctggtcggtgcgggtggtgcgcgacaagcaggtggtgctgcaggcgcgtttcgctgaccaggccttcggcagcaccctgggggcgctggaagcggcgatcatccatctgacccacagcggctacgcctggctggaagatgacgtgctgacgctggatgagcgcagtgcggtgcactggcgcaagcgcagcggtgtgggactgtgcgcagtgtcctatgtcgcctgcgacggacccgggcgtggcgaaaccttcttcgtctcgacctggaagcgggtggaaagcggacgtgggctggagaaattccgcgccaagctggtcgagaccctggcctgttcgcatgcccagcagcatggccccgacagcgtgcgccgacgcctcgacacccaggctggcaagctgattgccagcgagcgtttccaggccttcctgcgcgccggcaagcgcaaggccgagcgcatcctggtcgatacttatctgaacacggcgctcaagtaa

SEQ ID NO: 350891 - DNA, 468 bp, Pseudomonas aeruginosa
atggaggccatcgggctgatgccttcgcacacgggcgaacctggcgggcgtcggtgcgggcagcagatgacgcactacatcatcgagggcggtcccttcgatgttgcatgcgacgaattgctcgcaaccggcgccatgatttcctggatcgatatcgtcacccagcgggtgccaatgtccgcaacgcagttgtacgggccaggtggggagcctttaccccagcccgaagatccgaccatcgacataccggcgctgactgtcgcgggtctgattcagccggccacgccggctgaggatccgaagaacaagcgcaagtacacctgcccgagctgcaagttgaacgtatggggtaagccaggcctgagcgggcggttgctctgtgtggattgcgacgtacgtttccttgaggccggcgagctggtggaagtgccgccggactctgatgcccagccgggcggggacgactga

SEQ ID NO: 350892 - DNA, 174 bp, Pseudomonas aeruginosa
atgtccgcaaccccaagccagctgctctatgacgaaatcgaaggagcgtacgattggttcaatgatcggttgtacggtggccagctgcctggctgcatcttcaccctgcagcgcaaggccaacactttcggctattactccatcgcgcttcctgcgccggaatggctcgggtaa

SEQ ID NO: 350893 - DNA, 381 bp, Pseudomonas aeruginosa
atggccaaggacccgaccacggcacgcgaagcgatggtcgcgcaaatgatggaagactttgatgccatcgtgcggcgcctggaacaggttgacgccgacctggcggcgaagacttccgaagccgtacgcgatgcagcaggcaaagtcctgctgcagacgcagctgaacttcgagtcgatgatggaagaacagcgcaacgcactggtgcaggcaggacgcgaagcggcggcccggattgggaatgagatcaaccgcagtgcggccaacctggtgactgcacaggctgagcgccgggcggttgggtactcggtagctctgctactgattggtgcggcgctaggcgccgccatcgtgtacgtcgcctacttagcgggacggtga

SEQ ID NO: 350894 - DNA, 351 bp, Pseudomonas aeruginosa
atgacggcccggcaccatgaccaggacctgcggataccgcgtgaagaattcgagcggatccgcaccaagtcgaaaatgcaccagcgcagcctcgacgtcgcctttgaaatcctggtcgaaggcaagggtcttgtcgcggtcgccaatgcacatggcctgacgaaacagcgtgccttggcaattcgcgacaaaatctattccagctacctcactcaaaccccggagggttggcggtgcgcgcagatctgcgcacctgctgaaatgatcgatcgtttcgtgctggaagccgacgccgaacggcttcggtactggcagacccattccatgaccaccaaggacgttgatccatga

SEQ ID NO: 350895 - DNA, 408 bp, Pseudomonas aeruginosa
atgagcacccccaccgataaggaactcgcccagctgctgcagccattgcaggaaagcttggcgggtatcaaccgttcactgcgtacattggccgatacccgtctgctcgaaatgttcggccctgagctgtccgaccgaaagaaatggactgagcagttgaagcacgcacaccaaagggatgaccgggcgctgtttgatctgcgtcaggcaggcgaacagggccgatacccgggcggatatgaccaatgggtcaaagactacggcgaggaagaagccaagaagctggcagcccctgtggtaagcgctttggaacatcgaaaagttacctcggcagaactggccgagctggaagccgctcaacctgtattggcgcggttgtatcgagagttcatcaaactgcaaggctga

SEQ ID NO: 350896 - DNA, 1305 bp, Pseudomonas aeruginosa
atgttttttaagaaaaaaaatgatctgctcgactgccaacaacagcgtgctgatttgcaacggcgcttagatgccttcaatcagaacctgccaacgatccgcttcaaacccgacggcagcgtcattgaggcgagcgcactctttgccggggtacttggttacattcccgaggagatcattgacaaacaccatcgtatcttttgtgatagaaatctcattaacaccagtgcctaccataaattttggcaagacctagccaatggtatcgctcagcgaggcaccttcaagcgcatccataaaaatggcgaaattaagtggattgaggccacctacttcccattaaaagatgaaaacggaaaggtcgttgaggttttaaaagtcgcggctgacgtcacagaagctaaggataagctggtcaccttggatgctgcattttcggcaatatcccgttcaatggccgtaattgaattcagcccagagggcgaaattctccatgccaatgacaactttctgaatgccatggggtatcggcttaacgatattaaaaatcgccaccaccgcatgttttgcttagacagcttttatcaagaaaatccgggattttggccagctctgaaaagtgggcaattttatagcgggcaattcgaacgcaagacttcatcgggcgggcgcatttatcttgaagccacctacaaccccgtgattgatgcagaaggccatgttatcaaggtgatcaagtttgccaccgatataacagcgcaacgacagaagactgaagatattcgtctagccgccgaactctcgttcaccacagccgaagaaacctcacaaatttccatacgcggcatggagtcccttgccagctccattgatttgtcccaaagaacactaaaccttattaacactgcggttgccctaatcacgcaactcaatacccaggcaaaggatattgagaagatcgttacaaccattcagggcgtggcggagcaaaccaacttactcgcgctgaacgctgccattgaagccgcccgcgcaggcgaaacgggccgaggcttcgccgtggtggccgacgaggttcgccagctggccgcgcgcaccagcggcgccaccgtcgaaatccagaacgtggtgaccgaaaacggcaagctcactcagcagctcaacgtcaacatgaccagcattgccagcagcgccgaagaaaacaatgatcaaatcgcaacagtaacaaccatcatgcgtgaaatcagcgatggtgctgatcacgttgcgcgcaccgtatcgacgttgttcaaggataacaattag

SEQ ID NO: 350897 - DNA, 1038 bp, Pseudomonas aeruginosa
atgagttttcgcgcgagcctgcgaaacaggcggcactggacagccgtgtccgccaaacgggatcaggcggacgttctgcgcgtgcagtattggtatgaagggctacggcagcgcacggggttggcgacggcctataagctcgaacagcacttcgagccggagtcatttcgcaagcaggacgggatcagcagtaatcgctgcaaatggcagcgctatgcggctggccggcacaccccgcaggccaagttggcgacccgcattgatgcccgggtaccaggctcattgcaggagctgcagcatcccctttgggccatcctgaaacatcagccatcccgcaccacgctgagcgaggcgtttctgcagcgtttgaagccggatgtgcaggcgatattgttcgagcctgtcggtggtatcgaggtttactggcagcgggccagagtctctgttgtgctgatgagaaagctggaacgcatcgccagcttggatgccttggcggctctgacctggctactgcgagaaacaatcgcgcagggcaatcgaaagaatacggagcgattggctcacagcatctatacggtgctgctgatcatgggtatcgagtggcaaaaccgggagttggccgagccgttgctcaagctgtttgcgtaccgcattttgccgcttggctcgccaccgcatcgccgattctgcatgagcggaagggacatgcttgagtgctctgccgcactcaatctgattgtgtatcaaaccaccgaaggcaagcgccgcagcctgacttggctgcagcgagtacacattatgcgtcggttgctggcaggcatgacgggcgtcgatgtggtgcatgccctggccccccagtacatgccatcgggcaccgatgtaccggcggaagtgattcaccgacttgaacaagatgagcgctggcggcaatgggggtggagcagcattaactctgcccagccagagccatttccgccgcctgagctcttgctttctcgacgggagaaaattgccgctcaatcaacctcgcccgagtaa

SEQ ID NO: 350898 - DNA, 1545 bp, Pseudomonas aeruginosa
atgagattgaccagtgatcaactccggcaggccgtgcgccatgcctgcaatccttcgctatcgcatcgggcggtcgcacgcctcgccggggtatcacctaataccgttcgaggcctgcgggatcgactgagccaacgagatgcggactgggaacagctgcgcgagttagaggatgacgccctgcaggctcgcttcagcacgcgcacagagggtggcagccgtcgagccgtacccaattgggcgagcatccatgagcagctgcagcagcgggatgtcacgctggatttgctctggcaagaattccgcgttggcgaaccggacagcgtgtcctacgcccaattcactcgcctctaccgagcctggcgtaaccggcagaaaatcagcatgcggcagatccataagcccggcgacaagctgtttgtggatttctgcgggcgcaccatgcccatcgtcaatcgcgacaccggtgaggtatccaaggcgcaagttttcgtcggtactctcggcgcctcgggctacctttttgccacggcggtagctagccaaactatcgccgactggttgcactgccaccgactggcgctggagcatcttggcggcgtgccgcgctatgtagtgccagacaacctgaaggcagcggtgctcaagagtggcaaagaccacattcaattgaatccagcctaccaggagttcgccgagcactacggcttcagcgtccacccagctaggccccgacgcccgcaggacaagtccttggccgagattggtgtgcagatcgtgcagcgctgggtgttggcgcgcctgcgcaaccacaccttcttttcgctggcggaactgaatgagcgtctcgactactggatggagcgtttgaatgagcgcacgacccgcacctatccgaaaagccgactggttcgctttcaggagctggatgccccggaactccagggcctcccggcggagccgtatgcctatagtcagtggcgctaccaaatccgggtggccaacgactatcacctggagcacaacggccaccactactcggtaccgtttcaatacatccacctgctggtagatatccgggtcaacagtgatcgcttgatggtgtttcatcaacggcgccagattgccagtcataccctggctcaaggagttggcgttaccacggtgccggagcacctgccaccccagcaccgtcatcagcgggacacccagccagaagccttgctggcctgggctaaatccatcggtcccgccacgtatgactatgcccgacgcaacctggaagagcgcccggactttgccaatggcttgaaggcggtgattgccctgcagcgcgatacccgcaaggagcaactgcatgaccgcctggagtccgcttgtgcctatgctctggagttgaactgcctgggctacggccgattgaggtcaatcctgcgcagcggcgcggatcgcaaccggccggtaacacccgaggctcccgtgattgaacactcgaatttacgcggcgcagcctactacgccacccaatccggagaatccgcatga

SEQ ID NO: 350899 - DNA, 741 bp, Pseudomonas aeruginosa
atgactactgccaatacgactcaacgactggtcgagttggggctgcgtggcatggccctggcgtacgagcgtcagcgcgatcagcccgccatccagacccaatccttcgatgtacggctgggtgatcttctggatgttgaaaccgcggagcgcgacacccgtaagatcgagcgttacctcaaggctgctaaattgcgcttcagccaggcagcccttgaggatgttgaatacagaagcgatagaggactggatcgaagcctggtcatggccttggcagaaagcgagtggattcggcgtaagcagaatctgatcctgaccggcgccacgggcactggcaagagctggctcgcctgcgccttcggcaaccaggcctgtcgccaaggttttaccacctactactgcacctccacacggctgtttgaagacatcgcccgatcacatgccgacggctctctgcccaagttgcgccgccaactgatcaagacccagttgttgataatcgatgatctgggcattggcggaatcgagaagcacctcgggcctgcgctgctggaaatcatcgatcagcaatcgatgaacggcgcgctgctgttgaccagccagttcccgacggagaaatggtacgacctgtttggtgatccaaccatcgccgatgcgattctggatcgcatcgttcatcgcgcgcacatgttgccgctgagcggcgagtcgatgcgtaagcgcaaaggcaagaaactctga

SEQ ID NO: 350900 - DNA, 837 bp, Pseudomonas aeruginosa
atgcacagatatgtcgtgatagacgccttcgccagcgaaccgctgcaaggcaacccggtggcggtgttcttcgactgcgacgacctcagcggcgagcgcatgcagcgcatggcgcgggagatgaacctgtcggagagcaccttcgtgctccgcccgcaacaggacggcgacgcgcgcatccgcatcttcaccccggtcaacgaactgccgttcgccggccacccgctgctgggcaccgccatcgccctgggcgccgagaccgacaaggacaggctgttcctggagaccaggatgggcaccgtgcccttcgccctggagcgccaggacggcaaggtggtggcctgcagcatgcagcagccgatccccacctgggagcacttcagccgaccggccgagctgctcgccgccctcggcctgaagggctcgacctttcccatcgaggtctaccgcaacggcccgcgccacgtgttcgtcggcctggagagcgtcgccgcgctgtccgcgctgcaccccgaccaccgcgcgctgtgcgacttcccggacctggcggtgaactgcttcgccggcgccgggcggcactggcgcagccgcatgttctcgccggcctacggcgtggtcgaggacgccgccaccggctccgccgccgggccgctggcgatccacctggcgcgccaccggcagatcccctacgggcagcagatcgagatcctccagggcgtcgagatcggccggccgtcgcgcatgtacgcccgcgccgagggcgccggcgagcgggtctcggcggtggaagtgtcgggcaacggcgcggccttcgccgaaggccgggcctacctgtga

SEQ ID NO: 350901 - DNA, 648 bp, Pseudomonas aeruginosa
atgatgggcgtcaacgcgaacatttccgagtccctcaccgggaccatcgaagcccctttcccggagttcgaggcgccgccggcgaaccccatggaggtgctgcgcaactggctggaacgcgcccgccgctatggcgtgcgcgagccgcgggcactggccctggccacggtcgacgggcagggccggccgtcgacgcggatcgtggtgatcgccgaactcggcgagcgcggggtggtgttcgccacccacgccgatagccagaagggccgcgaactggcgcagaacccctgggcctcgggggtgctgtactggcgcgagagcagccagcagatcatcctcaacggccgcgccgaacgcctgcccgacgagcgtgccgacgcccagtggctgagccgcccgtaccagacccacccgatgtcgatcgcctcgcggcagagcgaaaccctcgccgacatccacgccctgcgcgccgcagcccggcgcctggcggaaaccgacggcccgctgccgcgcccaccgggctactgcctgttcgaactgtgcctggagtcggtggagttctggggcaacggcaccgagcggctgcacgagcgcctgcgctacgaccgcgacgaaggaggctggaagcaccgctacctgcaaccgtga

SEQ ID NO: 350902 - DNA, 1668 bp, Pseudomonas aeruginosa; identical to SEQ ID NO: 328229

SEQ ID NO: 350903 - DNA, 1038 bp, Pseudomonas aeruginosa
atgagcgcgccccgggttcgcctcggcgacctctcggtcggcttcgtccaggcgctggccgacgccctgctcgccgccggcgtcgagcccgcagcactgctcgagcagtacggcctcgaccagcggcgcctggccgaacccggggcgcgcctgtcgatccctcgctacatgcgcctcggccatgccgccatacagctcagcggcgaccccgccctcggcctgcagatgggccgcctgagccgtctcggacagatgggcctggccggcgtcagcgtcgcccaggcgcccaacctgcgcgccgccgcgcgggcaatgatccacctggaaccgctttacgcgcagaactaccggggccagtcgagcctggtggaagacgccggcggcgcctggctgcgcttctattcgatcagcccttataacgcctataaccgcttcgtcgtcgattcggtgctggcaggctggatcagccatctcggcgccctggcaaggcagccgttgaaagcggagcgggtggagatcgaatatccagcgccgccttgggccgagcgctacgaggcattcttcggctgcccggtggaattcggcgcgccgaccaaccagttgcgcctgagccaggccagcctggccctggcgaatgccgagcactgtccgagcacctggagccagatgctggaactctgcaaccgcgaactggagcagttgacccgcacccgcagttggcgcgagcgcgtcagccgcctgctggggccgatgctcaatggtcgcgaaccggacctcgaggaaatcgccgcgcgcctcaagttgccgacctggaccctgcggcgcaagctggccgaggaaggcacccagttccgcagcatcctcaacgacacccgccgcgacctggcgatggtctacatccgcgagaccgacctggctttcggcgaaatcgcctacctgctcggcttcgcctcggcggaagccttccagcgcgccttcaagcgctggagcgggcagacgcccggcgaattccgccgcgcccagcgacagagcgcctga

SEQ ID NO: 350904 - DNA, 381 bp, Pseudomonas aeruginosa
  misc_feature (5)..(5): n is a, c, g, or t
gtgtncagaacgctgcgttttcccagctggtacccggacacctacgccaccctggtcgaacagcgcgtcgaactgctggcgatccccgccgccctgaaccagagcggtcgctggcagcaaccctggcccggcttcgatgccgagctggttcccggcgacgtgcgcctggcgccgaacagcctgagcaacgccgaggcctggcagcgcctggcggtcggcgagcgcctgctggccagcggtgcgcgcggcgccgccgtggccttcgcccatagccgcctgtggaacgtcaccgaagacggccagagcctgctcggttcgtcgcagggcatgcgccaggccaatcccggcggcggtgcgcaactggtcaatctctggctatga

SEQ ID NO: 350905 - DNA, 273 bp, Pseudomonas aeruginosa
atggctaagccgtatcctatcgtcccgctgtcctggctggacggtctcaacgacctcaacaaccaattggtggcctacgaactggccgtccgggcgctgttccggctgttcgccgaggacggatcgccctacgagctggagacggttctatccggtctgcatgacctggtgcagccggtgatcgagggctaccggtcgatagccgatcaatgccgcaccgctgaatcgctgggcatggtgggcgtggtccaactggccgacgacacggaataa

SEQ ID NO: 350906 - DNA, 1464 bp, Pseudomonas aeruginosa
ttgaataaattagaaaatctaagttttggcgagtttgacgctgaaagcgaaatgcaaatgctctcggaatacttctttgacaacgggacactagaaaaaataaaaactggtgataagaaatattttctcggaagaaaaggctctgggaaaacagcattatttctacagacaaaaaaaccaaaacttggccaagacatcatatctttagactttgatgactactgctgggatatgcataaaaaaatccgtgaagaaggggtgcccgaggaaagtgcctttactacatcttggcgtttcaccttcctgatagccgcttgcaaacactggaaagaaaacgcaaaaggaaaacttaagaaagaagcagaagctctctacaacaaaatatatgggagcgaagaggtaagcctagcaagcttcctatttgataagtttagaagaattagaagaatcgaccttccgagcatcgatggctttggaggtggaggaggagttgaactggatgaagatcacggaaaggctcttgccagcaagataaaactctggtccgaccttctagaagattttgtaaaccagcactacgacgagcacatcttcacaataaccatcgatcgtctagacgacggatgggatgccacaaaggaatctaaagatgtactagctggcgtattgaaagccgcaagacagttgaacataaaactacaaagaaataaaaagccatccccaataattgtatttttaaggagcgatatttacaacgaactccgcttcaacgacaaaaacaaacttggctcaagccaagaataccttgactggacagaagaggatttaataaagataatcgaagagcgcattagaaaaaccacagaaacaactatagataacgcttgggacactgttttttcaactaaagaaatgcggcaaagagctggcataaaaagctacatactaaagagaacaatgcttcgcccaagagacataattgcatactgcatattctgtcttgactctgctcaaaaaaataaacatgaaaaaattgaaaccgacgatatatatgaggccgaaagaagatactctaggcacatctacgacgaattagacgatgaaatgcacaagcagatcccagactgcaaggatctattacaagttctccgagacatcgcgctaacgagattcacaaaatccaaatggattgattcctattcaaaaagattcgtagatgatactgaagaagaggcaaaagaaaaattaaaaattctttttgactattcaatagtcggagtccccaaaaaaggcggaaaatcccgaggaacaaaattccaattcatatatcacgacagactactagaaccaaactttgacggcgatatgatcgtgcatttctccttgcacaaagagttaagcctaaaagagcctagaacagcaaggaaagcaaagtcaaaggagcaagtaaaaagtagcgcataa

SEQ ID NO: 350907 - DNA, 168 bp, Pseudomonas aeruginosa
atgatccgccagatccgcgcgctcctctacgaccagggcttcaccatcggcggggcgcgccagcgcctctccggcgacgaggccaaggacgacgtcacccagtacaagcagctcatccgccagatgatcgccgagctggaggaagtcctgctggtcctgaagaagtga

SEQ ID NO: 350908 - DNA, 1293 bp, Pseudomonas aeruginosa
atgaagactccgatccatccaacgcgactggtcctcgaagagaacggggatttccacaagtccccgaaggggatgcttttcatggacccgctcaatggacagttcaccgacctgtcaggcgtgcgcatcctgcggtgtggcgtggacaccgtgcggcagttgtacaacggcaagctccggccggaagtcatggcgctgtttgacctgtcggtggatgtggtcgagttcgccggttacgaatggtccaagggccgtatcggtcgcgactctggctatcagtaccgcctgcagaacgccgaaatgggcctgatcctgctgatcaagaatcacaacatcaaggtcgacaccattggctcgcacctcaagatcgaggtgtcgccccacgccattgacggcgccgacccgcgtatcctccagggcgtgctggatgacctggccgcagcggtgctgagtcactgcgagaccaaccaagcagccgtgcatatcgcgctggatgtgcagggctggacgcctccggctgatctcgttgatcgcatgcactgccgctcgcgtcgggtacggcaaatcagtgggatcgagcggatcgagttcgacggcaacgcctcggtctacgggcgtggcgagacgtacatgttcggctcggccaacggcctgcaactgtcgatctataacaagaccctccaggctcgggccaccgacaagctcgactattgggaaagcgtgtgggccaccctgaacggggatccgttcggcgatggcgacccggcctataaccccctggaaacggtgtggcggatcgagtttcgctatcaccactccatcgtccagcagttctccgaaggctcgcgtatggcctcgggagaggtcatcggctgccgcacctacgagggcctttgcccgcatctacaggggctgtggaactatgcctgcgaggcattccgtgtgctctcccgggagggcatgtatgacgccttctggagcctgatcagccaggacgcccgcgtccaggtcgagtgcgatccgctgatcgagcgcaccgagtatcggcgctattacaagactgccaagggtttcagtggacgtaactgcgagatgtttctcggccagttcgtgagcctgatcgcgcgggagcgtgtcccggcaaaaaaggctattgagtccgcccgcaaattggagttctggcacgttatcgaagaccactatctcgccaagggttggactcgtcgcgatctggaaaggcatatacacaagctcatgtgtgatcgctatctgcgcaagggatatgcgatatga

SEQ ID NO: 350909 - DNA, 1275 bp, Pseudomonas aeruginosa
atgagcagcattaagtttttagaaaagctgttggatggcgtggcagtggagtggacagcgttgggtgaggtggctgaagttagaagcggctggggttttcctaacgcctatcaaggacaagctaacggcgactatccattctacaaagtgagtgacatgaacatcgctggaaatgaaacaatgatggtcactgctaataattacattgatgcagctactgtaaaaagacttggtattaagccggcaccagaagggactgtgattttccccaaaattggagctgcagtagccacaaacaagaagcgccttctttcaatgccatcagcttatgacaacaatgtcatgggcttgattcctggagagaaagttaattctcgttttctgtaccattggattcagacaattaatctttgcgcgcttgcaaatgattccggggccgttccttcaattcgtaaaactgaaatggagatgctgccggtccctatcccctgccccgacaaccacaaaaaatcgcttgaaatccaggccgaaatcgttcgcatactggacagcttcaccgagctgaccgccgagctgaccgccgagctgaccgcccgcaaaaaacaatacaactactatcgtggccgattgtttagttttgaagacgggaatgtgaaatggaagacgttgggagatgttacaaagaagtggtactcaggcggaacaccaacagccggcaaagcggagtactacgatggcggggatattccttggctaagaacccaagaggtcaggttttcagacatcgaggatactgaagtaaaaattacgcggaaagctctagtggattccgcagcgaagtggattcctgcgaattgcgtgatcatcgcgatatcgggagcaacggcaggcaggtcagcggttaataagatacccttaacaaccaatcagcactgcggctgtttggagattgatagtgccaaggctctgtaccgttatgtcttccactgggtggcctataactatgaaaacattaaggcgctaggtcagggtgctagaggtgacttgaattcaagcatcatcaagggatttccccttcctataccctatgcggacgaccctgagaaatcgctcgccgagcagggccgaatcgtcgccatcctcgacaaattcgacgccctgaccaactccatcaccgaaggcttgccgcgcgagattgagttacgccagaagcaatacgagtattaccgtgacttgttgttgagcttccccaagcctgctgaggtagaggcataa

SEQ ID NO: 350910 - DNA, 1263 bp, Pseudomonas aeruginosa
atgggaaagacgctcgaagaaattgcccggcagctgagcacgccaaagctcgttcaaagaacggtcccggaaacgacgaaggtcgtagaagaggcaaagcctctgccaaaagtccaactcatctacgccttcaatggaagcggcaagacgcgtctttcacgggagctgaagaagctgttcccggctgtgaccggaaatgaggacgagcagcgctctgagttatcaagcaagaggattctctattacagcgcattcaccgaagatctgttctattgggacaatgacctggcttttgatgcggacccaaaactgctaatccgccccaactctttcacgcgctgggtgttggaagagcaaggccaagatcagaacatcgttgctaattttcaacgctatacaagcgacaagctcacgccgcggttcaacgaagaatacacatacacagacgagaaaggcgaaaaggtccttgttaaggcgttttcagaagtgacgttttctctagagggcggtaacgtcgctcaagctgagcgattgaaaatttcgaagggcgaggagagtaattttatttggagtgttttctatacacttctcgagctagccatttccacgctcaacgatgttcagccagactttccagaggaaacgccattcgataatctggagtttgtcattatcgacgatcctgtcagttcactggatgacaatcatttgattcgcctggccgtcgatctggcgcaacttattaaatcaaataactcaaaaatcaagttcatcatcacgacgcacagtcctattttctataacgtcctttgcaacgaatttggaagtgatgatagaactgagcgctacagctggaaatcaaagtggtttagcaagtatcgcctcgagaagaatgaagacggcagtgttgatctggtcgatcagccaaacgattccccgtttgcttatcaccttcatctgctgtccaagctccaagaggcaatacagagtggtcaggttgaaaaatatcactttaaccttctgagaaatattctggaaaaaacggcaacctttctcggatataagaggtgggagcaattgcttccgccaacggatgacggcctaccaaatccgaatgcaaaaagaattgtcaacttctcaagccattcgaagcatgcggctgatgaagtgcaaccgctgaaaccggaagaaaaggaactcctagcaacattggttaggcatattgttaagcagcaccgattcaggcaggacgagaccgcatga

SEQ ID NO: 350911 - DNA, 189 bp, Pseudomonas aeruginosa; identical to SEQ ID NO: 324731

SEQ ID NO: 350912 - DNA, 450 bp, Pseudomonas aeruginosa
atggatgtcgtgcagttcagctccagcccgaaaggacatcggggacagcggggcttcaccctgatcgagatcatggtggtggtggtgatcctcggcatcctcgccgcgatggtggtgcccaaggtgctcgaccgtcccgaccaggcccgcgctaccgcggcgcgccaggacatctccgggctgatgcaggcgctcaagctctaccgcctcgaccagggccgctatccgagccaggcgcagggcttgaaggtgctcgcggagcgccctgccgatgcctcggcgagcaactggcgctcgtacctggagcgcctgcccaacgacccctggggcaagccctaccagtacctgaatcccggcgtgaacggtgagatcgacgtgttctccctcggcgccgacgggcagccgggcggcgagggcatcaacgccgacatcggctcctggcagctctga

SEQ ID NO: 350913 - DNA, 2355 bp, Pseudomonas aeruginosa
atgaagttaattataaataaggttgctctgaggaattttaaggcatttcgatttcaggttttcaatattggctcaaagaacctaactgtccttgatggaccgaatggctttgggaaaacctcattttttgatgctcttgagttactgctcaccggagatatatctcggtacagaaacttagaggcaacgatggataaaaggtcagtagcattcggtagtccgatagtttatgaggatgctgatgatggggctgagatatctatcagcgcagagatagaaacttctagtggtatagtctttttaagacgatcagttaggaagaatgatttagataaggatagagggttaggattttctaagtttaaactttacgaggcatcaagtttaagcgaccaaggtgctttggttaaggacgagcaatcatatctgcgagacttgcttggagatgaatatcagcgaaattacaagctgtttcactatgttgagcaagaggataataccgcagttctgaaaagtaaggcggtaacaaagcaacagaaaatagatcatttattcgacgttggtgattatagacagagattggagcggattgaggctgttaagagccagctggcggtcctgaagaatccggcacagaaggctgcgttggagaaattgaaagatgagttgtttaaactccgtcaatcagttagtggcgagcctttggatatttcggcagtaaattatgaacgattagttgaagttactcagcaaccttgggatctggcagatatttcggcaacctcttctgttatttctagttggattagtagcgaaggtatacttagtaagatttctgattttagacgcaatgcacaggattttcttaacttaagatataataaaagactagaaaaaacacttagccccaaaaaagaagctgttcagaaccttctgctgttcgggaatcggctgtctcgtatcgaaaagtatcaagaagatatagagaattatgatttttgtgtggaatttcttgatgcttatgctcagggaatgagtgtgtatctctcgaaattttcagctattgagcaagatatatttgagagacttgggttcagtatcgagttctcgttgctccagcagaggttaaaggagttaggtctactggttgcaaactctgaccgattggcagtcgctctgaatgggctcgtaagtgcccgtgagaattttttaaaatcctatctttcagatcacatggatcactcaaagcttggtgatgcgctttgtcctgcatgtggttatgagtgggaaagtagagatcatcttttggcgcagttcgattctcaaaaaacggcattagtagcgctcttggagtctaatggactagccttgaagattgccgtagagtccttcgagaaagatgttttggattctctccgctccactgcgtcaatgtttgtttctgctgaggaggactttgtcgactataagcaagcgatatgtgatctgaccgttgagcagattgcctatctttcaaagatttctatacattatgctgagcatgggattgagttaaaagattattactatcgaggctttaagctggatgaggagcttaaggtagacgatcttttgcaggcggtggcgtcactattcaggcctgttaactatgaggttgtctctgaagagtttgaggagctattttcacaagtgttttcttctaatgatagtgctttaatgttagttagtttggagtctatcgagagaaagcggaagtatttgtccagggtttatcagcgggaggtttacgaggaaattaaggataaggagagggcaatttctgcggcagatgaaataataaggaaggccacgtacctagagaaagctctagctaaattaagagatatatactctgaaaatttaaacgcgtatgtaatgtcgacggcaaaaggaattgagattctttttcatatatattctggtcgcctgctgcagaactttcaaaatgggcttggcatatttattgagactgatggaaaggcattgcactttaaagaacaccctttaaagcgctacgatgtcatattctctatgagttccggtcagttagcatccttggtcttatcatttgctcttgctttaaataaaagatacgcaaaaaatacaatattgctaattgacgatcctgtgcagaccttggatgacattaacattgctggatttattgatatccttagaaatgagttttcggataggcagataatattgtccacgcatgaggatgagatgtccgcgtatatgcaatataagttcaataaattttgccttgattctgccgggattgatcttaagacgatgcttaatgtttctttttaa

SEQ ID NO: 350914 - DNA, 690 bp, Pseudomonas aeruginosa
atgaaagaagttataaaaggcctttttacggattacggctattctaggctgtcgcccgagttcgatctctactctccccttgagtcggagaagaaagtatattggctgctggtcgagtcgtcacccaagaatgtattggaaatgcaggcagagctattcgaacagtgcactggtttgggccaccatgcagcagtaaataaaaatactaatctaatttgcctttggtgtgttccagtgattaattccgatgttgtgtcggaagtgcatgctgtcgaggaagatttatttttctttaagaagcatgttctatattacaccccctctgagcttaataatctgaaggcgagaattggttttgagagcctgggcgatatattgagtgttctgataaatgatcctgacaccttctctcgctataaggagatgattgggttggagagttggaatgaactgctctatagaattgttataaaacttagctttattgatattggagacggtactccagtcgacattgagggactgcactcaaaacatacccaaagagttcttggtacaaggcagccggaacttctttcatttatagagtccttcgttctaaatatggatctaacagatagcccggtaaagacactggctgatttggtagatgctatcgccgaggcaggttatgaagttaattataaataa

SEQ ID NO: 350915 - DNA, 1278 bp, Pseudomonas aeruginosa
atgtcaggcgaaggatttgagaataatcacccccacacagctattcctatctggggtgggtatgtctatcaaggtaaaatagcgctttactgttgcctaaatgccattctagaaaaaggaaaggaatgtgcggatttaactttgcaacttgatagtattgacgatttctcaatattatccgatgttggtgtggtgtctcttcatcaagtaaaagcatataagagcgagtatttttcagcctactctggtgcggttgagggtcagatattaaaggcaaaggaacatcctgggagtaaagcctatttccatgtttccaggtccgtgaatcttcctcctgactatgcggaaaaattcggatcggtccagttttataagtacaaggtagggggtgctgagcaagatttttgtgcacttaatgaagtggatgagttgttagagcttcaaatcgcagatttctacaagcatctccacggtgctcaagtctatacagggactaaagaccatctttgcttaattagagggctattagaagatgttattgtaaagagagtcatgaaaatgcatgcgactattcaggactcggtaggtgtgttacagcgaatcacagcctttaatgagttgattggattttctgaattctttgaaattttggagaaagaaataattgatgatcttcttgatgagaatttctttggtatggagatcaagaagaatattggcgtttatttctctgagttctgtgaggagtgtgacttagaccatgatgatatctgtaagctagatagatatctggcgaaaatcaatttgctggatgttaatgaactgaaggactttatcctgtctgtggctccggacaaaaaagccaagttcggcagtattcgagagtataaggatgagacaataaattcagatggcatgaaaatggggctgtttaggttgttctcagagctgattgaggcaacatataactctgatgtcagaggggcccggtttagctgggcagatggaggggtgtcgtactttccaacttcaattagctcaggcccgtccaatgcagcatctatttgtaaaaagattgtagatggcgctgtgaagtatgatgtggattttctgtatgaaagcgggcttttaattactactgatatagatgtagagtcaatttattcggtcgctgtcggggtgcgaagtctcattgatcaaagccatgataaatttaataaatttaagaaggtggggcttgtatcattgtctaagattcccggtgggataaggaaatga

SEQ ID NO: 350916 - DNA, 777 bp, Pseudomonas aeruginosa
atgggactggatgatcgcgaatggatgcgtcgcgagagtagtgaacgtcagcgagagggaaggggccggaagcggcctaggaccttccgttggaacgctctgtacttgtttggcggcatggtgcttcttaccgtccttacgctgacttggcctttgctccgttcgttcgtagatcgtctcttggtccctgcgcccgtcgaagagagcattccgattgccaaagatcttcaggaccttccggcacctccttctgaagtagcccatcgctcaaccgcgtccgaagcccccagtcgtcgttcattgcgcgattgcctgaatggtggcaatgccatcgacgaaaacgtgattcgttgccagaacggtggcgagctgccgcgcgttcgtgctccgcagaaagcgtctgagccccagggcatggtttctcaagaatacctagctcagtttcaggctgagcgggaccagcgtatagctcggcagagtagtgttcaaaattacacccaagaacgtgattcgcagtggataaagagctggggtggcggcagcggctatctggcggagtgggttgttgttaacaacgtcattgacggtggatctgtctgccggaatcaaggatggggctccgttgaataccgggagtgccgaaaaggcgcaaaggtaaactttcgtgagcaatgccgcgcttggaccgctcgtgctggtaaagatcgctcggattggagctatcagatgaaagagcactactgcacagcggaaagctcgtttagtccgacggggtaa

SEQ ID NO: 350917 - DNA, 393 bp, Pseudomonas aeruginosa
atgaatgaattttctccttatctcggcatgaccccgggcagggatgaggcggatgccttgtacctgcacctggtcgccggcgtcgaaccgggcgttgggagagcggaagcgttcggtcgtgccgtcctcgtagcgaacggtgtaggcattttcgctcagaccggttgcctgctggacggaggcgcctcccagggctcccagcgcggccccggcgatagcgcccaggggaccgccgagggccgcgccgaccatgacgccaaccacgccgccggcgccgtagccgaccgttcggtccctatctgcggaaatcacttcggcggagtgggcgaggggagtcgtggttgccagggccagtgcgatgagggggagcatgtgtttcatgggaaatcctga

SEQ ID NO: 350918 - DNA, 198 bp, Pseudomonas aeruginosa
ttgctattgggtctgtggtttatgacggcggacctcgtctgctcatgggcgaccctgtatcgccgcctgctactggaactgctgcgcctgctcaagccggtcctgctgtgggtgctgcgcgtgctactggtgcggctggtcctgatgctgctgatgatgtacctgggcacgcaggcgttccgggcgctgctcctgtag

SEQ ID NO: 350919 - DNA, 258 bp, Pseudomonas aeruginosa
atggccatcaccaaaatcatcatcaccagcggcgaactgaacattggcaatgacgccaccgaacaggatcacgccgaatggcgcaagctcgccaccgaagcgctggccaagacattccccaatgccgaaatcgaggttggccagactgacagcatgggcagcgttctgcgcctggagagcgacgaccaagatgccgacgtaggccgcgatagcctcgactatcagtatgcggttcaagttctagagcgtatctggtga

SEQ ID NO: 350920 - DNA, 216 bp, Pseudomonas aeruginosa
gtgaggcccgactcctcccgccacaacccagacccgcgctaccttcgcgggttgctggatgccgccggtataacccagcggcaggcggcgcagcttctcggcatcagcgaccgggtgatgcgctactacgtgagcgacgaggccagcgaaagctaccgggccgctccgtacacggtccagttcgcgcttgagtgtttggctgattccacacgctaa

SEQ ID NO: 350921 - DNA, 387 bp, Pseudomonas aeruginosa
atgagcgaacaaggcaagaccggcctggagatccgacgtgaagtcatgggcgacgccttcgtcgagcgcgccatgggcaacgccaccgccttcacccagccattgcaggacttcgtcaacgagcatgcctggggctcggtctgggcccgcgaggcgctgccgcgcaagacccgcagcctgatcaccctggccgccctgaccgccctgaaatgcccgcaggaactcaaggggcacgtgcgcggtgcgctgaacaacggctgcacggtggaggaaatccgcgaggcactgctgcactgcgcggtctatgccggggtgccggcggcgatcgatgcgttccgtgcggcgcaggaagcgatcgatacctggcagggcgaacagcccgcctga

SEQ ID NO: 350922 - DNA, 264 bp, Pseudomonas aeruginosa; identical to SEQ ID NO: 341449

SEQ ID NO: 350923 - DNA, 1311 bp, Pseudomonas aeruginosa
atgtgtagttcgaaacgcacgttgtatataactgtcccgcttcttggcgtacttgcctcgatgcacgccagggcagatttcatcggtgacagcaaactcaacctcggtctgaggaacttctatttcaacggtgactatcgcgacggcagcaatgcgccgtccaagaccgaggaatgggcccagggcttcaagctggactaccagtcgggcttcaccgagggcaccatcggcctgggggtggatgccctgggcctgctgggggtgacgctcgacagcggcaagggacgccatccgggcagcaccctgatcccctccgacggcgagggcgccgtggacaactggagccgcttcggtatgaccctgaagatgcgcgcctccaggaccgaggcgcgggtcggcaccttgctgcctaagctgccggtggtcgacgccaacgacgcccgcctgctgccacagacgttccaaggcgggatggtgacctccagcgagatcgacggcctgaccctggtcggcggcaagctcgagagcaccaccggccgcggctccagcgaccggaccggcctgtcggtgcggggcggcaaggaggagggcaacgagttctacttcgccggcgcggactaccaactgaggaagaacctgctggtgcagtactaccaggcctcgctggaggactactacctccagcatttcgtcggcgcggtgcacaccctgagcctgggcaacgaccagttcctgaagaccgacctgcgctacttcaagacccactcccagggcgccaacgcctcgggcaaggccggctaccaggtcagcggctacaccagcggcggcgacggcgagatcgacaacgacacctggagcgcgaccttcatctactcggttcacggccactcattcctgctgggctaccagaaggtttccgacgacagtcccttcgtgcagctgaactccggcagcgtgcccgacgccggcgccggcggtgtcaacgtctacctgtacaccaaccgcctcatcaccaacttcaccgccgcgggcgaggccaccagctacgcgcaatacggctatgacttcgccggtgtcggcatccccggcctgaccgcctcggcgatgtacctgcgggggcgcgacatcgaggccatcggcagcggcgaccagggcgagtgggagcgcgacttcaacgtcaactacgtcatccagagcgggccgctgaagggcctcggcgtcacctggtggaacgcctccatgcgcagcgacatccagcgcaacgaggaccagaaccgcctgatcttcaactacaccatcccgttgttctga

SEQ ID NO: 350924 - DNA, 453 bp, Pseudomonas aeruginosa
atggagacctggacaggcgcgttcccgcaactgctggccgcctacgagcacaaggagcgcttctacggcatctgggacgccaccacacggctccaggcagaagccgccctggacgagtggatagccaccatcccgaagggccaaaaggaagtctggagcgatctggtcagggcagtgggaaactggcgcgaagagaccatgacctacttcgagacggacatgcccgtcaccaacgcttacacggagtccatcaaccgactggccaaggacaagaaccgtgaagggcgcggttactccttcgaggtgatgcgggcacgaatgctctacaccacgaagcacaagaagaaggcaccgactgcgaaggtctctcctttctacaagaaaaccatcggttacggactgccggacttcgcagaggaactcaactacggagtcgatctatcaaccatctga

SEQ ID NO: 350925 - DNA, 450 bp, Pseudomonas aeruginosa
gtggtcccagacgcgggattcggacaggtcgtcgacccgctgctcgacgcgctcgatagcgacctggtgctgggcctgctgttgctcgatctgctgctgccgacgctcgagttggacctgcaactgggcatgcgcgagcaactgctcggcctgagtcatcggaggccgccgagacttcagcttggccaatacgcttcggcgaaccgacttagattcgcgcatcccgaccagcatgcactggtcaagggtcaggtcgtaggtggcgacctggttgccgtggaagggggtgtaatatttttgcaccccctcaagctcatcgcccaactcgtcttcgacacgagcgagaaactgatcgtttctgatcttcggttcgccagcagccaagcgagcctcgttgaccatgtcccgcagttcgatggtggtcatggtggcggcctggccgccaattga

SEQ ID NO: 350926 - DNA, 357 bp, Pseudomonas aeruginosa; identical to SEQ ID NO: 341416

SEQ ID NO: 350927 - DNA, 528 bp, Pseudomonas aeruginosa
atgagtgagattgatcttgatgaggccggcctgcgtgatctggtgatggtcaatgacggccaggttgtaacgacctcgctgaaggtggctgagcgtttcggaaagcggcacgacaacgtgatcaaggcgatccgcggcctcgattgctcgccagaatttcatgccctcaattttgaggagatgatcgtggatgtcgatatcggcaaaggtgccaggcggaaatctccagcgttccgcataaccagagatggctttgcgttcttgtgcatgggcttcaccggcaaggaggcggccaaatggaaagaggcttacatccgtgccttcaactggatggcagagcaactgttcaagcgctcgatggacttcgccaccctgcgtaacgagctgatggcggagtaccgacaagagaaaggaattgccagcctggccggcaagaccctgcgtcgatggcagatcaaggcacccgtcatcgaacagaagatcatcgaggtcgagcgcgaatggcagttgcagctgtttcacgcctga

SEQ ID NO: 350928 - DNA, 357 bp, Pseudomonas aeruginosa; identical to SEQ ID NO: 328645

SEQ ID NO: 350929 - DNA, 333 bp, Pseudomonas aeruginosa
atgaaaatgccagaacgccctgaaacttgggctgcgctgcttgcgtggctgtctgcgcactatccgcagctgtacgccgccggcctgtcctttgtggtcgcgctgacccgggtgatctacggcggtggaacgcggcgccaggctctgctcgaggcaacgctctgcaccctgatcaccttgggcctgattcctgtccttgagtggtttggccttccgcagaacatggctactgctgccggggtgttcaccggtttcctgggtgtgaagaagatcgccgagttcgctgatcggatcgccgactggaagtttccgcgccggggggctggcgaatga

SEQ ID NO: 350930 - DNA, 318 bp, Pseudomonas aeruginosa
gtgcagccgtacctgatctcgctgttccgcgaagacccggcccgcgcgttcggccgcctgcgcatcccgaccctgatcgtccagggccgcaatgacatccaggtcggcgtcgccgacgccgaggcgctccagcgagccaagcccgactcgcaactggtgctcatcgacggcatgaaccacatcctgcggatcgccccgagcaccggtctccagcagctttccgcctacaacgacccgaacctgccgctggcccggcaactggtcgaggcggtcagccgcttcatcctgcgcggcgcagaggcggaaaaaggccgctga

SEQ ID NO: 350931 - DNA, 723 bp, Pseudomonas aeruginosa
gtggccgacccgcgcccaggcggcgtccggcacaacaacgtgtttcgcgtcgtcagcatggggagccacgccggaaccgtcaccggcgggcactcacccagctccggcggccaggctgttgccgatcccaggtaccacaactggcacccaggggcgagcagccgcaaattgcacgtcggcgagtggggaagcgctaccggcacggtcaccggctcccagcaggtggccagcggcgcgctgtcgatcgctgatccgcgcgtgctcgatcgcaccaagggcgacgcctacctgaccggcggccactacggcgtagttgggttcgaccaatccgccggcgcggtgtcggccagtgcgaggcacgacaacggtcgatggagcgtggccgatccgcgcatgccggaggcgaacgaccggctgacctgcatcatccagtcgctggacggcacctggcacaggccgtttaccaccctggaactcgccgcactgcagagcttggtcgaccccgaagagcagttggccctcgacggcctgagcgacagcgactggcgcgagcggatcggcaatgcggttccgccggctgcggccgaggccatcgccggcgtgatgggcaccaccctgttgctggctgaggctggcgagaccttcctgctcagtagtacgccaatctgggtgcgtcaggtcgccgttggactgagtatttcagaacctgctgggagtctctga

SEQ ID NO: 350932 - DNA, 1008 bp, Pseudomonas aeruginosa
atgcccctctctgacgagcaatgcaactactccgatcccctgctcattgaaagccagcccataaactccaaaaaccaacccatcttgacttcggtaaggcataatgcttgggtaggtggtttaaatatgcaaaaccatgggtgctctgcccatggcgttgctctacatgcgatgcctatcaaacgcaggaccgatcgtacaggtgtagggatggctgagacccaaatcgagtggacagactccacatggaaccctgttgcgggctgttcaattatcagtgacggctgcaagaactgttacgccatggagatggcgaggcgcttagagtctatgggcgtggagaagtacaaaggcctaactagaaaatctggcaagcgcactgtatggaatggtgtgatcagagaggacgagaaatccctctctattccatactcttggaagaaacctcggaagatttttgttaactcgatgagcgacctattccacgaggacgtgaacgacgacttcattcttcgcgtctggaatgtcatgcgcgaaaccccacgacatagctatcaaatattgacaaagcgtcctgaacgcatgaaagaaatcataaagagtagaatcaaggacattcttcctaatgtgtggattggaaccagtgtagaaaactccgaagtgcttcaccgtatagagagcttacgaaatgtacctgcggccatacgatttatatcattcgaacccctaattgactctgtgggagatgtggatctacgtaacattgattgggcgatagtcggcggcgagagtgggcgaggagctcgcccaatcaaagaagaatggatagatgaaatttatgaacagtgtttgctaagcgacaccgccttcttcttcaagcagtggggcgcttggggaaaagacaatacgaagagatctaaaaaggataacggtagagagtaccgaggacggacatgggacgaaatgcctgtcactatcgtaggtagtctaggtcaagtctcgatctga

SEQ ID NO: 350933 - DNA, 1245 bp, Pseudomonas aeruginosa
atgacagaaaaacgttataactggttggacggcgccattctagatgatcattcacgtcgaaagcacaagatactaagagagtatttctttcagtatctaactgtaaggtgccagcttccccaacaatccagattccgtttagcagtcatcgatggattctccgggggcggacgctaccaatgtggcactcctggttctccagttattttcattgaagagctaaaacatgctttaaagcacatcaatttaaatcgagcatcccaagggctagggcttatcactatcgactgcttcctgattttgaacgatgccgataagaacgttaccgctttcctaaaggagactctcgcgccaattcttgcagaagccaaggccacggaggagcgattgtcacttgaggttgcttattttagcgaacccttcgagcagctttaccctaaagtcaagaacctgctatccaagcttagatgtagaaacgtcctcttcaacctcgaccaatgtggccacagtcatgtcgataggagaacaattctagatataacacgttcgaacccttccgccgaaatattttacacattcgcaattgaggcgttaatttcctttttaagaaagtccgatccggtcatgctggctacacagctcgccccaattggaatacctgaaagtgaactcaagaatctcgaaaactatttaaatacgaacagttggttgggcgcggctgaacgattggtatttcaagcattcaaaagatgcgcaccatatgttagtcctttttcaattaacaacccttccgggtggagatattggctaatacactttgcgaactcgtacaaggcacgtcaggtttataacaacattcttcacgacaatagcagcgcacaggctcacttcggaaggtccggcctaaacatgttatcctacgaccctgcggaagaaggaactctctacctgtttggagacagcgacagggagaacgctagaattgaattgattgaagatatacctagaatcatctcggaatcaggtgacgcggtgtctatcagtgagttctattcgagcatttacaatgaaacccctgcgcatacagatgatatacatactgcaataattcagagccctgaaattgaagtcatcacccctactggtggcacacgcagaaaggcaaacacaatcacgatcaatgacactttgaagtttaagagccagagaatacttttcccaatgttctctgcagagagaaaataa

SEQ ID NO: 350934 - DNA, 687 bp, Pseudomonas aeruginosa
atggttcacctcccccgcacagtcgaactctgggacgtcgccctcaacgacaaccaggcccgtatgacggcacccgaatggcattgcgaaatgctgcgcagagcagctacggagctactcgcggcaggaggcgtggaccaggctggctacctcgacatgctcgacctggccacaggcgcacaagcacacgcccttgaggaacgcgcagcacagtggttccggccgaaccgaacgtaccgggtcttgctcgagggacgcgaggtaggccagatcgcgcgcggttcgttcagcccatcagtaccagggctgagtgatggcctagtgcgatacgacaagcgtggcgagttggtgatgctttatcagcgcacgatctacgcgggagacattcgcggacgccgctgggcatgcacggacgggcagacttacacgctcaccgtcattggctgcagctggcaggggcgggaatggcgggcgttcagcgagccggacgagtattgcgtggcactcgatattgccgagcgaaccgaagaagatggagacatcggagcctctgttctttggcgagaaaggctggaagcatgcgaattgagaacatgtatagtctgttgggcacacttcgctcatatcgacaaatgcgaggcctgtactggaactggagccgttgcagttgaaagcataccgaattag

SEQ ID NO: 350935 - DNA, 879 bp, Pseudomonas aeruginosa
atgtctgtaaggctttggttgtttctgggtggaactattgggttgatttttgggttgtttttagttgtaggggtcctatctttttcagcagatgttgagacgctggtaggtggttccacctatgcttttcttaaagaggtcgccgttccgatggctgctggtttcggtggggccattgctggtgcatgctccagctattttttaactcgtaaggagaatcaggttaggcaagttgagattgatacggagttgattaacactagcttgtatctacttatgtccaaattgagcgagattgtagcaattagaaaacaaggttttttccctcacggtgaaggccaagctcggtttcttactatcccgttgtactcaacaggaggggagccgcagccatcactggatatgagaattattacagtgcttggacgggttgggatagatgatatttctgaaaaaatatacaaagcagaaaatggttacattgcttgcttaaatcatttgaatattagaaatgatatgtttttgcaggtgcgagatttggccgaaagatctgggattcttaaggataatagtgtcatgatatataagtacgttttggctgttgggatgcctaggttgctagctctttatgatgttacggaaaatttaataagttatattgatagtgttatagaggatgtcaaggatgctttgttggctattgagagggctcgggagagatttgttgtaaatgggcgtgtgtctgtaatgtctttaagtttttctgattttagtgattccaagctgccttcgcctcactttgggaatagaacggaactagaaaagtatcttgcgaaatcggttgaggttgctagggtttctggcttggagagagggtag

SEQ ID NO: 350936 - DNA, 1161 bp, Pseudomonas aeruginosa
atgaacgacttagtgactgaccaagattacgatgatgtcgatgatcaaaacgatactgctattggtgaattttcaataatttctgctataacagcatctctagaaagagataagtccttgacggggagcccatttaagtttgagattggagcgccatggagtctaacaagccccgtgtcagcagactttcttgagcaaataaataaaaaatttaagcgaaagaataagtttcatagctatttttcaggaaatcaatcaaatcaaactccaagtaacttgaaaaaatatattgatggcgaaatggaaattgaggaattcgccactttagagatgaggttactggtaagtattgccaatgactctgaaagagcatccttagtcggcggaaatctagtttttatccattataaaacatttggcgatgatgaagatcaagggcgcctaatgattgtgatggttgataagaaaggtgcttttgaatttgatgagaaaaccttagagcctaagaagctacaaccaattgataccgacgctctacgccaggctgctctatttgatttgaccttgttttctgtgacttaccccaagcaagaaggggccgcgtatctccactttattgagggtaagtctaaggcagagttttttaagatagcactaggatgcgactccagtgtatccaacaaggaaagtgtaaataatatatttgaggctataaagcacttttctcaaaaattgaatttaagaaataaggttcagcaaaaaataactgaaaaggtgtatgagtatataagtgagcgagtggggaaggaggtttcgctaaaagagatacaaaatctgatagacaaagagcttcctgcaagtcacccgtcaataggtaaatttgctcgattcgcaaatgaaaatggttttcaagttaacgcagtatttgaagcgacacgacacagtctaaaagacagtgtatcaattaaaatttctgattttcagagcaattatactctttcagctaaagcatcttcgatcggatatgccggctcaggaaagccaattactgtagatgatgatctcacttatatgaagatacctctctcttcacatgatcgagagagtttgattataacaatcggtcaagctaagacgaacgatgatgaaagcaatagctga

SEQ ID NO: 350937 - DNA, 1281 bp, Pseudomonas aeruginosa
atgatgaaagcaatagctgatattttaaaggggaaaagctataagatagaggatggcgcgcttgatatatatggggaggaagaggagcttcaagaaatttatgcagggataataagtattgggtataaaggtgaaaagctaattgaaaatggagaactcggcctctgtttatctatagagctaagccctgataggtggagtatatatccgcctttctttccaacacaagctgagctttggcagtatatcctgagtaattcaaagcttcctgagctttattatgtgcttcaagagagggtctattccggtcaagacccggagcatcgaagcgtagggctgacaagatattatttggagtggtggaaattactcggtttattaaaggatcatgtaggctctgaaggtagcgattccactcttgtatacttcataagtacagacaaaggcgcaaagaaatatgaaataaaccctaagaaaataactctagaggaattgctaagtttttctgatgaaaatctttccaaggatggtctcgatcaactgtatagcgcattagtgcttgaagatcggcatcaaaaagaaaggcgtgacgtactaagaacctctctttccgagctattagaagaaaatcactcggaatctttaatgccttggcttatgaagcaagggagaaggttgcagaaaaaatatctagaaaattatgacatatatttacataaattctcagttaataagctcttatccgagattgaagagaagtcaacagattacatatccaaaataaatgactcaatatcctctagccaaaccaaggcttttgctattcctggcgcaattatagcaattgctgcattaattaagaataccgacactttctcgcttatctttgtttgttttggactgttaagtgtgtgggtattaactgttatagctaataagattcacagagaggcatatgagactttagaggagcaagttaggcgctcactgaagagatatgaggtgatgaaagatgaaaatgaggtaagagtagtagctacagcctcaaagaatagactgctttctataattgaaaaatcaaaggaaaggctaaaatttattgatcgactttcttttagtgtttttttagcagggtgtttttatactgttggtacaaatgagtgggtgcaaaatttcgctaatgagcagtatgagaatcgaggtttctatattaaagctatagaggttccaaagagatttcatcgctggaactggttttttgagcgcgcagaagctgtttaa

SEQ ID NO: 350938 - DNA, 267 bp, Pseudomonas aeruginosa
atgcgtgaccacttgatcctgttgccgggctggggcctgggtagcgcaccgctggaaccgctgcgcgacgcgctgcacgagcgcgagccgcacctgaacgtgttgatcgagccgctgccgtcgctggccgccgccgaggccctgctcgagtggctgccggacgtcgaggtctcgaccctggcggccagtcacggcctgccgctggaatgcccggacgaggtggccggcgcaatcctgagattccttcgcgagggtgacgatgcctga

SEQ ID NO: 350939 - DNA, 159 bp, Pseudomonas aeruginosa
atggacaccttccaattctgcttcgctggcatcgttggcagcctctccggcagggtcgtgagctggggtggcctgactgtcgatatcgaccggatagagaacgcttggcttcgtcgggcgattgaagactatcgctgtggtcgcagggggcagaaatga

SEQ ID NO: 350940 - DNA, 954 bp, Pseudomonas aeruginosa
atgtatagcccatacctctatgcgcgcgcctctgagcttttagccttacgagcgctgataaaaaacaaggtcgatctacaacacttaatcccgatcatcgaacccgtagttttaaacagtgagcgggtccagagatgtatgcgggaattcggagaagcgaaggccagcctaatagttgtaatcaatcctgcccagcacgaattccacgaaagttcagaagcacagataaacttccgcaccgaaaccattgacctcttcaacgcacataaaagcttaattcctggctatattgttaactcgcaatcgacaaagaaaaaaattgaaagattcttttccttctatccggataggccagtagcactcttatacaacagctcgccgctttcgcaggacgagttcaaaagcatcgtaagcaacaagaatataattcaccacatttcgataaacgaaagaatcagctcaatgcaagtatcgttaattccaaaatcaaaatttatcgaagtcagagacaacttcaacaagcttaagaagaatgcggattacgatggtgcagaattctttacggatcgtcacaaggaagttggcgatacgctccaaggagtgggtgattacactataacgggacgttcattagaaattggcggcggacgacctggagcagtcgcaatccatgccacatacgaaaaaaagaactctgacatttgggtagaacatttcgtctcagatgagactgatcgtgatatgggcgacgcttcatcaaaattcctagaggccgctcggaaattagtggcagcaatttcaaagcgcccgggggaatttggaaacgatgccgccctacaagcctacaaagatcatgttgcgaacgatacgttccccggattacccaagaacaaagagtaccagatctaccatcatatttgtctcatgctgaaagctcttcccaatacaaaatag

SEQ ID NO: 350941 - DNA, 2259 bp, Pseudomonas aeruginosa
ttgatagaggtaaagcgtgaagaacgcttgtttaagggagtggggtgtaatatggcggagacattttattttttatctggatcgcttgcgcttgagaataagccgtttcattttcgagtcgcggaggtgattaagagagttttttctaagtgtcatggctacgttggctataaattgacaacgttagggcgtgcatccgatgcagatgtcccgtcttttatattggttactaaagagtttggaataatattggtcgatgttgtagaggatcggctggtagatgttttggagagtgaaggcgcagagtattggaagttagaaagcggcgaattgctgccttctcgagttttcactctggaaatttatgaggatgaagttgctagtaggttaaagaacgacccgaatttgtatgatagaaaatccaaatctatcaaagttccggtgcgcagttttgtggttttttgcactaattcaagtgagcaaattagtgcctttgtaaattcagacgaaactgctgtagaagggatttcttttgacgctcttgagcagagtctcaatggcgttgagctgagttacaattcttccgacgaagagatagggcgtgtctgttctcttattgaaggaacgtttatatatgaaacaaagagggcgatcattgaggatgagcgcctagaaacagtaaacgactatattcagaaatcattacgaactacctttaagcaagacgagtctcaacggctggctgctatgcagttgcctccaggtccacagcgaattcgtggattagcgggtactgggaaaacaatcgtcctttgcctaaaggcagctattacgcataagagattcaaagattataagattttgtacttgttcaatacgcagagtctgtatcagcatgtgcaaaatttgataactaaatactatactctggaggcaaagaagactccggatttcgattcaaaacttaatgtgttccatgcttgggggggaaggcagaaaccagggctttactctactctttgccaaagtttagggataacacctttaaccttggcagatgctagaggtaagggtgattccttaaagtttatttataaggatctgcttgagcgagctggtaatcttttagttcctgaatatgatttggtgctaattgatgaagcgcaggattttcccaatgaggtttttgaggttgcttatagaataaccaagggtgagggtgcggctaaacgcataatttgggcgtatgacgagttccaatctttgcgtgacactgtaattaaagggccgtctgagctgtttggtgtagatggcaatggtcatcctaatctgccggattccatccttaatggacgttatgaaggcgatatccctaaagacttcgtattgccgaactgttatcgaactccccggccagttctaatgacggctcacggaatagctatggggctttattccagtcgccaatctgaaatgttttaccattctgcagagtggaacgcgattggttatagtgtagtagagcctcaggggttattgatttctgaaggcgataaggttgagatagagcgcccagatgccaatagcaagaatctcttggaaggaattctaagagataatggtaagcggccgttaaacttagttcgggcggaaagatttgattccgatcagcagcagttaaattatcttgctgaaaagatacagcggctgataatggagaatggagttgcgcctgaagagataattgtcatcaatttgagtccaggcaacaacaagaactcaatgttagctattcagcgcgagttggtcggggttggggtaaaatctgttattcctggatatgtcgagagcgccgatgtatttaaaccgagcggatttgtcactctgacgacaccattccgggctaaagggaatgaggccaatatagtttttgtggtaaatgctcagcgtgtatcagatgatttcactctgaggatgcgaaacgcattctttgttgcggttacaaggtctagagggtggtgttacattactggttacggggctgctatgcaggggctagtagaggaaattgaatcgataaagcgcgatttccctatgttcaaatttatatgccctagccctagtcgtgtaaagaatacaaaatctttccttgataagtccgataaagagctggataagattcaggagttcatggaattgctccgtgctaatccagagcttcgcgacctaattctagaccaagagcgaggggcgaaatga

SEQ ID NO: 350942 - DNA, 543 bp, Pseudomonas aeruginosa
atgtatcacggtgaaagactcaatgcctggacccacctgatcggtgcggtcgccgcctgtaccggcgccgtctggctgacggtccaggcgtcgaccgcctaccacagcgtgcgcgggcgagcgaaggtggtgatgcgcaagctcgaccacctgtccatctacctgctgatcgccggcagctacacgcctttctgcctggtcacgctgcgcggtccctggggctggacgctgttcggcatcgtctggggcctggccgtgctcggcatgctccaggagatcaagccacgctccgaggcgcgggtgctgtcggtggtgatctacgcggtgatgggctggatcgtgctgatcgcggtgaaaccgctgctcgccgccctcggcagcgccggcttcacctggctggcggccggcggcgtgctctataccgtagggatcgtcttctatgcctatgaccaccgcttccgccactggcatggcatctggcacctgttcgtgatcgccggcagcctcctccacttcgtggcgatctggcgctacgtactctag

SEQ ID NO: 350943 - DNA, 876 bp, Pseudomonas aeruginosa
  misc_feature (538)..(538): n is a, c, g, or t
atgtgctgcaccagcatctgctggcattcgccaatcagttgccgcgcctcgccgagcatggcctgggcctgcgggtcgagggcggtttcctggaccgtctcgcgtaccacgtcgagcgcgcggctggcgctggactgcaggcgacgcaggcgttgcagggaatcggccagcggcttgatgcgctggaactccaccagcgacttgctggagatatccagcagcctgtccaggcgttcggcggtgacccgcaggacccggctgcggcgctcctcggcctgttcgccgcccgcctgcccggcgggctcctcgtcgttgtcgtcgctggcggccgctgacgccgctggcggcgcctcggggaccgcttccggcagaccgggagtcgtcgccggcagctccgcgcgggccagcggcaggccgctgcgcaccaggccttcgagacgcagcaccaggccgtcgatctcttcccgcccggcgccttcggcccagcctgcgtcgccggctggcggggtgccgatacgcagcaacaggtcgcagcccnggagcaacgcatcgatatgttccgattgcaggagcaggcgtccgtcctgcgcctccaccaggcaatcctccatgacgtgcgccacgcgcacgccggcgtccagcccgacgatccgcgccgcgcctttcagcgagtgcgcggcgcgcatgcaggcttccagttggtcggcctgggtcgggctgcgctccagcgccatcaggccggcgttgagcacctgggtctgggcctccgcctcgagccggaacagctcgagcagcgacgcgtctctcatctggtccggggtcatgccaggctccgcgctacggcttgcaggagagggccttcgtcgagcagggtga

SEQ ID NO: 350944 - DNA, 780 bp, Pseudomonas aeruginosa
  misc_feature (126)..(135): n is a, c, g, or t
atgcgctgggcgtcgtccggggtccagctgaggttcagcccgccgctgtcggcgttgccgccttccagctcggagagccggcgctcgtcggcgtccggggtttcctgctggcggcggctctcgccnnnnnnnnnngttcagggcgaggcccagcttgccgggcaccagcggcccggcgagataggcgccgagctggtggctctgcccgccgaggccgtcctcgcgcacgccgccatcgagcaggccgctgcccgtccaggtatcggtggcgcgccgggtgatcacgttcaccactccgccgagggcttccgaaccgtagagcgaggacatcggtccgcgtaccacctcgatacgctcgatgctctccaccggcacccagccgaggtcgaagtcggaatgggcgatggccccggacgaggtggagatccgctggccgtccaccagcaccagggtgtgctcgctggacatgccgcgaacgctgatgccccgccgggacatgccgacgccgttgaactgcaggctttccgaaccgcgcagggcttcctgcaggtcgcgcaccgggcgccgccgcaggtcctcggcggtgatcagcgaaacgctggccggggcgtcgcgcagcttgcgctcggtagtggtggcgctgaccacggtcggctccaggtcgaccggcgcggccagcgccaggcagggaagcaggtagaggaacggcacggcgcgggccagccgcagcggaggaagacggtgcggggaggaatgggggggcatggtcggcaggtatga

SEQ ID NO: 350945 - DNA, 1590 bp, Pseudomonas aeruginosa
atgtcagcagcctcgttagccaccctcgacgggtcgctccgcatgaccctcgtcgagcaaccccgaccgccggctctcgccgacctcggcagccgcctgatgatcgtcgtcgagcgacgcgaggactgggcctcctacctgcccagcgaggaagtactcaccgcccaggaatacctcgagcaatcggcgcgcgaccacggcggccgccgcgtgcaggtgatcaacctgtgccgcggctacaagtacctcggcctcggctactactgttcgctgctggccgaggcccgtggccaccgggtgatcccgtcgctgcgctgcatcagcgaactggctcgcaagtcggtgtacgggctggccctgggtggcctcgacaaggccctggacaaggcgctgtgccgtacgccctatggcgccaccgacggcttcaccctgaccctgtatttcggccataccgagttcgagccgctggccgacctcgcccgccagttgttcgaagcctttccctgtccgatcctgctggtggagttccgtcgccagcagggctggcatatcgagggcgtgcgccctggcgtgctgaaccgcctgcgcagcgaccaggaggacgttttcgccgacgctctcgacggtttcagccggcgcgcctggcgcatgccgcgttcgcggcgggtggcacgctacgacatggcgatcctccacgatcccgacgaagcgctgccgccgtccaacccgcaggcgctggccaacttcgtacgggtcggcgccagcctcggcatcgacgtcgaactgatcggacgcaaggactacgcgcgcctggccgagttcgacgccctgctgatccgcgagaccacccgggtcgaccaccatacctatcgcttcgccgagaaggccgagcgcgaaggcctggtggtgatggacgacccggcatcgatcctgcgctgcaccaacaaggtttacctggccgacctgcttggttgccggcaactgggcatgccgctcaccgagatcctctacaaggaacgcccgcaggactggcagcgggtggcccggcgcctgggcttcccgctggtgctgaagattcccgatggctgcttctcccgtggcgtggtcaaggtcaacgacgacagcgaactgctggcggcggcgagcgagctgttcgagcgctcggtcctgttgctggcccaggagttcttctacaccgagtacgactggcgcatcggcgtgctcgaccgccaaccgctgtacgcctgccagtacttcatgtcgcgcggccactggcagatctacaaccacaaggccgacggccaggacgtcaacggcgagtgccgcgccgtgccgctggagcaggtgccgccggcggtgctggagctggccctggaggccgccgggcggatcggcgacggcctctacggggtggacctgaagcaggccggcgacaaggtgctggtcatcgaggtcaacgacaacccgaatatcgatgccggcgtcgaggacggccagctcggcgacgaactctaccggcgcatcctccaggccttcgtccagcgcctggaactcaagcaccgtggccagttgagcaaggcgctgcgctga

SEQ ID NO: 350946 - DNA, 1566 bp, Pseudomonas aeruginosa
atggacaaggacaacagcatgtctcgaaacaatccttcgcgtcattcaatactcgtcacttccaacataaacgcggccaatgatgcgaatcgtctttccgagctttgtcgacaactggaaatacgcggctatcggctcttccaggcgccaagccgcaaggtcgccctggattttctcggcaacgccgcgcaccccgccggcatcctcctgctcgtcgcggagccgacaggcgagaacgaagccgcacaattggcggcgctcgatgaactccgccaggtcgcgccgtccatcccgctgttcctgttgtttcgtcaactgcgcatcgagcagttgtccagccagctactggacgaggtccagggatgcttcaacctggccgccggccccgcacgcttcatcgccgagcgcatcgacagcgacctgcgcgaatggcgcgccccggcgggccccaggcggctgcgcgactatgccccgccggtcccgcgcacgccggtgagcgcccgctacaacggccgcgcacgcctcgacctggcgccggccaagcagtggcggatcggctcggggagcaccgcggagcgcctggcgacaccgctgaacgacctctccacggcctaccgcaagacgtccgcgggagccccggcggcgcacgccggcgacatcgccgaggcctttcgccgggcgctctgggaagccgccgcgcggctcgccagggaggatggcgatacgtggttcttcgagatactgcggggcaacccggggcctggcatcgaggccggccgggagacgccggcgaagcgctggcacgggctcgccgagacactcgacagcagtcctcggctggacccgctgcgcgtcgccctgagcgcccccggcctcgattcgcgcggtcgcccggccagcttcggagtacccgccgcggtggtctgccgctacctgcgccggcacggcatcgccccgttgcgcaccggcgactatcgcttcctgctgctgtttccccagggcgccagggcggaacacgcgcagccgctggtggacaggctgtgcgaattcaaacgccggcacgacgacgatgcgccgctgaagcaggtgttgccggagttgctcgacagctcgccgctgtaccgctacatcggcctgcgcgaactctgcgcgatgatccacgaagccagcctgcggctgcacctgaccgccctcgccgacgccgccgccaggactgccggccacgccgcgctggcgccggccacggtctatgggcacctggtcagggacgaaaccgaagcggtggcgatcgacaggctcggcggccgtgtggtcgccagcctggtcggcgtccatccggcggccacgccgctgctattgcccggcgaacgggtggccgaggaatcgccggcgctgatcgactacctgctggccttgcaggccttcggcgagcactttcccggtttcgctcccgagttgcagggcatcgagatcgatgagcgcggccgctaccgggtccgttgcgtcaggccggccgccctcgcccgcggctccggcctgcgcctggccacgcgccggccggactga

SEQ ID NO: 350947 - DNA, 174 bp, Pseudomonas aeruginosa; identical to SEQ ID NO: 330002

SEQ ID NO: 350948 - DNA, 2307 bp, Pseudomonas aeruginosa
atggctaacagccttggcacattaacgcttgatcttgtggccaggatcggcgggttcaccggtccattggacaaggctggccgcgattctgaaaagtggcgtaagcaggtcgagagagatgctgcggcgattagcgtcgcattcatcgctgcatctacggctgctgctactgctctaacagccatgacggttgctgctgttcgtcaagctgaagagtttactcgtctagcgactatttctgggacaactactgaggcatttcagcgctatgcagtaggagcccaggcagtcgggatcgagcaagaaaagcttggagatattttcaaggatacgcaggataaggtaggtgacttcctttccacaggtggtggagagctaaaggatttcttcgagaatatcgctccaaaggttggagtaactgctgaggcattccagaatttatctgggccacaggcacttcagctttttgcttcaactcttgaaaaagctaatctttcgcaagccgaaatgaccttctatatggagggcattgccgatgaggctaccgcgctcctgccactcctgagaaacaatggagaggcgtttcgagagcttggcgactcagccgcttcggctggcgcgatcatggacaatgatacgattagggcagcgaacgaactatctgccgcagcaatgtttttgcagcaggaagttcaaggcgcatccaatcagataatgagtgagttactgccttcccttgcgggtattgcttcaggttttcttgaggctacagagaaggggaatggattcaaggttgttggagaggcggtatcaactgttcttgaagtggccgcttctgctgctataggagcttactcagcagtacaactacttggaaaggggctggccggacttgtatttatcgctagtgaagttcccaatggcttcgatgcagtaaagcaagctgctgctaccgttgccgatgagcttgatgcaactgctcaacgttcaggcaatgcactaaaccaaattgtaaatggcgtagaagagggaagcagagtatctaggactgccgacctgcttgagcagacaaggaaagctgctgttggagctggccaagctctagtaaagtcttctgacgatgccgacaaagcagctaagcgaagagcaaaggcaatagcagatcagattgctgcacttcagcttgaagcagcaacagtaggaatgacgacagagcaacagaagctctataaattggctatcgacggtgctacagagtcgcaattggctcaggctaagaccgctttagaaacagttgatgctttcgaaaagcagaagaagtcgcaagaggactacaagaggcttatccaagacctaagaactgatgaggagcgactcctagatacaacaaaagagcgtttggcagtgctagacgctatgaaaggtctgagcgatgaagaaagaaatagagttgcatcccgaatcgcatcagaatcattcacatccgctcctacgtttggaggggttgacgctgtcgtggctggacctcagggcgagttagataagatcgacaaggcccaagaggagcttgaaaaatggtacgaaactcagcttgaacttcttgaggcgaatagagaggcgaaagctgagcttaccgctcaatgggatgaacaggaactaaagatcaagcaagagcacgaagatgctctagcagctatagagagatctcgtcagcaggttacgttgagtgctaacgaggagtttttcgggaatcttagtggtctcgcaaaaacgtttttcggtgagcagtctggactgtacaaggctgcattcgttgctgagaaatcattcgctattgccaaggccctgatcaatgttccaaaaactgcatctgatgcctattcagctatggctggtatcccgattgttggtcctgccttaggcattgcagcggcagccgccgccgtgaccgcacaactcgcacaagttgcgtctatccgtggagtgaatctttcgggacaggcccatgatggaatcatgtccgtaccagaggatggaacatggaatctgaaaaagggtgagcgtgtaacaacagctgagacaagtgcaaagctagaccggacgcttgatgacgtacaacgtaatcaggtaagtggaggggccccaaccgttaacttgattgaggatcgtagccgggcagggcaggttaatactcgccgccaggacgaccaatacatcatcgacgttgttgtggccgacctattcggcgatggccgtacatctaaggctatcggtagttcgttcggcatgcgcaggagcggaacatga

SEQ ID NO: 350949 - DNA, 615 bp, Pseudomonas aeruginosa
atgaccgcaagtttgccgaatgggctgaccgactgcctgctctggtctgaagagcttggcatgggcttccacccgcgcccgccgatggactatagcgggccgtatttcgagaagtatcaggcgcttgacgcaacgccaatgggaactgcactgaccacggcgcgcgtagacatggtgcggcgtcatttcgatggtgaagtgctcgatgtaggcattggtggtggacgattcgtcgtcgagtccggcggtaaggggttcgacgtgaacgaagaggctgtgcagtggctgaagatccgtaacgcatatgctgatccgtacaagggcgtggccgccatcacatgctgggatagcctggagcatgttcccgatcccgaggccctagttcgctctgtcggcgagtgggtattcgtctccatgcccgtctacaaggaccagaccgattgcctgaagtcgaagcacttcaaacctggtgaacacctgcactactggagcgttcggggtctagtcgggtggtttgcaaagatgaatttcggctgtgtcgagatcaacgagcgagagtcagaactcggtcgagagggtatcaccagctttgcgttccggagattccatggctga

SEQ ID NO: 350950 - DNA, 1044 bp, Pseudomonas aeruginosa
gtgccctcactgcgtgagcttgaggcccaggcaaaggccttggccccgatcatgaccggaatcgtggccggtgtgcgcgacgagctgcgcaaggagttcgccagtcagttgcagtcgcgtgacgaccgcatcgccgatcttcagaaagccctggacgagcgtccagaccttgaagcaatcgccaagcacgctgccgcgctgatcccagagccgaaggacggcgagccaggacgcgatgcgaacatggatgcgctcaaggagtatctggccgaactggtgaaggccatcccggcgccggcagatgggaaaagcgttaccgtcgatgacgtggcgccgctgattcggcaagaggtggccaaggcaatgtcagaggttccgcctgcgaaggacggcgagtccgtcactgttgatgatgtgcgcccggttctggccgaactggtcagcaaggctgtggccgatctgccgcagccgcagccggggaaagacgccgatatggatgcgctgcgttcccacctggacggactggtcaagtcgctggagctgccgaaggcgccgagcattgaagaggtgtcggccgcctttgagcgccgcttctctgacctatccctatcctgggagcgccaggcgcgcgatacgttcgaaaaggccgccgaccgcatgcctattccgaagaatggcgagaatggccgcgatgcgctgccgcttgactctttcgatatggccattggcgaagacggccgaaccatcaccgtcaagctgcaggctggcgaaaccgtgatcgagaagtcgatcaggctgcgggcgatcatcgaccgcggcgtgttcagcgccgagaagtcctatgagcagggcgacggcaccacctatggcggatgctactggatcgcgcagaaggacgcacctgagggcgttcctggcggctccagcgactggcgcctggcggtgaagaaaggtcgcgacggtaaggatctgcgtgacagtgcgtcgaagcatgacccgcgtaaaggcgtgaagattcgcaaggacgaggatgacgacaaatga

SEQ ID NO: 350951 - DNA, 303 bp, Pseudomonas aeruginosa
atgagtgatcttccacgttgtagccacgggaaaacgattcttgaaagatgccgagactgcgagcggcgagatgcggttgaaattccttcggcactcaataagcaggagggcggcgcacactacaaagaacagccaatccagcccgttcaatacatccatgccaacggaatcggctacctcgaagggaacgtgatcaagtacgtctcccggtggaagaagaagaatggaatcgaagacctgaagaaagccaagcactacatagagcttcttatcgaactcgaatcccagcaggagagcgtctga

SEQ ID NO: 350952 - DNA, 228 bp, Pseudomonas aeruginosa
atgaaagctttcaccgattacccattcacattcctaggcgatatcgcctatcaggaagcacctatccgcaccgttgaagttcacggatgggatggcgacaagtatgcgcggatcactgttgaaggcgagagcgcatctgtgaaagtcggatatctgtaccagcaaccgggccgctgcggagaagttgctgtgattgacaaatccgatctcaaagttttgaacgactga

SEQ ID NO: 350953 - DNA, 525 bp, Pseudomonas aeruginosa
atgagcattgactggagcacggcaccagagggtgctacgcattgggagccgagctcttatgaattcgctgaaggctggatgcggaaagtcggggataaatggtcctattggctagaaggaagcaaagtgtggggcctatcgggtccagcctgttgtgtatccgcagagcgtgaagcgacattcgaggctagaccgcaagatgcctgggacggcaagggcctgccgccagtgggcatttccgtagagtggctgtccagcgcccatggctggctcggcggccgcgtagtcggacatgacggcagcgtggccgtggtgtcgcacaacgatggctacaccggttgccatccgcacgaggtgcgcccgatgccaacccccgagcagatcgccgccgaggagcgggagaaggccatcagcgagatgttagatctctacatcaacaacggcgcctactggccgatgacgagtaaacagttctgcgaaatcctgtttgacgccggctaccgccgccaggagtcatccacatga

SEQ ID NO: 350954 - DNA, 303 bp, Pseudomonas aeruginosa
atgccatttaaatcctatccgcttgaggtacagagcgtcggcagcgacgcctacatcgcaatgagcaagggacaccacgacctcgaagtgttcatggccgaggccgtcaaggagtgcccgggtcggtaccttggcggcccgcagcacaagtggtgcaagacggtgccggaccgctcgggcgagtttgcacatcggtatgtgttcgtcgaggaaggcacgccaggcgcatggccggcgacctactgctgggaattcggcgaggactggaaacgctggaatgggattggcgagcagcaggcatag

SEQ ID NO: 350955 - DNA, 306 bp, Pseudomonas aeruginosa
gtgcctgacatgagagaagagtttgaagcgtgggcttccagtcatttcgttgacgtaggaagcggcaatccgctcaagaaaggacctaacggtcactatggcttctatgtcgtggcaacggcatggaaagcctggcaagccagccgcgcggctctgaaggtggagttgccggacgatgggatcgaggactgttggcgggactggcagaactcatgccgagacaccttcgataccggttactgctatgcaactgaccggatcactaaagtcctccaacaagccggaatcgaggttaaggatgactga

SEQ ID NO: 350956 - DNA, 195 bp, Pseudomonas aeruginosa
atgactgaccaatacctgagacctgatcaaatgatagagcctggctactactggtggttgccagagtacctgagcgccaatccagagaagcaagagaactggcagatcatcagttggcatccggcgaacactgcgcgcgtgcgcgtgggaatattcgtcggaccgctgattccgccaactgagatcaagccatga

SEQ ID NO: 350957 - DNA, 264 bp, Pseudomonas aeruginosa
atggcagatgcagagttcctttgtgcgactgatcctaacaccatcctttccctactgaatgagatcgctgagaacgattcggtggttgctgtttggaggggccggacgcggcgcgctgaagacgagatcgacaggatcaaggcggagaacgatgcgctgcggggagcgctacaggccgtagtggatgatccaacctggcgcagtaacgacaacaccctgtggccgaagatcatcaaggcaatggacaaaggaaccaccaaatga

SEQ ID NO: 350958 - DNA, 1077 bp, Pseudomonas aeruginosa
atgcctatccgattcaagcccggccgctcgacccggccggccgtccaagacgacttcttcattcccgagctctgcgaagccgaagccctgttcaccctggtgctgctggcggagctgctggtgctggtgctggtgctggcggaaccgatgacgccgagcttcaactgggtgcgcctggccctggcgtcgctgttcgtgcagtggatcgtactgctctcggcggcgctgttctgccgcctgcggccattgctcgcgcgcctgccggtggcgctggcggggagtgcctgctgcctgttggtggtggccctcaccctgggctgcacggcggtcgccgagcactatcagctgggcggagaactgacgcgtgccggcgaggtcaatctgtatctgcggcacgcgctgatcgcgctgatcatgtccgccctggtgctgcgctacttttacctgcagagccagtggcgccggcagcagcaggccgagttgcaggcgcgcctggaatcgctgcaggcgcggattcgcccgcacttcctgttcaacagcctgaacagcatcgccagcctgatcgagctggacccgctgaaggccgagcatgcggtgctggacctgtccgacctgttccgggccagcctggcgaagcccggcactttagtttcctgggaggaggaactggcgctggcaaggcgctatctttccattgagcagtatcgtcttggcgatcgcctgcaactggactggcaggtgcacggggtgccggccaacctgccgatcccccaactgaccttgcagccgctgctggaaaatgcgcttatctatggcatccagccgcgggtcgaaggtggcctggtgcaggtcgaggcggtttatcgtgaaggagtgttccagctatgtgtgagcaacccctacgacgaggcgctcgagtcgcccccgtcgaaaggcacgcgacaggcgttacacaatatcgatgcacgacttggggcacttttcgggcctaaagcgagtctcagcgtcgagcgccgtgacggacggcactacacctgtctacgctatccatgtgcgcgactcatgcaggaagcctga

SEQ ID NO: 350959 - DNA, 900 bp, Pseudomonas aeruginosa
atggctaagaaatacgcccatataaaaaatccactaacggtgattgctatatttgcaacgtttgttgagcttggagggacaattgttctgccgaatttggaaggggaggttcaagagcggtacgtctggttcttgatgggttttcccgtgctcttggtgtggcttttctttcgcgtcctatggcataagcatgaagttttatatgctcctagagattatcgtgacgataatacatttctttctgcgcgcggaatcgttccagtctcccaggacttggctctcgataagctcatagaggaggtagacgaagtccgcgcagatacagacagcgagccagttgaagatacctcatcaggtgggctagagactgatatccctacgcccaagattgactgcggcagcagcacgcctactgataacggtgttcagcagcggcctcagcttgatacgactgagcaggaggcagggcatgaacttcaagcggaatttaagcgggcggttcaatttagatacaagcaagtaaacgacgcgtttgaccttctgtctagagagaagaaaaccctgtttcaacgtggtgtgtcgctagacagtagttcatatgtttttagtggtgcgtcaattacagccaaagaaactctcttggttgaggcgtttactcctttacaaataatgaataggaaaaatctcaagaaggtcaaggacgtagttaggcagtattttgttaattaccatcatggtagtgacgaggttcgattcaagtttattgtcttggtgattgattcgggtcgcgcggcgttgctggataagtgcataaccattcttaagcaggaactctgggattatgatgtgcctaatgaggtatatgttgtaaataacactaagtctattgtcaaaatttaa

SEQ ID NO: 350960 - DNA, 276 bp, Pseudomonas aeruginosa
atggcaactgaacagattctggacattgaccgcaacccgctggaagtcggcgccatgtactgctgcgtcaacctgatgctggccgctgacggccgggaaatctgccgcgactacggcgcgcttgttcgctacgtcggcgtcacttctggcgagtacaagcgccacgtcttcgccgatgcggacacctgggaagaaacccgcgtgtacgccgaccaactgctgaagcagcaggcgccggcaatcgatccagcaacccaaggctgggccgacctataa

SEQ ID NO: 350961 - DNA, 312 bp, Pseudomonas aeruginosa
atggggttcgcaatcatttgcgacgcccgcgctggcgaaggcttagggatcgatacgcttgcactggtggatcgccgcaagacccgcagcctatggtggaccagtgatgactggtcaatcgccatcaactaccagaagcgcgatgcggctgagtttgccgccaagcgcctggagaaaaaccgcgcgcgcgttgttccgttcgaacaggccttgcgcacgctccaagcacaggcaagagccatccgtgaggccggggatgatgactggggccacccattcgaatctggcttcggcggccacggccagtcctga

SEQ ID NO: 350962 - DNA, 1860 bp, Pseudomonas aeruginosa
atggaacgacctaacaaggcgctagctaagcaccaaggcctgtggcgagtagatggcataggcccagttgagaaaaacgctcgcttaggcgcgagaatcacagtctgcttttccggcgtaacagaagattgtctgaataaaccttatctttcgtcctctttgaacggccagactcttaatctgaaggtacatacctcatggatccacaaatttaaagttggatcaatatggagaaatggcctttcggcagttcagccaggcgaaatggagaaaacagtcaccatcgatgttgaccgagccaaatctatacctttgacacactccgtcaatttggacggtcaatgggcagatgaactactaccaaatttcgatattggtgagaatcgaaattctctagcatcgtcccaatattcgatagtgcctgtcttaaacgactcacatacgaaatggctagtaatccccgaatcagaactcctgcgcttttacacgggtgcctcctcaagaatattatcaagtgctctacaggggggcattaatgactacgtagactggagcaggtgcggcatcgaaaacggggtacctctgctccatataaaacaagatataaaccgacaggagtctgctcttctagcacgagcgcacatctcagaacgagctaaagaagccctgtattatcctcataaggagctagccttaaccaaccagcataattcaacaaccaatattgagcgcccattggttttgaaaggaatttttccattcaccggcacgactcagcttgccgtatccggaaaaagaatgctgctaagcaacaaaaataatgatccgcagtgggctatcttcgcaatggaaataaatcactgctcaaaggaaagggaattctcgaaaataataatagttaaggacgagggattccccgcagcatcaaaaaggtctgaccctgtagcagatgctatacctcaacgctttagagcgatcatggacgatgatgatgaagaagaagccttcgatgacctaccggcagaccagcggctcggtcgcttggtcgtactcagctataccaatcaatttagtgcattcgaaggcctaacactcgaacatcgacggccacaagaagaatatagaaacaatcttccaaacacaccaattgatatagcagttaaagccctaacccttgaagacggcagctattccaaggatgcccaaggcaatttaggggtgagccttttccaaagccaagactaccaaatagatcgtgaattacagctgtttatagagatgctagcagagctacgcttagaaacagcacacatgggctggaaaatcagaaccagaaaaatagatggcgccattagttacaaccatgaagatctaatagctagcttccctgaaaaaattggcaaaaagcgcacatggcacaaaattaccgactcagaaggcaatgaacgccccagaaaggtggtatggactgaaatcgcaacagatcgagatcaaaaatttctctatcttttcgaaatggaactaaaaccaggcgagtcaggacaatgtactctattactacaccaatcaaattttctaaaaatggatgagcagactttcagagagctattatttttgactgcaattcagaaccgctggccagcatcagacaataagtggacgaagcaatcacatcaatatcgtgcagataaccttttcacaaaagtgaacatgtaccgcataaggcatccatcgcttaccaaatcaaacgttactgaaaaaccctcagcaagcaccccttcgaatataagcccgacggagtgggccaatataattcttgagcggatctttaactttattccagcgaccgggagacagtaa

SEQ ID NO: 350963 - DNA, 2259 bp, Pseudomonas aeruginosa
atgtctgcagaaatgaaagctgctccacccagtccacacgtcaacttagtctgcattgagatcaatcgattccgccgactagggaacgtgcaagtcagcattgatcccacgaccacgattctggtaggtgctaacaacagcggtaagacatcaatcctcctagctataagaaagtttctagctgacagtccggcctttggagcattcgacctaagcgtggaccagtggtcgaagctgcgtaaacttggcgaggcgtgggaggagcttgatgagcccccagctatcgatgagacgactgcggccacatgggagcagtatcgacaatcgctgcttgaggcaatgcccactctcgacctctggttcgacgtacaacctggtgcctatcacatcgtgcgcccctttctgccatcacttcagtgggccggcggccctgttggagtacgcttgcgactggagcctgcatccacggttgaagatctgcagcaacttgcttggcgctttcgagaagcccgccaacctgtacgatcactggatgctacggccaggccctggccgatggatattcttgattactggttacggcacccaaacgacctaagccgtattgccctatacaggctggatccggcgaaaggccccttatcacagccacgcccagataaaccgcaggtgctatccaccattgctaagcctcttgatcgagaaaccctcgcaccattgattcgtgtggatttcatagccgcacaacgggggttaggctccgaagaggctgacggccgacctggtactgatccacaccgcgtgggcctgttttcaaatcaaatgttgcggtacgcacggcgtcatcttggcagctcaggtccggggccaggccaccatccagatctagttctcgctgttgcaaaggcgcaaggggagctcgatgagcaaatcagatccgcacttgaaccctcgatcaaggacgtgcgtaagctcggctatcccgggttgcatgacccccaagaaattcatttccgtacaaggattcaaacaggagatctgctcaatcacagcacggccgttcagtaccgtctagatgaccgaccagactctgaataccttccagaacatgcaatagggcttggttaccagaatttgcaatctctgagctaccagctggtttccttccgtgaaaatcggctgaatccaaccaagggggctcctgccgcggtgcacctggttctagtagaagaaccagaggcccaccttcatgtgcaggttcaacgaattttccctaagcgtgctcttgaactgatcacctcagatcaagaaaccgatacccacctcgctagccagatccttttcagcactcatgccagccatatggctcatgcggtgagcttcactcggctccgctatgtgcgccgactccgcgcgactacccctagcacgatgccgtcggcagaggtagtgaacctggctgacgttttcgggacggacaacgaaacactggcatttgccgaaagatactttcgagtccagcacaccgacttattgttcgcagatgcagcgatcttcattgagggcactgctgagcggatgctggttcctttcttcatagatcgggatcatgaagtgcttcgcaaccgctatgtctctctcctagaaattggaggcagtcacgcacaccgactcaaacctctcgtagaaaggctgggtattcccacggtagtaatcacagacattgatcctgttcgtgaaacgcagactgctggtggcaaagctacctggaccgctgcacctatcatcgacccagatatgctgaagtctgccaacgacagcctaactaaatggcaccccgccgtttcgagcctgaaggactacgcaaaggttactgacgagcaaaaagtttggaccagtgccaaaggcggtcgagtccgatttgcctggcaggtgcccgtgccatctgacggcccttggccaagctcctttgaggactccctcatcctcaataaccttgaatggttcagggcccaagccgacgcgaccggcccacttggcaggacagtgcgtgaagtcgcaaagcactctgatctagcactcctgaatgaagcccttcacagcatgcttcgagactcgtttaaaaagggggacttcgcggcaacgatatttgaacatctgtcgctgggagctccaataaagtgccctagctatatcttcgacgcacttacatggctcgattccgagttgaaacctgtgcccctaggagagcagcaatga

SEQ ID NO: 350964 - DNA, 1950 bp, Pseudomonas aeruginosa
atgacggcagcgggaaacgatcgtgacgccggtgtggtagaggagatcaccggttacctagcctcaacgcctccacagagcttcttcctctttgctggagcgggctcggggaaaacgcgaactctcgtagagacgctacgccgcttaactggcattgagtcgcacgaggcaggttctaagttcgctgcaggactgcgatcgcgagggcaggccatccgggttatcacctacacacgtaatgcggtgaccgtgatcaacgggcgccttggtgaaaacgatctggcagcggtatccactattcacagcttttgctgggatctaatagctgggtttgacagcgatattcgcgatgcactgctcgctttgaacacccaagagcttgaggaggtaaaacaaaacgcaaacgcaaggaagaaaggtccaacagctaaggacaatcagctgattgaagatttagaagcaaaagcacaaacgatccaaaacattcctcgtttcatctatcaccctgaccgcaatacctatggtgatggggccttacagcatgctcaggttgtatccattacagcctggttacttgaagagcgcccaacgctcagcagagtgcttactgatcgccaccctgtcatcttgattgatgagtctcaggacaccatgaagaagatgctcggtgccttgatgagcgtcgctcaggacgaccctttaaaactggctcttggatttctcggcgatcaccgccaacgaatctaccttgatggccatcaggacttgcctgggcttatccccgccgaatgggctcgcccagcgctaaaaatgaatcatcgcagccagaagagggtcgtcgacctgatcaaccatatctggaaagcagagctagaggggcggacgcaggccgcaaccggagttcagcaacactcgcgtacggagaagacaggcgggacggtacgcatctttatcggtgacacgagcttgcctactgatgagaaaatacggcgggagggtctatgtgctcgcgagatggctgtggcctcgggacgcaacgagtggctcaatccaaaagagggatatcaggtcctagcgcttgagcacaggcttgctgcgaggcgcggcggcttctctgatgtctacgatgctctggtcctgatagatccaaactcagcacgtccccaaggaagcggtgataacgcaggcccctcggccgtgcagatgctactgcgtgaagcatctgcgttggctgcctgttttggagagcagtgcgaagtcgatgatttctctgtcatcgagatcctgcagcgctatgaccgactacccagcctgtcgacagatgatgcagctcggaaggagcatctcgcggaactaaatctggcgatcagagagttcgcagacttatgctccaaaccaggtgccacagtacgccaaatcctcgaaccaattgtccgatcaaggctattcaaggccgatgagcgtctcctcaaagcttttcaagaccttgagccagtacccgaagctcctgcacgctcgtctgatgagtccccagaagatcggaaacgacgtggctgggatcagttgttcaatgcgcgctggtctgaactaggtcgttacaggacttacctggatggacgatccaacttatccactcaccaagtagtcaaaggatcggagtttgaacatgttttggtcgttatggacgatcaggaggcagaaggaaatctattttcctatgacaaactccttggagcgattccgctgagcagtaacgatctatcaaacgttgctgccaacaaggagacatccattgatcgaactttacgtttgctctacgtcacctgcagccgagcacgtgaaagcctcgcacttgtgctctggtcatcggcacctgaagtagcgtacgaaaagatcgaggctggtggctggttcaatccatctgagatccagaaagcccctgaaacgtaa

SEQ ID NO: 350965 - DNA, 1164 bp, Pseudomonas aeruginosa
atgctgggtaattcagcccttgctcgactgctggctcgagcagagcgagcccgcttgagcggcagtacccgtacaatcagagaatcgttcaagtcgcacgagtccgcttattggaagcaaagtctggatgaacgcgatcagatgcacgctcaaatgcaggcagccagggcaactggagccattgatcttgaatgggctaaacaaggaggaaatgatcgccctttggaggcaatagttctccgagatctcgataagcttgcgcagtatctgggagtcccaactgccggcacttctgtagccaaggccactgacttgctagcaccgtggaagcatttgccacgggtgatggagttgctcagcaactgggggagcctgaaacaggtgagatcacttggtcccgattcggcagctgatttcgtagatgcacttcaagtgctcgatgcggtttccggagctaaggaagaccaggtcctgcgccaactcagcgtccagttgttcagaaactcaaaacgtctcgaagccttgtgcaaacacatcgatattttgaccgccgaagcatccaactcgtcggcacggcactggagtgaggtcttcggctctatagggatatctaaagagccccagccgttcttactttccggtatcggacagctgcggctgattgatgggactgaatgtcccattgtccgcccgttcctaggagtggcgaactcagcgattgctagctatcaaggcaagcccgaatggcttttaacgattgaaaatctgacaacattccatcaagcagcacgagcactcggaaccgatttaaaaggagtggttatttacactggggggatgccctcgccaagctggggaaaggcctacgtacggattctttcgcagcttcccagctctagctgtgtataccactggggagatcatgatgaaggcggtttcaggattgccgcgcgaatagcacagttcgccgcacaactaggcctctcaatcaaaccgtggtcaatggaatcgaatgcttgggaggacagtggccagatggctagcaaggagcagctttattctatggtgagaagcgcaataaaggctggatggcaggatttggccgctgagctgaaaccgatacttttggagcaggaagggcagccattctcacttccctcttag

SEQ ID NO: 350966 - DNA, 3417 bp, Pseudomonas aeruginosa
atgaaaccgcttgaaaccatcaacctggtccagttctttctttacgaagcgaacgatatcgaaacaggcccaaatacggcatttctcggccctaacgggactgggaagtctgcactacttgatgcaatccaggtcgtcatgctggctgccgatggcaacagaacccacttcaacgcctctagcgaggggaagcacaattccagaaccctgcgtgattactgtctgggctcctacatccctggaggaaacacgtacgctaggacatccgcgaatacatacgtagggcttgttttccgcgatagcgagaccgggattcctttcactgcgggtgtgtccataagggcttatttggatgagcccaaagctgaagtgaatggatatttcattcttcccggcgtagctatgaccgctaagcagtaccttcagacagaaggtgctcacgaaacggtgcttccatggcgcgccttccagcacacggcggctgagctgtgccggcgtgaatctacgaaccctgttttttcagcccagaacccaagtgatttcctacggcgtcttttgatcgaccacctggccggtcccggagacaaaccaaatccccagtcccttcgcgcagccttctctcgctcactcaaactgaacgagcgaatcgttaacctggatgcgactctgcgtcagcatctgatagagccgatgcctacaggggtgaagcaattcagagcaaggttggacgatgttcgggatctacgcgatctcatcgcacgcctgaaagttcgcattgatcgagcaactgaagtcgctgaagagtacgcaatagttaaacgcgaacggatatctgaagcgaacctcatggttctcaagcacacgtatgcgaccgagcgtctaggtgagactgttgacgccggcgaagccgaagctgaaaaactggatgagcagttggctactgcagggatagaactgtccagagctgcggcgaacatgacgttggcaactgatgccagagatcgcgcgatcgcgaatcttcacagcgaccccgcttaccaggagcaagcagaccgcgctgaaacgctgagacggctaagtgatgagctgcgagtgaagcagaagcagctcgagtctgatctcaaatcgatgatgaccgcgctcagctctgtcagcggtttaccaggcatgagtgcccatcaagagcatctcgaaagtgcggcaaaccatgctctctcgttagaacaaatgcgcctcgcccaagagattcctcctgcagtagccatccaggctgcagcgcaagcgatgggacgggcttatggagtcatgcggcgcgagaccgctcaggcagaaagcgaagaagctctggcgaaagagaggctgcgtagtgcgcgtcttgctcaagaacgagcgggaagaggcttgtcctcattgaatgaatcgaccacccgcttaatgggcgtgctttctgacgccggcattaacgcagtgcccatttgcgatctggtcacggtctccgatgccaactggcaacctgctattgaaggttggctaggccggcatgccgaagcgctactcgtcccagagaaccaagagctagatgcaattagggtctatcgaggcaaagccggtagcaacatttatggggcgaagctggcacttcccagccgggtccgtgaatggaaagccaaaggcgatgatcaatacgcagcgcaactgattcagggccaaaaccttgatgctgtccggtatctgcagggcgagcttggccgtactgtgctagcagaaactgacgaccagcttcgcactggagtcaaagcaatttccaaggaaggcatggtcagctcgggaggaggaatagagcgccgacgtcttccagggaccagtgaactacgccttgggcggaaagacagtggtgcgacacgccagcgagctgagattgaactccaatcggccatagctcagttcggagctgcatctgagatcgccaaaaaccttgtttcaggtctgcaaaagctggcgccattttcagacccggaagcccttcggacggacatcgagggccagtttgtctcggtaactcaaaccgctagctcagtggcagacctccaagcagctctggaaaggacgctaaccggcgccctggatgagcttaacgcgctgaaaaaacaagcagatgagaatgctgttgcagcccataagcaagaattgcactggaccactgagactactcgcctaagcgagaagaagcagaaccttggcaagcaactcatcgcgctaaaagaccagcttgaaatcgagttggtacaagagcgcgagagccgccttgatcctttctacagtgcgagtgaagtagagcgccatcgcacccggctggatgaaaaacacggagacaagtggaacgacaagctcacgcatctcgataactcgatccagcgatcacgcgctacggcgtccaattcagatcgcgaggcctggaagctattcgccaatttcatcagcgactacaacctcaagaacaacgacgtccaaagtcaggattggctgcgcgcgtatgaatttattctggccgagcgtaagcgcattcaagactttgagttggttgagcaagagcaccgagccgaagaggcctacctcgcggccgtgaaggtgtttcgatcagacgtagctcaatcgttgctaaccggattcgatcaaattgaagagcaaatcaccggattgaccgcggtgctcggctccgcgccgcctttcacgaacgatgaacgatacgagttcaagtacaaggtcgtcgatgagcaccgaaatcttcatgacttccttcgccgcgttcgtacgcacggcgcagatgacgatctctttggcggtccaggcgagatcccggaagagttccgcttgctggtagagggtgacagctctgcattgctagaagagacaagcccacttaacgatcaccgtcgtttcttcacctacgacgtcgagattttccaaggcgacaagtctgttggcatgcttagcaatcgctttggctcagcatccggcggcgagcatcgcacccctgtttatctcatttttggcgcagctcttgccgctgcttatggtcgttccaagggaagtagcggtggcggcggaatcatgctgctggatgaagcattcgaaaagatggacccccagaacatcaaagctacggttcagtttctcaatagccttggtctgcagctcatcatggctggcccagagtcagaccagggcaagctttcgtccttcttaagcatttactacgacatggcgcggtacggtactcgcaccatccagatgaagaagaacgttgtgcttaatcgagcgcaggagctacttcaaagcgacaattacctgctcaacccagatatcttgactcaagaggtagcacgcttaaccgaggagcagagaaatgctgggtaa

SEQ ID NO: 350967 - DNA, 606 bp, Pseudomonas aeruginosa
atgacagtgaattgggaaaagctggcagagcagacagagggaatgtatgtcagcgctgacttcgagaaagcgggataccggctcatggtgcagcaggtcttgtacgcgagcgaccgctttagccgcggctcataccatctgatcgtcaaatatttcccggcttaccgggaggcattttcaaattttggtatggagatccagcacaaccctcatcactcctacgtggtcgctacccctaaccacaacgtcgcggaaaaaatgctcatggaagagacgcgacttgcgctcgtgcttcgtcgcctctacgacgatcgcatgcagcttgctgagatcagtgatggggaggcggtcatttctttagaggagctggaacgggcctataaagaatggctcagtcgcgacctcccggaacgaagtgcgttgcgtgaactcgtcaatgcgctcaagcgatacggcttgctcaaggtgccagaggctgaggatgggcaacctttcaagatcgtgattcgcccaggaattgtggaactgcttggagagacagcgctgcatcaactagcggcccatgccccggagctggaagaggtgattgatcatgaaaccgcttga

SEQ ID NO: 350968 - DNA, 1407 bp, Pseudomonas aeruginosa
atggaagctataacaccacctctgttcgagcgattgccaaaggacttgttccgacctctggcggctgaaaacaatcaccgctactgggacgttctgtgcagactcatcgcagaaatgtggggtgaaggtgcccgatctcctggggaggaagcccccaaagcggccgtcattcggactatcgaaacattcctcgttgctgatgatccatgggatgagttgggaagcccaatcaacattcgtgcccatggcatttatcaggtgctactcacggcaggttggttaagccagcgccggcgcggtgtagttgagcaagtgaccttgaaacctgtcatcgcacgcttctttactgttctcgcggagtttgctcacagcaaacccgagtttctagccggcaaggttcgctcgatcttcgtctcactacgcgcggtggataccgaaaacgccatagagctctatcacgaggcggccacgcaagcgaaacggtgtatggctcacatcgccaacaccagttgccgcattcaggaccttatggatgtcctggtcaccaaaaccaccgcaagtgaatttgtccggggatattttgaggagtacatcgagaagctcttcatcgctgactacagcgacttccgaaccaacaatcatcctctacagtttcgctcacaaatcatcggcctggtgctgcagtttcagcacgatgcagacaagcgcgcggcgctcatcaattggtacctagatggcggtggcgacctcatacgagcagaagcactgtatgagcgagacaccgccttactccttcgattgcgagatgtggaaaagcatctgcagcgcctggacgaagagattcgtgatgcccaccaacgggctatggcctatttcgaatacaaactcagatcgcccggcaatttcgacaagctgataagtcgggccctgagtgccgtgggaacaatggagcagaaccatccggcacttccagaggtgtcaggttttttccacgcgtctgaatttggtctggccagacccagggctacacagcgaccgcacgagccaacgcctgtcgaaccttatgtaccgacgatcgaagaacttgcgatggaggccctgcggcagcgaatgaatgccgagcggaacgtcacgccaaccaagctagccaactatgtcgctgcccatttagggcaggaaacggaagtcatatccgatgacctcaaaatcgagtcaatcagcgacctgtgctgctaccagcgcctactcctaatcgcgtcgcgtgatagctgcccgcccgcaaaaagaacaagcgacccccatcttcagatggttccgggaatgcatgtcgtgtttgtgcctgatgcagaaaccaaaaacgactatctggaacatcaacaattcgtgatctatgcgaggaagccatga

SEQ ID NO: 350969 - DNA, 858 bp, Pseudomonas aeruginosa
atgcctcgacgcaattctgctccgaaagaaagatatgaagcgatcgagatactgcttctctgggaggggcgagtctcaaggtctcgcttgcttgatctatttgatattcacgagacactggccagtcgggacattgcgggattccgtgagcaatatccggaggcctgcgagccagagatgtcgactaagagctacgtaagctcgcggaacctgaagcccgcgctaacgcttggagttttctccgagtaccagcgtttagtgggagcgcttggaagcctaaatttggcctcgacaggtgtgcccatcgaaagcacacaactcgatgccaccgcgattcgatacacgcttttctctcaaatacatcgcgccatgcggcttggccactgcgttcggatcgtttaccgctcaatgagcaccccagagccgcatgagcgcgtgattcgcccccactcatttattcaggctgggccacgctggcaccttcgagcgtattgcgcaaaagctgcagcattccgagatatgaaccttggacggatctccgcagttagcccagaaagcaatagcagcctcccaggagcagatgaagacttggagtggcagcagacagtgtcggtacgtttaatcccacacgaaggtctatccgccgagcaggctcgcatggtgagggaggaatacatgggaggaacggctgcggttgtgtttagcgtacgggcaccgttagtccaatacgtcatccagtcctttagagccgcggttgatccagtccgcgagaaggcgccggaacatcttttgatggtgcagcatcccgaaacgctgcctcagagctcacgctggctacctcaggaacgcaatgcctga

SEQ ID NO: 350970 - DNA, 279 bp, Pseudomonas aeruginosa
atggcggtttacgtggattcggaagagatcctatggcgcggcaaactctggtgccacttggcagcggacaacttggatgagctgcatgcgttcgccagcaagctgggccttcgtagaggctggtttcaatccaagggctacccgcactacgatgtgaccgtttcaatgcgggagcgcgcactcaaaatgggcgcaatcgatgcagaccgagaaactatcgttgatcgctgcaagcagctgaggatggagcaacgacagcagttgttagcgctagcctga

SEQ ID NO: 350971 - DNA, 1218 bp, Pseudomonas aeruginosa
atggcaccagcacctcaaccgcgcccggtggcgctttccgtcgccaagtacatgctgaaagctcgggagagcatgcgcttcgaggatgaccctgatcgccttcaatacatccgtttcggatatttcggcgaaataggaggccttctctcctccgtaaaaaaagccggccgcgaccgactgcaagccgcacagaacaatttggcagcagaagaactaggcgacgccttatggtatttgactatcgcggcccatcttctgggcatccctgccgacgcgctgggagagcagtgcatcctagtcctacgcgcggagttcggcgaaagcaaaaaagcacctgcaccacctatcacgttccgtcagatagacggccttatcgaaacacagcgggatgaggatacaatcccccgcccaatccaacttgggaagcttgcgcttagtgcggggttgctggctgagatgtctcatatcggcctggaagccatggcagcgccgaagcgcgaggcctatttcgggcagctgttatcggagctcgccaaaacctgctccagcttcaacctgactctcgaagacgttgcgctagggaacctggagaaaacagccagccgttggccaagcgatcagatacgcgagttcccgctattcgatgaaggttttccggagcacgagcagttcgagcgtgaattcactattgaattcatcgagcgcggcgaaggacaaaacaggcatgtggtgcagcgcctgaacggcgtctacattggcgaccggctcacagacaacagcaacgagcctgacgattatcgcttccacgatgtcttccatttggcctacgtggcttatctgggttggtctccagtgttgcgaggtctgctgaagcgcaaacggaaatctgatcccactaaggatgagaacgacgatggcgctcgtgcagcgatcatcgaggaaggtattgccacctggattttcgaccacgcaaaaaaacatgattactacgaagggattcaaccaggacgcctcgattacggtctactcaagcagatccagggcatggttcgaggctacgaggttgagcaatgcaagctgtggcagtgggagcttgccattctcgaaggcttcaagatgttccgcgagctacgcacacatcgaggaggctccataacagtcaacatcactgaagggacgctgacctttaagccccctaaagagaccgaaacgaaatga

SEQ ID NO: 350972 - DNA, 672 bp, Pseudomonas aeruginosa
atgacccctacatcctttgtaaaggccctggctgaattcagcctggacaatgtgttcaacccatacgcagacacttgccccgtgcacgaccgcgccggagcagccgcgtcacgtcgcaaaaacctgaaaagctacctgcaggccgtttccgatctgggtgccgacaccatctggatgggtcgggatcttggttatcgcggcggacgacgcacaggtcttgctctcactgacgaataccatttatcagcgatggccctcgtgtatccagggtgcgagtcgcagcaagccacccacggccccgctattgctgaacggactgccgcagagatctgggcgatattgaaggccgtagaggttccaccgctgttgtggaatgtgtttcccttccatcctcatgaagcaggaaatccattcaccaaccgcaagttcagcgccaaagaactggctatggtggatgagctaaacaatgagcttttcaaatggttgaggatcagcaagatcatcgcgatcggccaggacgccgctcaatatgcttcacgcttcggactgccagtggaagccatccgacacccgagctacggcggagtccgggattttcgggccggaatgggaagactctacaaccttcggcctcaggtctcccaagcaagccgccaggcttcacttctgtaa

SEQ ID NO: 350973 - DNA, 801 bp, Pseudomonas aeruginosa
atggcaaaactgatcattgctgaaagtttggggttagcttgggtagctgcggcgcgacatctcgcaggttgcaaaggtcggaaggatcgaaacctgattttagaaatcagcagtcctcagaagctgtccaaaaacgacctgatgatcatcagggcggttgatgctgtgcttcacaagagtcgtaaggacttgagcgtcgagacagttgctagcacgatatttcctaacggtttggctagacgattcgctcgccctgagctttacaagaactacctggaattgttgaccaaaggcaagaagcggagttcgtggggtacctatgctcagcgcatgatgagtcgtccgagccgaagtggtacaggaacgatcaatccactggacgacctgattgagcgtctgcttcagactcataccggtacaaagtaccagtcggcttatgaattgggcgtcagcgatcccgacattgacctggctccccccttggacgggcatgggtatgagctgccagtgttcgatccggctcgtgacgccaagcccctcaatgttccctgcttgagtcatctaagcttcaaactcacggatggtaagcttgatttgaccgcgatctatcggtctcagtggtactgccagcgcgcattgggcaacctggtgggtttgagccagcttcactctttcgtaggcaaagagtccaagtatgaatgcggaacgctcacctgcattgcgacgcacgcatacctggatagggagacattcggcaaagtaggcgttactaatgaccttctggcatcgctaccttgctga

SEQ ID NO: 350974 - DNA, 651 bp, Pseudomonas aeruginosa
gtgatagtcccccaggtgttgctcgacggctatagctcgccggcaaggcctcaaggttgtcgtcctacctgtttggcatttgcgttatcagacttaaatcgtctgggagcccccgctgatttgagtcctgaatttctgtatcgggcggccgcgattttgtcccctggctgggtgccaggtggtggaatcactttcgaggctatgcgagaggcgtcgcgttcagggcagcctgaagaggctgattttccctactgcaccgaggagccttcgctcccaattcctgacctcccctcggggcttcgacactatgggcagtttctgcagtatctatcagtcgatcctaccgatattgcctgctgcatcacggctggacagccgatcggtttgggactgcgggttacgcccgaattcttcaagcctgaaaggggcttagtgtcttttagtgaacaagtgatggcaggactgctacatgcggtcgttgctatcggggttggttatgaagaaagcagcagtgcgccatggttctacgtacgaaacagctggggcccgcagtggggcgtaaatgggcacgcctggatttcaggtgcctatataggcgcacatgctgaatgtgcttttggagtcgagaatggcaaaactgatcattgctga

SEQ ID NO: 350975 - DNA, 1020 bp, Pseudomonas aeruginosa
atgggctaccgcgatattgttttgcgagctgcgcaacgtgcggccgaagtcatcgacgaaaccggtgcaatggagcgcatcgagcaagacggatatacgcgaattgatcctttccagatagcctccgactctggggttctggtcatgttgcgcccaatggaaaaacttctcggggcgtttttgggcgatgagacgcctggaatcttggtcaacgtggaccgccctgcgggtttagttcatatgacgtgtgctcatgaactcggccatttcttcatgggccacggtagtaccgccgacgagaaaatctattacggctccaaaggtgcagtcatcgaacaggaggcggatcagttcggctataaccttctggttccgcgcaagttgatcgtcaagatcatgcagcgcaagcaatggaagaaggaggaactgttccggccaggcattctgtatcaattggcattgcgtatgggggtcagctacgaagctgccgcttggtcactcaaccgacacagcgtcatgagtgtcgatgaagtgcaccagatgttgcgaactaccccggtgatgatcaaaaaatcactactcggcgagcgtttgcttgatgccaggaaggaagtttggttgctcgatagtgatgaccggagctcaatcctagagccgcgtccggatgaccaactagtggtacgcctgcctagccacgcatcttcggggtatctctgggccgccgactctgttgaagagctgattgcggagggcttccacctggagccgctgactgtgccctcgacgtcttcagcgggtaattctttgaccttcggcggccctggcacgatggactatttgctcagtggcggccgtgccgatagtgccgcgccaattggtgtgcacctctttgagcgacccccttgggatgcttccagccccgctatcaacacatacagatcccaagcccagtttgaagcgctgaagaatggattgacgcctcatgcgcgtaagcagctgcttgagggcggactatcgtga

SEQ ID NO: 350976 - DNA, 351 bp, Pseudomonas aeruginosa
atgagtagctcgtcgatggacgatcaagctaggctccgtctggctgagcggctccgggatgctcgggaatatgttgggctatcccaagatgaggtggcccatgcgctagggctttctcgccccgcggttaccaacatagaatcgggaaaccgcaaggttgaggccacggagctgagcaagctggccaagctctatcgcaagtcgatggagtaccttatgaccggccgggaccctatgccgtctggtcccactcagcttgcgtttctagcgagagccgtaaacggactttcgcagccggatattgatgaggtagctcgcttcgccgagtttctcaagcacaagggacagtga

SEQ ID NO: 350977 - DNA, 276 bp, Pseudomonas aeruginosa
atggaaatgaagagcgaaattgaaaaacaccttggccaattctgggacaagcgtgcgctcgatatcgttgaagacccactttctgttgatcaactgggtgcgcccttagaatccgtcatggccgtcgaggcacttgtagatgtcgggaagatgctaaaaatcaaaatcccggttgaggtcgtaatccgcaatggcgggtacgaaaacaaggagcagttcgtcaatctggtcacgtcgggaatcctcaagtatgtgaaggagcagggccatgagtag

SEQ ID NO: 350978 - DNA, 1101 bp, Pseudomonas aeruginosa
atggagaattttttgagccttacagatcaagagatatatgcacttgcccataatgttcttactgacatcacggaaaaactggcagatggcacttataaaaacctgaatggacacttagctttcgcatggtctaccgagaaaaaattcaatgcgtgggctgagtcaaggacgttaggagatggcccacctcagcacaaaatagttctacattatgagctcgcacgcatcctataccgcgacgcagaagcattctgttctttcgcggtagacgagcagacgaaaaacttgataaccaggtcttttgggaataacgcaacagaggcactacccagctgtttcactatcaatgactgcatccacaatatgtttctcgcttcgttaacctgggtttatttccacgagctagggcatctgatgcaagagcatgggagagtaagaaattacggtacagtttcaaaaactagcacgatcgccgagtttgatgcgcatgccgccaatgccctggagggcaggcaggcagcgatatcccatgccacagagttagctgctgactttgaagccacaactcaatgtctcgtagcgtctgtccaacacttcttgaaagggccactggtagacgaaagtgatggggctgaagtttttctcggtaacgtttacttattgacatgcagcctatcttgcattttttatcggtttaatgccgggtcaccagcacgggccgacttccctgtaacaggctcacacccaaatcctatataccggctcgaaattgctgcgccacacatttacgaattcactgaagtcctcttaagagcaaatgaatttgatgcaaacaaaagacacttggttagcatggtaaagcaggctgccgatcttggatcttttttctacaactacactagggccactggtaccgaagaaaccattcacctttttataaaaggcttaccacagcgaccggaattcagatcttactctcaagaaatactaaacacttgggatgaaatacatcccgaaatcctcgcttacaggcactttggcttcaaactagggattatgcatttcactgaagaatatcgaagggtagtttttagcgactga

SEQ ID NO: 350979 - DNA, 1317 bp, Pseudomonas aeruginosa
  misc_feature (626)..(626): n is a, c, g, or t
atggaagagcgaaaaaaaataacgatcgacaagaatgcagtttctcgcgccatccgaaaaccccttgaagcctattacaaggcagtgggcccgaatggttatgacggaagcttcgagcgacctggcaactgggaggaagatgaagagctattcaagtcgattttcaaatcgaagtacgtatctcgccacttggattggctctatgtccttcaaatagtctttgcggtaattgatcatcatccccagctaagtcccgctcagttcgctgaaaaactggaagaaacaattgctgaaactgccggacagcgcgactatctagcgatcgtcccattggccttcagaacgccatttggctttccgcacttaagaaagccttctcttggtcggcgagtgatcttgggtgaattcaccttttctccgccagcaccctctgtcaaatccatcaacaagataatcgtcaaccacgaattcccccctataagtgagtctgacttcgtgcacgcaacacggacgtcgcacgatgcgttttctcgtgaaatattggtgaccttcgatgctcatggggatgaggatcggttgcgcttcagcgtagagtcaaagttcagagcgctgtgtagactaatcgnggttttcgccaaccttttcgcaaacactcgcaccggcttcggtaatactagggcggttaatcatttcttccttctcagtaaaaccacaggtgagcttagaagatttccgaccataaaatcattatcattcgactttgagttaagcactgaactattgagctcattaaaacgacccgagttcaattttttcttcaccaatctaatttcatcgcaagagagcatgtatgcccgtatgaggaatgctataaaattcttttcgatggcgttcaatgcagacgacaaggttactagctttctattctacgtaatatctattgaagctatattttcgagagacaagagtgctccaattaaggcaacactcgcggattttgcatctttgctgtgctttccatctgagcaacgcctcagcgcgcatcgcatgatccgcgaatcatacgatttgaggtcttcgatagttcactcgggcgtctcgtctgttgacaagaagaatgtcgaagtggcgaggtcaattgctgctcgtgcaatctactgcagcatgtttttgtgcaaagatctaaaagaggggcaaggaaagcttgaggacaggtttttcgaccacttgcgcaatcgaaaattaggcgtggccaaagctattgttccacatgccatgcgctcttttcctgagattaacgacgacgatgatgaatga

SEQ ID NO: 350980 - DNA, 714 bp, Pseudomonas aeruginosa
atgtgcagggttccactcgacctcacctcaatggtagtcgaccatgttttgccagagcaccttctcgaaagtccctcactatttaagactgccaagttgaagcttggcctcccttcttcgttcaacctaaactcgttcgataattggatgccggcatgcagctcatgcaatggaaaaaagtcagcgctccaatttgagccttcccttcttatccaagtagaactgcaaaatctcgcagagaaggcagacaaagctcgcctgctttgcgacgcagccgttagcaccaggcaggtgtccatcgctctccgcgtgctggaacaagcacaggagagcggcttgagttttgaggggacgacacgagagcgattgttggcccttctgcgatttgcctcagcgcgcgagcttgtacccagtggacaaccgctacggttgacgcactcatttcaactagtgacgaccacggtagaggatgcaactcgctggggagcgacccactggtctatgccccctcgcgacctgggagaaccagcgttggttgtgctatttcaagcggagccaggcgagtgcgttcagtgtggtctgatccagcaggtctttcagccgatcaatcaggaaggtggaggtgatccgatctgcagggtatgcctatcgaacctagattggatggatcctgtaaccttgggaggcttgcccactcatgcctcccaagcatga

SEQ ID NO: 350981 - DNA, 1101 bp, Pseudomonas aeruginosa
atggtacgtttggcttttgccaatggttatcccttacacacgttctatgcttgcctacttggttatcgcggtgcgatctggaatagagatattgatcgtcatcctacccctgcactgttagacatattggcacataaaaccgggcagacgaagatagctttacatacgatgactcttgcagcttatgaagggattgtttttgaaaatttgccgtatatagggaatgcggcttggatacttccagtgggtgttttccatcgcacccgccggcttgcggggcttcagttttgtccacgatgtttagaagaggactctactccatattatcgtaagtcttggcgtctggcactttatgcaatttgcgagcgccacttgtgcgttatgcagggaaattgtccgcaatgtaaatccactattgctttttatcgtcatggaattgggcgtgggaaggaaatccctatacaggctttacgtctctgccatgagtgcggctttgatttaagtcaggccccaagctttataccgaactggccagatattagatctttaaataattataaaaaagtattgggtcgatttgaatgcgggtgcttgccattcgagttcaatacaaccactttcggtatcccatattttcatggagtacgggtgcttgttagtgtgatacatggtcggaatgggctgcggcttcggcaagtgttatcaaaagctattggtgttgatttctgccaaaatccttcaagtgcggggctagattttgaatacttaacagctgctgagcggttgaatttattgctggcggtaatttggttgatggaggggtggccaacccgttttattgctatgtgcgctgaagcgagtttcactcgctcgcggttagcagaggaagtcagttctttgcctttctggctcgctcaggttgctgatgactatctggacaaccgattaattttgcctagcaggcaggaggtgatatctgcctgtttatacttaatatctgccgggcatactgtgtcaccgcaggcgttgggctgcttgctaggaatttccaaagatggcgcaaaagctgcgtacaaacagtggcaagcatctacttcctag

SEQ ID NO: 350982 - DNA, 891 bp, Pseudomonas aeruginosa
gtgtcgggctacgagcatcttcaccaagtaacagccgaaaatattgagcagcctcccgaggcccgcattcagtggctaaaaaaaactcgctggataggttatccgcgggctcaagaaattatgggtaagctagaggatttggtcagccaccctcgagaagagcgtatgccaaatatgctgctgatcggtggtactaataatgggaaaactcgactaattcgaaattttgctcagcggcatatggcagacgaaaacgttggtggggagcatatcattgcgcctgtcctttatacccaagctcctccagcgcccaatgaagctggtttttactcggaaattctgaacacactatttgagagggtgccaacctcttcaactgacgctaaaagagctcgtgttattcaggttcttcgcggagtgaaattgaaagttcttatagttgatgagcttcataatatattggccgggtcctcggtcaagcagcagcaattcttaaatatgatcaagtatcttggtaacgagctgcagatttcaattgttggctgcggaacaggcgacttattgcgtgctgtcagcattgatcctcagattcaaaatcgatttgtccccgaaattttgccgaagtggcagttgaataaggagtacaggcagttactcatgtcatttgagcgcgtcttgcctctgcgaaaaccatcggcgctacatgagccacaacttgctgccaagattttggctatgagtgaaggaaccattggtgaactctctgcgttgctaaatttggcatctattcacgcaatacgtggggggcaagagcacataacggcggatgttctaaatgcttgcagttacatttcgccgagcgaccgtaccaagcaggctgctcgggtttaa

SEQ ID NO: 350983 - DNA, 1875 bp, Pseudomonas aeruginosa
atgaaaacaatccgtccaggccagttggtctattggcgaaaccagccggcagttgtgcttgagctgaaggggttttccgatgccattttgcgtacggtggatgatgggcgaactgaggttgttagtgtcgccgatgtcacaatggggcctacctcggcggagcctcctcaaagactgcatctgattgcaaaagacaaggaatgggataaggccgttgagcgatatgagcttattcgtccacttttaagcttggcaaaccgcgagacacatgatgtgcagcgagtggctgatgaagcggggaagagcttgaccacggtctaccgctggctcaatcgctttgaagaaaccggattagtttcgtctctgttgaggacacctcgctcggataaaggcgagcagcgccttgacgacgaggttgagcagatcattactcttcaaatccagaactactacttgaagcaggagcgtccatccattctgaagctctacaggcgcattaaacacgagtgtcaggaagttgatttgatgccgccacacaaaaatacagtctattccagggcgcgtgaaattgagcagcgcgagctacttcgtaagcgctacagccctcgctccgctcgagagaaattcgagccgctccgaggtggttttcctggcgcagattaccccaatgctgtcgttcagatagaccataccaaggtagatgtaattgtcgtagatgaggaacatcgactaccaatcggtcgaccttatctgacaatagccattgatgttgccacgaaaatgatcggcggctttcgaatgacgctggatccgccgggagcgtcatcggctggcttatgtatagctcatgcagtaatgcgtaaagagcactggctagcaaagcgtgatatcgacgctgaatggccgatctacggaaaaatgaacaaaattcatgtggataacgcgaaggagtttcgcgggaatatgctgactcgagcctgtcagcagcacggcataattctagagttccgacccagagggcagccaaactatggccctcacgttgagcgtgcatttcgaacctttatgggggaatgccagagcttgcctggaactacattttctaacgtgcaagctaaggtcgattacgactcggaaggtcatgcatgcatgacactgagcgagttggagcagtggtttactgtgttcttggtgtattgctaccaccatcgtgcgcacaagggaatcaatgaaatcccacctataaagctgtatcaccagtatgtgcatggttcagcttcgcaacctggtgtgggtctacctgcaccgattgaagatgaagagaatttccggcttgatttcactccttttgtggagcgcactgtgcagcgccagggcgttgtaattgatggtattcactattacgcgcctatcctacgtcggtgggtagtttctaaagacccgaatggggtcaaagctagaacattcatttttgcccgcgatcctcgagatatcagcgtggtttacttctttgacccggaaacgctcacttacagtcctattccatatttgaataacacgcggcccgccataagtctgtgggagttgagagcagtagtagcgaagcttcgagaagaccccgtcagtcatgttgatgaagaaatgatattccaaggcattcgaaagatgcgtgagatcgaggatgctgctgtacagaaaactcgccttgcaaagcaacatcgagcgaatgaaaagcgtaaaagacggatggtcgaaaggcgcaacggttggagtggtgtgcacgtttccacgccctcagtcgctgcatcggaacacgtcactgcatcctgtgacgatggtgatattcagccttttaacgatattcagctgagctag

SEQ ID NO: 350984 - DNA, 660 bp, Pseudomonas aeruginosa
atgaacctcaaatctgaagctcccattcgtgaaataggcataagcacacgaagcgtgacgggtgttgtgccttctctaggtaggtacgagtcttccttggaaagggatctgatggagattctgcgattcgatcatcgcgttgaaagcttcgttgcccagccgttaacaatcgaatatatcgatgatgttgggcggaaccgaagctacacgcctgatggccttattcactttaaaacgtcgtcatacaggccgcagtctgttctgttcgaagtgaagtttcgcgaagatttccgcaaaaattggaaggtactgatacccaagtttcgagcggcaaagaattactgttcaggccggggatggcgttttgaggtcttcacggagcgggagattcgaacaccatatctcgataacgtgaagttcctatggccatatctggccagagagccttctgttgagacaagagcgctcattctgaagacgctatgggacttggatgaggcagatcctgatctgctgttatgtgcgctatgccatgacgcagccaaccgcgcacgaatgatccccgcaatttggcacttggtcgcgaacggcgcggttgggtgcgatttggatcttccgttaacaatgcgatcgtcaatctgggctgcacaggactgctga

SEQ ID NO: 350985 - DNA, 204 bp, Pseudomonas aeruginosa
atgactgagaacgcatgcgaatgccatcgctgcatccgggagaaggggctaaccggtgacggcgttctgaagctccctctttcagccacgaagatgatcctttgccctctctgcggcaacaagcgctgcccgcatgcaagtgaccacgggctgcgttgcacagggagcaatgatccaggccagccggggagcatctacaaatga

SEQ ID NO: 350986 - DNA, 303 bp, Pseudomonas aeruginosa
atgagcaagttcaaggcgggcgatctcgctatggtcattggttctcgcaacttcggtcggtgcgttgagctgatttctcgccacgtaggtccatgccgcgtagaggtggcaggaaaccgctgggtcgcagttccagatggtgttccggcgtggcttgtggccgctgaaggcatgaaagctgagctgaccaaatcgaatcgagttgtgaaaaccgatgaggtcgtagtttccgaagtgaaactcgtcccgttgcgcggcgacttccagcccgagcagcagaaggccaaggaggtggaggcatga

SEQ ID NO: 350987 - DNA, 300 bp, Pseudomonas aeruginosa
atgaccgtgcaaccgatcagtgatgagcagttggcggagttggaagggtattcgcagcataccgcctaccttggcgacgaagacgcagcaatcaccatgggagaactgcgcggtcttatcgcccgcctgcgcgctgctgaggtcgatgctaagcgctggcgtcatacgcgcgacatcataactgtcgaggcgattgagtcggctcactgtgccttcatcagtttcggtttgccacctgatgaaagcgaaagcatacgcgcagatcaagccatcgattccgccatggagagcacgccatga

SEQ ID NO: 350988 - DNA, 510 bp, Pseudomonas aeruginosa
atggaaaccaaacattgcagcaagtgcgatcaggaaaagtcgctctccgatttctacaagcgatcaaaaggaaattcctatcactcggcatgcaaggtatgcgagcgggaaatggccaaggactggtatcagcggaatcgagagtccgcaaaagaaaagtatcggcagtggcgcgaggaaaaccctgaaaccatcaagcgttatcgcaaagagaacagggcgaagcactaccgccaagaagtcatgcgcaagtacggcgttgatgagcattggtttgacgaacaaatgcagcggcaaggcggggcgtgcaagtgctgtaagcgagagttcgtttggggtgacaaacaaaaatcgccccatgtcgatcactgccacaaaacgagcaaggttcgcggggttctctgcaatcgatgcaacacggtgctcggcttgtgccgcgatgaccccgaccttctttcaacattggcggggtatctaaggacatgtcatggctattcagcagagccctaa

SEQ ID NO: 350989 - DNA, 750 bp, Pseudomonas aeruginosa
atggctattcagcagagccctaatacaggcttacgagaactcgcactcttcgccggagctggcggaggaatacttggaggccacctgctcggctggcgtaccatctgcgccgttgagcgtgatgcctacgccgcacaagttctggtgcaacgacaaaacgatggagccctcccagctttcccgatttggtctgacgtgtgcagttttgacggaagaccttggcgaggccttgttggcgtggtttctggcggattcccgtgtcaggacatatcagctgccgggaatggagccggaatcgatggtgagcgatcaggcctttggcgagaaatggcacgaatcgtcggcgaggtacgaccgcgattcgtcttcgtggagaactcaccgctccttgttcgaagaggacttgccgtggtcctcggtgaccttaccgagctggggtatgacgctagatggtgtgttatgggagccgccgacgtcggggcgccccatcagcgtgatcgtatctggattgtggccaacacccagcggagtgacatcaggaaaaaatcatgtgacaggccgtttggacgaatggggcggctctgggaatccactccgtggaacagacattgccgcagtgcgctgcgcgagtttcgaagaatggatgatgggctggcctacggggtggagcgcactaacaccattagaaatggacaagttccgcgagtggcagcggcagcattcgcttaccttgcatccgggtggacctga

SEQ ID NO: 350990 - DNA, 366 bp, Pseudomonas aeruginosa
atgagcgttcagtccaatacctatgttctggtcggcgtgaagctgaactatcaggaattcaaggatcgctatctaggcgacgacgaggaaggttacgaccagtacgtcgatccctacagcgacagcgcctataagggcattcagcaccacgatggcctgtgcgtcatcttcgatggcatgagcggcgaatacgtattcatcggccgcgtgctggcgaagtccatcgacgagcatggagaaggcatccagatcaccgaatgcaccgtgaccgctgggctgcgtgccgaagtctccgatcttctggtaaagcacttcgaactagccgagccggacgttcgcatctgggccttcacgcattaccgctaa

SEQ ID NO: 350991 - DNA, 333 bp, Pseudomonas aeruginosa
atgaacgaccgcacactactcgaactggcggcgcgggcggcggggatcaaagcacgctggttccgagtaaaccaatggcgacaagtcggtggccatacgatgcgaacagggcaggaagatgtttttggaactcatcatagcaagccttggaacccgctcaccgacgacggcgacgcgctgagacttgcagtcttgcttaacctggaaatccacagtccacagagtgatccgacagtcatgtttaggaccgccgagcatgatgtcttctatcaggacacatgcattcggcgagcaatcgtccgcgcagccgcagagatcggcaagtcgatgtaa

SEQ ID NO: 350992 - DNA, 1392 bp, Pseudomonas aeruginosa
atggatattccaaccaaaaaacttacctccgaagagctcgccctactgttcgaatttcgggagtcacacttcctcgactttaaaagcgtagagatttcgccggcgtcactgacaaaagctgtctcggcactctgtaacaccagcggaggcgaggtcttcattgggctcgaagaagtagaaacgacggatggcccttcactcgggtggcgcgggttcgctaccgaagagcatgcaaacgctcacttggataccgtcgagaagttatcaccactcgggaagcattacagcgcagaattcttgtcgcatgacagccagccggggttagttctccacctcctcctcaagaaggtcaaaagcatcgttgtcgcgtcgaacggcaagccatatgtccgaagaggtgcgcaaagcctagccttgaacgatgccgccgcaataaggcaactcgaatacgacaagggcatcgtgtcgtttgaagacgagaagctcgactataaactggaccgcattacaaactccaccgtcatcattgagtttctgctcagcgttttcccgagcgcagagccggaagaattcctagacaaacaggaggtcattgtcgatggtgcgccaacggttgcggcaacgatgctctaccatgacttgccccaagcgcctctcgccaagcggtcttcgataaaaattctccgctatagaaccaagaacgatgaaggtgaaagagaaaccctagccttcgaccccttaactattgaagggcccgcgtacaacctcatttacgaggccgtcgacaagacgaagaaccttgtcgaagagatcaagaaagttacgccggaagggctgatgtctatttcgtatccgcacgaggcgctgcatgagattgtcaccaacgcagtattgcaccgggactacagcatccaaacggacgtgcaaataaggatatttgataaccgaattgagattgaaagccccggccggctaccaggtcacgtgacggttgagctcataaccaaaacacaggctgcgcgcaatcccaagatggtccgcttgatcaacaagtttaagaatccgccgaacaaggacgccggtgagggcatgaagacggcgttcgagtctatgcacaagctccggttgaagaaaccggagattgtcgagaaagaacagtcgctcgtggtcactcttcggcacgagccgctcggttcgcccgagcaactggtgatggagtatttgagtaaaccgggtcagcctgaaatcacgaacgccattgcacgtgatctaacgggcatacgctcagagaacaccatgaaggaggtgttctataagctcgcggatgcgaatcaaattgagcgtgtcccgggcaagctgggaaacaaggccgcgtggcagaagaagtcctaa

SEQ ID NO: 350993 - DNA, 309 bp, Pseudomonas aeruginosa
atggcgctccaccccgcgctgctggatctccagcgcggacgcctccgccagttcgttgagatcggcgccggcggcgaacgccgtgccatttccggtgaggacgatgacccgggtatcggcgcactcgtcgaggcgccgtacgtgctccgccagagcctcgcgcaggcgcatgttcagggcgttgagcactgccgggcggttcagtcgcaacagggccacaccctgctccggccgctccagcagcacgagttcggggcgcaccgccccaggggaggaatccatggccatctccaattgcccggggattga

SEQ ID NO: 350994 - DNA, 264 bp, Pseudomonas aeruginosa
atgagggtggtgctgatgctggtgatgatcgcgctggtgggatgcgccggccggcaggatgccgagccgcgcacggtgcgcgtagaagtgcctgttgcggtgccgtgccgggtgccggcggtagaagtgccggcctgggccgcggctgggctgcggaagggcgacgatctccagaccaaggtccgcgcgctgctggccgagcggcggcagcggattggttacgaggcgcagctcctggctgcgaatcaggcctgtcaggattag

SEQ ID NO: 350995 - DNA, 741 bp, Pseudomonas aeruginosa
atgcatcaccagcaccgggatgtcgatgcgcttcaggtcatcgctgaagtcggtctgggaaaaggccacgatcccgtcgtagtgggccttggcgccgcccatcatgccctgccgccaccagttgcggacgatcccttccgagggctgcgccccgggacggttgtagccatagaacgggccggcgggaatgtcctggtagaactgcgcgcgattggccgcgagctgcgcctggagatcgtcgaagacgctcttcggcaggccgcccggattgccctcggtcttcaccatcagcggcggcaccgcgctgatgatcgccgccttcggcaccgggtcgtcgggatagcgggcgatgtagtggacgacctcgccgccgccggtggaatggccgacatggatcgccccgcgcaccccgaggcgctcgaccaccgccgccacgtcgtcggcgtagtggtccatgtcatggccgtcccagacctggctggaacgaccgtggccacggcggtcgtgggccactacgcgaaagccctcggcgaggaagaacagcatctgcgcatcccagtcgtcggaactcagtggccagccatgatggaagtagatcacctgggcgtcgcgcggcccccagtccttgtagaagagttcgacgccatccttcgttgtcacgtaacccatgtcgcttctcccgatcggtgtggatgcaggcaacggcgccaccctgcggccgccgtcccctgtgtagagtag

SEQ ID NO: 350996 - DNA, 1176 bp, Pseudomonas aeruginosa
atgaaaatcaaatccgtccgtacccgcgtcttcgaatggaagggcaaggtcgtcccgccgcaggcgcacttctgcaccaatgccagcgacatcctgttcgagaagggagacgccatgggttcgttccgcttccacggctggctggtggtggagatcgagaccgacgacggcctcgtcggcatcggcaactgcgccctggcgccgcgcgtggcgaaggaaatcgtcgacctctacctggcgccgatctgcatcggcgaagacccgttcgacaacgagtacatctggcagaagatgtatcgccgcacccacgcctggggccgcaagggcatcggcatggcagccatctcggcggtggacctggcgatctgggacatcatgggcaaggcggtgaacaagccggtgttcaagctgctcggcggccgcaccaaggagaagatctggacctacgcctcgaagctctacgccaacgacaacctcgacgccttcctcgaagaggcccagggctacctgaaccagggcttcaccgcgctgaagatgcgcttcggctatggccccaaggacggcccgacgggcatgcgcaggaacatcgagcaggtccgcgcgctacgcgaactggccgggccggacatcgacatcatgctcgaatgctacatgggctggaccctggaatacgcccggcggatgctgccgaagctcgccgagttcgaaccgcgctggctggaggagccggtgatcgccgatgacatcgagggatacgtcgagctgaagaagatggggatcatgccgatctccggcggcgagcacgaattcaccggccacggcttcaaggacctgctggagcgccgcgcggtggacgtcatccagtacgacaccaaccgcgtaggcgggatcaccgccgcgcgcaagatcaacgccatggccgaggcctggtcggtgccggtgatcccgcacgccggacagttgcacaactatcacctgaccatggccagcaccgcctcgccgatggccgagttcttcccggtgttcgacgtcgaggtcggcaacgagctgttctactacgtgttcaagggcgagccgcagccggtcgacggctatatccagctggacgaccacaagcccggcctgggcctggagatatccgaagagcacctcaaggatttcatcatcatcgagtga

SEQ ID NO: 350997 - DNA, 183 bp, Pseudomonas aeruginosa
atgggcgagcacttcgaagggataggccttgtgccgtggcagggtgccctggatcacgcagagccggtcgaccgcctggctgacttcggccagggggcgccgttcgcggaccaggtcaaggatggtgcgtcggtgtatcagcaggtcgtccatcagccgctcctgcaacaggttgtggcctag

SEQ ID NO: 350998 - DNA, 501 bp, Pseudomonas aeruginosa
atgaaccgcttttcactgccccgccccgacgcacgccagtgcgtcgccggcctgggtttctccgcccttctgctgctggcctcctcggccaacgccgccgcctgccgcgacatcaccagcgtgcagcaaagcgccgacgccacgcgcaatacctcgatgggcggccacgtgacccagcacatctacgggatgacgccgccgtccggctcgtcgcagaaagacaagaccctgttcaagtcgagaggcaactacgacgcggcctggcgccagtacggatgcatcgacaatccggtggcctgcagcggcaacagcaagttccaggtggtttccctggagaagctgcacatgggcaagatcgatgcctactcctgcaagcaggccgacggccagggcgtctgcacgcgctgggatacgtacatggccaaggagatttcgtacggtttcgtcctgaaggacggcaagtggatcctcaataccctctacccggttcccctcgactag

SEQ ID NO: 350999 - DNA, 165 bp, Pseudomonas aeruginosa; identical to SEQ ID NO: 337753

SEQ ID NO: 351000 - DNA, 1779 bp, Pseudomonas aeruginosa
atgaacgcgctcctcgccctccccgacctgcagccggaacgcctgttcgtgcaatccggcgacgtgcgcctggcggttcattgctggggcgcgccggacaacggcaagccgacgctgctgatggtgcatggctacccggacaaccacgagacctggctgccgctgatccgccaactggccgggcgctaccgcatcgtcgcctacgacgtgcgtggcgccggcgcttcggacaagccacgctggagccgcgactaccacctgcagcggctcagcgaagacctgcaggcggtgatccgcgccaccagcccggaccgcccggtacacctgctggcccatgactggggctcgatccagacctgggaaagcgtcaccgatccgcagtgccgaccgctgatcgcgtcctatacctcgatctccgggccctgcctggaccatgtcggtttctggatgcgcgaaaacctcaggcagcgcagtccgaaggccctgaaagcggtattcggccagttgctccactcctggtacatcgccttcttccatacccccgtcgtacccgagctgctctggagcgccggcctggcccggctctggccgcagttcctgaagcacgccgaaggcgtccgccatccgcaggtcaacccgacccaggccagcgacggccggcacggggtcaagctgtaccgcggcaacttcatccgcagcctgttccgtccgcgcaagcgccacaccgaagtgccggtgcaactgatcgtaccgacccgcgaccgttacgtcggcgcccagctgttccagcacctcagcctgtgggcgccacgcctgtggcggcgcgaggcgagcgtcggccattggcaactgctggccgagccggagcaactggccggctggctcggcgagttcatcgacgcccaggaaaccggcgagtcgccgccggccctgcaacgcgcccaggtccgccccgacgcgcgctcgatgagcggcaagctggtggtggtcaccggcgccggcggcggcatcggccgttcgaccctgctcagcttcgccgagcgcggcgccagcctgctcgccgccgatctcgacctggaagccgccgaacgcagcgccgaactggcccgcgcccttggcgccacggcccatgtctaccaggtcgacgtcggcgatacccaggccatggagaccttcgccgagtgggtgcgcgacaccctcggagtcccggatgtggtagtcagcaatgccggcatcggcatggccggaccgatgctcgacacctcgccggcggaatgggagcgcctgctgcgggtcaacctgtggagcgtgatcgacggctgccgcctgttcggccggcagatgatcgcggcgaacaagccggggcacctggtcaatgtcgcctccggcgtggccttcgcgccgtcgcgcaactaccccgcctacgccaccagcaaggccgcggtactgatgctcagcgaatgcctgcgggcggaactggccggacgttcgatcggagtcaccgcggtgtgcccgggcttcgtcgataccggcattgtccatgccacccgcttcgtcggcatggacgccgaacgccaggcacggcgccaggcgaagatccagcgcttctacaagcgacgccggctcagcccggacaccgtcggggaaaagctggtgcgcgccgtggagcgcaacaaggcggtggtctcggtgggcagcgaggtgcacctcggcgccctgcaatggcgcttcgcgccctgggccacgcggtttctcgcgcgcttcgacctgacttcctga

SEQ ID NO: 351001 - DNA, 2349 bp, Pseudomonas aeruginosa
gtgattcttctggaaaagggtgaaagcacaccagcgccatggatcaatgtcatcgccaatccccggttcggcttccaggtctcggcggagggcagtggctatacttgggcggagaacagtcgcgaaaatcaactgacgccctggtccaacgatccggtcggcgatccctgcgtagaagcgttctacctccgcgacgaggacagccgggcgctgtggagcgtcactgcgcggccgattcgcgacgatgggctctacagcgcacgccacggattcggctacagccgtttcggccatcgctgccagggcatcgacatggatctggtgcaattcgtcgcgctggcggacccgatcaagatttcccgactggtgctgcgcaacctctccggcaagtcacgacggctgtcgttcaccagctatgcggaaccggtactcggcagcgcccgggcgacatcggcggccttcatcgagacctgccaggatgtcgaaagcggtgcgctgcttgcgcgcaacccctggaacgccgcctttcccgggcgtgtcctgttcgccgacctgtgtggccgccaaagcagctggagcggtgatcgtcgcgaattcctcgggccgctcggtgacccctcggcgcctgcggcgctgctcggcgaggcgggactttccggatgcacgggggccgggctcgacccgtgcatggcgcagcagtgttcgatcgagctggcaccgggggaggtggtggaaatcgtcgcattattcggccaagcggactccctggctcatgcccgtgatctggtcacgcgataccgtcggactgatccggaagagacgctggcgggtgttggtaggcactggcggaccttgcttggagccgttcaggtgagcagtcccgagcgttcgctggatatcctgctcaacggctggctgctgtaccagaccctggcctgtcgcgtctgggcgcgctcggcgttctaccaggccagcggcgcctatggtttccgcgatcaactgcaggatggcatggctctgtccctggccgctccggcgctgacccgcgagcatcttctgcgcgccgccggtcggcagttccgcgagggtgatgtgcagcactggtggctgccgcactcgggacagggggtgaggacgcggatttccgacgaccgggtctggctggcgtatgctgcctcgctgtatctcgaggcgacggccgacatcgggattctcgacgaagtcctgccgttcatcgaagggccgccgttgcaagagggcgagcaggacaccttcttccagccgatgccgtcggagcagtccgcgtcgctattcgagcactgtgcacgaggcctggaccagtgtctgacgctgaccggtaagttgggcttgccgctgattggttccggcgactggaacgacggcatgaatcgcgtcggtgccggcggcacaggagagagcgtctggctcggctggttgctgctggagactctcgcgcgcttcgatggctatgcccgttcgcgtgaccctgagcgagcccgtcactggcgcgaacatgccgggcggttgcgtctggccatggagcgcgaggcctgggacggccactggtatcgccgagcgaccttcgatgacggaacctggctgggttcgaagaatggtgaagcctgccgcatcgattcgatcgcacagtcctgggccgtcctggcgggcgccgacccactgcgggcgggaatggcaatgaccgcactggagaggtacctgctacgtccagtcgatcgattggcgctgctgttttcgccccctttcgacgagaggggcatggatcccggctatatccgcggctacccaccgggcctgcgggagaatggcgggcaatacagccacgcggccatgtgggcggtcctggcatttgtccgccagggcaaaggggacaaggcggggacattgctttccttgctcaatccaatcaaccacgcgctcacaccggaacaggtggaacgctatcgagtggaaccctatgtggtggccgccgatatctactccgaggcgccgcatgtcggccgtggtggctggacctggtataccggctctgccgcctggatgtaccgcgccggactcgaaggtttactgggaattcgccggcagggtgcctggttgctgattgatccgtgcattccggtgacatggtcgggcttcgaggtaagcctggaggtggagggggggcactacgagattcaggtggagtccggagaagggcgaagccacggcgtgcgcgaggctttcctcgacggcgtcgaagtggagtgtatcgatggccaagtgcgggtgcctctcgattgtcagcgacaccgcttgcgactgagcctttag

SEQ ID NO: 351002 - DNA, 354 bp, Pseudomonas aeruginosa
atggaagctgagaaaaccccggataacgtcgtgatcctcaaccacgaccccatcgtcgacccgttgcgccagggcttgttgctgctctgccggcagcttggccgaccgctcggcgacgccgaactggtggacggcatgccgctggagcacggtcgcctgccgttgcacctggtggcccgcgcgttgcgccgcgccgacatcaccgcccaggtcacccgccagccgttgcgccggatcgatcgctacctgctgccggccctgctgctgctcgacgacggccgcgccctggtgctggtgggcaacgacggcgagcatgccgaggtgctggtaccgcagagcgacggcggaagctag

SEQ ID NO: 351003 - DNA, 471 bp, Pseudomonas aeruginosa
gtgaacaccgagcagttcattcgcaacgcggccgcgcgcgggctttcccgccgcgcaacgatgcacgcgctcggcatgggcccctggaagttccgggaactgctgaccctgatgccggagatcacctggccggcacgcggatgctcagccgaccaccagcgtgcgaacgagcagaagcgcggacgctgcacgccggcgcaggccgcagcactggagcgagcacacgaacgctggagcgagagccgacgcttcaccgtcgacggcgtgaccgggaccatcgccgagctggtggagcacttccagagcccggtccacgcaacgaccgtccgccgccgcgtggctgccggcatgagcctgcgcgacgcactcctctccccgcgccagcagcccaagccagggcgccggcatccctggaacaggccaacttgcgattttgcgcaagttgccgtgtcgcagcaggtgcagccatga

SEQ ID NO: 351004 - DNA, 210 bp, Pseudomonas aeruginosa
atgcagttgcaatgcccctgctgcgccgagcagttcccggtagaggtccaggcccgggccgcttcctcaaagcggccgcaggccggtggacccagcacccagcaattactcaaagaccaggtcggtcgagttcagtccgatatcgtgttggggctgattactaaagaggatgaagagcgccagatcgcggcactgaaggggggagcatga

SEQ ID NO: 351005 - DNA, 990 bp, Pseudomonas aeruginosa
atggatgcaaaaaatcttgcggtgctaatgcaactgaagaaggcgatggagcaagaggaacctgtagggaggctcaagaaaacgaatgcaccagggcaaggcttcagtgaagagtcggagcaacggctcgcagaacgtgctcagcagatatccagtgatccttcaggcaagatacctagtcctcaatcagagactttgcgcgagcaggtaattgatagtattacttaccagcttcgtcaggagttttccaggctaaatcgcagcaccaactcgcttgactccctcaagtatgacgagagtcacagtaaaggccaatatgaaagtcgtgctgcgaagggaaaggagcaaaataagttacctgttacgaaacctgctagtaagaattcgccattaagcccaccaaagcctgccgatttgaggatgtctggcatacgaagcggtaaatgcttttttagagatgtatacgttagtcgagcccagtacaaggctctaaaagaatctatggacctaatgatttatggaaatgataatggagccctgattaagaagtttgatgctctgaccttctatctatcccaagtcagggacgaccatgaggcgatggctgtatacgaaaaaatcttctccatactggcgtctgtcaagaatgacagagcaggaaaggtgggcaagccagctctgagtccggatagagtgagtcgatttactcgtattcaagaagaggttgcaaggcttgccaagccttctaaggagcttcagggcagcaatgatactcctgagtggactgcccgttcttgtctctggtgtaattcgaagttcttcgtccacaaggattgggtaaagccgccaacaaggtgtaagaaatgtcgcgaaaaattgcataacaggcaatgtgccaagggcgtgaagaaagctaagaatacaaagactgtgtacagtcattacgtaatctacagcggtggatctccagggctaggaaagcggcactaa

SEQ ID NO: 351006 - DNA, 948 bp, Pseudomonas aeruginosa
atgtctttagaaatcaaatctccggaagattttgttgatcggcctgactatcgagaggttttggactttggtgaaaaatccggcagagagcttttagagattcttggtgcgtacatatttccagataccaagtctgtgaagtgtgggattcggaactgccgcactccgcaccggcgcggttatctgatcagcaccacagacggtctggaaacgaacataggaaatgtctgtgggaaaaaacacttaggggtaatattcaccgaaaaggcaagtcagtatcgtaagagacaggccctccaaaggaatgtagagcagttccgtgctattaagtctcgcatccagcttttatgggaggagttagactcaataaaagcatccgctgcgcgtgtatctaagttgaagataattctgaataagtgtcatccaaatctcgttcgtgctcttgttaaccgaagcaaggtcaataactctgttctgggaaagcgcattcccatgactcgagaagaggcagagcgcttgtacgtccatgaggcgaaagaaagcgccgatggcaaggttcaaaaatttgaggcatggctggcaaaggggtggcccaggaaactggtagtggccggccagatcgctgggcttaggttctggatgagcgatcttcaccaagtactaagacaagaaattctgaatccagctgaagagatacagaaaatcaacaacaatgaagttgaacagttaagcctcaggaaactgacggagttctcacgttgggcacagcaactagacataaatttggaaaaggccagaactataattttagacggggaggcgtttttcgagttgcagaatattcaaatgctgaaactgttgggggatgagcttgacgcagcatctagcatattgctagagcctgcgctgggcgaattcaggattcaggctggttggttttacggatag

SEQ ID NO: 351007 - DNA, 765 bp, Pseudomonas aeruginosa
atgaccaaaccgaaccacaatatggcgctctgggaccaggtgaagaacaccccgctcagcgccaccaaaacccagcactttgacggtcgtgacgtcaccacgatcaacgcgcaatacgtataccagcgcgccaccgagttgttcgggccgatcggcaagggctggggctttgacattatcaccgaccgcttcgaccagggggctcccatcctgggcaaggatggcggggtcatctgccacgaactgatgcacaccgtgctcctcaagctctggtacgtacatgacggggagcgctgctactcccagcaattcgggcacacccccttcgtgcgccggaccacctacggagtctccaccgacttcgacgcgccgaagaagagcgtcaccgacgcgatcaagaagtgcctgagcctcgccggcttctgcgccgatgtgcacctcggcatgttcgacgatgccacgtacctcgaaggccagaagctcagggaacgcctggagggcgctggcgaaacaggcgccgaggccgtgctggacgaggccaagggggagttcgccagttggctgcacagccaaatcagcgccctggaagtctgccccaacgagcgcgctctggaaatgatgcgcaagcagatcgcgcaaacagctcgtgccaaagccgaggtcgtgaagatcaagccggcggccattgaggctcgcatcaacgaagccgccgacgcccgcctggccgtcctgaaacccatcaacaccccagccactgaggtatag

SEQ ID NO: 351008 - DNA, 1008 bp, Pseudomonas aeruginosa
atgaccatcttgaaaaacgtcgatctggacaacggcaccgtcgaggtcaccgagtacagcgccaccaatgccgctctggcgcaacttcgtgtgaaatacgccgaagtgccggacgcaaataccgaagagggctatgcgttcatcaaggacggtatcaaagagctgacctccctgcgcaccagcctagaggccgcgcgcaagcgcgagaaggcaccgtacctgcaggccggacagatcatcgacgcagaagcgaagcgcatcactgctgaactggcggccctggaagacccgatgaaggctgccaagaaagtggtggatgatcgcgttgagcgtgagcgccgggagcgtattgcgcgattgcagcagaaggtcgatgcgatcaaggccatgcccgcgcaggttcgtggccggtccagcgacgacatcagtgcgatgctggatcgcgtcggcgaaatcgacgcaacccacgacttctacgacctgacgaaagaagccgtagaggcccgccaggctgctctggacgagctaactcaaatgctgaccgatcgcctggccttcgagcaggcggagcgtcagcggcaggagttggaagcccagcaagccgagatgcgccgacgcatggaggagcaaaacgcggaaatgcgccgccaacaggaggaaatgcaacgccaacgcgaagaactggcacgccagcagcaggaacttgctgccgcgcgccagcagctcgccgagcaggaggcacccgccgctgtagagccggaggtgccgacggccgaggttgcaccagcacccgcccagatcaagcccgccagcaaggcagcagctacccagtggcacgcccgcgtcgtcgataaaagcgcgttcatcgcctctatcgccgcaggcctggccaccgaggacttgctcattgtcgaccagccagccctggacagcctggccaacagcaagggcaaggcgctgagcctaccgggtgtcatcgtcgagcgcgtggcagcgcgggcagcctga

SEQ ID NO: 351009 - DNA, 852 bp, Pseudomonas aeruginosa
atgcgatccgacctgcacgaggccaaccggctgtcgtggaacgccgccacccgggcgcacaacagccacaaggccgaccaggccgccttcttccgcaacggcggttccacgctctatcccgaggaactgcaactgctcggccatctcgacggcctgcgcctgctgcatctgcaatgcaacgccggacaggacagcctgagcctggcgcgccttggcgcccgcgtcaccggggtcgacatcgccgacagcgccatcgacttcgcccgccagctgtcccgcgacagcggcatcgccgccgacttccagcgcgacgacatcctccgctggctgcccgtcgccgccactcgcggcgaacgcttcgaacgggtcttcgcctcctacggcacgctggtctggctctccgacctcaagcgctgggccgacggcatcgcccaggtactggttcccggcgggcgcttcgtcctggtggagttccaccctttcgccctgtacttcgacccacactggcaaccggcctacgactacttcagccgcgagccgatcgccgagagcggcgtcagcgactacgtcgccgagtccggcgccagcctggcgccctccggctaccgcgccggcgtcgagaacttcagcaaccctcatcccagctacgagttccagtggggcctggccgatgtgatcggcgccctgctcggcgccggcctgcaactcgaacggctggaggaatacccctacgccaacggctgggccggcttcgacggcatgcgcgacggcggcggcggacgcatgctgccgcccgccgatcgtccgcgcctgccgctgatgtacggcctcagcgcaaggaaaccacgatga

SEQ ID NO: 351010 - DNA, 528 bp, Pseudomonas aeruginosa; identical to SEQ ID NO: 332994

SEQ ID NO: 351011 - DNA, 1434 bp, Pseudomonas aeruginosa
atgacagccgacaagaaagccaagatcctcgccaccctcggcccggccacccgcagccgcgacgatatccgtgccctggtggaggccggcgccaacctgttccgcctgaacttcagccacggcgactacgccgatcacgcgcagcgcttcgcctgggtgcgcgaggtggaagcggaactgaactacccgatcggcgtgctcatggacctgcagggtccgaagctgcgggtcggccgcttcgccgccggtgccgtgcaattgcagcgcgggcagaccttcaccctcgacctcagcgacgtccccggtgacgagcggcgggtcaacctgccgcatccggagatcatccatgccctggagccgggcatgagcctgctgctggacgacggcaagatccgcctggaagtggtcaactgccacagcgacgccatcgagacccgcgtggcggtgggtggcgagctgtccgatcgcaagggcgtcaacgtgccggaagcggtgctgcaactcagcccgctgaccgacaaggaccgccgcgacctggccttcggcctggaactgggggtcgactgggtggcgctgtccttcgtgcaacgcccggaggacatcgacgaggcccgtgggctgatcggcgacaaggccttcctcatggccaagatcgagaagcccagcgcggtgagcgccatcgaggcgatcgccgagcgcgccgacgcgatcatggtagcgcgcggcgacctcggcgtagaggtgccggcggagagcgtgccgggcatccagaaacgcatcgtccaggtctgccgccagctcggcaagccggtggtggtggccacccagatgctcgagtcgatgcgcttctcccccgccccgacccgcgccgaggtgaccgacgtagccaccgcggtgggcgccggcgccgacgcggtgatgctctcggcggaaaccgcttccggacaataccctcgcgaggcggtagagatgatggcgaagatcgtccgccaagtggaggccgagccggactaccacgtccagctcgaggtcaaccgtccgcagcccgacgctaccgtctccgatgcgatcagctgcgcgatccgccgggtcagccggatcctcccggtggcggtgctggtgaactacaccgagtcgggcaactcgaccctgcgcgccgcccgcgagcggcccaaggcgccgatcctcagcctgaccccgaacctgcgtaccgcgcggcgactgaccgtggcctggggcgtgtattcggtggtcaacgagcaactggcgcacgtcgacgagatctgctcgaccgccctcgacatcgccctggcccagcgcatggcgcgccgcggcgacaccgtggtggtcaccgccggcgtgccgttcggtcgccccggctcgaccaacatgctgcgcatcgagaccgtggcgccgccgctgggagatctctga

SEQ ID NO: 351012 - DNA, 339 bp, Pseudomonas aeruginosa; identical to SEQ ID NO: 332086

SEQ ID NO: 351013 - DNA, 177 bp, Pseudomonas aeruginosa
atggcgatgcacaccgagctttccatctacaaggccgcaagcggtctcttccgtcaggcctcgcacagccaggtcgaccgcgccgcgctggcaaatgtcctgctgcgcagagggcgttcgatcaacggcgcactcaccaagacctaccgcaaaccgaccaaggaacccgccgcatga

SEQ ID NO: 351014 - DNA, 201 bp, Pseudomonas aeruginosa
atgaactaccccgtgaatcccgacctgatgcccgcgctgatggcggtcttccagcatgtgcggacgcgcatccagagcgagctcgattgccagcgactcgacctgaccccgcccgacgtccatgtattgaagcttatcgacgaacaacgcgggctgaactgcaggacctgggacgccagatgtgccgcgacaaggcactga

SEQ ID NO: 351015 - DNA, 822 bp, Pseudomonas aeruginosa; identical to SEQ ID NO: 348407

SEQ ID NO: 351016 - DNA, 234 bp, Pseudomonas aeruginosa
atggccaagctgaaaacctactgcctcaacctcgacgggacgcataacgtcatggtcgccgcatcgagccagcaggccgccgccgagctgatcggcacgaccgtttacatgctgcgcacctgggatgccggctacaacgacgaggacgaggcgctggccctgtccgaacctggccaggtgttccggcagaaggggaccaccggcgcctgggagcgttggacgccgccgaagtag

SEQ ID NO: 351017 - DNA, 234 bp, Pseudomonas aeruginosa
gtgtggctcgaaattgatgccaccctctccttcgccgtttcccgcaacggcaagctgagcaagcgatctattacggacaatcaggagagtgatggccgctgtgggcttgcgtgccaaaactgtgactgggagatccacggccacgatttggaagacaagtcgcagtcgagggtgatcgagtccgcttaccagcagtgggaagaactcgaactcgcagtgcgcgccaggaagtga

SEQ ID NO: 351018 - DNA, 453 bp, Pseudomonas aeruginosa
atggtcgcggtagggcctctggccggcactctgacgcggcctcacgaacttgggcaggctttcggacctggatcgccgctggagcgtttcgtcgagcgtgccggaaaggttctgttgctcggagccccgctcgattccgttaccgtcctgcactacgccgaggccattgcccgcatcccgaacaagcgacgcgtgagctacgaaatgccgatccgcagcgaggacggcggagtgagatggaaacgcgccgaggatttcgactccaacggcattctcgattgtttcgctatcgaaggagagccggacgccgtcgagacaattaccaatgcctatgtggagctgcgacgccatcgggagggcttggtcggtcaggcgcactgctacttgttcgaagcgcgggatatcgtttcgttcggtgtcgactatcttcaacggcactttggctcgccctga

SEQ ID NO: 351019 - DNA, 414 bp, Pseudomonas aeruginosa; identical to SEQ ID NO: 30070

SEQ ID NO: 351020 - DNA, 978 bp, Pseudomonas aeruginosa
atgctcgctgacgttcaatccagttacggcctcgaccggcctttccaaggggccggcaactttgagaccgagcatcagcgcacgatcatccgcgaggtgtgtgcggccgtccagaccggtcggcttgtcgtggtctccggcctggtcggttcggggaaaacccaccttttgcgccgcatcgaggccgaactcaccaaagccggcaaggtcgcactcgccaaatcgctggcggtcgacaagcggcgcacttcgctgccatcgctcattgaagccctgttctacgacttgtctcccggcgatcgtgcgcaggtcaagatccccaagcaggccgagcgccgggagcgcgacctgcgcgacatcatgaaaaaaggcaaacggccgatcgtcctcgtggtcgacgaggcccatgacctgcaccacaagaccttaaccggcctgaagcgactgatggaggtggtcgccgacgccggcgtgctcctttccgtacttcttgtcgggcatccccggttgcgcaatgatctgcgccggccgcaaatggaggagattggctaccgcacgaccatttttgactacgaggggatcggctccgcgcgccgcgactatgttgcctggctgcttggcgcctgtgcggccgaaggcgtaaaggttggcgaactcctcgaggaagaagccatcgacctcatcgccgaacgtttgcgcacgccgcttcagatcgagatgcatctcaccctcgcattcgagcagggctttcgcctcggcgccaagccggttaccgccgaaatcgtcgagcaggtcctgtcccgcgccatcgacgatctcgaaccgacgttgacccgaaatggttacgatgcgacggctctggtcacgcacctcaatgctcggccgtcggatatccgcgccttcctggcgggcacccttgatcccgaatattcccgtcagctgaccgagcaactacgacaggcaggcgtcccggtttga

SEQ ID NO: 351021 - DNA, 1653 bp, Pseudomonas aeruginosa
atggctgagcggagaaagcggccgcccggagaggctcttgtcgatcttcgacgccgattgtcgctgctttctccccgtgatccaggccgtaccgagattgttgctcgtgccgccgatgcctacggcatctcgatctggaccctgtatcgggcgctgcgggagttgaaccgcccgaaatccgtacggcgcgccgatcacggaacctcccggatcgccccgcagccggagatggaaacctatgccgaaatcatcgcggccctgaagatcagaacggcgaaccggaaggggcggcatatctccacggcgcgcgccatcaagctgcttgaggaagacggcgtggtgacgcccgatggcctggtccgtgcaccgcccggcatcttgaaacgcgcaacggtcgatcggctgctgcgtgtttccggcctggattatgcgcgcgtcacccgcccggtggctgccgtccgattccaggcgcggcgttccaacgaactctggcacttcgacatgagcccgtccgacctgaagcaggtggaagcgccgctttgggtcgaggaagggcgcggccggccgacgctgatgctgttctccgtggtcgatgatcgctccggcgcgagctatcaggaataccgctccgtctacggcgaggacgcggagtccgccttgcgctttctctacaatgccttcgccgccaagcctgaaccggaactgccgcttcaggggattccaacgaccatccatatggataacgggccggtgagccgctcgcgcgttttccagtccgtcatgggtagccttggtgtccgggttctcacgcatatgcccccgtcggacagcgagcggcgcacgccggcgcgagcgaaaggcaaggtcgagcggccgtttcgcacgatcaaggaagtgcacgagaccctctatcatttccacaagccgaaggacgaagaggaagccaacctttggctcaggcgcgccttggtcacctacaataacggcgaccatcgcacagagtctcatgcacgcatcgaggattggctgcggcatcttcctcctgacggggtgcgggcgatgtgctcctgggagcggttctgcgcctttgcgcgcgaaccggaacgacggacggttgctggagacgcgaccgtatcggtcgaaggcgcatcctatgaggtcgagcccgaacttgccggcgaaacggtgaccttgctctggggcctgttcgatcaggaactgttcgtcgagcatgagggcaagcgcttcggtccattccaaccttcgcgcggggcggttcccctctttcgctatcgcaaataccagaagagcaagctcgaagagcggctcgacaaggtggtgcgcctggcagaccaacttgggctcccccgcgccgcggtcaccggcggggatcgtccattgccttcgctgcccccgaccacggctgggctgagtgtacggcggacaccgtttccggaacccgcaatagagaccgcttatccaaatggcctcgcagcccgtggggccatcgccgaccagctcggccggccgatcggcgcgatgaatgccggtgaccgcgccttcatcaatgaactgcttggagaaacactcgacaaaaagatgatcgcggcccgtatccgcgaacgcttccaggcgcgaagaaaggaagaatga

SEQ ID NO: 351022 - DNA, 597 bp, Pseudomonas aeruginosa
atgcgggtcgggtacgccagggtcagcacgatcgatcaaaatccggagcttcagcttgaggcgctgagacgcgccggttgcgagaaggtgtttaccgagcgcgggtcaggcgctcgcgatgaccgcccggaattgggccgaattctctccgacgtgcttcgcactggtgacacgctcgttgtctggaaactcgatcggttggcgcgatcgctaaagaagctcatcgcgacggcggaagagttggagcgcgcgaagatcgggctcgtgtccttgaccgagagcattgatacgacgacgccgggcggcatgctgaccttccatgtcttcggtgcgatcgcccagttcgaacgtgctctgatccgcgaacgcacgacggctggactggtcgaggcgcggcaacgtggccgcaagggtggccgcccgcccgcgatgcgcccgggcgatattgccgcggcgcgcgccctgatgaaggaaggcagcataccggtacgcaatattgcgcagcgcatgggggtttctgttgcaaccctctatcgtcatatcggcaagaagggtggctctcccaaaacagtggaatccgaggacgtccatggctga

SEQ ID NO: 351023 - DNA, 204 bp, Pseudomonas aeruginosa
atgctgcctcactccggttttctccgcaggcacgtcgaggccggcatgatcctagttgctgcacggattctcgccgggcgcaacgtgcatcgttccgccgtagtgagccggcgcgacaacaacgacatgtggggcatagctgagcgcctggagaacatcgccaggcgcatccgcggcgagtatagggaggtaggtgatgagtga

SEQ ID NO: 351024 - DNA, 429 bp, Pseudomonas aeruginosa
atgagtgaggtcatggaccaggcagtcattggtatgccgtatgaaatggcgttggggtgcgaagtgtcgcgcaggcagtactactcccgtgcgaacgctgtcctggcggaacgcgacgccctcgccgccaaactggcgatgctagaggacgcagcagcaaagggagatgctgctcgccagcaatgcggcggaatggagatggagatcgaggaacttcgcgctgaactagcggaactgcgcgccgaggcggagcaactgcgcaaagacgccgaacggtatcggtggctgcgagaacgcgacctggaaacgatcagccgaggcggagttttcgcagggatgaccccggaaaacatagtcctgaatctggaggacctggacgctgaaattgacgcagcaagatgtagtaattccgacggtcctgcgtcctga

SEQ ID NO: 351025 - DNA, 3642 bp, Pseudomonas aeruginosa; identical to SEQ ID NO: 328321

SEQ ID NO: 351026 - DNA, 351 bp, Pseudomonas aeruginosa
atggccaaggatacccgcgatacccagaccctcgacgccttcccggccaagccgtccaggggccggcctcgcaaggctgacgcgctctccaatgctgagcggcagcgtctctaccgtcagcggcaggcgggcaaggcaccccaggtggacgcggatgccctggtccgtctgcagaacgaattcgaccggcacgttgatgatgcgcgcgccctggtcgcccatcttcgaaagactattgcgcagatggagcttgaggtggatctgtgccgccaagagcgatccgatgccatgcgcgtcaacagcatttaccgcgagcgcctggagcttgctggtctccctacagactactag

SEQ ID NO: 351027 - DNA, 906 bp, Pseudomonas aeruginosa
atgatttcctttatcgacgaacaccgttcggtgctcggggtcgagccgatctgcaggctgctgccgattgccccgtccacctattatgaggtcgtcgccaagcgcacggacgtggaccgcctgtcggcccgcgcccggcgcgacatggccatgaaggtcgagatacgccgggtgttcaacgagaacttccaggtctatggcgtgcggaaggtctggcggcagttgcagcgagaaggcttcgatgtcgctcgctgcaccgttgcacggcttatgagaatgatgggccttcagggcatcattcgcggcaagcccgtcaaaaccaccgtgtcggacaaagccgcaccgtgtccgctcgaccgcgtgaaccggcagttctatgcccccgcgccgaacatgctctggctttctgattttacctatgtcgcgacctggcagggctttgtctatgtcgccttcgtgattgatgctttcgcccgccgcatcgtcggctggcgggccagccggacagcgcatgcaggtttcgttctcgatgctctggatcaggcactccatgaccgacggcccatccatcacggtgggctcatccaccactccgacaggggtgtgcaatatgtgtcgatcaagtattccgagcggctggcggaggcgggcatcgagccttccgtcggaagtgttggcgacagctacgacaatgctctcgccgaaacaatcaatgggctttacaaggccgaggtcatccatcggcgaggaccgtggcgcaacttcgaagccgtagagttcgccacgctcgaatgggtggactggttcaacaaccgccgccttctggagcccatcggaaacatgccgccagccgaagcagaacaacgctactacgccatgctggacgtgccagccatggccgcataa

SEQ ID NO: 351028 - DNA, 330 bp, Pseudomonas aeruginosa
atgacaagcaagacgacgaacaaattctctcctgaagtgcgcgcccgcgccgttcgaatggtgtcggaacatgaagccgagcatccttcccgttgggcgactgtctgctcgatcgcagccaagatcggctgctcggcgcatacgctcaatgagtgggtgaagaaggccgaggtcgacagcggtaaacgagcgggtctgccaagtgacgtcgccgagaagatgaaggctctggagcgggagaaccgcgagcttcgtcaggcgaacgagattctacgcaaagcctcagcatattttgcccaggcggagctcgaccgcccactgaagcgatga

SEQ ID NO: 351029 - DNA, 384 bp, Pseudomonas aeruginosa
atgacgcagatgcacgcccctgctttccgcttttccgtaaatccggcttcgtacctcgcgcgcctgcgtcgcctcgccggcccggcgcatcacggcctgctgctggccgccatctcgctgatgacggcggacacggcgaaggccgccggttcctcgatgccctgggaggcaccgctgcaatccatcctcgaatccatccaggggccggttgcgcgcatcgtcgcggtcatcatcatcatcgccacgggcctggccctcgcattcggcgacaccagcggcggcttccgcaaactgatccagatcgtcttcggtctgtcgatcgccttcgccgcatcctcgttcttcctgtcgttcttcagcttctccggcggggccgtcgtatga

SEQ ID NO: 351030 - DNA, 945 bp, Pseudomonas aeruginosa
atggagattcgacacctgcgttgcttcctcgcggtagccgaagaactccatttcgctcgcgccgccgaacgactgcatatcgaacagtcgcctctttcgagggcgatcaaagagctggaagaagacctgggcgtcaagttgtttgttcgcacgacgcgcagcacacggctgactcgcgcaggaaagctgtttcaagaacatgtgccgcgagtgttcaccgctttacagcaggcccgcgacagtgtgaaagccgccgccaacggctttcatggccagttgcgggtcgcgctgtcggacggcatcacgccgtcgcggttttctacattcctggcgttgtgcaggcaggaagagcccgaaatcgagattcgcttgtccgaggttccgcttacgcagcaaatcaagggccttcacgacgatctgtacgacgtagggttcgcgcaatcggacgaggttggcgatggagtcatcgcggaacccgtttgggacgatcctctgatggtggcggtgcctgctcgacatccactcttgaagtacaaacgtattccgttggaagaggtgctgcactatccgctggtactcggcgatcctctggcctgcgagggtcatgcacgccaggtagatcgcgcgctgcgccgagtggagcaggagccactgattgccgagcgagtcacaactatcgacctaatgatggcgttggtatcggcgggctttgccttgggattggctggcgcctcgcagatcgcggccagccgcgagccgggcgtagtggcacgtccgctggccggccgcacacccatgctcaccacctatctgctgcgtctggacggcgagccttcgcagccgctggctcgtttcatcgagagagtcagcactgtcgaatcgtccggtggacagaagccttccacaccaccccaatctgatccttcggaggaaccagagacatga

SEQ ID NO: 351031 - DNA, 2004 bp, Pseudomonas aeruginosa
atgcaaggtcaaggcgtgctgttcgggcaagtcggcgtcgtgttcggcatcgtgattgccggcgtgtggaccgccacgcagtggacagccgccgccctgggctatcagctacgccttggctcgccctggttcgatttcttcggcacgccggtctatcacccttggcggttgttcgagtggtggttctcctacgatgcctatgcgccgcgcatcttcgacactggtggcgcgatcgcgggcggcagcggcctggtcgccgtcgtggtcgccatcgctatgtcggtgtggcgctcgcgacagtcgaagctggtcacgacttacggctctgcacgttgggccgaagttgccgacattcgcaaagccggcctcgacaagccggccggtgtcttcctcggcctgcatcgcggccaatacctacgacatgaaggcccggaacacgtcctgactttcgcgccgacacgctccggcaagggtgtcggcctggtggtgccgacgctgttgagctggccggcgtcagccgtcattcacgacatcaagggcgagaactggcacatcacggccggctggcgctcgcgcttctcgcactgcctgttgttcaacccgaccgatccgaaatcggccgcgtacaacccgctgctggaagtccggcgcggcgcgcatgaggtgcgcgatgtgcagaacatcgcggacatcctcgtcgatcccgaaggcgcactcgaacgccgcaaccattgggagaagacttcgcacgcgctgctggtcggggccatcctgcatgtgctctacgccggcgaggacaagacgctgcgcggcgtcgccaacttcctctccgacccggcttgcccgttcgagctgacgctgcatcgaatgatgacgacgcgccacctgggcgacgtgccgcatcccgttgtcgcatccgccgcgcgcgaggtattgaacaagtcggacaacgagcggtcgggcgtgctgtccaccgccatgtcgttcctgggcctgtaccgcgatcccacggtggccgaagtcacctctcgctgcgactggcgcatcgccgatctgatcgccgccgaccatcccgtttcgctgtacctggtcgtgccgccttcggacatcagccgcaccaagccgctggtgcgcctgatcctcaaccagatcggccgacgcctgaccgaatcgctcgacggcagcgacggcatcgcacgtcgccacaagttgctgctgatgctcgacgagttcccggcgctgggtcggctcgactttttcgagacggcgctggcgttcatggccggctacggcatccgcagcttcctcatcgcgcagtcgctcaaccagatcgacaaagcctacggccagaaccattcgatcctcgacaactgccatgtgcgcgtgacgttcgccaccaacgacgaacgcaccgccaagcgcatctccgaaacgctcggcacggcgaccgagctgcgcgcacagcgcaactatgccggccatcggctcgcgccgtggttggggcacctgatggtgtcgcgccaagagacggcgcgcccgctgctgacgcccggcgaagtgatgcagcttccaccggacgatgccgtggtgatggtgtccagcgtcgcgccgatcagggccaagaagctccgctactacgccgacgccaacttcaagcgccgcgtgctgccgccgcccgcgctcgcggtcgggcgctacgtcgatgcgccgccagttcgtcctgacgactggagcgggctggctatccctgttgttccggttgctccctcagccgtcggcctggccggcggcgacgccggcaccacggacgacggcggcccgcgccgtcagccggagctgtccgaggtcgccgaataccgccccgaacaggaactggtggccaacgacttggcgctgctcgatgacgacgacgcgccgttgccgcttcctcgccagctcgacccggccatgcagcgcacggcccggctggcttccctcgaccaacacgacgggatcgagctatga

SEQ ID NO: 351032 - DNA, 1335 bp, Pseudomonas aeruginosa
atgaacaaccacaacggtaccctgcaccgtggctggcaatcgctccagcgctggcgcatccagatcttcgtcatcacctggctggcctacgccgccttctacttcacccgcaaggccttctcggtggccaagctcggcatcgccgaagacccctccttcgagctcgacaagagcgccatggccgatctcgatgccctctacctggccgcctacgccgtgggccagttcatgtggggggtgttcgccgaccgcttcggcacccgcgtggtggtgctcggcggtttgctcacctcggcgctggcggcgctggtgatgggtaccttcgccaccctgccgatcttcgccgcctgcatggtggtccagggcctggcgcagtccaccggctggtcggggctgtgcaagaacatcggcgccttcttcgccacctacgagcgaggccgcgtgctcggcctgtggagtacctgctacgccttcggcgggctggtggcgacgccgttcgccggctggtgcgcctaccggttgacgcatgactggcgcatggccttcctgtcctcggcgggagtggtgctggcggtggccgtgctgttcttcttcctccagcgcaaccgtccgcaggacgtcggcctgccgcccgtggaggccgaggccgcgccccccgccaacgcgccccggccgagccattccggcgccctgctgaaggcgctcaggaatccccacgtgctggtcctcggcctcgcctacttcctgctcaagccggcgcgctacgcgatcctgctctggggcccggtgatcatctacgaacgcatgccggagatcggcaaagtcgcctcggccatcgtgccttcggccttcgaggtcgccgggctggccgggccgatcctcatcggcctggcctcggacaagctgttcggcgcccgccgcatgccggcctgcgtgctcagcctggcggcgctgaccgtgagcctggcgctgttcgtcccggcgatgcagagcggcagcctgtacctggtggtcggcctgctgttcatgatgggcgtcaccctctacgggccggactcgatgatcagcggcgccgccgccatcgacttcggtaccagcgaagcagccggtaccgccaccggcttcgtcaacggctgcggctcggtcggggcgatcctcggcggcctgctgccgggctacttcgacaccctcacggtgttcttcgtgttcaccgccaccgcgctgctcgccagcctgctgctggtgccgttctggaacagccggccaggcgcgtgccgcgtcgaaccgaaggcgcatgccggcgggccgctgctggcggccggcaagccgcgttga

SEQ ID NO: 351033 - DNA, 1242 bp, Pseudomonas aeruginosa
atgaagggagcagctggccacaagcgcgtgccggctgaatttctagagaacttcgagattccggactggcccctcaacgaccaaatccgcattgttcatctgctcgacagagtggaagggttgatcgcccaacgcaaacaacacctgcaacaactcgacgacctgctcaagagcgtgtttctggagatgtttggaccaacgagtccaggttatgagacttggccgctagtagagattcgtgagttagctgccaaacacaaaggtgcgatgcgaacaggaccgttcggttccaatttgctccacagtgagttcatgtcagagggagatgtggcagtgttgggcatcgacaatgctgtacaaaatcgatttgcgtggggtgagcgccgatttatctccaaggaaaagtatcaggagctccagagttatcgcatctttccgggtgatgtgattgtcacgatcatgggcaccatcggtcgttcggcggtgatccctgacgacatccctgttgccatcaacaccaagcaccttgcggcgattactctgaatagagaggttgccaatccattgtttttgtcatacgccattcactccagcccttatgttctaaaacagttcgcaagcaagaatcgcggagctattatgagcggtcttaatttaggtctcattaaggagaccaagatcaagcgtgcgccgatcgacctgcaagaccggtttgctgaaatccacaagagcgtcgatcaactgaaatcccgctaccagaaaagcctcgcctacttggagagcctctatggcgcactgagtcagcaagctttcaagggcgaattggatctatcgcgcgtacctatgccgaaaccaccaactcaacatgtcggtgctatctccattgaagatcaagcctcggtgcccgaacctgtcgtgcaggccgtgcctgtgattaatttacccaccagcgacaagctgccagcggcgttggagaatgctgaatcccgcaaggcacttatcgcagaatggctgcacgcctatcgcgaacaactgcgcggcatgccgttttcagcgcaggatttcatggcggcggcgcaagcccggctggtggagttgttgccggacaccgaccttgaactgcgcgtcagcgactacgagcacatcaaagcctgggtattcgaggcactggcagctggcacgctgtcgcaggagttcgataatgctggcaatcgcatcaaacttagaactgttccggtatga

SEQ ID NO: 351034 - DNA, 450 bp, Pseudomonas aeruginosa
atgactcaaacaacgacgaaactgacgctgcacgctttcctgctggtgctgctgccgctcgcagggacctcaattggctgggcggcggagcctttgccacccgaccaggccttcaagctgaaggtttccgttcgcggaccgaacaccgtgatcgccgagctggtaccggcgcccgagcactacctgtacaagagcaaggttagcttcgccctgaagaatgcgagcggcgtcatgatccgccaagtgcaactgccggtcggggaggcgaagaacgatccaaacttcggcccgatggaggtgtaccgcaagccgatccaggcagaaatcgccctggaccggacgcccaaggcgaagactctaaccctgcttgcccgctaccagggttgcaacgagaagctgggcgtgtgctatccgccgatcgataaatcggtggacctcgtgttgccatag

SEQ ID NO: 351035 - DNA, 507 bp, Pseudomonas aeruginosa
atgggacggtatagaggacttttgcgcgggctgcgttgggcgctgctggcgcttgcgctggtcgcgtcttggcatgcgcccgcacaagcggcacccgagtccccgacgttcatcaccctggatgggaaaaagatcggccccggcgagctacgcggcaagcttgttctggtcaatttctgggcgacgagttgcggtatttgcctgcaagaaatgcctgacctgatcgccacctaccgccgctatcgaagccgtggcctggaggtgatcgcggtcgccgtggattacgacgagccggcgcagattcgcgcctatatggcgaagcaccagctgcccttcccggtggtgttcgaccgggacggcgcgctggccaaggagtacgaaggcgtgcgcgccacgccgacgaccttcctcatcgaccgcacgggcaagcgtatttccaagaccgtcggcatcatcgatttcgacaagctgcgggccttcctggaatcggtcggcgcgcctggttga

SEQ ID NO: 351036 - DNA, 690 bp, Pseudomonas aeruginosa
atgtctgagactgtcatcaagctggaaagcgtccgtaaaacctacgggagcggcgccgccacgacgaatgcggtctcggacatctcgatgaccgtagaacgcggcacctgggtcgcgatcatgggaccctccggtcacggcaagagcacactgctgcaactcatcggcggcctggaccgcccgagcgccggccgcatcatgctggacagcgcggagatcggcagcctcgacgccactaaactggcggcggtgcgcggccggaagatcggcttcgtgttccagttcttcaacctgatgccgcatctcaccgccctggagaacgtcgaaatcgccctctggctcggcggcgcggccaaacgcaacggacgcgccctggagttgttggagcatttcggcctgggcgacaaggcccaccacctgccgggcatgctctccggcggccagcagcagcgggtcgccatcgcccgggcgctcgccaacgatcccgacatcctgctcatggatgaacccacgggcaacctggattccgccgccgaagccgaactattgagtttgctggacggcttgcaccaggccggaaagacgctcctcatggtgacgcataacccggcggtggcggcgcgagcccagcgcgtaattcaggtcaaggacggtcggatcgtcgcggatgcgagcaatgggacggtatag

SEQ ID NO: 351037 - DNA, 1164 bp, Pseudomonas aeruginosa
atgaacctcggcaaactggtctggcgcaacctgctgcgccgacgcgggcgtttcatcttcaccttggccggggtgagcatcggcatggcggccttcgtcgctctgatgaccatcggacaaggcctgaccggcgaaatcaggaaacaggcccagggcttgggtgccaatctggtggtcacgcccaagggctggtgtgcctatgagcaaatctcggtgctcaccggggagcaactgcccgaggcgattccgatgtccgagctggaaaagattcgcaccgtgcccggggtcgggagtgctgttccctatctcaacgagaagaccgcattccgcaaccagcccgtgccggtgatcggcatttggcccgagccaatgcgcacactgcagaaatggacggtcgagtccgggcgctatttcaacgccccggatgagcgcggcgtcgtcatcggtgcagccatcgccaaacagttccagctcaagccgggcgacgaattcacggtgcgcggcaagccgctgccggtgatcggggtgctgcgcgaagccggcaccaaggacgacatcgccaccttcattccgctgccccttggccagcagatttacgaggtcgaggacaaggtgtcgttcatcgcggtccaggtgaccgacctcgaacaactggaagcggtgagtctcaacatccaggaagtcgccaacgtcgcggtggtttccgacaagcaattgttggcttcgatcctgtccatcgtcggcaccgtcagcgcggcgatgcaggcggtggcagcggtgggcgtgctggcggccgccttcggcatcgtcaatactttgctcacggccgtctacgagcgccgccgggagatcggcatcctgcaggccctcggcagtccccggcgcacactgttcctggcgttcatgctcgaatccgggctctatggcctgctcggcggcctcctgggtacggccctgggtctccttggcgcctggctgttcggccctgcactcaccgacaacgccttcaccgcctcgctccgccagtcgccgacgccggtactcgacgaggcaacactcctcttcacgctgacgctctcggtgggcctcgcgctgctcgccggtctctacccggcatatcgggcagcccagctttcgccggtggaggccatgcgccatgtctga

SEQ ID NO: 351038 - DNA, 441 bp, Pseudomonas aeruginosa
atgaagcaagccatcgtttcaatcgtcgtgggcgccgcgttgctggccggcgctgtgccctgggccggcagcggcctcgcccacgccggcctgcccgacctgttcggcaaggcgcaacccccattgccgaaaggcgctttgcaggtgcaggacctggaggccgatccgaaaggctataccggccgcattctggtgcgcggcgtcgtcgcgaaagtctcgccctacgacccgcaactgttcgccctgatcgactcgcgcgaagcgcgggtctgccaggacctgcagtgcgccaagtattacctgccaatcaaggtcaaggacgccaagctcaagccctgggatgaactcaacgtgcgcggcacgatggctgaagattccgccaggaagctcatctatcttcaagccgactcggtcgagaatctggggccgatcaagaaatga

SEQ ID NO: 351039 - DNA, 1176 bp, Pseudomonas aeruginosa
gtgaacgcgtcggccatcgaaaaccctgcgctggaagtcgtgcggcaggaactgggcagcgcgatggcggccaccaagtgccatcgctgcggttgctaccaggatacggtacaggcgcttgccagctcgtctgtcctgccggcgattcttgcgtcacaactcgccgaggcgcgtgccttgttcgaaccgaagcgctacgactgcctgggctgcgaggtctgctggccggccttggtcatcaacgccgccgccgagctcgacccggcactggccgaagccagccactgcgccaccgaggcacccgaggaacgcgccggctggccgccgctgcccggggactaccgggtgctgcgcttccaggccccagtggcggtgtgcaccctcaactccgatgatttgatcctgcggcttgccgccgcgcgcccgcccggcttgtccatcgtcggcagcctacacacggagaacctgggcatcgagcacctgattcgcaacctgctgcccaatccgcatgtgcgtttccttgtggtctgcggggaagacacgcgtaaggccatcggccacctgccggggcagtccctggtcagcctgatgcgcgaggggctggaggagagcgggcgcatccgcggcgcccagggcaaacgtcccatcctcaagaacgtgggccgtgagcaggtcgaggccttccgccgccggctgcaggtgatagacctgatcgggacgaccgatctcgatgcgctcaccagcagcatcgccgaggccgccgcgaacgatcccggcccggcggaggcaatcacaaccgaagcgcccgtggtacccgttctgcatgccgtggagccgcagcgcctcgtctccgacctggccggctatgtggtgatctacccggactggcggcggcacctcctagtgctggagcattacgccaacaacggcgtgctcacccgcgtgatcgagggcggtacgccgacggccctctacagcacggtcatcgccgaggggctgattagccggctcgaccacgccgcctacctggggcgggaactggcgcgcgcccagcatgccctggtcaccggggaggactacgtgcaggaccgtgccccgggcgaagaagacgctgcatcaccggcctgttccggcgacagttgcacttgtacgacatcggcctcaggcgtccgatga

SEQ ID NO: 351040 - DNA, 384 bp, Pseudomonas aeruginosa
gtggccacttccgccaaggtaatcgtcagcccagtctgcaacgtgacctgcttcgagcaggagaaggtcgcgcgaatcaaggccgaactagccaaagaggaacaactgctgccccagctcgccgaactctacaagctgctgggcaacgtcacccggctcaagatcctgctggcgctcgcccagggcgagttgtgcgtgtgcgacgtggcccatgtgctcgggctcaccgtcgcggcgacctcccatcaattgaagctgctgcgcgaccaaggctggctcgccatgcgcaacgacggcaagatggtctattaccggctgcacagcgagggactgctgaaggcgctcaagggcgacttctgcctgctggagcagcgactcgcgtga

SEQ ID NO: 351041 - DNA, 2145 bp, Pseudomonas aeruginosa
atgctgcccacacgggtgagatccgttttttgttcgctcgcaatcgccttcgggctggtttcgtctgcggctgcgcagatcgaatcgcttcttcgcttcggtgcgcccgcggcgaacatcaagagtgaactgcttgcggcgacggatgcggtggtgccgggccagcccctggtggtcggcctgaggctcgtgccgtccggcggctggtacacatattggcaggttcccggcgatgccggattgccgacccagattgcgtgggagctgccgccgggcttcagtgcggggccgatcgaatggccgcatccgcaacggctgccgcttgggccgatggtgaacttcggctacaaggccgaaacgatgctgctgaccacgttgagcgtcccgcagaatctggcgacgggcggcttcgttacggtgcgggccggggcgaaggcgaattggctcgaatgcaaggacgtctgtattccgagcggagcgacgttgagcctaacgctgcccgtccgcgagtctgccaagccttctgccgcagcgagcctgttcgcggcgacccgcgctttggttccgcagccgctggccggcgccgaggcgcaggccacgctcgacggcaagcggctccggctggcgctggccttgccaagcgaccgcagggtggaccgcgtcgagttctatccgctggaagaagcccacatcgaaccgtctgcagcgcagatcctcaagcgcgaagggacgcagactgtcgtgtacctgaccgcggcgacggcggccgcgcccgatttcaagacactgaggggcgtgatcgtcgccaacggcgggccggccgttccgaacgggtggaccgcaacagtcgaggcgccggtttcttctggtgtgatcgcagcgagcgccttcgagaccgcgggcaaggatccagccggcagctcagcttcaatgacgctgctgattgcgttcggcggcgcgcttctgggcggcctgatcctgaatctgatgccctgcgtgttcccggtgctgtcgctgaagctgatcgggctttcgaaacaccgcacgcaatccggttcgctggccgcgcatggacttgcgttcacggccggcgtcgtgctttcgttcgtgctgctagctgccttgctgctcgccctgcaacagaccggcgaagtgctcggctggggctttcagctgcaaacgccgtgggtgatcgcagcgttgaccgttctgttcttcgtcatcggtctgaacctgctcagcgtgtttgagttcacgttcgggcagggcgtcgccaactcgcgggcggccgacgcgctggtgcgcaagtccgactggcggggcagcttcggtaccggcgtgctggcagtgatcgtcgcttcgccgtgcacggcgccgttcatgggtgcagcgctcgggtatgcgatcgcgcagccgccggctgtcgcgttgtcggtcttcgcggcgctcggcgtgggcatggcgctgccgtacctgttgttgacgctgtttccccgctggctggtcagcttgccgcgaccggggcgctggatggatatcttcaagcagctcatggcctttccgatgttcgcgacctgcgtctggctactgtgggtgctgatgcagcaggtcgatgccggcgaggtcgcgctggcgctgggcgcattggtggccgtcggcttcgcgctctgggcgctcggactgtcgcagcgcggcgcaagcgggttccgctgggttgctttaagcggcgcagtggtcgccgcattgacgttcacgtccatagtgggcccgggaacggcgggagccggcagggtcgctctcggcgagggttggatcgagtattcgcgcgagaggctggttcaactgcaaggcgaaggcaagccggttttcgtcgacttcaccgcagcatggtgcgtgacctgccagatcaacaagcgaaccgtgctggacaccgatcgggttcgcgctcggttcgctgccgatggcgtcgttctgatgcgcgccgattggaccagtcgcgacgagcgcatcacgcaggcgcttgccgagttcgggcgaaacggtgtgccactgtacgtgctgtacgaccgctcaggaaaatcggccttgctgccgcaattgctgaccccgggcatcgtgttcgacgcgctcgacaagatcaagtag

SEQ ID NO: 351042 - DNA, 1968 bp, Pseudomonas aeruginosa
atgagtacctattcgaccacatcatcgcagataccgtcttcgccgcccatcgcggcgcaatccacccgacggcggtggtggcataagcccgaaatggtgactttagccatcgcagcggtattgctggcggttgggctggtcatggagtggatcatccactctgagttgctcgcccagaccctgttcatcgcttcgaccgccattggcggggtctacccaatgcgcaatgcggttcgcgcggtgcgcaacaagcggctgacaataaccgtgctgcttgccgtcgctgcgatcggtgcgatcgccttgggggtgattgaggaagcggcgatgctggtcgttatcttcagcctcggggaggcgatggaagcctacgccaccgacaaggctcgcagttcaattggcgctctgatggaattggctccgccgaccgccaatcggctcaccgccaatggtgaaaccgaggccgtggccgtggaacggctccaccccggtgacgtcgtccttgtccggccgggtgagcgcttgcccaccgatggcacagttcttcaaggatcttcgtgggtcgatgccagccctgtcaccggagaatcggtgccggtggaggcaatagacggcaccgctgtttttggtgggagcttgaatggcaacggcgtgctgcatgtgaaggtcaccaaggaatactacgacacggtactcgcccgagttatcgagcaggtcgaggaggcccaagccaaccgtagcggggccgagcggtttgcggacaagttcagtgccgtctacacccccgccatgttcattctggccattgtggtggcactgggcctcccgttgctcggatatgagtggcgcgaagcaatctaccgggcgctcgtcattctggtcgtttcttgctcttgctctctggtcatctccgttcccgtcagcgtcgttgctgccatcgcccgcggtgcccgcgacggaattctgatcaaggggggcgtctacctagagcgtctggccgatattaaggccgtcgccttcgataaaaccggcactctcacacggggccggcctgctttggctaaggtcgtcccggtcggggacgtgaatgagcgagacgccttggcgctggctgcggcggtcgaatccggaagcgagcaccccattgccaccgcgattgtggccggtgcccagggcaagagtatcggtatccctgtggcacaagacgcccgggccttgcctggaaccggcatggaggccactgtcgctggccgtgtccttcacgtcggccgacctaccgcggtcgaccgtgcgcacgccgtcctggggccagtgctgacgaaggcggaggccgagggatgcacagccgtcgtcctgcgtgaaaacaaccttccgctggcggttttaacggtggcggacgaggtacgacccgacgcactgtctaccatcaaggaactgcgtgatctcgggatcaaacacgtgctgatgctcaccggagacaatgacacggttgccggaagcacggctaagaacctgggattggacggctaccgcgccgagttgctgcccgaggacaaggtcactgcgattcgtcaattgcgagagacctatgggttgattgcgatggtcggcgacggtgtcaacgatgcccccgcgatggcgaatgccgacctggccatagcgatgggcgcggccggcaccgatgtggcgttggagaccgctgacgtagcgctcatggctgacgagcttgaccggcttcccgccgctataagactgtcccggcgggcacggcgcaacatcaagctcaacatcgccatgagtctggttgtcgtggctgtacttgtcgtagctggtcttgcaggctggatgtctctcaccaccggattgctccttaacgagggtagtgccgcgctcatcatcctcaacggcctgcggatgctggttccgggccggaatgaggctcgacgcgccactgtgccagccggctga

SEQ ID NO: 351043 - DNA, 333 bp, Pseudomonas aeruginosa
atgaattcggcgtggctgcttttaggtgtggcgatcatctgtgaaatatcggctgcgatcgccctgcgttttagcgatggcttcaccaaggtttttccgaccgttttggccatcgtagcttttggaatggccttttataccgtgagtgttgcgatgaaaacgctcccagtaagcatcgcatatccggtttgggcgggcgccggtaccgcgggcgtcgctcttcttggcgtattggcgctgcgcgagcctgcgagcatcagcaaaggaatcggtgttgctttggttgtcgcaggggtcgtgctcttgaacatcgcttcgggtggagcagcatga

SEQ ID NO: 351044 - DNA, 453 bp, Pseudomonas aeruginosa
atgaccaatatgagtaagacgtcggatgtcgagaccatcgccgcacccacttgcgggcgtgtggacaattgtgtttctgggtcgccgggaaacgccaggattgccgcgccggcggggcgcggtacgtggttgctcttgggcgtcgcgatccttggcgagatttctggcgcgatcagccttcggttcagcgaaggcttcacccaactctttcccacggccgtggcgctcgcatcgtttgcactcgcgctctacttggtgagccgcgtcatgcgcacgttaccggttagcgtggcctatccggtctgggccggtgtagggaccgctggggtgacactaatcggcgtgcttgaactgggcgagtcgctcggagcgctaaagggtctcggcgtcgtactggttgttgctggcgtcgttattctcaacatcgcatctgaaaaaaggagcggctgctaa

SEQ ID NO: 351045 - DNA, 663 bp, Pseudomonas aeruginosa
atgcgagtatcgaagtcggacggcgcgctgagcgttaacttgcaacgggacgcgcttattgccgctggcgtcaacctggcgcatgcctacgaggaccactcatcagggaagaagcttgatgctcggcctagcctgacggcgatgctcaaggcgctgcgcgaaggcgacaccctggtagggtgggaacttgacaggctcggcgggaatttacgccatctcataaacacagcgcatgacctgacgcaacacggcatcgggttcaaggtgctcacgggtcatggcgcttccatcgacaccacgacgcctgccggcaggctggcgtttggaattcttgccgcccttgcggaattcgaacgggaactgatctcggagcacgccaaggctgggctggtagcggcccgggcacggggtcgcaaaggcggtgcgccattcaagatgaaggcggcgaaagtccgcttggcgatggcggccatgggccagtccgggacgaaagtcagtgagctatgccaggaactcggcatgattcgtcagcccctttatcagcacgtcgggtctgacggctcatggaccacttcactatcgttctcgtgcgaagaagcggcgacgtgggcgcggcagtcgcacatgccctgtatagcgcggtgtcaaggtgattgtgcgtga

SEQ ID NO: 351046 - DNA, 627 bp, Pseudomonas aeruginosa
gtggaatcgagtgacatcaccgccgaaattcgcatggccgtcctcggcgaatgggtgcctccccagctcgccgacgtgctcgccctgcagcgtgccgaagagccggagactcatgccgtcctggccggatggacagatcccggtcgaggcgcggagctgccaggcgacggcttcgacttcgccttgtctgcggttgcccggcagtggcctggctgggtatgcgaaccgctgtggcatgacacgctggcggtcgccgtggccaagcgctcccacctgctggcctaccgtgaagtgccgtgcgaggaagtgctcaagcagcccttgatctgctcgcagtccacggccgatgaaccatggcgcatgaccgtgcagcgcgtgttcgagaacgcgctgcaagagcgagagcaaacggtggagacattcgatgtggcgatgacgctggtggccgccgggtacgggatcgccattgcgcctgccgcgagactggcgagctacctacgccgaggcatcgccgtgcggccgctggccggcgcaccaacgatcgtgatggcttacctgctccgccgcaacacttccttgtcggacacccaggcaagattcgcccgccgcgcgcgcttggtgtcctga

SEQ ID NO: 351047 - DNA, 648 bp, Pseudomonas aeruginosa
gtgaaagcggccgagtacgatgcttggtacgacaccgatcgtggtcgctggatcggagaaaccgaataccgactcttgaccgagttattgacgccgcagtgtggtgaccatgttctcgatgtcggttgcggcaccggctggttcactcggcgcattgccggactggctggtgtagaggtcacaggtgccgatatcgattccgaagcgttgaccttcgcgcgtgagcacgacacccgttcgcgctacatggaagctgacgcgtgttgcctgccttttgcaaacgacagttttcgcaaggtgatgtcggtgacggcgctctgtttcatcgccgattggccacaggcgctgtccgaaatcgttcgcgtcaccagcgaccgcttcgctgtcggggtgctgaaccgccacagcctgctgtggtggaagaaagggcgcaacggtgggagcggggcatatcggggcgcacattggcacacccatcgggagctgcggaaagccttggcggatttaccggtttgcgaccttcagatccgaactgccgtgctgttggcttccggctcgccgctcgcccgacagacggagcagtgcctgtccgggcggttgcctttcggcagttttttggtcgctgcggggcgcaaattctcacagtag

SEQ ID NO: 351048 - DNA, 1161 bp, Pseudomonas aeruginosa
atgtctgaaaacatgaaaccttcgcttccgatctacctcgactacaacgccacgacacctgtggcacctgaagtcctgaccgcgatgctgccgtacctgggcgagcacttcggcaatccgtcctcttcacacccctatggaattcgggcgcggcaagcagtgatgcaggcaagggaggcggtcgcagccttgatcggcacccagccggatgaggtgatctttaccggaagcgccactgaggccaacaatctggcgctgcttggtgctgcgcgtgttgccggaccaggcaagcgtcatctggtcgtaagcgcgattgagcatcctgctgtcatggcgccggccgagtatatgaagacacttggctgggaagtgacgacattgccggtggatggatatggccgcgtcgatccggaggatttgcggcgagcgctcaggcccgacaccttcatggtttcggtgatgcatgccaacaatgaaatcggtacggttcagcctgttgccgaattggcggaaattgcccgcagccacggctgcctgatacacaccgatgcggcgcagtcggcgggcaaaattgcactcgacgtggatgcgcttggcgtcgatcttctgacgctcgccggtcacaagttttatgcacccaagggcgtgggtgccctttatgtccgtcacggcaccccgctcgccggtatcctccatggcgccgaacaagaacatgggctgcgccccggaactgagaacgtgccgcatatcgtggcactcggggcggcggccacactcgctgatggtcgactcaatgaggcggtgatgcgtatgaaagcagcgcgcgatgcattgcatactcagttggccgagggagtgccggagcttgtcctcaatggtcattccgaatttcggctgccgaatacgttgcacgtgtcgttccctcacgttaccggccggacgttgctggccgaagccgctgcggtggtggctgcttctgtagggtctgcttgtcactctgaaggcgacactgtcagcggggtgcttgcagcgatgggaatcgacacagcgcgggccgcgggagcgatccggctttccacgggttgggcgacaacgttgcaggacatcgagcgcgctgccgacgcattgatcgttgcttggcggcgcttggcacatcagtga

SEQ ID NO: 351049 - DNA, 1248 bp, Pseudomonas aeruginosa
atgcacacggccgctatccgcctcgggctgcgcgagaaccttggccagttctctctgctggtgttggtcaatgccttcgtcggcgccatggtgggcctggagcgcagcatcctacctgccatcgccgagcaggagttccagatcgcggctcgggcggcaattctgtcatttatcgtcgtcttcggcatcaccaaggcgctgaccaattattttgctgggcggctctccgaccggtatggccgcaaacacgtgctggtggctggatggctggtggccgctccagtgccgttcatcctgatgtgggcacccgattggaactggatcgtcggtgccaatgtgttgctgggtgtgagccaaggcctcacctggtcaaccaccgtcatcatgaagatcgacttggttggacccaagcagcggggtctggctatggggctcaacgagtttgcgggttatttcgccgtggcgggtagcgcgctcgccactggctggctggccgcccatttcgggttgcggccggagccgttctaccttgggggcgcctatgtcgttcttggtttgttgctctctgcactggccgtccgcgagacccgtcatcatgtggcacacgaagtacgggcgcatcacgcaggagatgaaacggaatcgcccagtcagggcgaaatcttccgtcgcacctcgctgaccgaccgcaacctgtcaagcgtcagccaggccgggctcgtcaacaacctcaacgacggcatggcctggggcttgttcccattggttttcgccgctgccggcatgacactcgcccaaatcggcacgctcgcagcgatctatccggctgtttgggggctgacgcagattttcaccggagccctttccgaccgcattggtcgcaagcagttgatcgtctgggggatgtgggttcaggcggcgggcattgtcgtcacggcgcgggctacggacttcctcggtttcggccttggggcggtgctgctcggcgttggcacggcgatggtctatcccaccttgctggcggctatcggcgatgtagcccatcccgtctggcgcgcttctgccgtgggcgtctaccggctctggcgcgatctggggtatgcagtcggcgcgcttttggctggcttcacggccgacctgtttggactcgccgccgctgtctggttggtagcagggctcaccttcctgtccggtgtgatcgctgcagtgcggatgaccgaaacgcgttcgagaagagccgatgtctga

SEQ ID NO: 351050 - DNA, 738 bp, Pseudomonas aeruginosa
atgttcttcaaacagctggctaccaaggaatcgtctctgtcttacttcttcggctgtggtgggttaggcaaggccgtcgccgtggatgtggtggcaggcgacgaggactggtttatcgaggcggcccgcgaggccaaggtcgagattacccatgtcattgacacccacgtccatgccgatcactactcaggagggcgagcattggcgcaacgtgcccatgccccctactgcttgcacgaatccaatcgcgaccgggtgaagttcgacttcctgcccttgcaggacggacagttgctcgacatcggcaacgtcaggatcaaagtcctgcatacgcccggacatacactggacagtctctgcctgctggtgaccgacaagcggcgcggcgaggcgccctggttcgtcatgaccggcgacacgctgttcgtcggcgccacaggccgtccggaccttgccgggcaggaacgagagatggcgggcgtgcttcacgacagcctgcataccaagctactggccctacccaatgagatcgaagtctatccggggcaccaggcgggcagtgcgtgcggcgccggtctatcgggcaagccggcctcgacgttgggtttcgagaagcgctggaatccggcgctcgccatggagcgggcggcgttcatcgattgcgtgacgaaggagattccgccgcgcccggccgagatggatgcgatggtgcgtttcaacctcggcgtggaaaactga

SEQ ID NO: 351051 - DNA, 342 bp, Pseudomonas aeruginosa
gtgaataccctgttcattctcaacgacgggccttatggcaccgagcgcagctataacggattgcgcttggcgcgagcactttccaaggaaccggatcaggtcgttcgtgtgttcctgatgggggatgcggtggcatgtgcaaagagtgaccagaaagtcccgagcggttactacaacgccggtgacatggtgcgcatggccggaggagaaattggcctgtgtggcacgtgcatggatgcgcgaggcttgagcgacgatctagtggttcccggtgcgcgtcgcagcaccctgaaggaactcgctgagtggacggcagaagccgacaaagtgctcgtgttctga

SEQ ID NO: 351052 - DNA, 645 bp, Pseudomonas aeruginosa
atgaaaaccattctctatgaacaggtgtcccgaatcgggaaggcgatttccagccccaagcgactggagcttctggagctactggtacagggggagaagaccgtcgaaaagttggccgatctggcgcacatcgatgtcaagctggctagtgcacatctgaaggctttgcgcgaggcgaggctggtcgggactcgccgtgacggcaagtatgttcactaccgcctcaccaacgatgacgtggctgacctcttggttaaggttcgcgaggtcgccgaagagcatctgatcgagttgcgtgtcgcactggaccagatgtcggccacggcaaatctcctgagctctgaaacgcgcgagtcattactagccaaggcccgggcaggtgacgtcgtcgtgatcgatgtacgaccgagcgatgaatacgcgtcggcacacctgccatttgcgcgctcgatgccgttggatgaactgcagaagcgaatcgatgagctgccgccgggcaaaccggtggttgcttactgtcgcggtccttattgcgtgatgtccgatgcggcggtcgagttgctgagaaacaagggtttcagtgcgcacaagatcagcgatggcgttggtgaatggcgcgcgacaggtctgccccttgaatgctga

SEQ ID NO: 351053 - DNA, 276 bp, Pseudomonas aeruginosa
atgtctatgcataacccgccgcatccaggggagctgctccgcgaggatgtcttgcctgcattgcacgtaagcatcgagcagctagccctgcacctgcaaacctcttacgaagtgctgtcccaggttgtgaatgggagttcgcccatcagcaaagatctggctgcccggctagagggcgctgggattggaaaggctaggcactggttagccatgcaatcagcccatgagcggtggctagcggagaatccccagcaaccacatcttttcagtaggtga

SEQ ID NO: 351054 - DNA, 978 bp, Pseudomonas aeruginosa
atgcaggacgtgatgcggtgcctacaaacagagctgaatgacgcgcccgctgataccaaggcgcaccggattctgcaattcatggtgcaagccaagctggcagagatggaaaaggggagctgcgagccgcaggtgtttggccgctccgcgttactgttcaacgtggagggtgagcgcaagggccaggccctgaatcccactacatggctgcagccgggattgctggagcgttttctggactcacggcagtccgcgctattcgagcgcctgcaacgggctggcttggatcagatgccggtcgttcgcaccaatgagggtaaggggggcaaaggtattgagcgagcctactggctcgatgttgccccgctgcctgcagagattgaggcggatgagccggcacgacttgggaaccgtatcgagtatcggcgaaccgatgcaggggaggtaaaaacctcctggctgatgcgcatagtgtttcgaaatggcgagctgaagaacaagagctggcgtggtctgctgctattggcctctatcgtgtttggaatagtgctgcttggcctatggtttctcgctggggtttggagcgtatcgggcctcgaccacgggctgacattgcgacagttggggagctctgctttcttcgcgctgtgtgcctggtatatctggcggaacttctacgccccgtggtggcgcctggttgatgatcgtgtgatcaaggctccgaccgcgctgctatcgctctgggaggactccgctgagctggaaatgcaccgggatagtgatggggcccaatggacgcgcttcgtgcgtttcagcggtgattgcccgttgtgtagcgggagagtgctgttgatggcgggtaaacccgatcaggttctccccttggttgggcgatgcattgaaagcccccatgcgcatgtattcagctttgaccgagctcgactagccggagcttacattggcccaccgctagcttga

SEQ ID NO: 351055 - DNA, 882 bp, Pseudomonas aeruginosa
atgaccatgttcgtagcgctcgaccaaaacggccgactcatcaccattgaaaacgcattgcgcggccttgcctgtaactgcatatgcgtgagctgcggtgaggcagtcatagcccgcaaaggccttcttcgagagcaccactttgcccactacagcaacaaggaaagctgcaacatccatcgcgaaagcctgctgcacttgtacgccaaggaggtcattcgcgatgcccttggtctgcaactgccgcccccgcccggagtccaccccatcagcgaagacaccagcagctggtgggacttcgaaaaggtcactccggaagttccgcagccgggctttcagcccgacctggtggccgatctgaaggacggcacgcagctattcatcgaggttgccgtcacctccttcatcgacgaagtgaaaagagagcaaataaaggcttttggtacacgaacgattgagcttgatttgcgtgaccgcctgctgagccagcacccaataccatctgaggtggcaaaggattacatcctccaccagatccaccacaaaacctggatataccccgaaacactgcctaccacgcagccatccgaaaacaattgggcactccctccacacccaatcgaacgccccttgccccggccaaccaccacgcagccggagcagcgtttcatcatcatgcagatgtgggtatctgccaggacattgcccagcggctcaattgcggtgcgctcctggtcgtttaatccgcaaatagccgagctgctcaaaacgtggcgaaaccagctgggtggcgagtacaaccccaggtacaggaactggatcttctacccccacaaccgcgatgagattctggagagacttcgagcgttggatcagcgctga

SEQ ID NO: 351056 - DNA, 1155 bp, Pseudomonas aeruginosa
atgaatgaacccttctggatctggcagcagcccgactggccacacttcaactggcaagccgaaccgcttgccccgctgctgcgcgcctgcacccaggcccaggggcgcttgctaggcatgctcggtgctgtcggtagcgatacggagacgcagagcagcctggatgcccttctggagaacatcgttacttcgtcagctattgaaggtgagcaactgaatgtcggttcggtgcgctcatccctggcaaggcggctggggattaacgaagagggccgagtcaacgtacgctccgaaggccttgcggaattgcagctcgatgccaccagcgcacatgaacagccgcttgatctacagaggctatatcgctggcactgttggctcttccctagcgacgataacttgctgacgcgcccattacgggttggcacgctacgcggcgaagagcccatgcaggttgtttctggccgactcgaccgccctaccgtgcattttgaggccccaccgcgccaggggttggaagaacagctggcagatttccttacctggttcgagagcagccgcagcgatgccggtctcgacccgttgttacgcgccggcattgcccatttctggttcgtcaccctgcacccttttgtggacggtaacggccgccttacccgcgccattaccgacatggcactggcccaaggcgagcatcaggctatccgcttttacgccatgtcggcgagtatcctcgacgaccgtgccgactactaccgcttcctcgagaccagccagaaaggcagcctggatatcacagcatggttgcagtggtttctcggcacattgctcaaaagcctggaacaggcccttggccgtatagaccgcgtactggccaaggcgcgcttttggcaggcacatagcacagactcgctccctcccgagcaaatcaagatgctcaaccgcctgcttgacggtggagaaaagggctttgaggccggtatcagcgcagcgcagtaccaagcagtcgcccaggtctccaaagctacagccacccgccatttgagcgacctactggagaaaggctgcctgcggcgcctaccgggcggaggtcgcagtacccgttatcagatcaaccagcccggcagttccttgcctggcctcgacattgagtaa

SEQ ID NO: 351057 - DNA, 1548 bp, Pseudomonas aeruginosa
atgaccaacaccgacatcgtccagaaactctggagcctgtgcgacatactgcgcgacgatggcatcaactacagcgactacgtctccgaactggttctgctgctttttattaagatggaatacgagcaggtacagaataacgccagctttgagcataagctgcccgacggctaccgttggtcagacctcaccaacaagacaggcctcatccgactcaatagctatcggcaaatgctcctggatctgggcaaaaacagtgatccgattatcgccgcaatctatgccgacgcgcagacccgaatcaaagagccgcgccacttcgaccagcttattaagagcctagacgccataaactggtttgacgcccgcaaggatggcctcggtgatctgtacgaagggctgttagaaaagaatgctagcgaaaccaaatccggcgctggtcagtatttcactactcgcccgctgatcgacagcatcatccgcgtcatacgccccaaagcaggtgaggtgatccaagacccggcagcaggcactgctggttttctcaccgcagccgacgcctacattaagcaaaacaccaatgaccacagagatctagatgaaaaggcccgcaacttccaacgccactcagcctttatcggggttgaattagttcctggaacgcgccgcctagccctgatgaactgcctgctgcacggcatggaaggcaacgccgacggagtggtaaggctgggcaacactctcggcgaagatggggtgagcctcccgaaggccgacctaatcttatccaacccaccgttcggtaccgctaggggcggtggtggtccgacccgcagcgatcttacatataagaccagcaacaagcagctggctttcctccagcacatctacctcggtcttaagcctggcggtcgtgccgccgtagtgctgcctgacaacgtattgtttgaggcaggagtaggcacagaggtgcgccgcgagctaatgtcaaaatgcaatctgcacaccattcttcgcttgccaacaggcatcttctatgcccagggcgtaaagacaaatgtgttgttctttcaaaaaggaagtaccgctaacccacgccagaaaaaagactgcacccaatgtacttgggtttatgacctacgcagcaatacgccaaactttggaaagcgcaagcctatagaggcaatccacctaaggtcatttgaggatgcctatggagaggaccctaatggtaatagtccacgtgccgagaatgtcgaaggccttggcgaacttagccgttttcgtgcattcagccgcgccgatatcgccgctcgtggcgactcactggatataagctggctcaaagatgctgacagcctggatgccgatgacttaccggcaccggaagtacttgccagcgaagccatggccgaactgactgaggccctgcgcgagctggatcagttgatgctagcgcttggtgccggggaagaagccgagcagcaaaagcgaatgctggaagaagtaattggactgaatgtggtcagggggcacgccgatgagtga

SEQ ID NO: 351058 - DNA, 1743 bp, Pseudomonas aeruginosa
atgagtgacctgccaaaggagtggatagacactaacattggcagtatcgctgaggtaaccagtggcggcacgccgcaggcaagtgatccgagcaacttttcagccccgggaacatcaattccttggctgacgccttctgatttgagtgggtacaaacataagataattcatcacggagcgagagatctcagtgagaaagggtatgattcttgctcagcgaaactaataccggcaggaagtttattgttcagtagccgagccccaatcggctatatagcgattgccgcaaatgaagtttcaactagccaaggcttcaagagctttactttccctaaatatatcaaccccagctatgcctactatttcctaaaaagcattcggagccttgcagagagtctaggtactggtaccaccttcaaagagctatctggaacaacagcaaaaacgcttccattccgcctagctccactcgccgagcaaactcgcatagcccaggaactcgatgatctactagcccaggtggaaaatctaaaaagtcgtgtcgatgcaattccaactctacttaagcgccttcgcagatccgtcctcgccgcagcagtttccgggcgattgacagatgagtggcgtgtttcacacaaccagctaggcagtgcattcgaactgcacaaaaagttgaagcaggcgcacgacgccgaaggggggcacgctagaggcaatgcatccaaacctaccgagaaggcgcatgaccttacgagcgatgagctgcctgaaacctgggatattgcagagctacgcgatatatgcgctccaggtcggccaataacttacggcatattaaaacccggcccggagctagagttcggtgttccctacatccgtgttgctgacttcccagacaataaattagacttctcaagaatcaagaagaccagcccagaaattgatctccagtacaaaagagcacggctgacggcaggcgatctcctcctctcaatccgaggtagtgtaggaagattgataaaaatccctgaagagctggaaggcgcaaatattactcaagatacagctcggctttcgatctctcctctagtcatgaccgattttatctattgggccctgctcgctgactcaactcagctaagaataaaaaaagcaatacgaggtgttgctgttagagggattaacatcggagatgtacgagccttgcaaatcccccttcctccactcgaagagcaagccgaagtcgttcaccgaatcgaacgactctttatatacgccgacgaggtggaggcgaaggcttccatcgctttgtcccatatcaacaagctatcccagaccatcctggccaaggcatttagaggcgagttaaccgaaaactggcgcgccgataataaacttttaataagcggcgaacacagcgccgaagcgctattagaaaagataaaaactgagcgcgaactaaaaataaaagcacccgcttccgaagccccccaaaagccaacaaagatgggcaagaacatgaaaacaagcatcattaaggttttcgatgcacttaaagaagccaatagaccgctcagtggccaagagcttttgactgcagccggctaccccaatgacagtactatcgaggagctggagcagttctttttggatgtgcgtgaatcgattgagtctaataaaatacgtaagcaagatcgagacaatagcgggcaagactggtttgccttagcagaggcgcgataa

SEQ ID NO: 351059 - DNA, 1599 bp, Pseudomonas aeruginosa
atgaaagtcgataaacttcatatccgctctcgcttcaaaaatctagagaacacacgcatagattttgacgaagacaatctaatgacagtgattgtgggctgtaacggtgctggaaaatctaatgtcctggaagcactagtagcaattttccgcaatctagacctaggtgagtcgccaccgttttcttatcatttggtttatcgacttggccagcgccctcagaaaaacgagtcgcccgggcaatggcttgaaatcactattgatgctgcacctgagcgcggcacattggcaaagcagtatgaagtaacagtaaaaaacctacttgaattgaaagatggaaatttagcaaatacaaagccctccatcacgcccattcctttttccaaagtaaaacgggacaaattcggcaacgcgccttatcttccgaaatatgtattcgcctactactccggcccaagcgatcgactagaaagacactttaaaaagcaccgcacagaattttaccgccgcttactgcgcgacgaactagacttgaaaggagatattcgcccattattttacgcaaaaccccaccacagccaatttgtactactcgccttcttcttatcagctgaagacagtatcgagaaagctttcttactaaaacatctaggcatcaaaggtttagacagcatccactttgtgatgcgccaacctggctgggcgaaacagaaaggcgagctgttctggggggcgcgcggcgtagtacgccgcttcttagacgagttaataaaatatgccttatcacccgtaaaagtaacacgacaagaagacacgtcactgaccggcaacaatatcaacaatgaattctttcacttattcctacctaacgtaaaagcgctgcgcgactttgctaaagacctaagcgcagacgaactgttcaaaatgttagaaagcaccttgctttccgaaataatctctgaagtaagcattcgggttgaggtttctagcagcactgaggcacttactttccgagagctcagcgaaggcgaacagcaacttctgacagtcctaggcttattgaagttcaccggaggaaaagactcgctatttttactggacgaacccgacactcacttaaatccagcatgggcagtaaaatacctaaaatttctaagcgactttgttcccgaccatgaaactagccacctactgatggtaactcaccatccattggcaatcgccgaacttgaaaagcaacaagttcaagttatgtcgcgaggcgaagataataaaatttacgctagggagccagacgaaagccctagaggtatgggcatcaatcttattcttcgcagcgaaatgttcggattgaagaccactctggatgacgacaccaacagaaagctaactgcacgcaacgcgctcgcagcaaaagaaaaactttctgaagaaaggttcgtccgagaagaaggattaaatccggagaccgacgcagaataccttaaacgcttaaacgaagatttagaaagcctcggctttaacttagctacagacgaccctgattacctcgacttcttacgaagtagataccatcaagataacgtgaggaactcttaa

SEQ ID NO: 351060 - DNA, 810 bp, Pseudomonas aeruginosa
atgcgctggatctgcaaagatgatatcgaagagcgcataacgcaagcttggaggactaaatctgcacaagcgaaggctgcattgattgcagcgcccgacgcatcagcacgcaagaagattctcaaacaactagcgtcatccgatgtatggcgtgagttctatgaaattctgccagagaaccttaaaaagaaatgttggtactgtgaggctgatgacattcgtggcgacatgccaatcgatcactttcggccaaaaaataaagttcaggaagagccaaaacatgacggctattggtggcttgcctttgagtggacgaactaccgttgcgcatgtacattttgcaacagccgaagaaattttgaagaaactcaaggtggaaaggcgtgccgattccctttaaaaaaccctgatagtagagcattcaaacctgaggatgaggcacttcttagagaagagcttccagactttctcgatccatttgatccagatgatgagaagttactatggtttgacagcgatggcctgccagagccgaaacccggagctaatgaagagcaaaagcagaaagtcgaaaattcgattgatattttccatcttcatgagacacggattactcgagccagaaacaagatacgtattgaagtcgacaatcaagtaagaaaaatccgcaacagggatggggttcatgaagcaaaactagctttaagacgcatgattagagatacagaaaagctttcacgcgctgcagtcgtatacttgagcccccacagggaccttcgtgagatagaagaaatattaaaactagactga

SEQ ID NO: 351061 - DNA, 999 bp, Pseudomonas aeruginosa
atgaacctgtccgatccccacgaactcgccaccctgctcgaaggcatcctcctcgcggccggcaagccgctgtcgctggagcgcctggccgagctgttcgacgaggccgagcggccggaaccggggcagttccgcgacgccctggcgatcctcgcgctgtcctgcgcggggcgctccttcgagctgaaggaagtcgcgtccgggtatcgcctgcagattcgcgagcgtttctcgccgtgggtcggccgcctctgggaggagcgtccgcagcgctattcgcgcgcgctcctggaaaccctggtgctgatcgcctaccgccagccgatcacccgtggcgagatcgaggagatccgcggcgtggcggtgaacacccagatcgtcaagacgctgatggagcgggagtggatccgcatcgttggctaccgcgaggtgccggggcgcccggcgatgctggcgaccaccaaggcgttcctcgattatttcaacctgaagagcctcgacgagctgccgccgctgtcggcgctgcgcgagatggagcccgagccggaaccgccggtcgaagtggcgtccgcggcgcagccaccgcgcgacgatctcgacgaggatgcgattcccgcctcgatccaggccctggccgatcgcgccatcgccgaggccggggaaagcctcgaggagatcgagggcgaggccggcgagccggagaaaccgcgcgaggaaaccagcttccgcagcctgctgctggaactggacgagatggagcagggcctgaagaccgacttcgacgacctgctcgaccctccggagccctcggagcagggcgacgagtccgccgagccagcggctgggccgattcccgtggtcgcggagcaagccgtcgagcctgccgtcgcggaggctgtcgcggacgccgatcccgatgacgaagagcgcgccctggcggaggccatgcgcgaggagcgcgaggcactggacgccgacgacgactggccgcgccgctga

SEQ ID NO: 351062 - DNA, 729 bp, Pseudomonas aeruginosa
gtgagcgcgaacggacgatcgatcctgctggtggacgatgaccaggagatccgcgaattgctggagacctacctgagccgcgccggcttccaggtccgcagcgtttcgcggggcgccgacttccgccaggcgctgtgcgaggaggaggcgagcctggcgatcctcgacgtgatgctgccggacgaggacggcttcagcctctgtcgctggattcgctcccaccagcgcctggcctgcatgccgatcatcatgctcaccgccagttccgacgaggccgaccgggtgatcggcctggaactgggcgccgacgactacctgggcaagccgttcagcccgcgcgagctgctggcgcggatcaaggccctgctgcgccgcgcgcagttcacccaggtgcgcggtggcgacgtactggccttcgaggactggcgactggatacggtcagccaccggctgttccacgaggacggcgaggagttcttcctcagcggcgcggatttcgccctgctcaagctgttcctcgaccatccgcagcagatcctcgaccgcgacaccatcgccaacgccacccgcggccgcgaggtgctgccgctggagcgcatcgtcgacatggcggtcagccgcctgcgccagcgcctgcgcgacaccggcaaggcgccgcggctgatccagaccgtgcgcggcagtggctacctgctggcggcgcaggtgcggccgcacctgcagccatga

SEQ ID NO: 351063 - DNA, 204 bp, Pseudomonas aeruginosa
atgccaatcgaattcctgacccatgaggaggtatgcgagctcaccggcgctagaaccaaggccggccaggtgcgcgtcttgaagcagaacgggatcaggcacaccatcaaaatgaatgggtggcccgcggtaaccactcacgccgtaacgggcgagcacagcaaagaaccggctgtaatccagtggaaacccaacaaggcgtaa

SEQ ID NO: 351064 - DNA, 1662 bp, Pseudomonas aeruginosa
gtgcttgccggtgaggaccttcatcgcgacgtaggtgatgaagcccagggcgataccgtcggccaccgagaaggtcagcggcatcatgatcaccgtgacgatcgccgggatggtttcggtgtgctcgtcccagtcgatgtgcgccatcccgcccatcatcagcatggccacgtagatcagcgcgccggcggtggcgaaggcggggatcatcccggccagcggggcaaagaacatcgcggcgacgaacagcacgccgaccaccaccgcggtgagcccggtacgtccgccggcggccacgcccgcggcgctctccacgtaactggtcaccggcgggacaccgagcatgccgccgaacacgctggaggcgctgtcggccttcatcgccttcgacaggttctcgatgcgcccgtcctccttcaccaggtgcgcgcgctgggcgacgcccatgagagtgccggcggtatcgaacatgtgcacgaagaggaaggccaggatcacgctgatcatggtgacgttgaacgcgccggcgatgtccatcgccaggaaggtcggcgccaggctcggcggcgccgagaacaccccgccgtactgcaccaggccgagggcccagccgaccagggtgacgctgaggatgctgatgaggatgccgccgaacacccggcggtactcgagcacggcgatcatcaggaagcacagtgccgccagcagcgggccgggcgaggtgaggtggccgagcttgatcagggtcgccgggctggccaccacgatgcctgcggtcttcaggccgatcaggccgaggaacaggccgacacccgcacccatggcgaacctgaggctgcgggggatgctgttgagcagccattcgcggacccgggagaaggtcagcagcatgaacatcaccccggagatgaacaccgcgccgagggcgatctgccagctgtagcccatggtgccgaccacggtgtaggtgaagaaggcgttcagccccattcccggcgccaggcccaccggccagttggcgtacaagcccatcaggaagcagccgagggcggccgccaggcacgtggcgacgaacgccgcgccgtggtcgatgccggcgtcggccatgatgttgggattgacgaagatgatgtaggccatggtgatgaaggtggtcagcccggccgccagctcggtcctgaccgtcgtaccatgctggcggagcttgaacaggcgttcgagcaggccggtggcgggcggtgtcgcagcgtagatcccttgttcttcttgtttggtgctttccacagcaggtactcctcatcgctcttgttgttaggtcctgcgggccggttggttaccaggtccctgacgcggctcgaaggtgatgtgagggcacgattttctgacctttgggtcaagaactcgtgcgagcgattatgcctttgtatacaaaaaggtcaaagaatgtttgagggtgtttcgccacatttttatcagctttccgtcacgcgtccttccgggcggtgccgcgcgctcggaacgaggggcggaaaggggtggtgcgccggatgccgctgcttgtgtacactatttcgctatcagccgccggcgtgcctcacccacgcccgtgagcgaggatcagcccaggccacaagccggacgcacaaggttcgagaccgatga

SEQ ID NO: 351065 - DNA, 501 bp, Pseudomonas aeruginosa
gtgccgtccttccagatcaacgacgaggagtgggatgcgctcttcgacgagccgcatcagcttctgaaggtgtactgcgcgatccggatgttcatggactacaggaccggcatcgctggcgaaacccgccgcctgagcgagcagatgctgattgaggttttgagcatcccggcatcacctgggcgtcctgcgcacaaggcgacccgcaaggaggcccgctacaccatcgatgcgctggtgcgccgtggcatggtcgagcctatgcccagcatcggtcctttcgttttccacctgccgaaggcttcgcgggatcaatccgtctcggagaggtggggccagaggtttgaccaaggtggggccagacctggggccctaggtggggccaaggatttagagccagaagccccggaactactgggctacagcgaagaggttggagcaggtggggccagaggtggggcctacatccggtcttcctccgatacctcctccgtcacgtaa

SEQ ID NO: 351066 - DNA, 360 bp, Pseudomonas aeruginosa
atggaaggcattcttagtgctatcaaacaactgattcaaacggcgaccgatttcttccagcgcgcacttaaggcaatcgaagacttctttaagtgggcgcaagatgcgtttgattatttttgggagcttcttcctgtcctgcctgagtatgtgtttcacaggcttgtctccggtattgtgaagttcttccagtggttgccggtacctgatttctttttgcaggcaggtaacgcgtttcagtcgataccgccgtcggttgtgtatttcgccaatgcattccagattggtccaggcgttaccatggtcctgggcgcgtatctgctgcgattcatcctccggcgtatcccgattatcggttga

SEQ ID NO: 351067 - DNA, 1134 bp, Pseudomonas aeruginosa
ttgtattgcgttagtcgctgccgcggtccttatggctgcttttggccggtcagcgaccacgtcgagaatctgagtgccgcacagctgctcatcgtattcgacgacgataacgtcaaccgcttgatgctggcaggccccggctcaggcaagacacgcgttatcgttcaccgcattgcctatctgctacgcgtgcgaggtgtcctggcacgctgcatcgtggcgctaactttcaaccggcatgcagcggacgagatcaagcagcgcctgctgaggctggtggggcccgatgcgttcggggtcaacgtcatgacctaccaccgcatggccatgcgcctaacgggtacccgcttcgaacgcggcgaaacggtcgaggaagggcggctcgctcaggtgatgaagttactcgaaggcaagcgtcgcctggcgcgacaccgacaaccgctatatcgagcgctttcgcgaagattatttggcctcgacgagctatctggccgacaactacctctccagtgcccgcatcatcgaagccgccaaagcgtcatcggccgtaacccggatcgtctgagacaggattacccccttcagatcgacacggcccgtcgtgaacgacctaaaggtggcgactgggagagcctggatctggatctggagcgggcagggcgggtgctgcgtttgaaagtcgacgccaaagacgacgcacgcgcaaacgttcaggcccaagcggcaatggccgagctgcaacggttgcttacgctggacactgaggattggcagggctggcctggtgtgaggcgtacagcgtgccgtactgcctggccgctgacaaggaagtgcattgccacttacggcccagcgaggcgacgcatggacgcgtctttgcgaaacggcttttgccccggattggtacgacttcttcatgaccgcgttcgatcagattaccgccgagttcgggcaatgtccgctcgcagcccataccttagtcgattggatctacgactacgcgcgccagctgcgccaacaaccgaaacaggggctgtacctgggcaaggtgcactcggccatgggggcggggttccggcacgtggtcgtgctggacggtggctggtcctcgcaacccgacaccctgagcgatga

SEQ ID NO: 351068 - DNA, 1200 bp, Pseudomonas aeruginosa
atgcgcaaaggcgccgagatcgctcaggcgctgccgctggaatggatcgagcgcctgaaccaggcgcttttctcctcacccgaagatgccgagctgctggaggacccggtcatcctggcggcgtgccggcgtgccaatcgggcagaaatgctgcattgggcgcatgccaacctgcagcgccccggtgaaccggtggagccctacgtgtcagccgacatggtggacaccgccaaggaactggcccgccgggggctttccgagttgttgatgaatgtcgcgaggtcgacccagaacgccgcatgggacatgtggatgaagatggcattcggcctgacgcgtgatccggtggtgcttgaggagttcctggaggtctcgtcgcgctccatctcggcgttcatcgacggcaatatgcgggtggtgactcagatcatccttgaagagaagaacgcccaggcccatgacgaccctgtcgacaagcggacgctggtcagtcgtctgctcgatggccgggatgtggacaccgaacagttcggcaggcggctcggctacagccttttccagaggcaccacgcgtgcctcatctggagcgaaatcgccgatgcgcacatccaccccttggagggcatggcacgtgcgctggcgcagcttaccggcacggtagcgccgctgatcgtgttcgctggcccggcaacgctgtgggtctggatgagcgcggcaaggccgctggacctgaccgcgctgcaaggcgtcgcccagcagtttccaaacgtacgcgcggccatcggctcccaggcgatgggggtgaacggcttccgtcgctcacacctggaggccctgaccacccagcgattgatggggcgcctggcgggtgcacccgccgtcgccacgatcgatcaagtcaggatggtttccctgatgacccaggacttgcgcgccgcaaggcaattcgtcctgagcacgctggggcggttggccacggagcccaggggcctccagcattcgttgcacgccttcctggccaacggctgcaacatcacccagaccgccgaagtactcagcacgcatcgcaacaccttgctgcgccgcctggagcgtgcccaagacttgctacccgtgccgctcgccgaccaccggatccagatcgccgcggccctcgaactggtgatctggagcacgccagtggccgacgacgggcaatag

SEQ ID NO: 351069 - DNA, 963 bp, Pseudomonas aeruginosa
atgggttacagaggttcattcgcggcggctttgctcgtcgccgcactatcgctggagtctctcagggccgagcctttgcaggccgtaccggccgcccgggcgagccatgccacgcaagccaccatgctggacgccacctgggccgggcagcgcctggtcgctgtcggcgaccacggtgtcgtgctgttgtccgatgaccagggcaagcactttcgccaggcgcgctcggttccggtgtccacgcagctgacgggcgtgtcgttcgtggacgccgatcgcggctgggcggtcggccagtggggcgtgattctgtcgaccaccgatggcggtgagtcctggcaggtccagcgcctgtccacggaagaggaccggccgttgttcgacgtgcacttcttcgatgcccggcagggcgttgcggtcggcctctggtcgctgctgctgaccacccgggatggcggcaagacgtggacggaacagccgctgcaagccccacccggtgccaagagggccgacctcaacctgatggggctttttgccgacagccgcggcacgctctacgccacggccgagcatgggcaggtattgcaaaccgacgacttcgggaagagctggcgttacctggataccggctacgaaggcacgctctggtctggcgcggtactggccgacgggagcctgctgctgggcggccagcgtgggacggtgttgcagggggcggcggatggcaagggcttccgccgactgccgacgcaaagcaagggctctgtcacctccgtagcggtggagggccgtcgcgtcgtggcggtcgggctggatgggttcaggatggagagccgcgacagtgggcacagcttccaggataagcagtcggcagacggcctttcgctgaccgcggcgctgttcgaccccgagggcgtgcccgtgctgttttcacgtcgcggggtcgtcgcctatcaggagtga

SEQ ID NO: 351070 - DNA, 1422 bp, Pseudomonas aeruginosa
atgaaagacgtatccacacggcaggacggcgacctatccgcccgccgtatgttcaggcagctgctggttaccctcgcggcatcgaccgcgatctgctcggtacaggccgcgccccagggggccgaggcgctgggttcgacgctgacgccgctgggcggtgagatggccgcgaattcgagcggggagattcccgcctggacagagccggggccacaaggtgagggctggagctacggccaggtgcggggagagcactggaggttcaagggtgacaagcctctctacagcatcgactcgagcagcgtggcgcagcacgcgagcaagctttcaccgggccagctcgaactgttcaagaagattccgggctaccgcatggacgtctacccgacccgccgtagctgcggcgtgccggacttcgtggctgagaacacccggcagaacctcggcttcgccaagctcgacgccgagggtgtggccctcgaggaagcccatgtgccgggcatcccgttccctttgcccagcagcggcgcagaggtgatgtggaacatgaagatgcgttaccgcggcctgggtgtagatatccccaagagcatttcaggcatttcgccgcgcaaaggcagggaatggttgcgccagtccacggacaccttcttctttacgccctggggaaagaaaggcagtgcgcttttttcctccgtcggacgcctggaaaacgccacgttctccagttaccaggagcccgcggcgctggccggtcaggctggcgtgcagacggcggtggccggcgagcaggccacgaccttctactacttccccggccagcgtcgggtccggcgcatgccgtcgtattcctacgacgcgccacagatcgggctggacaaccagtacaccgtggatgaggcgaacgtcttcttcggggccatgaaccgcttcgactggaagctgatcggcaagcaggagctgctggtgccgtacaacgcctttggtgcctacgacacggccgccaacgtggaaaccttcgcgggcaacgactccatcgcgccgcaatcgcgtcgctacgagctgcatcgtgtctgggtcgtcgaggccaatgtccgccagggcatgcgccaccaggcccccaagcgcctgttctacatcgacgaggacagctggaaccccctgctggctgtcgactacgacaagcagggccagatctggaaggtgcgtgaagggttctcgatccccgtctacgagacgggcgcatgcgatgtgcaggcacaggtccagtacaacctggtcgacaaccgttatctcttcgacatgaccaccatcggcgcgggcaagaacgatatccgctggctcaccgaggacagtggcaaccctcgactcaaacgcgacttcttcacctccgacaacctgcgagctatcagcgagcgctaa

SEQ ID NO: 351071 - DNA, 675 bp, Pseudomonas aeruginosa
  misc_feature (196)..(205): n is a, c, g, or t
gtggaactgatagaagtgggtgccctggtctcatgtgtgttactggtgatctgcggcctgtactatggggtggcgttcatcaggcgagataactatctgattggttgggagtttttgattgtaggaatatccgcgacgaacttcacggtcttcatcgttacgggctggctggccaattacaatgtcgccatgtttnnnnnnnnnnttctcgatgccttctcccgtggggtcggtattccaatcattgcaacactgggcttgatggcggtcacgcacaattacaagccttccctggcgagtgacatcctattgttcctggcggggtttgcggccgcggccatctacttcacgtcgagttcattcaaggcctacctcccgtatttctatgtggcgatgtggttggcttacaccctgtatctggcctatttcgtgtggcgactggcccgtgccagggagcctttgcatgcgctggccactgccttgagcggcgtggcggggctgacgattgcactgcggtatgacttctttccgattccgggtgacgacacaaagatagtattcatgacctgtgccttcttgacctggtcgtactcgattgtgcagtcgtattacgcctatggtgcacttcagcgttccaggaagaattcagttgaggcgttgctcaacgtccgttaa

SEQ ID NO: 351072 - DNA, 216 bp, Pseudomonas aeruginosa
atgacgtattcaattgagtccaaagtgagtgaattgctggataacagcactgcgcgccagattcttgaaaaacacttgcccggtatcactaaacatccgcaaatcagcatggcccgtggctttgccctggtgacggcggcgaaatattcgggcggcctgatttctcaagacgcgctaaataaaattgacagcgacctgaagtcgttggccggctaa

SEQ ID NO: 351073 - DNA, 582 bp, Pseudomonas aeruginosa
atggctcggataggcgctgaagagcgcagacaggattttatcgaggccaccatcaaggtgatcgcagagcacggcatcgccaacgccacgacgcggcgtatcgcggcggcggcggattcgccgctggcctcgctgcactacgtcttccacaccaaggaggacttgttctatgcggtctacgagtccttgatcaacctgccgcaacagtccttgcagcaagtgccggcaggcgccacccccgcagagacggtaggggagatgctgcgccaactggtcaagtggttcatcgcgcaccccgaacgggccatcacccagttcgaactcttcttctggaacctgcgcaacgacccggaaatggcagcgaagatctacgccgtttccatcgaagcgacccagcaggccatacagaaggcgacgggcgatgcgttggatcacattgcagtggccaccgtcagccggctgctcctcaaccttttcgatggtttgctgctctcctggaccgcccacggcaaccccgaccgcctcgaggccgagaccgagaccgcctgccaggcggtggaactgctggtggccagctactaa

SEQ ID NO: 351074 - DNA, 1527 bp, Pseudomonas aeruginosa
atgtcctcgcacactactcttccggttgagccactcgatattctgatcatgggagccggtgtgtctggcatcggtgcggctgcctatctgcggcgctatcagcccaacaagaccttcacgattctcgagtcccgtgagcgcatgggaggcacctgggacctgttccgctatcccggtatccgctccgactccgacctgtacaccttcggcttcgacttcaagccctggaccaaggcgaagtccctggcggacgccgcggacatcctcgagtacctgcgcgaagccatcgacgagcatgagctggagaccctcatccagtacaggcagacggtgatctcggcgaactggcaatcggacaagggcctgtgggcggtgctggtggacgatggccacatggggcagctccgcactgtcgaatgccgctggctgttcggcgcgggcggctactaccggtacgaccaggggttcagcccccgcttcgagggaaccgaacggttcaaggggttgatcgtccacccccaacactggccggagaacctggactacacgggcaagcgtgtcgtcgtcatcggcagcggcgcgacggccgtgaccctgattccggccatggcggacaaggtctccagcatcaccatgctgcagcgcacgccctcctacatcatcaaccagccggccaatgatgcggtcgcggcgttcttccgcaaggtcctgcccgagcaggccgcctactccctgacgcgctacaagaacgccaggatcaccctggccttctgggccttctgccagcgcttccccaaactttcccgcaagctactcctgtggctgacccgcaaggagctgccgaagggttacccggtcgacgtgcatttcaatccgccctacaacccctgggaccagcgcctgtgcacggttcccgaaggcgacctgttcaaggcgatcagcgcgggcaaggccgacatcgtcaccgaccatatcgagtgcttcaccgaatccggcctgttgctgaagtccggcaagaccctggaagccgacatcgtgatcaccgccacagggctgaacgtgcagatgttcgggggcatcagcctgtacaaggacgacaagcccgtcgtgctgagggaaaccctcgcctacaagggcaccatgctctccggcgtccccaacttcgccttcgcggtgggctacaccaactcctcctggaccttgaaggtgtgcctgctgtgcgaccacttctgtcgcctgctgggcttcatggacagccacggctacaacgtctgcgaacccatcgcgccggacgggatcgagacccgcccgctgctggatttcggtgccggctacgtgcaacgcgcgctggacagcatgccgcgtcaggggccgagcgagccctgggtgatgtcgatggactacttccgtgatgtcaagctcctgcgccgcggcacggtggccgaggattgcctggcgttctcctcggtgcccagcgcgcccctgcacgcaaaggtcgagctgcaacaaccaggtagccgcggatga

SEQ ID NO: 351075 - DNA, 876 bp, Pseudomonas aeruginosa
atgagccccgatcgcttctgcgaactgcctggcgcgcgcaggatctgctatcgcagccacggccacgaagacgcaccggcggtgctgctcatcgtcggcctggggctgcagctgacctactggccgcaagcgctcataaccggactggtcgagcggggattgcgcgtcatcaccctggacaaccgcgactcgggccggtccttcttcaccgacgtgacaccgccctcggtcatgcagcagttcttccgccagcggaccccgggctatgacctgggggacatggccggcgacgtcattgccctcatggatggcctgcagctggaagcggcgcatgccgtgggcatgtcgatgggcggcatgatcgcccagacgcttgccgcgcgttaccccgagcgcatcaggaccctcacctccatcttctccacgaccggttcactgcgcgtaggccagcccgcactcaaggccatcctcaagctgctgcgccgccccccgcgcaatcagcaggaaagcgttcgcgactacctggacatcatgcgtgtgatcggctcgacgctcgagtggaacgaggtggcgatgcgcgactacgccacggaggcctgggagcgaggtggcggcgaggccagcaacctgggcacggcgaggcagatcggcgcaatcatcaactcgggtgaccgcacccaggagctgcggcgcatccgctgcagcacgctggtcattcatggggacaaggacctcatggtcgcgaccaacggaggcttcgccaccgccgcagcgatccccgggtcgagcctggtgctgttgcccgggatgggtcatgacctgccgagatgcctgtcaggcacgttgctgtcacttctctcggggcacatgcgttag

SEQ ID NO: 351076 - DNA, 1158 bp, Pseudomonas aeruginosa
atggaattcaagttcttactccccagcaaagtcgtcatggaacccggcctgcgcgagcgcaccggtgagcatctgcgggcactcggcctgagccgcatcctgatcgtgaccgatcccggggtgaaggcagccggcctgctggacagcgtctacgccagcctggacaaggccggcatcgccttcgaggaagtggcggacatcaaggccaacccgcgcagcgaagacatcaaccagaccgcgcagcagtaccggggccaaggcatcgacggcctgctggccgtgggtggcggcagcgcgatggacgcggccaaggccatcagcgtgctgctcactcatgacggccgcatcgaggactacgaaggctccttcacgctcacgcgtgccataccgcccatcgtcgccatcccgaccacggcaggcaccggcagcgaggtgacctgcttctcggtgatcaccgacaccgcccgtcatttcaagatgagcgtccatgatcaccgggtcggaccggtactggcgctgctcgactcgcacatcaccgacacactgcccgcgtcgattgccgccgcgaccggcatggatgccctcacccacgccatcgaggcctacacctgtcgcgtgtcgaacccgatcagcgacggcctggcgctgcatgccatccgcctgatcagccagcacctcaaacccgccgtgcaagagccggagaaccgggaagcccgggagcagatgctggtggcgagcctgatcgccggcatggcgttcggcaacgccgacgtcggcagcgtgcactgcatttccgaagcgatcggcggcatgtacgacacgccacacggcgtgggcaacgcgatcttcctgcccttcgtattcggccacaaccgtgacgccgacatcgtccgccacgcccaggtggcctatgcgctggggatcgaccccgggctttcgccggtcgacgccgccgaggccgcggtcagccacctgttccagatgagcaaggagctggggatcccccgcttcgccgacgtcagaggcgtgcgcgaggaagacttcccgaccctggcggagaacgccaagcagaacttctcggacgccagcaacgccaagacgatgtccgtgcaggcctaccacgacatcatcaccaccgcttaccacttcgtcgcgtga

SEQ ID NO: 351077 - DNA, 852 bp, Pseudomonas aeruginosa
atgggcacgatcatggcgcacgcgctgctcaagcaaggcaaacgcgtagcggtctggaatcgctcacccgacaaggcacaggcgctcgtggccgccggagcccacctctgtgacagtgcgcacgccgcgctggcggcgagcccggtcaccctcctggtgctcctggacaatgcggcagtactcgaggttctggaatctgccgaagtgaaccttgcactggccaaccgcacgctcgtcaattacaccaccgagtcccaggaagagagcatggcgctacaggcgctcgtcaaccgtgcgggcggtcactacgtcaagggcatgatcgtggcctacccgcgcaacatcggccacgccgaaagctactgcatccataccggcgagcgggaagccttcgagcagcatcgcgcactgctgcacgtgctggcgggccatacgctgttcctgccctgggaggaaacgtacgcgttcgctgccctgctgcatgcccattcgtttgccgcgatggtggcgttctacgaagccgtgggcgcgagccaggcgtttggcatgcccgctgccaagatggcccggctgattctcgacacgtcgcgcttcttcgtcgccgatgcactcgaggaagccgtgcggcgcctggagcagcaggacttcgcgggtgaccaggcaaggctcgacgtgcacgccagtgccttcgcagagattggccaagccatgcaggcagccggtgcctggacgccggtgttcgacgccgtgtgccaggtggcccagcgtgcaacgtcgatgggttacggcgaccaggacatcgtggccaccacccaggcattcgctgcagcggccctcccctcggaaccctag

SEQ ID NO: 351078 - DNA, 147 bp, Pseudomonas aeruginosa
atgcgtgcttttgcttttctactggctggcctggcgctcgccctgctcctgacggcctacaccccgaagcgttacgtagagaatcgcgcagccgtgcccacagggcacccgatcgcgagcataggcgatattttccggcactattga

SEQ ID NO: 351079 - DNA, 1050 bp, Pseudomonas aeruginosa
atggccaccgttcctttcgttcgggcgataagccttaccgggttccatgcgttcgcggcggcgcagggactcgaccccgtgcagatgctcaggcacatcagcttgccgagccacagcgtgcagcacgaggacggccttttcccctaccagcaatattgtgccttgctggaggcctgcagcctgcattcggggaatgcgctgttcggcctgcaatatgggttgtttcaggcccctggcgtcttgggtgatctgctctacctgctgcgcaatacgcgcacggtcggcgaggcgttgctggagttacgcaaccactacgcgctctacaacgctgccgccgaggtagggctggagaatcaaggtggggtgatcaccctcagttatcacgtgcgtcagccgggcctgcccggcgtacgccaggccgaggagctggcctgcgcggtgggcattcaattgatgcgaacgctggtaggggcgcactggttgcccagcgctatactgctgaagcacccggccagcacggacccggccctttatgcccaggccctgggcatggcgccaaccttcggtgcgcactgtctggccatggtgttcgaaccgtcgatcctggaccggcccaatgctgcctccgacgaggcgttgcgccaggtggtcgccaggcgaatgcaacgcttggagccgctatccagcgacaacctgtccgaccagatcaagcagctgttgcatcaactgctgcccgccgggcgggctacggcggagagggtggccaatatcatggccttgaccccgaacgagttgcgtcaactcatggagcacgaaggcttgtcttttcagcacctgctggatgaggtccggcagtgcatggcgcaagcgtatctttccaggccttcggtcaacatcggcgagctggccacgatgctgggctattccgatgccagcggattttgccgcgccttccaccgctggttccacatgagcccattgaactggcagaagagccagggcatcacacgccaaccgcgtctactggggcgagggcgctcgcgtctgtaa

SEQ ID NO: 351080 - DNA, 1053 bp, Pseudomonas aeruginosa
atgacgtcctccatcctgggtgccgcgctacggggttttgacgacttcgccatcgcgcaaggtcttgagccccatgcgctgatggcagaggtttcgctcggactgggtgacctcgatgcagtgatcgaaacccggcagttcaatcagctgctggcgttatgcgcgcaacgttcgggcaatgccctgttcgcactgcaattcggcctggagcatggcatgcggggtatggggagcctgctgcatgccattcagaacgcacgcaccgtcggcgaggtcgtgcacgcgttgagccggcattcccatgtgctcggtactgcggtggagtttcgtatcgaacggcatgccggcagcgcacggttgctctaccaggtcaccgatgccgagattccctgcgtaaggcagagcgtggaatgggccatgggcatgagtgcgcaactcatgcagagcctgctcaagcacctgtggcgcccccaggccctgctcctgcagcatggcgcggctgtggcgccggccgcctaccggtacctgctgggtgtgacgccgcgcttctccagcctggagaacgcctgggtcttcgcccccgctctcctggatacacggctcgccgtacaggatgaaaggttcatgcaactggcgcgacagcttcaggaggagctggcggacatcagcttgcagtcgctgccccgccacgttcaacggctcattcgcaaccgcctgcctcatgggcgcgtcacggtggagcagatcgccatggacctgactgtcagtccgcgcagcctgcagcgctacctgctgacgcaggacacgagtttccaggccctgctggacaagacgcgccaggcggtggccacacgcctgatccgcgacgcctcgatcagcctgacgcaggtggcggacttgctggggtacacccagctcggtgcgttctcccgggcgttcagccgctggcatggcgtcagcccgcaacaatggaaacgccaactgcaccaggcgtcggtgctcgatccgaacgccaaatgccccgcgtcgccaccgccatccgccgaggcgtga

SEQ ID NO: 351081 - DNA, 777 bp, Pseudomonas aeruginosa
atgcaggctaccattggcggcgatacgccccttggaactgttcgcctcatcggctaccagcttcaggccgcgttcagcgatcagcgtgccagcgtcgttttccaggcgggtcacaccgatatcgatggcgcccttgctgccgatggagccactacggttgtccaggacgaatgcctggatatccagacctccggcaccggagacaatcccctcgaggctgttgtccagggcctgcgcgatacgcaaggtcagggctccgccgctgagcaggcgtcccccctggttgttcaacgcggaggtggcaagagtgaacgcgcggtcgctggagatttccccaccgctgttgtccaccacgccgagttggcgcaggagcaaagtgccaggcgtggcgatcaggccttgagcgcgattgaccaggcttcccttgttcagatcgagcgtaatgccggtatcgctgaccaggttgcccctgtcatgctggtccagcccttggagatccgcatcgatcgcacccttggcggcgatccggcccgcctggctgttgtctacccgagcggcgacgagggtgagtcccgcatcgctgccgatactggctttccggctgttgttcaggttgccggtacgaatctccacggcccccttgccactgatcgcaccggcctggctgttgtcgaggctggcgctgctcaagctaagtccggcgtcgctcgccagtctgccgccctgattgttcagggcgccctggttggtcactgccaatgcccctgcgctggatag

SEQ ID NO: 351082 - DNA, 516 bp, Pseudomonas aeruginosa
atgagcaacgagacttccatcgatctcaagcagtgcgtcctcgatgccgtgctctccgggttgatcgccctggtggtgttcggccccatcgtcggcgtggtcctcgacggctacggcttcaacctgcattacgagcgggtcggctggatcatcgcgatcgtgatggccgggcgcttcctgctcagcctctacctgcagacccgcggcgggcgggccgtgctggagcgcttcgagggggctggcagcggcgtccacgtcctgccgccgggctacaagacccgcttgcgctggatcgtgccgctgatcctggtggccgcggtgatcttcccgttcttcgccagcaagtacctgctggcggtggtcatcctcggcctgatctacgtgctgctgggcctgggcctgaacatcgtggtcggcctcgccgggctgctcgacctcggctacgtggccttctacgccattggcgcctatggcctggcgctgggctaccagtacctcggcctgggcttctggtga

SEQ ID NO: 351083 - DNA, 732 bp, Pseudomonas aeruginosa
gtggccggggcgatcctcggcttcccggtgttgcgcatgcatggcgactacctggcgatcgtcaccctgggcttcggcgagatcatccgcctggtactgaacaactggctgtccttcaccggcgggccgaacggcatgccggcgccggcgccgaccttcctcggcctggagttcggccgccgggccaaggatggcggggtgccgatccacgagttcctcggcatcgcctacaaccccaacatgaagttcctgttcatctacgtggtgctgttcctggtcgtgctgctggtgctctacatcaagcaccggctgacccggatgccggtcgggcgcgcctgggaggcgctgcgcgaggatgagatcgcctgtcgcgcgatgggcctcaaccatgtgctggtgaaactctcggcgttcatgctcggcgcctccaccgcgggactggccggggtgttcttcgccagctaccagggcttcgtcaacccgtcctcgttcaacttcttcgagtcggcgctgatcctcgccatcgtcgtgctcggcggcatgggctcgacggtcggggtggtgatcgccgccttcgtcctcaccgtggcgccggagctgctgcgcagcttcgccgacatccgcgtgctgctgctcgggatactcatggtggtgatgatgatctggcggccgcgcgggctgatccgcatcagccgggtgggcttcgccccgcgcaagggggtggcgccatga

SEQ ID NO: 351084 - DNA, 933 bp, Pseudomonas aeruginosa
atgcacagcctgcgctttttcagcaacgccgaggtcgccgagcgcctgtcttatccacaactgatcgaggcgttgcgcatcggcctggccaagccttgcagtgcgccgctgcgcagctgccatgccttgccggcgcaggcctcgctgctacagatgccggtgtggcaggccggtgaggggatcggcgtgaaactggtgacggtgttccctggcaatggggcgcgtggcctgccggcggtggccgcggtgttcgctctgttcgacggcgaagacggtcgcccgctggcgttgctggaggcttcggagctgaccgcccggcgtaccgcctgcagctcggcgctggccgccgactacctggcgcgggacgatgcgcggcgcctgctggtggtcggctgcggaaccctggctgcgcacatggtgcgggcccacgcctgcgtgcgcgactatcgccacatcgacatctggggccgcgatccggccaaggccgccgcgctggccgcccggctgcgcgaggagggctacccggcgcgagcggccgacgggttgcgcgcggcggtggaggcggccgattgcgtcagttgcgttaccaccgcccgcgaagcgctggtgcgcggcgcatggctgaagccgggcgtccatctcgacctggtcggcgccttcctgccgtccatgcgcgagactgacgccctggcggtggcgcgcgcgcggatcgtggtggacacccgcgcaggcgcgctggaagaagccggcgacctgttgcaggcgatcgccgaaggcgccatcgggcacgagacgatatccaccgaactgcgcgacttgctgggcggggcagggcggcgcggcgatcccggggaaatcaccctgttcaagtcggtgggttatgcgctggaggacctggtcgccgcgcgccgggttgtggataacgccgcctga

SEQ ID NO: 351085 - DNA, 969 bp, Pseudomonas aeruginosa
atggcacatctcgtcgaaaccatggcctacgctggcgccgctccgtggcatggcctgggcaatcaactcacccagaaacagcccattgaagtctggcaacgcgaagccggtatggactggcagatcctggaaagccccgtgcacttcaagtcggatgccgtcggccacctgggcgccatccactcgttccccgagcagaaggtgctctaccgctcggacaccaaggccccgctgtcagtggtctcgcagcgctatcacaccgtgcagccgcgggaagttctggagttttaccgggacctcaccgaggtgtccggctacgagctggaaaccgctggtgtgctcaaaggcgggcgcaagttctgggcgctggcgcgtaccgggcaaggcgctgcgctcaaggacaacgaccaggtcaatggctacttgctgctggcgacctcctgcgatggcacgctggctaccacagccacgccaactaccgtgcgggtggtctgcaacaacaccctgaccatcgccctggatggcaccagccgcgcaatcaaggtgccgcacaacacccgcttcgatcccaaggcggtgaagaagcaactcggcatcgccgtctcgcaatgggatgacttcatgtaccgcatgcgcgcgctggccgagcgcaaggtgcagtggcatgaggcactggggttcttcatgaacgtgatgtgcgagaccagcccgaccggcgctctgccggagcaactgcccaacgaacgcgccctgcgcaaggtgcaggagctgtacgaaggccgtggtcgcggtagccagctggactcggcacgcggcaccgtctggggcctgctcaacgccgtgaccgagtacgtcgaccacgaacgccgtgcgcgcagcaacgagtaccgcatggactcggcctggttcggccagggcgcgcagatcaagcaacgcgccctggatgccgcgctgcagctcgccgcttaa

SEQ ID NO: 351086 - DNA, 405 bp, Pseudomonas aeruginosa; identical to SEQ ID NO: 344324

SEQ ID NO: 351087 - DNA, 1041 bp, Pseudomonas aeruginosa
atgcgtcacggcgatatttccagcagcaacgacaccgtcggagtagcggtggtcaactacaagatgccgcgcctgcacaccgcggcggaggtcctggacaacgcccggaagatcgccgacatgatcgtcggcatgaagcagggcctgcccggcatggacctggtggtgttccccgagtacagcctgcagggcatcatgtacgatccggcggagatgatggaaaccgcggtggcgatccccggcgaggaaaccgagatattctcccgcgcctgccgcaaggccaacgtctggggcgtattctccctcaccggcgaacggcacgaggagcatccgcgcaaggcgccgtacaacaccctggtgctgatcgacaacaacggcgagatcgtccagaagtaccgcaagatcattccctggtgccccatcgagggctggtatcccggtggccagacctacgtcagcgaagggccgaagggcatgaagatcagcctgatcatctgcgacgacggcaactacccggaaatctggcgcgactgcgcgatgaagggcgccgagctgatcgtgcgctgccagggctacatgtacccggccaaggaccagcaggtgatgatggccaaggccatggcctgggccaacaactgctatgtggcggtggccaacgccgccggcttcgacggcgtgtattcctacttcggccactcggcgatcatcggcttcgacggtcgtaccctgggtgagtgcggcgaggaggaaatgggtatccagtacgcccagctgtcgctctcgcagatccgcgatgcgcgcgccaacgatcagtcgcagaaccacctgttcaagatcctccaccgcggctacagcggcttgcaggcatccggcgatggcgaccggggcctggcggaatgtccgttcgagttctaccgcacctgggtcaccgacgccgagaaggcgcgcgagaatgtcgagcgtctgacccgctcgactaccggtgtggcgcaatgcccggtcggccggctgccctacgagggactggagaaggaggcctga

SEQ ID NO: 351088 - DNA, 1116 bp, Pseudomonas aeruginosa
atgccttttctgagcgacatgctcgaccagtcccgccggcagcaggacgaggaacaggccctggcgcgggagaatctcgccgaggcgagtctgctccaggcccacctgagccaccgcagcgccctgcacagccgcttccgtttcgacccggcggcggtgatggactgcctgcgcgccgaggtgctcggccaggaaccggcgctacaggccgtcgaggacatgctcaaggtggttcgcgcggacatcgccgacccgcgccgtccgctgttcagcgcgctgttcctcggccccaccggggtcggcaagaccgagatcgtgcgcgccctggccagggccctgcacggcgacgccgaggggttctgccgggtggacatgaataccctgtcccaggagcactatgccgccgccctcaccggtgcgccgccgggctacgtcggggcgaaggagggcaccacgctgttggagcaggacaagctggacggcagtcccgggcgccccggcatcgttctcttcgacgaactggagaaggccagcccggaagtggtccatgcgctgctcaacgtgctcgacaacggcctgctgcgggtcgcttccggcgaacgcacctaccatttccgcaacaccctggtgttcatgaccagcaatctctgcgcccatgagatccagcgctacgacgagcgtcgccaacgcctgccctggcgcctgctgccggtcggcggcgaacgccggcggcgggacatcgacgggatggtccgggcccggctgctgaagaccttctcgccggagttcgtcaatcgtctcgatagcgtggtcaccttcaactggatcgaacgcaacgtcgtcgcgcgcctggtcgagttggaggtgcagcggctcaaccggcgcctggagaagcatcgctgccgcctggaggcgaccccggaggtgctggcgaagatcgcccgcgccggcttcgaccggcagttcggcgcccgtgcgttgcgccgcagcgtccgtcatcatctcgaggtaccgctggccgagcatctgctcgaccaccaccagccgggcgacgggaactgcacgacctacctggcgagcctggagcacgagcgggttcgcttcgtgcggcgctga

SEQ ID NO: 351089 - DNA, 591 bp, Pseudomonas aeruginosa
atgagcgccaactcgctgctcggcagcctgcgcgagttgcaggtgctggtactcaacccgccgggggaggtcagcgacgccctggtcttgcaactgatccgcatcggttgttcggtacgccagtgttggccgccgccggaagctttcgacgtgccggtggacgtggtcttcaccagcattttccagaatcgccaccacgacgagattgctgcactgctcgccgccgggactccgcgcactaccctggtggcgctggtggagtacgaaagccccgcggtgctctcgcagatcatcgaactggagtgccacggcgtgatcacccagccgctcgacgcccaccgggtgctgcctgtgctggtatcggcgcggcgcatcagcgaggaaatggcgaagctgaagcagaagaccgagcagctccaggaacgcatcgccggccaggcccggatcaaccaggccaaggcgttgctgatgcagcaccatggctgggacgagcgcgaggcgcaccagtacctgtcacgggaagcgatgaagcgacgcgagccgatcctgaagatcgcccgggagttgctgggagacgagccgtccgcctga

SEQ ID NO: 351090 - DNA, 627 bp, Pseudomonas aeruginosa
atggatgcgcaagccgccgcccgactgggcgatgagatagcccacggtttcggtgtcgccgcgatggtcgccggagccgtggccggagccctgatcggcgccgccgtggtcgccgccaccgccgccaccggcggcctggccgcggtgatcctggccggctcgatcgccgccggcgggctgtcgatgttccagatcgtcaagggcctgaccaccatcttcgagctacccgagccgaccaccggggtgctcatacgcggcagcttcaacgtctacgtgaacagtcgcaacgcgatgcgcgccggcgacgacgtctccgccacctgcagcggcctgccgctgaaccatccgctgtggccgttcccggtgctgatcgccgaaggcagcgccaccgtgtacatcaacggcaagccggcggcgcgcctgcagagcaagatgatctgcggcgcgcacatcaagaccggcagccaggacaccttcatcggcggccccaccgagcgggtggccttcgtcctcgatctggaggaatggctgcacaccggcctcgaggcgctgggcctggcggcctgctgctggcggcgatggccggggtcgcggcgctggccggcttcgtcgccatcggagggctga

SEQ ID NO: 351091 - DNA, 444 bp, Pseudomonas aeruginosa; identical to SEQ ID NO: 337940

SEQ ID NO: 351092 - DNA, 504 bp, Pseudomonas aeruginosa
gtgttccgtaccaccggtttcaacagcatccgcaccctggccgctcgcctgcattacttccaggccatctccggtaaccgcctggcctgcctgccactggagctgcgtctgcgtggcaagtcgacccggcaaagccatgggacgccgatcttctacgttgacctgacggtacgcggcggcatggacatggcggaggcgctactggccgccaatgagctcaatgcgcagcggcaagcagccggcttcaatcaggccgccttggatgaagcggcgcagcgtggctttggcaatggcgccttcgaggacagcgaggaagacgcgggcgccgtcgccgaggagttctaccccaccgaagaaaccccatctccaaccaccaacacgccccggcgttctgcgaagaccaacctggccgagaagctggacgcacaagcccagcgccacatcccaccaaccgatcaccatcaaggagcccaccatgcgcctgcacaagctgaaggccagtga

SEQ ID NO: 351093 - DNA, 333 bp, Pseudomonas aeruginosa
atgaaaacgtccagttcgcagcggcaggggctgccagtgattcacgagcgagcggccggcatcgacatcggttcgcgcttccatgtggtggcagtgcccgtcgatctcgccgaagagccggtgcaaaccttcaaggcgtttaccgccgacctggagcgcatggccgattggctggtcgagctgggagtcaccacggtggcgatggagtcgaccggggtgtattggattccggtctacgagattctcgagagccacgggttctaccccatttccagggacaggcatgggaggtccaaccgcgtgggaagcagaagcgctaccacagccacctga

SEQ ID NO: 351094 - DNA, 300 bp, Pseudomonas aeruginosa
atgtacatcaccctgaccgattccgcgaacccgggcaatcgtggcaaccgcttgaccctgtcttcctcgggttccaccgcggccaagggcgtcgccgtggaaatccgccgggcggatgattccctggtcagcttcggcccggactccagcgtcactggcaaccccaaccaatggttcgtcggccagttcggcaacaccagtacctcgattccgttgagggcgcgctatgtgacgacgtcctctccgctggcagcgggccaggccaatgccgccgcgaccttcacgatgagctaccagtaa

SEQ ID NO: 351095 - DNA, 1062 bp, Pseudomonas aeruginosa
atgaccacactggccaacctgaccgaggttctgttccgcctcgacttcgatcccggcaccgaactgtatcgctatcggggccagacattgagccgccggcagtgccgctccgccatcctctcgcaggcaagccagctggcccgggtgctcgaacccggcgaccgggtggtgctggcgctcaacgattcgccctcgctggtctgcctgttcctcgcctgcatcgccgttggggcgattccggcggtgatcaatccgaagacccgcgagccggctctggccgagatcctggccgattgccaggccagcctggtggttcgcgaagccgatgcgccttcgttgagcgggccgttggcgccgctgaccctgcgtgccaccgtcgggcagccgttgctcgacgatttttccctggcggcgctggcggggcccgccgagcccggctggagcgacttccaccgccaggagtcgacgacgccctgctatctgcaatacacctcgggttccaccggcgcgccgaagggcgtgatccacaccttgcgcaataccctcggcttctgccgtgccttcgccggggaattgctggcgctgcgcgaaggcgaccggctgtattcgatacccaagatgttcttcggctacggcatgggcaacagcctgttcttcccgtggttcagcggcgcctcggcgctgctcgacgacacctggccgagcgcggagcgggtgctggagaacctgcgcgccagccggccgaaggtgctgttcggcgtgccggcgatctatgcggcgttgcgccctcatgcgcacgaactcctggagagcgtgcgcctggcgttttccgccggatcgcccctgccgcgcggcgagttcgagttctggagcgcccagggcctggagatctgcgatggcatcggggcgaccgaggtcggccatgtcttcctcgccaaccggccgggccaggcgcaggccgatagcaccggcctgccgttgccgggctgctggaccgtgacggcgagaccgtcgaggcggccggccagcagggcgtgctgctggtgcgcgggccggggctga

SEQ ID NO: 351096 - DNA, 1029 bp, Pseudomonas aeruginosa
atgacaatcatcaaacgcgagagcacttcaatcagcatttctgaattctatgaaaaccatttgctaaataagtatgattacgatcctgtttaccaaagaaaaagtgtctggacagacgaaaaaagagccttcctaattgatagcatcctaaaaaattttcctatcccacccattttccttcatcaaaaaatagacccagacacaggtaaaactagctttgatgttgttgatggaaaacaacgcttaacagccatcacaatgtttatcagaaacgagcttgcggtaaccaatgagttcgggggaagtgaagacataggaggaaaaacatttggcgaaatggaaggctacctttctgaatacaagaagtccttctggcgctatagacttcctcttgaactcatagactccgatgacccatcactaattgatgaaatatttgatcgcctcaaccgaaatggagaaaaattaaatggtcaggagctgcgcaaagcaaaatattacgacaccccccttctaaaactagttgaaaaattagcaaatacaaatgatttctggaaagatcggctatccgccgccacagacaagaatagaatggaagaccacgagttcatctctgagttaatattcgtaattgcggaggataaacttttcggctccaatcaagagactatagatcaaaaatacgaaatatactcaaaaaaagatgaagagtgggctaaagaaatagaggaaaaatttaacaccataactgaattacttaaatcttttaacctaaactacgatgagttaaaaataaatggtgtaagccatctttttggcttatggtcattcaccgtcaatagatttgaaaaccatcaaacttccggaattaacaataaactccccgaattctactcaactcttcgcaacgacccgtcaagcaatgagtatgtaatggagtataaaaagagcatgagttccggaaccaaagaagtaacacaaagaaaccgtagacgacaagctcttatagattatgttgaaaactattag

SEQ ID NO: 351097 - DNA, 1020 bp, Pseudomonas aeruginosa
atgagtacaatcacaatcgtactagggaatggtgtaaccatagatttaatggaacacctagggctgtcacaggagattaatgtcctcaacctcttcgcaagaggtgacgaagtagaatggccaaataacaatggtttttctggctttcttacctacaaaaactgccctaatcttgtaagtttaggcatgacacccaaaacgcctagtgacgaagcctcaataatattcgaaaaaatcataacctgcgcaaatttctattcatatcgatccaaaggccaaggcgacgaagagaaaaacatctacattcgagcatacttagagctagtcgaatatcttagatcacttttcacttggtacgataaaaaattcgtaaaacataactgggaagaaaaaatagaatcatggccctggcttaatttcataaaaaatttacaggaaaaatatgaaaaaataaatataataaccttaaactacgatatttatttagagagaatactccaaaaagcagaaatagaatttcaaatcagccagatagataaagagcaagggaaaaagataacaatattcaaacctcacggttctatcagttttgtatccagcattgaaccagacaaagccgatacaatacctgattactatatatcatacaaatttaaagacccattaactccttcagacataaaaacttcttacgaagacctagataaaaaaagactaataaatactataatcccaccatatggtgactctgccaggtatcagcaaagctggtctagacttatattggaaagcgcaacaacaggagcaaaaagctctgacactttactaatatctggagtttcatattggcacgtagatcgcctagaggttgataagatacttctatctgccgacgaccactgcaatgtaataaaaattaacccaaggcctaatccaatttttgacgcagtgttgcaaagcagattctctaaataccaacagtatcgcagcagttcaattctttcagagattgcaaaatga

SEQ ID NO: 351098 - DNA, 945 bp, Pseudomonas aeruginosa
atgagccagggccgcagcctgcgtctgtttctggtggacggcacgcccaacggcttgctgaccgccgagatcatgaactggaccggccatgtgctgaccggcccacgctccaggctggccgaactggtacagcgacccgagtgcacgcgtaccggcgtgtactttctggtcggccccgacccggacaacagcctgcgctcgaaggtgtatatcggcgagtccgacgatgtggccaagcgcctgaagagccataaccgtccggaggaggcgggtggcaaggacttctgggagcgcgtgtgcctggtcaccagcaaggaccagaacctgaccaaagcccatgtgaaatacctggaaagcctgctgatcggcatcgccggcagcctgggccgctgcgagctggtcaacggtaccgcacatgagtacgtcagcctgcccgaatccgaccgcgccgacatggccttcttcctggagcagattcgtaccgttttgccggtgctgggcttcgacttcctgcgtgagctgaccaggccttccgcgccggctgctaccagcatggtggcgccggtcacccgctccccgcgcttcatcctggaagttccgcgccaccgcatcagcgctcagggccaggaaatcgacggcgagttcttcgtgctcaaaggctccaaggcccgcgctaaatgggtaggcacggagcgcggttaccaggggctgttcaagcagttggtcgacgacggcgtgctggttgccaatggcggtgagcacctgaccttcagcgacgactacgccttcagcagtcccagtgcggcggcggccgtggtgtgcggccgcgcagcgaatgggcgtacatcctgggtggttgagggaaccggccagacctacgctgcctggcaggatcagcagctgaatatctcagaactgccggcggggactgaagcctgtgaatga

SEQ ID NO: 351099 - DNA, 1347 bp, Pseudomonas aeruginosa
atgagctattacaagccctatccggcctacaaggactccggggtggattggttggggccggtgccggatcattggcaagttgtgcgtatgcgctatgccgccaccctgaacccacctgttcgtagcgacttgctgggagatcctgatcaagaggtttccttcctgccgatggaggctatcggagaagatggttcactaagccttgagcaggttcgcccggtagctgatgtaagaaatggctactcctattttgaagacggtgacgtggcctttgccaaggtcacgccctgctttgagaatgggaagggcgcccttatgcgagggttacaatgcgctgcaggatttggcactaccgagctgacagtgcttcgcccgaaacctgcggctgcagatgcccgctacatcaactacatcgttcaaggctccagttttcgtgccttcggtgccggtgcaatgaccggagcgggtggcttgaagcgagtaccggatgagttcacgcgcaattttccggtgccacttcctgagctaggtgaacagcgtctaatcgccgctcacctcgacagcgaaaccgcccgcattgatgcgctgatcgaaaagaaaacccgctttatcgaactgctgcgcgaaaagcgccaggcgctgatcacccatgctgtcaccaagggcctcgacccgaacgtgaagatgaaagactccggcgtggagtggctgggggatgtaccggaacattgggttgttaagcgcctgaagttcatcgccacagtccaaaccggtatcgccaaaggaaaagataacgccgaaaaggatactgttgaggtcccctatctgagggtggccaacgtgcaggacggctatctggatctggatgaggtcgcgacgatagaggtttcaaccgccgacctgccgcgttatctgctgcagtccggagatgtgctaatgaacgaagggggcgacttcgacaagcttggacgcggtcatgtgtggcacggcgagatagagccatgtattcaccaaaaccatgtgtttgccgttcgcccacatggtgtcagctctgagtggttaaatacgttcaccagttcagctgcggcccagttctactttatggggcgctccaaacagagcacaaacctggcatctatctcctctagcaatctgatggagcttgccgttcctctaccctgcgaagaagagcagcgcctcatcctcgatgagttggatcgccaaaccgctaaggtaaatgccttgggcgcgaagatagaacgcagcatcgccctcctcaaagaacgccgctccgccctgatcaccgccgccgtcaccggccagatcgacctgcgggaggcagtatga

SEQ ID NO: 351100 - DNA, 1188 bp, Pseudomonas aeruginosa
atgaaattaaagaaatggatgcttgcaacaattctatcctgctgctcagtaacgatttgctctaaagagctagatactgatgctgcaaaaaaaatactcgggggggcaacggtccaaatcacgaacatccctccgaactcgaacgtagtaaaagaccaactcttcctaagaggcgaaataactcacaaactccagccaggctatgtcaaggttgtacaagacactggaaacggcaagaattggactacggcggttactacttaccctagcggtgcgcctgacgaacagcgtgggagttggacctcaaacattagctaccctttaaccaattctaggtccagcataaagataagagtatgcaacagaactcaaggcgagggagaaaacggcaatactaactgcaccataattcctcaaggcatatctgaaatatcaaatatcggaagaagcccggatgtccgggtagttaaagtatggtttcatatgttggccgacctaaactctatagcgtcagtagacaaaggcagagtcgagaaggtagtagactggatcgctaatggcaatagcacctccatccttccgggcggcaaacttccactagattactataacgctgactatatacttggcgagtgtcagacaagccaacggattcagatgcgtttccatgccctagacgtagtaaacactacaaattgggagcccaaaggctatagctacctaatttttatgccgcttttctataacaacctagataacaagcgcacctcataccttccatttgccttcggtgactatgtagcgtccattgaccctaattccgactacttccatgttttctttactggagtaatgagaaagaaaaatggcgatagcatcattggtcgctctaacatgggttcgcctgaacctaaagttagtctaatcgttattgaggcttccacttttaacaccatggactttcgtgacgctgcgaggctcttggttcacgagtttggtcatgaggccggcggcttagtccacgccgaggggccatgccaaggaaatcctggcagtaacataatgtgtcctttgatcgcaggccctaccggagctggcgactactggggtatgcaaggaacccgctctcagtgcggtttcttatacgatactcatcgtcttcgcaacggaacccaccaatacagatag

SEQ ID NO: 351101 - DNA, 1386 bp, Pseudomonas aeruginosa
atgataccccacacaagccccatcctttacttcactctttccgggtttctcctgcgttttagctggcctccctttgatgtccctctctcattagcagcaggactaatcctatcagcagcagccataagcaatgcaaactacaaacactctattataggtggagcaattgttggtggcttatggaatagttacttgcttatcggcctactcccatgggggatttattttgcatttggggcatggctcatttccgtatttatcatgtccattttctaccttctaacaaaaataatttacaccaagatgacacctgcattgggaggaatttcgatatccctagcatggacctgcatcatgtacatcacacaaactctacactacccaattgctttaaccccaacacttgtaaggtcaacacctgagattgcatcgagtctctcaaaccttggattttttgcaggtgagttcctgattatactctttactttctcggcaactctttacttctaccaactacgctttgcgttaatcgccttattggttgcaacagcattaagaaactggctccttatacttaataacgaaacccctgaaacacatacagacatagcgatcgtacaacctgccattagagcagagtcctttttcgcagcatctaataatttataccaaagaagaaaaatagagaaatctttggacaacttaacctacagcgccgcgtcccaaaacgctcaacttatagtatggccagaggcagcaaacggcttaccaaacttcaacctaccaaaccgagtaaagacgactcgcaacattctcagccagactaaaagcgaacttctaataaccggttacgagtacaacagcgcgggaaaaaaattcaataccgcttacttaataagtagcgattccgcaatacaacgggcacaaaaaaaaatcaccgtaccattaattgaaagtaatttagctagaggtagagaaaaaaccttcgaatcaaaaattggaagaataggagtcgccatatgttttgaaggcctatttaactcacaatttaaaaatttagcagaacagcaggcggactacttttttgttctgaccgatgactcttcaatgagaaactccaacataccctccattcacacatcatacgccattctattttcaaaaatatataagaagccactagttttttccaacaacaattcagtttcctttacctcaaacagcttaggcgaagttacctccatagatcgagaaggaaacattccaaaggtgaactactggaaactctcaacaaaaaaaaccgatgctagctggataatcttcaaccaagaagccgtgatagcatttatttccgcactagttttggtatgcgcccgaaatgtttaa

SEQ ID NO: 351102 - DNA, 948 bp, Pseudomonas aeruginosa
atgcgtgaccagcagaccacgaccaatcctcccgaggcttgcgcccagaatccagactggcgccaagacctgtcctatgcactaatcgagtccctcatggccgaacccgaagagcaggcaaaagccttcctgaaggctcatttggagcgactcccctactacgaacgcttcgggctctcgcatgagaacctcgtcctcctgatggaggacctcttcaagcagttgcagtacaccttttccttcctgggcatcgatgcagcctggctcaggcaataccagatcgaacgccgagtcgatcggaagaatgcttaccgtgttttggaagcgctgcaaagcgccgtcgcacagttacggacccatgaagggccgagccccgtactctggttcacggggctcggccggacgacccggccattcgttcgggtttcggcattggagggagccctacgcaaagcactcaccgacaaaggttggtcgacctcgcagatcgaggacgcctggccaagcgcaggcctgcaaccctacctacaagccctcggcctgtgtcggcagacgctcgccttcgcgcttgacgcccccagccaagccctggacctgccgacccagcgtgaagccgtcctggccgctcatgacgaactcattattgagctgaggggacggcttctctgggagagctggaacagtccgccagcagactacgaatggggcgcacgcccgccccatccacctgcgtttagcgcatccatggataccgagcaagagcctcccgccacacctcaaggtcatccgccctatcgtctatgggcgctgatcccggcatctggtcgcgccaagtccggcgcgcctcaagaggcacatataggtcttccagctcatcgcatatggctagccatttttgagcaggagacagcgcctgtacctgctggggcgtccaggagtagcgtctaa

SEQ ID NO: 351103 - DNA, 1041 bp, Pseudomonas aeruginosa
atgatcgactggattgcggccatgatcgaactgcaccacgcgcctttgagcagtggggcggtggtctgtatcgaggctgacggcacggttgcttgggaaactccgcgcaagatgctggtccgtggctcccatgactcgacgatccatatccggagcgtaggcggggacgggcagggcaacgcgactcatctgtacatcgacggcaacccaagcaagtggttgcaaggacataaccttgttggttcctgtgatctcgttgccctcgtctgggatgcttttcaacgcctctgcgccctggtgggccttgagccaactgactttgagcgtcagaaggtcagggcagggcagtaccgcgtcactcgcgtcgattacaaccgaatgttcgaacttccaagccgggccgatgttcgagcctggctgcgtgcgggcgagttcaaatgtaagtctcgtcatggtcgcccggtaaataatcgcgggactttaactttcggcaaaggctcaagtcattggtcgattgtttgttattgcaaggctgacgaaataacttctggcggatcgcataagttgccagaagaattccatcaatatccagaaatctatcagtggatagataacaagctccgcgttgaacttcggttgcgctcaaagaaactcaaggcgctgaaccttgaatatgcctctcaactaacccccacggttctttggaagctctaccgtgatttcattggggaacttgatatgtcagagcaaatagaacttaactctgagcagttgctgtcgctgccgaacaagattcgcggaacttatgttctttggaagcaaggtcatgatctgaagtcgatgcttccaaatggaacttattatcgccatagaactgcgctcatggaacatggcatagatatcaatattcgctgtgatcgccgcgacgatagcaatgttgtgccgatgattcggattcttgaggccaagcctgctgccattccgaacttcttctttgagagggggttgattcataaatcggcccgccaggtggctgtatga

SEQ ID NO: 351104 - DNA, 180 bp, Pseudomonas aeruginosa
atgcccaccaaacacatcgacgaggccacctggcgcaaggtggagaaagagaccgtcaaggcagtgatccaccttcaggcatcggtcaaagacaccgaggtcctgcgatggctgatcctgaaagggctggaagaaatcactcccgaagacctagagcgcttccacaaaaaaagggactga

SEQ ID NO: 351105 - DNA, 300 bp, Pseudomonas aeruginosa
atgctgctgaccattcgcgacgttcccgaagacctggtgcgccaggccaagcttgcgaccggcaagggcaccggcagtcaggcgttcattgccggcatcgaacttatgatccgtcagcgtgatcggatcgaggcgatggaagacgagattcggtcgctgcgcgagaccctcggtgtgttccagggcgtgcttgcagatgcccatgccgccgctgtgcaactggctgagattgccgggcaacgcgatatgctggtgtcggacaacccgttgcagcccgggtatcgccatcgccgccgctag

SEQ ID NO: 351106 - DNA, 468 bp, Pseudomonas aeruginosa
atgaaagcgcaaaaaggctttaccctgatcgaactaatgatcgtggtggcgatcatcggcattctggctgccgtcgctatcccggcttatcaggactacatcacccgcggtcaggtaaccgaggccgtatccctgggcggtggtctgaagtccccgctggccgagtatggcgccgacaagaacgcttggccgactctggttgccccaactgctactcctggggctggtcaattgaatgcaactctggttggcaagtattcgagcgtagatagcaccattgccagcggctatcctaacggtcagatcactgtcaccatgactcaaggtaaggcttctggtaagaagctgaccttcagcactcaagacgggggttcgtcttgggcgtgtggtaatgcttctatcgacggttttgccggtaccggtaccacgatcgacgctaagtacctgccgaacgcttgcaagccgtaa

SEQ ID NO: 351107 - DNA, 1941 bp, Pseudomonas aeruginosa
gtgaagtctctgtgggtatatcttcagggcggcggtaagaagaatgtcttgctctgggtcggagtactttgcgctgttgtctggggactctatggcagagcgctgttctttggctatgtctgggatgacagtattctgtttctggataagacggatcttctaaactcctcgataagctggaaggttctctccgagcccgtgttgccgggtacttcatatttacggccgctggtttttctttctttctttgtcgaatttcagattctcggacagagtccgtttgtatctcatgcagtaaatatcgccatcttcaacctgaatgtacttctggtcttttggcttggcagcaccctagccaggcataccgagcggaaatatggtttattcctggcatttctggctgctctcttttacgccatgcatccggcgctcatcgagtcgaccgtctgggcatctggccgtttcgacctgttgacgaccttctttatcctcgccggcttggtcgtttatctggcggacatcaagagcaccgtgctgcgtgccttcttgctctgcctatgtatggcgggcgccctgctgagtaaagagttgggtatcgtctttcctgtcttgctgttgtgcctgtggttggcgaaagagtgtgattgctctacgcagcggggaggagctctgcttgtccaggcgcttttcagaaatggatggatgcttgttgccctgataatcactgccttcggctatctagttgtaaggaagcactccgctggcggaatctaccattcccccgttggactttcctatatagcagatgttgtgctgggccaacgtcttcccttggagacgttgaagttctatcttttgcagagtttcctgccatttcagtcgataaatgtttctcatccgctgaatgaagtctttgagcgctctgtttatgtcctgcttgctgggcagatggtggttctcattcttgtgctgacggttatttatcaggcgttatatcggcgctcagcggcagcttggatgttttttgcctatctcgtttgcctattgccggtcttgcatatcatccctttgacaattggtgaaaatcttgggcatgagcgttttctaactgcccccttagcattccttgcactcgcattggtctttgttcgctatgatcgagtcctttctaaagtagggctgagtggtgcgcccttgcttcgggtcgggctggtagctggattgctttggctgggaatggcaggtttcactatatacagcatacttccaatgtggacatcggacgccagtctgtgggcatgggcatacaagacgcacccagaatctaagtatgccagatacaactatctgtacggagccttgaggggggggtatgtagaacttttggatgaggaagtttctcgtctgcaaaagaaatatggcggtctggaggtgcctgaacaaatactttacgcgcatagattgataagtgcaggtgactccgaaggtttgaactatctagaaggagtgctacaggttcttccgaggttccatgatgcggaaaatggtcgggtcgcccttaatgattttaagcatctttcctctatgcagatcgggggtgcctatgcagtttatgcggaagggctattgatgcttagaggggatgctgagcgcgctctgaagtataacaagattgcagagtggtatctggctacgggggaggtgattcctcttatgtatcagcggagtgctattctttatgcgctcggggactacggtcaggccgcacgtatatatcaagaccaagagggtttgcattactacatgagtcaggctgtaaaaaaggatatgaagaggttggtggaaggcttctgtaaagaaaagggatttccttctgatccgtgtggtgagttacgtgagcgtggtgtgatctctaaggaaagtgaagcgaggcagggatga

SEQ ID NO: 351108 - DNA, 753 bp, Pseudomonas aeruginosa
atgaggctggcttcttttgatattgctgctcgattgagagctgcaggagtgcatcttcttttttccagtatgctcctggcttttgctttttttcttattctggggaaatggtatccgccccccttagatctggcggccggagtgctgggggtctacgggttgatgttgtttatcgatctcctcctagggccgctgcttactttcgtggtgttcaagaggaataggaaacgctttctctttgacttgggcgtcatactgcttatgcagctttcggcctatgggtatggattgtacgctatggcggagggacgacccgcatggatcgttttcgttatagatgatttcgagatcgttcgtccggtcgatttggatttacggaagaaagaacaatttaaagtagagttcgcctccggagtttttagggggccgcgatgggtagctgccatttattcatccgatccggaggtcaagaagcaacagcggcaagatgaaatgtttgccggaattagtctagctcagaggccggaggcctatgctcctctcgaaacgagaaaacagcagatttccgcaagagcgaagccgcttgcggagttgctgaagctcaacggaagggaaaactatgagcgtgtcatggcgaacgtaaccggggtaatagggtggcttcccttgaagggaggcaagaaggatcaggtcgtcttgatcggagaagacggaggggtgctttctatcgtaaacctcagtccttggcagtaa

SEQ ID NO: 351109 - DNA, 807 bp, Pseudomonas aeruginosa
atgcataaccttctgctggcaaactcgctagcagtgacttcatacaaggatgcagggtacaaggggcgaatcgggattgccctgaatctgtcaccctgtatcgataacgtgaacccggaaagcgccgccaagaagagttgtaattccgtgcataatgcctgggttctggatgcactttacaagggaagctatccgaaagaaataaggcttctctatcaaaaatacgcaccaggcttccagcccactcaggatgagatgaagaagatcatgcgaggcaggccggacttcatcggggtgaacttctattcgcccacattagttaaagacgacccgacccagcctttcggaataggcaatcgtcccaatccggaccagtatccttcctataacggccccgtatcgccttctcacttggtcgagctgctcaaacagatcgacaaggaatacgcacaccctagcctgatcataacggagaacggagccggtttcggggtcgacgatgaaaagctcaaggacaatatgattctggacccgcttagggcaaaatacctctctgaccatatcgatgcagcactctcggccagaaataccggagtaaaagtagaagggtatctattctggagcctgctggacaacttcgagtggctattcggctacagaaatcgctttggaatgattggggtcgactttgaaagcccgcaactcacaaggttgcccaaatccagctattacaagtatcaagagaagatcaaggagtttaaagagcataataaatgccagccccagcaaagccggcattcgagttga

SEQ ID NO: 351110 - DNA, 1983 bp, Pseudomonas aeruginosa
atgtccggttattgcttctatgcccctgaggcccaagagcttattgaaaaagcaggtataagagaggcgattgaaagctttgcagaactaaacaaaaaacaaacttacgttttgtgccggcctctctccaaagaagactctgcttatgactatgatgaagcagttgccatcttttcatccggcatacgtccctgctttttgaatctcggtgacgacgaagatgcctttgatgagtacgcatctgacttccttgaagacgtctcttttctatctgaaaaatttaaatatcgcgaaaaaataggccgaaaaaaacattggtcctccctatttgagaaatttgaagtagaagactttgaccctaaacaccttgaggtacaaaaagcttcagacgcgcgactggtcgaccttataacctccttggtggttggcagcatcaatgacatcactaagattgacctcgaagcgatcggccttcttgactccgttaagtctaagatcatcttatttgacactgatcagacaagctttgtattccgctcaggcgctggcaaaaagtttgtaattcaaggcttagccggatctggcaagactgagcttttactccataaaatgaaggaaatatactcaagtgacctgaaggcaaaaatagcctttacctgctttaacaaaatccttgcttctacgatgaaggagagaattcctgtattctttgacttcatgcgagttgaacgacaaatcgactggaacaacaaacttttttgcttccactcttggggcagtggccgcgacccatactcaggaatgtatcgttacatatgccacagctacggaataccatttggcagcctgcaatccggagggtttgactatcaatgcaaaaaagctataaaagatataaaagcaatctctggcgaacgagattttgtatttgactacgtcttcatagatgaaagccaagatttttccgcaagcttcatagagctatgcgagctagtaacaaaaaagaaagtattcgttgccggcgacgtatttcaaaatatattccgccccatagatgaaagcgtcaatcgggcagacatggttctcaaaaaatgctaccggaccgaccctaaaaacctaatgttctcgcacgccctggggatgggcctatttgaaaaccccgtgttgagatggctgaagccaaatgaatgggatgcatgcggttatgtatatcgtggaaaaggcgatcgagctctggtttcgcgcgacccacttaggcgctttgaggacattcctaataattttgaaagcacaaaaatccattcacttaacaatggtcttccgatcacagaagccatcctcaacgtaattgcagaaatcaaggaaaggcacccttcgactcagcagggtgacattgcaataatttttcttgacaaggacaactacatatatgatgcaattgccgaactaaaaatcgtaattaaacagcgtctgaattggggggttaacgtttcctttgaaacaaaaaacagcgaccctaacaaactattcatctcaaacatcaataacgcaaaagggctagaattccccttcgtaatctgcttcgcaagcgatctaaatagaaatccttcattccgaaatgcactatacacaatgatggcccggtctttcctagaaagccatcttgtactcggaaaacgcgccaactcggaagttctgagaaacgtcaaggaagggctaagatacatgctcgaaaacggttacatgaaccttcgagtcccctcggacgaggaaatagcaaagcaaaaagaatttattgtcatagatgaacagccttcagtagaggaatttgtaaggcaatattgtgctagtaaatcagcaacgcctcgactactcgccaaactcataagccgtatgaacgacattgtgaaagattccgattatgatgaagaatacctcgaggcacttctggaagccgaataccgcaggaataaagcactgtga

SEQ ID NO: 351111 - DNA, 642 bp, Pseudomonas aeruginosa
gtgagcgccttcttttacaaggatataccagactattgccttgatggtttctgcgccgttagaagctcgactgacaacctgagcaatattcttcatctagccgaacttattaacactcaaggccattgcagaaccgcagactatgttccagactttgattttgccatcttcaccggagacttttgcagggcattagttaagaaaagagatggctttttctctatgacaattccgttccagctaattaatgacggagaaaccatatacttcaattttgaccccgcaggcgaagcggttagcggtcgatttatctctatactccgcaacgcaatattaacagccgcacatagcttcatatcgcacgaagagattgtttgctccatcagcgatagctttggcctagatatctcagaggcaacccactattacgatatttttgcatcgttgctcgctgacgatcatggttattttagatttgatgacgacccagacaatgaagatggctgcatacatccccgctatcattttgacttcttctacaagaactcaagctcaataaagctgggcattgataaatatgccgacatcgaatgcttctactctttatttgatggcaaacaaaagaaacactacctccggtag

SEQ ID NO: 351112 - DNA, 960 bp, Pseudomonas aeruginosa
atgaagcagagtttctactcacattttgatcgggatttggccggggccggttcggcaaacctcaatgaggcagtccgacgcgggctcctcagtcaacacgaggcaatgatccacgaccatcagtgggcacagtttagtatttacgccaaggagtctcatgaggtggatgtcctggagctcgtcaatgaaaaactggtgcggaaataccgcgaagaactctgtacgcaggtgtaccacgggaatctttcggtgcagaccgcggagggccttcttgagacagtgagttcagttatggccctcgcgaccggtggtgactggaaagtcgtgatgcctgatatcggctttcctggccatgcacggagtacagtcccacacagtcttgatcaagcgaagttcgaagccgcagtggaagatgttcaggcccgcctatcagagcatctggcggtagtattgatgttagtgcgacatctcggcatctcattacgtgaagcttttttcttcgacgcccaagcggctctagaggcggccaagggggatggatatattcccctggaaagcggcaaagaagggccgtatacacagaggataattaacatctcgatgccaaagcagatcgccgttttggagacggcatccaccgcccaagatgttcatcgctatccacaatcaaagcagacatggcggctctggaagcagaacagcttacctgctgccaaggatattttactttttcatgggctgagcttctgtgattgccgagcagcgttcgcatgtgagctttacaagcagtggtccggtcatgaagccccgattcttggagggcgcgctcctaatatcgacgatctagaggcgcgagatcacgtcgcctacgagcttgggaaactgcatatatgggaaactgatgcttacgtcggagcccgagccaacctgcgaaaggaagctgccactaccggtcgataa

SEQ ID NO: 351113 - DNA, 1407 bp, Pseudomonas aeruginosa
atgcaaaaaatcgaggacttgatgagtatctttgttgggcggcaaacaccgcagactcgcctgcgtatctgggccaagaacgccccagtcattgaacagcatatgcgcgctgccgccgaggaagcacgacacgactatttcgagtatctgtacgtacatcgtgacgatgatcgacggacgatccaactggtcgccggtaaccacccgataccggcgaacgacgacggcagtctccagatggaaggcggtgcggcactcgtattgtcgcaggacacccaggttggccacgtcgcggtcttaatctacccttacgaaacgtcccggcgcgcagggaaaccacttttctggggcttcttcgatagtccggcagatgcaatcgcaggtaaatggctcgatcgggccgtgcacgacttcgcccgttgctgccgtgcatccagcgtcgtagaccaaacggcttatcactctgaccggttgcggatgcgttggctcaaacttcgaagctgggcgctctgtttgcgtggccggttacccggcggcccgaaaatgatctgtaccaagccgtcgtggggccggcggatcatagccggcgttattgtcgccctcaccacgctaaccgcgttgctaaatctgccgagtatggtggcgacgttatcagggtacaccgtgcctagattatgggctttgttgtatcaggatcctacagttgacagcgcacccccatctggatcacaagtgtcgggctctaggacagcaaacaatcccccgaaagcaataccgagccaggcggatccatctattaccccagcagtggcaggtgtggagatgcccgtcatttccggctggtatacgttctgccctaccgcggctgatcaaggtagcagcccgaaacttctggatttcctctatgacgtgcgagcgcatgctggcaaagtggccttcttcgacgtgcaggtcgacatcgactgcgtgttgggcaagcagccagactatgaggcgacgttcagcaggctcgatgaagcgggcgaggttctttacctcatgcgcgtgcccctaataatggacggcgatcttgttacgccccagcaatggcttagcggcaagcacgatccgtccgccctgcgtagcatgtacagcgacaatggttcagcgattgcgatacacaatggaaacgacagccgtaaccccatttcacgtttccagccacatgttgagggaagcaacgacatcctcttcgggccctatgcgataaaagaaagctccgacgacgctgccatcacgttcgatctgaacgcttcgtttcttgacagtgctgctctacagcaggcgaccattatcgcggaagaactccgtgctgcccgtgcgctgcctacgactttgaattcgccagtcgggaaaggtgggtcataa

SEQ ID NO: 351114 - DNA, 681 bp, Pseudomonas aeruginosa
atgaacagggtgaggtggctgaatgctcaatggccttcgtcgattcgatcggtaggcaagaggctaatcgacatgccatttacggaggagagaatggatggcttcgctatcgagcgaatcagagatgacttcatcgaagggcgttacatcgaaaagtacagttaccaggaggtgatatcgaccccttttggaagtgaagaggtgcttgatcgaattggataccggacgacggagttcacgcttttcgattcgcctccccatattgagctcagaaattaccagcgcagcctaaaggaactgatcagccgcttgcttgaagcctgcagtttcaacttggtagtgacgcctccttcggtgaacctgatcgactgggtcgcggcgctccaggaggcggtggatcatgcaatcatcgtcgactcgctccaagtgtctggtgtcgaaatagacgaaggagtgactgggaaaattttgctcaagggggcaaaagatgtgcgcgatgccactgatctccttctggccggccggaaacatgtgctggaaaaagtccaagtaaaatttacagaccttaacaagatcgtctccatccagctgtccaacaaaggcaccgcgaagctccctgcggtgctaccgaacgatcttctacgtcatctgcgaacgtcctttcctggcaacatcagctga

SEQ ID NO: 351115 - DNA, 2826 bp, Pseudomonas aeruginosa
atggccaactcgtctgccgctaggaagcagccgcgggcgcgcctgctgaatccctgggcgctgctgttcatcgctctggcggtggtcctggtgctgtggctgaccttcaacagcgaggaagtgttcatgcccagcggagacggcgaaccggacgcggtctcggtgaactacgccgagctgctgctcaaggcgcatccggagaacgatgcgctgcgcctgaccctggtcgacctgctgatcaagctcggcgacttcgagcgggcacgtcaccacctggccggcttgcgtggcaaggatcgcctggcggcgccgttctacgagaccgagctggacatcctcaccgccctggccaagcccgagggcctggacgaggcgcagacgctggcgctggtggagcgactgcgcaagatcgatcacgcatcgctgaacaacgccatgctcgaacgattcgcccgtcacgccctggccctggatgccccggcgctggcggcagcggcgttcgccgaactggccggtcgcgacccgcggcaccggcaacgctggctggacgaggcggcgcgctggttcctggcttctgcccagccggggcgggcggcggatatctaccgacaactggccgagacggaggctgacccggcgaggcgcctggactatctgcggcaggccttcgccagcctgctcgccggcgagcggggcgagcaggcggcgctgctgctggccgaacacctcggcgaactgccggacgatacgcgcagcctggcctggctcgccgagggggtgcgcgccgcggaaggcaaccagcgctatgacctggccgaacgcttcgtcgaacgctggcgtaccttgcgtcccggcgacagtgacgcggtggcggccgacctgcgcctgaacatggcttccgggcgcatcgagcgggcctgggcgatcggccaggaactgctggccctgcgcccggacgagcggacgctgctggccgatctcgcccggctcggcgagtggaccggcaatacccgggaggcgctgggattctggatgcaactgctggccggcaacgacgatccggccttgcgcgagcatgcctggcgcctgtcattgcagatgttcgacttcgacagcgccatcgaactgctcacgccgatcggcgcgcagcgccagatgagcgacgaggaactcgacacgctggtctacagccatgaaacccgcggcaccccggaggagggcgaggcatggctgcgcacctacctcgagcgctatccgaagcagcgcctggcctggcagcgccttcagcagatcctcgagcacacccagcaattgcaggaggagaccgaggtctgggcgcggatggccaggcatttcccgctgtccatcaaggagcgcatgcaatgggcggaaacccattggaacctgttcgatccacggcaggcctggaaggtcctcgacgctgcggatgagcatgccatccgcgaggcggagttctggcgcctgcgcgcggcgctggcctgggccctggagcgggacgacgatgctcgcgccgcctacgaacgcatgctggcgctggggatccgcctgaacagcagcgacgaagaccagctgatcaccctgtaccgcgacagcgacccgaagaaggccctgcgaatcctcatcggcagttggcagcgcagccgcgatccgcggcgcctggccagcgccctgcaactggcggagaacctgcacgactggccgaccctcaggagcctcctggccgaggccgagggcgtgccccaggcgcagggcagtccctactactgggtggccagggcgcgcctggcggaacaggaaggacgcggcgaagacgccgagcgcctgtacaggcaagccctggcgcgcttccccggcgagaatctggtgcgcgaacgcctgctctggttctacgtcgagcgtggccgccgcgacgccctggcgccgctgctgacgcagtggcgagggctggcgcggcgggacagcacgctgtggctgccgttcgccagcgccaacctgctgctcgaacgcaacgaccaggcgctggcctggttccgcctgtatctcaagtccaatcccaacgactggctggcgcaggcggcctacgccgacgcgctggacgccagtggttaccgggacagggccctgcgcctgcgccgatacctgctcgggcggatcgagcgcgggacggtcagggccacgcccgacagcttcgccgcctacctgcgcctgctcgccgtggcccagggcccgctgctggcccaggaagaagcgcggcgggcctggaatggcgagccggcgatgctgcagctctggttcgaacagtttctcgaccagctcgccgcgaccaaccaggacgcgctcaaggatggctggctggcctgggcgcgcgagcgcggcctgaagatcggccgccacgaagagatccaggccgcgctgcgcagccagagccgcgcggccttgcagcgcctgctggcgcgcggcgagctggatccggcgcagcgggtcgaagccctgatgcgtctcggccatggtggcgaagcgctgggcgaggccctgggcgcgctgggcgatggccagtcgcgggacaaccgcgagcagctgcggcggcaggcggcggaaatcctcgaacgcaccccccagggcctgcaactgggttggaacagccgcgacttcggcggtctcgatttcaaggggccgacgctgcgcgcggcgcgccatctcggcgatgactggcatgccatgccgatctcgaactggctagcggccgctatcacggcgacgcgctggacagctcggtcctcggtagcgaacgcaacgccaggctga

SEQ ID NO: 351116 - DNA, 720 bp, Pseudomonas aeruginosa
atggcgggatttcgcagcagcacgcccagcccgcctcgctggccgcccgccgtcccgccagccgcggcgggcaccgtgacgaacagcagcgccgcggcgagcagcaccggcaacgcgctcgccagccagtccgcgcgccagtcggcgagcagcggcccgaccagcatcgaaagggcgatcccgcccgccatgaaggtgctccacaggccgaacaccaggctacgccgtgactcggcggtgatccggtggagcacggcgggagccgccaccaccacgatgagaaaccccaaaccctcgacgaaacgggtgccgagcagccaggcgaagtctgtcatcgacgcgccgagcaggctggcgccccccaggatcgccaggccgatggcaagcagccggcgatcgccccagcggcgcacgaggatgccggcggcgatgccaccgaacacgccgacgaagggaaaggcagacatgatccagccgagcgcggcgagatcgccgccgaagtcctgctgcagcgacggcagggcgatggacgccttgccgacatgcaaagccgcggcgataccggcgaagatcaggttggcgaccgccatggcctgggtacgcggacgtgcgggagtggacgggctatccatcgtcgttgcctccgggcagggagtgaggcccggcacgatcgccaggcgcgttgcccggattctgatagctcaacttaacttgaggtaa

SEQ ID NO: 351117 - DNA, 2622 bp, Pseudomonas aeruginosa
atgtctgagctatctgcacaactcgaaaaaatcgtcgatagcctgcaacagcagttcgcctccagccgtgtggtgtggtgggaggatccgcaaggggagttcagtgagctgctcgaatccttgtccttgcagaacgtgcagatttttcggcgatccaaggtaccggccttgacgatcaagcgacagattgagctgttgagtccagatggtctgtttttgatttatgaagatggtctgcgtcccgaggcggaggccgattggttgctggatatccgcttgtatgcggcacctttcgcggcggatcgtacctccatgctgttgcaggagctggggctacgtcagcacagtctgcgcgagcacctgaaggcgcgtagcgcattttttgccagcaaagaccgggtgaccaggatcaagggcctgctgagtccggaagatgacgaggcggcgctggatctgaagaccctcgcggtgcttgccaaggtcgagcaggcagagatgtttgccgtgctgacggccatcctggccaacctagctgaagccgatgaccttgaaggcaacccgttatgggagtcgctgggcaaatttggcatgcagcccgtgttctggggggtgatgttgcaggcctttgggtatcagcacagcgagcccacgttgcggcatttcctggttcgcctgtttgccactgatatgggccatgccctgcatgcccatgtcccggataacctcaggcttcttcagttgagccccttgcgtgcggccaatgtcgcggtgttcctgtcgcagtggcgtgatagcaccttgcgccagcgttcctatgaccggttgtcgaagcggatcgccacagacttgcgtccggcggagctgttggcacaggttcccatcgattcgcttatggcggtgaacacctttgttgatgtggagcgcttgattgcggagcggctgcgtgacgccgtgctcagcaataccagcgaggcggttggtcagcagctccgcgacagggccagcaggagaatggatggttattgggccaatccgcggtggccggataatgaggacgccaatcgatccatctggtgcgcttactaccatgccctgatagctgcttctgagctgttcgaactcaagcttcgctatgcggcaggtttttccttcgactccgcggaggcgtgctacagcgcttacacccgcgagctctaccgctttgatcagttgtaccgtctctatcacgaggctgccgatgtcgtgtatgccagaagcccggatgcactggctccgcttacctcccgggtcgagcaagactatctgaatggctttcttcagcctttggcgcagaagtggggaagctttttggaggcagggcagatccagcaatggcaactgcctggggtgcccaaccagcaggagttctatgcagagcatgtagatcgttatctcaaggggggagatgaccggcgggtattcgtcgtcatcagtgacgctttgcgttacgaggtcgcccaggagctgaatgagtcgctcaatggcaagtaccgctttgccgcggagttaggcagccaactgggtgtgctgccgtcctataccaagctgggcatggccagcctgttgccacacaagacgctgagctacacagatgctggtctggtgcaggtggacggtttaagtagcgatggcctggaggcacgcaacaagatcctctcaggggtgcagggcctagccttgcgtgccgaggacttcttgagcatgaacaaaaccgatggccgtgagctgatcaagccatacagggtcgtttacatctatcacaacaagattgatgccgtgggcgactcatccagcaccgaaagcagcacgtttgcagcttgccgtgatgcccttggcgagcttgagtccatcgtcatgcgcatcatcaacaacctcaatggccatcgggtgattgtgacggcagaccatggctttctgttccaggattccgctcccgaagcactggacaagagcaagctggtgggcaagccttccggcagcatcgtatccaagaagcgctatctcatcggtcgcaaccttggggttagcgatcaggtgcatgcaggctacattcgggataccgccggcattgaagatgacatgatgttttgggcgccgaagggggtgaatcgcttccacttcgtaggcggtgcacgtttcattcatggtggtgcgagcttgcaggaagtcgttgtccccgttctcaaggtgcaacaggtgcgtgggcagaaagtaaaggacacggcggtgcgcaaggcccaggttaccgtgctagggaacaacttcacgatcaccaccaatcgctacctgttcaacctgttgcagaccgaggctgtttccgagcgagtacatccggcggtgctacgggtggggttgttcaatgaggccggagaggccgtttccgtggtggagcaggtctccatggacagcgactcgcagaacctcgaccagaggcagcgcaaagtggctctgactctgctgaaccgtccgttctcatcgagcgagcgttatttcctcaaactgctcgatgctgagaccgacgtcgaacagttccgtattgaagtgcgtatcaacctggcgattagcaatgactttgacttctga

SEQ ID NO: 351118 - DNA, 1362 bp, Pseudomonas aeruginosa
atgaaagggcaggagcttaaggatgggtttcgacggattcttgagggaaataagtcgcgcgctgtcctgagtaagtcttacgcttttgatagtgccgagttttcagaggctagggcactgaacacaagtatggaatctttggtcgctcgtgatgaagagcattcttggcagatacaactgaggccgaggtttgggaagcagggggttaatagaagtaagattggtggtcatccggacttcgatcacctggcgggtacggatggagtagagtttcatcatgcctgtgctctgttcctggatatcaaaaactctaccagattgaccctgctatataagctagaagatgttatttggataaagaactctatccttaaggcagcttcggagatagtcagaagccttgatggtcatgtacatcgttttatgggggatgctcttcttgcctttttcggccgaaagggagaaaagatggaggacagtgttgttaatgctataaattgtgtttctgttcttgagtctttgatggtgaatacaattatccctgttcttgtggatgaggggtatgacgcaaaggacttgggctttaggatcggtttggattttggcgaagatggaaaggttgcctggtcttcgtatggctataatgaagtgagagaggttacagctacttcattttatgttgatgtggcgtcaaagctgcaagggatggcaagaaaaaataactgcatgatgggggaagggctcttaaaatctattgactttccggagatttttgttcggaagaagaaggttgtagagaatggccagtctgttgagattgattacttggatagacgttacacggatcgagatggtaatgcccttcgttataaggttcgagagctaagtaaggacggctatagagatttgttgccttttggggcggagctcaaggctcagtttgaaggctcaagttgtgtgggccatcagggcgctctgtttcagtgctacgtgaaccctggcaactctccagtagagtattattcggcctcaagatctcttcccaaaggaaccgccttagagtttaagttaactctgagaggaggcgctttcggtttgcatttgtttcccttgggggtctcatttactaaaagaaatcatggggctgaagcacagctaagtaaaagtgctggcgtctttcctgtcggggatcattccgtgctatcggaaagtgaggtggggcgcggtcagttttttatgggtaaggtgattagatttccagaagctacggcatatagaggactacacactatggaggcagtggtaaaggatcgattggggaatgtggtatttagagactttatcggtgtttatatagactga

SEQ ID NO: 351119 - DNA, 816 bp, Pseudomonas aeruginosa
atgtgcaatgcgaataatcatcctcctggctgcaattgtggttggggtggagtctggtacggtagtagcggcggtggtggtggggaatttgctcgctggctgtttaacaaaccaaaggctgagcgtaagacagggttacagcatgcaaccatgtccgatctttccggtggctttaccaatccaaatgccaaatgcccagtatgcggtgcttcggtctacttttatgagtccccatatggggggatggtttattttgatgagctgggcccaccgtggcccaagcacccctgtacgagtcgtgcctctgaaagaactccacgacgtggtatccgtaggtggagtgaggttggctggaaacccctgaaagaagtaaccatttcggtaagattggaagtggcgggagtgtactccatttcaggttcctcgcagggtacaaagatttccctatgctttcgtagtgaccgggttgttatggcggatatcgttcgctatcgccctgtaggtgatggagtatttgagctttcaattcttgattatgagtcgacggaaaatcgttggctcgtttggaatggtattgcagcagtcaatccagatcgacttgtagagcctctaacttactcagttatacaagccattcctgagcctaccctcaaaaaagtcagaaaggtggctgtagagcaagagcctaatactgttgtatgtgcagtgtgctcgcgcaaggtcagagaggatagacttgtcaagcacttgaagaaggtgcatgaggttatattggtttgcgttgggggacaggtgacagggcagatgtatcgctaa

SEQ ID NO: 351120 - DNA, 1401 bp, Pseudomonas aeruginosa
atgacagactttgctgacgcatattataaggccagtagagatttttctggggtagcgggtgccttggagtcggcaggcttcgttaatgacgttcaagtctccatagatgcagctcttgaggcccttaagaaagaggctgagcgacgtgccaatgtaggtgttgactacgttaagggcaatattgccgaggtgtggcatgcggaaacactaaaggtttctgctgtggcgaaaggcaacgatgatatatgggcaaatgcggtaggaaacaataagacaggagaggatgttgcatacggtaactcaacaacagcctctcatgcagagttgaagtactacaaaacagctgaggactctgctaggcaactgggtaatcccgcctattcagacagccagaagattgtacctactgatcaacttgagggtgttattgctgagtcgcaaaagcaagctgctcggaaccaggacattcgtcccgaggttgcggccgcatatcaagacaccgcagataccgtaaatgatcgcattgaggtggatggcattacgtccaagcccttaagcgagggagatgccaaaagcatcgcatcagactttaagcgcgatggtgaaattgatcccgacgcttacgggctcaatactgagagcttcattgagtggtcagatatttttagagagtcaggaagtgcagcacttaatgcggccgctttctctgcggccttgactgcggccccccacgtatatcgcatcgttgctcagtacgtgcagtccggtcagttggacgcaaggctaattcgtgaaggggcaagtcagattcttgccagctcttcaggcgctggattgcgtggtggccttgcggcagtgattactggctcatgcaaagcggggctgatggggcagtctcttaaggggatctcacctactgctgtcggtatggctaccgccatggcgcttaactctattgaaaattcttggcgatatgctcaagggcaaatctccggtaaggaactggcgttcaactcatcaagagatgctgtggcccttatgatgggcggcggaggagcggtgctcggccagatgattattcctgtgccagtgctgggggctttgctcggaaacctggttggctcgaccctcggcgcggttggtgtcagctatgcaaataacaaggtattaggaatctgtgttgagtctggctggactttctgggggctggtcgatcagtcctatgtggttccagaagaggtgctcaaggaggctggttttgatctctttgcgcgtcaggttttcaagcctgaacagttcaatgttactcgtttcaacacccagtctttccatgagacccgtcttggtttcaccgtattaagacgaggagttatttctttcaatacagtcggataccaatag

SEQ ID NO: 351121 - DNA, 630 bp, Pseudomonas aeruginosa
atgggcatggaagagccgctggacgctatcgactggccgcgaattattgatgaggtaaaggcaacctatacctcgcatctagagctatacagcttcaaaaaataccccgcgctcgattatgagcgcttcaaggctaccttctctgcgctagcggaggaggttgatctcctggtcgcactgctctggaaatgggggcattggggcaaggatagctatccctcgaagcagaaggccttgatcggcgagatcgagagactgtggcctgcttttcgaggctgggcgctatctgctggtgatcaattcactcctgaaaccacttttcaatggtgggataagcgactgggtaggctgcgctatatcaccagcgcctacctgactcacctgatccatccgctccaggtgccgatcatcgatcagcacaatttccgcgccatgaatcatctgctgcgaactccgtccgccaagaaaaaaccatccaactggtgcgatatcgtccggctcaagtacttcctgcgtgaagcgagcaaacgatttcaacgcccagagattgaattagacaaatacctaatgatgtatggccgtgcgctcaagccgcgcagggtcaggtcacctcgtaaggaacaggcatga

SEQ ID NO: 351122 - DNA, 3663 bp, Pseudomonas aeruginosa
gtgctgatcaaaaatctgtttacccgctccattcaccgctcaatcaatggcgtgatcaaggctgaccaggacgatgctgaatcggtctggcaggagctcgatgagtacgtcatcactcgcgagcttgaccagcacctgcgcagctttttcgaaagctacctggctgccctggacaatcccaaggatgcagccgggcgagtaggggtgtggatctccggtttcttcggttcgggtaaatcgcacttcttgaagatcctttcctacctgctggaaaacaaacaggtcagtaaggaggggatcacccgcaaagccatcgacttctttgaagagaagattgccgaccccctgttggctgcggatatcaaacgcgctattgcggcagacaccgatgtgctgctgttcaatatcgacagcaaggctgacgccagtgaggggcgtgatgccatccttcgcgtcttcctcaaggtgttcaacgagaagctcggctactgcggcgatcacccgcatatcgcccacatggagcgttacctcgacagccagcacaaattcactgactttaagcaggccttcgccgcggcttctggctctacctgggaggaggagcgagatgcctaccacttccaggttgatgcattggccacagccctgtcgcaaaccctggggcaggaaatcaaggatgccgatgcctggatcgagcgctttgagagcgacttcagcctgtcggtggagaattttgccgcctgggtgaaagagtatctcgaccagcagggcgcacagcaccgcctcgtgttcctcgtggatgaaatcggccagttcattggccaggacacccacctaatgctcaacctgcaaaccatcacggaaaacctcggcaccgtttgtggtggtcgttcctgggtgctggtgacctcgcaagaggacatcgatgccgtgctcggtgaggtgcgcgcctccaaggccaacgatttctccaagattcagggccgcttcaaaacgcgcctgtcactgtccagcggtaacgtcgatgaagtcatccagcgccgtttgctcgacaaggagtctgagcccaaggatgccctgcgcaagatctaccgcgagaaggccgacatcctgcgcaatcagctcagcttcactaacaccgggcgtacctacaaggccttcactgacgaagacaacttcgccgcggtgtatccctttgtgccgtaccagttccaactggtgcagcgtatttttgaaagcatccgcaaggctggtgccaccggcactcacctggcccgtggcgaacgttcgttgctggatgccttccagtcggcagccaaggcggttggcgatagcggcattggtgttctcgttccgctttatcgtttctacccttccatcgagggcttcctcgaaggcgtggtgaaatccaccatcgacaacgccgcgagcaaccctagcctgcaagacttcgatcccctggttctgaaaaccttgttcctgatccgttacgttgatgagatcaagggcaacgtcgataacctgatcaccctgttcatcgatcagatcgatgcggatcgccagggcctgcgcaagcagatcgaagacagcctccagcgtctggaaaaagagaccttggtcagccgcaatggtgatgacttcttcttcctgaccaacgaagaacgtgatatcagccgggagatcaaggatgtcgatctcaccagctccgacgaggcacgcgaactgggccaattgctcttcgacgaagccctgcgtggccagcgtaaattccgcttcgttgataacggcaaggactttggtctcaaccgtcaatgcgacctgcatccgctgggcaaccgcatcgacggcgacctccaggtcgctgcgatcagcccattggtggatgaccgggaaacctggaacgaacagcgctgcatcctcgaatccagccagggcgaggggagtgtgctgctgcgtctggaggacgaccgtgacctggctcgcgagcttcgcctgtatctgcaaaccgacaaatacatcacccgcaagaacgatggcaccctgccgctcaataccaagcggattctccaggatcgagcagaagagaaccgtcaacggcggcaacgcctgagtgccacggtagatcgccttctgcgcgaggctgaggtctatgtcgcgggcaacaagctggaaaccaaggccgccagtgcgccgatgctgctggaggaggcgctcgactacctggtgcgcaacaccttcaacaaactcggttttatccagcacttgagcagtgacccgcagaaagaaatccaggcactgctcgccacaccgttaacccctggtctggggcttgagagcactggcgaggccaatccgcgtgcgctcaaggaggtcagccagcacatcgagctacttgcctcgcagtcgcgtcgcatcgtcctgcatgacctcgctgaaacccactatggacgccgcccttatggttggcccgaatgggagacggtattgctggtcgttcgcctgatgctcaagggcgagatcagcctgattggcaacggtggcccgctggcaccgcatcaggtctggaatgagatttccactccggcgcgttggcgcaccaccgagatccagaggcgccagcaggtgggttccggcgaactgcaaaaagcccgtcagcaattcaaggacgtgttccagaagattgccccggatggtgaagacaatctctacagtcacctgaaaacccgtctggaggagtgggagggtaatctcaagcagtggcgggccctcgcccagggtgggcaatacccaggtctggacgatatcgaccagggactaaagctgatcggtaagctcaaggcggccccagatagtttcgataccatccagttgttcctcaaggagcgctctgcgctgttcgacctatccgataactacggcgaccttgagaacttccacaccagccagaaaacagcctgggacaagctgcgtgcagctcaagcagactttctgcccaaccggcccaaactggacaaggatgaaaaagcggcgcgggcgctggcacgtatcgacgaaattctcagcgccaaagcccctttcaatctgattcgagaaggcgagggactgatccaggcggtcacacagatcaatgatgcctttctcaaggaggcccaccagcgagccgatgcctggctggagaagcaactggccaaggtcgtggtggagttggatgcactgcaagccagtgccgagcagcgcaacaagagcctgctgcctctgcaaaatctccggcagaaactcgccaagcagcgcagcctggcccatatcagccagatgcaggacgaagcccgagaaatggcggatgtcgccattgatcatctccacctgctggctgaacaagctgcggccaaagccaagaccgtagccactacaacgggcttaggcccagtgacatcgggtggcggcaatccaggtttgcctgtagccgagtcaactgcggctgatgcgcctgtggctgtggtggcaccggctgtgccggtgaagaaacgccatattctcgatgtgcagcagttcgccggagcaggctacatagagactcaagccgatatcgacagctttctcgccaaactgcgcaaggagctggagcaggcagtcgccgacaatcaacgcgttgaaattcgctaa

SEQ ID NO: 351123 - DNA, 579 bp, Pseudomonas aeruginosa
atgcccgtgaataacctcgacgaacgcctcaatcaaattctcgaccgggtgacttccgatgattttctcggtggtcaggggttgggcaatgaggtgccgttctacgcattcgattacccgccgcaggacgaagagaaggtgcgcgagcacattcgttttttgcagggggcgattgctaagcgtcgcccggagctcaaggtggctttcgtcaatctgttcgagctgctcctagacatgctcaacggtcgaaagctgctggaaaaatccatcgatctgcaagcgcagaagggtgacgaagcactgcaaaaagccctcaaggctccgctggatgcgggaaagattgccagggaactggttgggcgctacccgccgaacgagtacagcatcctgtttatcactggcgtcggcagcgcctatccgcttattcgcacacacaacctgttgaacaacctccagccttttatggggcagacgccggtcgtgttgttctatccaggccgttacgacggccagtcgcttcagctattcgcccaactgggcgagaaaccctattaccgcgctttccgtctggtgagctga

SEQ ID NO: 351124 - DNA, 690 bp, Pseudomonas aeruginosa
atgtgctcggcgctgggacgtttgtcgctggcgctcagtccggccggcactcaaaataggcactttgatgtggttgatgagttcgaagcccttatgagcagtgtttacctggccaatttcaccaaatgctcattgattgtgcccgaggcccgcatcgttgctggcctgctgttgcaggacgtggaacctcgggaatgggaaaagcaagtgcatgagctgaatgtgctgcaaaagcgcacggccaagacggcagcgacctatgccaatttggcgcgtgcccgcttgcaaactatggatgcagatctctggcagctggtgcgcgacggcagcatgcctgccgctactcatgcggtcttggcggcaactgtgaaattctcgcccttgttcggtgatttcctgcgcacggttgtgcgagaccagttccgtcgttttgccacgcacctggaggctcgtcactgggacgcctatatcgaagattgccagcgtgctcagccagatatgcctaccttgagcgactctactcggggtaagttaaggcaaaatgccatacgtatgctggctgagtctggtttccttgaggacacccgtagcctacggctgcgtagtcagcccattgagcctgctgttctgaactatctacgccaacacaatgagcagtatgtgctcgactgccttcaggtatgcccgtga

SEQ ID NO: 351125 - DNA, 303 bp, Pseudomonas aeruginosa
atggcgtcattcacacagctatgggcagtcataggcctggcagcagggctggtcttgctgctcgccttggctctgttctgtcagcaactgcgtatcagcagtctgcgctcgatgcgccgggatttgctccagcagattgaagctttgtgcgatggtcagcgcgatcttctagaccagcagtttgagctgcaagcggcgctgcgcgcagagcgtgcgcatgtcgaacagttgaagcgcaaaacccagctactagaggcggcaatgcaggatgagtccctgcatgctgccaggagcaaggcatga

SEQ ID NO: 351126 - DNA, 834 bp, Pseudomonas aeruginosa
atgatcaagccgggtgacatcagggctatcgccgatgcggtagctttcgtaaaagattacgtcccagccaataagctatggaaacgcctgaatgcgcagtacgaaataggcacaaagcaaggggcacgatttagtctgacggcggcagatcacaagtaccttcgcgatcttgtgaggaacgagtatggctttgatctcttgaaagagaggcctctcgacggtgagctagacaggatgtcgttggcgcagaagacccgtagcgaaaaactatcgggcgaggaggtgagcagagatattattttggtcggatctgggtgtggcgtcctgtcactacctgaaggggatttcaccctgcccacgggggctgttcttcaacttcaggcaagcgcgctccatggaacagaacaagtcgtgctggtcgaaaacctcagccctatgtatcaccttcatcactatctctggccagtagggatgagtcggactccaatgattttccgtggaagtcctcagtactcgcccgctgccgtagctaaggcattggctggtgtcaggagagtcatctgctttccagatttcgatccacaagggctactcaacagtttctgtaccgataaggccgatgggctggtaattccgactaaaaaagcgcgctccgaactgatttgcaggaggctggataaaccacacgacttcaccaggcaagtcgaagcaagggattggctgcgcaagcagagattggggcttgagtacgtgtctgatctgttggcatcggaaacaggattcagccaagagtctatggttggcctggacttgcaggttgcagacattgcctga

SEQ ID NO: 351127 - DNA, 1275 bp, Pseudomonas aeruginosa
ttgaaggctgaagactggaagcgatttgggcagagtgtcgccgccaacgcggagctgcttgagttgctggcaaactccgacgagctcggagtcactgcccaagaaaaggggcagaagaaactcctatcatggctgatcgctaaaaatcttattgatgttgatgacggggtctacagcctgtcgtcgttgatgcttgacctgggcgctcaaatttcgatgactggatttgagagagccgctctagatttggaagaaagcatcattgccattacgaatctatgcgaatcctacgagagctcacgtgatagcggcagtgtcgacagaatggcacgcattgagaagaagctgagtttacggttacgccagattatcaaagcaattcgcggcgagattgtttcaacaagaatgtttgttgaggctggtttcaattttactaataacctatccgatcaactgcgtgaaattcgccatgtggcggatcgtttggtgcatatccatgaccggctgagcttgttcacgtacgagagcctagcaccgctttgtcgtgatgaccgtaccttgcatcgagtgattgtgaagtttttcctcagcgcactctccaagcagcgcgctcagctgcacgacctcatttctcgtttgaacaagctcagcgttgctgttcgtaagcgcaagcggcaacgccaactgatccttgtcgttgatgcctggctggatagtggaaacatcctagatctactccccatgcaggacgcgacaacgtactccgggaatatccgtgctcgtggcatgagtttgtttgcgcatgcggttgcagggcacacagatgctgactacgtcgctcagctggagtcgattatcgctagccttcctcctcccaaggagcggagtttacgggatgtggttcaaaggccagaaggtgagtactcgttagtgcccgacgttgagttggagcaggaggaagaggtaccaccttttgctgagcctcacctgatcgcgatgctagaggcctacaagcaggctcgggttcctcaatcggctgtggattattggctcttgaatggccacccggaggctgacctcaaggtctggctgtgtgctttggacaactacttacttgtgcttcagtcagaagtcaaaaatgcgggtggaaagctgaatttcagtatcgttcccgaagagcttccaatgagccgatactcagcgaatcagtacatcacggatatttggatctgctcagagcattcccttgatcaacctcgcgtcagagccttgtag

SEQ ID NO: 351128 - DNA, 663 bp, Pseudomonas aeruginosa
atgcgcatgagtcgtttgcgtgagtgccttgagatactgcttcaggggggattcatctgcccattcagtcaaccggatcttcaccaggccatgcttgatcaggatctagttgagcgagtggaacaggggttgctgccactggggcgggtgctggcacgtattggcgatgaggctgcaccggatacgttttatgcggggtacgcatcgttcgactcacctcaggatcgtcagtctgtggccagtgagttggtgtggcttcgtgatcagatcaaacccttactggattttattcgtctctatagccgggctgaaggcggcgatgtgtacttggctccaggtgaggaggttactttctctaggctgatcgaggctatcgaggccaataccacttacgcagagatgcttcgtgatcttgcgggacaccaaatcttcaggcgtatcagttccgcccgtgataacaaagacagcctgggtagagcgcttgaggccttaacagatgaaggcttccttgtgcgcgcaaacaagcaaagcgcaaattttgtagtaaccgggaaaatgggttatgtcttcatggccctggagtgggtggctgcgtatcacgaaattgccgagcctgaaaatcgtcatgagctagctgccgtgcagggaggcttggagctttga

SEQ ID NO: 351129 - DNA, 3738 bp, Pseudomonas aeruginosa
atgtcgaagctagttaggatcgtacttattgattcgttgtgccgtggtaccaaggctgacctttgtctggatggcaacacagccatcatgggtaccaatggcattgggaagactagcttcatgcggctgatcccaattttctatggcatcaaaccaggggagttgattgccgcggactcgaacaagaaatcgtttgccgattggtatctacccaacccgaccagcttcatcgtctttgaatatctgaattgggagagccacccacgctgcgttgtcatgcacagaagcagcgacacctacgcttatcgctttgtgaaaagtggctggcgtaacgagctcatttatgaagacatcgaagccgggcgcatggtcatgtcgtctgatctccaacgtcacatgtcgaagcagggggtggattgcaccgcgcaaattccgcctctgtattatggtcgcacaattcttttcaacaccgactccaataaccttgaaggcattgaaggtgtcgacaagcgaaacttggttcgcacgatgcgttcagcattttcattggctccgcgtggcaagcatctatctggccttgatcgtctaactgtcgcgcttatcgagagcaaaggtactttcgactccatgaagtcgaccatggccagtattttggatcaggacagtgtcaatcctgccgagatgcttaagactttttcggtgcagtcgtttaaggagatcctggattcgcgagacggatacctggcgcttgaagagctgggcagagccatcgtggatcttgatacgacccgtcacgagtttgaagcgtgcatagccgagatgggtaagcttcgtagttgggctgctttgctcaatgacgagcgtgaggcagaaagtagactgatcaatgacgaagcaagtgtgctgaccaataaggagagtgagtttaacgagcaggccagtgatttgcggagtaaggcggggctgaaggtcagtgagacgagtgttgccgccacgacggctgaacagtctctgaaaatggtcgaagaaaaacaggaaggctttcaacagcacggcattgatgagctacgggttttgcatcaacgcttcgaagggatgtgttcttcggtcagtgagaagcgccagcttctgaataatattgagcgagagggggccgatctacgccgttttgctgagatcagaatccagcaaatcaaagacgactttgtccgtgaaaaagaatctctagaggcgaactacaagacagctgtcgatgattttgagtgtcgttccgtagagatcaatacccagagagagcagggtaatgatgactgccaggcaagggaacgagctgaaactcaggccctcacccagaatgtgactaggctaaaggtgcgttgtgggcaattgcggagtgagtatgcgcagctgggtaggatgaaggtttcgcccgagaaccagatcgctatcgatgaggccaacacaacgatacgtggcctgaatgcgtcccttaatgaaaccaatgacctaatagtccaatgccaaggggacactcgaaagattcaggaagggcttgatgactgcgcccgaggagcgcagaacattgccaacaaccgaaatgagattgtcaggcttcaggaggaactcaagcgtcaatgcgagcctggtcgtgactcgtttcttggatttcttcggcactgtccggagggctcgcccgattgggtatccactatttccaaggttgttccagctgagattctcttgcgtacagacctttctccccgattatcgggggcgggcggtagctcactttatgggtacgagatcgatctagagcgccttgacgatggcttgattgccaatctggagcaaatgcgcatgcagattgctgagttggctattcagctcgatgatctcgaccaagaacaggcaagaattcagaaagaggccgaccagctctctgggaagttgaaacaccagaaacaggtatcagagcagctcagcagaaaatggagtgagtgcgacgctaatttgagaactcaaatcagtgctcatgaagctttatgtgagcgggctgaagccgagcatcgcgagagcctggaacgtttgaatgctgagctgatcgaggtgacagctttggccgaggaggctgcacaggcgttaaagcttgtagaggcagcatttggccaggagcgcatggctataaaaaatgaagccaatctccatatggaagcgcttgaagccgagaagaaaagctataagcaaagctatgacaagcaggtagatggattcaggcgtgaggaaaaacaccagatcgaagcagtgcatgcggcgcttgaaaaagatcttgcttccaagggtatcaataatcttcagcgcaaccagctcctgagcgaaattggcgatttagatcagaaaatcagacgctgtaacgaatcgcgtagcctcattgaaagctatgagctcttcctggcccatgaccttcctcgactgccccagcttggtcttgagttatcaaagaagcaggcagcgctggagcaggctgagagggaaaaggcgcgtcttgagcaggagcttgaagtgcagcgaaagttatatagcaaggagcgcaagctacttaaggatagatgggaggtcgttagtcaagaccaacaacgactggccaaggttattggtcgcctatcgagtgttgcggcgaacacgtcggagcctatacctaaaggtatgtccgtagctcaactggaataccaggcatcgcagttggcccttaaccgtaagcgccttgcagacacagggcgtgaattgcttcgcaccattcatgatcgctttgtccgcggcccagtacgttctcttgcccacacccaccaaggcgcgaaggtcagtaggatctacagccaggccacggcagatgctgacgatgaataccaagcgtgggtttacgcagcaccgccactgctagacctgctcaatagtcagcccgatcataaacggttgctgatcatgcaaattcacaacctgtctaccgaactggagaatagtcgagggcagctcaaggatctgcacaaaacgattttgaaactaggtaaaagggctacagacaaagccggagagacattaggtgctttcccagcgatcagaaattttgagtttcatgtgtcatctcgaatccatgcgttggatttttgggatgagttagatacctatgtgcgagagtttgcgcgctggaaagccctgggtgccgatgtgttgccggcggcttcgtttattgccgcgatgaagcaggtagaacagaaacttacagacggtgcgtttggcgcaacactttccaactgctttgatgtttccgtgcgagtggatgaccagggcagtcacaaagtcgcgaccacgaacaatcaactggtaggtatcagtagccaggggctttcaaggattatcgtctacatgatctatgtatcgctttttgagctgcttcgggatacggccgattttgagatgtctattccgtttgatgaggccctagaaatcgcgccagagaacgtcatctcgttagttagctatttcaacaatcggcacatcaggatgttggctggcttcccgggtggtgcgcctgagctacttcgccgttttcagcattgttacaccttacgtcgtcataaagagcgggtcatcgtcactcagtacctgccgccacgcacgaatccacttcaggtattaaattatgaaattggtgagagccaggaagcgggggtatgcgcatga

SEQ ID NO: 351130 - DNA, 873 bp, Pseudomonas aeruginosa
atgaaaagaacacagacggtcgagcaggttcgctgggatctggcgctacgttaccgactcattgaaacagtggcttggtgggaaggtcgcttgacgaccaatcatctgatgcagagcttcgggatcagtcgacaacaagcctctaaggacatcaacacctacatcaccgaacatgcacccaaaaaccttacatatgacaagcatattaagggctatgtgcctgccaaaggcttcaaaccgcggttcatcgatgatagcgccagcgcgtacctgcacttgctcaaccagaaccatgaacgcgcgccacatattgaaggcttggccctggcgtatgctcatacggaggttgtccaggtggctgatcgctcgattcgccccgagatccttcgccctctcctcagggcgtgccgggaaggcctccgtcttgaatgcgaatatgtttccctgaagaaccccattccagaggtgcgcctaattgctccgcacaccctcgtgtacaccgggatgcgctggcatatacgtgcgtactgcgagaagaatggtgactaccgagatttcgtgttgagtcgcttcagaggagatctggacacactcggtaattcagaatgggcacgtgaccaggatgaaggctggtctgctgaggtcaacatcatcattgagcctgatcccaggctgaagcccgcgcaaagggaaattatcgaaacggactacgggatgagaaacggccagttgctgatccccagccgaggagcacttgctcagtacgttttgcagcgctatcagatcgatccgcacaagattcaatcacgcgcgagcgcccagcagattgtcgtggccaatctggatgagattcagccatggctgtaccaataa

SEQ ID NO: 351131 - DNA, 3801 bp, Pseudomonas aeruginosa
atggctcaagcaagctcaagtaacctcaaacgcacctggttcgcactgtattacgggctgatagctggttttagggtgttcaagtccacgtattgcccaggcctctccaagtcatcttttgagccgctgacgccggtgctacttgaggatgatcgctttacgcgttacgagcaggaattgcttggtgctctgaacaatgacgaggtattgaacattgcgctcaccggtggatacggggccggtaagagcagcgttgtgaagactttcttcgagcgcaatccccaattcccgtatgtcacggtctccctcgcgaccttcagtcaggaggcgcctgcccagacatctaagtcactagatacccaggtctcgggtaataacgcttctataagcgctgcattggcggaaaaaggagatgaggtctcggcctctgagctcctcaaccgaattgaggaaacaattgtccagcagctgctttactccgtgcgggctgaccagttacccaaaacacgcctgaagcgaatcgcccaggcttcgaactccatgatttttttacgcacgtcgtttctggcagcgtggctcgccggtgttttgaggctctgtgtgcccaagctggagaagcaggcagacgttgatctgggttggatcatcaagggactcacgctgattcccgaatggatcgccgccagcatcgttgtagccggtggaatatacatggtgtacggagtgctgagattcctttcgatgttcagcatcgacgggctgacccttaagggcggtaagctcgaggctacacatcatggttcagtgctccacaaaaacgtcgatgaaattatctactgcttcgagcgtagcgacgtccaggttgtagtaattgaagaccttgacaggttcgatatccaagacatcttcttccggcttcgggagatcaacttcatcatccgccagtctcctcagatcaagcggtcagtacatttcctctacgccatccgcgatgagctgttcacggtcactgataagaccaagtttttcgacctgatcattccaatcattccagtcgtgaactccgagaactcgcgagagaagttgaccgagctaatacgtgctcgaaaagtaggcgagatctccttgggcgccaggcttgacccagccatggtagagacagtgtgctactacattgacgaaatgaggctgatcaagaacatcgtcaatgagtacgacatttactcaaacctcttggcaaaagatggcttggcgcttgagccgaacaagctattcgccatcgtcgtgctcagaaacctgcatcccgatgcatataccgacctgatcaagcgtcggggccctatttacaatgtgctaataggctttgctggatgggtcaaagacgaggtgcagagtcttgaagagcaggcggatgagctgagggagctgttggcacggcaggaaaatgaagtcgcaacgagtacggcgcatctccgagcatgcgtatggtacgagatcgtgcggcagggggatctgccaaatgccaacgcagtcagcattccaagcggtgccttattcacgctgcaacagtttgtcgaggatggcaacttcgacgctgtaatccaggcggactgggtgaaggtgatggctactagctattatggaaacgctgccgggaacaccattcgacctagccagcttctcatggcagcgaaatacaaaactcgcgccgatctattgcagcgttcggtcgatagcattgagggcgagatcaatgatttgcgaaggcagattgttcgtctcaaaacaaccccatttcgcgaggctgcacgaaagggctatggcccaacaatcgcgaactcgcttgctggtctagaggtggttacctacctcatgcgtcgtggttttttcgacaccgactacgtcgactatctgggctatttctatgagggttcgctgacccaggctgacaagaattttatccttgcactcggtcggggtgaaatgctcgatgtgaccactccgttgcagaatcctgagcgcgttgcgagcaagttggacttcgactgtcttgaggaaggcaaaggcatcattgccggggtaattgctgctcttgcaacgcatcgagaagttgatagtgcagagcttgcgaccgagaagctggccatagtactgaagagcggccacaagcacttggagcggatggctgaagcggtgcagttgctccttggggggaaggatggccaggcggtcatcaaggcactgttcgaaatagatcagaacctgatgcaccagcttcttcaaactgatcggtttggactcagtgatgccaggcagcagtacatcagcgccatcttggatgcattgacggccgagcagctcaataccatgagggataagaagggcttgttcctaaaggcaatcaatggactctccgatatcgctcaactcttgccctctttggagtcaaaacggggaggctggaattggctccgtgataaacccgcgcaattcagggatgtcagtgatgcgacatcgcccgacgatctcaaaaaacttgttgcgtggggatgcctggagctatcactgcccatgctccggttactttggcaaaagctaggtactccttctattgaggaggctctagtgacctatgggcgtcttgaaagccttgagctccctggcctgtcggagagtatcaaggtgcatcccgaagcgttcattactgagctcctgagccaagacggcgttctcccagagagcagcgattcgctcgtgaaactgctgcatctggttcaagacgatccggatcttacgggacaattgctggatcgaacccagtgcctcgtgtcggatctccgggaggttcctaaggaggtttggccacgtttcttggacatggatcgagtcgagccacttggtagggctgtttggactgtcttcgatcaggtgatcgatccagatataccttctgccgacgcaagtggggatgaagtaagggagttgctcaaagagaaactcctctcttttgttaagcgtcatgtcgagatactggccgggggactatggcaagcggagccagcacgacaagctgcgcttcaggtttatcttcttcgccaagaggtacctaacggcacgctgcgcacgttgtttgctgatatttcattagatcccgcagtagtgctggtttcaggtctacctcctgtgcgctgggatctctttgcctacagccgctgcgttccttacgccctggaaatccgagaggcattcaaagcccaggcaccgcgtatggagccgagctatatccgtcggtgctggaaggaagccagagctgatctggacttgtcggcgttgccggtcggttttgtgtgggagctcacccgttacgagacggcctcgattagggatgcgctgacaatgtggcagggcattcccttcgaggccttcgatacttgcgagggatcatcagtcgagcttgcgaaggtgtgtgggcgcgccaacgtcgaaggggttagcttttcggctacgtatctaccagtcattcttcaggttattcaggatggcgacctcagccgagaaaacaggattgaaatgattattcaggcactcacgcttaactgtgaatgggagcgaatagcagctgtcctggtgctattgggcgatgagtatcccaacattgctctgcggcgccgtgtgcacctacctaactccgaagaggacaagcgactggttgaggcactcgggcgtcgtaattttgtggggggcatcagtcatgagaaaaaacacatcgttgtgtaccgtagaccaagcgcaatgaaatag

SEQ ID NO: 351132 - DNA, 510 bp, Pseudomonas aeruginosa
atggccctgaccagcaccatcacccgctacgacgccagttggcccgcgcgcttccaggccgcccgtgcgcagatcgcccaggccttcggctccgagctggtcgccatccatcatgtcggcagcacagcggtgccggggctcgcggcgaaaccggaaatcgacctgctggcggtggtctcggcgcaccgcgacgaggcccgccgcgacgaagcgctgcgcggcctcggctacgtgcgcggaagcgacctgtcgacgggtcatcatttccatcggcgcgacatcgatggcgtgcgtacccacaagatccatgtctgcgccgaaggccatgcgcagatcgggagaatgctgcgcttccgcgacctgctccgccaggacccgctcctgcgccggcgctaccaggcgctcaagctggaactggaggcgagcaataccggcggcatcggcgagtacctcgccggcaaggcgccgttcatcgacgaggtgatggccgtccggcgcgatcaggcttag

SEQ ID NO: 351133 - DNA, 1161 bp, Pseudomonas aeruginosa
gtggatgcgctcgacgaagcggttgaaggcgttggccagcgtaccgaactcatcgttgctggtgaccttcaggcgcttggtcaggtcgccctcgccctgggcgatgtcctgcatggcgcggcccatgtcggtgagcggctgcatcagcacgcgaatcagcatgccgaggaggaacatgatgccgaccaccgcgatcagcgtggcgacgatcgccgacgtgcggaactcgctgagcatcgaataggcggtgtcgcgatcgagaaccagggcgacataccaggtcacgccgggcagtcccttcaccggagtgaaggaaacgaactggctgcggccgtcgagctccacttcatggactccgggggcgattgccggtgcgcccttgggataggcttcggcgaggctcttcaggaccaacccggagtcggggtggaggaggatccttccggcgtcgctgaccaggaaggcatagccggcgccgtcgaacttcagcgagttgaggatcgcggtcagggtttccagcttcatgtcgccggcggcgacgcccagcagttggccgttgtgccgcaccggcagcgacatggcgaggatctgctcgccggtgccggcatcgacgaaaggctcggtgacgatcagccggtcggccgccagcgcttccttgtaccaggcacgggtacgcggatcgtagcctgccggcatggcatcgtagggacgcatggtgaacgccccggtggctgcctcgccgaggtagaccgaggcgaagttgctgctgaacaccgactgttccagctgtcgcgcgatgcccgcctcgtcgggctgctcgagcagcgcgagctgcgaggccagtccttgcaccaggtgcatgcggccttccagccagctctggatgttgctggcggtcagggtgccgatttccccgaggtagttttccgtgtccgtgcgcacggcctcgcgctgccggtaatcgttgtagaggatgaagcaggtgaaggcgaagaccaccaccagcgcggcggcgagaaggattttcttggcaaacgacagcgagcgaagcatgagcgatgcgtcctggcaaaagcctcaggtggggcagggagcccaggccaccagggggagcttacgggggaaagctgtgttccagcgcctgagcgggaggctttgtag

SEQ ID NO: 351134 - DNA, 174 bp, Pseudomonas aeruginosa
ttgttcgagagcgcgaaagcgcgcctgaagtcggcgatcaacgtcctcgccatgacctgcctgctcgacgagaacgaagagcccggcgacaccctcgcctacatcaacggcgccttgctgaagctggtcagcgatgccctctccgagatcgaagcggcacacccacgccagtag

SEQ ID NO: 351135 - DNA, 219 bp, Pseudomonas aeruginosa
atgaacacgaccaagaagctgcggcttgggccgttgcccaagaccgagaacatcaagctgacctttgcctgcccggccagccttaaagccgacctcgaccgctacgccgcgctgcacgcgcagacctacggcgaggcggttgatgccatgacgctgatcccgcacatgctggaggcgttcatggcgggggatcgtggatttagacgccgcggcagttag

SEQ ID NO: 351136 - DNA, 1287 bp, Pseudomonas aeruginosa
atgagccaggacgacacccccgaccttgccacgccgcaggcgggcaaggtcgcgccggaggcggtggcgctgcgcgcccagccgcgcccggtcacgcggctgaaccggcgcacgctggccatcctcgtcggcggcctgtcggtcgccgtgctcggggccacgatctggtcattgcagccgcaccggcgcggcgcgggcgagcaaaccgagctttacaacgtcgatcgcgtctcgaagaccgaagggttggatgcgctgccgacggactactcgaagctgccgccagccttgccgcccgatgtgcccgagctggggccgccgctacccggcgaccttggcccggccatcgtcgcttcgcagcagccggtgacgccgggctattcgccgccaggccatgatcctgaagatgccttgcgcaaggaggcggaggcggcggcggcctcgtcggtgttcttccgctcgggcggccagggccaggccgccgccacggtcacgcaagctgcgccgggtgtgcctggtgttgcaaacacattcgcggccttcgatcctctcgctgccgggccggcctcgacggcggcccagcccgccgacccgaccgccgtgcagaacaggcaagaccagaaggaagcattcctgaaagccggttctgcggaaacccgcaattccggcaatctggcgctgcccgcgtcgccttatcaagtgatggccggaacggtgatcgcgggcgcgctggtgactggcatcaagtcggacttgccgggcgacgtgatcgccacggtgacggagccggtctatgacacggccacgggcaggttcctgctgatcccgcagggatcgcgtattttggggcgctacagcagtcaggtcagctacgggcagagccgcgtgcaagtggtatggaaccggatcatcctgcccgacacgtcctcgctgacgctcgacaacctggtgggcaccgatcccgcaggttattccggcctggaggacgaagtggactggcactgggatcgcgtctttgccggcgcggtgctgaccacgctgctgggcatcggcgccgagctagccgcgccggagaaccggcaggacggcgatcgcgtcatcatcgccgggcgtgacagcgcgcaggacagcatcaaccaggtcggccaggagatgacccggcgcaacatgaacatccagccgaccctgaccgagcggccgggcctgccggtgcggatcatcgtgaaccgggatctggtgctgcgtccgtaccagcccttgttcttcaaccggggagcttcgcaatga

SEQ ID NO: 351137 - DNA, 705 bp, Pseudomonas aeruginosa
atgcgattcaagcgaccgcaggtgcgctatgccgatacgccgaagcctgccaccccgtatcaagctgccgcccaggtgtgggacgaccgtatcggctcggcccgcgtgcaggcgaagaactggcgattcatggccttcggctgcctgctgctggcgctgctgatggccggcggcctggtgtggcgctcggcgcagtccatcgtgacaccctacgtcattgaggtggacaggagcggccaggtgcgcgcggtcggcgaagccgccacgccgtacaagccggccgatgcgcagattgcctaccacctcgcgcatttcatcatgctggtgcgctcgctgtccgtcgatcccatcgtcgtgcggcagaactggctcgacgcctacgactacacgaccgacaagggcgcggccgtgctcaacgactacgcccgcgtgaacgatccgttcgcgcgcatcggcaaggagtcggtgacggtgcagatcaccagtgtcgtgcgcgccagcgacacgtctttcaacgtgcgctggacggagcgccgctacgtcaacggcgcggcggcgggcctggagcgatggacggccgtggtgtccatcgtgcttcagccgccgcgcaccgaagaacgcctgcgccgcaatcccctgggtatctacgtcaatggcctgtcgtggagccgcgaacttgaaacctcggaaggaacgaagccatga

SEQ ID NO: 351138 - DNA, 327 bp, Pseudomonas aeruginosa
atgcgatgcgttcctgtcctgctggccgtgctgctgacctcttgcggccagcagccggccgagaatctagccgccgccttggccactgatcccgtgcggcttaaggcgctgcgcgcgcaatgcgcggccgaccggcaaaccgcaggcgaggacacctgccgcgccgccgccgaagccttccggcagcggtttttcgccggttacacagggccggatgaataccggacgctggccgaactgccaccgatcccggcgagcttcgatacgcccgatgacgatgcgccagaaggcgatgtgccgctcgcggctacggagggcacgccatga

SEQ ID NO: 351139 - DNA, 738 bp, Pseudomonas aeruginosa
atgaagacccgtgtgctttccgtttcgctcgccgccgcgctggccggctcgctgatgctcgcccagccggcggcggcactcaccttcgttgatcccgtcaacttggtgcagaacacgctgactgccatccgcacgctggagcagatcaacaaccagatcaaccagctccagaacgaagcccagatgctgatgaaccaggcgcgcaatctggcgaatctggacttcaacatcgtcaaccggctgcgctcgacgctcgccaccaccgaacgcctgatcgccgaagcgcaggggctggcctacgacgtgacgaacatggatcaggagttcgcacgcctgtaccccgagcaatacgccgcgaccgtcagtggcgatcagatgttccgcgatgcgcaggagcgttggaaaaacacgcttaacggcctgcacaccgcgatgcggatgcaagcccaggtgtcgcagaacctggcgcaagacgaaagcgcgctggccgatctggtcagccaaagccagtccgccaccggcgcactgcaagcgatgcaggcgacaaaccagctccttgccttgcaggccaagcagtccatccaggcgcagcaactccagatcacgcaagaccgcgcggcctcgctggaactggcgcggcaggcggcggccaccgagcgcgcccgcgaagtacggcggcgcttcctgggtagcggtacaccgtacacaccgcagcctgtcaacttctacaacaactga

SEQ ID NO: 351140 - DNA, 2451 bp, Pseudomonas aeruginosa
atgctgaaccttgccgaataccgccagcgcccggccttgctcgccgactggctgccgtgggccgggctggtcgcgccgggcgtcgtcttgaacaaggacggcagtttccagcgcacgatgcgctttcgtggccccgatctggacagcgccacgcaaagcgagttgatcgccgcgtctgcacggctcaacaacgcgctgcgccggctggggtctggctgggccttgttcatcgaagccgagcgccaatccgccgccgactatccgcattccgacttccccgagccgttgtcctggctggtcgatgaagaacgccgcgccgccttcgaggaatcgggccatcacttcgagagcgcctatcacctgacggtggctttcctgccgccggaggaatcccgcgcccgcgccgccaagctgctctacgagaactcgcccggcgacggcgtggattgggacggccgcctcgatgccttcgtggcggaaaccgatcgcgtgttcgacctgctcgacggcgtgatgccggaaatcgcctggctggacgacagccagacgctgacctacctgcacgcaaccgtctcgacgcgacgctatcgtatcggcgtccccgaagtgcctttccatctggatgcgctgctggccgactccgcgctggtcggtggcctggcgcccatgctgggcgaccagcacctgcgcgtggtgtcggtgcggggctttccgacctcgacctggccgggcctgctggacgacctcaaccgcctgggctttgcctaccgctggagcacgcgcttcctgtgcatggacaaggccgaggcggagaaggagctgggccgcctgcgccgccagtggttcgccaagcgcaagaacgtcgtcgcgctgctgcgcgaaaccatcttccagcaggaaagcccgctggtcgataccgacgccagcaacaaagcagccgacgccgatgccgccttgcaggagcttggcagtgatcaggtcgccttcggctacctgacggcgaccgtcaccgtcatggatgtggacgccgccgtggccgacgagaagctgcgcatggtggagcgcgtcatccaagggcgcgggttcgtcaccattcccgaaacgctgaacgccgtcgatgcgtggctgtcctcgatccctggcaacgcctatgcgaacgtgcgccagcccatcgtctcgacgctgaacctggcgcacatgatgccgctgtcggcggtgtgggccgggccggagaagaacgaccacctcgacggcccgccgctgatcgtcacccgcaccgatggcgcgacgccgttccggctggtgacgcacattggcgacgtggggcacacgttggtcgctggccccaccggcatgggcaagtcggtactcctggcgacgctggccttgcagttccgccgctacttcggctcgcggatcttcgccttcgacatgggccgctccatgcgcgccaccatcctcggcctgggcggcgagcactacgacctgggcgccgatggcggcatcgcgttccagccgctcgcccgcatcgaccacgagggctaccgctcctgggccgccgaatgggtggaaggtcgcctgctgcatgagggcgtgaccgtcggcccggacgagaaggtggccatctggtcggcgctcggcagcctcgccggtgcgccgcaggaacagcgcacgatgaccgggctttccgtgctgctgcaatcgaacgcgctgcgccaggcactcgcgccttatgtcctaggcggtgctcacggaaagctgctggatgcggacgccgaccgcctcggattcggcgacgtgcagggcttcgagatggaagaactgatgcacagccccgccgccgtgcaagcggtgctgcgctacctgttcgcccgcttcgacgagcgtttcgacggtgcgcccacgctgctgattctcgacgaagcctggctgttcctcgatgagccgtctttcgcggcacgcatccggcaatggctcaagacgctgcgcaagaaaaacgtgtcggtaattttcgccacgcagagcctggccgacatcaaggattcgacgatcgcgcccgcgatcatcgagagctgcgccagtcggatttttctccccaacccgcaggcgaccgaaccgcagattcgcacgatctacgagggcttcggcctcaacagccggcaaatcgaaatcatcgccactgcgcagcccaagcgcgactactactaccaatcgcgcctcggcaatcgcgtgttcgacctcgacctggggccggccgcgctcgccttcgcgggtgcatccacaccgcaagaccagcgcgacatcgaccgcgtgctgacgcaggccggcgctcccggcttcgctggcgcgtggctgcgccatcgcggccttgattgggccgccgacttgctgccgtcctcgccggcggcggcttctttcctttcccaaccacgacaggagaacctgctatga

SEQ ID NO: 351141 - DNA, 2001 bp, Pseudomonas aeruginosa
atgcaagctcagggcgtgctgttcgggcagatcaccgtcgttctcggcatcgtgatcgccggtgtatggagtgcaacgcaatggacagccgccgccctgggctatcagctacgccttggctcgccgtggttcgacttctttggaactccggtctatcacccctggcggctgttcgagtggtggttcttcttcgacgcctacgcaccgcacgtcttcgatattggcggggctatcgcaggcggcagcggcctggtggccgtgctgatcgccatcaccatgtcggtgtggcgctcgcggcaatcgcgcttggtcacgacctacggttctgcgcgctgggcgactgacgacgaaatcaagcacgccggtttgacgcaggccgcaggcgtcttcctgggccggatgctgggtaggctccgctactacctgcggcacctcggccccgaacacatcattgcgtttgcccccacgcgcaccggcaagggggtcagcatggtgatcccgacgctgttgtcctggctttcgtcggtagtcattcacgacatcaaaggcgagaactggaagctgactgccggctggcgctcgctgttctcccattgcctacttttcaaccccactgacccggcatccgccgcctacaacccgctgctggaagtgcgatgcggcgtgcatgaagtccgcgacgtgcaaaacattgcggatatcttggtcgatcccgaaggcgcgttggagaaacgcaaccattgggagaagaccagccatgcactgctggtcggcgcgatcctgcatgtgctctatgcaggtgaagacaagacgctgcgcggcgtcgccaacttcctttccgacccggcttgtcccttcgagctgacgttgcaccggatgatgacgacgaagcacttgggcgatgcaccgcacccggttgtcgcctcagccgcgcgcgaagtgatgaacaagtcggacaacgagcggtcgggcgtgctgtccaccgccatgtcgttcttgggcctctaccgcgaccccacggtagccgcagttacgtcgcgctgcgactggcgcatcgccgatctgatttccgctgaacggccggtgtcgttgtacctggtagtgccgccttcggacataagccgcaccaagccactcgtgcgcctgatcctcaaccagatcggccgccggctcaccgagtcccttgatggttccgatggcatcgagcgcaagcgcgaattgctgctgatgctcgatgagttcccggcactcggccggctggatttcttcgagacggcgctcgcctttatggctggctacggcatccgcagcttcctcatcgcgcagtcgctcaaccagatcgaaaaggcttacggcccgaacaattccatcttggacaactgccatgtgcgggtggcgtatgcgaccaatgacgagcgcacggccaagcgcatttccgaaatgctcggcactgccaccgagctgcgcgcgcagcgcaactatgccgggcacagattggccccctggctcgggcatctcatggtgtcgcgtcaagagatggctcgaccgctgttgacgccgggcgaagtcatgcagcttccacccgacgaggcggtggtaatgatctccggccatccgccgatcaaggcgcggaagctgcgctactacgaggacgagaacttcacccggcgcgtactgccgccgcctgcgctcgcggccgggcgctatgccgatgtgccgccggcccgccctgacgattggagcggtttggcgattcccgccgtgccggcaacggcatccgccgacgacctgggcggttccgatgacggcggcccgcgccgccagcccgagctatccgaagtcaccgaatacagccccgaacctctctccgcaggcaacgacttgaggctgctcgatgacgacgacgacttgccgctgccgcttcccggccagttcgatcaggccatgcagcgcacggcccggctggcttccctagaccccaacgacggaatcgacttatga

SEQ ID NO: 351142 - DNA, 840 bp, Pseudomonas aeruginosa
atgtcgagcattgcaatcaccgatctaactttgcccagggacgtagacggcgtctcgcgacctgttgtggccttgagcgcaacatcggtaacaaaggactgggagaacgcaaggcatcaacatcgcaaggcgcagctgatctactccgtacgtggcatcctcaactgcgagattgaagacggcgtctggatcgtgccgccgcagtgcgccatatggataccgggagacttgccgcacgccgcgcgaggagcgggtgaaacggaatgctattgcctctttgttgagccagacgccacaccggatcttccaaaaaactgttgcacgatttctgtatcgccattactgcgcgaattgctactccgggcggccggttttcctgagttgtaccctttgggaggacgggaagaccggttaattgcagcattgctcgatgaactggttggagcgccagtggaagacctgcatctgcccatgccgcgcgactcgcgattgcggcgcctggcggaaatgatgttggccgatcccacagacaaaacctcgaaagccgactgggctattcgcattggcatgagcgagcgaagcatgagccgtcttctgctgcacgacattggcatgagcttcggacgctggcgtcgacagctacatgtgatccttgcccttcaacgtctgaccaagggggaaagcgtgcaaacggtggcattggagctggggtacgaaaacgcgagtgggttcgtaacgatgttccgcaaggcggtgggtaagcctccggcacgatacctctctgatcgcatgagcggcgcggagatcgcttccgttcccggaatcacgcttcccgattaa

SEQ ID NO: 351143 - DNA, 615 bp, Pseudomonas aeruginosa
atggagccacacgatgaatcgcctcggatcgttgacctaattgcagcgttcggtagtaagaagctaccgtcaggcaggcacaagatgaagctcgatgtggcaaccaacgccgagtctggatcgctgaggtcgcctcaggatcagcgcgtggcagcgaacgggctgcgaccgacgatggctcgcgtcagtgttttgaacgccctggagaaggcggccccgagctgtctcgatgccatccagacgtatcgtatcctcagcacgcagttcgacagcctcacgccaggatcggtttacagagcgttgaatgatctttggactgccggattgttggtccgcacggacggcgcacgtgggcgcgcgttctatgcaatcaagccgaaggcgttaagcagccagtacgacacaatgggatgccattgtggcgcgcggctggttttcattgaagatttggcgttgcgcgaacaccttcagtcgctggcatccgaggaaggctttgctctcgacgaggagtcaatcttcaccattaccacgacctgtgcgaaatgtcgtcaacttcgcaaggaaggaaacctgacgatggatatcggccggcgctcacgggccaagacaccctga

SEQ ID NO: 351144 - DNA, 1470 bp, Pseudomonas aeruginosa
atgtcgctctctgaaccgatccttgccatgcctactgcttcgcgtgcacccacgttcctccctggccgcgcggccttgatggcggtcgtcgctgccattgttaacgtaggttgcgccagtggcccagactatcaccctccggccatgccggaagccgcagcacgctccttcgtcagccagccggccgatacggacgccgccgcatctctaccgccggactggtggaagctgtacaacgatcctgcgctcgacaatctggtgcaggaagccctgtcggccaataccaatctgcgtgtgacgctggccaacctcgaccgcgcacgggccatctacaaggaagcccgcggcggcctgttcccctcgacaaacgtatccgccggcgcgggctacggccgcgaccagaccacgtggacgggaaccggccgggcgcccacgcagtggaactacagcggcgggctcgacatctcttacgaagtcgatctattcggccgggtcaggcgcgacatcgaggccgcgcgcgacgattccgatgcggttgccgctgcccatgatgcagccaaggtcgtcgtcgccgccgagacgacgagggcctacgtggacgcctgcacctatagcgaatccattggcattgcgcactcgtccattgaactggctcagcgcagcctagatctgatcagtcgccaggaactcgcagggtcggcgtcacacctggatgtcgagcgggccggcgttacgcttgcccaggcacaggccaccttgccgccgttgcaggggcagcgggataacgcgctgttcgaactggccgcgctgatggggcgcacgccttcgcaagtgcctgagtccgcgcgcgcctgcaccaaggcaccagagatcgaaggtgcgctgcccatcggcgacggtaccgcgctgctgcgtcgccgcccggacctgcgtcaggccgagcgccaactggccgcggataccgcacgcattggggtggccgtggcttacctttatcctcgcgtcacgctgggtgcttcggggaactacctgcgcaatgactatctgaagggaaatcgcacctggtcgttctctttgggaccgctgatttcgtggagcttccccaacacgatggtcgcgcgtagccgtatcgcgcaggccaaggcgcaaacctctgcgtcgttggccaccttcgacggcgcagtgctgaatgcgttgaaggagtccgagcaatccttgagtgcctacggtgccgccatgcagcagcgtcaggcgctgatcgaagctcgtgaccgggccgaaggagccttccaattggcagaccagcgctaccgcgccggatcaatcagctaccttgatgtgatcgtggcacaggccagtctgatcaacgcgagatcgcaggtggccgcagccgaccagcgggtaggttccgcacgggtcagcgtgttcaaggcgcttggcggcggatgggaacaggccgcggcgcagtag

SEQ ID NO: 351145 - DNA, 1134 bp, Pseudomonas aeruginosa
atgagtaccgcacccttccgtgccaaacccattgcaataagcgtcatcggccttgtcgtggtcttcggcctgctctatgcctggcgtaccggccgcagcagtggcgttgaaaaccacaccatgccgccgctgccggtttcgacgatccgcgcggaaacccgtagcgttggcgatgaattgcaagctgtcggtagcttgcaggccgtgcgcgaagtgctgttagcccccgacacgtcgggccgcgtgaccgccatccatttcgacgctggccagaccgtgaaggaagggtcggtactggttcagctctacgatgcccccgaacaagcggatcgcgcagccgcatcggccaaggccgatttcgcgcagttgcaactcaagcgctcgcaggaactcgcgccgaccggcgccgagccacgcgaaacgcttgaacaacgcaaggctgaagctgcccaagccgtcgcggcggttcgacaactggacgcgcgcatccaacagaaagccatccgcgcaccgttcaccggtcaactcggcatccgccgcatcaatcccggtcagtacctcaacgccggcgatgcgatcgccaccttgacccaactcgacccgctctacataaacttcacgctgccgcagcaggatttgtccaagctgaagccgggtgcgccggtacgggttacggtggatgcggcgccgggccaggtattcgacgccaaggtcagcgccatcgagccgcgcatcgacggcgaaactcgcaacgtcgctgttcaagcgctacttcccaatgccgggcggctgctgaagtcaggtatgtacgcaacggcacggttgacgttgcctgcgacggccgatgccatcgtgctgccgctgaccgcgattcagacctcggcctccggcgacagcgtggtggtcgtgcaaggtgccgatgcacagggaatcggcaaggcggtcgcggtgcctgtcgttaccggtcgacggctcggcgaagacgtcgtggtcacgcaaggcgtcaagtccggcgacatcgtagtgaccgcaggccagaaccggctgccgcctggggcggccgtcaagatcagcaccacgcctccttcggcagccgcgacttctacggtgccgaccgtcgccagcgcgcggtaa

SEQ ID NO: 351146 - DNA, 969 bp, Pseudomonas aeruginosa
ttgccggccatcaccgtaacgggccgcatggatacggcgaccaccgaaggtactggctcctacaccacgggcgagacggcggctgccacgcgcctgccgctgtcgctgaaggaaacaccgcaggcggtgacggttgtcacgcgccagcggatggacgaccagcagttgaattcggtgcagaacgtgctggagaacaccgcgggcgtcgcgtcgtaccagtccgacaccgaacgaacgagtttctattcgcgtggtttcctgatcaacaacgtccagtacgacggcatccccaccgtggtcggcaacatcgtcaatgggagcggcatcggttcagttgataccgcgttctatgatcgtgtcgaggtcgtgcgcggtgggtcgggcttgctgaccggcaccggcaacccgtctgccgccatcaatttggtgcgcaagcgaccgacccgtgacttctcggccgccgcctcacttggcgctgggagttgggacacctaccggggcatgggcgacatctcgacgccgttgaccgaggacggccgcatccgcgcgcgcctcgtagggacataccaagatgggcattcgtatctcgacggctacaaaccggagagaaagtcgttctacggcatcattgaggcggatctaacgccggacacgacggtgagcctgggctatgactaccaggacatcacgccgaagggcgccacctggggaggattgccactatggttcagcgacggcacgcaggcggaatattcacgttccaagacttacgcacaggactggagccattgggacaacaccctcaagacggcgtttgccgggatcgaacaccgctttgacaacggctggaaactccgtgctatcgctaatcagtatcgcaccgaatccgatgccaaactggccggcctggtcggtcgccccgatcgcgctacgggactgggctttttccctccggcgcttatccggtag

SEQ ID NO: 351147 - DNA, 1065 bp, Pseudomonas aeruginosa
atggcgagcggccccttcgaattgctcggccgccagcatgatctggtggtaggggcgacgagttcgcgccgcacggccagccaagaggatatcgcgccgttctatccaggctttacgccggtcaacatctatgacttgactccggccttaccgcgccccgacttcgaggccatgccttggataccgacccgcacccgaatcaagcagagcggtgtctacagcgcagcccgcttctcgctggccgagcctcttaaacttatcgtcggcggtcgcttcagcaactacgaaatcgacgataacgccaacggcagctcgttgcactacaagaagcgcaacgaattcactccgtatgccggcctgatctacgacatcaacgagacctattcggcctacgtcagctacacgggcatcttcaacccgcagaccgactatcgcgatagcaatggcaacgtgctcacgccgtcaaagggaaagaccaaggaaatcggcctcaaaggcgcttacctggacggccgtctgaatgcgtccgtggccgtgttcgagacccggctcgacaacgcggcgcagattgtcgccggcacctatacgccagccggtggccaggcctacaagggcgcggacgggacgaaatcccgcgggatcgagctggacgtgcagggggagctggcgcgcggctggaacatctatgcgggtattgctcatttcacggcgcaagacggcgatggcgttcgcttgaattcgcaactgccgcgcaccaccgcgcagcttttcaccacgtaccagttgccggggaattggagcaagttgacgctgggcgggggcatcaaatggcaaagccgcttctaccaagcgcccaataccggcaccagttcgttgggtggggaacagggctcctatgcgctggtatcactgatggggcgttacgacatcacgaagcagaccaacgtcgccgtcaacgtcaacaacgtctttgacaagaagtacgcgctacagaagggcgatttcgacaccgtgggttatggcgcgccacgcaatgtgatggtcacgctgaactatcggtattga

SEQ ID NO: 351148 - DNA, 456 bp, Pseudomonas aeruginosa
atgcctctcaagactcccctacccgccgcgcaaaacctggccatgaacaatcccaacaaggtcgccttgttctggttgacgacagccgctggcgccgtgctgttcgtcaccttccagttgttcttctacgtcaatgacttcgtgagggcgcaaggagcaacaccggcgatcacgtttgagcccgacgtactgtggatgtttcccgcgttctatggttgttggatcgtcgcggtgctcttcgcgctgatcggaacccgtaagacccagtggattgcgctggtcttgggcagcctgcttgtcgttctgaataccctcgggggaatcgccgacgggttgcgggacggttggcacgtggccttttcggctgtgttcttcattacgctgcccggcgtattcgcgatcgcgaccacctggcgtcgcatcaaaaacaaggaaaacggccatgccgatgaatag

SEQ ID NO: 351149 - DNA, 405 bp, Pseudomonas aeruginosa
atgccgatgaatagctctgacttccccttggtctggatgaatcttgcgcaagaacccggacatgatcaccagaaggacttcgacgagttcgaagccaacttgcagcgcggggagcccttcgtactcttgagcgatacagcaccgcccgcagaagagcacgagcactcgccggaagagaagaagcgcctcgcgctctggatgaaaaagcacaaggttgaattgcgaaagctggttctggcaatgattcagatcgaacccaaccaagccaaacgcatgggttacaaggcattcgcagtccttttcgccaagttctggggctaccctctacttcttgctgcttcacgtgaggaggcaatagaaatggctagagaactgatcctaaaggagggaaagtcatcccactga

SEQ ID NO: 351150 - DNA, 639 bp, Pseudomonas aeruginosa
atgatcgtcgcgtttctcaaccagaaaggcggcgtcggcaagaccacgctcgccacgcacatcgccggcgagctggcaacgcgcggccagcacgtcgtcctgctggacgccgacccgcagggttcatcgctggactggacgcagcgcagaagccagcaaggcttgccacggctgttcagcgccgtgggcctcgcacgcgaaacactgcatcaggaagcgccagaactcgccaggcgggccgatcacgtcatcatcgacggcccgcccaggatcgccgctttggcgcgctccgcgctgctggcggccgagcgcgtgctgatcccggtacagcccagcccctacgacctgtgggccagcgccgagatggtggcgctgatccgtgaggcgcaagtctttcgacctgcgctgcgcgcggccttcgtcatcaatcggcgcgtcggcaccaccatcatcggcagggaagcacggcaatcgctggccgaacagccgctgccggcgctgcgcagcgaagtgcgccagcgcatcgtcttcgccgacagcgtggccgctggccggctcgcccgcgaaacggcgcccgacagcgacgccgcacgcgagatcgccgcgctggtcgatgaactgttgcggtggccggcatga

SEQ ID NO: 351151 - DNA, 918 bp, Pseudomonas aeruginosa
atgagtttccccgcagacatcaagggctgcatgaaggactgcatactgtcgctgttctggccacgaaaggatatcgtcggcttcttcgagaagcatggctgtacgaaggcagagatcgcttccgtgcagattgaaggtgacagcgccctcaagcggcacgaagtcattgacacgctgttcgcggcgctggctgctcggtcggacaacggcctcgggcctttccgcgccattctccagtcgctgttgaactggtcgcacttcgatccgtactacttcgacaaactgcgtaagctggatcgagcaaccgcgaatcggaatttggagcacctgcgtcaactccaagaaattcgggacgctaagatcaaaaaagatcgtgagcgccgcgcagcgcaagaagcggcgcgtcagcaaccaaccgcgtcccttgatcaactacgcgccgagtacctcgatttgcttgccgacaagacgtcgcggcagcaacgcggctacgcgctggaacgtatcttggccgagctggctcgcctttcgcggttggaggccactgaagcctttcgcgccaacggcgagcaagtagatggagccgtgaagttcgatggcgaacattacctcattgaagccaagtggcaagagcggaccgccagcaacgagccggtgtatcaattcgcaggcaaggtgtccgggaagctttacgggcgaggccttttcatttctgtgaatggcttcagtccagaagtgatcaggagcctcgtcatgggcaaggagattcagacgctcttcatcgacggcgaagacctgatcctggtgctagagggacacctcacgttgcgagacatgatcgaccgtaaggtaaaggcagcacaaacaaaggggctgatctacgtgcatccgatttcaggtgccgagaagaaatcgtag

SEQ ID NO: 351152 - DNA, 1299 bp, Pseudomonas aeruginosa
atggatcgtgaggctatcggtcgacgggcgcaggacgtacagtctggcctgcgtgacgtctcggatttgcgcgtgtcggccacgataccgatcacacgacagatcggcatggcagcgcaactcgctgtccacatccgtggcctggacaccatcgagaacatcgttgggttccacggtttttgcagtaatctaggtatctcatcggattcgctgcctactgtgctgggcacgctggaacagatcggttggatacgcgtagttccaaatgtctatgcaccaacgcgcattgaggaatccatcccgtattttcaagaggtctacggggcgctcggcgagcagtggtccctgcgcaggcctggcgagcttgagcaggcgacgatggcaatcattgatcggctcaccgtcgcgccggtacctcttgaaactttggcgtctgagctcggactgaagacaactgacattcaaacggtcgtggatatcggcgacctgggtggctatctccggcaatacgactcgccgagggaccgcgttccgattctctacgcgccgctcttctccgaagaaaatcccgagacgttgctgaatttcattgcaaagaatccaggtgcgcacggcgaaatcgaagccgtcttccgcgcggcgaaatcacatcctggcgcaccaatcagcactcttgagcagagcaacccattggttgtggaactggtcaacgagaacatcctgcgtgcacccgccattgtgtcatctggtggcacacagtcgtttgcattcgcgcccttcaagaccactcaaccccgcgccatcgttgagaaggctcgtatcatcttggcgtgtgttcgctatggcgagggttattcctccatcaccaaaatttcggaccctagctctatcttgagagggcttagggaccggaagatgattggacgtacgccacattccaatatccagtcgcaatacgccgctgcggcaaatatgggagtgggatggatcgagcccgagaacgggcgtttccgattccgcctgtatgacaccgaggacaacctagccgcagtagacctagcgattgccatgtgctccggtcagagcgaggacgtggcgtcatcgctgctcttgccagccgaggtcaagggctatttcacgagggctgaaccaggcggcctacttcttccagaggcaaaccggaagcgtgcgcgcgatcttatcgccacgcgcaaactggaccccaatacgcgcaccgccgcacgacttgggcgcgcgctgctcgacgacttgcgagggattcatcgtgtcatcaagtga

SEQ ID NO: 351153 - DNA, 1128 bp, Pseudomonas aeruginosa
atggcctgggcactaggctatgtgccactgatcaacgtacccgtaactctgcctgcagataccaactctcgcgcaggtaccgacttaaccgatgccgacgtgctcggctttcgcttcagcccaagcgggggcgtctcgcggcttctgatcgattgcaagaccaccactggcagagctgtcgatcgggttctatgggttagaggactgcaggacgttcttcacctcgaggagctatatcttttcaagaagaaggttcccgaaaacgcacgttggctagcccacgaactgaaggttaattgccttgatgaaggcgagttacatgagctcgatactcgactcggattaaatcgtctaaagggaccatactttgacggcagtggatacgagaacatcgaaacgctgcttgcgttcccgaagggaagcgaataccgcgccgtggcccagtttcttcggacgacactttggacgctaaagcctgcacatagggttcttacgctactaaatctcggccagcaaaaggatctacatagaaaactacgtttggatgatcgggctcatatgtgcctagttcttcttgccacacgagccctcgcaataagtcttgggctgctgataagtgagttgaatgtcgtggacgttcttaatgtagagtcgcggctacgcgaggagcttcacggcggggcagagtcgctcgctcagaaagtgcgttttgcagacgcaatccgtcgactgacgggggacgccgattcccaacaggctattgatcacgaggagtttccccgcctgcttgaggaggtcaaccgattgctgatcagacgttatgctttaaacgacgccatccggatcacggatctggcgttgcactacttcgcggccggtacgggcacactgcctcgacacttgagcggcagcgattccaatctttcggcaaaaatggcctccgacatccttgctctctttgtaaagagcaactctctcgataccggtttttcgcgcgcgatcataagtttgcttgccacgacgcccgaagtcgtttccgagcagagcgatgatcagcgtcaagaggtctcaggcaaaggggaacaaatttcgctgctagcgccactcccccctttagaagagagataa

SEQ ID NO: 351154 - DNA, 162 bp, Pseudomonas aeruginosa
atgccgggaaagccgcataaaacaagctttcccgaggagacctttaccgtcaaagacgggtttggtctggatagtgaacgggacggtcttaatccggccctcagttcttaccgccagttcaaccgccaacccgatttgctggccggcgatagccaccgatag

SEQ ID NO: 351155 - DNA, 327 bp, Pseudomonas aeruginosa
atggcaaacgaaactgaaacccaacaacccggcccaacagaagccgagcaggctcgaattgatgaggcaagaagcgtcacgatcaccgactttaccgatttccttaacgaggtggcgccggatgcaaaatgccttttttgcggggcggatgaattcatggtgctcgggcagccggattccgatcagcctctcataaccagtatgaccatcccaaagcagaagtatcgaggcgtttggtcctacccggtagtgtgcagaaattgcggcctcaccctactgttcaacaccgcccacgtatctgacgctgtacacaaagagaaaaactga

SEQ ID NO: 351156 - DNA, 207 bp, Pseudomonas aeruginosa
atgaagaaaatcaccatcggacgcgccgcgcgcaaatacggaagtcgccccgtgctgttggatggcgtgaaggtcgccgaggtcagcaaggtgtcgagctgctggggtgcccggtatctgtggattctcaagcgcgacagcgacggcaaaacgcagcaatgcacagaccttgaccacgtccggtcaatcgcacgcaccttcgaataa

SEQ ID NO: 351157 - DNA, 489 bp, Pseudomonas aeruginosa
atgagcgccatcatcagcgaatgcggccagtaccgttaccttctgactcgccctggcgactgcctggccgacaaaggcacagcggttttcctaatgctcaatccgagcaccgctgatgccgcgctcgacgatccaacgatccggcgctgccgcaacttcgcctcggcctggggctgcaacgggatcgccgtcgtcaatctgtacgccttgcgcgcgacgaacccggccgacctctggcagcacagcgacccagtaggcccagacaacgactggcgcctgcgcgcgatcgcccgagagtacaccgacatcgtgtgcgcctggggcgccaatgcgaagcccgagcgagtagaagccgtaaccagcatcttgaccgccgccggcgggcgcctctggtgtcttggcacgacgaaggatggccacccgcgccaccctctgtacgtgcctggaaatcaagcgctccagccttgggcgccgagggtaacgccatga

SEQ ID NO: 351158 - DNA, 390 bp, Pseudomonas aeruginosa
atgcgcaagctgaaacagggcaccgtgatggccgataagcgccacgaactgctcagcgatatcgccgatcacgtagcagccgtggtgagggaccacggcgtcgctctggatatcgcagagcaggccggcgccgcggtggtcgaccatctgtgcgttacctgggctggcagccacgtcacgatcccgaaggatcacaggtggcggctgactcagcgggatctggagatcctcggcaagttcaaaggcaacaaccaccaccagctcgcggtggagtaccacatgaccgagaacgcgatttacaagctgctgaagcggattcaggacaggaagttcgaccgcgaccagggcaaactcgacctcggggatggcctgtccgacgtggtatcctga

SEQ ID NO: 351159 - DNA, 561 bp, Pseudomonas aeruginosa
atgcagctccagtgcccatgctgcggcgagcagttcccgttcgaggcgggcttcgccgacgcagatggcaagcgtcttgccgcgctgctggccggcctggagccgaagctgggccgtgcggtgctcaactacctgcgcctgttcagcccggccaagcgcgggttgcgcatgaccaaggcgatcaggctggtggaggagctggtcgacctggtcaacgcaggcgaggtgcggcgcgacgcacgcaccagcgactcgaagccggccccggcccgagtatgggttgccggcatcgagcagatggtgctcggtcgtgaacgcctgcagctgccgctggagaaccacaattacctgcgcgcggtggtgtatggcatcgcagcagatccggcgcaggcggttcatcaccaggcggccccgaaggcgcgaaacgcagggccgacagcgcagcagctgctccaggaggttttcggccgaatcgatgcagatctgcgacttggccttatagatgaagaggaagcggagcgccgccgcaccacggcgcggggggaggcatgcgcaagctga

SEQ ID NO: 351160 - DNA, 576 bp, Pseudomonas aeruginosa
atgacgatcctgaaatccctcataacgaagatacacgtcgccaagagccagatgggcgtggacgacgacagctatcgcgccatgctgtctcgcatcagcggtggcaaaaccaactcggccaagggcctgaccgttcacatggccgagaaggtgctggaggagttcaaggcgaagggctggaagccgaagcccagcgtcaaggccaaagggcggccacacaacatgggccaactggcgaacgaggtcctggtcatcgaggcgcagctcaccgacatgaagctgccctggtcctacgccgacaagatcgccaagcagatgttcgggattgcccgagtggcctggctgaagaagcccgaccaggtgaaggcagtgctggcggcactgcatgtcgagcaagagaagcgcggcctgctcgcgagcgtggaagccctctgcaaggagctgggcatcgagcatccagaacaagtagctggtttggaacaactgccgaaagactggcggcgacagcgtccaatcctgaaggcacttgtggatgcgttgcatgtggcagtggaagccaggaagggggcggcctga

SEQ ID NO: 351161 - DNA, 408 bp, Pseudomonas aeruginosa
atggagcgctaccacagcaccgcaggcgacccgccacggcgtgacatgggggccaaggccagcgagcgggccgagctggaacagcagatggccgagtttctggcccgtggcggccaggtgcaaacggtcggccaccaaatgcgcgaagcgcccgagccgttcgtaatcaacgccaggaccacgccggtatacaactcggcgatggcgcccacagccgcgccagccagccagccagccagccagccagccagccagccagccagccagccagccagcatcgaagccggttcggcgatatcgcgcaaggcccgacgacgagcagatcgcccgaatgctgggcatccctcgcagtcgctgctcggcaatcgccgagcagtaccacgttcaatttcacgggtgacggcatga

SEQ ID NO: 351162 - DNA, 690 bp, Pseudomonas aeruginosa
atggaccaagaccgcatcctcgacaagatcagaaagtgcctggagatggcgaagtccaagaccgccaacgccaacgaagccgcaatagcgctgcgtcaggcgcaaaagctgatggacgctcacagtctggagatgggcgacgtgctggccagcatggcctgcgaagccaaggtgccggcagggtctgacggcaagccgccggcatggcgtgttcgcctcgctgacgtctgctgccgcgcatttggcacccacctgatcatctgcacctcctggctggaaagtgcagccttcacctttgttggctgcggcgctgcaccggagctgaccggctatgcctaccaggtgctggagcgccagctacaaaaggcccgcaaggagtacctggctactcagaagcgctgtaagccgaagaccaagcgcgagcgcggagacgccttcgcgcatggctggatctcggccgtcttggcgaaggtcgacgagttcgcgggtgtcgaggacaacatcgccgaggccatccaggcgtacatggccaagcaccaccccgacctaggcaagttcgaggtgaagcgccgtaaggtcaaggcccgcgacgaggtagcccgagacgctgggtatcacgctggcaaggccgctcaacttcacaacgcggtcgggcaccagcccaccgccagactgacgcacggggtgtag

SEQ ID NO: 351163 - DNA, 630 bp, Pseudomonas aeruginosa
atggacagccaacagaacaccaccccgcagattccggctggctatatgcagaacgctgccggccacctggtgccggagcaccaggtgcgcgagcacgacaagctgcgcgaccgcgttgtcctcgacctggtcgccgaagcgctggccatccaggactcgctgcgcgccttcaaggccaagaccttgagcgacatggccgacgtgatcgccatcagcagcgagaaatacggcgtgacggtcggcggcaagaagggcaacgcctcgctcacctcgttcgatggccgtttccgcatcgagcgcgctatgcccgaccggcaggcgttcacagaggagattctggctgccaaggagttgatctacgcctgcatccgcaagtggtcggcgggagccaaccacaacctggcggcgctggttgaccgcgccttcacgggccgcaacgggcaaatccgtaccaacgacgtgctcggcctgctgcgtttggagatcgacgacccccaatggcaaaccgcgatggtcgccctgcgcgacgccatccaggtcaacggtcaggcgacctacgtgcgcatctaccagcgcgtcggcgacaccgaccgctacgagcccatcaacctcaacatcgcgggggtgtga

SEQ ID NO: 351164 - DNA, 246 bp, Pseudomonas aeruginosa
atgacccccagcgacctccgtattcgtgagctggaggagcagctgcagctctcagagaagcgccgccgggatctggccgccgacctgcacagactggccgctacgtcgctccagctcagcacgcacctcgcggtgatgtgcgaagcctacctggcgaatgactcggtcctcgccctgcaccagctcggccagctcgccgctcgctacgagcacttcatcaagcccgccggaaggagcattcactga

SEQ ID NO: 351165 - DNA, 621 bp, Pseudomonas aeruginosa
atgagcaccaagaacatcggcatcgccgccgtcatcgtcgcggcggtatgtgcagccacactgctggaactggatggccacagatcctctggcctctggttcctgatagttctgatggccctgtttaccagctgggaaacgaagagcgaccagtcggaggactcaatctccgtgctggatgcctgggaagcgctcggcaacgacattggtgtcggcccttccaaggatgagctgctggagtcgctgcggttcacagctgctttggctgatatcaacgatggcggcaacccggcctggaatgcggtcgtgcgcgagcgggtccggcaagtccagggcgaagggtattgcgtcgagcacgacgacgagcatgcacgcggagagctgggggccgccgccctctgctacgtcgaggaggcctatgcgcaggtggttgaccgagagcgccaggccatggaacgcacattcgtcacttacgggattgtcccggacctctggccttggtcgcctgagtcctggaagcctgctggcaacccgcgccggaacctggagaagggcctcgccctgggcctggccgagctggagcgcctgatccgcgccgaagcccaggaggtgcgctcatga

SEQ ID NO: 351166 - DNA, 369 bp, Pseudomonas aeruginosa
gtgaacatccgtcccttcccccgaccgagcctcctgaaggaggtcccgaccaccaccgcggccgactcgatcccgcgtcacgcgctgccggtctgcagcgtgctgacgcccgaactggccgagagcctcaaggtggtgaacgccgtcagccgttcgctgcgcgccgccggcgtgctgatcgacagcaccgtcgtgctcgatcgcaccatcttcatcaagcccgaaaccgccggccgcctggccagcgctttcagcgaccaatggcgcggggtcagctggaccacgcgcgaccaattcaacaagaacatggtcacgatcgacggcgtccgcgtcgcctggttgaccccggcgaatgaggaaggccaatga

SEQ ID NO: 351167 - DNA, 1185 bp, Pseudomonas aeruginosa
atgaccctgcgcctgaaacagcttctcgccgagctgacgccggcggcgacccaggccgacctggcccgcgagctgaagctcagcgctgcgacgatcgcccagctgatcaaccacggccagtggcccaagtcgctcaaccagcaggcgctggcctggaccatcgtcgagtttctgatggttcgcggggcgcagttcgaggacgcccgcaacgcatttgaagaaatggagcctccgcgcgccaacgcgaaggccccagcaaccccgcccgtaaacgaccaagtaaacgatcaggagtgcgaacccatgctacttgagatgcaagtgcttcaaccagccacacgacgccagttcgggctcacgttcgatccgttcgccgatgtccgcggcgtcgacgatatgtacgtcaacaccgagacccgctacgtcctcgaaacgatgtaccaggcggcgcgcaatgacggcttcctggccatcatcggcgagtccggcgcgggcaagagcgccctgcggcgggccttgatcacccgcctggccaaggagccggtgatcccgatcacgccctacatctcgggcatggtggacaaggacagccagggcaagagcctgaaggcgagccacatcgccgaggccatcatgagcgctgtcgcgccgctggaaagcccgaaatccagcccggaagcccgctggaggcaggtccacaacacgctgaaggcgtcccacgccgccggcttccgccacgtcgtgatcatcgaagaagcccacgccacggctgagcagaccctgcagcacctgcgccggatgcgcgaggagttcgagcagggcttcgacaagctgttgaacgtgatcctgatcggccagaccgagctgctcaacaagctgagcacccgcaacggcgcgatgcgctcggtggcccagcgcgtcgagacggtgatcctgcagccgctcgccatcagcgaggtggagccgcacctggcgcaccgcgcgggccgggccggtaagaagctggagcagctgatcgaccaggagggcctgcaggccatcatcgaccgcctgcgcaactccggccgggacggcgccagccagctgtacccgctggcgatctccaacctgttcaaggcgtccttgaacctcgccaccgagatcggcgagtccatcgtcaccgccgacgttgtgaagggggtgtag

SEQ ID NO: 351168 - DNA, 1773 bp, Pseudomonas aeruginosa
atgagcgcagtgatgactcagcgactcgtcgccctggccctcgacctggatcgcacccccgcgagcaggaccgagctgtgtcaggccgcggcggacgagctgcgcatcagccttgcgactctgtaccggcggctgaaggaggtcaccgtgacccaaccccgcaagcagcgatccgacgccggcgcgtcggcgctgacccgcaccgaggctgagcagatctgcacgacgatgatccgctccatccgcaacaacgacaaacagctcagcacgctggagcgtgccgtggagcgcctgcgcaacaacggcaagatcatggccggcaaggtcgacaccgacagcggcgaagtcaccctgatgtcgctcagcgccatcggccgggcgctgcgggcctatggcctgcaccccgagcagatcctgcgcgccgcgccggccgtcgagctggtcagcctgcacccgaaccatgcgtggcagatcgacgcctcgatctccactcagttctacctggccgacgatggcgccgcgccgatgaacaaggccgagttctacgacggcaagccgcagaacctgaagcgcatcgagaagcagcgcctgtggcgctacgtgatcaccgaccacaccagcggcactctgtatttgcagtacgtgctgggtgccgagtcggccgagaacctgattcatgtgttgatcagcgccatggtcaagcgcggcgagacggacccgttccacggcgtgcccttcatcatcatgaccgaccccggcgcggcgatgacctcgtcgatgttccgcaacctctgccgcgcgctggcgatcgagctggtgatcaacaaggtcggcaacgcccgcgcgaagggccaggtcgagcaggcgcacaacatcgtcgagcgcgagttcgagagcggcctgcagctgatgcagaagccgcgcaccctcgacgagatcaacgccctggccggccgctggatgcgccactacaacgcgacggcgatccacacgcgccaccaccgcacccgctatgcggcctggatggcgatcaagcccgagcagctgcgcatcgcgccgcaggcggagctgatgcgcgaactggcggtcgccgcgcctgaaaaacgcaaggtcacagccaagttgcgcgtgccgttccgcggcgccgagttcgacgtctccggcatcgagcacctgcaggtcggcgactgggcgctgatcacccgcaaccccttccgcgatgccgacagcgcccaactggttctggtgggcgaggatggccgcgagcactaccaggtggtcgagcgcatcgagcgcgacgacaacggcttcgcggccaacggcggcacccgccgcgtgatcggcgagcgccaccaggcgctgccggagaaggccgcgcagcaggaccgcaagcgcctggaccagctggcgaccggaaccggcacggtggccgaggccgagaaggccatcaagaccagggcggtgccgttcaacggcgagatcgacccgttcaaagaacaggccaacacggtgctgccgacgtacctgccgcggcgcggtaccgagctggaaacccgcgcgacggtggccaccgtcgagatcaagccgctgacgcacgttgagatagccaaggcgctgcgcgcccgcatgggtagcgagtggaccgccgagtcgctggcctggctgaaacagcactatcccgctggcgccatggaggagcagctcgacagcatcgtccagcagctccgcgcgcccgcgcgtccaggcctgcgcctggtaggcggtgccgaatga

SEQ ID NO: 351169 - DNA, 1071 bp, Pseudomonas aeruginosa
atgtcgaccaagaccaaggacgagatggtggagcagatgatcaagtcctcccagcgtcgcgccgccaagggcacgaagatcatcgacctcacgggcgatacgcccgaggtcatcaaggtgacggcgggacggccggcgacgccgccggcagtactggtggaagacgcgccgctgaatgccgaggcgctcatcagcacgcagaatcagctggcggcgatgaccaccgaacaggacgcccatgtgcgtgccgtcgccgagcagctgggctaccagctaccggccgacagcaccgcacccgacctgatcatgcgcgacatcgccgccaacatgcggcgcagcgtggaggcctgcctcgaagttggtagggggctgcaggtactcaaggccgcatgcgcgcacggcggcttcctcgatcgcctcgacatgctcggcctcgaaccgcgtgtggctcagcggttcatggcctccgctagcaagttctcggcaatcggcagcaaccccgccatggctagggccatcggcaaccagaccaagctgttcgagatgctcgtccttgacgacgagcagatcgaggaactggagctcaccggccagaccggcgagctgaccctcgacgatgtcgccacaatgtcggtcaaggaactgcgcgccgcgctacgcgaagcccgcgagcagggcaaggccaaggaccgggtgatggcggacaagtcatcgcgcatcagcgagctggagacccagctggcccgccagcccctggtgatcgtgcagccgatggacgagcagctcgccgagcgccgcgaggagctggcggccaaggccaccgccgccgaggcagcgatcgccggcgccctgcacccggccgtgcatctgctgatggagaagggcgaggaatccggcaatgaccagcgcccggtgatcgccggcctgctcgaccaggtcgagcgcgccctgctgcagatccgcgccgagtacgacattcccgcgaccacccttgccagcgcccaacccagctggatgacggacgacagcgaggaagcggtgcgcaaggccctggcagaggcgcaggcgtga

SEQ ID NO: 351170 - DNA, 273 bp, Pseudomonas aeruginosa
atggacttccagatcctgaccctcaagctgcttgagcacgagccccctcgcagcacggccttcgttcaaggcatggcggcggtcctacgcaaccgtgttgaccgtacccctgtgaccagtccgttcgcggccggtaccgaaggcgacgatgccttcttcgctggccgtatgcgtggccacaacgagttccgcaacctgctccaggagcacagcggcgaccatgacgccgccgtcgaccgcctgcgtgccatcgctgctgcggaggttgcgtaa

SEQ ID NO: 351171 - DNA, 306 bp, Pseudomonas aeruginosa
atgactgccaaacgcacacacgacagcgtccgccgcgccctgcggctgatgaaggccctgcgcgggcatgccctgcgcggcctctccaacgccgagctggcgaaggcgctgggcgagagccccgtcaacgtcacccgctacgtggacaccctcgtagaggaaggctgggccacgcgcctggaagacggccgcatcacgccgggcatcgccttcctgcagttcgcgatggccaccaccgaagaactcgaccgggcaggcgcacgcctgaccgagatgcgcgcccgcatcagtaccaaccaccactag

SEQ ID NO: 351172 - DNA, 489 bp, Pseudomonas aeruginosa
atgaggcgccgcaattggaaacactgggtgccgcgctctccatccgatgccctgcacggctgtgcggagcttgccctggagcgccacaaccgcggcatcgagcggctggcctgtgaccacctgggccagaagaaccacagttccctctataagtggctgagcaacggccgcctgccgctgagcctgattttgccgctggaacacgcctgcggcctgccgctgatcacccggtacctggctgctgcccacggcctgatgctggtggccgtcccctccggccgcaaggccactccctctgacgtgcagcagctgcagcgcctgctcaacgaagcggtcggtgccgtgctggccttcaccgctgggcagcgctcggttcccgaaaccctggacgcgatccgcgccggcctggaatcactggcctggcaccacggcaacgtccagcagcacgaccgcccacaactcgacttcggagtggctgacgatgaataa

SEQ ID NO: 351173 - DNA, 321 bp, Pseudomonas aeruginosa
atggctactgatcccctgctggccgacgagatacgccgagcagtcgccgcagaagttgcagcgctcgaaagaaggctcgacgaccaggacgaatggatgaacggcctgttcctggcgattgaggacctgatgcaggcgctgctgcgcgagcagccggcgctggtggcatcagcgatacgggactggcaggcggcatcggatcggtatgagctggcgcgacaagggctgtacgcggacgagtcgcagaagcggctcgaaccgcggaagatgctgtaccagctgctgcacgcgacaggcgctctgcagccattcgaggggtga

SEQ ID NO: 351174 - DNA, 213 bp, Pseudomonas aeruginosa
atggcaacccagcaaaaacccaagaccgcagaacaggtgaaggccggcttccacagcagcggaacgaccgtcacaaagtgggccaaggcccacggctttccgccgaactctgtctatcaagtcctcaacggattctccaagggcaactacggccaggcccacgacatcgccgtcgcactcggcatgaagatcgccgagtcggaagccgcgtga

SEQ ID NO: 351175 - DNA, 369 bp, Pseudomonas aeruginosa
gtggccaaggtaaagacgaaggtgaagttcgcgggtggtggggcattcattcaactgctgggtgtcgtggcaatcgtcttgggggcgttcctcggtgtgatcggcatcgtgctgggcgcggcggtgggcatcaccttgctcctggtgggcagttccatgtcgaagtactcgtgctgttcggagtgcgggaatcgggttgacgggcgccatgtgaagatttgccccatatgccacgttcgattcggcgagtccgtagcagttgccgaggccgcactgccatcgcccaatggctggcgcgatgcagctttgttcatcggaggagccgtagcattgtgcggcgctttattcgcctatcgactgtgggtgtga

SEQ ID NO: 351176 - DNA, 300 bp, Pseudomonas aeruginosa
atgtctcgcccctcgactacccgccagcgcctgcgcatgccgcgcatgacgctctggaccatcatcaccctcgctctactgctcgccctggcggtgatccgccccgagcagctccaggtcgtgctgtacaaggccagcctggtcaccttcggcgctgtcctggcgtattggatcgaccgcagccttttcccgcatgatcggccgcacaactgcggcactcagcacgcgctgatcggctcctgggtgcgccgtgcgttgatcacgctggcgtgcatcctcggcctgacgctggggctgtga

SEQ ID NO: 351177 - DNA, 894 bp, Pseudomonas aeruginosa
atgggcatgccgcagattatctggctggtgttggcgagcatctcccttggggccgccgtcatggcccatgggcaaatgcgccgattctccagcgttgtggcagtcatccgcatcagcgttaccgctctgctgctggtttggggtggcttcttcgattctgtccaggccgccgaccagatcccgcgcgacgctgagcagtatcgccgcacgctgatccgcgccgcgcatgccgagtggggactcgacgccccgatcgccaccctggccggccaggttcaccaggagagcgcatggcgcagcaccgcccgctcgcccgccggtgcccagggcctggcgcagttcatgccgaccaccgccgactggatggccgagatctacccggccagcctcggcccggagccgcagccgtacaacccgggctgggcgctgcgagcgatggtcatgtacgaccgctggctctacgaacggaaccaggccaccagcgactgccatcgctgggcgtttgtcctctccgcctacaacggcggccagggctgggtgaatcgtgaccgcaagctggcctcggctaaaggcgccgacaagctggcctggttcgattccgtcgagcgcttcaacagcgggcgctcggccgccaacttccgcgagaaccgccattacccgcgcgccatcctgcagcgctgggagccgctctacgcggccgccggctggggtcggggcgtgtgtgccgagaggtatagccgccatgaaactcccgctcctgtgcttgctgacagcgatcaccgctggcgcatcacctgccgcatgttcccggaactggctagctgccggcgagctgtacgcatcgccggcaccccgcgagccgctgccggcccggccgcgccggttcaggcgtaa

SEQ ID NO: 351178 - DNA, 423 bp, Pseudomonas aeruginosa
atgatgcaacggatcgccattgccatgttcgccctgctggcgctgatcggctcctcggccctgagctggctgctgggctccagcacggcctacgacctcgggtatgccgaaggcacagccgccgcagcagaccaatgccagcaggcccagctcgatgccctggaaggcgtgatcgacagcaccaggggcctgattgcagacgcgaacgccgccagccagcagctgggcaagaccattagcgcccgccgcatggcagacgcacagaccacgaaggagatccgtcatgcgctcgccactactgcgcctcagcgcgctggctgcgtgtttgatgctggcgtcatgcagcagctcgccgacgcgcaccgtcgagccgccgatgccgctgccagcggaatacgcgcgacagtgcccgacgcccgttga

SEQ ID NO: 351179 - DNA, 165 bp, Pseudomonas aeruginosa
atgccgctgccagcggaatacgcgcgacagtgcccgacgcccgttgagccaacggacaacagcgccgacgccgccgtggtggcgctgaaggagctttacgaccagtacggcgagtgcgctggccgcctcgtcgacctggtgaactacctgcaggagaaacgctga

SEQ ID NO: 351180 - DNA, 168 bp, Pseudomonas aeruginosa
atgaagcgaccacaaaggctcaagggccgccgccatcagcgcggcttcatctacccctccggccgccagctcgtcggcctcgttgccgcgctcgccctcctgggctgggtcctgatcgagggcctgatctggttgttcagccacatcagcatcgggtgggcaccttga

SEQ ID NO: 351181 - DNA, 315 bp, Pseudomonas aeruginosa
atggacttcgactccgccctgaaagccgggcagttcgccttcaccgccttggtcggcctctattcgttggccgccgcgcgccgggccagctcgaaggctgacgccgagcagctcgcccagcgcctgaacaaccaggacagcaagatcctggtgcttgagcagcgcatggatcacctgcctgacgtccagcaactcgccgagctgtccgtggacgtgaaggcgatcaacgcgcgactggagggcctgggcaatcaacttgcccctttggcccgatccgtcgagcggatgaacgaatacctgatgaacaacaagtga

SEQ ID NO: 351182 - DNA, 300 bp, Pseudomonas aeruginosa
atgagcaaccaaccattcgccgatttcttgcgccaggaccagcgcctggtgctgctgcgcatcctctccgagctgccgcagtaccgctccaactcgtccgttctcgccagcctcctcggtgagtacgggcatcatccgagccgcgatcaagtgaaaaccgacctggtctggctgggagagcagggtctggtcaaggtcgaggatattggctcggtcctggttgtcaccctgaccgagcgcggcgacgacgtggccgccggccgcgcttcggttccgggtgtcagtaagccgagggcctga

SEQ ID NO: 351183 - DNA, 549 bp, Pseudomonas aeruginosa
atggggcgcaagtccagcatcgagaaactcgccccggaagtgcgctcgcacatcgagcgccgtctgcgggaaaaccgcctcaccctggacgaactgatcgtcgacctgcaggagcacttcccggcagagcagaagccgagccgctcggcgatcggacgctacaaagtcagcttcgacgagatggcccgccgcctgcgcgagcagcaggccatggccagcctgctggtcgaagagctgggcgagaacccggacgacaaggctggcgcgctgatggtgcagtccatcaccaccctgacgacccatgccgcgctcggcgcccaggtggacgaagagaccaccgtcgatgacgtgcgcaagttggcccgcgccgccaaggatgtgttggccgcgcgcaaggtgagccgcgaggagcgcaaggcgatcgagcgcgaagcccgcgaggcgctgctggccgagcaggagcagcgcctggaagagatgcgcggcagcgacggcatgagcgagcagctcgaagaccgcattcgcggaatcctcctggggaaagcctga

SEQ ID NO: 351184 - DNA, 195 bp, Pseudomonas aeruginosa
atgaagaacctgtttctgattgccttactggcgagcttggccggctgctgggaatacaaggaatcgccccagataaaggcttacggtgcgactcacatccaggtatggcacgacgacgagcgtggcgtgacctgctggctgtacggctccaccagcggtggcatctcttgcctgcctgacggagtacttcgctga

SEQ ID NO: 351185 - DNA, 1674 bp, Pseudomonas aeruginosa
atggccatgcctgccaccaccgccaagctgggcaaaggccttaccgccaccagcgcgccgcgaaagatcgatctcgcccaggagatggagctgctcggcgtcgacgtgccccaggagatcgccgaggcccagccggcgaacgagcccgtcttcctgggttaccagcggcgttggttcgaggacgaaagccagatcatgatgggcgtgaagtctcgccggactggtttgacctgggcagaggccggccgcaatgtgatgaaggctgccaagccacgccggagaggtggttgccacacgttttacgtgggtagcaaacaggagatggcgctggagtacatcgccgcctgtgcgctgttcgctcgcgccttcaacgagctggccgaggccgatgtctacgagcagacgttctgggacgaaggcaagaaggaagagatcctcacctacatgatccgctttccgaagtcggggcggaaaatccaggcgctgagcagccgccccagcaacctacgcggattgcagggcgacgtggtgatcgacgaagcggcgttccatgaaaacttggaagagctgctcaaggccgccctggcactgacaatgtggggcaacaaggtgcgcctgataagcacccagaacggcgtggacaatcccttcaacacctatattcaggatgcactagaaggtcgcaaggactacagcatccacaagatcacgctcgatgatgcgattgccgagggcctgtacaagcgaatctgctatgtcaccgggcagacctggtcgcccgaggccgagaagaagtggcgcgacgacctgtacaagaacgcccccaacatcgagtcggccgaggaagagtacggctgcataccgaagaagagcggcggcgcctacctgagccgcgtgctgatcgaggcggcgatggtggccgaccactccatccggatctaccgctacgaggcgccggccggcttcgaagaatggacaccggagatgcgttccgccgaggtgctcgcctggtgcaaggagaacttgcaacccgagttggcccgcctgagcgaccgcaaccgacataccttcggagaggactttgcccgccgcggcgatctcaccgtgttcaccccactgcagatagatccgctgctgcgcaagcgcgtgccgttccaggtggaacttcgcaacctcacctacgaggcccagcgcgacatcatgttcttcatctgcgatggcctgccgcgcctgaccggcctggcgttcgatgccactggcaacggcggataccttgccgagcaagctgcgctgaagtacggcagcgccatggtcgaccaggtggcactgtccctgtcctggtacgccgagtggatgcccaagctcaagggcgagttcgaggccttcaacctgcagatcccgcgtcaccagacgacgctcgatgacctgctgtcgatcaaggtcgagaaaggcgtgccggtgatcgacaagggccgcaccaaggatctggagagcgccagttccaaggccaagcgtcacggtgactcggctatctccctggccatggccgtgcgggccagcttcatgcagggcggcatcatcgaggcgaccatgctgcctcgccatagccgcggcttcgacaacgtgcccaacgacgacgacatagaattaccggagccgaccacatcatggtga

SEQ ID NO: 351186 - DNA, 1566 bp, Pseudomonas aeruginosa
atggtgaccacgtcccgcatcctgggccctgacggccagccgatccgacttgccgagatccgcgagccgcagaccgcccacctgaccagcctgcaccacgaggtgggtaaccacccttcgcgcggcctcaccccgagccggctggcggcgctgcttgatgccgccgagcagggcgacatcgttgctcaatacgaactgttcgaggacatcgaggaaaaagacggccacgtcttcgcggagatggataagcgccgccgtgccgtgtcgcaactggagtggcagatcgtaccgccggacaaccccaccgcccaggaaaaggacgccgccgccaagctgcaggcgctgctggccggcctggatgacttcgaggcgatgctgttcgacaccaccgacgccatcggcaaaggcttcgcctgcctggagttcgacggctggcaccgggtagacggcgactggctgccgagggcgatcgatcatcggccacagacgtggttccagctatcgcgaggccgacgtcaggagatccgcctgcgaggcgcggcgggtggcgagcccctgcggccgttcacctggatcacccacatccacaaggccaagagcggttacctggaacgctcggcgctgttccgcgtgctggtctggccgtacctgttcaagaactacagcgtgggcgacctggccgagttccttgagatctacggcatccccatgcgcgtgggcaaatatccaggcggggcgaccgagaaagagaagctcaccttgttgcgtgcgcttgcccagctcggccacagcgccgcgggcatcatcccgatcggcatggagatggagtttctcaacgctgcccagggcgacccggccgcgttcaagctgatgatcgactggtgcgagcgcacccaatccaaaaccatcctgggcggcacgctcaccagcggcaccggcgagggcaccaacaccaacgccctgggcaacgtgcataacgaggtgcgcctggacctgcgcgactccgacgccaagcagctggccgcgagcatcagccgcgacctggtctacccgatcgccgtgctcaacggcctggccgacagctggacgcgctgcccgcgcctggttttccctacccaagagccagaggatctcaaggtctacgccgaggccctgcccgcgctggtcgcgctgggcttccaaatccctcgccagtgggcccaggagaaggtggccatccccgagccggccaagggcgaggacgtgctgcagctgcaggtggcgccgtctgcgcccacacctccagcacagcctgcaggacgtgcggtggccagcgcgcagcggccgccggcgaccggcgccgagcagctcgacgacaccctgcagcccattaccggcgcctggatcgaccgcatccgcaacttggtgcgcagcgccgagaccctggagcagatccgcgacggcctggaccagctgctgcccggcatgaccctggaccagtacgccgaggccatggcccaggcgctggccgctgccgcgctggaggggcgctacgagatcctgcaggaggctgccggtggccgttaa

SEQ ID NO: 351187 - DNA, 1248 bp, Pseudomonas aeruginosa
gtggccgttaatgcggtgtcgctgccgttccgggagcagaacgagttcctgcgccgcaagctgaacctgcccaccaacggctggacggacgtctacacccgcgagcacgactacgccttcgtcgtcgccggcgccaaccgcgacgagctggtcgccgacttccgctcggccgtgcagcgtgcgatcgaggacggcggcaccctggaggacttccgccgcgacttcgaccgcatcgtcgccaagcacggctggagctacaacggcggccgcaactggcgctcgcgggtgatctacgagaccaacatgcgcagcagctacatggccgggcgctacgagcagctgatggcggtgcgtgaggagcgtccgttctggcagtacatccacagcgacgcggtcgagcacccgcggccggagcatgaggcgtggaacggcatggttctgcgctgggacgacccctggtggcaataccatttcccgatcaacgcctggggctgccagtgcagcgtgcgggcgctcagcatcgatgacctcgtccgcatgggtaagaccggcccggacaccgcgccgccgatcgtgtgggagcagcgctcaatcggccagcgcagcgccgaagggccgcgcgtcgtcgaggtgccgcagggcatcgaccccggcttcgagtacaccccggggcggtcaaggctggagagcgctgtgccgcggccgcggctcgacgaagagctgatcccggcgccggcgccagggctgccgaaccggctggccagcgacccgttgccgccgccacgcgctttcccgccggagcgcatcctgccggccgacctgccggacaccacctatgtgcagcgctacctgcaggagttcggtgccacccttgatgcgcccgccgtggtgcgcgacgtgatcggcgagcgcctggtggtgggcagggacctgttcgtcgagcgcaagagtggcgagctgaaggccaacaagcgcggccgcggccggtggttgctgatgctcgccgacgccctgcggcagccggacgagatctggactcgcctggaatggatgggcgcgctgggcacggcggtggtgcggcggcggtacctggcgcgcttccaggtgcagggcgagattgcccccgcagtagcggtgttcgaggtcggccaggacggctgggtgggtgtcacgacgtttccgccggcggatgcgggctacgtcgagggcctgcgccagggcattcggctgtacaggagggagaaatga

SEQ ID NO: 351188 - DNA, 564 bp, Pseudomonas aeruginosa
gtgagcggggccacactggagttcgacgccgccggcgcgctggcggtgatcaacgaagccgccagtgcggcgggcaacccggccgccatgctccgcgacatgggcgagtacctgatcatcgcccatgaccagcgcttcatcagccagacggctccggatggcacgccctggcaagcgctgtcgccggcttaccagcggcgcaagcgcaagaaccaggacaagatcctggtgctcgatggctacctgaagaacaccctgcgctaccaggtcagcgacgacgagctgctgttcggcacaaaccggaagtacggcgccatccaccacttcggcggcgagatcgatgtcgcggcccgcagccagcaggcgtacttccggcaggacggcaagaccggcgaggtcggcaaccagttcgtcagcaagcgcaagagcaactttgcccagtgggtcaccgtcggcgcgtacaagatcaagatcccggcgcgcccctggctcggtaccagcgcggacgacaactacgtgctcgcgggcatcgctatgaagtaccttctccgggcgcctcactaa

SEQ ID NO: 351189 - DNA, 1095 bp, Pseudomonas aeruginosa
atgaagacaaaacgcctccctctcgttgctctcgccgcctgcagctactcgctgggggcgcccgatgctgaccacaccatttggctgcaggtgacccccgcggggcacttcaggcctgcagacggtcgcaagatcgatgtgccgagctggcacatcaatgcggcggtcgccagcaaggtgatcgagcgcttccactcgaccaagaccaagcgcgtggtggactacgagcaccagaccctgcgcaaggaagagaacggccagccggcgccggccgccggctggtacacggacctgcagtggcgtgaaggcgaaggcctgttcgccagagtgcagctgaccgcccgcgccgctgactacatcgccagcggcgagtaccagtacttctcccccgtattcctttaccacccgaccaccggcgacgtcctggacgtgcaaatgggcgcgctcaccaatgccccggcgattgacggcatgcaggaactcagcctgcgcgccgcggcgtcgttcggctgcttcgacgacccctcagaggaaaaccccgtgaacccattgctgcttgcggtatgcgccgcgctcggcctggccgccaacacaaccgaagagcaggcggtcgccgcgctctccgccttcaactccaacctgcgcaagctcctcgaccaggatgacaaggccaacagcgaggcagtgcttgctgcctgcaccggcctgaaggccaaggctgttgccagtcccgacccagccaacttcgtgccggtgtgcgtagttgacggcatgaaggctgaactggccgcgctcactgcccgcctgggcgaacgcgacgagaaggagctcgatagccagatcgccgccgcgctggatgacggccgcctcgccaagccgatggaggggtgggcgcgcgaacttggcaagagcaaccgtgccgccctgaccgcctacctggaccaggccaagccgttggcggccctgggcggcagccagaccggcggcgaacccccggtgccggacgagaagaccggcctcacccaggaagaactggccgtgtgctcggcgatgggcctgaccgccgaccagttcaaagccgcgaaggaggcctga

SEQ ID NO: 351190 - DNA, 408 bp, Pseudomonas aeruginosa
atggttgccttgaccaaagaccgcaacaccgtgcgtcgtgatggcgtgcagttcaatgacccggtcgccggtgcgacccgcatcttcgcgggctccatcgtctgcctgaacgctgccggcaatgccgtacctggcagcccctcggccaccttgaaggcccggggtgtcgcccaggagcaggtggacaatcgtgacggtgctgccggtgccctgcgcatcgagactcgccgtggcgtgttcccctttgccaacagcgcatcggccgacgaaatcacccgcgcggatatcggcgccgatgcctacatcgttgacgaccaaaccgtcgccaagacctccgccaccaacacccgctcggttgccggcgttatccgcgatgtggatagcaacggcgtctgggtcgagatctaa

SEQ ID NO: 351191 - DNA, 891 bp, Pseudomonas aeruginosa
atgatcatcaaccgcgcaagcctgcagctgctgtacaccggctacaaggcgtcattccaggatgccttcgccggcattaccccggacttcaaccctttcgtgctgacagttccctcggtcaactcggtggagcagtacggctggctgggtaacagcaccgcgttccgcgaatggctgggcgaccgcgtcatccagaacctggcgctgcacgactacagcatcaagaacaagtccttcgagaacaccgtgggcgttccccgcgagaacatcgaagacgacagctacggcatcttcaacccgctgatgggccagctcggccaggattccgccaaccatccggcggagctggtctacgacatgctgaccaacggcttcagccgtaccagctacgacggccagtacttcttcgataccgatcacccggttaccaacgccgccggcgcggaagtcagcatgagcaacttccagggtggcagcggtgaggcctggtatctgatggacaccacgcgcgtgctgaagccgctgatcctgcagaagcgcaagaactacaacttcgtcgcgatggatggcgagaaggacgagaacgtgttcatgcgcaaggaatacatctacggcgtggatgctcgcctgaacgcgggttacggcctgtggcagctggcgcatgcctccaaggaagcgctggacaagacctccttcaacgacgccttcgcggccatgaagagccgcacgggtgatcgcggtaagaagctgggcatccagccgaagctcctggtcgtgtcgccgaacatgcgcgagcaagccaacgagctgctgctcgccgagcgactcgctaacggtgccaccaacaccaaccgcggcgccgtcgagctgctgatctcgtcctggctttaa

SEQ ID NO: 351192 - DNA, 258 bp, Pseudomonas aeruginosa
gtgactctgccgcgtcccctccagcttgaggttctggaggatcgtgacaaccaccagcgcctgtttgccagcgagcgagagatcgagggcgtctttgtccgggcggtaccggaagccggtttccggcgttgcgggatgtccttctcgcgagaggggcacggtattgccctcggcgcgctgaacaaggacgtgttcgaggtcctgatgaacgagcccaacctcatcgtcgagcccagctacttctcggacgaggcgtaa

SEQ ID NO: 351193 - DNA, 519 bp, Pseudomonas aeruginosa
atgcagtacatcaccgccgccgccctggccgagcgtcctggtgctcgcgagctggcccaggtggccaccgccgagcatcagcgcgtcgtcgccttcgagctgatggaagcgaccctgcggggtagcgatcgcagcagctggccggccgaccaggtcacggtggcggatgatgcgctgcgccgaatcgaagaggcggtcgcccaggccgagagcctggttgacggcttcctggcccgccgcggctatccgctgccgctgagcccggtaccggagctggtcaccggctgggtgcgcgacattgcgcgctatctgctgcacaaggaccggggcggaaaagaggacaacgatccgatcgtgcgtgcctaccgcgacgccctgaagttcctggagatgatcgccgcgggcaaattcagcctgggcggcaacgacccgatcgccagcaatccagacgtcgcagacgtgcgcttcgagtcgtcgccgagcgtgttcaaccgcgaccagctgagggcgttccgatga

SEQ ID NO: 351194 - DNA, 444 bp, Pseudomonas aeruginosa
atgagccggtttgcccccctggatacgagcctggtcgagcagcgcctgcgtgaccaggtcgccgagatcgaggaggtgctgggcgccgccgactatgcccaggtgcgagacctgaacggctaccggctcaacaccgcctatgtggtgttggccgcagagcgcaacccggccggcgccggcccgcaggcgcagcgcgcgaccgcggccgaggctgtgttcggcgtcgtgatctgcacccgcaactaccgggacccggtggctgccggcgccaaggacgacgcaacgcggatctccggccaggtccgcgaggccctgatgggctgggcgccgcggggctggaaaacctgcatctggctgcaaggccaggtgctcgatagcgaccagaaccgagtgctctggctcgatgtgttcaccaccacccacgtattagggggcaccccgtga

SEQ ID NO: 351195 - DNA, 195 bp, Pseudomonas aeruginosa
gtgagcaataccaacgcgccggccaaggccgctgcaaaacccgagttggtcgaggtcaagctggccaagaaccacacccatgccggcgagccgaaggtgcccggcaacaagatcaaggtcaccggcccggagcgtgagttcctggtgcgcgccggtgttgtcgaggccgagggcaccgccccggccgaacagtga

SEQ ID NO: 351196 - DNA, 777 bp, Pseudomonas aeruginosa
atggaagacgaatatttctacggccagggcgaagttgaagtcgcggaggagctcgctggtggcgtgctggggccttgggtctggctcggtgatgtttccgagatgaacggtgcgctcagtcagacagcgatcagtcatcgggaatcctattccggcaagaagggcaaggtgcgcgagttcttcaccgggctcgggatcgactggaacctcaccctgcatcgactggatacatccaacgtggcccggttcaccctgggcaaagagtcctcgatcgtggccgggaccgtgaccggcgagcagttcccgaacacgatcgtcaacggcaatgtcgtccagctcgaccacatgaacgtgtcggatgtgatcctcaccgacagcgctaccccgacgccggccaccctggtgcgcggcacccactacgattacgacgtctacggggacgtgaagatcctgacgctgcccaccagccctgcgccgacgatgcctctgaaggcggcctattcgcatggtgcggtagaccaggtcgcgttcctggcgggcgagcggaagagctacgcgctgcgctacaagggcatcaaccttgctgagaacgaccaacgctgcctggtcgagatgtacaaggtgtcggcgggcctgatccagcagctggcgatgatcacctcgggtaaccagttggcgggggcaccggtcaccttcacgtcgctgatggacaagaccaagccggctaatggtccgctcggccagtacggccgctatgccgtactgcgggccgcgtaa

SEQ ID NO: 351197 - DNA, 528 bp, Pseudomonas aeruginosa
atggcaaagctgaaaggggacgattccatcgtcagcgcgccggcgccggcaccatcggtgccggggagttcgggggcagatgacttgcaggtgctccatcctgacgttctggtgaaggacgtgggtgggagggacctagttgcccgcgaatatggcttcgtggagggcttgaagctgcgcccggaggtgcagccactgctcgatgatctctacgagctgctgaaggggcggatcctggagctggagcaggtcatcgtcatactcggcaagcatgccgatctgaccaccaagctgatcgcgcaatcggcaaacgtcgacgtcggcttcgtccagtcgctcaaccagtcggatggccggcgactgatgttggcctggtggactgccaacggccctttctggttgaacgacctggtcgagcgggtgcaggtcgaagccgcggtcgagcaggcccgccgccacgctggagcgacgtctacgcaacactcatcgccggaggatacggaggtatcgagcagctcggccgaatga

SEQ ID NO: 351198 - DNA, 186 bp, Pseudomonas aeruginosa
atgaatcaagctatcgcccacttggatgctgccgcgttgatcgcggagcacaacgcgccgatcagcgaacaggccggcgacctggagcaggccggcctgcagcgcgaggtcgctgcggattgccgccagacgatcgagcagctgcagaatctcgaacaggagctgcagcaatgcccaagcaactga

SEQ ID NO: 351199 - DNA, 258 bp, Pseudomonas aeruginosa
atgcccaagcaactgatcgacctggacgaggaagaacgagcgctcgtacacgcccaccggcagcagaagaaggaggagcgggaccggctgactcggcgcctgcttgtactggagctggctctgcgcttcgagacctggttgcagaagcatgagcggggcagcagcttctccactttcgtcaacgagttcggctgcgacgatcccaaccacgcgaagctgtacgaatcggtgcaggccatccgcgccctgctgaactag

SEQ ID NO: 351200 - DNA, 3075 bp, Pseudomonas aeruginosa
atggtcagcgccagcctgcagcagcaggcggcgatcgacgccgtcgccaccgaaacaacccgcgccgccggcgcgagcgagcgtgccaacagcacctggcgggagactgcggcggctcagtcagctgcgatgaacgcccatcacaacgtcgagcggcagttgcgagagaccgctgcggccgaagctgcggccgcccaggaggccgtcaaggccgcggccgactccgacaagcaggacgcttcgctgcgcaggctgctcggcactctggaccgcaccgagcgcgagctggcccagctcgatgcccagcagaaggaactgtccacgcacttcaaggccggccgcctcgacgccgaagcctatgcggccggcctggcgaagatcgaggcccgacgcaatgcgttgaccggcatctccaacgatgccaaccgcgccaaccgcgagctgtctggcctggctgcgggcatccgccgtgtgcagtcgctgctcatgacgggcatcgccggctatgggttgacgtcggccagccgcgcgatcgtcaacaccaacgtcgagtggcagcaggcgatccacaccatggaagcggccaccggctctgccgcggctgcccgccaggagctggaattcgtccgcgacgtgagcgagcgcctgggtctggagctgctcagcagctcgcaggcctatgcgcgcctggtcgcggcggcgaaggaaacgcccgagctcgggcgtcagatccgcggggtgttcgagggggtgtcggcggcggccacgactctgcacctcagccgcgagcaggtgaatggcctgttgttggcactggaacagatggtcagcaagggcaaggtgcagacccaggaactggtcctgcaactcggccagcgtgtacctggtgcattcgcgctcgcagccaaggcgctggacaccaacaccgcccagctcagcaagtggttggagaagggcatgatccccgccacggagttcctgccgcgcttcggcgaggcgctgcaggaggcctacggcgagcaggccaccaaggcggcgagcggcctgcagggagaactcaaccgcctgaccaacgcctttaccgacctgaagatccaggccggcgagtcgggattcatcgactcgtacaccactgccgtgcgcgacctgcaggaggtactcaaggaccctgcggtgatcgagggactcaacaccctgatcacagcactcggcaagctgatcgaattcggcgccaagggcattggtggcgcggccgccgtcgtgaagtacgtcggcgaggagatcgcgtccagggtaaacggtccatccggcgatgatcctgtccgccttgaagaagccatcgagcgcgaaacgctctggatggaaaaggcccaggaaaggttggacgccgcctacgagaagggcaaccaggctctcgcggcgagcatcgaggccgggatgtctgaaacccaggccaatctggcgcgctggcagcagatgctcgacgagctctatgcgcctcggcccgccgccctgcaactgcctgccaccaccgtcagcgctccaaccggcaaccgcccggcattcacccctgccggcggcgacgacaaagatgcggcgcgccgcgccaagtccaatgccgattgggtcgcccagctggagaaggaggcggcgacattcggcaagagcaaagcagctctccgtgagtacgaactcgaccagcgcaagctgtccggcacgctcgaagaccgcgcccgagcggcctgggcgaccctggacgccgccgagaaacagaagaaggccgaccagcaggcggccaaggactccaagctcctggtgcagctgcagctcgactacctgcgcgccaccggccaaggcgtggaggcggccggcgcagagatcgagaagaagtacggcgcgctgcagaagcggttgatcgagtcgggtaacaccgaaggcgccggcctggtgacccagctgatgggcgtcgagcgggccaaggccgagctcgacgagctggagcagcagctggagcggatcttcggcgagcagtcacgacgcgagcagactatcaacacacagcagcaggccggcctcatcagcgagatcggcgcccgccagcagatcctggacctcaacaagctcaccgccgaccagatcgagcagctgctgccgaagatgcgcgagcttgctgccgccaccggcgaccccgcggccctggaacggctccgcgacctggaggtgcgcctgcagggccttcggaccgtcgccaacgagttcgccaacgccctcaagtctggattcgagaccggcctgcagaacgccctgcagggcttggccacgggcacgatggacctgcaggaagcggcgctgtcgttcgttaacagcatcgccagctcgatggccagtctcgcgtcgcaacagcttgcgcagatggcgtcgagcaaactgatggggctgttcgggggcggcgatgacggcgcggggctggctgtcggcgcatccgctgtcaccgcatccgccggcgcgttgtcggccgccggcggcacactgatcaccggcgcggcagctattcaagcagcggccgccagcctggccgccgcgtccaccacccaagctgtttccggcgctgccagctacaccggcgccttcggcttcgcctcgggcggccaggtgctcggccctggaacagggaccagcgacagcatccgggcctggctgagcaacgaggaagtcgtcattcgcgccgccgtggcgacccaggccggcatgactccgctgttgctggatatcaaccagcgcggctgggccgcggtgcatgactggtccagcgctgtccggcattcgaccggcggcctggccggcgtccccgcgccggcgctgccggctccgaccatgccttcctccggccggctggctgagccggccgcgagcatgggagccacattgaagaacagccagaacttctacctggtcgacgacccggcccggatcggcaacgtcatgtccgggccgatcgggcaggacgcgatcgtcatcgcaatgtcgcgcgaccccgcgaagttccgctccatcctcaacatcaacggaaactga

SEQ ID NO: 351201 - DNA, 861 bp, Pseudomonas aeruginosa
atgccccacgccatcggcttcgtggacaacgcgggcggagtactcgcccactacaagatgctcgacaccatccgggccttcgcctcggcgaacggctggcaggtgctgcgctacgataccgcgccggccaatcgcgagctgatcctgaaaggtgtcggctggagcggtaccgaagagatcttcgtgggcttcaggacctaccaggaagcaactgccgactactacaacctgctagcggcgacgatgaccggctacgtgccgggcaacaccttcgacacacagcccggcatttacgtgtccggcgtgcccgcgcacaacaaccggattgattattggctgagcctgaacccccagcgcatagcgctggcaatgaaggtcggcacgccggtctacgagacctgctacgtcggcaagtgcctgccctatgcccggccgagtcagtacccctatcccattgtctgcagcgggatgctcgttggagccgcgactctgcgcttcagcgacaccaccgccaaccactcgatggggttcaagggcaactcccagcgcctggcgctgcgcacgaacgaccagtaccggaacacctggtgttggccctggggcaacaacaccgtggccggcgccgggaacgtctcgaatccaaacctgcgtgatacaggcgatcgttaccagcatctggcgatcgagctgcacgacaacgccaacaacatctggggagccctggacggaatcttctacatcagcggattcaacaatgcggtcgagaacaccctggtcatcggtggcgaaaattacgtggtcatccaggacagtttcagggtgggccacaccgactacatagcgatgaggctcgacaactga

SEQ ID NO: 351202 - DNA, 192 bp, Pseudomonas aeruginosa
atgatcgcggacctggagcatgcccgtatcactcgcatcgacaactatgcaccgggccaggtcatcaacatcggtggcacgcggtggaagatctacccctggcatcagaaaaactcggcgctccgagacggtggcacggctctcacgcacaccggcactttcggctgggccgtgcgctacgaggggccatag

SEQ ID NO: 351203 - DNA, 1713 bp, Pseudomonas aeruginosa
gtggcggtgctgcaggggcaacttgtgaccggcgtcctgggcggggtgatcgccaatccgcacttgaccgacgaccactgggcatttgagtgggtcaaccagttcgcgcctgttccatttgccagtggcgcgcagcgggccgggcagaatgctctgatcacgcactggccggtcgaagccaatggccgcgtgatcgctggccagctgtcgcgggcgtggctttacgactggtactaccgcatacacgttgcgccccagcagctcgacctcggcaacatcgtttccgcgcagagcacgcccatctacgtgtggaacgcctggtttgtcccgcgcaccttagtggctgtcgatgggctggacgagggcatcatcgtcaccggccaaccgtcgccgccgctgctgttcgcgccgctgcaggaaatggcctggcagctcacggtcacccccaacggcgagccggtgctcgatactgttgtggaatggcagttcgacaacggcaataccccaggcgtccgcgtcacagcgaacaggatcattggctggacgttcgcacccgactggggcgacggcgtgcgcgagcgcctgacctggtcgacggacattctgcagagcgagtcggccaaagagcagcgccggtcgttgcgccagacgccgcgcagagagttcgaggccccgatgtatgtagagggccgcgagcgccagttgctcgatctggccctgcatggctggtccgcgcgcacttgggcactgccgctctggcatgagatccagctactgcaagtcggcattcctgcggcggccacgttcatcccttgcgagacgattgctcttgactgggccgagggtggcttggcgatgcttcgcggagagtctgctttcgccagcgaggtcgtggaggttgaggaaatctgggccaatggcttggtgctgaagcgcggcactcagcaggcctgggggccgggaactcggctgtatcccgtgcgcagcgctcaactgctcgaagaaccgcgcctgacccggctgacagacatgctgatcagcgcggacgttcggttcctggttgtcgagcaatcggactggccagcggcgatgccgctgacgacgtatcgtggctggcccatctatgaccagcgcccggatgagtcagaagacctgaccagcagcctggcccgcctgctgctgacgctcgacaacggcaccgcgatcccacagtacaccgacactgcgaaccgtggcctggctgtacgtggccaccgctggatcgacctcggccgcgcagctcgggcctcgctccggtccttcctctacgcgatgcgtgggcggtggtcggccgtgtgggttccgacccatgctgacgacctcacactggtcagcacagtgaccagcgtcgccacgacgatcgacgtcgcacaggtcggttacagccgattctcgaatggctcaccgggccggcgcgacatacgcatcgagctgtacgacggcactgtgttccaccgtcggatcatcaacggcgccgagctgacgcccgagatcgaggtgctgacgatcgacgccgcattcggccgccagatcctgcccgacgacgtttcccgcatcagctggatgaacctgatgaggttcgacagcgacgtccaggagctggagcacatcacggactccgagggcgtcgccacatggtcgacagtgttccgcgaggtgcgcgatgagtcatag

SEQ ID NO: 351204 - DNA, 816 bp, Pseudomonas aeruginosa
atgagtcatagcgcgcgcgagtcctcgatcgcggccggcgagccgatccgcctctacaagttccggcgcggtgtcctggtgtggctctacaccagcgccgcgttcgatatccctgtcggcagcgagatctaccgagctgtacgcggcggtgtgaaggatgacggcattcgccggacgggagagatcagcgccgatcggctgaaggtcaccgcgccggccgaccttgaggtcgcgcagttctaccggggcgtgccacccagctccgagatcgacctggttgtctacgagtgccactacggcgaggccgaagcgaaggtggcctggtcgggcacgatcgagagcgtgcggtggccatcgctcgatcgttgcgagatcagcgccctgactttgcttgccacgctcgacgtgcctggcctgcgattgacctgggagcgcaactgcggcgcagccttgttcgatcgccgttgcaagatcaaccgcgacctgtggcgcgtcgacttcaacatccagtcctccacgggtacagagctaagtgtcggctcggcggccgcatacccggacggctggttcagcggcggctttcttgagtggcccatcggatcgggtgagttcgaccgacgcagcatcgagcaccaccagggcagcatcctgcgcattctcggcggcacgtccggcatcccgctcgcggtgcgcgcgtacccggggtgccttcgcatcgcccaggtgtgcctgaccaagttcaacaacctggacaacttccggggcgacccgaatctgatgggcaaaaaccccttcgacggcaaccccgttttctga

SEQ ID NO: 351205 - DNA, 417 bp, Pseudomonas aeruginosa
atggtcccatggccgcaaatcatcatcttggtcgcatcgttcgcgatcagctacctgaaccggccgaagcccgcgacaccgaagccggccgcgttccaggacttcgagtttccgatggcagagatcggctcgtctcagtacgtggtgttcggcgatgcctggattcccgactggcacgtgctcacgttcggcaactaccggaccacgaagatcaagaccgagggcggcaagaagagcatcggaggctggacgccgggcctcgcacccggcaccaccaaccccattgaggccaagttccgggcgccatgggacccggtgggcgacaagctcatcgagtgggacccgacgcaacccgaggcgccggacaacgacggcatcggcagcggcactgtagggggtgacacatggattccgtga

SEQ ID NO: 351206 - DNA, 234 bp, Pseudomonas aeruginosa
atggattccgtgacccgcgcctggccaaggcacctgcacgagctgggccactgcgccgccggcgcgcgccagatcgccgagggcctcgggctcgactacagccagttcgttttcaacggcacccctacggatgaactgcgggccaccggcaatgcgtttgcgatcgctctggccgagttcgccgaagccgaggccgcgcaggacgtggaggtcgcagatgggcagcagcagtaa

SEQ ID NO: 351207 - DNA, 2217 bp, Pseudomonas aeruginosa
atgggcagcagcagtaagccgcagacgattggctacaggtacttcatgggtatccacatgggcctgtgccgggggccgatcaacgagatccgcgagatcaaggtcggcgatcgcacagcctggaaagggtcggcggtaggccaggcgcgctggcagatccaagcctctggcttgttcggcggcgaccagggcgaggggggcatttacggcacgatcgacatgatgctcggcaccgagacccagcccgtgaatccccgactgaagcggatgctggggtcggcgctggtgccggcattcaggggcgtcacgacgctgttcttcgacggcctggtctgctcgatgaacccgtacccgaagccgtggaagttccgcattcgccgcgtcacggccggctgggacgacgacaacgtctggtacccggccaagtccacgatctggctcggcaacgacacgatcagtgcgatgaatcccatccacatcatctacgaggcgatcacgaatcgcgattgggggcgaggccgccccgcctcgcgcattcacgacgcttcgttccgagcggctgctgatcgcctgttcgcggaggggttcggcctctgcctctgctggcgccggcaagacgggatcggggcgctggtgaagtcggtgatcgatcacatcggtgccgtgctgctcgacgatctggacaccggccagctctcgatcacgctgatccgagacgactacgtcgttgccgacttgcccctgttcgctgaagacaccgggttgctgggtatcgacgaagaccaggttgccgatggtgcgtcggcaaccaacgaagtggtcgtccgcttcaccaacctggcgaccggcggtgatcaggaccaggtgcgcctgcagaacaatgcggcgatccagtccgtgggcgctgtgctgtcggaaaccatcgactacccgcacgtgccgaccggcgacctggccgcccgcctggcgcagcgcgagcttcgcgcgcgggcatctgaggtccggcgcttcaaggtccgactggaccgccggggagctgacaagatccgccccggcagcgtattcaggattcgctcgcgccagcgcgggtacgagcagctggttctgcgtgcgggccaatgcgactacggcacgctggaggccggcacgctgaccgtgtccgcaatggtcgacgtgtacggcctgccggcgacggcatacgtgcaggtccaggagccgacgatcaagccgccaacgctcgatccgttgccggccactgtccggaagcttttcgagatcccgtatcgggagcttgctcggtacctgtcggcggagctgctcgggcatgtcaccctcatgtcctgcggcgtgggcatcatcgcgcgccggcccagcgctgcagcgatcaactacacgatgctgacccgcgtggggagcgccgcgttcggtggcgtcgacacgggcgactggtgcccgacggcgcagattgccactgacctggactacctgacgacaacgaccaggatcacgtacagcacggacgtatcgaccgtgcaggccggcgatgcggggatgatcgacgacgagatcgtgcgagtggtcagcctgaacatcgacaccggcgacctggtgatcgcgcgcggctgtgccgacacggtgcctgcccgccatctgaaaggggcgcggatctggttctacggccaggacaccgccgtcgaccctgtggactactcgcccggcgtcgtcgtgcaggcgaaggtgcagacgcgcaccagcactggcctgctcgatcccgcgctagccgccacagatagcatcacaactgcccgacggcaggcccgaccgtacccacccggccggctgcgcgtgaacaacaccgcgtacccgcgcgacgtgttcggcgagttgagcgtgacctgggcccaccgcgatcggctgacccaggccgaccagctcgtcgacacaacggctaccgatatcgggccggaggcgggcaccacgtacaccctgcaggtctacagcggggccactctgcgcaagacctacgcaggcattacaggaacgagctggagctatccagccgccgacgaagtggcgcacggctacctgcagaccctgcggatcgtgctgttcagcgtccggggcgggctggagtccttgcagaagcacgacatcacgattgaacgaaatggcctgggcttcggcctcggccaatactttggaggtgtacccgcatga

SEQ ID NO: 351208 - DNA, 1086 bp, Pseudomonas aeruginosa
atgactctcgcaatgggccccaggctggggatgttgatcagcggcgcgccgggcgagggccactacctggccctgctgcgcagcgccaggctgctggacgggctgatccagacctcgataaaggccagagtggccagcctgccgggcagcccggcaaacggcgatatgtacctgatgacggccggcggatcggtcggccagctcgctcgctactacgtggactcgtacatgacaccggcggcagcgtgggagtacatcccgccgaaagaggggttcgctgtctggtccgaggcggatggccgggtgtacaggttccgaggcggctcctgggtaccggaggacctgctgggcgtcgaggtgcaagtctcggcggcaaccacgctggtggctgcggcgttcggtcggatgcacgtatgtagcggtaccaccgcaagctacgacgtgacgctgccggcggcgagcgggaatgtggggcggctgttgggcttccgcatgagccccgatctgactgagattgtcacgctgcgcggcgctggctcggacctgatcgacggtctggccgctcgaccgatgtgggcggaagagaccgcgttgctgtactgcaccggcacaggctgggtgaagctggcggggcgctcggtgccgatgatgtgccagatgtaccccacggaggcggtaaccctggccgactcggtgatcacgaagattccgttggcgggagtcgtgagggatacgaccgggaagatggcagacccaacgacgaacaagcgcgtcaacgtcatccggggcggcacctacttcatgcaggggctcgtgtatttccaggctggagcacaggcgtcgtacaacacgcaggcgcggctacacgtcaacggcacagtcgccccgctcgggaccggcgggttcctgctggacgtgccggccgcgcgcagcttcctgtcgagtgtcaccgccgaggtcgccgtggctgctggcgactacgtcgagctgtacggctatcagtcgaatggcctcggtgggtcgcgccagaactacttcggcaacgtcaaccactgcctgtcgctctcggagaagatcacatggtga

SEQ ID NO: 351209 - DNA, 447 bp, Pseudomonas aeruginosa
atggtgaggccaatcaacgacgtcgtcggcttcgcggcggcagtagcaacgctgtatcccgaccttgtgctggcccatcactggagcatccaggatgacggcgacggcccctacctcgccgagtggcccgaggagctggagctgccgaccgagcagcagatcagtgcagccggggacctggtgcgcgcgggtgaggaactgaggggccggtcggcagaggcgtctgcagtgatcgcggcgctgcaggagccgatcgcgctgctgcaggacgcagtagacctcgggctggctgacgccgaggagaccgacaggctgcaggaactcagcgcggcgctgacggagtggaagcggtaccgggtgctgctgagtcgggtgcagacctcggcggggtggcccagcgctccagcatggccaccgaggcccaatctggaaatttcgttaccatag

SEQ ID NO: 351210 - DNA, 699 bp, Pseudomonas aeruginosa
atgaaagcagactgggaagacgccccgcagcacctcaagcgcaatcgccaaagcgctggaaagtgggtggttgccgtttccatcggagtcgccttcaccgccctagtcgtctacgtggccgatcacaaactcccgtttccgcctgagccgccaatcgcccaggtgcctcccgcaaaaagctacacgccgaaatacgagttcagcgagcccgccgaccagcccgccgcgacaccggagcaactgttctgggataacgtaaacgagggtaaccgccaacagactcaaccaaagcaaaccgtctacaacgacaccaactacgttcccaagggcgctactaacatcgttgacatggaggccgtgcgccaatcagaggcgtatcgaaatcctactgcggcatcgagcagatcgtctcgaaacagtattgagcaatctggggcatgggtcgataaatggagcggtggagcccactactatgcagagtgggcagtgataaataactatattgatgattcgtcggtttgtgccaatcacaagcgtggatcaattgattatcgtgaatgcagaaagggagcgaagcagttcttcaagggagagtgccgttcctgggaaggtagatggcaaagcgatcgtaaacctagcagtgactatatgaagcaacgctactgctcagcagcaagcagcttcaacccaatgggatag

SEQ ID NO: 351211 - DNA, 600 bp, Pseudomonas aeruginosa
atgcatgactacgccgtatttgggcacgatagagccgctattggtcgttggttaggcttcgcagccataattgtcgccggtggaattgcccaagccttatcgtgggcaaagaacatcaccggactggaggctttcactaaagcatcgataacgactggcgtggcctacttaattctacattggctcttcaataaatacatatggaaacttccagcatttgagataccgaaaatatcgggaacatggaaaattacggcacaaacattaaatgaagatggaaccgtaagatttgactgggaaggagttattggaatagagcaaacctggaaacaaatgttaattcacctaaaaacaaaatccagtcagagcttcagctacaccgcgacattatctaagcgtcacggcccaacaggaggatggcttcttagctacagctataaaaacgaacccgaactccaatactctcatgaattaaactctcacaaaggatactgcgaggttgagttcgacccagagctaaaaatcggaagagcatcttacttcaacaacaacggaagacgcacttttggtgtcctcaacctttctaaggaagaaaaatga

SEQ ID NO: 351212 - DNA, 1122 bp, Pseudomonas aeruginosa
atgatcgactttgagaaacgcctcagctccatgaaagagcgtcggcaaggaagcagggaaagagcgattcttgaagccatgacattcgatcacgctttagaggcaatcgcagcaaataccgagatacgaaaatcagaaagcttcgagcaaattaaagagcctgccggagtaaagtatgcaattggggctatggctgcggttgaggaaaagtataccgaagtatcgttgcgcgaaggaaatagagtggcagacagcctcatcaagagcctagaagggcgaggcatttacgcaacaaaaaggcttcaaggctctgtagcactcgacatccacatacgaggatactcagatgtcgacatgctagttatagagaactctactatcctcatagagtcgccaagagtggagcctaatacttatcttccagcatcagacaaaagaggaatgaaggagattataaaagacttacgggaacaatcaatcacaacgcttaacacaaatttcccgcaagcaaatattgcagcaggaggaaaatcaatttgcctatcaggaggaagcctaaaaagaaaggtagatatagttccagcctgctggtatgactcaatcaaatatcaaaacagtcaacaagaaaaggatagaggaataaagatatacaacaaaacatcagacgagctatttttaaactatccattcacacatattgcaaatgtaaaccaaaaagacaccttatactcaggaaaccttaagtgcgtcataaggctaatgaaaaacatcattgccgacatgccagactacaaaaaaaagatagcaacgaatctgacaagctatgacttggccgcaatagcctatcacatggacaacaatctcattgccccatcttatatgcgcctcagcttagtggaaaagctacgctcacacctaaccacactagttgccgttgaagggtacagagaagcattattagtcccagacggaacgcgaaaaatatttgacaaagaagaaaaattcactgctttggctatgctgtacagcgaagtagacgagctcgcaaaagagatcgctcgagaaataaatccgctagaagctctatacaaaccagaaacactaaataaatacatattttaa

SEQ ID NO: 351213 - DNA, 855 bp, Pseudomonas aeruginosa
atgaatctcaaagaggaaattactagatccgagcctgactccgaagatttcagagaaaagataaacgagttgtcgtggaaatacaccgcgtcactcaaaaatatcgatatggcgaatttatctcaactcatcgttcgccgcgcggccatcgtccaaatactagacctggcgtgcggaaagaacctagcaatgcagaagattgatagtgatgcacgccgcaaggatgagagagtaattcacagcatatttttcccaatgcgaagagacagttcagaggttgctgaccacgatatctggcttctgagcgaggagtatcattactacgactatatttcttcagatcttccgctctcgaagcttacttgggatgatggcagcaaaatattttcagaggacattgatcagggtattcagaaaatacttgagaaacgtgccgatgaaaatggtggcaagcgtcctgatattgccatttttagcaaggaagggtcagctattattgtggagttcaaagctcctggcgtacagatggacgaacatataggtgaccttcaagagtatgcctaccttctgaatgcaatgtcaggtggcaagctaaagaaattttatgggtatttgataggcgacactgtcaatccacttcgagtgggtggtagttggacaaagtttccgatgggcaacggatggttccaatcgagtccactgagcgaccctgaaagcggggtcaagcttggcgaaacctatttcgaaatcctgcactttaaggatgttattgaacgggccaagaaaagaattagcgtatatcaaggcaagctaaacctgaagttagactttcaagaggaaacacctcgaaactag

SEQ ID NO: 351214 - DNA, 336 bp, Pseudomonas aeruginosa
atgcccgagcgtaaccgtaacgccgtcccccttctgcgcccctgcgcccgccccttctgcggcggccgcgcccgggttcgcgatgacgaggggcaccattggatcgagtgtgaggcctgcggtgcgagccatcacgcgccgcgtgaccccaaccccgcccagcgccgcgctctggtcgagcagtggaacgcgccgaccctgccaccggcccaggtcctgccggcgttcctgcgtgagctggcagcccgccagttcggcgccgagcgcgcccagctgctggacgcggccgagctgatcgagcggcaggccgccgcactggtcgagcgtgtcgcgtga

SEQ ID NO: 351215 - DNA, 240 bp, Pseudomonas aeruginosa
gtgatccgtcagtcgatctatgaagacgcccttgaactgctgatcggtcagggcggcgcccgcgagttcctggcgcgccgcaccgacgacggccgcgcctggaccttcagcgtccgtatcggcgtgcgctgggttccggtgcgctcgcgccgcgagccgttgcggacgtgggccagccttgtcgcggtcgagcgtttcgccctggccctgggcgtgcgggcgtttctggtcgagctgtga

SEQ ID NO: 351216 - DNA, 327 bp, Pseudomonas aeruginosa
atgcgtcacactatggccatcttcgacgaatggatatggcgcgacccgatgatcatcagctttcgacacaagggcttgcgcgtcttccatgaaaccagcaatacccgaggcatccaagccgcgcatgcgaaccgcctgaagcgtcagcttcagttcttggaccgcgcagcggcgccggaggacatgagcgtccccggctggcagctgcacccgctgaagggcgagctggcgggcttctggtcgatcagcgtgtcgggcaactggcgactgatcttccgctttgtcggctccgacgtggagctggtggattatctcgattaccactga

SEQ ID NO: 351217 - DNA, 288 bp, Pseudomonas aeruginosa
atggctctgcataacccgccgcaccccggcgagactctgcgcgaggacgtgctgcccgagctgggaatgaccgtcaaggcattcgcgcagcacctgggattttcccgcgaggcgctgtcgcgggtgctgcatggccacgcggctatttcgcccgacctggccgtccgcctggaaatggcgggcatcagtaccgcgcgcctgtggctggggatccaggccgactatgacctgtggcaggcgcagcagcgcgaccagcccgccgtcgcgcgtctgttcgaggcggcatga

SEQ ID NO: 351218 - DNA, 168 bp, Pseudomonas aeruginosa
atgcaaaccctaatgcagcgctacaccgagtataacgagcgtctgaaagcccaaggagtcaggttcctggccttcgcttgccccaagtgtggcggtgagatcgagaccgaacgtgcgacgcgcggtcagacctgggacaccctgtctacaggattccggcaggggtga

SEQ ID NO: 351219 - DNA, 222 bp, Pseudomonas aeruginosa
atgcgcgagcaaacccgcaagaacctggacctacgcctgagcttgatcgacgacgccgaagatgaaatggcggtgcgcttttcgaggaccgagctgcgcggctacatcgacgctctgtacgacgaagaacgcttgagccccgccgaagtcgaccgcgagcgtgacgaggccgagtgccgaggcaacgcccggctggccttcctggccgccacggaggactga

SEQ ID NO: 351220 - DNA, 255 bp, Pseudomonas aeruginosa
atgatcgagccgacccccgcccaggtcgccgcgctggccctgccgggcgatgactggccgaccggcaccgcccgtgcccgtcgcctgctgaatgcggtggccgagtgctggccgtgcccgatgtgcgcctctggtggggtttacgattggccggatcaggtgcgcggctgggtagatgatgggtgcgaagcttgtgaggcgtgccggtgctacttctcggcggccagcctgggcgaccctgatgactacgcttaa

SEQ ID NO: 351221 - DNA, 948 bp, Pseudomonas aeruginosa
atgcctacccaatccgacttgcgcttcacattcgacctcatcggcagcgacgcgcgcgacgttttcgaggttgtcgagtttgagttgcacgaggctctttccgagacctttctcctcgccgtcgacctgagctgtgccaaccctgctgtggacttcggccaggtgctcgatcattccgcttgtttgaccatctggcgcggcgacactcccgtgcgctacgtccacggcgccgtgtcctccttcgcccagggcgagaccggatttcgccgtacccgctactccgccgtcgtcgagccgcgcctggcgcgcctgaagctcagcgccgactggcgcatcttccaggccctctccgttccgcagatcgccgaggcggtgctcaaggcccatggccttacccaggattacgagcagcgcaataccaccgagcaccaggtccgcgagtactgcgtacaggccggtgacaccgactaccacttcgtcgagcgcatcatgcgcgaggaaggctttttctattccttccgccacagcgctgagggccaccaactggtgcacagcgaccgcctgttcatccacggccgcgtgggcgacgaaccggtgcagtacaaccccacgcccggcggcgaccagccgcagccggcgctgcgccgcttcgcctacaccgagaacgtgcgcactgcgcgccagacccagcgcgactacaccttccacagcccccgctacacccaccagcacagtcgcgacgggcaggacctggaccatcagggccgccgctacgagcgttacgattacccgcccgggccaagttcgacgaggccggcaggcccttcgccgagaaccgcctgcgcggccaccggcgcgatgcgcgcattgccctggtcgagggcgatgacccgcgcctgcagccgggcatctccttcaccctcgctggtcacccccgtgaagacatga

SEQ ID NO: 351222 - DNA, 234 bp, Pseudomonas aeruginosa
atgctgcgcgctgatttcgacaatatcgaacgcatgctgtgggccgttcgcaacggtcgcgggcgtgctgagttgtcgttcaacgttggccgtttgttcggctatatggcgtgcctgctttgtcatggcgatatcgatgacgccgtgcataagcgcctggatgcgttgctgatgaacgctcaggactacgccatgcgtgttgtcgtcgacctcgaatggcaggggtggtcgtga

SEQ ID NO: 351223 - DNA, 1449 bp, Pseudomonas aeruginosa
atggggactaagatatatgcactactcttgagggtcatgctgtttgtagtgtggtcattgcctattctggctgtttctccaagcgctaatgcagcaatctaccagtggaaggtttcgccttttggtatggagacaaagcgtttccctaaccctaatgcagcctgtgagtatgcatatacttctatatctagtaattgggataaaaagattgagccagatataaaaaatcgcgtagttcattgttatttttctggtaatggcgtgtattggcaggatatggcggccattctggagggggattcttgcccgttaggtgcggagtttaatggcgatacaggtatttgtgagtgcagtcctggttatgaaatggatgatattggatgtaagcctccggaaaagccgaaatgtgaagatactattggtacatggattcctcatcaatatccgattccggctgatggtgttgcgccttatccgcgtcctggcgtggtgtgttcgaaaagttgtcagtttgtagatgcttcgttggccccgaaaagttgttatacggcgggcgatagtgggttttgctacacgtattaccggggtaacggttcggagtgcaaagaaggtgatgaaactcaggtgaatccgtcgaaccctgcgccgaatcccgatccgggtgatggcggtgacgacccgaacaatccgaagccacctgtggagtgcatcgggggctatgtgtggaatggcaccaagtgcgtgaatccgagtgatccgccgccgcctgaccccagcaatccgggcggcgatggcaacggctctggcggcgatggtgagaacggcggaggcactgggggcggtacgggcggtggtaccggtggtggtactggaagcgggaacggtgacggttcaggaaccggctcgggtgaaggttccggcaacggtagcggtactggcagcggcacgggtacgggctcaggggaggggactggtggcggaggaggaggcggggacaagccgggggaggagtgcaagccgggtgagagctgcaacggctcgaccgatggcggcgataccgagtgcgacaagcccattgcctgcgacggcgacccgttccagtgcgcgatcctcaagcaggcccacaaggattcctgcgacctgcgcaagctgccgaccgataaggaaaagaaagacctccaggacctgattgaccagcagcagaagaagctcgacgccgaacagcaggcgctcgatggcaaggtcgatggcctgttctccgacttcaagcaggcagccagcggcagtagcgcgcaggggcggtgcctgaccgacgctcagttccaggtgctgggcagcagcttcacgctgccgttttcgcaggtgtgcgagttcctgcatctgttccggttcgcggtgatcgccatggcctatctggcggcggcccgcatcgtttctcgcggattctga

SEQ ID NO: 351224 - DNA, 288 bp, Pseudomonas aeruginosa
atgtggggtgtactgttccaggccctgattgctgccggtagctacctgttgccgcggctgctggccacgttgggcgtggtcgcggtatcggaaacgacgctcaagccgatcttgaactggctcaaggaccgggtgctgagcaacatcgggtcgctgccggagaatgcccggttgttccttgagtacctgggcgtggttgacgccgtgtccatcgtgttcagcgcgtacctgctgctggtcggcatccaggcggcgaaggtcgcgttcagcaagaaagtggcgaagtag

SEQ ID NO: 351225 - DNA, 1098 bp, Pseudomonas aeruginosa
  misc_feature (293)..(293): n is a, c, g, or t
atgctcaagctcgttaccggccagcccggcgctggcaagacttcgaacgaactgtggccgttcctgcatgacaaggcgtacaagggtcgcccgaagttctgcacgccgatcaagggattcgacgcggccaagcatggcgtgactgagatcgaggacctcaaggggtggcgtgagctgcccgaaggcgcggtggtgttcgtcgacgaagtccaggactacctgggtgcgcgcgctggcaaggaagtgccggattggatccgcgagtttgcccggcaccggcattacggcatggntttcatcttcacgacgcagagcccgatgttcctggacccgttcgtgcgtaagctgtgccagcagcacgtgcattaccatcggccctggaacatgcggcgttcgtccaagcggacctgggagtccgtccagggcgatccggagtcgaataacgcgaagaagctgtcgcaggcggctgtcgtgacggccaacccgaaggtcttcgacctgtacacatcgacggtcttggacacgcacaagccgcgtccgccgtggaagctgatcatcgtggcgagcctctcggtagcggcgttgctgggcggcgcggtcctggccctggtgatgctgggtgacgtcagcgacaaggctgagagcaacgctgcggcggcgattgagaacctgcctggagcagcgccgagcgtcgagattcccagcgtgtcgtcgattggttccagcgtgagcgcgatcggcagtcaggagacggtgtggacggctgagagtgtgcagcctcgggtcaaggggctggcctggacagcgccggtgtatgaccatctgaccaagcccacggattttccgcgtgtggccggatgcatcaagttcaagagcaagccgtgccagtgtttcacgcagcaaggcacgccggtggtggtgcctgaggaagcgtgcctgatgaacgtgaaggaaggatcgttcgatccgtggttctccagccgtcggcgcgaacaaccggttcaggagcggcagcaggtggccgaggcaccacggcaatcgtcggtagtgccggtgacgatcattcctgatagcagccgctcaccccgcacgttgtaa

SEQ ID NO: 351226 - DNA, 1449 bp, Pseudomonas aeruginosa; identical to SEQ ID NO: 351223

SEQ ID NO: 351227 - DNA, 288 bp, Pseudomonas aeruginosa; identical to SEQ ID NO: 351224

SEQ ID NO: 351228 - DNA, 1098 bp, Pseudomonas aeruginosa
atgctcaagctcgttaccggccagcccggcgctggcaagacttcgaacgaactgtggccgttcctgcatgacaaggcgtacaagggtcgcccgaagttctgcacgccgatcaagggattcgacgcggccaagcatggcgtgactgagatcgaggacctcaaggggtggcgtgagctgcccgaaggcgcggtggtgttcgtcgacgaagtccaggactacctgggtgcgcgcgctggcaaggaagtgccggattggatccgcgagtttgcccggcaccggcattacggcatggatttcatcttcacgacgcagagcccgatgttcctggacccgttcgtgcgtaagctgtgccagcagcacgtgcattaccatcggccctggaacatgcggcgttcgtccaagcggacctgggagtccgtccagggcgatccggagtcgaataacgcgaagaagctgtcgcaggcggctgtcgtgacggccaacccgaaggtcttcgacctgtacacatcgacggtcttggacacgcacaagccgcgtccgccgtggaagctgatcatcgtggcgagcctctcggtagcggcgttgctgggcggcgcggtcctggccctggtgatgctgggtgacgtcagcgacaaggctgagagcaacgctgcggcggcgattgagaacctgcctggagcagcgccgagcgtcgagattcccagcgtgtcgtcgattggttccagcgtgagcgcgatcggcagtcaggagacggtgtggacggctgagagtgtgcagcctcgggtcaaggggctggcctggacagcgccggtgtatgaccatctgaccaagcccacggattttccgcgtgtggccggatgcatcaagttcaagagcaagccgtgccagtgtttcacgcagcaaggcacgccggtggtggtgcctgaggaagcgtgcctgatgaacgtgaaggaaggatcgttcgatccgtggttctccagccgtcggcgcgaacaaccggttcaggagcggcagcaggtggccgaggcaccacggcaatcgtcggtagtgccggtgacgatcattcctgatagcagccgctcaccccgcacgttgtaa

SEQ ID NO: 351229 - DNA, 375 bp, Pseudomonas aeruginosa
ttgaacgacaccacagacagcactctgcgagacgacatgaacatcccacagaccttgaggaccgccagaaagaacagggggttgacgcaacgagaagtggccgagcttgtgggggtatctatcgaggcctacaagggctgggaggggggaagacaccaccccagatcggaaaacgtcgcaccccttgcccaggcgctaggaatatccaccgacgaactgatgatggaagcccagcagcgctcaatatcggaagacctcagagcgctattcaacgccgccgacaagatgccggacgacaagaagcggcaactcagaacggcaatcaaagggatgttgctggccatcagccaagagcagctagacgagggggagtag

SEQ ID NO: 351230 - DNA, 987 bp, Pseudomonas aeruginosa
atgctcgtagaaaagtaccttggtatagaagtctcaaatcttcagcaattgctagatatgttttctatatcaacagaagagaatttggagataggaaactatcattacccattaaagccatacagcttaattaaagccgaagccgagtgtcagtatcttagaaagaaccaacgctgtgggaagttgcatcagcgcggttatgtagtggttaccaaaaccaataatcttgttcttataggccattgctgtgctcataatcatctaagcattgatggtgagaatgtaaaaggcgatttgtttcttgtttcaaggaaagatcgtctcgctttccgtcaagcgcgaatagcggaaattcaagaaaacaagagtaatattgctgccgaaatacgaaaaatcagaatggagtttgaagcttttcgccaaaaggcagaatggctattagaaattatccctaaacctatagtctctaaattggttgacaagtataagcgcggagatttttccgttcagtgggaatatttaaaaataaagcgagacaaacagtcgaacaccgaggaaaaatcttggtatgttcatgacttcggattgataaaaggcgttggggattggctatttataaatagttcatcactaacaatgaaaatctgctcgctaagcgtaaagctaaaaacaatcccctctgaagggcgaattagtaatgacgaactattccaagctgaaaaggtagttagagaactttctgacttgcgcaattactggatagagctagatcgagccaaaaaaaacattgaagttttctgcacacgggagaacctacaacttctgcctcagctggtgtctaaccgagaggctcgagcagatgctgtaagaagccttcacaagattcttggcgagcccataaagaatgatgcttcaaagtatgttgataacctagataaggctttctctcagaagtatcaagctgatggcttaaggttgaagggctga

SEQ ID NO: 351231 - DNA, 690 bp, Pseudomonas aeruginosa
gtgggttacctgaagaatcattggtggaaacgctggatccgccgccgcggctgcaagctggccggcggcccggccagtgtcggcaagcgcaccacgctggtgctcgaggagcaggtcgaactcggccacctgcgcatcgtcccgccgaggctggagatcggcgcctacagctatgtgcgcagcggcaccgacctgtccctggtggcgtccatcgggcgtttctgctcgatcggctcggactgcttcatcggccaggaaaaacatacccatcccagcgactgggtgagcagccaccccttccagcacaccggcaccgcgctgcgctacgagccggcgctgagctacgcggaaatcggccacgacgtctggatcggacacagcgcgatggtgatggaaggggtcaaggtcgggactggggcgatcatcgccacgcgcgccgtggtcactcgcgacgtgccgccctatgccatcgtcgccgggactccggcgcaggtgatccgctaccggcatccgccggagatcatcgagggcctgctcgcctcacgctggtgggagctggatagcgccttcctcaccggcctgccgctggaccgaccccgggagttcctcgccgccctggaggcgcgcgaggcgccgcgtgcggcgtaccggcggatgaccatcacccgccaggggtgccggctggattga

SEQ ID NO: 351232 - DNA, 669 bp, Pseudomonas aeruginosa
gtgctgcccggttccgcagtgccgctgaggctgctgccattgctcaggttgacggtcggcgtggccggcgcgatggcgtccacggtagtgctgccctggccgctggtgttgcccgccggatcggtggccgtggcgttgaccacggttccatccgccagcggcgtggacggggtgaagctccagttgccgctgccgtcggcggtgacctgcccgatcggattgccgctgccatcggtcagggtcacggtggcgcccggttcggcggtgccgctgatctccgcgccgttgctcggattgaccaccggcgcggccggcgccaccgagtccacggtggtgctggccggagcgctggtattgccggtcgggtcgctggccgtggcgttgaccacggtgccgttagccagcggcgtgcccggcgtgaagctccagttgccactgccgtcggcggtgacctggcctatcgggttgccgttgccgtcggtcagggtcacggtagcgcccggctcggcggtgccgctgagcgtggtgccgttgctcgggttgagcaccggcgccgccggggcttgcgagtccacggtgacgctggcgcccgggctgctattgccggcggcgtcctgggccaccacgttgaccacggtgccgttggcgatcggcgtggacggggtgtag

SEQ ID NO: 351233 - DNA, 306 bp, Pseudomonas aeruginosa
atggacgcgccgccggcggtagggagggagggaggtcagcgcgacgcctccccatccggaacccacagccccttctccgtcgatatccggcgaaaacccgttgaaaacgccgccttcaccggcatagccaggcctgcttggcatgcttccccggcgactcgcggcgccttttcgccgaccgataccggccagcgccaagaagaggcacagcctttgctctggagcctcgacgaagagatccaggccgcagtgcgcaccccgccgtccaccggacggatgcccgacgacaagcacgacgcctcctga

SEQ ID NO: 351234 - DNA, 1452 bp, Pseudomonas aeruginosa
atgaccataccaattagcctagccaagttaaactctagtgccgatacccattcagcgcttgaagtatttaatttgcagaaagttgcaagtagtgcgcgtcgtggtaaatttggcatagcagagcgcatcgctgctcttaatttacttaaggaaactattcagcgtcgtgagcctgaaattattgctgcacttgcagcggactttcgcaagccggcaagcgaggtgaagctaacagaaatctttccggtattgcaagaaattaatcatgccaaacggaaccttaaagattggatgaagccacggcgagtgagggcggcacttagtgtagcgggcacgcgggcaggacttcgttacgagcctaagggtgtctgtttgataattgcgccgtggaactatccattcaaccttagtttcggtcctcttgtatctgcgttagcggcaggaaatagcgttgttataaagccgtctgaattgacaccacacactgcaacactgatcggatctatagtcagggaggcattctctgtcgacctagtcgctgtggtggagggtgatgccgcagtttcccaggagctgttggctctgccatttgaccatattttttttactggtagtcctagggtcggcaagttagtgatggaagcggcgtcaaaaacactcgcttcggttactttggagttaggcggaaaatctccaaccattattggaccaacagcaaatttgccgaaagctgcgcgcaacatagtgtggggaaagttttcaaacaacggccagacgtgcatagcgcctgatcacgtatttgttcatcggtgtatagcccagaaattcaatgaaattcttgtgaaagagattgtgcgagtttatgggaaggattttgctgcgcagcgtagatcggcagactattgcaggatcgtcaatgatcaacatttcaatcgaattaataaactcctgactgacgcgaaagctaaaggtgcaaaaattctgcaagggggtcaagttgacgcgactgagaggcttgtggtgccaacggttttatctaacgtcactgctgctatggatattaaccatgaggaaatattcgggccgctacttcctataattgaatacgatgatatagattctgtaattaagcgtgtgaatgacggtgacaagcccctggcgctgtatgtcttttctgaagataaacaatttgtaaataacatcgtggctcgtacaagctctggttcggtcggagttaatctgagtgtcgtgcactttttgcaccctaatctcccatttggcggtgtcaataatagtggtatcggcagtgctcatggagtttacgggttcagggcgttttctcacgaaaaaccagttcttatagataagttctcaatcacgcattggttgtttccgccttataccaagaaggtgaagcagttgattggtatcacagttaagtatttgagctga

SEQ ID NO: 351235 - DNA, 693 bp, Pseudomonas aeruginosa
atgagtttttctaattataaagtaatcgcgatgccggtgttggttgctaattttgttttgggggcggccactgcatgggcgaatgaaaattatccggcgaaatctgctggctataatcagggtgactgggtcgctagcttcaatttttctaaggtctatgtgggtgaggagcttggcgatctaaatgttggagggggggctttgccaaatgctgatgtaagtattggtaatgatacaacacttacgtttgatatcgcctattttgttagctcaaatatagcggtggatttttttgttggggtgccagctagggctaaatttcaaggtgagaaatcaatctcctcgctgggaagagtcagtgaagttgattacggccctgcaattctttcgcttcaatatcattacgatagctttgagcgactttatccatatgttggggttggtgttggtcgggtgctattttttgataaaaccgacggtgctttgagttcgtttgatattaaggataaatgggcgcctgcttttcaggttggccttagatatgaccttggtaactcatggatgctaaattcagatgtgcgttatattcctttcaaaacggacgtcacaggtactcttggcccggttcctgtttctactaaaattgaggttgatcctttcattctcagtcttggtgcgtcatatgttttctaa

SEQ ID NO: 351236 - DNA, 1269 bp, Pseudomonas aeruginosa
atgagcacagcaaagtcgtacagcatttccaaactgacagtttgggaggcctaccagcgtgtgaaagccaatcgaggagccgctgggatagatgaacaatctattgcccagttcgagcagaagctgcaacggaacctttacaagttgtggaaccggatgtcatcaggttcttattttccgccgccggttcggcaggtggaaattccgaagcaatcaggaggcaaacgcaaactgggtattccaacagtagctgatcgggtggcccagaccgccgtgaagctgcttatagagccgcgtctggactgtctttttcattcggattcctatggataccgaccgggaaaatcagccaaacaggcggtcgagatcactcgcaagcgctgctggaatatgaattgggtggtggagtttgatatcaagggggcttttgatcatatcgatcatgagctgctgctgaaagcggtaaggcatcatgtgaaggacgactggattctgttgtatatcgaacggtggcttaaagcgccgttcgagactgctgacggcgttcaggtaccgcgtgaaagcggtacaccccaaggcggggttgtcagtcccttattgatgaatctgtttatgcactatgcgttcgatacctggatgcaacggacttttccaggttgtccatttgcacgctacgccgacgatgcggtggttcactgccgtagcgaaaagcaggcgtgtgaggtcatggcggcaatcaaggcacggttggaagcatgtctgctgaccatgcacccggaaaagtcgaagattgtgtattgtaaagacagtaaccgcaaagcagcgtacccaacgacgcagtttacgttcctggggttcaccttccggccacgggaggcgtggggtaatcatggacgccggtttaccagcttcctgcccgcagccagtaatgacgcacttaagcgaatgcgtcagcaaactcgcggctggaatatccagcggcaaacaccggccagcctttttgaattgtcaaagcagtacaacgcgaccctcagagggtggtggaactactacgggactttctacagaacggcgatgcgcaaggtcttcaatcattttgacttgaagctccagcgttgggctcgtcagaagtacaaaccactggcggggcacaagcgccgcagtgctgactggctcaatcggatgaagaaagcgtgtccgtcgctgttcgtgcactggaatgtctttggaaatgcagatcgactgggtaacgggagccgtatgagttga

SEQ ID NO: 351237 - DNA, 162 bp, Pseudomonas aeruginosa
atgatgcgtcccgacaccaaggtgcagaaggtctgcctgtatccaaagcccgtcgacttccgcaaatccatcaacggcctgccgttgctgttcgtgttcctcaatcgcacccgtagccaggacaagatcctctactggggtgtgtcacgaacgctggcgtaa

SEQ ID NO: 351238 - DNA, 249 bp, Pseudomonas aeruginosa
atgtccacgaagatcggcttgagcccgttccacagcagcgcgtggctggtggcgacgaaggagtacggcgtggtgatcacctcgccggtcacccgcaatgcctgcagcgcggtgatgagcgccagggtggcgttggcgaagagcacgatgtgcttcacccccaggtactcgcacagggcctcttccaacgcatggtgcatgtcgcccccgttggtcaggaaacggctctcccagatcttttccaagtag

SEQ ID NO: 351239 - DNA, 633 bp, Pseudomonas aeruginosa
atgaagaggatcatcatcctcggcgccggtgggttggggcgtcaggtgctggcccagctgcaggtcgactacggtcacggcatcgactgggtgatcggcgggtttctcgacgagcgcggccccgacgcggtcgcggagtcgctctactacccgtggctcgggtatccggagagcttcgtcgcggagcctgaccaactgttcgtcgccgcggtcggcgatccgctcagtcgccagaagcaggtcgcatgcctgctggcgaagggcgccgagttcgtcgctatccgcacccgctgcacccttggcgtgcggaccagctacggcccgaccttcttcggctacgacgtgagcagcggcgtggactgccgtatcggcgcctacggtttcatcgaccagcaaaccatgctcggccacgacgtggtcatcggtgactatgtacatatcggcccgcgctgcctgctggccggctacgtgaaggtgggcgatcgtgcggtgatcaactccggggcgatgatcgcccgcgacgtcagtatcggcgaagacgccgtggtgggcatgggcgcggtggtgttcaaggacgtggcggccggacagaccgtggtcggcaatccggcccgggttattttcagcaagtga

SEQ ID NO: 351240 - DNA, 2022 bp, Pseudomonas aeruginosa
gtgaagaccgtactctatcccgccatcgcgctgatgaaccggctcagcttcggcatgaagttcggcctgatcagcgtgctgttcttcctgccgctgctgatcaccagcttctatctggtgcgcgatgcctatcgccagttcagcgacacccggatcgaactgcagagcttgacgctgctgggtagcggacttcagatccggcgtggcctggagtccctcaacgatctgttgcaggtcaatgcggtcatcggccagtccggcaaggccggcgatctggaagcgcgcatcgcggacgtccagaaggggctgcgcgggcggctcgaggcgctggcgccgctcagcgaggatggtgcggcggtagccgaattcgaggcccagcgcgaccggttgctcaacggcttgcaggccgtggaggccgaagggtccttgcagggcaagggcgcacgggcggagaagctgctcggtagcgcacaggtattcatcaagttgctcatcgcccaggccgggctcagccaggacagccagcgccaggtgcgccagctcagcgagctggtcggctcgataacgccggaggtgacggcggccatcagcaaggggcgcgccatcggcgcctactccctgggccagggtttcctcaattcgtcctccagcgcgcggctcgacgaactgctgctggagttcgagaaactgcatggcgagtacggcctgaagctgcaggagtccctggccggcagcccaccggcgctcgaggaggccgcccaggccagtcgcgagaccctgaagagcctggggcagttgttcgaggaccgggtgatcgtggccgagacgctggataccccgtggacgcagttctacgatcaggtcagcgcggcgatggacaagacctaccagctcgacgacgccgttctcggctatctcgatacccagttgcaaaagcgcctgcaacaggtgcgcacgcagatgctgttgctagtcgccgcgctggccgtggttttcgccgcgatcctatacctctacggcggtttctacgtttccacccgcgccaccctgaaggatctcgggcgaatgatggagcgcgtcgccggcggcgacatgacggtcagcttccaggcccgcagccgtgacgaactgggcgagctgggacaatcgttcaacgaatcggtggcgaagatccacgacctgatcgagcgggtcagccagaccgtcggcgaggtcgagcggcagaccctgcgcgtcgagtcggtgtcggccgaaagcaaccaggcggtagccgggcaacgcagccagatcgagcaggtggccacggcgatgaaccagatggccgctaccgcccaggaagtggcacgcagcgcggcgatggcggtgagcagcgcgaacagcgtgaaccaggaaaccctcagcgggcgcagcctggtcgagtcgcaggtgggtagcatccagcgcctggccggcgagatcgaccagtcggtggcggcgatcaatcgcctggccagtgacagcgcctcgatcagccaggtgctggatgtgatcaagggcatcgccgaacagaccaacctgctggcgctcaatgcggcgatcgaggccgctcgtgccggggagcaggggcgcggtttcgcggtggtggccgacgaggtgcgcacgctggccaagcgcacccagcaatccaccgccgagatcgaacagatgatcctgcgcctgcagggcggcgtcgatgcggcggtgaaggcgatgggcagcagccaccataccgccgatggcacggtcaacgagtcggcgcaggtgcagcaggcactggagaatatcctcggcgcggtgggcatgatcgtcgaccagaaccagcagatcgccgccgccgccgagcaacagaccgccgtggcccacgatatcgaccagaacatcgtcgagatcaaccaggccggcgagcgcaccgcggaaggcgccagccagaccgaacgggccagccgcgaactgggcgcccaggtgacccagctgaaacgcctgatcggcgcgttccgggtgtag

SEQ ID NO: 351241 - DNA, 480 bp, Pseudomonas aeruginosa
atgagtgagcgcgccacgccacgggtcgcggtgatcgccgacacctcgttgcagcgccacgtgctgcaacaggcgctgctcggccatggttacgaggtggtgctcaacgccgacccggccagggtcgacgacgccgcgctggagtgcgcgcccgacctgtggctggtggacctgacccagcaggacgactcgccgctgctggacagcctgctggagcaggaccgtgcgccggtgctgttcggcgagggccacgcgccggagcggcataccgaacattacccgcgctgggagcggcggctgatcggcaagctgaagcgcttgatcggcgaccccagcgatggcgttggcgacagcctcggcgcattgctcgacgaggagcgtccgccgcgcctggagattcccggcgatctcgcggcgatgccgctgcaggccggcgaagcggcccgcgaggtgtggctgctggcggcccggcggcggtga

SEQ ID NO: 351242 - DNA, 1533 bp, Pseudomonas aeruginosa
atgattgacttgatgaaaattccggtcctcggctttaacacaagccaagaggcattcagaaaatcaaaagagctctccatcccccttggcattggtgcattttacgaaattgccagattagcaataggcgcatcattaggaattcgcagcatccctgacgagcctagtgacgctaaaggtaatgtaataaaagggttccagctattcggcgacgaaaaagcaggcaaccttctctggatcgggcttatcgtgcagcactatatcgacaatagtactgagggcaacacttttgttgacttagataagtttcagtcattggttcgagcgcactggcaccgcggaatatttgccattgatcgcgatttcaccgagtgcggtgaagattatgggaaattcgtatcgcttcttgtcaacagaagagctaacctcgcccaagaaaccagccatatttcgagttcagattcagaatactctattgctgaagcagaggattactctgagaagttaacaaaagcgcttcgagagctaaaaattagcgcagaagttaaagattcaatcagcggaccaaggcttaccagatacaacatatattttaatgatgtatcaaatagagacaagctcgaaaagtcgctggacaagctaggcttgatattgaacatacaagactcctcaatatcaatttcctctggaagcgaagcaaagactgttggcctgaacataccacgcccagaagcatcatggctaaaagtttcgggggcagatataaaaatctgggtaggtgaaaataataactttacattgcctatttttcctggtgtcgacacccttggaaatccatttggatttgacttagtaagtacaccacacctacttgtcgcgggcgcaacaggcatgggcaaaagcgtctgcgttcacagccttatctgctctattctttcagtgcaagactgtcgaagcagagtaaagcttgctctgattgaccctaaacaagttgagctcaccgcctacaataagctaccaaacttgtggggcggtaaaattgcaatgagcgctgccgatgcaatggacatgctcactgaaattgtagaggaaatggagcgtaggaataaacgctttagcgagcttggctatacaaatattcaggatgcaatctctaaggggacgcccatcccttacatagtcgtagttatagaagaacttaccaaccttcttatgcagaatagcggcacagaggaaatcattgccaacatcgcagtaaaaggaagatcttgcggaattcacatgataattgcgacgcaacgaccagacgcaaagaccatcagcggtcaaataagaagcaatgttccttcgcgaatttctttggccgttcaaaagagcagcgaatcaaaaattattcttgacgatctcggtgcggaaaaattactagggaaaggcgacatgctcatcaaggaacgccctggagcgtccgctagcagagttcacggctgctacctagatcgctcccaaattgatgagtatgtcaaaaaagtctaa

SEQ ID NO: 351243 - DNA, 2052 bp, Pseudomonas aeruginosa
atgtggatttccaaagtagaactgaccaacttcaaaagctatcacttccaagcttttactttccccaaaccagcagcgggcaaaaatcttgtacttattgggggtatgaatggatacggcaagacaacttttctagaggcgatatatctttgcctctatggaaaagaagcaacgtcccaccttgcacgcgctggattaagcgacgattcctatggaaagtttctcaaaaacgcacttcatgggaccgcactttcctcaggccgagacttcatgtccgtatcaataagtgtatctattgatgacgaaaacggctatgaatttataagaaaatggtacttccacaaaaacggaagttttgccgaagaagagcttagcctgtgggaaatttcaggcggcataagatctaaacctttagcggcagaagaagatgacctgaaaaggattctggaaaactatttagtacctgctcatcttgctccgttcttcttctttgacggcgaggaagtcaaaaagaatgccgatcaaaatcaaaccgagttcatcaaaatggggatggaaaacctactcggagttgtacaccttcgcggcctccaagaccgcctaacaaaatactctgccctaagaagccaaggagtcattggcgttgataccgaacaacttcagaataatgtaaataagctagcgtacgaccaaaaccagcttgcagaaacagaagcagactacaagaccctgcaaggcgaaatcagtcgccttagtcaggcaaaagacggcatacagcaacgaatgctcaacattggggctggcggtggtgacgttcgtcatattgaagacttactcggcgaagaggctgcaaaaaaaacgcagcttaacgaagttaaggaaagtttatctaagctactctataccaagcttccattccatctagcttctcaagaaacactttccaagctgaaaaaacagcttagcgccgaagacatccttatcgactggaaggctaagaaagacgcacttgaaccacaaaaagggaaattcacaaactccctgaatcaattaataaccgatcgaaaaataataataaccagcgacagcaagcagcacttgtttgatgcgatatccgaggcctgggaaggaatttatactcctttgccagatggctgcgctgatgaactccaacactactaccttgactctaagcagcgattcaagatcgcagaaatgtttgagcaaataaaaatcagctcagacgacatacagcgacttttggaatccgaagaccagcttgttaagcgcataaaagcacttgaaaacaagagagttcagcttcaaggcatcatggatgacggtcaattgcaagcattgatgaatcaacttaacgatgttgattcccaacttgatcagtccaaagaaaagttagcggcgacacagcgcaaaattgacgcaataaccgcagaaataaccgaccttcgctccatcatcgaacggctgaataagagcctgcgggagtttgaaccgcagaaatcctacactcaaaaggccggacgagttctagagtttattgaagaccttctcccagagctatttcgactaaaaacagaagaaatatccaactctgtcacagagatgtttaagcttctgacccacaaaaacatggtcgcttccatcagtattaacgagcttggagagtctgcacttttagacgaagcaggtaacgaaataaaatttgatttgtctgcaggcgagaagcagatgttcgcaaccgcgatgattgctggcttagcgaagacatctggatttaatgtgccgctcattgtcgacacccccttgggcagactagatagcgagcaccgagaaaagatcatcaattactggatttccgaacccaaccgacaagttatactcctaagccaagatgaagaaattggctttgccgagttcgcgaaattccagaatcaggtctctaaaacctacttacttgagaccaccatcctaggtcaaggcgtaggtaaaaccatcgcccacgaaaacaaatatttcggaccaaaaaatgattga

SEQ ID NO: 351244 - DNA, 201 bp, Pseudomonas aeruginosa
atgatagaagatggacttggagagctgtcactgtggaaagacgcggccgcctcaaaaattcttgaagagctttctcaaaagcatagtgtgccaatcagcgtactaaaagagcttgtcagcctacagcgtgaaaacgcacacaaaggcaaagctagaggcataaatgacaatattgatatgatcctggatcaaatggagtag

SEQ ID NO: 351245 - DNA, 1182 bp, Pseudomonas aeruginosa
atgcagcttgcatccatagaaacaatttatcaaagatgcagccaagatagattaatgaaaaatacagcggaaaaccttgtgtacgtacccttagagcaatggtgggacagcctcctcgaagaaatggcggatgagtatctagatgaagctcataatcacccatggatcgttggtttttctggaggcaaagacagcactttggttgcgcatgctgcctttgagatgctttcaagactgaggccaagtcagcgaaatagagagattcatatagtatccaacgacacccttgttgagagtccactagttatctctcacctcgacatggtgaccgaacagataaggcttgcaggagattcgttagccctacctatcaaagtagtacgcacataccctgagccggacaaaaccttttgggtcctcttgataggcaaaggttacccaagtcccaaccagacaatgagatggtgcacggatcgtttaaaaattcaaccaacgagctcatacattaaagagaatgtttcaagaagtggcgctgcaatcgttgttcttggtgtgcgcaaagatgagagcaataccagaaaaagatctattgaaaaacgagtactagttcgtggctcaaggcttatagcacacgaagagttaccaggcgcttatatatatcgacctattgttgacctagtaactgaccaagtttgggaagcactagctacatacacccctccatggggcggcacacacagagccctaatccagctgtacagagacgcggagggaggtgaatgtcctgttgttcttagcaaagcagaagcaccaggatgcggaacagcctctagtcgctttggctgttggacttgcaccgtaatcgagaaagataaaagccttcagggatttgtggatagcgggaaaatacagtactccgccttaatcgagttcagagactggttaaaagagatcagaaatgatcccgcccgccgccaagttacccgcagaaacggcaaggtgacattcagcaacggcaagcatgtacccggcccgttcacaattaatacccgactagaaatcttagaaagactactgaaactgcaagaaaaatttggcgacaggctaatctcagaatctgaaatagatgagattaaaaaaatttggtcagaagatattgcctctaaaatggagatagcatga

SEQ ID NO: 351246 - DNA, 219 bp, Pseudomonas aeruginosa
atgaccgagacatttttgatcgaagagcctcttttcatcacagaagaaattgaagcggaaatggtcaaagccggctatgtgtttgaaccgcctcagcacgtgtctttccaggacgcccaagatctggcccaaggaaagcttggcgatgatccccatgctgccagccgaactgattcggcggccctttgtgaaggcaaactagacgtcgtagtagagtag

SEQ ID NO: 351247 - DNA, 402 bp, Pseudomonas aeruginosa
atgacctggcgcgtcggcctgatcgtctttgtgctcctggtgatggtctggacggccggctggtggggcggtcgcgaggctggcctgtccgatgggcgcgccgcctgcgccgacgcacagacgcgcgcttatcgcgacgtcctggagcagtcggcggcacaactgaagacggtccaggacaccagcgcggctcttttccagcgcctggccaagcgggccgacagcgaccaacaaactactcgggagcttcgccatgccctggccgaaaccgctgctgatcgcgctgcctgccgctttcctgctggcgtcatgcagcagctcgaaaccgcccgtcaacgtgccgccaaggccactaccggcggccttggctcaaccgtgcccgaccccggtggcggtgactga

SEQ ID NO: 351248 - DNA, 417 bp, Pseudomonas aeruginosa
atggcccttcaacctcgcggcatccgcaacaacaaccccggcaacatcgtctggtcggcacgcaacaactggcagggccaactcccccacgacccgcagatcgaaccgcgcttctgtcgtttcgacacggcgcataacggcacccgcgcattggccaagctgctgctgaactaccgcaaggtctatggcctgcgcaccgtcgaatcgctgatcgcacgctgggcgccgtcgaacgagaacaacacccgcgcctatgcctcggcggtggcccgagcgatgggagttccgccgcaggccagcctgcacctggaccaggccaccctggtcgctctggtgaccgccatcattcaccaggaaaacgggcagcagccctacagcgccgagcagatcgcccaggccgtgcgggaggtgctgtga

SEQ ID NO: 351249 - DNA, 471 bp, Pseudomonas aeruginosa
atgcgcacctatccgcaattcgggcagcgctcgcaacggaagcaccaaatgcctgatcccgcatccacctcggccggcagcgccgcgctgctgaaaatgtttggcatccatatcagcgcgggcgccctggccgccgccctgggcttcctggtcctgtggcccaggaccatgaaagaggggtttgcccggctgttctgcaccatcgtcgcgtccagcgtcttcggcccaatcctggtggtttacctgcactccaaccgccccgagctgttcgagtccgcccaggtggtggccgggctctaccaactggagccagcggtcggcctgctgttcgtttccgctccgctcctggtgattgccggtctgcccgcctggtggctgatcggggcggccctgcgcctgtttgagcgggacggcgattcatggctgggcgcgttcgcccagtgggtaaaacgcaaactggagaacaactga

SEQ ID NO: 351250 - DNA, 360 bp, Pseudomonas aeruginosa
atgtcttgtctcagtgctaaagctgttcttgaaccgctctacaacttcctacagatggcctatggtcctgaactcaagtctttggagcggattccgttctccactgaggctgagcgctgggtgtttactcgacttgcagaagcgcctttatcgatcaaggaagccatacagttggagccggatagaaagcgcgttcttgctctgctgctgacgcagtacgtcatgtttctgacgatgtttgatcatctgaactttgagcctggctttctggttggtacgtcggacacgactcttggatcgggatggttggactacattggcaagcaccgctggccgttcccgcagatgctgcctcagtaa

SEQ ID NO: 351251 - DNA, 384 bp, Pseudomonas aeruginosa
gtgactgaatctaagaagctgcgcagtgctggagattttccgaacaaatcggctgtggagtacgcgaccatccgcgtcgagattcctcaccgccttatcccatcgaatcttcggaatccccattacagggatgaggacatcgttgttgggctctatgcgagccccactggccgtctttcttacaagacgctttatctcgacagcatcgagttggctgagcgttttgcagcacatctccaccaggtttttcagagtcggccctatgccagtgagtacgctctcaaggtcgaggtgatcaccactacccagaaagtcaccgcaaccaaagggaaggccaagcattctgctgcggtggccgaaatgctctcgggaaatgccccctga

SEQ ID NO: 351252 - DNA, 1575 bp, Pseudomonas aeruginosa
atgtctgacactcaattccctatattgggcactgctgtaccacctatgctcggacgagggaccattctgcaaaaaatgatgggcgcgctgactaaggcgactccggatcatctgcaagtggtcgggccaaggtttgccggcaagacggtgcttttgcatgagttggctgcccgtttgcgtcaggctggcgcaccctactcggccgtcctgttatgggacttaggtcatcagacgcctgggactgatgcactcttcatgcaacgcttagccagcgagctatctgcagcattaaggggcagccacaccgactatgccaaccatctcaaggcctctgaggacaacccttaccaggacatcgcagaggtgctggatttactgaaagaagagggcgtcaaagtactggtaatcatggatggctttgataagccactatccaatgggcagctgacgcgcaatctatgggatcagctgcgggaactggcgcttaaacccagcctcagattggtcactgccagtcggcgcacattgcgtgacttgattcgcaatccagaggctcagactagcgatttctggaatatcttcgagccgaatccggtgcgtgtgggatgcttcgacgagagcgacctcgcggctgttttggaaatgatgccggattggcagctggctgcaggtgctcaaacagagctttggaatgcgagcaatggctttccggtactaatgctgggtgtactcaacacagtatgcgagtcttgtgggccgggggctgtgagtccagtcgccatgcaggctgcctgtgagagtgcattctctacggtttctgacaagctggatgctctctgggccgattgccccccttcctctcaggatctcctgcgacgcgttctagatgaaagctctgtcgtacgggctggcatcgttgccgcagatgcagagacgctgactgatcgtgggttcgtacaaatcgtggcaaacaagctgcagagaccctgccggctgcttgtgcgttaccttgaggagcagccgcacgagggcagcgcactcgttcgtttgttcgggacggatgatgcctatcggaagaatctcaaaggggtgctggagcgccggatcggacagctcggtgacatcgatccaacgctgaagcgctatctagaacgcggcacagaggagctgccagaccaccccgatatattcttgagcaacgtgcgcggcattgtgaatcaggcgtttgagctgatttggaaagctgagacgccaggcagacgcattccatctgagtggatggcggtttggaaacgaaacgatgagcgtcggctcgatgagtgggagacgaccttcccgcagggagttcatcgtgtgcgtctgctcaacctcatgacaggcacagacaggagtgctcggtgtgcaaagcacatcacgaaaggaacctttgtcttgatgaatgcggtgcacgcgtttggagacttcgggcaacaccaagaaggggcgccgatcgacccgggcacggcgtacgcggtccttcatctttgtgttgagctgtctgcagcactcgctcgagagttgccattgaacgcgtaa

SEQ ID NO: 351253 - DNA, 3978 bp, Pseudomonas aeruginosa
gtgagcatcgtgcaagacaagcaactgcgcgaagccacctcccagtggattgctgcgttggatgtgctgcgcagcgagatgcctgccagcgagtctaggtcgctgatacgagaagtgttcgccgcctttttactgctgcgctgggctgatctgcaggacgccgagcaggaagcgatggcggtcttcgaagaccgaacctaccaggcgctgttgcccgaaccgctgcagtggcgacactgggtgcggctggatcacgcttacgctgtcgccgagaggctgcgggagctagcgcattatgtggatggcttgcgcggcgatgcgacacacccagttgcagcctatctgcacgcgttagctgagccgttgcgccgcgcgctgagggtgaacttcgcctacctgcacgactttgtgcgttgggtggccgatctgccgttcgagactccgagcgagcgtcgtgcgctactggaattgttcgatcaggtcatcgccgaaaccagcgatccttacgatgggcagtattccacgccggtcaatatcgctcgcctcgttgcagcgctggcgaacccacaaccgggcgagcgcatctatgacccgtgttttggttctggcaacttcctggtggctgcttggctgcaggccgagcgcagtcgcaatgaactacttcgccccggcgctttgctggaggtagcggggattgaaatcaatgccagcgccttcctgatcggcctgacgcggatgttgctggcgggtattgaaacgccccgcttggagctgggcaacagcctggaacgagagccgctgagcagcccgggccgccagggctttgatgtggttctggccaacccgcccattggcgctaagaccagccgcgagccatggcggtaccagcacttcgctattgcgaccaacgacagtacgggcctgttcattcagcacgctctgtctcagctcaagccttatgggcgtgcggtcatcgctgtgcctgaggggtttctgtttcgtggcggggcagagcgagagttgcgtcgctacctgttggaacaggggcaggttgaggccgtaattgggcttccagctggggcgtttgctccatataccagtgtgaagggcagtttgctggtgctcagtaagcaaggtggtgctagccgggtacggatggcagatgccagtaccttgtttgagtcacggtctggccgcaaagctccgacgatccgagcggaggttgccgagcaactcgcaagcgagcttcgccgtcccgagcttcgaaagccaatcaaggggcacgaagaaaatactccggataggggcatgattagccgcttctcttgggagctcggtatcagtgagcttgaagctgcggaatgggatctcagcccacgccgtcgtgagaagggtgggcttgatgacctgcttgctaatctcaaagaagccttgggcgaagctggtgcagtggtttcgctcgccgaggtggctcagattatggccgggcgatccattaagtctgctgatctgctgggggagcccccaactgagcgagcggtgggctatgtccggatcaaagacctcagtcaaggaaaggttggacgcagctcgagttggctgcgcccggatcttgccagcgttgaacagcgttgggccttgctgccgggtgacgtgctggtatctaaatccggcaccatcggaaagacagccttggtgcgcaacggcgcagtgggtgctattgcggctaacggtctctacgtactgcgggcggatcaggagcggctcgacgcaggttttttgttggcttatctcgccagtcctgcttgccagaactggcttgctgctcagtcacgcggagcagtgattcaacacctcaaccgagccgtactcgatggcttgccggtgcctctgcctccactgcagatgcaggcgcgtgccgctgcgcagttccgcgagtttggtactgatgcacttgcgtttctgtcccaggcaacggggagcagtgaatcagatcgcctcgccgcatggctggcggagctagatggcaaggtgcctaagtttttaggtggcctagacgacacgccagcactcagccacttcgaacccatcgtcgccttggtcagtagggccagaaactgggtggctcatgagcaagtcagcagccaggctggacgttggctaataccgctgaaccaggcactgcttcctctggcgggcgttgctcagattccacaaggtcctgggctgttgagtgtgttgcaggacgctgagcgaggggtgcaagccacactagagcagaccaccggctacctaccctctgaatcgcaggcgcgtgccgttggcgagcgtctgcgggagtggttgcgcgcggcgattgtagatctgatcgattcgaatgggctgcaggtgcgtacctcgccgggatcactggtggcgggtagcttcgccgagtttaccgtggagctggaaaatttcggggccttgccgctgcgcaatgtgcgtgtggaaactcagccggattggggcatcgtcgagctaccgtatctcgcagagcggggggcgttagcgatcaatctgcgaggggatgtttccaagcaagggggcgatctagcgctgcgcctgatttggcgggcacgagccttgtcggggcaggaagtcgatggggaaatcgagttggtcatccgcgtggccgagcccgagctagtggccaacactgtggcagccgaactgggcggaagcccctatgtgaccggcagcccgctggagcctcaacatggtcatagcgttttctacggccgcgacgagctgctcggtcagatcagccgtcaaattgcgacccatggaaatgtggtactgcttgagggtaatcgccgcgccggcaagacttcgatcctcaagcatcttgaaggttgtttagcgatccctggttggttggcggtgtatgccagcctgcaaggggctgaaggcgctgcgcaagtcgtgggtgtgccgacggccgaagttttccgcgagatcgcccgcagcatcgctacggcgctaaccaaattgggcatcgacgtaccgctgcccaatggccagatgcttgcagccggtaagccccctttgggcgtggcgcgagcctgccgtgagggcatcggtgacgagtcaccgtttaccgaattccgcgagtatctggagctggtgctgaccgttctggaccatttggggcttggcctggttttgatgctcgatgagttcgacaagctgcaggagggcatcgacaacggggtgacctcaccccaggtgccggagaatatccgcttccttatccagacctacccgaagttctcggcgatcctgaccggatcgcgccgcctaaagcggctacgcgaagagtattggtcagcgctgtacggactgggaacgagcatcccggtgacgacactcgatatggaaagcgcacgcaaggtggtcaccgagcctgtgcgtgatcagttggccttctccaaggaggccattgaacgggtgatcgaggtcactgcacgccacccttacctgatgcagtgtctgtgcaaccgtgtgttcgactacgcggttcagaccaagagcaggtcaatcaccgcaggcgtggttaatgacgcagcgcatgcgctggtgcgggacaacgagcacttcgccagcttgtgggattactcagccctgggactccagactggccgccatcgccggcagttgatcttgctgctgtgtgcactgaacttcaaactgggaacgcacatcggttttggcactttacacgaacaattggctcaatccggcgtggacgtcaacgatgaagcgcttgatgccgatctgagttatctacgtgaactggagcttatcgagttctcaggcgaaatcggcgatggtgaatatcgcttggccatcccgttaatgacggactggatagaacaacaacaggatgcagacgtggtggccagccgcgcgcgcacggaggcggaggaagaaaatgtctga

SEQ ID NO: 351254 - DNA, 1179 bp, Pseudomonas aeruginosa
atgacgttcccggcgacctggaaaacccacaagctcggagagcttgcccagtacattaatgggaaggcgttcaagccggaggactggaagacctctggcctgccgataattcgcattcagaatctcactgatagcagcaagccgttcaactactgcgaccagcccgttgaggcgcgctattacatcaacgatggcgatctgctgatttcctggtcggccacactcggatcattcatctggaatcgtggcccggctgtgctaaaccagcacatcttcaaggctatcccgaacgatcaactggtagagcgggactttctgcatttcctgatgctggaaaccctggaggagatggccagtcacgcccatggcattgccatgaagcacatcaccaaaggaaagttcgaggcgattgaagttgccattcctccgctgccagagcagcgccgcattgtcgcccgaatcaaggaatgcatggagcgagtggatgagattgggggcctcacaagcaaagtgcagcaggagtctggttaccttccccaagcattccgcttcgatctgtggaaagagtgccttgaccgccatccgcttgtggagctccgaactctcgtgacctcggcaaagaacggcctttacaagccacgcgagcatcatgggtctggctcgatcttactgcgtatgttcaacatcaatggagcccaattcgacacgactcggttagagcgcctaaatgtcactgagaaagaggcaagtgactatgcgatcagcaatggcgacatcatcgtcagtcgggtgaatagtcgagagcttgttgggaaatcgacagtggttgaggggctcgcggaagcagctgtcttcgaggccatgctgatccggctccggattgatgctgcgaaggctcggcaggatgttcttgcttggctgatgaatgcacctcagtttctccacgacctgcggatgcgagcaaagcatgcaatcggtcagtcgagcatcaatcaacaagatttgttgggctcttgcctacccctgccgccgctagatgagcagtggcggcttgcggagaagtacgccgatcttggagagctagcggccaaccttcggaatgaatgcagtactcgatggaaagcaacggacggattgcgcgaagccatcctgcgtaaagccttcgccggggagctgtga

SEQ ID NO: 351255 - DNA, 1482 bp, Pseudomonas aeruginosa
atgacccagaacaacaccgatcaccgccgccaggaagtgcagcagatcgttaaaaacgcctgcgatcagctcaatgctgagggagtggatgcccgcaactacgtggagcagcttgcctggctcttctttctcaaggccttcgacgaaaccgaaacacgcaaagagcaagaggccgcctttgacgacaaaccctacgagcgccgcctgactggaaattacgcctggagccactgggcaaaggacaccgaccaccccgacgaaatgctcgagttcgtcgacggcaaactgtggatcaaactcaccagccccgacccgaccataggcatgggcaatgacgcgttggcccaacgctttcgccgcatcttcgacaacgtgcgcaattacagccgtcggggcgtgagcttcgccaaggtcgtgcagcaggtcgataagctgcacttctccagcgagactgacgtcattgtgctgtcggagatctacgaagacttgctcaagcgcgtggcggccgactcggccggctacgctggtgagttctatacccagcgccacatcatccgtgccatggtgcaagtggttcagccgcaatccggcgagcgtgtgtacgacccctgcttcggcacggctggtttcctgggcgaggcggccgactacttgcgccaccacagcaccttgagtggcaatcagctcgatgagttacagcataaggccttcttcggtctagagctcaaaccgctgacttatctgctgggctcgatgaatatgatcctgcatggcatcgagggggccaatctggagctggctaacacgcttgaagtgcacagccaaaacgtggccgagaaggacaagtaccaggtcatcctcgctaacccgccctatggcggcaagatggcgcaggagctgcaaaccaactttcgcgtgcgctccagcgcaaccgagtgcctgtttctgcagcacatcatggccaaccttgccaagggcggtcgcgcggcggtggttatccccgagggtgtgttgttccgtggcggccctgatcagaaggtacgcaaggatctgctagaacaattcaaggtgcacaccatcctgtcgctgccggcaggctgctttctgccctataccggcgtcaagaccaatgtgatcttcttcgaccgcgcacaagacggatcgggcacggagtctgtctggtattacgatctgaccaacgacggcttcgaactcaagcagacgcgcaagccgattgcaggtaaccagctgcctgacttcttggccaagtggcaaggccgcgtggagggcgataactcctggacagtgcccctgactgacatcgtggccaagggctacgacctctcggccaagaacccgaacaaggtggacgactacgagcatcggcctgcactggagctggtgcaggccatcaagaccaaggaagcccgaatcaccgagttgctggacgagcttgagtccttgctggagtgtgctgaatga

SEQ ID NO: 351256 - DNA, 2292 bp, Pseudomonas aeruginosa
atggcacgcaacgaacgactgacctgcaaggaactgatcgagccccaactggcggcgctgggttggtcatggcaggaacaactgcggatcgggccgggacgggtcaacctcactggcgatgcgatgtacgacgaaacacagtcgatcatcgcggattatctactgcgcttcaaaggtgtgcctttggcgattctggaggctaagtccgaaagcgcaagtgcggctgacggcatgcagcaggcttcgcgctacgctcgtcgcctttctctgcgcttttcgattgcctcgaacggcaacgactggattctgactgacaacgaaaccggagagttcgagtcgctgagcgctccgccgtcggctgaagagcttattgcccgcgcggggggcgcagttaactggtccctttgggagggcgcgttcgccgctggctaccacatggatcaggtttcacgcaaaggcgtacgcccgtatcaagatatcgccatcaacaaggcgctatggcagttcgcccaaggcgatgaccgtgtgctgttgctgatggccaccggcaccggcaaaaccttcaccatcttccagctcgtttggaagctgctcaacggcaaggcgctcaagcgcgaacacgtgctgttcctaacggatcgaaacagcctcaaggaccaagcctatcgcgctttctcggccttctcggcgtcggagcgcgtgcagatcgacaaggataccgttgctcagggcctgcacctggtcggcaaggtcttttttgcaaattaccagagtctcgatgaggaactggatggcaagaaagtttatgaacactacgaccccgatttcttcgatctagtagtgatcgacgaatgccaccgctcgggctttggggactggttcggtgtactcaaacatttcggcagcgcgttgcagctgggcctgacagctaccccgcgcgagctcgaagagggcgaccgttcgctgaccgcagaagaaaagcgccgtgacacgcagcactatttcggtgatccagtctttacctacagcctcaagcaggccatcgaagatggcttcctggtgccctatctgcttgaagagcgcatcaccaacgtcgatgaagagggttacaccggctccgacggcaagcgctacaccactgcaaacttcgagcgcgatattcgcatgccggatcgtacaaaagccattgccgaagacctctgggaggtactgggtaagtacgatctgcgcaatgagaaaaccatcatcttctgcgtggacgacacccacgccgcctttatggcacaggagctgcgccgcctttcgggtagcgccgactacgcagctcgcatcaccagggctgagcgcaacagccaccagctcgagcgcaatttcgctgtagtggggcccagcaaccctcgggtggctgtcacggtggatcttctcaccacgggctttgatgcgcccgatgtgaagaacgtcgtcttcgtacgcccgttgcgcagcgccatcctctacaagcaaatgaagggccgcggtacccgactgtgtgaggacattaacaagcgctacttcaccatcttcgactattccggtgctagccagcttgaggatgccgagtttgacggtcaccctgcgaatcggcagaaggccgtctccgccagcagcaaaccaaagaaaaagggcgacgacggtacccctaagcaagtgggtaacggtgtttcggtggtgatctccaccgagaaccgctacgtgtgtctagccgacgggcgcaaggtgccgttcgaggaatataccgagcagtcacgcgagttcatcctcgacgtcagtcacaaggggatggatgagttgctgcgcatctggatcgacaaaggcagccggcaggagctgcgtgaagccttgcgcgaccgcgatatttacccgtctgctttccggcattacttagaccttcctgatgccgacgacgtcgatgtcctcgccaagattggctttcagctgcctcgcgtgcccaatcgtgcggaccgcgccaataggctgtgggatgaagatcagttttggctgttgaaccagatgggcgaagccgagctgcctgagagccagcgcttcaaaacccatctctggcaaaccgcactagaccactaccgtcttttcggcattgacgacctcgagcaggcacgcacctacagcgccccacagttcgccgaacagttcggcagctttaccacgcttacccagcgttatggcggtccagccctgctcaaggccgacctcgaactggtgaagcaacgcctttatgtgtccatggccgcctga

SEQ ID NO: 351257 - DNA, 1494 bp, Pseudomonas aeruginosa
atgtctatcttgctagcatggttgggcaatgcagatttacgcgcatctgaggcccaggatcctacagacgaagggccgattcttggtgccatcaacaccttgccctttaacgaggtgcacctgctgtcggatcatggggtgtctgcttcaaacgcttatgtgaagtggctgaagaggcaggcgagagtcggcgtgaccttgcatttggttgagctgcccagtcctaccaatcacgaagcgatttatcgtgtggcgtctcaggtcgctgagttggtatgccgagagcaccctggatcggatccaacctatcacctgagtcctggtacgccagccatggcgtctatctggattctgcttgccaaaacgcgctaccccgctcgattgatcgagtcctccaaggagcagggggtcaaggaagtctgcatcccgtttgagttgtcggccgagtttgttcccatcgccagagaggccgatgacgtgctgacgaggctcatgcagggtctgccgcccgagtcgccagctttcactgccattattcaccggtgcgcagttatgaatcgcactgttgccatggcccaccgactggcgttgcgcgacgtgccagtgcttattcagggcgagtcaggaactggcaaggagctattcgctagagctatccaccaggcaagtgctcgtagcggccagccgttcattgccatcaattgtggtgctatcccgcaagagctggtggatgcggagcttttcgggcatgaaaaaggagcgttcacaggagcggcgactgcgcgtgccggctactttgagtctgccgatggcggcacgctgttcttggatgagattggtgagttgcccctggcgtcccaggttcggctgcttcgggtgttgcaggagcgcgaggttacgcgtgttggtgccgccaagccgaaacccatcaatgttcgcatcattgcggcgaccaatcgtgttttgcctgcagagattcaggtggggcgctttcgggaagatcttttccatcgactcgcagttggtgttctgctgctctccccgcttcgcgagcgcgaaggtgatcttggtttgctgatcgattcgatgttggctgctatcaatgccgaggcctcatcacagcctggctataagcataaagaattagatgcttctgcaaggaatattctgattggtcatccttggccgggtaatgtgcgcgagctgcacaacactctacttcgggccagcatctgggcctcgggcgacaaaattaccggcgaagacgtcgctgcttcgctggttatgactgttctgcccaaaggcgactctgtgcttggacgcccgctggaacagggtatttccttgccagatctgatggcggaagtggcgcgtcactacctagagcgcgccatggctcaggcccatggcaacaagtctgaagcttctcgacttttgggcctaggtagctaccagaccctcagtaactggcttcagaagtatggggttggataa

SEQ ID NO: 351258 - DNA, 2103 bp, Pseudomonas aeruginosa
atggtcagtgttgcattttcggacaagtattttgacagcctgctgaagcttacgccgaacgagcaagcgcaggctaataaggcggtcatgctgtttcagcaggatccgcagcatggcggtctgcactacgagaagctgacagctttcagggatgacaaactgcgttcgatccgggtgaaccaagatgttcgtatcatcctggctacagtggagaaacagaacttatatctgatgctctacatcgatcaccacgagcaggcttacttttgggcggcccgtcgtaaggtcgagatcaaccccaatacaggcaatctgcaagtatttactgtccaggagcaagaattgattgcggccgagcagcctgccatggttacccagcctgggctgtttgatgctatccgtgaccgtcaactagtccagttgggagtgccggaggaggccttgccactggtacgtagcatgaagatcgaggctgatctggagactgcgcgcctaaatgagcagatcccggcagatgtgcatgatggcttattcatgttgatggctggcgccagcttcgatgaggccttcaacgaggttattccggcaattacacagcaggtggataccgacgatttcgctgcggcattggcgcgccccgagtctcgcgcatgctttgttgtggcagaaaatgaagaggcactgcaggaggtgctcaatcagtcgctggagaaatggagggtatttctgcacccagcacagcggcgtttagtagaaggtaagaagaatggcccagtgcgagtgctaggcggtgctggtaccggaaagacggtggtggccatgcaccgtgccaaatggctggcagagcatgtggctactcctgctaataaggtgctgttcaccacctttactcgcaatctggcggcggatatccagcaaaatcttaataagatatgcagcccggcccaacgcgagcgtatcgaggtaatcaacctggatgcttgggtgatcagctttctgaagaagcagggctatgattacggtttgctaatgaatacccagcaggagaggcagctctgggagcaggcatactccgacaaaccggctggttctgggctgagtctggcgttctttcaagaagaatgggcgagggtgattcaacctctatcaattatgaccgccgatgagtacaagacctcctctcgtatcggtcgcggtacgccactgaatagacagcagcgtatcgatatctggcctgtgtttgagcgttatcgacatctgctgtcgagcaattacctcaaggagccggatgacgcttatcgcgatgcgcgccgactgcttgaaggcagccctgagctgcgaccggaactgtgcgcggttatcgtggatgaggctcaggacatggggacccaggcattcatgctcatccgtgctctggtgcccccaagctctaacgatttgttcattgtcggcgatgggcaccagcgcatttatggcaaaaacaaggtggtattaggccagtgcggtattgatattcgaggccggagttctcgcctgaaagtgaactaccgcactactgatgaaacccgacaggtcgcggttagtgtgcttgagggggtgtctgttgatgatcttgatggcggtgaggatacccaggcttattaccattcactgatgcacgggcctagtccgtcaatcaggagctttgccagcatgaccgagcaggtacaacaggtgatagaagacctgctggccaatgatctggccgcagataattgctgcgtgatcgcccgtacccgcaaggaattagtggaaattcaggctgaattcgtgaaccgtggtcagcgctgccatatgctggatcgcgacagtactcccaccccagatggagccatcaacctagcgacgatgcaccgggtgaaggggcttgagtttgatgctgtattcatcctttcggcgaataaagggttggttcccctggactttgtggttaaccaggcagctgatttggtggccaggcgccagaaggaaaacgaggagcgtgcgctgatatacgtcagtctgacgagggcccggaagttggcgtttgtctatggatatgggcagatgagtgagtggttttga

SEQ ID NO: 351259 - DNA, 6438 bp, Pseudomonas aeruginosa
atgattcccggcttgttggccagcgaagtatccgctggactgcgtgaattcattattaccggcttcgagactgaaactgccccgttccggggggagttccgccgtttggttgaggagcagcaggacggcgaggcttttattaaagggccttacgttagtgttggtctgccatttttgagcggtcagtcaggctgtgacttcttctctggatttaagactgagttccccccgcatgctcaccaggagcaagcatggcgacgcctttccgcgaatggcaaagcagccaatacactggtggctacgggcactggctcgggtaaaacagaatgctttatgtacccggtgttggattactgccagaaggctggcaagccaggggttaaggccattgtgatttacccgatgaacgctttggcgacggatcaggccaagcgttttgccaaagaaatctatagccagccgtccctcaagggactgcgtgttgggttgtttgttggtggtgacggccaaggcctcaaggtcatggggcctgatcaagtaatcacggataaggaaaccctgcgtcagaacccgcccgacgtgctgctcaccaactataagatgctcgactacctattgatgcgcccgcaggatcagaagctttgggtgaacaatggggctgacaccctccgttatctggtcgtggatgagctgcatacctttgatggtgctcaaggaacggatctgtcgcttctgatccgccgcttacgtgcccgctttgatctggcgccggagcgcctgatctgcgttggtacatcggcgacactgggaggggaagaaagtgcggctgggctacttcagtatgccagcgatatattttccgctcctttcccaccggatgcggtgatcactgagcagcgccagtcgccggatgagttcatcgacacactgtcgtttctcaacctgaacccggacattggtccagagacgctgcagatcgcgctgcgccaaggcttgaatgagtacttgttggccgcttacgagttgtacttcagcaagcagccggagatggatctagagggcatgccagggcgtatagcgcttggtaaggagctgaaacagcacgggcaattggccaatctattgcgacatttgcggcagggtgacaagactccaaccttccgagagctggcgaatcgtttggccgctcagattccaaagcgttttcaacgtcagccggagcaggcactgattgctcttttgtctttggcagctcatgcccgggcggaaacaaaattgcccttgatgcagctgcggctgcagctatgggctcgagagctgcgacgtattgttggtaccttgcgtgagcctgttctcgcagatgatcttgagatcgaggcggtcgacagtatcaagcgcttgccgcccttgctggcgtttggtgatgacccgcctgccagggacaagcagcagattcgattgccactcgtgcagtgtcgagagtgtcacggtactgcttggttgacacggatggaggtggcgcagccagtcaatcagcaaatcgaattggatctggccaatatctactcagcgtttttcagcaatcaccaggaaactgggttgttaatgccttgggtgcctagtggtgataagcaggtgagcggcccaaggttgacccattttcgggtttgccgggagtgcggctttaccgcagggctggaacatagtggcggctgcaaggcatgccaggctggaaatgaagcgctggtgcgtgtaagccgccctgatttgctcaaggaggagcgtgtcggccaggtaaaccgggtcgttcatcagcacaactgcccgtattgctccgccaaagcatcacttgtggtgttcggtgcgcgagccgcgagtcttagtgcggtggctattcatcagctatttagcagtcgcgacaacgatgaccgaaaactgctgacctttagtgattcggttcaggatgcggctcatcgcgccggtttctttgcggcccgtacctggcagaacaacgttcgaatggcactgacccagctactggaaagtcatgtagggccggtaccgctcttgcagataccggagttgtttgaacgttattggctacaacatgacggtcaccagggatatttgacgctgccgtattacctgcgtgagttcatgccgccggacaagcgttttgatggtgactttgagtatttcgagcagtccggtgaggtacgtaatccggcgcggcatttgaagattatccgtaatcgcatgctctggcaggtcctggaggatttggggtggcgtgcgcaggttggtcgctcgttgaatcgcttaggcattgcagcgctggagtggccgctagataaggtgcagcaggctgcggagctttgggcgactgaggtaaataatacgctcggctatcggattgcttctgaggtagcccagcaattcatgcaaggtctaatgctgcatctggtgtatctcggggcctttggattagaggacctcgcgagctatcgctggagttctggaaagtcttatctgcttaaccttattgattatgcgccggccagtggtccgtctgccgctcggccacgttatccggcagctggtaatggtgatggctttgaaacgctttctggagggcaaagtgccacctggtaccagcgctggcttgcctgcctgaatccgggagagctggttgatcggaaacagttggactcggtattgggtgcttcgctcaaggccctttgctcgactgggcttctaaaggaggagctgagtgagcgtggtgtgcagttgtgggtggttgtgtctgatttgctgcaggtcaccactgacgttcgctctgtagagtgcccgggccatcgttctctactgttgccagcaagtcatgccgatgcttggcttggtatgccgttgttaaacgcggcacatcctgatctgcattacctgcaattggtgcctattcgggactcgctataccgcaacttgtttcgccatggcgtcattcaccgggtgatagctcatgagcatacagggctgctatccacgcctgagcggatacgcgttgagaacagctttatgcgtgagggtggcaaaccgtgggaatacaatctcctatctgcaacgccgaccctagaaatgggcatcgacattgggaacttgtcgagtgtgttgctctgctcggtaccgccggcgcaggcgaactacctgcagagggttgggcgaggcggacggcgcgatggcaactccttcgtcctaaccgtggccaacggtcggccccatgacctggttttttatgccgacccgagccgcatgctggataccccggtggagccacctgcggtttttctcaaggcgcggcatgtgttgcgtaggcagttacttgcatacgccatggactgctggactagggaatccaggggagacaacttagtgccatctaccatgcagccggtgctggatgcggtagaaaaagcccaggaagatcgcttcccttatacgctgctgaatttccttaagcacaacatgcaggagatttgggatggtttcagtgcttatgtagccagagagctcagtgatgatgaccttgagctgctacgccaattcttgtttggtggaccgcagcatttggatgaccacttgcagttgtacgtgcttgggcggctcaaagtggttgctgatgagcgggccaatatggctgtgcgtagtgcggaactgaaaaaacagatcgacaagctggttaaggcaccgcaggacgagcatacccgtgacgagcttgctgagttggagcgagagcgtgagggtttcaaccgcttgcgctatgtgatgaataggcgtgaaacactcaacttcctgactgatgaaggcttgctccctaactacgccttccctgaggagggggcaaccttacattcggttatcttccgatcagaaaaagcggtttccggtgatggggccgagcgcgagttgatcaagcgcgagtacgaatatcaacgaccggcacaggcagcgctgacggaattggcgccagagtcagtgttctatgccggtaaccgtaaggtaaagatatctcgagtggaaaccgccaaagggcgcaatattcaggactggcgattctgcccgcggtgccattactccgctgctgcggacaatcccactgctggcttcagcgataagctctgtcctcgttgccataccagtcagtggggggatgcaagcgctcgtaccaagatgctgaagatgactcaggtgtatgcgtttactaacgcacgggatgcgttactgaatgaccactctgatgatcgggagccggtatttttcagtaagcagatgctgatcgattttaagcctgcggatatacatatcacttgggttttggatgataaggatcgtccttttggttttgaatttatccgctcggcgactttccttgaggtgaacttcggtcgccgtgacggcgacgagatgatgttcgaggtggctggcgagcagctgcagcggtccggctttgctgtttgtcgtgagtgtggctcagtgcagagccgtaaggtgacggcaggcaagggcgagccagttcatctgaagagctgtagctatgccaagggcgtgaaaaaactagccaatggcggtgacgactctggcctggataactgcctgtatctgtaccgccagtttacctcggaagccctgcgtattctgttgccaagactggcagcggggggaaccgaagagcagattaactcctttgttgcagccctgcagttgggactcaaacgacggtttggcggcaaagttgatcatctgcgagtagctcatcagagcgagccgataggggaaacagacgaacgtcgacattttattgtgttgtacgactctgtgcctggcgggactggctatttgcatgagctactgagccgggctgagaacatgcaggcggtgttccgcatggcatacgacgtcatggccgcctgtgactgctatgagcacacaatggatggttgttatcgctgtctgctggagtaccgcaatgcctatggaatggagagtaccagcaaggcaatagccttagaaatgctcaaggacattgtcgaaggcgagcatgagtgggtgcagaacagtgagtccttaagttctctctccggtaacccctgggttgagagtgagctagaggcacgcttccctgaggcgcttgcgcgatttagtggtatggattgcgtcggcggtcagaaggtcagggtatcggctgacatcattcacggtaaaactggctaccggctaacaattggcgagaatgcctatgaagtggagccccaggttgatctgggcaaggctgagggtgtccgatttgccagtcggccggatttcgtgctttggcctgcatctgctggtttcaagccagttgcgatcttcctcgatggctaccaatttcacggacagaaaagtagcgaggacttgatcaagcgacaaagcttgatgcatgccggtttcgtggtatggacgttgaactggtatgacgttaataaggttatcggtgataaagccttggatgtgccattactaaccggtatgacttcaccagcacagcatcaccaggcgatcgcggggctggcaaaattggtaggggcagccaacacggctcaacacctgagcatgcccaccttcgacttactcatgcactttcttgccgatcagcgtccacaggcgttgtcagagcaggcgctgttttttgttctgcaatgcctgccagctgcttcgttggccgattcagaagttcgaactgagcttttgcaaagtctccatggcttgccggttagctttaccgatcagcaaccagagccggtagttctcgcgggcaatgtagaaatcaaagatgcgcagggtgctgcacaaatcagcttaggcttgattgcaggtgcggatttggtcagacagtttgatttgaaccaggctttggtatctatgtgctatgaccttacgcagggcagtgaagaggctgctcgctatcaatggcagcgattctgggcggcagtgaacttcttacagttcctgccgctgttttatgcctggacgccccaatccaaatacgatgggacagcggcaagcttgctctggcctttggttggtgcagggggcgacgaatcggctgaagcacaccagctgcctgactggttcaagctgctggatgagaacctggcaacagacttgcgtgaatatcagattgcctggcctatgtctgcagttgttggcgatgcggtcatgaatgcacagggtgaagtggtcggtgaggcagagttgctcttgcccgagcagaaaattgccctgctgcttgagtatttggaagaccagcaggcggcgatggcgtatttgcaggaagcaggctggaccatagtttccagtgctgagggcctagttaaggccatcacccaattgaattcaggagcctga

SEQ ID NO: 351260 - DNA, 1728 bp, Pseudomonas aeruginosa
atggaacaatttaagcagtataaccttagcaagcaagctgttgtaagtgcgtttgaagaattgaagaccatgctcagcgagttggcagccattggtgttgatgttgacgcggatttgaagaaaattgaatctgcattgacttcagttaacgacgatatgctgcgcattgcattgatgggcgctttttctgatggaaagaccagcgtaattgctgcctggcttgggaaagtgatggcagatatgaaaattgacatggatgagtcatcggacagtgttgcaatctataagcctgaaggtttgccggaaaaatgtgagattgttgatactcctggcttattcggtgataaagaaaaggaaatcgatggtcaagcagttgtttattcggacttgactaagcagtatatatcggaagcgcacattattttgtacgtcgttgacgccactaatcctttaaaggaaagccacggcgagattgcacgatggctgctgcgtgatcttgcaaagttagattcaactatctttgtcataaacaagatggatgaggtaactgacttaaccgagaaccagctcttcgaagagcaagcaagaattaaaacggataatcttaaaaaaaagctggttagagtagcctctcttgatgaccgtgaagcggatagtctcaatattgtgtgcatggcatccaacccaaatggtcgcgggcttgagttttggtttgggaagcctgcgcattatgaggcacggtctagaatcaataatctgaaagcggcaacacaaaagatcttggccaagagtgtcagcggtaatcttattactaaaactggcatggatgttgtcagtgacatcgtccggcagagagtggccaaggcgaatgcacaattggctgatttagaggtttttgcacagcaacgacagcttgaatcagatcgtataggtggtgacatctcatcgggtagggcggaagtcaaaaggctggctggtgagctgtttgaagagttgcagtccattgaacggcaatatctctctaagctacgtccgttagagatggagtccattcgtccttatctggaggatgagcttggttattctgaaaaaggcatgggtttcaagcttcatgcgaaaattaaattgactgttgatcgttatttcgaacaagccacacttgtcgcgaaccgactgaacgagagtatttcaagagagctggataccagtgagtcatttctgtcttcaatgagtgatgggatatttaaaggcgtaggcaagtcaataagttccgtttcgaatgttagcccggctgctatgaaatccgttgttttcgctgcccgcgacgctcttgcgagtgtgactggagtcgttttcaagtttaagccctggcaggcaaccaagattgcagggaacatcactaaatatgcagggcctgctggtgcggccgtttcggtgggggctgagatttatggcgcctacaaaaaacacgagcttgaaaaggaacttcaggagaccaagaatgagatatcagagtttgtgaagaactcatttcttgatatttatgaaattcttggcgataccgataaaacaataagtttcttcgctccgcagcttaaggattatgagttgattgttaaagagctacgctcaaaaatttcagaggttgagaagagcaaagcgatacttaagggtttggagtcaaaattgaaggcgctaccgacaactttactaggcgagctggcatag

SEQ ID NO: 351261 - DNA, 1749 bp, Pseudomonas aeruginosa
atgttgcaaagtcctgcgaataacgtgtcctgcagtccgtcagttgctcatggcaataagtctgttgtaaatggaaagaaagataaggctactacggctagccatactctcggcgtaaagatcggcgagatagaaagcgctatatctgcccatagcacggctttgctaagggctgtgcgtatgcaggctgcagttcaccgcgttgatgggttgattattgggacaggtgaggcagactttactaaggataatgttttttattcgttaacctacaaagaaaagccttttagtcttgttgatgttcctggcatcgagggtgacgaaaaaaaatatcagcctatggtagagagggctatagccaaggctcatctggttttttatgtcaacgggacaaataagaaaccagaaaaaacaacggctgaaaaaatcaaaagatatttgcgtagaggcgccaaggtttgcccgatcgtcaacgtccgtggcagtgcagatgcttacgagtttgaggaagatcgtgagacattattgactgcccataaccagagtgcgctatcccagactgttgatgtgctatcagaaacccttggagagaattccttgctggaaggtttctgtgttcagggtttactggggttttctgggttggcttatatggcagatgctcaagagacaacaatccacccttctcggttgcatgatttgtgtgtgcagcagcgaaactaccttaagttttttggctcacccaatgaaatgtacctgtttagtaatcttgaagccacgaaagaactggtgaataaaaagcagttaactttcagagaggacattgtagaaagtaacaaatccaaggttacggaccttcttggggaaaatatagaggttattgaactagccctgaatgaataccatgccttccttgagaaaatccagccggaagttaagaaatgcaaggcgctgatcgaaggagcactagcaagctctacaaggttgtattcggccgctaagaagaattatatcaataaagtttttgatgcaatggtggatcatgttgatcggatagtctcgaaagattttgggaataacgagatcattaagcaggaaatcgaagaggcttttagtgctgagcaggctaaagcaggcgtggaaaataaagccaagtgtgatcagctgattgccgacctgcatgaaaaaataaaagatgcactggggcggctccagcaggatataagcctcgtataccttgaaagccgtgttgactttgaaggcaagatgaatgtgactattggtggggcaaaagaattagggggggatcttgggctgggtggagtcggcggtgttttatttacaattggttctatggcatatactgggtttctagcaggtctcccagctactcctgcgacagctggcatccctgttagtgcgataataggtgctgctattggcgcgttgatcggggcaattacttcgtttttaagtgtttttgtgagtaaagactcccgcattaggaaggtaaaaggtaaggtatgtgaaaagctggatgaggccagggctcaacatataaagagcattggtgacgatgtagcgtctttctctggttatattaaagaaagtttatctgctccggttttgcaaaaaatttctgaaatggaagagcagttggcggttcctgcggatacgcttcagcaggaacttgagcggctaaaagccatgaaaaacaaaattgagataatgccttatggaacaatttaa

SEQ ID NO: 351262 - DNA, 603 bp, Pseudomonas aeruginosa
atgctggaaaaacaaaaactcaacaagctctacagcgaagtcgcagagggtttaaacggtacgctggcacagttgcagggcttacgcattgagcatgaagaaagcaagcagcatgtcatgggtatgatggacaagctggaaaatatccagaaaagcttcagtgatgaaattgtgctgcttgaggataatgccgagtgggacaagtttaccattgcgttttttggtgaaaccaacgctggtaaaagcaccattattgaatccctgcgcatcatgtttgatgaagaagcacgcagagatgccattgcacacaaccagagccagcttgatcagtttgaggctgctctagttgaacaggctgacgtattgaaacgtaaattctctgaggtttacggggcgctagcagaagacctgctatcgttgaggcaggatgtcattgcatttaagcaatatatggactcagagaagtccaagcgcttggctgcagtagccgataaccagacgctgcgcaagcaggtcagtcggctcaaagcctttttaatcgtgacctccacagtggcggtatccgccttgcttgcgattgcctggatggtgggaggggcttaa

SEQ ID NO: 351263 - DNA, 4959 bp, Pseudomonas aeruginosa
atgtcgttacaggacagcgtggccacctttatcgggttgagcaacgacaacgagtttttcagcgcccattaccttgctgaggtattccagggcgacctggttgacaccatcaaagagtgggacagcaaggaagagcagggcgatggcttcgtcgctccgcatcgcgctctgcgcaacctgaataaaggctattttgccctgcggcataagctcaagacagagcgcagcgccagtgagcgcattcgcttgcagcgtgagttctaccgtgacctgcttgctgcgctgggtattccctaccagcccggcaaccgtgaggttgctgtcaatacggagctgccagtgctcagtgtgctgggtgaccagctgtgggtgctgggggcactggatgctaatagcgagggtgaggatccgctgtcgctacaactgcaccgggaccagttcttcggctctggcccgcaccacgacaaattgagcaataccgactggtaccgcatcctcaatgaagtggtgtttcgccaatccagcccgtttaacgagcaaccgccgcgttgggtgctcctgctcagcgaccgccaaggcattctgattgaccgctacaagtggtcgcagaaccgtatgctgcgtttcgactgggaagaaattctcggacgtagagacgaccgcaccctcaaggctactgcggtactgctgcatcgagaaagcttagtgccaaatgacggcccgagtcgactcgacagcctggatgaaaacagccacaagcacgcctttgccgtctctgacgatttgaaatacgccctgcgccacgctattgagcagctcggtaacgaagcggcctcgcaactgatcgagcaggcccgagagcgcaaagagggcatatacagtggcagcaatgcgctggacgctgaccagttgtccagcgaatgcctacgcaccatgtaccgcatcctgttcctgttctatatcgaagcacggccggagctcggctacttgccgcaccagcacgacgcgtggcgacaaggctacagcctggaaagcctgcgcgatctcgaaagcgttcgcttgactaccgaagaaagtcgtcgcggccattattttcatcacagcctgcagcgcatgttcggcctgatctacaatggccaccagctcaaccgccaacttgaccagttgcacgaaagcaccgccaacggcttcaccctgaagggcctggacagccacctttttgaccctgctaacactccgttgctcaaccgcgtcaccttcagcaacgaaactctgcaacaggtgatccagagcatgtccctgacccgcccccagaaggggcgtaagcgtcgtggccgtgtcagttacacccagctcggtatcaaccagctcggcgccgtgtatgaagcgctgctcagttaccgtggtttctttgccaccgaggacctctacgaagtcgccgccaaaggccaaaacattaaccctgatgaactggaaaccggcttcttcgtcacgcaaagccaactgagcgaattcgacgaagacagcgaatgggtctacgacattgaggacaagaagaaaaagctgcgcgtccaccccaaaggcaaattcatctaccgcatggccggtcgcgatcgggaaaaatccgccagctattacaccccggaggtgcttactaaaagcctggtgaagtacaccctcaaggaacgtctgacggacgatgtaaccgccgacgacatcctcaacctgacggtgtgcgaacccgccatgggcagcgcagccttcttgaacgaagccgtcaaccagctcgcagaggcctacctcacgcgtaaacagcaggagctgggccagcgtattccccacgaggactatcagcaccagctgcagcgggtaaaaatgcatatcgccgaccacaacgtgttcggtgttgacctcaaccctatcgctgttgaactggcggaagtttccctctggcttaacgcccttagcgggggccacaacgtaccctggtttggctaccagctgttcagcggcaacagcttgattggtgcccgccgcgaggtctattcggccagtgctctcaagaaacaatccaaggaaagcctctggtacaaccacgctccgcggaggcttaacccctttagtctgctggagcaagccggtgagggcgggcgaaaagaaggggagatttaccacttcctgctgcccgaccccggaatggttggctacaacgacagcgttgctaaacagctgcgtccggacgccttcaaggctatcaaagactggaaaaaagctttctgtgctccgttcgaagcgcaggaacttcgcaccttgcaaaccctcagtgacgcagtcgatcgcctgtggcacgaacatacacagatgctggagcagcaccgccggcgcaccgaagacagctaccccttgtggggccaacagggtatggccgagcgccacacaagtaccaaagaaaaagaccagctgcgtacctctggcatcttcaataccaatgcccgcatcgcatcgccctaccgtcgtttgaagctggcgatggactactggtgtgccctctggttctggccgctggacaaggcagagcaactgcccgaccggcaaaaatggttgttcgacctcaataccatccttaacagcgctggcacctttgaattcgcgccgactcaagaaggcctttttggtgctgagctggaacaacacgaagacatcttcgccaaaccgatcgaagaccttttcgctgccaacgagccccaacagactctacgggctgaaacccaagctgtccgagaggttagtacccagcagggcgagctcaacctggaaaagctattcaagaatccgttttttaacacgctggccgtcgccaacgagctgggtgagcacttccggttcttccactgggagctggccttcgccgacatctttgccaaacgcggtggttttgacatagctctaggtaacccgccttggcgcaaggtggagtggcaggagggcggcatactgggcgaccacaacccggcctttgtgctgcacaaactcagtgctaagcagctgactgagcaacgcgaagccgccttcgagcgcagcccgcaattactgcaggcatggtttgccgagctggcggaagcggaaggttcacaagcgttcctcaatgccacccagaactacccgcagctcgctggccaaaaggccaacttgtataaatgcttcttgccccgtgcttgggtcaatgcgaatgagcagggtgtgagcggcttcttgcacccggaagggatttatgatgattccaatggtggtgttctaaggcgtgagatatatcagcgcttacgctcgcacttccagtttaagaatgatattaagctcttttcggaagtggataatagtcgtagatacagcattaatatctatggtcgtcgtttgggtcttgtcaagtttaggaatttggctaatttatttcatccattgacaatagatgcgtgctttcagcacaacggaataggaggagttccagggattaaggaagaactggaacttccggatggtcgggtaaaagtgaagtggaacttagacggccaccgcgatcgtatcattgacgttagtcagcacgaactggctctgttcgcccagctctatgacgaagccggcactgatgccctagaagctcgcctaccatccttgcacgcccggcaattgatggcggtgttggataaattcgccgcccaacctcggcggctgggggatctaaaagagcagtaccactctactcaacactggaatgaagtccacgcccagcaagacggcaccatgaagagggaaaccaaattcccggaaaacccggaacaatggatactctcaggcccccatttcttcgtaggtaatccgttcttcaagagtccgcggcccggatgtaagagcaacaaagactacgataatctcgacctgcaaaccatgccggacgactatctgccgcgcagcaactacattcccgtctgcgaccccgtcacctaccgagaccgcactccgcgtgtgtcctgggtggaagagggagagcatcgggagcggttggctactgactactttcgacacattaatcgccgcgcgattggttctgcgtcagagcggacagctattggagcaatcataccacctggcgttgcccatatagatggtggattttcaataacatttaaagatttcaaaagcttaattacgtttaacactagttttatatcgataccgttcgacttcttcgtcaaaacaaccgggaagtctgactgtcgtggtgatttagttggaatgatgccaatgttggatagtctcgcccctgcggcaagagtccgcggattggctttaaactgtttgacgatgcaatatgcggacctatggcaagcaaactggcaagacagctttcgccaacaacgctgggccatcgataagcccacccctgcgttgccgcaggacttcttctccaagctcacttccgagtggcaacgccatagtgccctgcgtagcgactatgcccgccggcaggccttgctggagatcgatgtcctcgtcgcccaggccctcggtcttaccttggatgagctgctcaccatctaccgcgtgcagttcccggtgatgcgccagtacgaagccgatacctggtacgaccagaacggtcgcatcgtcttcacgcccagtaaaggcttggtcggtgtcggcttgcctagaaaagcccgcaatagtgacctgaccgaaggtacccactactcggtagagtctccggactacaacgctcacgacatcgccctcggatgggaagatatccagcacttacctcagggcactgtgcgcaaaacttatcaggacgacaccctgcctggcggcccctgggaaaccacgatcacttaccaggcccccttcttcaagcccgaccgggaggaggattaccgggtggcgtggtcaatttttgaaagtgactga

SEQ ID NO: 351264 - DNA, 2898 bp, Pseudomonas aeruginosa
atgcaaagtctttatgctccgggcgcccgcgtcgttattcgtgactgcgaatgggtagtgcgccgagctgaccccagcgatgacggtggttacatccttaccgtcgatgggttatccgagctggtcaatggcaagagtgcgcagtttctctcccggctagaggagcaggccgatgcgatacgtattctggatcctgttgagacgcgcttcgagcaggacatcacgcccggctttgagaagagtcgtctgttcatcgaaacccagctgcggcagatcactcctgctgatgacaagattcatttgggccatcgcgctgcgatggatacggtgccctatcagctcgacccagcgctgcaggcgctcaagcagagccgtcagcggatccttattgccgactcagtaggtctgggtaagacactggaagccggcatcctgatgaccgagctgatccgccggggccgtggcaagcgcattctggtgctgacgctgaaaagcatgatgacccagttccagaaggaaatgtggaaccgattcaccatcccgctgacccgactggactccgccggcctgcagcgtgtacgcaatcacatcccgggtaatcacaacccgttctactactacgacaagtcgatcatctccatcgacacgttgaagcaggacaacgagtaccgccgccatttggagcaggcctactgggacatcattgtcatcgacgaggcccataacgtcgctgagcgcagcagtggttcgcagcgtgccaagctcgcgcaattgctggccggccgctccgatacgttgatcatgctgtcggccacgccgcacgacggcaaggcgcgcagttttgccagcctgatgaacatgcttgacccgactgccatttccgatccggacgactacgccaaggaagacttccgcgacaagggcctggtcatccgccgcttcaaaaaggacatccgcgaccaggtcaagcaggagttcaaggagcgagtagtcaaggacatctatctgcacgcctcgctggaggaagagggggcttatcaggccctgcttgatgtgcccttcacctaccgcggcgaacatagcgcgaccagcaacggccagttggtacgtatcggcttgcagaaggccatgttcagctcaccggctgccgccgagatttcggtcaaacagcgcattgccaagctgcagagcaagggtgtcagcgccgacgagcaggctgaaattgaagcgctgtacagccttcagcacgccttgcgcaacatcaccccgaccaacttcagcaaatatcgggaatttctcggcctgctgaacagcaaggactttggctggaagaagagcgacactgacgaccgcttggtgatcttcagtgagcgtattgaaacgctcaactggctgcagggccaactgcaacaggatctcaagctcaaggacgatgccatccagatactgcatggcggtatgagcgacatagaacagcaatctatcgtcgaagcgttcggtaagccggaaagcaagctgcgcgtattgctgtgctcggacgtggctagtgagggtatcaacctgcactacttgtctcatcgtctggtgcattttgatctgccctggtcgctgatggtgttccagcagcgcaatggccgggttgaccgctacggccaagagcagacgccgatcatcacttacctgatcgcccaaagcagcaacccgacggtcaagggcgatcagcgcatactggaaatcctcaaggaaaaggacgatcaggcctaccgcaacatcggtgacccagccaccttcatgaaggtccatgatgcggacgctgaagaagcattgaccatgcaggccatggccaccggcatcgatgcacagacctttgatcagcaataccaggctgatgatagtaatgagggcgacgatttgttggcgctgtttctcaaccctgaggccgcgcagccgaaagttccagagcagatagagcagttcaccgtagacggctttagcctgttccccagtgactatgaatttgctcgtcaggcgctggaagcgatcaaccgcgagcgccgccaggtcaatttctcggccaataatgagcgtcaaaccatcaccctgacgcctccggacgacctggactaccgattccgtttcttgcctccagagatccgccccgaagatggcagcctggtcctcaccgctgacaaacagcgctttgccgacgaaatccgccgaagccgtcaggacgagaacgcctggcccaagctgcactacctttggccccaacacccagccattcagtggctgcaggacaaactactggcccaggtggcccggcacagtgcgcctgtactggctttgccggatatcgaccgagtctgccagctaatgcaacccggcgagactgtgttcctagtcagtggcctgatccccaaccgcaaggcccacccggtgatctggaagtggttcgccatcaggatccgtaatggcacggttacgggtatcgagcctgccgaggcttggctgcaacgcctgcagctggacaaccgcttgcctaaccgcgctcagccgctggataccgcgctgctggaacgtatgcgatcagcagtaattaccgctgcgggcgatcagatgcagcaactgcaacaggactatatcgccgctcaccgtcagcagctggaacgtcagttggtcgagctcaaagcgcttaaggggcgtcaggtcactcagcttgatttgcaattcgaaggctccagccaggcggagcacttcaaggccgctcgcaaagaggagcgtctgaagcgcattgaaaaggtatttgccgactaccagacctgggtgcaggacactcacaccatcgaaccggtgccgtttattcaaattattgctgtattcacccgggtcatagactga

SEQ ID NO: 351265 - DNA, 834 bp, Pseudomonas aeruginosa
atgctgaccaataagcgtcacctgacggcgatcatgaaagcggttcggcgcaatcaggacaaaatcactcttacggatacctggcggcagatccacgagctttacggcgtagggacgaagctcggtacatcgacgttgctgctgactactgcggatcaccagacgctgctagcgctggtgagaaaggacatgtctctggatccgctcaggcacagcacggcggcgctcgagggggacaggctggccctggctgcgatctctagaaacgaaaaagtcagtggccggacggtaggcgagggcctggtgctggtcgctcaaccatcgggcagggttctcttgccatcaggtgactatcggcacccccgtggcggcacgctgaacgtccaggctagcgacctgcatgggctagagagggttctgctggtagagaacctgagcgttatgctcgcggctcaccgatatcaattgccggcagagctccaggacgtacctatgttatttcggggcgatcgacagtggtcgccgaaggccgtttctgctgcgagggtagggattaccgacttaataagctttccagactacgacccgcagggcctgatgaactcgctgactgctggcgcttcggcggtggtggtgccagcgccggcgacgatcgcacgcattcttgaggcacgcctcaacaagcccgctgatttcgataggcagtcttctgcagtggcgtggttagagaggagagggtgcagcatcgcggccgatttgctttgccgccgcttggcgatttctcaagagtcgatggcggaccaggtgctggaactgattaccctaccgagttga

SEQ ID NO: 351266 - DNA, 1245 bp, Pseudomonas aeruginosa
gtgaaggcagaagactgggtcaggctaggtgagcacctgaaagcgaatgctgatctgcttgaagccatggccttggcggatgaaacaggcatcacgccccctgaacgtatgaccaagggcctttcgtggctcatgtccaaaggcctggtggaagaagacagcgacctgttgcatctcagtggcctactgctcgacgtgggcgcacaaatttctatccaagggttcgatcgcgtcgcgcctgacctcagggagatcctgatcagcattgaggaggggtgcgaggcctaccatggtgccaaggcggctggcgatccggccgagaccgagcgccacctgcggcgtgtcaccaacaccacccgccaggtggtgcagcacctgagaaacgagcagaacgtcaccagggcattcatcgagggaggatatggattctccgtccggctcaccgacaggatccgcgacatcaaaaatgcgatcgaccggctcaagcgactgcacgagaagttgggcctgtttacacacacgggcctattgcagctgacaagaagcgaccgggcgctgcggggcaaacttatcgacggtctgttgggtgcggtgtcccgcaaccgcttcgctctcgacgagatgattgggcggcttgatcggctcagtctgacagtgcgtaagcgcaacaagatgcgccaggtggcacaggccgtcgacgctcacctgcaggccgggggcgtaatcgatcttgagccacttcttgaacgacttgatgctgcagtttgggttggtgctgctccactttcactgggcggcaatgcgttctgcgacgtccacgccggcgagaaccttgagcagctggagttgctgatagcctcactgccggcaccgaaggtcaaagcggcgccagcggcagctgcccaggagcgtgaatcgaaaattgtcccttcagggtccaatcaggaaaaggcgctggaaaaacccttcgtgcgtgctcacctggaggccatgcttcgggagctgattgtcactggtaaacctcaatcggctatcgcttactggaaagactttggtgaccccgatatccctaacgggatctggctatacgccttggatggctatgcccagttgcaggcggcattcgccaaagtcaacggtaagaaactgaactaccgccttgtgccgacgctggcgcctcatagtcggttttcggcgaacaggcatgttctggaattgaccctggatagggtgcagaggcgatag

SEQ ID NO: 351267 - DNA, 663 bp, Pseudomonas aeruginosa
gtgagcgagattcgcgatgtcctcgaaaccctgctctctggtggcttcatctgccaatatgcctatccagagctccatcgtcagcttcgtgcgcctggtgttgaggcagaggtcagggcggcgctggcgcctctcggccgggagctgggcaccatcggtgaagaaactgccccggatacgtatttttcgcggtacgccgatctttctgcctccaaggatagagctgcagctgctgtgcaacttgtgcagatgcgcgatcagctcaagccctgcctggagttcatccgcctcttcaatcgctctgggcgcaccgatgcgtgcctggcgcccggcgacacggtgtccttttcggatctgctcgaggccatcgagaacaatcccacctacagggatcagctgcgagacctgagtggccacgagttcttcagcaaatccaagagcgccaaggacaacaaagagcgattggccctggtgctgcggcctttggccgacgcgggttacctggtgaagcgcagtagtgagtccgcgaactacgtggccaccggcaagatggggtacttctacatgatcttggcctgggtggctgagttcagcagcctaagcctggatccggaaccggatccatcttcgactcagttggaacaacgaggccttgaactgtga

SEQ ID NO: 351268 - DNA, 3720 bp, Pseudomonas aeruginosa
atgtctcagttgctcaagattgttcttatcgattcgctatgcgcaggggccaaagctgagatagcgatcagcgggaacaccagcgtcaacggcacaaatggcatcggtaagtcgtcgttcctgaagctcatacccgttttttacggggcggcgcctgggcagttggtcaaggcagggagtaatcgggaaagcttcgctaactggtacctgcccaatgcctccagctatatcgtcttcgagtacaccaactccatgaatgcgccgcggtgcgcgatcatgcaccgcagtggtgacagctacgcctaccgcctcgtggcacacgcctgggagccagatctgctttaccgggactatgcgtccggagaattagtcagggcaggggagctgatacgccatctggcagtgaaaggtatcgactgcagccctgagcttcagccgattcactaccggcacatcatccagttcaacagcggctactcccacatggagaagctgacggatccccaaaagcgaaagctggtcctggcactccgtccttcattctcgctggcgccgaagcggactgacttcaacggtatcgacaatgtggcgctcgcgctcctggccagcgccggtacgttcgacaccatgaagaccactatggccgagatactcgagcaggataactctgatctcggccgcaccctggaaaccctgaacgctgctccgttcaacaaggtgctggagaaccgagccggttatctcctcatggacgagttgaggcctaaggtggtgtcactgtcccaatttcgagttgaccaccaggcaaccacgcgccagctcggtattcaaaaggcccgagcaaaccacttcatgaagcggctgagcgagtgcgaagctgcacgaatggaagctctgagtgggcttactgatcgagagacgcgcataaacgatgacgcctacgctcggcgccaagagctggcagaaaaacgtggccacctgcaggcaaacttcactgcggccactgactcggtaagtaaaattgagtcggccaaggagcagcacgagcaggcaggaatggcagacctgctggcgagagcggacaacttcggcgaggtgataattcaacgtgatctgaagcaggatcacctgaataagcttaacgctaagggtctagacatacgacaggtctacgatgcacgggcacagaaagccaaggacgctgcgtcagtgcagcgagaggaggctcactctcggcacaatcttgcgctggaggctatccagaagcggcaagatgagcttgaggacgatttacgccgtcgtaaggaagagaccgaaagggagcaccgcactgaacttgatgagcatgaacagcaacgcaaactgctggccactgccgccgctcgcgcaacagctgaacttgagcacctgaagaaaacgaaggtacttccaagctcccaagacgcccttgacgcagctcagcacgcgatagatgaccaagctgctctcctggccgatttccaagacgaattggcagctgcccgtgtagaggagaagagtctgcaggacgagcagtccaagctggtgtctgcgttccaggggcttgataagcagcgtagcgaaacagcgaagttacgtgacgctttgaaggaccaactgaacgctggtgcagagacgatgcttgggtacttgcgaaagaaccacccgagctggaaagacaatattgccaggctggtaccagtagagaccctcctgcgaaccgatctgaaccctgcaatgctggaatccccccagcaatcgctctatggacttgagctggtgcttcaggggctatcagtcccaacgttcgctagcgatgaagcgctggaacaagagattgcatcgctgactcttaggcttgagggcatccaggccgacttcgagagcctggataagcagaatcgtgttctggaagaacgcttccggaagcatgctgcgcggttgagcaagtctcagaacgatgagagtcaggccggtattgaactcgcatcgcggcgtgagcaacgcaaggccttgtacgaacgagcgcaggatgaacatagcgcctacatcgaagagcagggtgcacgcactgctcaagcgcaacgggtcttggccgagaaagacggaagtatcgcgcaactgaaatcggttcacggacggcacatgctggagctggccacgaatgaaaagactgcacgtgaggaccttgctgaagagcgtgcgcgacagaccgaaggtcacaaggcagcattgcagcgaatcaccgacggcctcaacgctgagcttcagtccatcgagaacgacaagtcggtcaagctccgtagtgagggcattgatgacagggaaaatcgtcgactggagcgcgagataagccagctcgagtcacaaattaaggaaatcaatggtctgcgatcgatcatcgagagttatcgaaactgggtagtggacgtgctaccgcagctcccgatacgaatcgccgagatgtctgaccttgaaggtcaggtcgccagggttgacaggcaaatcgctgactataacgaagaggtcaacgcccggcttagggaggttgccgagcaacgcaaggctttggcccaggaagggctgcaggatgaggcccaggccaggttactacgtggtgtgctcaaccgccttactcaagttgatatcgttgatcccggtaccttattagacgggtttactgcccaggacatcgacgaggatgtgacccggttaatacaccagcgcagtgtgttccataagtccgcctctgagacctatcgccaaatcctgtttcagttcaggacgcgccaactcctgcatacgccgcaaggcgctgccatcgaacagatcgctagccaggccagcaatgcggcagcagagcctgacctagcctggttggaggcggctccaagccttcaggaatacatcgacgtctcgcatcctgaccagaagacgaaactgatcatgcaggcgaagaacctttctgatgagctttgcgatcgtcgtaccaagctgttggagctgcatcggagtatccagcagcttggccgcgacgcgacgcagaaagctcgggaggtgcttggcgcatttgcccagatcaaacagttcgagttcagggttacatcccgcatccaagaaatgtccttctggtctgatctatccacctacgatcagcactatcgccgctggcaagccatgggtgatggcgtcatgccgaccgagaatttcgtcgaggctctggagaacgtggccaggcagatcaatgagggcaagttcacctctgacctggagcagtgctttgacgtgagtgtgtcgtgcaatgaccagggccggacgaagattgctaccaacaactcagagctgattgagctcagcagcaccggcctgaccaagatcatcgttgcaatgatctacgtctccctgttcgagctgctgcgtaaagacgctgatttcctaatgtcgatccccattgatgaggctctggagctttcgccggagaactacgtggccttggtcaactacttcaaccagaggggaatctccatgctggcatgcttcccaggtggtgcgccggagttgcttcggcagttcactaaccgctacttcttggagaggcaggctgataccggcacgatcgtcgtcaaggagtacggcctggacgtgcacgaggagctggatgagctgaatgaggctttggccgcagaggagtacctatcgtga

SEQ ID NO: 351269 - DNA, 831 bp, Pseudomonas aeruginosa
atgcatcaacgctccggtgcaagtccggtaactgttccaatcatgcggcctcgggactacctcttttaccagctgggcatcggtgatgacccgcaggtcgccgtgccaatcgttgcgcagcagtcgtcgcccccgattcaagagggctgctacgaaattgccttgctcgccgctactgaggaggaggcacttcgggcatgcaaggaattccgtgagagaggtagctgctcccacgaactccccaagcagaggcaatcgcgccacaacttccacgcaatcgctccggatgccacctggccaacgcagcgattccacgagcttcactggctatacagccacagggactcgccagccaatctacagcgcctgaaggggctggccgacatcatccatgtacattacctccgaccagttccttcagcgatgcccgccggcattcgcgtctataagtggacgaaagagcaagacatattcgacttctggcatgccctatacgctgcccgggacaacccaaatttacttgggttggactggaccagttatgccacctgtaatccgcaacaactgatcggcaggtacgtctcagcgcaagcgaaatccgcccttcaagccttgcagcatttacgaaaccgcgtgcgactttaccagtcggatcctgcacaggaagcactgctagtcgttaatggcaagccgacgcttacgctcggcgaatacacacagatcgtcgacagtctggcggaagtactggggtgtgaagtcgcccctgtgcttcatctcacggatctgcatgaagggtgcaaaatgaaactgctgatgttttctaagcagtga

SEQ ID NO: 351270 - DNA, 465 bp, Pseudomonas aeruginosa
atgaagcgactgaccgcacttgttccgatattgctgctggcctcgatcaacgtccaggccaatgcctactgtgattccaggcgatctgcccaagaggttgagacctgctatcgacaatccctgacggcgctcaaacgagctgtcgacaagggcctcagcagaatcatgagcaaccggaactatagcgaggtatccaagcagcgggtcttggaggagcaacacgcttgggagcagagcgtccagaccaactgccaggactacgcctgcgttgaatatcagttccagggccggctgcttcagctgggtcgaatgaaagcaaatccagccccctccgcaatggatgccgaggcgtgcctggatgactggatcgctgcccatcgccaagaagaaggagacgaggtcgcgatcatccacgaccagatcaccgaatggcagcaatggtgtagcgaaggccgcttgccctga

SEQ ID NO: 351271 - DNA, 633 bp, Pseudomonas aeruginosa
atgagaaaaaagcaatcccgaagcgactggcttcacaaggacccaaacatccatgattggctgatagaaacggcccctcagtgggcacgtgatgaacacggattactgatatacctagatgctctatcggaggatcaattcaagcagctaaagcagcgctggagctcgcgccttcatagagcaaaaagaagaaccctcagctgcgacatttcaccagcaactttcagcacacttaaaagaatacaaggaaaacggggcctaaccgaaacccttgaagaaataatcaacatcaattacgaagcaaaaaaacactactcacatacttttgaagaaaagcttaaaagcataaagcacaaaatagatagcggcatcgcacaagagctacatagatttagtagcactctagagaggacagcagctcaccgaacagagctctctgaattgaaaaacaaaatagaaaaacaagaaggtcagatagccacacttaggtccataaccctcattctgatagaaaagctagaacgcgaaaatatttcattggactcgagtactacagagaaactaaacgaaactcttcgctcgccaagcctagaaaatagtgatgcgcccagcaacaaaagccagagtgactaa

SEQ ID NO: 351272 - DNA, 885 bp, Pseudomonas aeruginosa
atgactgacgcgactcccaggcaaggccactggggccaagagcggcgactcgagttcatcgactaccggctgctatgggaggggcgactgaatcgcgccgacttgaccgagtttttcaagatctcgattcctcaggcgtccttggacttctctgcctacaaagagcgggcgcctgacaacatggtttatgaccgagcgcagaaaacctatgtcgcaacggagcagttcgtacccatctttgccaaggcggacggcgcacagtatttaaatgagctgctgtggcgccattccggggccttagcgcaaagtgaaagttttgccggatggtcaccgctagtagacacttctcctttacccgtgcggaaaattgaagccaagatacttgtgccgttgcttcgggcgatgcaagcgaagcagggaataactattggctatcagtcaatgagtaatccggagccggccacccgaaaaatatttccagtagcctttgcccaagatagttaccgctggcatgtacgggcctactgtttgaagagcagtaagcataaagatttcgtactcggtaggatctacgcggcagggccagcggaaaatataacagaggatattcctgaggacgtcgagtggaacaccatggttaatgtggtcctcggcccaaacccagcttttttgccggcgaagagaagtgcaattgagcgtgattacaatatggtcaacggtgaggtgacgatcaaaacgagattggcgcagctcttctatcttcgtcagcgattgaatattcttgagaactccccgccgccagatgagcaccagcacatcgtattacttcgaattgaggcattcgaagggcgttatcttttggagggtaaaccaccaagcgcctaa

SEQ ID NO: 351273 - DNA, 1176 bp, Pseudomonas aeruginosa
atggccgcaaaaatcaccttctttcccgtagacaatggcgacatgacattggtgcggcttgccgatacccgggtcacgaccctgctcatcgacatccacatccgcgtcgctgcagatgatccctcagactccacgccggacgtggcgagcgagttgcgtaaacgcttgcagtacgacagcgatggccgccccttcgtggatgcattcctcctcagccatccagataaggaccactgctctgggctgcgcaagcatttttggcttggggcgccagaggactatcccgacgacgacttgccgatgaccgagaagcgcatcctcatccgagagctgtggtcgtcgccgatggtctttcgccgccgctccaaacatcacaccctgtgcgacgacgcggtagcgttcaacaaggaggcgcggcggcgtgtcgcgtactggcggacctatcgtgccgcaggtaatggcaatcgcatcctgatcatgggggaagatgagaacggcaaaactgacgatcttggcgccatcttgatcaaagcagggcagacgttctcaacgatcaacggagacgccgcaagcgcgtggttcttctccgcccgcctgctcgccccctcgcccaaacaggacaatgacgagctggaggaaacgctgtcgaagaatcactccagcgtgattctcaacctggaaatattcccgtccatgctggccagccagcgcacgcgttttcttaccggtggcgatgctgaggtcgccatctggaagcgtctttgggagaagtaccagtacaacgctgaggtgctggcgtacgacctcctccaagctccgcaccactgctcctggcactcgctgtctactgatagctggtccacctacaaggaagaggccgaagtgtgccaggaagcacgtagcgccttgggccaggctcggagcggcgcaaccatcgtggcgagcagcaagaagattctcgacgacgatgtcgacccgccctgcattcgggccaagcgtgagtaccaggtcatcctttctcccgtagacggcaccttcctctgcactggcgacgtcaaacggggagaaccgatcgaactggaggtgcgctcgggcggcagcttggctcgcatcatgattgggacggcgacggcagccggaagcgccgtggccgccgccgcgccgcgcgcaggctga

SEQ ID NO: 351274 - DNA, 2271 bp, Pseudomonas aeruginosa
atgggcgagtacttcgagcttggaagcccatgcaacgcggcggactttaagtacgccgaatcacgcatgctgctgaaggcctgcgaccacgacagctacaccgatgtactcgagtgccgcgtactaatggaaggcagcagtcgaacggagatcattgttgtccttgcgggagatggttcggtcgctcatggcaatccgggaggtatacggcgaacagagcgactggccattaccatcaatcccacattcccctaccctgcgatcgttcggacgctgcgcaaggacttcccaccgttgtcgcaccgccattacagcaccgagggaactccctatgcactctgcctctacaacatgccctggagcagcgtccagcgaagctggacggccgagcgtttcctggatcgcctgttctggtggctgcgagaatctgctgagctgcgcctgcaccgcaccgatcagccgttggaacagctgttctataccagcgccttccaactaattttgccgtccaatcacctggacttcatcaatgatccatcgcgacatctgtgccttcacccgctgagctctccgccgggcgcccctcgaggttttattgcaaaacctcataccgacgagcagatcgcacaggcgggagccaggggcttcagagtgctgccgctaatggtcgaccgcgttggcagctctgaagtgttggctcctcctgccaccctgggacaactgcaggagcgacttcagcagtggggaagcgagctctattcgccactggtcgaggcagtctccggcgcggtcccgtcgcagggactgaaacgcccgacagccgacatcgatgaaggcctgctggtcctggtctgggtcccccgtggccgcgaaactgcgatcgaacgatacgacgtgttgtgttatgccatcccgaccccgctgcttgatctcgcccaagcacttgacgtcgttggacccgctgaccagaagggtatgcaccatcgcgcgataattctgggccagcacgaacccagcaactcagtctggaaagccattgaggtgtttcctgttgaggtacgcattgcgttggatgcagcgggggcccgcaagctgtcggccatcgaggctgaaaccggagaattttccgcagttctggcgggtgtcggtgcattgggtggcctactggccgaaatctgggccagagagggctgggggcaatggagttacatcgacccggatcaattgctgccgcacaatctctgccgccacgtcggccgcgagtctggtttaggtcaagccaaggctcaggtactgcaaacgctcactcaccaaatttaccccacagccccactcgccgtagccatcgccaagagcatcacgtcacgggacgacgatgttcaggcggtgctcagccaagcctctctcttggtcgacgtcactaccaccctggatgcccctcgagagctggccctccgcgagaacgtcccacggaccgcgagtctattccttacgccgtcgggacaaggttgcgtcttactgatggaggatgcagaacgcacgctgcgcacgcctgccctagaagctcagtactaccgcgccatcctggataacgactggggccaaaaccatctggctcagcactacggggacatctgggtcggaggaggttgccgcgacctctccgtaaaactggcatatgagcgtgtcgcgctacatgccggcatcctctctcgtcaaatgcgccgaagcgcacgaagcaacgcagctagaatctgcgtgtggcaggttgatgaggacagcgaggccgttgccgctcacgaagtacctgtcatgccggtgcacaccacggtctacggcggctggactgttactcatgatgatggcttggtggccaagctgcagcagctgcgccaagccgcccttcccaacgaaaccggcgggatcctgctgggtgtgaccgatatggccagccgcagcctagtgctagtggacgtgctcaccgctccggcggatagccaagccagtccttgccacttcgtccgaggtacggagggacaaccccaggcgttgcaggaagcgcaacggcggaccgccggcctggtggactacgtgggggagtggcactcgcaccccgatggctgtccggcgcgtgccagcgttgatgaccagaaccttctcgccactctggcagatcgcatggcaaccgatggacttcccgccgtgatgctcatcgtcgccgagcaaaccgtcagcatttacctacaacacaacgcggatagcccgtcgtaa

SEQ ID NO: 351275 - DNA, 480 bp, Pseudomonas aeruginosa
atgatcgttctcatcacgatgtacttgctggctctgctggtcggggccacctactcaatcggtgccattgcgctgggctggcttcctctaccctatgaagttctgcgcgtgcccttgatgtgtggcgcgattgcctgcgtaggcggctgtctctactgcgtgcgagcggtgtatctgaacaagtgtgtatacaagcgctgggatcctgattggcacatttggtacttcctcagaccaatcgcgagcaccatctccggcgccatcagctatctgttcttgaaagcaggacttctggttctggagtccagcgcaaactccggggcaactgaagtgggcttctttgccctggcgttcatcgccggactgaacgtcgacaagttcgtgaccaagattgaggacgtggcaaaagcggtatggggcattgaaaagaccaagaccgccgaagctcgtgctccccagagagatcccgaagccccctaa

SEQ ID NO: 351276 - DNA, 1548 bp, Pseudomonas aeruginosa
atgagtattgtcgtcgcacaaaccttccaccctgtcggacacggcaccttccacactgggagagcccactatcgcggtgagctaggctctttcagctgggtctatgactgcggctcccaaaggcgctcgacccttgcgccggccatccgggccttcagccaatccctgcggggcgcacaaccacagatcgatctactggtgatctcgcacttcgacgacgaccacgtcaacggcgtggaaagcttgctcgcgacctgttcggtgaagtggctagcccttccctataccgacctggcttctcgattggcccaggctgccgcagtgaacgaagagccatgctcttcctccaccgccctgtttcaactcgatccagttaagtggctagccgtgcgcggcttgtccgatcgcgtcgagaacctgttgttcgtggaaggcgggcctgcgccggacaccccaccggagccagagccgcaaggcgacgatcccgatcagcctcgtcgtccctcctcgagagaagacgaaaatcgcccgcggccagcagagcaagaacaaccgcgtgatgttcgcggcacgaacctggatgaattggtcactccgctgaacacttttggcagcgcagaaggcgcagcgccccgcttggcgctgctgcagcactctcagcctgtgcaagcgctaggccccgatctggagctcatgttctataactcggatcaacccgatatgtgtcgaacgcgcatcgacggtgtgcgcatcgcacgaagatcaaaggctccactggcgcaagtggaggccgaaattctgcggctcactcagcaactacagattggccaaccaggcgtgaaaccacggcgaccatggcgggaaaaactacgcaaggtctacgactaccacttcggtaacaacgggcaagctcgcaataatatctctctttgtctgatgacgagagtaccaggaccccaatgcgaacctgagtgcccagagtgcactgctccttactgctgtggcgcccccgacctatgcgcggagcttggcctgcagtgcgattactatggccgatcgtgcagtcactgctgctcatggtgcgattaccgcagccggccgcgcaggcacttttgcttttggtacggtgagcagcggtacagaagatacggatacctttgccggaggtgcagccacctctaccgaaaacacaggcatggtcaatcaatctgctccattggtacggctaacctttgccttggcgacctgacagttacgagctcgacaattgattccatgcaacggcatttcgctcatcgttgggacgcactggcagcggtacaggtgccccatcacggctcacatcattcgtggcgtcgcaataatgcctaccactttgacccagacctgtttatccactgcgtgcccgaccactctagccgccacccgcacgcggacgtgaacaatgatctactccggtatcctgttctgcgagccaactactcgcaaggtgtgacaattaagatggacggagcgggcaggttttattatcgaaggttccctagctag

SEQ ID NO: 351277 - DNA, 654 bp, Pseudomonas aeruginosa
gtgcgtctggcccttttcgatctcgacaacaccctgctcgccggcgacagcgaccatagctggggcgaatggctgtgccagcgcggcctggtcgacgccgccgaataccaggcgcgcaacgacgccttctatgccgactacgtggccggcaagctcgacgtccttgcctaccaggccttcacccaggcgatcctcggtcgcaccgagatggcccagctggaaacctggcaccgccaattcatgcaggaagtgatcgagccgatcgtgctggccaagggcgaggcgctgctcgccgagcaccgcgccgccggcgaccggctggtgatcatcaccgccactaaccgcttcgtcaccggcccgatcgccgaacgactcggggtggagaccctgattgccaccgagtgcgagatgcgcgacggccgctacaccgggcagaccttcgacgtgccctgcttccagggcggcaaggtggttcgcctgcaacgctggctcgacgagaacggcctggacctggaaggcgccagcttctatagcgactcgctgaacgacctgccgctgctggagaaggtcagccggccggtggccgtcgaccccgatccgcgcctgcgcgccgaggcggaaaaacgcggctggccgatcatttccctgcgttga

SEQ ID NO: 351278 - DNA, 378 bp, Pseudomonas aeruginosa
atgccccacaccgcccccgctcccggctcgctgcggccggtcgtgatcgtcgccctggtcaccgcgctatgcctggccggcgattcgatgctttatatcgccctgccgatctactggcacgaggtcggcctggaggcgctctggcaggtcggcgtgctgctgtcgatcaaccgcctgatccgcctgcccttcaatccgctgatcggccgcctgtacaagcacctggcactgaagaccggcctgctcctggcggtcgtcatcggcgtgttgagcaccgccggctacggcctggccagcggtttcctggcctgggtgctgctgcgcggactgtggggatcggctggtcgttcttccgcatcggcgggctctcggcggtag

SEQ ID NO: 351279 - DNA, 312 bp, Pseudomonas aeruginosa
atgaaacggaattgggaccacatatctttcattctcgcagcaattgagcagtacccgtatccaagagtaaaagtcgagatcaatgatctgattgatcgcgctgcgatgacttttggggacacgccggagattcgctttgctatgcaagccgcagtcttgcaattagtcgaaggaaaattcgtgaccgttagcggaatccaagttcgctcgaatgactttgctgatggcctgctgactgggatgacatgggcggggtacgaccttctcgacgccaatcgcgatagagccaataagtggcaggcggaaggctaa

SEQ ID NO: 351280 - DNA, 270 bp, Pseudomonas aeruginosa
atgggccggtacctcgttctgattctggtggcagcttccctgcaggcaagcgctgactcattcccgccaagtcacagctgctccgaacccacagtgccgtacgaattcaacaatgagtttgagcggcagaatttcatcaacgaagtcgaagagtacaaagggtgcctatctgactttgttgaagagcagaatgacgctgtccagaagcataaagcggctgccgaggaagcgattgacgaatggaacagcttcgccagctctctcaactga

SEQ ID NO: 351281 - DNA, 1764 bp, Pseudomonas aeruginosa
atgagccgtgctcatctgcgcttccaggtggattcccgcctcgccacattgttgagtcaggaatactcctcgtccgagcgagcgctgaaggaactcgtggacaacgcatgggacgccgacgcggagcagataacgatcctcctcccgaaacctctgagtggtgaccctctcgtcatccaggatgacggcactggcatgaccgaggaagaactgcgccggcactatttgtcgatcgcatctgatcggcgttcgcggcgcggtgagcgcacggccgggaaaaatcgcttggtcaaggggcgcaagggtatcggcaagttcgccgggctcatggccgcagcggtgatgacgcttgaaacccgtgcgcgcggtcgattgtgctgtatcaccttgcggctggacgatctgtcccaagtcgaagacattgaacagttgaatatcggcctgcaaagcgatccttgtgggccggaactgcatggcacgacaatcacgctgagcgatctgcatcagggcctggcttatccggatgccaatcggctgcgccagatccttttgcaggactacgggcgacaggatgactttgcaatcacgatcgacggcaagcggctcgacgtcgatgatgtatccggtagctactcggagcaggaagaggagcttccaagtgccggtaaggtaaagctgcgtttctccatcagcgacggcaagtccgggttgcgtcagccaggcatcactctgcgtgtggacggcaaggccgttgggcggcctgggttcttcggccttgatcaacgagatgactttccatccaagctgctgcgaaagctctacggcgagatcgaagcagatggactgcgcgaccacatcacggcgggctgggatgcggcggtcgagaacagcgagcttctgagagaggttgagggctacgtccagcccatcttgcgagaagcctatgagcagcagtaccggcgcgaaattcagttggcgcaggcccgcttgcagagagcgatcctcgcgcgcttgtcggctctgccagagcacaagcgtgtatttgccgaccgcgcgatcaagaagattctcgacaagtattacggcgagccggagagcaaagtcgagccggtggtaaatgtgctgttggaagcgatggagcgttccgactaccgcatcctcctggagcacatcgcagaagcaacaccgggcgatgtcgctggggtagccgagcgccttgatgaatttggcttggcagagatggccttccttgtacagcaagcgacggctcgccaggtcttccttgatcaactggacgcgctcgctcgtgacgccgctacgacggaagccgtcgtgcacaaagccctggagcgaaacctgtgggtattcggtcccgaatactcgctattcagctcgaacagtacattgcggcggcaagtggaagatgtcctcggagagacctacacaggtgacaaggccaacaggcgccccgacctgctcctcaacgagaacctcggcggacagtacctgttgatcgagttcaagcggccgagccacgcgctgaatcacgatgattacgtgcaagcgattggttacaggcacgaactggcaaagtatctcggttctccgattcaggttctgctcgtcggcggcagtcggtcttccgactttcctacggacaatcgtgaaccgcatgtcgaggctcggatttttggtcaggtcatctccaccgcgcggcggcagattgagtggctgctacgtacagcggagacatgttcaaactga

SEQ ID NO: 351282 - DNA, 687 bp, Pseudomonas aeruginosa; identical to SEQ ID NO: 333145

SEQ ID NO: 351283 - DNA, 762 bp, Pseudomonas aeruginosa
atgcaatccgcctttcgtcaggttctcttgcgtgcggttaaagacgctccacaagtccgggcggcggtcgtcgaaccggcgcggcatcaggatttgcgactcggtgacgggcgcgggcttgttcgggtcgtcgtacttgagggccagtgcggcacgggcgaatacttcggcctcgccatcgtcgagcgtgatggcccgcattgcttcgcggttttccttcacgcgctcgaagccgctcaacacttgataagcgccttcgatgacgtgcccggccacatcgcctttatggggcacgcgcacgtccgccacggtgtcgccgcagacaaggccattgctgcaaacgaagcggaacatgcccgccaacatctgatagctgctggtgccgtcgtgcgagttcagcaacacgatttcattggcttccgcgccgttgatctggctggcgtggcgcagccggatcatgtgtttggtgtgctcgcgcttgccttcatcgcgcacgcgggtctgcgtcgccatgaagggttgaaacccctccttgcgaagctcggtcaacacggcggcggtggggatataggcgtaccgttgcgagcggctttcgtgcggcgcatccgcgaagatggacggggccacgcggtgaatctggtcatcggacagcgggtaatcgctgcgcagtaccggggaatgggaagcgaaacgggatgcgagttgcatgatctttctcctgacaaaaaggtttgctgttcacaccgcacaccggattcctag

SEQ ID NO: 351284 - DNA, 189 bp, Pseudomonas aeruginosa; identical to SEQ ID NO: 339404

SEQ ID NO: 351285 - DNA, 2052 bp, Pseudomonas aeruginosa; identical to SEQ ID NO: 345685

SEQ ID NO: 351286 - DNA, 681 bp, Pseudomonas aeruginosa
gtgaggcacaagcccctccgttattggcactacgaactctttatgagttttctctgtctcgccgcggatgaggatcagttgattatcccagtcgatgtcgcgcttgcggatgcacagcagcgcattcaaccggatgccggtgtagtagaagacctcaaacgtgcaaagccagaaccaggcgggagtgatgcgtgcacgatcgccggtgcagcgctcggcgccgacttgcatgctgagccaactgcgagcgcgcaggatggcttcggcggcgacagttttgcttgctcgcctgggggggatgacggtggtctttctgaacgggttgacttgggagtgcgtcaccagctcgtgctcgatggcatacccccagatcgttcgcagatgattcgaatacgtgttccagctcctcttcgacaggccttgttccaggaccttgcgccgccatcccagcacagacctgtggtccacctcctgtacggttgccgtagggccgaagtgcttgagcagcgccttggtcgcggcgcggtagatcttcgcgctggcttctcggagatcgtgcgcgaagatgtactcctcggtgagctgctgcggcgtcattcgacatccccttcggcatcggtgatgaccgtgaggcttgggttgtccagaggctgtacagggaacagcagtttgggatcctga

SEQ ID NO: 351287 - DNA, 291 bp, Pseudomonas aeruginosa
atgcagaagcgatccatccagcgcggccgaccagcgggcgccaccaccttcgacgccgagctggcgcaagccttcggcgcagcggtgcgcgcgttgcggacggagcgcgggatcgcacaggaatcactggcgaacctcgccggcatcgagcgttcacacatgggcaagatcgagcgcggcgagcacatgcccacgctggcgatcattttcaagatcgcaagcgcgctcgattgcagtacggcagtgctgatgaccgcgacggaaggccaactcgcggtcgccgagaagtag

SEQ ID NO: 351288 - DNA, 1065 bp, Pseudomonas aeruginosa; identical to SEQ ID NO: 334733

SEQ ID NO: 351289 - DNA, 510 bp, Pseudomonas aeruginosa; identical to SEQ ID NO: 82613

SEQ ID NO: 351290 - DNA, 528 bp, Pseudomonas aeruginosa; identical to SEQ ID NO: 82615

SEQ ID NO: 351291 - DNA, 765 bp, Pseudomonas aeruginosa
atggttcgccgctggggtatttccgctggcgactcggagcaaggcagccagttcgccgccggcgccgaggtcaggacctggcgaagtgattcgggccgaatcacccagttcgccgccggcgccgaggtcaggacctggcggagtgttgccagtggcaacacccaactcgccgccggcgctggggtcggtccctggtggagtgttgccagtggcaacacccagcttgccctcggcgccgaggccaggtcctggtggagtgttgccagtggcaacacccagctcgccggcggcgccgaggccaggtcctggcggagtgttgccagtggcaacacccaactcgccgccggcgctggggtcggtccctggtggagtgttgccagtggcaacacccagcttgccctcggcgccgaggccaggtcctggtggagtgttgccagtggcaacacccagctcgccggcggcgccgaggccaggtcctggcggagtgttgccagtggcaacacccaactcgccgccggcgctggggtcggtccctggtggagtgttgccagtggcaacacccagcttgccctcggcgccgaggccaggacctggtggagtgattcgggccgcaacaccaaaaaacacgacgcccgaccgagactttctcatggctcatcaccccgctcggatggcacgctcgatccgtgcctgggacgaatgaggtccttgagccggctgaggacctcgctccctgtccgggtatcccccctgggctggacctga

SEQ ID NO: 351292 - DNA, 270 bp, Pseudomonas aeruginosa; identical to SEQ ID NO: 349378

SEQ ID NO: 351293 - DNA, 438 bp, Pseudomonas aeruginosa
atgaacagaacctatgacatcgtgattgccggcggcggcgtgatcggcgcgtcctgcgcctaccaactgtccaggcgcggcaacctgcgcatcgccgtggtcgacgacaagcgaccgggcaacgccacccgcgcctcggccggcggcctctgggccatcggcgaatcggtgggactgggctgcggggtgatcttcttccgcatgatgtcctcccgcaaccggcgcgaggcccagggcgcggcggtggcggtggacgcgagcacgccgcacatcctgccgccggcgttcttcgacctcgccctgcaatccaacgcgctgtacccggaactgcaccgagaactgatcgaacgccacgggatggacttcaagttcgagcgcaccgggctgaaatacgggtcatgccgagataaagggaaaattcactcacttcgctcttaa

SEQ ID NO: 351294 - DNA, 336 bp, Pseudomonas aeruginosa
atgatccgcgtcgatacgatctggctggccaccgagccgatggacatgcgcgctggtaccgaaaccgcattagcccgggtgatcgcggtgttcggtgcggcgaagccgcactgcgcttacctgttcgccaatcgccgggccaaccggatgaaggtgctggtgcacgacggcgttggcgtctggcttgcagcgcgacgactgaatcaaggcaagtttcactggcccggcattcgccatggcagcgaggtcgaactcgacagcgaacaactccaggccttggtgctgggcctgccgtggcagcgcgttggtgcgggcggtgtgatcagcatgctgtaa

SEQ ID NO: 351295 - DNA, 2091 bp, Pseudomonas aeruginosa
atgactctgtctagagcgcagcagaacctgtacgcatttgtaagccaggagcgagccgtttttcaggcgttgtctattgaaacaccgtgggaatcaactcaatggtcagtaaaaagttggcttccccaacgaaataaagcacaaacgatcacttttgaaacacaccggcagtcgctcgagaagaccggatattccgctccacccaaggcccctctccccccagcctttcaggacttctgcaaggccatcattgtgcacctgcagcgcacccggggattaaagttctcgatggtagcggcatacaacatcgccactcggcgactgtacaactcactatacgagcgtggggaagcagaccctctccgattgatgcgctctgactttgatcgcgtagtaggctttcttcgcgcgagcagttacaagaatttatacgatgcgatttcgcacctcaaagtgatcgctgacacaattgataagtttcaaataactgagatcgctattcattttgagcatgatgttcgccccgagaaagctcgccattgttatatttcattatatgaccccgatcgcgaggtgaagcagcgcaaatcggacgaaaagttaccttcccgcgaggctatggaggcctatgcgctatgcactaaccacccgcttagtgatagcgaagaaatattgctccgagtaattgatctattgatcgcgaccggtcagcggggtaacgaagtgacagtccttccttatgactgctggatcgagcggccgataaaggatactgcgggtgaacttgtgcttgacatccatggcaagccgctcattgagtgtggaatccgctattttgcggagaagcagtttcagtcgcgcgttcattggcttgctgaaagtgatgtcccgctggccaagcgggcaattgagcgattaattgctctgacaaaagagcagcgaactatagcgaaatggcaagaggacaatcccggccgcatttgggattatcccccgggctcggtgattaccgaggttgaagttataagctggctgaaattcagaagctatgacaacctgcatctttatttgaagagaaatggggtgcactgtatagactggtcaataaagagcggtcatgcctatcgatgctattgtgctggtgatatagaagcaataattgcgccaaaactccgagctcatgtcgcgctggcagatgacctaagtgggcgccatgtaattcttaaaactagcgagacactagctatcgcgtttgatggccaattccgctttggcggtcgtgaaggaaacgtacttcgcgcagtgccacgaagagtctcgttgatggacatcaatcgagctttggggggggaccctaggtatccgtctattttctccaggcgctctctagtcgaagctgatggttcgccaattcggctgaccagccatcagcctcgacactggcggaacaccatataccacctgaccggcatgagtgatgtccaacaagctttagccttggggcgaaagcggctggatcaaaataaattctatcagcacaccagcctcgaagaagacacagccacacaccacgattttttggcgttcaacagctatcgcgagcgcatcgattttcttcatgcagggattaaggaaggagctattcaaggagcactcactgatagttacaacgcactcctgcagagcaagggggctccgacggcagatgccttcctcgctgtacatgccacggcgctacatgtcaccccgtttggaggctgtgtccatgatttctcacaagccccctgcccgaagcatctgcaatgttggaacaactgctcacatctgcatctactgggcactccgtcggagaagaaaaatcttcaagaactagccaaacgcttgaccgacgccatcgtcattatgcgtgacgcgagtgctggcgaagccggtagtgacgtgtggctagcagatcaggagcacaaacttgagagtttgcgatctgctctttctcggaccagagacattggtccactgcaggtctttccgtccggccagccggtaacccttgctaaaacgagcaaacgacgtagttcggttttggatgagtag

SEQ ID NO: 351296 - DNA, 1254 bp, Pseudomonas aeruginosa
atgaggctgattcagtgccacctgtctacaggccagcgaatgccgctgcttgtgcaggatggtgtcgctacaccgttaccagtgctcgttccgtttctctatgtccaactcaaactcaagtaccgtgcctataacaccgctgcagcgcacctgcgtgctattcaggcgttctatatctatgcggagagccgcagcctcaatgtcgatgaggccatcctggcgtgccgctttgagtcgatcctggccgtgctggacggctacgtcgtttggcttttgagcggccggcgagctgacaatatttccgccagaattggtgctgcagattcgtccctattcccccaaatcgatctgcgaacccgcgaccaatatctgcgtttgctgaagcgctacctggcctgggctgcaacccgctacctaccgcgtacctcagccagtactggaactcatcatttaatcaacgcagccttcgttgacgtcgcggaagcaatcgagcgtcgattcgaaaaccacatcgttcaggtccgcccccaacaggctcgctaccgcagtctgacggaggcgcagctcgaaatcatccatgccctgatctgcccaggtggtgcggataatcctttccctgagcgagtccaactgcgcaattggctgatgatcgagctgctgctcgaaacgggtatgcgtcgtggtgaactcctgaagctctataccaccgatatcaaccacggctcccagcacgcctatgtcagcatcaatgaccgcaagcatgatccaaatgatccgcgagccgaagagccagccctgaaaacacacagccgcaccgtaggtatctcttcacagttgtatgaggtttacgagcggtatattcagcatggccggcgccccatccgtaacggtaaaccgatgaagctgccgtcccgctacctgttcatttccgaccggggccgcccgctgtcaatccgcgccttagccaacgtacttgatcggctttttctgacgattgaactggcctaccccggactactgcctacactatcggcacacgactttcgccataccttcgcggatcgattcctggcctacctaattgaggcgcgcggttacgaactggaacgagcgatggatgagctccggcggatctgcggatggtccgacacctcgtggatgccacgtcgctatgcaagccgttatctcgcagagtcggccaatttgcacaacgctcagcggacttcagcggcatggaaacggcttgacggctaa

SEQ ID NO: 351297 - DNA, 849 bp, Pseudomonas aeruginosa
atgatctcggccggttcatcccccttgctgatcggatgggacgtgggtgcctggaactgcgacaagaaccccagcagcctcgatgccctggtcgttctcgatagccagcggaaactcatgggtaagccctggtgcggaagcctccgccgcatgatcaatcagtctgcgtataccgatgattttctccgtcgactactgggactttgcgggctagaaggccatgaccaatctgtaccagtggtcttggctatcgataccccgctgggattttctcaggagttcatcgacttgctggtgaacggccatgcggctgacacgattgatcgatcatctgataacccatacctgttccgccgaactgagcgtttgctttttgagcgcggactgagtccgctgtcggcgctgaaggacatgattggtagccaggcgaccaagggcatgcatgtgctggctcgctttgcccctcaagtcgagacctgcggggtatggacggacggtgccaggttgcgtgctgttgaggcatatccccgcgcctgcaagcgttctgccaccatggctaaattgaaccaggaattcggtatcgggggacaagccggtggcgggctgccagagggtttccagcatggcgatcagctcgacgcactaacctgcgccttgatcgcctggctattccattttcagcccagccagcttctccagccgcctccggaccccactgaaggagggctggatttttgcttcagccgatgcttgagacatccaaatttacctttgaatattcccgccttgtcatcaaaagccgcaatgtgcaatcctcggcaagtttttataggactgcctgctgcttga

SEQ ID NO: 351298 - DNA, 1185 bp, Pseudomonas aeruginosa
atggctgtgcagcttgccctgcacatccgtgggctaccaattctgcagtactcgttagtcaagctcgtggcaacgacactgatcggcattccgagactcgcggtggatcggataaccaggctattggcggaaattgagttcgtccgcctcatacaggaagggaaaagcattaagtctgtgcttcccacggtgccttattttgaggatctctatgatggcctcggggagtatttcgaaaccgagtcaggggcggacgagttcgaaacactgacgctagagattgttgatcgcctggcaggcgcaccgcataacgctgactcattggcgtctgcacttggggcggatcgtaaggcttttgatgacagcatcgaaattggcacgaaaagcagctttctcatcaagcagcggcatcgaacccgtgacatcttgatgaacccaacatacttcaccgagaacgctgacatttttgcagaccatgtcgccaaggttggcgccaaaactgtccaacataccttggatttgctcaaacgcgcacaaggatggccgctggcgctgattgagaaaactcaagaaatcggcggaaaaaaggtctcggcagacgaggtcgcgcttctgaagcggttggcccaagacggtatggtgaaaccgccttctatcatcacctcgcacgcggggcagtccatgttcatgttcaccccaacgccgggtcaagtgaacgtcagccccttgaaacgagagcaatatgaacgagcgcttgcgattgtctcggcagtaaggcagggcgagctacttccaaatcgatacagcatcagaaaccccggggctcttctgtatagactgaagacagacttacagctcaagccaaccagcgactacgccgagcagtaccagaatctggttttgctacgtattgccaagctcgaaaagcagagcaacggctggcatcaactcaaaattatcgatacacccgagaatcgggagtcgctgaatattgcatataaccttgtgcaaggcgaaaaaatcgccgatctcgatattgataaagacgccattgcggcaatgacaggaagtcaggagtacgtcgagtctctggtgagttcgaagcttcttcgcgagcgagaaaaaatcacactttctgaggaaacgcagaacgaagtgacccagctactcttggagggaatttaa

SEQ ID NO: 351299 - DNA, 1113 bp, Pseudomonas aeruginosa
atgttgaaggacagggctcaaaaagccactgcactgaaattttgcgtatctaaacgctggctacctcaactagaggtagaaattgagccaagtaacaggcttgagcgctcaaaatttttactgactgaccttgatgttctatgtatcacaacatccccagtaggcatgcatagcaaggtcgtgtttgattgtaaaagtggcactagagagtccgctattggacgcgctttttggcttcgaggggtgatgacaaaggtaggggctgatcatggatttgttgttctgaactcgaagcttaaactgagccgagaccatcggataagtgcctcagagctgggcgtctcgttattgcacgatagcgagttcgctgacctagctcagggtttacagggctctatcaacctacaatccgactattccttggtatctgatattgaggcgtgggagtcctttctagagctgcgttcaaaatcaccagcgctagctgaatacatgagttattccgctagcgcgttttggacaatcaaggactatggcgaacaatgccgtaaaacaatagcgcgccttcgtaaactgagaccagaactagacccctccaagactgaccatctagctatttttggggatgccctttgtcttttcctaatatcgctatccagtctggctaataaactatttctattgcttatgaggccctcagctgctgaggatttttcatccgcccttttagcctctgtgtatggcgggtatgaaagccttcagtcagcaataaagattcgccaattagcaactgggcaaactgatgaatctgtaagcattttcccagatatcgaacgttttgagcagcttatcagagaggtcgttcaagcgccacagcaagccttgccggcggcactactttctagggaaattgggtttacccatttaaaaggcgtggtcgataccaggcttcagatggatatcgcgaacgaatccccatacgcgccgaagtttattttattggcggcagagtatttgcagagagcggcaaagctccctcctgagttttcggctatatatgtggagcgcgtgctttcgctaatgtccagggtgactcacaagaaatttgtataa

SEQ ID NO: 351300 - DNA, 2067 bp, Pseudomonas aeruginosa
  misc_feature (435)..(435): n is a, c, g, or t
gtgtacctttctgctttaaggatcgagaattttcgccagttcggccaggccaatcgtgcactggatatccagttcaatgaaggggtgactgctctcgttggcgaaaatgatgccggtaaaaccgctgtaatcgatgcaatacgatacgttctgcaaactcgggatgcggaatacctacgcctgcagatggaggacttccacattgcaaacgatggctcacaggcggaaaccatcaccctcagatgcaccctggaaggactgatccttgcggaactcggtgctttcgctgagtacgtgacctacaaagacggcgtgggtcggctgtacgtccactggtctgctcgccgcgtcgtcgcttccgcctcaacccgcaaatgggtcgacatctcggttcgttcgggtgagaacggagatggcccgcctttggacataggngtacggcaactactggccaccgcatacctgaaacctctgcgcgacgcggagagggaaatgtcaccgggcaggaactccagactttcccaagtcctgagtagtttccctaatattgatgccggcagctccttcgaccccgccttactcccggctgatctcgctagtgctgaggctctgagtatttccggtatgggcgactttcttcgacacctagtgaacagtcacagcgccattgtgtccgctcagaaagaaatcaacgacacttacctgcggccgttatcactcgccggtcagcccctcacgagccggatcggttttggcgaggctggaacggatcccgcaaagctcaaacagatattggaacgcctagagttggggctactggatcacgccacaggtgaagcccgaggcgcttacgggctaggctccaataatgtgttgttcatggcctgcgaactgttgctgctcggtaaagagcctgatgggctaccgctgctcctcatcgaggagcccgaagcgcacctgcacccacagcgccagctccaactgatggagtttcttgaggctgcggcccagccatccgttgacttaagacccgttcaaatcattctcaccacgcacagccctaacctgagctcgaaaatccccctgcagaacctggtattgatgcagaggcagcaggccttctcgctagcggaaaacaagacctgcttggcagctgatgattatcgcttcctcagtcgtttcctcgacgtgaccaaggccggcctttttttcgcaaagggtttgcttgtcgtagaaggcgatgcggaagccattctgctgccttcgcttgctcggcggttaggcctggacctcaccaaacacggcgtatcgatcatcaatgtgggtggtgtggggctgcggcgctactcaaaaatcctgcagcgcaaagataggtcggaaggcgagatcaccgtgcctacggcatgcatcacagacatggacgtgatgccggactgcgcgcccgagattctgagcctgaaaggagtaaaaggggccgtctggccagacaaagccgaccggcggtggcgcgccgtgaaagactttggcgccacctcgccggacatagaaagaggcctcaaagaacatcgcgacaaacgagccgagagtgatggccaatgtgtgcgcacgttcgttgccgatcactggacgctcgaatacgacgtggcgttcaaagggctctcaaaggaagtccatcacgccgcttatctggccatcaatgaagacaagatcgacgaaggcaaggaaaccaaggccagcgtgttgaagaaggcgcagatggccttcgaaaaaattcagaccgcccatgctaccgaagaagcccggtgctccgagatctacaagcttttcaaaagggcatccaaagcgatcgcagcccagcacctgatcgacctgatagaccagcgtttcgttgaccgctcccttgatgccacaacgctgcggggactgctgcccgcctacattgtccatgcgattgaatatgcgacgcggggggcagcactgaccaacaccagcccggctcaccccactatggtacccgccgcaccgaatccagtatctgctgattcggtagaagaggccgccaaatga

SEQ ID NO: 351301 - DNA, 2004 bp, Pseudomonas aeruginosa
atgacgctcagccaattggttgcccccatcactgacgccgatgtggactgggtcattagcctgatgggcctggaagagttggatgagccccgtcgtaacttcctgaagtccatggatagcgtagatgtggcggcatgccctggtagcggaaaaacgaccctagtcgtcgcaaagcttgccatcctggcccgccagtggaagagccgcatgcaggggatctgcgtgctatcgcacaccaatgcagcgcgagaagagattgagaagcgcctcggcggcaccgaggtggggcaacggctgctgcgcttccctcacaatatcgacaccatccatggcttcaccggccgattccttgcttcgccatggttacgctcgaaaggaattgcacttcaatccattgacgatgaggccacgcataaagcacgccgaagggcactgacgtacaaagagcatttaggtgcgcaagtcgccttcgagaaaaaattcaaaagtcttcacaatctgcggatccggtccgttgatttcgacctaccgcttggcaatgaagatattggttttgccccacacacagacacctacaagagtgtggtgaaatcgctcagtagtgcagccaaggccggctacttctgcttcgacgagatattcgttctcggtcacgctttactcgatcaggaagagggcgtgggtgccgccttacgcctgcgcttcccatgcgtcttgatcgacgagatgcaggacactcaacctgaccaggctggcgtgcttcagcgggttttcccccgcgatgatccggaccttagggtcattcgcgttggggatccaaaccaggaaatcttcgaaaagaagacaccattgccggatccattccccgatccggggcgtcagctggagatcaccagcagcttccgctttgatcaggccattgcatcgatcgccaaccgatttgcctatgcccccatcacgaatggtttggtaggccttcgggcgccgcgtaccccagacactgtccctaatacaatcatcgtcttccctgacgacgacgcatccgaggtgctggatgcgttcggaaagctggtgctgaaacatctgccggcagaaacccgtaggtcgggtgtgttcgccgtcggcgccgtgcatcgactagagaactataagcagaaccagtacccaaaggcactggagcactactggccatcctaccggtcagatacgaccaaggcgtcattcaagccacgtacgttcgcggaaggcgcccacattgctcgtcgctacgcgatgcgagaacccacagcctcttcagccgtcgagttgttggcttcctgcctggccaacttgggcgtattggcgtttccgggcagccaggtgcagctgagaggccgctatcaagcctcggtggaagagaaactcacaaccaagccagaagccttcgctcggtaccgcgattgcctccagcagattctgttcgtgccgtcggaggtcactgagcaggattggatcaaggtcatctctccgaaactcttgctgctggcagctgctcttcatgatgccgagggcgtgactgcggatcgccaaagccaccagtaccttgcttgggaacctgctccagtagccactgaagctggagaaagcggaggttctctgatcaacacctaccgattccaggacggcgccgacggcgtcgatattcggatgtcatccattcactcggaaaaaggcagaacccacgccgcgacgctgatcctggaaacctttaggaacacccacttcattcagaaactcatgccgtggcttgaaggccaaaaagccgctgccaagagaccaacggacagcgccaagaaagacatgatgctgatgtacgttgggatgacccggccgacccatatgctctgcttggccatacggcagagctcactgggggagggggcggcaggcgaaaagcggagggtggcactcaaaactgcggggtggtcgattttggaactggcggcccaggtatccgtttcataa

SEQ ID NO: 351302 - DNA, 813 bp, Pseudomonas aeruginosa
atgaaacccgagatgtctgagttttcctacggcttcgccttcaccaacgaactggttacacttcccggctctcacgtcgtagccgcccccgaattcccttcgctgcagaaagagggcaagcctggtggcggttacgacgtcaagattccgttcgggtcaccgctcttcctccaattcaagctgagccattacctagagcgcacaaactgcaaggaatacactctaatgggcggcgcctactaccgttggcatcttcatgccttacggcactccgcccagcatgatttgttgctggagcttgaaagtaaaggcaacgaagtctattacgtagccccaggtttccaccaaacagcagagctgaatgcgcattacctgtcgaagcagatcgtcaattgctcatttggtttccgcccaggtgatatcggcgtcttgcctgatgaagatgagcactacgtcgtgttcaacagccgtcctttggcataccgatgctcagacgaaccatcgccagtcaaagctcaggggatgggggatctcctaggcgtagctcgggaccaacgtgctactcggaatctcaacgaagctgggattcgtcaaattggtcagacaatcgtggacgtgcttcgtaagagcagaacacgtcgctcactcgttggccacaagtcgatcaatccggatgaggtcgcaagggcaatcgataaccaacctacgttgagaacactcgcatttatatcccgtacagttctggactctgaactactcatcttaaggaacgagccaacggtcaacgcatcagtcgtaagcggggatgagtga

SEQ ID NO: 351303 - DNA, 219 bp, Pseudomonas aeruginosa; identical to SEQ ID NO: 331859

SEQ ID NO: 351304 - DNA, 801 bp, Pseudomonas aeruginosa
atggctgcgaaggagcaccgaaaggagcggattgaagatcaggagttcgatggcgaaatcactgagggcttcgagcaaaaggagctcatccgaatatttgccgtcggtgtggtcttcaatggtgtgtcgttcaagcaaacgattctttccaactgctacttccggaagtgtaagtttattcgctgcgattttaccggggcgcagattaaggagagcaactttaagggctcttcttttgaagaatgtcaatttcgctactcaacgtgggaaaaaacatatttagacgaaaattttcttgatggctgccttccccctgaggaaaacctcgcaagggatcttgtgcgatctttacgcgttaactttgcgcagataggaaactatgaggcggtgaacgaggctgcttcgattgaggtggcgctgacaggtaggcatctttacaacgcagcctattcgagacaggcttactacagatccaagccacagtataagggccgagggcgggtcagctacatagcacagcacgctcgctggaagactctcgatctactttgggggaacggggagagcattcttcgtgtattgttcgcgggaggtgtagcgatttttattgccgcagcactgttggtggcttcggagaagagctttggctatctggagtccctgttaatctgttttcaagccttctggggactcactgaacgaccgatacccattgagcttgcggtagcactcacgatctgtaggttcgtcctctttgggcttttcatggcgatacttgtaaagcggttgtcccgaagatga

SEQ ID NO: 351305 - DNA, 624 bp, Pseudomonas aeruginosa
atgaatcacgacatattcatcttcgggtcgactgtacgcggcgaggtgggggcatcgtcggatattgacgtgctcgtaatcccagttagcagcgttttccccgagatatatccggcctcttggagcgtttacagtcgtgagactgtacgctcctactacgaggaaggtcgcctctttgcttggcatctccatctagagtcactctgtatttatagcgcaagttcggagcactggctggagacacttggttgcccggccgattaccaaagtgcacgcgaggatgtcttgagcctcacggccctgctctgtgactccttgcttgagctgcggaacggcactgagagcgttatctatgaactcgggatttgttacacggcgctgagggatatcgctatgtcggcttcttggcatcttacggggcgcccctgcttttcccgatacgctcccttcatgcttccgggagcgcaaatcccgatcgagcgtgaggtatatgaacaggcgatgatggcgaggcatttctcaacgcgaggaagcgctcagcctcgcacgccggaagatacggcctccgcacttcttaaagcgccattattcgaatgggtgcaagctttgggagatgtgttatga

SEQ ID NO: 351306 - DNA, 126 bp, Pseudomonas aeruginosa
atgatcaccatcaatgaccactcagatatcaggtgggtgttcgtcgacttccatatggagtgcctggatatccgttacagcaacaccaaccagtggccaggatcgggcgagtcactggcgaactga

SEQ ID NO: 351307 - DNA, 165 bp, Pseudomonas aeruginosa
atgatcttattcatcgcaatgaaaaaactgtccaaggttagactcaatgtaaccatggagaaaatggagaagctcatcaagctggcagactccaccactaaatatatagacaagcaattaaagtcggacttttggagaacgaagaggactagcctaagcgcctga

SEQ ID NO: 351308 - DNA, 2181 bp, Pseudomonas aeruginosa
atgaacgaagtgtatcaggcggcaaagatgagtttggacagtgatgggttctctgcattcaggtacctatcagctatcaactctctgttgtccaatccagtttccacttccctggggagagacctgacaatccgagcgctcggtgcccgtgataaattcaccggccatgtaggaattctgcgcaatatggttaggaaggccggactgtttccatacttgaaaaaagagttttctgagcattctcccagtgatcgggtagccttgaatttataccgaacgccgttctcggctgacttcgttttccattcgatgcaatttcaggttttcgctctcctcaaggcaggtcgtaatgtcgtgctcagtgctcctaccagtatgggtaagagcgccatcgtcgattcgctgctggggctccgtagtttcaaacgggtcgtactcgtagtgcccacggtcgcgctggctgatgagacccgacgacgtcttcaagagcgcttcggcgatacctatcagatcattcatcacagttcacagaagagccacagagactgggttgtgtacgttttgactcaggaaagggttaacgagcgagatgatatcgaagatatcgacattttcgttatcgacgagttttacaaattggcttttcggcaactcaaaaagggtatcactgacttcaaagacgagagagtcattgagttaaatattgccctgagcaagctattaaaggtgtccaggcagttctatctgaccgggcctttcgtcaacagtattcgtggcctcacagagcttggttacgaccatgcgttcatcactgccgacttcaataccgtagccgtcgatgtgcagacctacggtgtcgatgccaatgatgacgaaggaaaactcaaggccctagccattatcgcgccgcagtgcaaagggtcgacaatcatctattgcaagtcctcaggcgtggcggggaaggttgctcgcgaacttgtccggcttgggtatggccaaccattccaagatgcccatgtggaatgggttagtaaggaattcgatcctgactgggactacacttacgcgctcaaaaacgggataggtttgcacttcggtggcctgcctagggctcttcaacaatacactgcagaccgtttcaacgcaggtgaccttcgttttctactgtgcacctctaccattattgagggtgtgaatacgattgcgaagaatgtggtcatctatgacaaccgtaatggcaacactgggatcgacaaattcacccacggaaatatcaaaggccgtgcaggcaggatgggtgtccatttcgttggcaaggtgttctgcctggaagatgttccggaagacaacctgaaccaggaggtcgatgtccctctggggattcagggtgctgatacgccattgaacttgctcgcgagcgcacagcctgatcacttgtccgaatattcccaggacagatgtgaagccgcctttgcccaggatcggttttctatcgatctggtcaagaaacactcttacttcaggatggagcagttcgagcagctgtacagtatggttgagatgctcagggaggaggagttcgactcactcgtgtttcactggtcaccagcgcctggttttctgacagccttggccaagatcagcagcaggctcgtgccaaaggcgttttctacgaatggactgcagaccaaaacccacgatgccatcttggccaagctaacgagctatcagaaagcagagagttactcggcttatctgaaaagccagatagagcacaccaagcaatggagcaaggttgatgagaaggtaaatctgtccaccgcactcaacaacgacctaaaactggtgagcaataccttcggctacaccattccgaaggtgctcgggctgctggaagacgtggttcgcttgcacgctatcaagaagggcatccgcagcacgattgactacagttacgtcagaatgagctttgagaatctccacctccctccaggggtgaatgcgcttgaggaaataggtatccccattcagacactgcaccgtatgtctaagctgctgaacttcccagaaggagcaagtgtggatgagttggctgactatcttcgacagaacgagcgggcttggaggtctatgggccacgtcgaccagagcttcgtcagacgcgcgttgggagcggcatga

SEQ ID NO: 351309 - DNA, 1629 bp, Pseudomonas aeruginosa
atggatgtcgtgatggaacccaatgacgctggcggagtcgctgccaagcacggcttcatctttcaggattgtgttgccgcctactacgttacccagatgctgcgtgataaggcgattcagcgtgtgcgctgtgaggtcaccgacgacattgatgtcgtgtacgacaatttcgtcgaattcgtgcaggtgaagactactaacaaggcgcactgggccagaagtgatctagtcgttctcagccgaggtgacgggaaggccaagattccacacagctcgattctgcataagtcgatgcaaagtgaaccagagctcaccgtgccaagaaaattcaaaatcgtcacggagcatccggtcaacgtttcccttgaatacctgcgtatcagccgtgacgaacgcaatggcaagccagggcgtgatgagttgatcgactacctgaactcgaagacctctaatttcgtcgccaccagtggcgtggatgtggctacctgggttgacgcaatgtattgggaggtgttccgaaccatgcgcgagattgagctcatgggtattaggaacattcgaaacgctgcgtatgagcttcatggggttacattgagcaccgaggccacggcggaggatatttggcgagggattttagatacggtcactcgtaaaggtgccctgtcgcgcaaaatccactcggcagatagcaagtcctatcttcgtgcagatttgaatgcgtggttccagaccctggttgaagaggatcaaaagcacgcgggccgtaaagtgtatgtcaaacgccagctacctcatattttggttccgttccgcagcacactggtcaccccatgcgctaagcgtagtggccttgtcctccaccagaagtacagcctcaagcgttaccgataccagtatatcgccgacaatgtttgcaaatggctagatgaggttttccttcgccccaatgaactcgctgacatccacaagctatcgattgtcgagcagaggcagcgcttaagaaacacggtgttcgcttcattggcggatgtacgttcctttctggggcgcgttctccttcatgccacgatacggcaattgcattcgagtcagcccatcccgtgcctgctttatcttgaaagccaggggaaagaaaagatactcgaaaatgtacacatcgttcggcgaaatccggaaggcgatcagctgtgggttggcttcagtgagcttgtcacggcggtcaatattataaagcgtctgcctgagatccgacagcagctatacgatgagatcgaagcgtgctttagcgaagcccgaggaaaaattctcgacatcaaggatgatgcctacctactacaccatgacatcgacgtcattctggacgaaagcaactcttttgatgagcacttggatcgattccggtttgtgctgttcattggttatgactcttcgttacttacagaccctgaaactccagggcatgaagataaactggaggatgaaactgcagcactcttcgaagcatttgtcgatgacttgcagcgaaaccccatcttcgcgaagctcacaatcgatgtgtttatctaccctgcaccaagcttggacgcattgacccaattggtagacaggaaggtcagggaggctgtatga

SEQ ID NO: 351310 - DNA, 1299 bp, Pseudomonas aeruginosa
atgtgtataagagacagccatcaggcgttcgaagtcataggtcacggtcttggcggcgatcgccccgttggtgcccttgatgatcaggtcggccgcctcggtccaacccatgtggcgcagcatcatctccgcggagaggatcagcgaacccgggttgaccttgtcctggccggcgtacttcggcgcggtgccgtgggtcgcctcgaacatggccaccgaatcggacaggttggcgccgggcgcgatgccgatgccgccgacctcggccgccagggcgtcggagagatagtcgccgttcaggttcagggtggcgatcacgtcgtactcggcggggcgcagcaggatctgctgcaacatggcgtcggcgatcacgtccttgaccacgacgttcttgccggtcttcggattcttgaactgcatccacggaccgccgtccagcagctcggcgccgaattcatcgcgcgcgacttcgtagccccaatccttgaaggcaccctcggtgaacttcatgatgttgcccttgtgcaccagggtcaccgaactgcggtcgttgtcgacggcgtattgcagggccttgcgcaccaggcgcttggtgccttcctgggaaaccggcttgatgccgatgccgcagttctcggtgaagcggatcttcttgacgcccatttcctcggtgaggaacttgatgaccttctccgcttccggcgaaccggccttccactcgacgccggcatagatgtcctcggagttctcgcggaagatcaccatgtccacgtcgccgggcttcttcaccgggctgggcacgccttcgaaccagcgtaccgggcgctggcagacgtagagatcgagttgctggcgcagggccacgttcagggagcggatgccgccaccgaccggggtggtcagcgggcccttgatggaaaccacgtagtcgcgtacggcgtccagggtttcctggggcagccaggtgtcctggtcatagacctgggtggccttctcgccggcgtagacttccatccaggcgatcttgcgctcgcccttgtatgctttttccactgcagcgtcgacaaccttgatcatgaccgggctgatatcgacgccgatgccatcaccctcgatgaacgggatgatcgggttcttcggtacgctcaaggacatgtcggcattcacagtgattttgtcaccggtcgccggcacctggatcttttggtatcccatgctgaactccgtgttgtggttaaaaccctgttgcagccttctagggtagcccagttgtccgcccggaaaccacatcttccttag

SEQ ID NO: 351311 - DNA, 660 bp, Pseudomonas aeruginosa
atgctaaggcgattgaaaaaacttcctctacatagtttcattgcggtgcagcgctataggaataatccaatgatttctaatgatgaccgcaaagctcttcagcagtcagtattaaaatttgagttttaccttctgtcgttatggttgttatttttgctgataataataattaagatcgacgttcctatatgtttcgagagagggtgtgaatttattggtgttcttgatcttctgcaaagaaacatattgccagtgtgctcgttgctttttattttaattggtttgtttttctattggcgtttcaaatataggctcgaatccagtaatgaaattccggttttgataactgaaattgaagatctgagctatgaacatctaacctttcttacaacctatattgtgcctttaatttgttttaatctagacagtgctcgctatgttttatcattgtttctattgcttttcgtgattggcctgatttatgtcaagactgataagttttatgcgaaccctacattggctgtgcttgggtttaggctttacaaagtaacaactgagtgtgggtgtaaggttgttataacaaaggcaaggctagctaaaggcgatcgaatcgcttttattaatttagatgataaattcgtctacgggaggatatcatga

SEQ ID NO: 351312 - DNA, 801 bp, Pseudomonas aeruginosa
gtgggcggacgagttccagatgatcccggcggatacgggggcggccgagccgggcaagtaccacaccgaccggaccccctatgcgcgcgagccgatgcgctgcctgtcgccgctgttcccagccaagcgcgtggtgacgatgatcgcctcgcagctgatgaagacccaggtcgccttgaactggatcggcggctgtatccacatggcaccggccaacatcctggtgctgctgcccaccgagaagctgagcaagcgggtatcaggacggatcgacaagacgatcaaggccgtgccggtgctgaccgcgcgcgttgccaaggcccgctcgcgcgactcgcgaaacacgctcgacaccaaggagttcgaggggggcgcactgtactgcgcatcagccggctcggcctccaacctggccgagttgtccgctcggtacgtgtacggcgacgaaatcgaccgctgggaaatggatgtcgacgacgacggcgacccggtcaagcaggccgaggcgcgcggttcgacgttcggccgccgtgcgaagttctactactccagctcgcccacgctgaaaggcgtttcgcggatcgccgacctcttcacccagggcgaccagcggcactactacgtcccgtgtccgcattgcggaacgatgcaggtgctggaatgggagggcctgaagtacgaccccgagtaccgccttgtgcagtacatgtgctgcaacgaggagtgcggcgccctgatcgaggagcaccacaaggcggccatgctgtctgctggcgagtggcgagcccatgccatcggtga

SEQ ID NO: 351313 - DNA, 1158 bp, Pseudomonas aeruginosa
atgggccatggccaggttgtaggtgagcaggtcgagtccttcgttgcgggccgacttcgctttcacgtactcggtgcgcttgtgccccttcacgaatcgggtgattttccgctcggccacgatctggtcgtagaagtcatccgccaggtccttggaaaagtgcagcgcgccgggcccctcgctcaggggatagcggttatagatccagtccttcgcggtgtcggtgccgatcatccacagctcgacgccgcccttttccgtcttgccttgccaggtaacgtcaaccttcgacggcctctgggcgatcaccggccgtccgggcttgctgtgccccctgatagccaggacgttacgccagcgccgcaggcgggcgaactggtagacctcgtccgaatggtggccaccggagtcgatagcggtggccacgattgccagctcgacgcccgaggcgtgccggtaacggcgtttcagttgctcgtccagcaggtcccaggtccgcaggtcggaggggttgcccatcagcacctggtgatccaccacccaacgctccatgccctcgccccagccgatcaccagcagctcaagccggtcgccctgggtatccaccgcggcggtgaggatgacagcgccgttaggtacctgcccgagggggtagtcttcggcccgcgccctcagttcgctggcgttggtcatttcttgggaggaatcccaaacccgtgccaggcgggtgttatagaacacctgcatgggctccaggtccccgcgctcctcggcacgcctagccttgacgtactgcttggccaggccggcccaactgacccagccaaggggtgcatagagcgcattgagatagaaaccaaccgtctccccatcccctgtggcgtgggaacgccactcgccattggccagcatccagcccttgctcgactcctcaatctgagcgtggcactcctcattggcgcagaggtagtcgacgcgggagaagtcatcgctgtacttcaggttctcccactccagcacctgcatatgccggcagtgcggacagggcacatagtagtggcgctggtcgctctgctcgaacaggtccgcaatcttcgacacgcccttgatcgtgggcgagctggagtaatagaacttggcccggcgcccgaaggttga

SEQ ID NO: 351314 - DNA, 426 bp, Pseudomonas aeruginosa; identical to SEQ ID NO: 342699

SEQ ID NO: 351315 - DNA, 951 bp, Pseudomonas aeruginosa
atgcttgacccgctgcccggcctcgggattgaaccaggcgccggtgcgcagctcgccaatgctgcccttggtccccgggtcgtagtcgcccaggtggcgctcgctggcggcgaccagcatgtcccagacctcggtgccgatggcgaaggccgcgctgccgatgaagtgggtgccattggcgtcgccgcccaggccgctggtgaggcgcacccggccaccgacctgcttgcccggcctgaccaggtcgcgggcctccagggtgcggaagttggcgatcccgccgatcaccccggcgccgcccatggccgagctggcgcccttgtcgatgaccacctcgctgagcagctcgggatcgacgtagagcgtcccgttgcgctgctggtggccgctctgctggtagttctggcgcatgccgtcgaccgacatgttgacccgcccgtagtcctggatgccacggatgttcaccgacaggccggggtcctgctggctcaccgaggagtacaccccgggggtttcctcgagcatgtcggcggcatgccgcggcgggttgcgctcgatctgctcgcggccgatcacgctgaccgaatgcggcgtctggtagacccagtcgtccggacgcgcggcggagatcaccgagggcgacatctgcaccaggtcgtcctggctgacgcggatcaggctcaattggtccttgccggagaagcggtattccaccgggctgccctggagcatctggctcaggccgtcggccagcacgtattcgccgtgcaccgccgcgctgccgagaccggcgaaacgctggctgtcgaagaacacctggaccccggcctgctcggcgaatcgcagcagggcgcggttcagcggttgtgccgggatgtccagccggacccggcgcagcgcggtctgctgctggctcgccgagtccgccccgtcttgcgcatgcagcggtag

SEQ ID NO: 351316 - DNA, 1287 bp, Pseudomonas aeruginosa
atgatagctttcttgaagattgatcttgaggctgaatcaagattcttcctgcaagcatttctttgcatgaatgacttgagtctggaggccccttacaagatcaagtcggtagcgaagcagctctgcttgacggagagatttgtccgggacgcatcgcaagagttggtcagggctaggcttctgagggaaagcaagcaggaaggcggggttgggcgtcctggtgttggatacgttgcctcggagcgcttgcttagagtgctcgccgaagtaggcagagaattcacccaccaagagctaatgcttcgcctttttcttgagccggacatttacgcagttggagagggtgaaacgtcggtatcgacagatcaggaggaaaagtcatcccgctccgctacccgcaaagacggtcgacctgctgcccctggtgccaaggggcggctgggggctgcctcccggatgttattggccgctcttctcagcgaggctgacgagtgcggtgtcgtgactgggcttggagggccgaggctcagggccatgactggactcgactccttatcgatcaagcatcaattgaagcgtcttttgagcttggggttcgttcgtagctatgtgccggggctttcgaatggggttttcgttggctcaaaggtcacgagcatttactacctaaacctagatcacccacaactccgtatgaagcagagggagcgggcgttggtggtttacgcaacacaagggccgggcaagtacgacatgctcgaagcggcgctgcctgcgatggtgaagctaaaagcggtagagcctagggtgcaagaaatgctctatcacaggttggcaagttatgcctctcatctgctgacggctatttgggctgatccagagtgcgagcttgctgatgttaaagcggcaattttcgaaagaatttctagtgagctgggtgggcctttgaccgttaatcctgatcgggctctgtcgggtccttgggatggcttgagggaaagcttccacgctgagatatgccagtgggcggaaagcatccacaaggggttgtgccgcatgaaggtctggggaggatacaagccccaacaggttcggctcatcccggctccggttaggaaagatggccttagcattgtgtcgttggttgtatatcccgtgccgagagttaacgacatatgcctttgggtatgggacgtgcgcggtgggagggttgattcgtatgtgcgtgaggatgcgctgggcttagcgctccgctatgaggtggcgcttttgaccaagactcgctag

SEQ ID NO: 351317 - DNA, 1899 bp, Pseudomonas aeruginosa
atgactaagagtaccgcttgcctttgcctcactctgatagcggcttctctgctcgcgggtgtggcccacgcccaggatccggtgacggtttatgccgctaaaaacatcatcaccatggaaaagagcaaccctgaagcgcaggccgtggccgtttccggcaagcgcatcgtgtccgtcggtacgttggccagcgtcaaggcggcactaggagatcagccctacacgctggatgagacgttcaaggacaaggtgatgatgccggggttcattgagcagcacatgcaccccttgctcggcgcgctgacattgagcaccgacgtgatctccatggaggactgggatatccccggcaagcatttcaagggggcccagacacctgaggaataccttgagcgcttgcaggaaaccaacgcgacgctcgacaaagacgagtggctatattcctggggctatcatccgctttggcatggcaagatcgaccgcgcctacttggataaaatcagtagcacccggccgatcattatctgggatcgttcctgtcatgacttttacctgaacaccgccgccattgaggcattgaagctcgacaaggcggcgatgcaggggcgtggtcttgccagcactcagttcgattgggacaagggatactggtttgaaaacggctccatcgagttgctggccccgattctgctcaagcacatgggttcgccagagcgccttgttgcaggcacaaagatgctggttgagtacttgcatcagaaaggtattacggcgtttaacgacccaggcgccttcctgataccgggcctgtgggacatgtaccagaaagtgctcggcgcgcccgatgtccccttctacagctacttcttccctgaggcgcgcactcaggccgtagccggcaagagcttggtggaatcgctggctgaaaccgaaaagcttgtggcgacggggccgcaaggcaaggtgtccatgttcagcaagcagatcaaactgtttgccgatggagcgattatctcgcaagccatgcaaatgaaggatggttatctcgatgggcatcagggtcagtggatgatgaccccggagatgctggagacgtggggcaaaatgtattgggatgccggctatcagctgcacatccacgctaccggcgatcttgggctggatgtggtgctcgatatgttggagcggcgcatgcgtgagaacccgcgctacgatcatcgcaccgttatcgtgcacttcccgaactcgaccgaagcgcaagtggatcgcatcgctcgtctgggtgcgattgtgagtgccaacccgtactacccgatcggttttgccaacaagtacgccaagtacagtaccggccccgaacgggcgcatgccatggcgcgtaatggttcggtgatcaagcatggcatcccgctctccttccactccgacttgccggtggcctatgccgacccattgttcctggcctggagcgccgtcaatcggaaaaccaacgaaggcaatgtggtagctcccgagcagcgcatcggcgtgcatgacgctatgcgagcaatcaccattgaaggtgcctactcgtggcgtaaggagcaggagctgggcagtatcgccccgggcaagattgccaattttacggtgttagaacagaacccctaccaagtcaaagcactggcgctcaaggacatcccgatctggggtacggtgtttgaagggcggctgttcccgaacacggctcaaccgaaggcggttgccgcccatgatgccccggcgaccagtcacttcgacccgttgcaggcatttagtcatgagcatggcaatggtgatacctgcgacattgctcgcaagctggtgacgatgttgccggatagctggagcgaaagcggaactgcattggtgcagaactga

SEQ ID NO: 351318 - DNA, 1806 bp, Pseudomonas aeruginosa
atgcatacttataaacacgtcataacgagattgtggatggtgctctctctctctgcctgtgttgtgcctgcaggttttgcgctagagcaatctgcacagcccagcgctcatgaatgggaaagtgcgctgaaaaaaagtgggaaacctataacggtctatattgccaagaaggtttataccatggatcctgggcggccggaggcgcaggccgttgcggtgctcgatggtcgagtgttgtccacgggtacactggactccatgaagccgtggctttcgcgttatgactacgttgtcaataaagacctgaaagataaagtgatcatgccgggttttatcgagccccatgctcatttttggatttctgctggtttcttggggttggaatatatcggacctattgagtctcccaacccggccgggggcatgtatgaagcagtcccgacctttgatgacattgttgctcgactgcgccggctcgataaggaagaaaaagatccgaacaagccaatcattgcttatggatatgatgccgcaaagcatgggggggatttcaatcgcaaggtgttagatgaaatcagctctaccaggccgatctggataattgctttcgcgcctcactttgtctacctgaacagcccggcaatcaaggtcgccggaatggataaaaagactgctgtccatggtgttggaaagaacccggacggtagccttaatggtgtttttgcggaggttttggccgtttccaaggccctcggccccgtgtttaaaaacatccaggaaaatggtggcgtaaagggcctgcatttcatgggggatgttgcccggagtgctggaataacgacggctgctgagctggtttttggcgtcatagatttcgatacagagtggaagaatgcgctggaggcaaccgctaatccagatttttccgttcgcatgcaaatgattccactggaaagtgccctacggagacgctacgagggtcaggaaatcgatgcctattggaagatggctaaaaagagcagcgataggctttgggtgcgtggtataaagttcttaaccgatggctcgttcccattgatgtcctccaaggttgggttcccaggttatttggatggctccaatggtttggtgaacgatgtgccctggaatcagatggtggggcgtgtattgccgttttggaagagtggtattcccattcacatccatgctaatggtgatcaggccggagatgttgctttggatgtacttgcgcagctgcaagacataaagccacgatttgaccatcgctacaccatagaacactacacaatgacaaataccatgcaggcacggcgtttgaaagcgcttgggggcgtggcaagtgtcaataattacttcgttaactaccgcagtcagttgcattccgatcatgcatatggcccggatcgttcacaagcagtggctcgcctggggtcgcttgatcgtgagggggttgtgtttggattgcattcagactacccgcaagtagtggttccgatgcacccattaactgccgtttggattgctgtgaaccgttttgccgaagatggcaaaacggtggtcgcccccggtgagcggattagtgtcgagcgcgcatttcgtgcagtgacaattgatgcggcctacatactgggagcggaaaaggaactgggcagcttggagccgggcaagttcgctgactttgccattcttgaggatgatcccttccaggttgaccctgagaaaatcaaggatgttcctgtgtggggtactgctctttcagggaagatctttaagcgcaaccgttga

SEQ ID NO: 351319 - DNA, 939 bp, Pseudomonas aeruginosa
atgaatggcacaatagatttgaagcgcatccagcatttcgccctgctgggtgaagagctgcacttctcccgcgctgcagagcgcgcgaacctttcacagacagcattcagccgcagcattcgctcgcttgaggtggatctgcagttgcgcctgttcgaccgcgacacccgtaccgtggagttgacagccccaggccggcaactgctggtctatgcccgcgaactgcttaatagcgccaataacctgaaaaccgaagccgactatatggccaaggccgaaggcggcgagctgcgctttggggcgagcaccatgaccacccacagggcgctgccgttggtgatcaacgagcttatgaccattagccccaagctcaagctaggagtcgaagtcagccacaatgccaacctcggcactaagctgctggaggaggacattgagttctttgtcgccaatgcggattttttaggcgatgaccctcgcttcgaggtcaccccgctgttcagggaacccgcctctttcttctgccggaccaatcatccactggccgtgcaacccgccgcagtgagcctcgagcagttgcttgcttacccttggacctgcattcgcttcgacggcccgacgataagccgtctctatcgactattcggcgtgtcctcccaaaagcaattgccaatggcactgagctgtaacgacccgggagtgcttcggcaagcgctctacaacagcgatacgctgctggcgacctggtctggctggctggaggaggatattcgacaaggcaaggcaattgatctgctagcgcgcgttcagcctacccttagcgcggaatctctcgtgctgaactgcgccattgtgcaattggccggacgcagcttgtcgcccagtgccaggagtgccattcagctgtttcgtaagcatacccaccccgtcgacgaataa

SEQ ID NO: 351320 - DNA, 1764 bp, Pseudomonas aeruginosa
atggccgtcgctctcggtttgagtgcgcagaccgaagccgtttctttcactatcggcgagtttgaggggcagtttgatagttcgctttcagtcggcgccagctgggctttgcgtggtgccgacccgtccaacgttggcggcttttatggcggtgaggcctcatccaataccaacgatgacggccgccttaacttcaagaaaggcgagaccttctccaagattttcaaaggcctgcatgaccttgagctgaagtatggcgatagtggggtctttttgcgggggaagtactggtacgactttgaactgaaggacgaaagccgttcgctttacgacatcagagatgtcaaccgcaagcaggcggcgcagtcctcgggcgcccagttgctggatgcgttcgtctaccacaactacgtgattgctggacaacccgggacagcgcgtctgggtaagcaggtcgttagttggggcgaaagcacctttatcggcaacggcctcaacagcatcaatcccgtggatgtggccgcattccgccgccccggcgctgaaattaaagaagggctgatcccggtcaacttgctctatctgtcccagggactgaacgacaacctgtccgtagaggccttctaccaactggaatgggatcagaccgtagtggataactgcggtacgttcttcggtggtgacctcgtggctgatggctgtgacgatcgcctggaggccacgctaccgggggccttgggggtccgtaatacctatctgacgcggggcgctgaccgagacgctagggactccgggcaattcggtgtggcattgcgctggacggccgaggcgctgaatcagactgagttcggcctgtatgccctcaactaccacagccgcgcaccgttcataagcggtgttgccgctgacaatgccttggtcagacccggtacgccaggtatcggcggcaagcccaggttcgcctccactggggagtacttcctcgaataccccgaagatattcgtctgtatggcttgagcttctccacctctgttggtgtgaccgcagtgtctggcgaagtcagctatcgccccaatatgcccctgcaacttaacggtgttgatgtcacctcggccgcgttctatggcgcactcgccaatcaggtgaactcaccactgttcgccagcggtcattcgtcgcttgccgccgcggaggcgttccacggctatgtgcgtaaaccggtcagccaggcgcagctgacgctgacgcactttttcgaccaggtgtggggcgcggatcgtctgaccctggtgggggaggccggttacaaccacattactggcattaatgacagtgcattgcgttttggccgcgatggcaactatgggaatgggcaaatgccggccggaaccaacccacttaatggcgcagcgctcccggcaaacgtgtcctgtacggctttgctcaacacggccaatccgcagaactgtaacgacaagggcttctataccagcagttcctggggttaccgcgggcgcgccattcttgagtactccaacgtattcgccaacatcaacctcaaaccgagcgtgtcttggtcgcacgatgtcgacggctatggccctaacttcaacgagggtagcaaggccatcagcctagggctggatgccgactatcgcaacacctacaccgccagtctgacctacaccgatttcttcggtggcgaatataacaccagcattgaccgtgattttgttgcgctcagctttggcgtgagcttctaa

SEQ ID NO: 351321 - DNA, 1362 bp, Pseudomonas aeruginosa
atgaacaataaactgatcccacttagcattctgacgctggccttgttgtcagctggtgttcgcgctgcggtttcgcctgaggaggccgcgcaactgggctccactctgactccgctcggcgcggaaaaagccggcaatgccgatggcactatccccgcctggaatggtggtttgagcacggatgccggggcggtggatgccgccggctttttggccgacccctttgccagcgagcaaccactgttcagcatcactgcgcagaatgttgaacagtacaaggacaaactgacgccgggccaggtagcgatgttcaaacgctatcccgatacctacaagatgaatgtgtatccgacccaccgcagcgccagcatgcctgacaatgtttacgagtacgcaaagaaaaacgccctgaatactcagttggtgggtaacggggatggcctcaagaactttgtcggatactttccctttccgattcctaagtcgggtgtagaggtggtctggaaccacatcacgcgataccgggggggcagtgtggatcgcaagttcgcccagatcgtgcctgatgcgcggggcggtttcaccccggtgatcatgcatgacaccttggtgttcactgacttcattgcagactacagcccggccaagcagggcaatattctgttttactggctgcaggcagctgactcccctgcgcgcctggctggcaatatcacgctggtacatgaaaccatcaaccaggtggaagagccgcgcatggcgtgggtctataacgccggtcagcgccgcgtgcgccgtgctccacaggtggcttatgacggcccaattggcaccgccgaaggccaccgtacggcggacaacttcgatctctacaatggctcgccagaccgttatgagtggaagctggaaggaaagaaggaactctacattccttataacagctacaagctcgactcgccgaaactgaaatacgctgacgttatccgggccggccacatgaatcccgatcttcagcggtatgagctgcaccgtgtatggcatgtcaccgcgactctgaaagcgggtgagcgacatatttacgccaagcgtgatttctactttgacgaagacacttggcaagccgccgtcattgatcattacgacggtcgcggtagcttgtggcgggtcgctgaagcccatgcgatccagatctatgacaagcaagtgagctggtatgccgcagaaaccctgcatgacttgatttccggtcgttacctagtgctgggtttgaagaacgaagaaaaaagtaactccaagttcggcagagtcgcaaacacatccgagttcactcccaatgcgctacgccagtccggtgtgcgctaa

SEQ ID NO: 351322 - DNA, 1536 bp, Pseudomonas aeruginosa
  misc_feature (731)..(731): n is a, c, g, or t
atgctgaagttctctggccgtccggccttccacgggccccagggcaccttgagctacgctgagctggatcgtcagtccgcggctctggctgcttggctgcaggtcgaactgggagtacggcgcggtgaccggattgctgtgatgctacccaatatcctggccttcccggtggtgatgcttggtgtgctgcgcgccggctgcgtgcaggtgaacgccaatccgctctacactgcccatgagctcgagcaccagctacacgatgccgactgcaaggcgatcttcgtttacagcggcagcagcacgaccctggcgcaagtgcggcgaaaccctgcattggttcgggtcattggtgtcggtgcgggattaccgggcgctggacaaccctgctggccggcgatggacgccgggctgggcgaacataccgagctggagcaggcgctgggcttcgggcagatgcttgagtgtacgccggtaccgttgagcgccgatgatctactgtttctgcaatacaccggtggtaccaccgggctttctaagggagccatgctcagccacggtaacctgctggccaaccttgcccagtaccgggcgatgatgccctcggtgttgcggcctggcgaagaggtgctggtgaccgcgattccgctctatcacatcttcgccctgatggtgagcctggtctatatgactgctggggccgccaactggctggtggccaatccgcgcgacanggacgcacttatagcgctgctcaaggtcgccaaaccgagtgtcttcatcggggtcaacacgctctacgcaagtctgcttgcgcagcctgagctggcagcggtggatttcacccagctgcgcctttcaatcggcggtggggcggcgatccagaccgcagtctccgagcgctgggaggctctgactggaaactttatccgcgagggctacgggcttagcgaaacgtcgccgatggtgaccttcaatcccgcagccatcggccgctttactgcaaccactggcgtcccggtgccaggcactgatgtgcgcctgctcgacgaaaacgggctggaggtcgagtgcggtaaggctggtgagatttgcgtcaaggggcctcaggtaatgtcgggttactggcgtcagcccaaggccaatgccgaggcctttaccgtcactggctatttccgcactggtgacattggtagcttcgatgagcaggggctgctgaaaattgtcgaccgcaagaaagacatgattattgtctcgggtttcaacgtgttccccaacgaagtggaagacgccgccatacgccatccggcgttgctagagtgcgcctgcatcggcatacccgatgacaagaccggagaggcagtgtgtctgtacgctgtacggcgcagcggagctgaattggcagcagaggagctgactgcgcacctacgccagcacttggcggcttacaaagtgccaaagcgtatccagttccttgcggaactgcccaagtctggggttggtaagatccttcgtcgaaagatccgggaaatgctctga

SEQ ID NO: 351323 - DNA, 945 bp, Pseudomonas aeruginosa
atgctcaaaggtctggctatcaccccgcccgtactcgggcggatttccatcggtaaggtcatcgagaagaacggcaagcgactgccggagaaggatgaccagttcaccatcacgtcccaggtgcagggtaaggacggctggttgctgcacccgctcaatgatgagctgcgtcagggcaaagacgacaagctgcgcagcattccggtacgcctgctgttcaacgaaccggagctgaatttccgagccgactacacactgttcgaccggcaatcggggcgcccggtttgcgtcggcaatggcgagacctgcaaacgggtcactcaggacggtatgcagtcgttgccctgcccttcgccggatgcctgtccgctcgccaaaggcggtgcctgcaagccctacggccgactgaacgtggtcattggcgatgaggatccgctgggcagcttcgtgttccgcaccaccggcttcaacagcatccgcaccctcgccgctcgcctgcattacttccaggccatctcgggtaaccgcctggcctgtctgccgctggagttacgtctacgcgggaagtcgactcgccagagccatggcacgccgatcttctacgccgatctgacggtacgcggcggcatggacatggctgaagcactggtgaccgccaatgaactcgattcacggcgccaggctgccggcttcaatcaggcagcgttggatgaggcagcacgacgtggcttttgcaacggagccttcgaagacagcgaggaggatgccagcgccatcgtggaagagttctacaccgagggtgaggcacctgcatcagcgcccaccgcttcactccacccaaccaaacccagcctggctgaaaagctcgatgcacaggccgctcgtcaaaacacaccctcagacaaaggaggacgccatgcgcctgcacaagctgaaagccagtga

SEQ ID NO: 351324 - DNA, 969 bp, Pseudomonas aeruginosa
atggctcatctcgtcgaaaccatggcttacgctggcgctaccccgtggcacggtctgggcaacaacctgccgcagaaacaatccatcgaagtctggcaacgcgaagccggcatggactggcagatcctggaaagccctgtgcacttcaagtcggatgccatcggccatctgggcgcgatccactcattccaggaacagaaagtgctctaccgctcggacaccaaggcaccgctgtcggtggtctcgcagcgctatcacactgtgcagccaaaggatgtcctggagttttaccgcgatctgaccgaggtctccggctacgagctggaaaccgctggcgtgctcaagggcgggcgcaagttctgggcgctggcacgcaccggccagggcgctgcactcaagggtaacgaccaggtgaatggctacctactgttggccacttcctgcgacggtactctggccaccacggcaacgcccaccaccattcgcgtggtctgcaacaacaccctcaccatcgccctggacggcaccagccgtgcgatcaaggtgccgcacagcacccgcttcgatggtgagctggtgaagaagcagcttggtgtcgccgtctcgcaatgggacgacttcatgtaccgcatgcgctacctggctgaacgcaaggtgcagtggcatgaggcactgagcttctttatgaacgtgatgtgcgagaccagcccgaccggtccgcttcctgaacagctgccgaacgagcgcgctctgcgcaaagttcaggagctgtacgaaggtcgtggccgtggcagtcagctcgactcggcacgtggcaccgcctggggcctcctcaatgccgtcaccgagtacgtcgatcacgagcgccgggcgcgcagcactgagtatcgcctcgactcagcctggttcggccagggcgcgcagatcaagcaacgcgccttggacgcagcgctgcagctcgccgcttaa

SEQ ID NO: 351325 - DNA, 177 bp, Pseudomonas aeruginosa
gtgaacagccccgccctgcccctttcccgtggcttgcgcatccgcgccgaactcaaggaactgctgaccctcgccgcgccgatcatgatcgcgcaactggcgaccaccgccatgggcttcgtcgatgcggtgatggccgggcgcgccagtccgcacgacctggcagcggtggtgtag

SEQ ID NO: 351326 - DNA, 1482 bp, Pseudomonas aeruginosa
atgaagcgattcatcgaagaggtgagccggacacaagtcagcttgcttcccgaatgcctggacgacttcgtcgctgaagacaatccgatccgcgtggtcgaagccttcgtcgagcaactcgatttggtggccctggagttcgatggggtcactcctgccgcaaccgggcgaccgtcctatcaccctgctgtgctgctgaaggtctacatctacggctatctcaaccgcatccagtccagccgtcgcctggagcgcgaatgccagcgcaacctcgaactcatgtggctgaccgggcggcttgcaccggacttcaagaccattgccgacttccggcgtgacaacggtaaagccattcgcaatgtctgccggcagttcgtcgtgctgtgtcgccaactcgatttgttctcccagtcgctggtggcaatcgatggcagcaagttcaaagcggtcaacaatcgtgatcgcaacttcactcacagcaagctgcgcgcccggatggagcagattgaaaagagcatcgaccgctatctggcagcgatggacaccgctgaccggacgcaatccgatgtcgctgaagccaagacctgccgcctccaggacaaaatcgagaagctccggcagcagatgcaagcgctcaaggagatggagcagcagctatgtgaagcgccggatggacaggtgtcattgaccgatccggatgcacgctccatggccaccagcggcaaaggcaccggcacggttggctacaacgtgcagactgcggtcgatacccggcaccatctgatcattgcccacgaagtcaccaacgtcggtcacgaccgcacggcgctggccacaatggccgagcaggcacgcgaagcgaccggatctgaatgcctcaccgtcgttgccgaccgtggctactacagcgggctggaaattctggcctgcgagcaggccggcatcacgcccttcatacccaagccgatgacctccagcagcaaggccgaagggcgcttcggcaaacaggacttcgtctacctcccggctgatgacgagtaccgctgtcccgctggccagcgtgcgatcaagcgtttctcgacggtggaggacggcctcgagttggatgcttactggagttctgcatgtccgcgctgcccgatacgcagcaactgcacaaccagcaattaccgccgactcaagcgctggcggcatgagacggtactggaggccatgcagcagcggctggaccgtcagccggagatgatgcacgtgcgccgccagaccgtggagcacccgttcggcacactcaagcactggatgggcgcgacgcacttcctgacaaaaaacctgcctcgggtgagcacggagatgagcctgcatgtgctcgcctacaacctcaaacggctgatgaacatctttggcatccgtggtgcggtagaggccctgtgcggacctgaggcaggccattttgactcgttactccgcctcaggatgccgtag

SEQ ID NO: 351327 - DNA, 669 bp, Pseudomonas aeruginosa
atggcattgatcaactgcagcgagtgcgaccgcatggccagtgaccaggcggctgcctgcccgcattgtggtgcgccaattgctaagcagactgccgccgttcaaatgccgcccgcccaagccattagccgcaatgtcggtttctggctgggcgtcggtatttttctgtttccggtgatctttgtttggttcctgctgcgccaagggcatagcactaccagccgcgtgatcggctttgcctggctcgcgctgatggtcgttgcgatggcctcgggggatcgcccgtccagcaagtctgccccagattcaagtggtcagagccaaccggcgaaagtggttgcgcccgttgagccgctgctagaagtgagcgctcagcaactggcccaggcctatgaccgcaatacggtcgcggcggaccagcagttcaaaggcaagaccttcaaggtcactggcgtggtggattccatcaataccgatctgttcggcaacccctacgtcacgctgcgtggcggggtaaaccagttcatggagccgcagttcgagctcgatggcgcccatgccaaatacgcagccggtatgcagagaggcatgcgcatcagtctgatctgcacaggtcgcggcgacgtggcgaaaacgccaatgtcccaggattgcgtgcccgctaactga

SEQ ID NO: 351328 - DNA, 1290 bp, Pseudomonas aeruginosa
atgagccattacaagccttatccggcctataagggctccggggtggagtggttggggcgggtgccggagcactggagcactgtgccgcttaaatggtgctttgagtgccttgatggcaagcgtgtgccgctcaactctgagcagcgggcagacatcaaaggcgaggttccatattggggctcaggtggtgtggtcgaccacatcgagaaattcatttttgatgagccgctggtactactcggtgaagatggtgcgccattctttgatagggataggccggtcgcttatgccatccaaggaaagtcttggatcaacaaccacatccatgtcctgcgtccactgacggactacccgattacgtggttcgtgcatgcgttgaattgcgttgagtaccgtcactacatcgatggttccactcgcgacaagctgactcaagatgacatgaagagcatctcgcttgtcatccccgagtcatctgatgaggcgagaaaagcggttgctcacctcgaccgcgaaaccgcccgcatcgacgcgctgattgaaaagaaaacccgctttatcgaactgctgcgcgaaaagcgccaggcgctgatcacccatgccgtcaccaagggcctcgaccccaatgtgaaaatgaaagactccggcgtggagtggctgggggaggtgccggagcattgggctgtttgcaagctcagcttccgctactcggttgagctcggaaaaatgctggatgaaaaacgaattaccagcaccagcctgatgccttatctgcgcaatcaagatgttcagtgggatgcggtgaatgcaaaagatttgcctgaaatggacatccgtcctgaggagctatcgcgttacaccgttcgcgctggcgatcttcttgtgtgcgagggtggagatgtagggcgagctgcaatctggcgtggtgaaaatgaagtgattggctaccagaaggcactccatcgtttgcgccctcgtgatgccaccgccgatacggcggagtttttcttcttcgctctgatggctgccaagacacggggtgttttcgaagagtcagactccaaagccacaatcgcgcacctaccggccgagaagtttcgtcagtatcgttttgctttcccaccagtacatgaacaacgtgagattgccggtcacatgcgaacccttgcccagcgcttggataaggttcaagtaaagactgagcgcagcatcgaactgctcaaagaacgccgctccgccctgatcaccgccgccgttaccggccagatcgacctgcgggaggcggtatga

SEQ ID NO: 351329 - DNA, 501 bp, Pseudomonas aeruginosa
atgagtgagcctatgttgagtaaggctgctgagctggagtttcagaagtcttgttatggcaagtgtgccgcgattaagcgcagtgaactgaggcctctattggatgagaggaagctgctggcttctgatctgttctaccaggcccttcagtacgtcatttcgcatagcgagaagcaccgtgaatacagccgcttgggagttctggtagatcttttcgatgtccgggacaaccagctttttatcgcctattggctcagtgagcgcctaggcctgaagtgctcgatggacagagggcaagttcgtttcaaatccactgggcaaccgtccaagcccgacttgcggttcaaggaaggcatctcggagtttttgaagcgaggcttgaagcgcccagcgcaggacacctccgctgcggagaagaaaaaaccgttgcctaagcgggttgatatgctggattcctgggctcggcttcctggcagctacggagcgggcaagagaaattga

SEQ ID NO: 351330 - DNA, 666 bp, Pseudomonas aeruginosa
atgaagcagcgtctgatcctggtggactacgagaacatcggtaagatcgacctgtcgctgcttgatgcttcctataaggccatcatttttgttggggccaggcagaacacgcccaaggcttcgcgcaagccgtccactgcgcatcgcttttcacgtgtggacttccagaagattgagggcgtgggtaagaacgcgctggattttcatatcgcctttcagttggggcgtacctttgagactgcgccggaaacgcagtgcatcgtcctttccaaggataagggcttcgacccgctcctggcctacctgaacaagaacggcttggcgtgccagcgcattgctgcgcttgaagaattggcggcggaagaactgcctgagccagtagctctatccccagaagatgcctgcggacgctgcggcaaggccagttgcgtggagcacctgggaggccagtggtgcagccattgcggccatttctcaagcccgccggatccacaacagatgccttcacgccaggcgaagtatcgcgagaagaaaaaagaaagttacggctatgagccgctaatgggcacgtgtgcctggtgccaccagcgtaccgacatgagcggcggcatctacgacgacggtgagtggatgtgcccaggctgtatcagcggatacgccaggtaa

SEQ ID NO: 351331 - DNA, 1647 bp, Pseudomonas aeruginosa
atgagactcaccaccagctggttgaagccaccctatgcgagtggcggtattgatcacctcggcactcaggcgccttgcgtaatgatctatggtcagttactgcctggcattaccaatgtcactgatcgggcgcgctattactcgttctatccctggttggtatggtcatatgaccagcgttatgcgaaggacgattacaaccacttcgtcgagaggtttcggcgtgctgattgcctgtttactctgattgccgaacggcacgcacaggtgaccgacctcagtaacgagcgacacggcatcgctatggtcggtcgcaccaagctggttccctcgctcgccagtctgaaggccggtgaacagctacggctatcgctctacgcgacgaccgaggattctccccagcgctacttcatgaatcggttgggtggtctttcgcagtactacgcaggcactctggccgacctgcaactgatggagtcctccggtcgatcctggagcttctatagcagccagtatggcgcaccgcttgcgcaaagcgttgatgcgtcggtgcctggtgagcggttctgggaggttgtcgaggacgactcggtgacgctcgatgatctcgacgagctgagcgccttctgtgcctgcaatatttccggcagcctgggcgagcatcagcagctcattgatatttttttcgatactggcaaccgatattcagaggaaggcgctcagcgacgccgaagcctaggtctgatacagcaactggcggaagctctgccggacgaatgggatctgaccgaggaagtgttccgcggttgtgtctatagcgccactctgcctactggtgaggcgtgggaaattcccgatgccttgcaatccactcaggcgcactgggccgtctatgtgcgcaatgaccttatgtcggtcgccttccagacgatcctcgccatctgcctgcaggaactgcaaccgcaatcggcggcgcagcggcgggtatttcacagtgtcgaggctttcgccgactggtttgccggctcggcaacggttgccggagtactgagtgatctgggggcgggcagttttggcgacctagttgccagcagccgggcgaacgcccctgcggtcactgactggacaaacgatgcgcatgagattcagctgggttggcagttgattggtggctggcagccgggcgtggacattgcgccgctgctttcacatagcctaagcctgctggctatgctggttgctcgcgatgaaacagggcagcagccgtattcagggctggcgatcactcttgaggcgctcagggactatccgatcaatctcataagctttcgcagccgttgtgccgactggcagacgatgcctctcgagcatgtagtggccgatttggtcgtttggtgtctggacacccatcttcgagtggcgctgcgcaaactccggcagtccaaccgctcgaccttccatttgcgaccgtccgagcgaggcctggaagtggtgggcgaccaagtcccgccgccatcctcgaccacccctcgtttccggcaggcggtgcagatccttcgcgacctcggaatgctggcgcgtgatgacagcaacatgatcaggttgactgcatctggtcggacgcagatggaggtcgccagtgtctga

SEQ ID NO: 351332 - DNA, 3303 bp, Pseudomonas aeruginosa
atggacgtgactgcacctgttaccagtgctgcgaaggcatggttgagtgagtttctgtttaaccgtgagatgttcaaggggcctgacggtacacctctttatagttatcacgttacagaggacgagttccggtcgcttgttgagctacttcgttcctacttcaagcgtggtgctgtggcaaacagttccgctcatctggcggcatgtttttgtctattcgtcagcgagcagtataggcgcgcctataacagctcttggtcatggtcaggacctgagtctttgctggaggcatccttgtctccgcagcagcatgccagcctaacggccactgggttggcctattggaaacggccgattcgactccgggaaaatgggcgcgactggcttggctcgctattcgctgagggcgggcttccgtggccattggttcaaagtgagtcacacgggttcgggcgcgctgtgcgcagggggattaagcatttctaccgaactgaaggtaaccgcaggacaaccgcggacctaatggcggacttcgaaaatgacctaccgctcatttttcgcaacctcgaaacgcgtcggcttttagcgggcatcgttgatcagctcatgtatctggttgagcatcacccactcaaggatcaacaggatccagtcagttatctggatcaggtagccccaggatggacagatgccttcccaattccattagatgaaagcaatgcacgcacgctgctcaatgactggctccgcgacgccgggcagaagcgcaaggagcgtcaagagtccttggagagggcgagggccttcacttgcgaacattttctgcatggcacattgccgcaatggttgatacgcaccgaattgatcctgcctcatgaggcagagtttgcggttgattcgacaagtctgagtagtacccgacttgagctggcctactacgagggcgaaaggctcctagctagagggcccgccgtttacggacagcttactgaaaaaggtatcaaggcgcgcttctccaatcctcaagtcacgctcgaacgtcgcaaacctggcgagccggtgagtcttcgcttgttggacaacgggcgtgtggtgcattgccaatacttcgatggcagcgccctcgattatcacgatgtacctttgattttcgagagtcgctccgagcgctggcaactggttgctgtgtctagttgctcgctgtcatctggactggttcgacttcgagttcccaagggcttttcgaccagttgcgaaggtgacgctgcaaagcctttggccgaggaccaagaaaatggcctctggatggatgcaaactccaacttcacgctggtaaagggggaggatagctatctagtcgcgcttaatcaggcggacagcgatgactctaaaccaactctctcgggtgtgtttgcactttacgaaagcaccccctcgatggtcttcctggggtggcccaaccttgagttgcctgaaggttacccttattccagagatgacttgttcgagttcgtcaatggcaagcttcttgaccgacgacttatcggccaatacggctcggtgcgttacaccctgcgcactcgatcgggaaagacactcatgcagcgccgtttcggcgtgctgcctagagattttggtctttcgctgttccccgaagtacgcgaacagcctgcacgtatcgagatcaaaggggctgcgcagcttgatccgcatattgtcagcaatgccttggtagtggagcagtcagaaaattcgctgtatctgcgccatcgaggagacgtaccgccttcgacctttatgatcgaagtaggtcaaggattgcccacgctgcagttgcacttgccctatccctaccagggggcccgcctgctggaccaattcggcaatccgtcgcgagccagagagttgttactggttgatctgatggggtatcgcatctcactgacctcagggttaacccaaggacagaccttccacatgcagttggaactggtgagcgcggagcagcagccgcatccgcaacgcacgtacagcattcgggtaggttcggcacctgtgatgctcaacctgttcagctacctagctgacatgcagaacatgcttggagcagtagatgagcaggatgcctatatcaggctttctgttgaggccgaaaaaccactgcttaaattcgatattcgccgatatggtggccagcttgagtgggaaggtcgctatgccttccatataggcggcgtctccaataaagctgtactggatggtgtgaaggcagaggctatgctcctgtccgatcccaagcgagcccctttgcagttgatcgagaagaccagtgaatcagttggtactggtagcttcgagataccacaggctatgcagtctcgtgggccgtggctgatctaccctgcagacaactcaggcattcgttttcgtccagcgctgtatttgctgcctgaaaacagtctggataccgcaggagaggttatttcactacaccgggccgctgagctgtttcacccttggcgcaatccgtatgtcatcgagcagcaggttgctgctatggcggacgattttaaccacagtggctggcagtacttagcagacttgaagcagaactaccatcacctgccgctatcatcgttcgagacctggaaggctctatcgcgcaaccaagaggcattgagcttcgcagttttccgtcttgagatggatgaatctttctgccttcgcatccgtgacgagctcgcagttatttgggaaaccatcccgcttcctctatgggtacgggcgcatcagcttttccacaacgctatgcgcttgactgggctgcccgaggttctggtcaacaatcttgtatcgaatcgtgccagtgtactgcgcttcatcgtttccggatttgaatatcttggggattacctgagcaccggtagccgaagctcattgataaaactgccaccagaaaatgttctgccgatctggtatcaggagctgcgccgatttcatgaagctaaccggaattggccaactcttttgggtcgcgagctttccagctggattgacgggcagaaactgccgcctttggtaaaggctctttcattggctgagttcactgatgcggtcacctatctgcccatattcatggcctatgtcacagccggtcgggcaagaattactgacctgccggcgacaccagcctatctgaaatttgcgattcgattgatttccgacttcgaccgtcagggatggttcgtgcctgcacacgccctgatggtgtcttatttgctcgcctcgcaggacgaggcataa

SEQ ID NO: 351333 - DNA, 6285 bp, Pseudomonas aeruginosa
atgcgatttttcagggacctaatcgagcaaagccttgagcgtacccgtgaggcaacgctcggcgtcttgggcatcaatcatccgggtctgcgtcgtcacctgagcgaaagcatggtgaacacattgggcgccgagggctgcttccttgcgccgccagttttcgagcacacctttggctggcgtgaagctgaactgcgcctgcaggatctgccgtcggggggcttgctatcgcccagcctgcttgacacgttggccagtgcaccagcctaccgctttccgaaaacagcccacccctatgttcatcagttgcaggcctggcgcatcctgctcgacgaacagccccgctcagcggtcatcaccaccggaactggttcgggcaaaaccgaatgcttcatggtgccgatcctcgaggatctgatccgcgagcatgagcgtagcaagactgcgttggtcggtgtccgtgccctttttctctacccgcttaatgccctgatcaactcgcagcaggagcgcctcgacgcctggacccgcaggtacggcagcgacattcgcttctgcctgtacaacggcaagactgaagaacgcgccgacaaggttcgcaaggaacagcagcagaagcccaaccagatcctgtcgcgggaactgttgcgcaaggaaccggcaccgatcctgatgaccaacgccaccatgctggagtacatgctggtgcgtcaggtcgacaacccgatcctggagatttccaggcagcagaaatcgttgcgctggatcgtcctcgatgaggcacacacctatgtgggctcccaggcggcggaaatgtctctgttgctgcgcagggtggtccaggccttcggcaggcagtccgagcagattcgcttcatcgccacctcggccaccatcgccggagccgatgcgcaggagcgactgaaacgctatctggccgacctggcgggcgttccgctcgaccaggtcgaagtgattggcggctcgcgcgtttggcccgatctggcattcgactctgcaggcaacgatatcggcctgcaggccatccgggatatcgaaccggaaacggcagtatccgccgcacgcttcaaggccctgtgcgacagcaccatcgccaggagcctgcgccatgcggtggtcagctccgacaagcccctcgacctgcatgacctgattggtacagtttccgagcagttgcagggaggcagctccctcgaacagcagcagaaggtgctcgactggctcgacaccatgaccggcacgcatccggccgaaggccagccgccgttcctcaaactccgcatccacctgttccagcgcatgctgcatggcctctgggcctgcgtagacccgcagtgcagtgccaaatcagctcatctgcaggactggcccttcggtaacgtctatgtgacccagcgtgcgcgctgcgagtgccatgccccggtgtacgaactgggcttctgtgacgattgcaagacgccgcacctgctagcagaagatcgcaatggcgaactgcaccagcccagcccttacgccggcgatgagttcgcgctcaatcacgaaggcggtggcgaggatgcggcagccgaactgttgaaggcgaatgccgccagtgctcgcctgatcattgccggatcgcctgcggcgcatgagccttacgtctcaatcactctggatcttgagagccaaaagctaggtgcagtcaatgccgcccgcaatatcaatctctgtctagttaaagaaggaaaagagggtacagacaaaaaagaaaaagacttcgcctgctgcagccactgtgagcactcgacttggggggcgagcgacttcctgcgaaaagcctacctcggtgcaccgttctacattgccaacgccgtgccgaccgtcttggaattctgtcccgatcctgacaaggcggattgcgaaggccgctctcccgaagagctgccggggcgcgggcgcaagctgatcaccttcaccgacagccgccagggcaccgcgcgcatggcggtgaggatgcagcaggaagcggagcgctcacgactacgcgggctggtatttgaaaaactgaggaatgcgcaggccaaggccgatgctgcacccaaggacacccccagcggaaatcctgccgagcttcttgcccaggcagaaaacctggaaaaaataggcatggctggcatggcggcagaactgcgaaagcaagctgaacttttgcatagcggcgcagcgcctgccaatcagaccgagaccattccttggccgcagatggccgacaccatcgcggcagccagggatatcgacaagttcatcctgcgctacaaccgctatgccaatccggcgctgttcgatggcagtgaaggcggtctgaccatggcgcgcctgctgctggcccgcgagttctcccggcgtcccaagaaccagaacagcacggaaacgctgggattgatcaaggtcggctaccaggggctggagaaggtgacgacatctccacctctgtgggtcgatacccgcgccattcccgcaatgggcgctgcagatgattccagaactgctctgacgctggatgactggcgcgactttctcaaggtggcactcgacttttatgtacgggagaacaccttcatcctaatggaaaacaagatgcgccgctggatgggcagccgcttcagtccaaagtcgcttttctcgcccaagagcgacgtgcaggaaagcagcactatccgaaagtggccgcagatcaagccgggcacaccccaccgtctgatcaagctgctcgagctggcaaccggcatgaatcgcaccatgaatgcggatgccgacaagatcaacagctggctcgaagcggcgtggctggcgttgatcaatgccggcattctggagtcctccgataccggacatcgtttgcgcctggagagcctcacattctcgttgcctaacgagggctgggtttgccccttgacccggcgcatcttcgataccaccttccgtggtctgaccccctatctgccacaaaagctgctgagccaggactaccgctgccagaagatacagcttcccgccttgagcagcctgatgccggatggctccccggtagccaagcaggtgcagatccgtcagctggccgcaaaagatcctgtcattacccagctgcgccaggaaagcttgtggacggatatcagcgaccgaacggtcgagggcggtttttactaccgaaccgcagagcactcggcgcagcagtcggcaaaacggctggatgactatgtcgaggaattcaagcgcggcgatataaatgtgctgaactgctccaccactatggagatgggcgtggatatcggcggtatctctgctgtggtgatgaacaacctgccgccacatccggccaactatcttcagcgcgccggtcgagccgggagacgcagtgaggctcgggccatcgcctatacgctgtgcaaggctgatccgcataaccagcgtgccttcaccaatcccaaatggtcgttcgtgactgccattccggcaccaagcatcaccctcagctccgcgcggatcgtacagcggcatgtcaactcgctgctgctggctctattcctgcgcatgcacagcagcaatgatggcgaccgtacaaagctgaccctgcactggttcttcgcctcggacgaatcacctgctcagcagttcgtagcctggctcacggcaagtccggatgattatgagggcgccgttaagcagctggtgagcggcacctgcctggaaggtcgctcgcttagctcaataaccagtgaaacccggctggcattgcgcgacctcgaggagcgttggcttggtgagtaccgcaatatcaaccacaagctccagaccggcagcgacgggccatacaagaaggccctgatgctggaaaagcagcgccatgaaaatgagtacctgctccgctatctggcgtcgtccgcattccttccgggctatggcttcccgactgacgtggtgagcctcaagacatacaacgtcgaggatttcctgcatcagcagcggaaaagcgatgctagtcgcgaggatagcatcttcgacaataaggaaatgccctcgcgcagcctgaacatcgccattcgcgaatatgcccccggcgctcaggtggtgatagatggtcgcgtctaccgctctgccggtgtcagtctgcagtggcatgccgacggccaagttaacgaagcacagaaattcgacattgcctggcgctgcccggaatgcggcaacacgggggtgatcgaaaacgcctatgccaataacgaaggactgtgctgctcgcattgcacaacaccgattccacccagcgagcgccgcatggtgttacgtccgggcggctttgtgagcgatttctacgaggaaaccaccaacgatgtcacttcgcagaagtacatccgcgttgagcgaccgcgcatccagctgtacggcgaaagcattgccttacctgatcagcgctgtggcttcgtgcgcttcggtcatgacggcagcgtattccatcattcgtccggcgaacatgaaatgggttatgccgtatgcatgacctgtggccgcgcggaatccatgcttgcctcgggcgaagtgcccagagatctgcaacccgataaagctcaccgcccggttggcgggctggccggcagccgcaaggagcatgactgttcgggggaggcggtcaaggctagtctgcacctgggctaccagatccgtaccgatgtgttggagctcacccttaggaatccccttacgggggaatggcttcctgacaatcccgagggccggctgattgcaacaacgctcggcgttgccatgcgggacgtgatcgccgaccgactcggtattgccagcagtgaaatgggcttcagccatcgcctcgatcgcgaccgtgacacacggcaaggccgctctgtcatccagctattcgatgaagtcagcgggggggcgggtttcgtgctggctggcctgagcgatatcgcattgctgctgggtaaggctctggatcggctgcaatgtccggccaactgcgagaatgtctgctcgcaatgcttggccagtcaggatagccgtgtcgagcgtgaagagctggatcgcaagttggcgctgcggtggctgagcgaatgccgactggttgagcatctgaggctgcccgatgtatttgctggcctgcatggcgcgcgctattgctcggttggtccgctacgcgaactgagtgccgccatcaactcgctggatcgccgcgatcagactacatcgattctgctgtgcctccacggcgaccctagggattgggatcttgaccatccccggttccgggaacaggtgttgacctgggccatttccgaacgaatcaaggttcgtctcggcattgctgaaccagctctgttgaactcggagcaaaaggaaaccctggcactgcttgcccgtctgggcgttgagctagtcgagtggcaaaccggagcgttgcaagccccgtatctggttgcccaactgtcatcccaggctggtgcccggagcctatacagcaacatgaacaacgtcgcggtgcccggatctgattggctacaaggacataccgatgtggtttgggcatccagcaaattgatgccagctgttacgggtaactccctagacagtggagcctggcaccaaccgccgcagggggcgcgtatcgttgaaatttcttcgcagcttgacgggcctgtcaacaccctaacaaaccgcctcaaagcgatgatcgatgctcagatgccggagttggcagctttgatccgcaatgatcgggcaatttcggtcagctactcagatcgctacctgaaatcacccttgtcggtgatgttccttacaggtttcctggagctgtttcaaaatgatgagcttcagtctttatcgatacagacgctagcgccgagtggtaaccaaccaagctatctgctcagtcatgattggatgcggagggatgaccaggtcacgattctcaggctctggctgatagagcaatttgatattgagccggacattactgtaatgaataaccctcgagatttgttgcacagccgggttattacaaccagatgggcatcaggtagcaccagtaagatcctattggatcaaggtatgggctactggcgcggaaggatgccatacagggatcagatgaactttgacttcaatgcttcaccccatgatcagaaagagcttttgtgcgatagatatggatacgttcaaatgcaacagggtggggagtggccgacctatgtcagttgcgttattgattga

SEQ ID NO: 351334 - DNA, 366 bp, Pseudomonas aeruginosa
atgagtggtgagctggtgttcgatctgaacgcgcttttcatctatgccaaggtggtcgagcacggtggcttcgcccccgccgggcgggtgctggggattcccaagtcgaccatcagccgcaaggtcgcgcagctcgaggcgcgcctgggcgtacgcctggtgcagcgctcgacgcggcaattccaggtgaccgagatcggccaggcctactaccgtcattgcgtggcgatgacggtggaagcggaggctgccgaggacgtcatcgaacagaaccgctcggagccgtgcggaatggtccgcctgacctgctcgacgccgctgctgcacttcgaactggcgccgatgctggcgcgcttcatggcgtag

SEQ ID NO: 351335 - DNA, 489 bp, Pseudomonas aeruginosa; identical to SEQ ID NO: 331334

SEQ ID NO: 351336 - DNA, 273 bp, Pseudomonas aeruginosa
gtgatcggataccagagcggtgcgaatgggccgcactacttctgctacctgttcgacgcaaccgatcccatgacaaccccgctgtggaactcattgtttgccccaggttacggggaggttcaggaggcggacggtttcgatgaagtgctccagaaatggggcgtgcaattgcccgactttttgaagcgggcgctgcgtgaggactgggtaaaagctcagctaaacactgaatactgctggcaggaagacggtagcttcgatcaggttcgttga

SEQ ID NO: 351337 - DNA, 633 bp, Pseudomonas aeruginosa
atgagacgggagcgctggcaggaaatgaaactttcatccctctttcccgaagaaataataaacgcgctcaaggccaagacagagctgaatgaggtagcatccctctccagcagtccagcaagagcgataattttaaatggagtaataatggctctaggatttctagcggccattatatctttcgacgcaatagacaaagacctgctagaaagtatctccaccttttgcggagtcatgattggctttgttataacttcaatgctattctccggaagaagcgaacacgcagacggcctatcacttgagcaagcaagagcatatatttggaaagcaaaatatatgcttctatctcaaataaacactttattctcctatattttttgcttagccttctgcatggcagcacttttctgcttaaagatggacatgctgttatcgcaaaaaattctagctgctacagcgatttcgtttttatccatgagcatttatcgcaccgtgctactgccattccagatatacgatgttcactcattttccttagatagcctgctcgaagaaaagcgatccgaagctgctgcacaaagcagagaagctagcaaagcgcgaatcttaaagcttacagaaaagaaataa

SEQ ID NO: 351338 - DNA, 315 bp, Pseudomonas aeruginosa
atggcgttccaggctgaccggttcctctggttcaacagttccagcgggcagaccgtggcgccggtctcgatcgttggcggccagatgttcatcaacaacgcgatgattcaggacggatcgatcaccaacgcgaagatcggcaatgtcattcagtcgagaaactacatatccggacagtcaggttggcagataaataagagtggggaactggagattaatgcatcgtcagtaagcgcaacttctcgatttgtcggtgggaagtggaccatcactgataatgagacaggcattgttgttgtggagatatcggtctaa

SEQ ID NO: 351339 - DNA, 828 bp, Pseudomonas aeruginosa; identical to SEQ ID NO: 28366

SEQ ID NO: 351340 - DNA, 264 bp, Pseudomonas aeruginosa
ttgcaacaggtcgggctcgacgacaacttcttcgaactcggcggccactcgttgctggccacccaggtcattggccgcctacgcgaacgactgcacctggaggtgccgatcaagtcgatgttcaccgcggagacactgggtgagttctgccacggcgtcgagaccctcaaggccgagagcgcgccggtggaagatgctctggctaaatccctggaggcgctcaaacgtctatctgccgatgaacttgaaaaactgatttcctaa

SEQ ID NO: 351341 - DNA, 564 bp, Pseudomonas aeruginosa
ttggacgcccacgggttcacccgaagcagcggcaaccgtccgctgaccgaagaggacttcgaaggcatcccgcacgacgtgatgttcaagctgtaccgcgactacagcctgtccaccgtctacgacttcgagcaccacgtccgcatcggcgaatcgctggaggtcaccgggaagctgcccaccggcttcatgctgctgccaccgcagtcctggcacccggacgtatggaccgacgtcgcccgcatgcggacgctcaacgcccagcagtacagcaaggggcaggaaatgcacctgtgcccgctgcagttcgacatcgtcgaccgggccatcgtgcagtactccatggaaggagacctggtcttcgatcccttcggcgggatcatgaccgtcccgtactgcgcgctgaagctcaagcgcagggcccgtgcccacgaactgaactcccgctacttcctggacggtgcgggctattgcaagtctgccgaggaagagatggccatgcccgacctgttcgccctgctcgaggccgatgctgacatcacccataaggaacccgccgcatga

SEQ ID NO: 351342 - DNA, 1014 bp, Pseudomonas aeruginosa
atgacgatcctggagggctgctttccaagcatcgaggtctacagcatcgacgaagcctttgccgacatgactggtctacccgaaccactggagtcgataggccgtcaggtgcaggcagagattaagcagaagacaggtattccggtcggcataggcatcgccaccaccaagacactggccaagctcgccaataacgccgccaaacgctggcagaagcaaactggtggcgttgtggatattcgcgatccggttcggcgcgacaagctgctcaaggccatgcctgtcgaggaagtctggggcgttggtccccgcatgcgtgctcacctggaaggcatgcaaatcaagacagcttgggacttggcacagatggatgcctggacgctgcgcaagcgcttcaacgttatcgtcgagaaaaccgtgcgtgaactacgtggtgtggcgtgcctggaaatcgagaacgaaatcgaacccaagcaagagatttgctcaagcagatcattcggtaagcgcctgcgagagttagcgcctatccaagaggccgtcaccagctatgcgacgcgcgccgctgaaaagctgcgcaagcaggagtcactctgcaggcaggtgcgtgtgagtttgcgcaccgggatgttcaatccagctgaagcgaaatatgccaatggcgtcctatgccaactgccctacccaaccgatgacagcaggctgatcatcaaggccgtccaggcgggattacagcaggtcttcagagagggcttcagctacgccaaggctcaggtgatgctgttggatctgtgtcgcaagaatgagtacacgccggatcttttcgcccctgaacagcccgtgaaaaccgagcgactgatgagcaccctagatgccatcaacaatcgctggggacgcggaacgctgcagccgggacgcatcgcaaaaccagtcgagtgggctatgcgcagagaattactctctccggcatacaccactcgctggtctgagttaatggtcgcaaaagctaagtag

SEQ ID NO: 351343 - DNA, 198 bp, Pseudomonas aeruginosa
atgaagatgactcgcgatggcaaggtcgattccgtggtgctgactcgcccgtctggcaatgctgaattcgacacttcggtgatcaatgcggtgaagtccatcggcgccattggcgaggttcagcacctgtccgatgccgacttcgaaaaggcctacgccaacaggatcatccagttcactccccagatggggagttga

SEQ ID NO: 351344 - DNA, 747 bp, Pseudomonas aeruginosa
atggatggtgagttggtcggccttctccgagttgcgtttgaagaacctggtcttggcctggccgacatccatcacgccgaggaacgccgagtacgccagcagctcgatgtattcgttcgggctcggcgtggccgtggccacgtaccggtaccggacgccatcgccgcggatgccggcggcgcgatcgtcacccgcgaacagggccatgaactcgcggaacgtcttgctgccgccgaagccgcgcaggcaactggcttcgtccaaactggccacactgaaccgtcgagggtcgagcttgccatcgcggacggtctcgtaattggtcaggtagatggtggcggggtcgtctacctcgtcgaaactgcggatgaaccggacggtgatgccgagcatcgcggcgtctcggtagaactcctggcgcacacccagcgggatggtgatgagcgcgtagcctccggccaggtcgcgggtgacgcgcaccacttcaagctgcattaccgacttacccaggccgaaggccgcgaaacaggccgcgcggccttggcgcaccagccaggtggcgatggcgcgctggtgcggcttgagcagggggttgaaggccgagggctccacttcgaagcctttcggctcggcgaggcggaccttggctcgcaagaagtcttcataggcggtcatgctgtttccttggggaacggcacgcactggacgccgccctgcctgacagggcggcccacgaggcatggttga

SEQ ID NO: 351345 - DNA, 555 bp, Pseudomonas aeruginosa; identical to SEQ ID NO: 331491

SEQ ID NO: 351346 - DNA, 204 bp, Pseudomonas aeruginosa
atggtcaacggccgggaggagtggtggccgggtaaggtgatccagttcttggcggactggccggggttcgtgctgtacgccgcgaattgggagcgtgactgggcggcgatctgggagattttcatgcaggagctcaaccggctggacgcccaggccttggtgccggtggcgcgggtagttgcggcccaacgagacgccgcttga

SEQ ID NO: 351347 - DNA, 237 bp, Pseudomonas aeruginosa
atgatctgggagtcgatggggaacaggccctccggctccctgctctcgccctggtatccctcggggaagcgggccaccagtttcttgcggcgcttcgacctggtcttccgtgtcgcctcttcggcatcttcgatggccttcgccatcaccgaggcgcccgggatgtggtacgcgtcctgccaagcctggcgcgcgctgatcagtctcatttcgactctcccctgtagtttcctgtag

SEQ ID NO: 351348 - DNA, 672 bp, Pseudomonas aeruginosa; identical to SEQ ID NO: 333034

SEQ ID NO: 351349 - DNA, 939 bp, Pseudomonas aeruginosa
atgaccagcctcaacctccgccgcctggcagcggcggccgccaccttcagcctctcgttcacggccgcggccgcgatcaacagcgccgccatcgtctcctccaccctttcccctcagtgcctcgaatacaaggtcgtcgggatctgctactggctgctctgcggcccgcatggctgcaaggtgaagacgtcggtcaaggtccgccactacgtgcctgacgcagtcgtctccagctatgcgaataccgggagcaacccctggaccgaggtgtcggcgctgggcacaccgaatcccctcgcccaggccggcaatgacgcgaccaccaactacaaggccgagaacagcatcggccgcttcaaggaagcggatgtgatcggccatcctggcggggccacgttcagccggttcgccagcgcctctgggtacgtttgccctggcgccaccttcccgctggtgccgtacttcctcagcacactggacgccattggctggcggcatggcattcccgagcaggtgtaccccgaagcgttggtcccagggctgcgcgaggtgggtggaatcttctccggcgacatgtgggggaacctctatccgcgcagcggattcctgcaccagaccgacgactacaagacggcggccgtcatcgcccagcgcgccggcgacatcaccacgcgaatcggccagctccacgtctacctccccatgcgcgcagcacccaaggacggctactggccggcgggcgagctgaaagagggcgatgcctcgaccgggaaatggcaggagctgaccccgtccctgagcctcaactgcgcggtgtttcccaactcagggccgaagacgcaagccgtcgacggcgattacgcctgggcgctctggcgtccctactcctgctgccagcgcaaggggcagatcttcctcggcagtaccgacttccaataa

SEQ ID NO: 351350 - DNA, 591 bp, Pseudomonas aeruginosa
atgcgtgaggcagaaatcaaacgagcgttagcacaccatctggactgtgttcgcggcggcgtgccgaacatgctccttgaggagctacagctcaatggaggcgaggtcagggcagatatcgtcgacgcgtatgaccttcactgctacgagatcaagagcgagggagactcgctcaagcgattactcggacaagggtcacgctatgctcgcgtcttcgaccacgtgacactcgtgacgactgagcggcatctcaagaaagcattgccgattctccccaattggtggggcattttgctggttcctgagcatgagcatgccgggttcaagcaagtgcgagttgccaagccaaacaaaggccaagagccagatgttctagccaccgtgcttcgtcgagaagagtgtctatcggtacttggaagcctgggaattgcgcgaggctggcgtagcaaaagcctgtacatgctgcaggaacgcctcgctgagctactgacgctcgatgagctgaggcacaccgtgcgaagctgcctcttgaaacggggtgaggctccagtggaagaagggcccctggatctcttcagtactgcttcttaa

SEQ ID NO: 351351 - DNA, 759 bp, Pseudomonas aeruginosa
  misc_feature (18)..(27): n is a, c, g, or t
atggatctggcacggatnnnnnnnnnngatgactgggtggttttcgaaaatcgaatcttcaccttcgaggacatcaacaactccagtattcgacatattgttgatgtaggcaccattgaagcacttgagtcccgcgacctctccgaatctgagatcgacgacaatatcaatattttcaagctacttttgaataaccatgtgcgtgagaccgtcaagcctcacaacattgtgtatgaccgccgagagaagatctttttcttcaaacctcacaacccagacgacgaaagccgcaaagaagactgggtagggaaaaagaaatcaacccgtcgagtgtacgaaaaggtgatgtccaagcgagaccccacgcgtctcgctcaccatgttcatttatcattcgaactgagctttaccagcattgcgcagcagtggtacgcactcgttgtgcctagttggctttatacttatgatggaaatcgcaagtctcgctttcatgaggatttgctatcaaagcaaaaaagacttgagtttaaccaaagcgtacgaaacatagttcgattcctagcctactacttgcgttcagtcaacagcccgattactaaggctttgcctaataactctgcttcgactcctgccctggacagcccagcgaatgaagtagaattcttcggcgagttattagagatcacttgcgaagaaaagctggtggaaggcgaacaggttggcgctgaatttgatgaggagttagcccttgaagattaa

SEQ ID NO: 351352 - DNA, 1719 bp, Pseudomonas aeruginosa
atgggcgaccagggcctggcgcaggcgcaggcaggccaggcggacggcggaaccgaccgacgagacggtgaacgagccgccctgcaatggagccttgggcaacgcactgtcgccaagctggaagcgcacctcttccggcgccatgccagcggcgtcggcggcgatctgggtcatcaccgtgtaggtgccggtgccgatatccgtggtcgcgctggccacccgcagcaggccgtccgcctccagccgcgccctcgcgctggccttgctctgcatggcctcccagacgccgccggccatgccccagccgagcaactggcgcccttcgctcatgctccgtggccgtgggtcgcgggcctgccaaccgaagcgccgggcgccctcctcgtagcaggccagcagcgccttgctggagtacggcttgtcctcgttgccgttgcgctcggcgaagttgaaccggcgcagcgcgatggggtccatgccgagccgcaccgccagttcgtccatcgcgcattccagcccgatcagccccagcgccgcgccgggggcgcgcatgtccagcggggtatagacgtccagcggcaccagacggtaggccagggaaaggttctcgcagcgatagagcatgccgctccactccaccacgtgctcggtgaagtcttcgaagcgcgaggtctgcgctgtcgcctggtggcccagcgcaaggaggcgcccctcggcatcggcgcccagttgcaggcgctgcagggtgcgcggccggtagccgaaggtgaacatctgctggcgggtcagcactacgcgcaccgaccgccgcagttgcagcgccgccatcaccgccagggccaactggtattgcggacgcaggccggagccgaaggcgccgccgacgtaggcggcacagacccttaccttgtcggcgggcaggccgaagaccttttgcaggtaggcctggctgttctgcgtcccctgggtcttgtcgtgcaccagcaggctgccgtcgggctggacgatgaccgtggacgcgtgcggttccatgggattgtggtgctcgatcggcgtgctgtagctggcctcgacccgaatcggcgcggcgccgtaggcggtgtagaaatcgccgcgctcggcgggcagttgggcgggagcctcatgggcctggtcgagggcggccagcaggtcggtctggtgcggctcgggctcgatatcgatgcgcagcagcgagcccgcgtagcgggccagttccaggctccgtgccaggaccagggcaaggggctggccgctgtacaggacgcggtcgtcgaacagcgggcggaagggttcgccttcggcggcatcggcgtccttgtagggctcgtcgtcgcccgccatcggcggccggttcaggtgatgcagtaccgcgaccaccccgggtaccgccagggccgccgcacagtctatgccgcgcacccggccgcgggcgacgtcgctgctgaccacgctgccgtggagcaggtcggcggcaggatattcggcggcgtagcgagcctggccggtgaccttggctggcccgtcgacgcgatccagggcttgcccggtgctgtgtggcaggctgctcattggccgatccctcccgagtgggcttcttccagtgcgcgaacgatggcgttgcgcgccaatccgatcttgaaggcgttgtgggccagcggcctggcgtcacgcagcagcgcttcggcgaagcggacatag

SEQ ID NO: 351353 - DNA, 465 bp, Pseudomonas aeruginosa; identical to SEQ ID NO: 340970

SEQ ID NO: 351354 - DNA, 273 bp, Pseudomonas aeruginosa; identical to SEQ ID NO: 340969

SEQ ID NO: 351355 - DNA, 945 bp, Pseudomonas aeruginosa
atggatcttaggcattttaggtactttattgccgtagccgaagagctgcattttgcccgtgccgcggaaagactgcatatcgagcaatcgccgctatcgcgagccataaaagaactagaagaagagttgggggtgacactcttctcacgtaccacgcgcagcactagattgactcgcgcgggtcaactttttttggagagcgcatacagggtgatggctgcctttcaacaagcccaggacagtgtcaaggctgtcgccaacggcttccagggacaactgcgcattgcgttatcggatggcatcacaccgtcgcgtctaccgatattgcttgcgctctgtcggcaagaagagccggaaattgaactccggttttttgaggtgacgctttcgcaacagataaaaggccttcaagatgatttgtatgacgtcggcttcgcgcagtccgatgaagtcggcgatggaattgtggcaatacctgtgtggagcgatgcgcttatggtggcagtgccggcccggcacccacttctggctcacaagcgaatacctttggatgagctattgcgctatccgttggtcctctgcgatccgcagatctgcgaaggtcacgcaaagcacgttgatagagtgttacgtcaggcagacatggagccgctgattgctgaacgggttgctactggcaatttaatgatggcgctggtatcggctggctttgcgttagcactgacgggcgcgactcatattgctgcgagccgtgaaccaggtgtcgtagcacgaccactggcttcgcgcgtgccaccattgacgacctacctgcttcacaccgaaggcgaaccctcagatgtattggctcgctttattgagcgcgtgcaagccatcgaagtacctgatacccctcgatccgcaatgggccaccgccccaatccacccgaggaagctgtgccatga

SEQ ID NO: 351356 - DNA, 282 bp, Pseudomonas aeruginosa
atgcgtcccgctcccttgcggcctgccgccgctgtctcgaccgctgccgcgcagccccaacgctacctcaccaacgatgaagccgccgagtacctgcggctgtcgccgcgcacgctggaaaagcagcgcgtgatcggcggcggcccgcgctttcgcaagttcggccggcgcgtcatgtacgccgtggccgacctcgatgcctgggccgccgaccgcagcttcgagacgacctccgatcccgaatacgccgagcaccactcggctgacagccgtgcgcgctga

SEQ ID NO: 351357 - DNA, 654 bp, Pseudomonas aeruginosa
atgcgctcggtgagccaccagatgaacatggccaagctgccgatgcaccgcgatctggccggcttcgacttcagcgcctccagcgccgacgctcgcttgatcagcgagctggccagcctggcctttaccgacaccgcgcagaacgtggtgctgatcggtgggccaggcaccggtaaaacccacctagccaccgcgctggccgtgtccggcatcacccggcatggcaagcgcgtgcgcttctactccacggtcgatctggtcaatctgctggagcgcgaaaaacacgacggcaaagccgggcggatcgcccaggcactgctgcgcatggatctggtcatcctcgacgaactgggttatctgccgttcagccaggctggcggtgcgttgctgtttcacctgctgtccaagctgtacgaacacaccagcgtggttatcaccaccaacctgagcttcgccgaatggtcgagcgtgttcggcgacgccaagatgaccaccgccctgctggatcggctgacccaccactgccacatcgtcgaaaccggtaacgagtcctatcgcctgcaacacagtagcttggcggcccaggccaagatcaaatcacgggagcgaaagcgtaagggcggccaagaaccggaggacgatgagccgttctga

SEQ ID NO: 351358 - DNA, 1038 bp, Pseudomonas aeruginosa
atgtcccaatccacgcaggtcaaccgccgcatcgtcctcgcctcgcgcccccacggcgccccgacccgggataacttccgcatcgagcaggttccgcttcctgagcccggcgcgggccaggtgctgctgcgcaccgtctacctgtcgctcgatccctacatgcgcggacggatgagcgacgcgccgtcctacgcgccgccggtggaactcggcgcggtcatggtcggcggcacggtcagccgggtggaagcctcgaaccatcccgggttcaaggtcggcgactgggtactctcggccaacggctggcaggactacgcgctttccgacggcagcggcctggcgcgcctgggcgagtcgccggagcatccgtcctacgccctgggcctgctcggcatgcccggcttcaccgcctacatgggcctgctcgacatcggcaagccccaggccggcgagaccctggtggtgggcgccgccaccgggccggtcggcgccaccgtcggacagatcggcaagctcaagggctgccgggtggtcggcgtcgccggcggtgcggaaaaatgccgccacgccgtgcaggtgctcggcttcgatgcctgcctcgaccaccatgccgcggacttcgccgaacgactggccgaggcctgcccggacggcatcgacatctattacgagaacgtcggcggcaaggtcttcgacgccgtctttccgctgctcaacgccaaggcccggatcccggtctgcggcatcgtcgcccactacaacgacaccgacctgccgcccgggccggaccgcttgccggcgctgatgggcacgatcctgcgcaagcgcatcaaggtgcagggcttcatcatcttcgacgactacggccatcgctacgatgaattccagcgcgacatgtcgaagtggttcgccgacggcctcatccagtaccgcgaagagcgggtcgacggcctggagaatgcccccgaggccttcttcggcctgctccagggacgcaatttcggcaagctggtggtgcgcgtcggagccgacgcatga

SEQ ID NO: 351359 - DNA, 1446 bp, Pseudomonas aeruginosa
atggccctcatgttcccgcgcttggcgcgcaacttcgcacgcaacggctatttccctaccgatgaggtcaccctcgaacgcgctctgcaggccctcgctcctgccccgtcgggcagaatgaggatctgtgatccctgcgccggtgagggtgttgccctggctgaggcagcacacaccctcggccgcgatcaggtccaagccctcgctgtcgagtacgaccgcgagcgcgccgaccatgcccgaggattgcttgaccgagtgctgcacagtgaccttttcgacaccatgatcagcaggcagtcgttcggactgctctggctcaacccgccttatggcgacctggtggcggaccactccggtgcgtcgcagtaccagggcagcggccgccggcgtctggagaaagcgttctaccagcgctgcctgccgttgctgcagtacggcggcgtcatggttctgattgttcctcaccacgtcttggacgatgagctgactggctggttgagcaaccacttcaccggcctgcgcatctacgcagccgcggaccctaccttcaagcaggtggtgatcttcggcatccgggtccgtcggcaggacctggcccgggcggacgccaatcaggtgaggtctcgcctgcaggcgatcggcgcgggccaggaaaaggccgaggaaattccagcggcttggccgtgggaaccctacgtggttctgccggccaccagcgagctggagcacttctaccgagtaaccctggagccggagcagttcgccggtgaagtccagcggctgcgaggtctctggcctgacttcaacctgcacttcgcgcaagcggggctgcagccgcgcccaccagtccgcgagctgtctcgctggcacctggcccttgccctggctgccggcgcgatatctggcgtcgtgcgatcgaagtcggaccggatcctggtcgtgaagggtgacacctacaaggacaaggtccgcaagaccgaattcaccgaggacgacgacggcaacatcaccgaggtgaggatcctcaccgaccgtttcatcccgatcatccgggcatgggaaatgacaccctcctcggtcaaccagggccgcgtgctgaccatcagctcctcggccgcgaccacggaagaagctgaagagccccaacctgagccggcctctgcaccgctgctgttcagccctggccaggtcgtgatgaccgcagccgtgagccacctggtggaaaccggtcaactcaacccagcgcctttgctgaatcgccatctggcgggagactgggggacgctggaccaggaagactggaacaccaaccagagagccctgaagttcggcgatcggctgctgtcgtcctacgacatcgacgccggcgacgaatccaggctctggatcatcactgaggcagaccgcagctcaaccacgcttttgctccctagcgattactga

SEQ ID NO: 351360 - DNA, 549 bp, Pseudomonas aeruginosa
atgccgatcgaggacgtgttctcgatctccggccgcggtaccgtggtaaccggtcgtgtagagcgcggcatcatcaaggtccaggaagaagtggaaatcgtcggcatcaaggcgaccaccaagaccacctgcaccggcgttgaaatgttccgcaagctgctcgacgaaggtcgtgctggtgagaacgttggtatcctgctgcgtggcaccaagcgtgaagacgtagagcgtggccaggtactggccaagccgggcaccatcaagccgcacaccaagttcgagtgcgaagtgtacgtgctgtccaaggaagaaggtggtcgtcacactccgttcttcaagggctaccgtccgcagttctacttccgtaccaccgacgtgaccggtaactgcgagctgccggaaggcgtggagatggtaatgccgggcgacaacatcaagatggttgtcaccctgatcgctccgatcgccatggaagatggcctgcgcttcgcgatccgcgaaggcggccgtaccgttggcgccggcgtggttgccaagatcatcgaataa

SEQ ID NO: 351361 - DNA, 579 bp, Pseudomonas aeruginosa
atggctaaagaaaaatttgaacggaacaagccgcacgtcaacgtcggcaccatcggtcacgttgaccatggcaagaccactctgaccgctgcactgaccaaggtctgctccgacacctggggtggttccgctcgtgctttcgatcagatcgacaacgcgccggaagaaaaggcccgcggtatcaccatcaacacctcgcacgttgaatacgattccgctgttcgtcactacgcccacgttgactgccccggtcacgccgactacgtgaagaacatgatcaccggtgctgcccagatggacggcgcgatcctggtttgctcggctgccgacggccccatgccgcagacccgcgagcacatcctgctgtcccgccaggtaggcgttccctacatcgtcgtgttcctgaacaaggccgacatggtcgacgacgccgagctgctggaactggtcgagatggaagttcgcgatctgctgaacacctacgacttcccgggcgacgacactccgatcatcatcggttccgcgctgatggcgctggaaggcaaggatgacaacggcatcggcgtaagcgccgtgtag

SEQ ID NO: 351362 - DNA, 303 bp, Pseudomonas aeruginosa
atggtggatcaccagcaacaaccgctggctgccgtctccgagcgtcgccagcagcgcgcgcaacagtggcccgcggcccaggtcgagactgcgctgggcctgctccgccaaggcttccagcgcttggccgtcggcgaccgactgctgccacaacaacgcctcgccggcctcgaccgcgcggtgttcggcgcaccaggtcccgtcttcgaggcggaagcccaggcgcaacgcatcgtggtgcgccagcaaggcctgcagcgccgtttccagaagcgtaccgtcgagcgcctgccccggctctag

SEQ ID NO: 351363 - DNA, 174 bp, Pseudomonas aeruginosa
atgctgcgttctgcgcatgacgacctggcctgcagccgacagagcgatcgtcgcagccttcaggcgctggtgaaacgtctcctggatgccgccgccaccgatagccttccccgctcccttgcagagatggagacctggctgcagctcaacagcgaggagaccacgaatgcatag

SEQ ID NO: 351364 - DNA, 180 bp, Pseudomonas aeruginosa
gtgctcggcgctcgccggccgcgcgccgacctgaccctggtcatccaccggcgcgacggggagcggctcgaagtgccggtgacctgccgcctggacagcgacgaggaagtctccatctacgaagccggcggcgtactgcaacgcttcgcccaggacttcctggaggcggccggcgcctga

SEQ ID NO: 351365 - DNA, 354 bp, Pseudomonas aeruginosa
atggcacgtttcacccatagcgtcggcggcgagacctaccgcttcgacagcctcaaggacgtgatggccaaggccagccccgcgcgctccggcgatttcctcgccggcgtcgcggcgagcaacgacggcgagcgggtcgccgcgcagatggccctggccgacatcccgctcaaacacttcctcgacgaggcgctgattccctacgaggacgacgaggtcacccgcctgatcatcgacacccaccagcgcgacgccttcgccccggtgtcccatctcaccgtcggcggcttccgcgatggctgctcggcgacgccgccgacgaggccagcctgcgcgccctggctccgggcctga

SEQ ID NO: 351366 - DNA, 825 bp, Pseudomonas aeruginosa
atgcaactcgcatcccgcttcgcttcccgttccccggtgctgcgttcggaacgtcccttgtcggatgaccaaatccgggccgtggccccgtccatcttcgcggaagcgccgcacgaaagccgctcgcagcgatacagctacatccccaccgccaccgtactgcaagaactgcgcggcgaaggtttcgagcccttcatggtgacgcagacccgcgtgcgccacgacgaccgccgcgactacaccaagcatatgatccggctgcgccacgccagccagatcaacggccgcgaggccaacgaaatcatcctgctgaactcccatgacggcaccagcagctatcagatgctggccgggatgttccgcttcgtttgcagcaatggccttgtctgcggcgacaccgtggccgacgtgcgcgtgccgcacaagggcgacgtagctgcccacgtcatcgaaggcgcttacgaagtcctgcacggcttcgaccgggcgcaggaatcgcgcgatgccatgcgcgccatcacgctggacgccggggaatcggaagtgttcgcccgcgctgcgctggcgttgaagtacgacgaggacaagcccgcgcccatcacggaatcgcaaatcctgatgccgcgccgccatgacgacgaccgccgcgacctgtggagcgtgttcaaccgcacgcaggagaacttgaccaaaggcggcctgtccgcccgcgccgcgaatggccgccgccagaccacccggcccgtgcagggcatcgaccaaagcgtgcgcctgaaccgcgccctgtggctgctggccgatggcctgcgccagttgaaagcctga

SEQ ID NO: 351367 - DNA, 246 bp, Pseudomonas aeruginosa; identical to SEQ ID NO: 323983

SEQ ID NO: 351368 - DNA, 252 bp, Pseudomonas aeruginosa
atgacctctgacactccacccagcttccctgagggcacgccgattctcattcgaccggaaggcttcgacctgatcagcggaaagttctatatcgccaagcaccgcgatggagagacgaccttcaaacagtacgtcaacgatggcggagtggagtacctcgcccccttgaacgccgcattcaagctcgtggagctcgacgaggactggagcatcatcggccgagtcgtggacgctaagatcacaggcctctag

SEQ ID NO: 351369 - DNA, 279 bp, Pseudomonas aeruginosa
atgagcgcggtctggaacaagccccagtcgtctgcactgaaggctccgatatctcagcttccgccgcggagattcgcagcgattaacccgaccacgacggtcgaagaggcgttgagcgaggccatcgcgctgacgctaagtgcgtctagcattctcggagcactgaccacctccgacgaagagcacgcatgcttgtatgccctggagattgctgcagagatggctgccgatttggttgacgccgcgctcgactccctgcgtgaggagggccagcaatga

SEQ ID NO: 351370 - DNA, 219 bp, Pseudomonas aeruginosa; identical to SEQ ID NO: 339344

SEQ ID NO: 351371 - DNA, 276 bp, Pseudomonas aeruginosa
gtgccgtccttccagattggccagccggacgacgaagagttccgtggtccggacgctcgcccggtcaccgaggtactcgactgcgtgctgaacgggctcggtaggtccgcgccagttccggcgggaagcgtcgagtttcaccagcagatggctctgcaggccgcccagcagatcaagcagagctacagccatatcgcgaaagagaaagctcgccgggagtgccttgcgcatctccgggcatcgttacgcaggccgaaggaggcctcccatggctaa

SEQ ID NO: 351372 - DNA, 135 bp, Pseudomonas aeruginosa
atgttcgcctcgttggtatcggtgcgcgcactgacggtatccacccgctgccccaaggcggtgtccgcgttggcgcggacggtctgttcggtgctgatggccgaggcgttgctcgcaacctggccggtgagctga

SEQ ID NO: 351373 - DNA, 603 bp, Pseudomonas aeruginosa
atggaagatcggtctggaatggggattcccggccagtggcgcggcggacaccgcctacaccgagatccagcagtcggtcaccccgggcggcagcgagcagaacgcaactgccctgggcttgttcgcatacccgaccgacacccacacgctgacctcgctggcggctggcgctcgcctggccttccgcgggcgcctgatcgaccggaccggcaacgttggcccctggtcggcctgggtcgacggcatcagctcgacggatgcgagcgagtacaacgaactgatcaccaaggagtacgtcgagtccgcactgggcgagcagttcttcgccgacatcgatcagatgcaggtcgatatcactggcctgcaggaccagatcgacaatctgaccgatgtgctggcctacgacccgacgaagacctacgcgaagaacgatatcgtgcgggttggcaaccggctgtatcaagcgaagcaggcggtgccgctcaacgcctcgccgccgaacgcgacctactgggccgacatcggacagtcgatcgagacggccaacggcctggcccagcaggtggccaccaacaccgcagatatcaccgagctcgacggtaa

SEQ ID NO: 351374 - DNA, 684 bp, Pseudomonas aeruginosa
atgcagcacggccatgacggcggccttgctgtgcatcaactcctccatctcgaagcactgcacgtcggccatgcccatccgatcgtgatcggcgtccagcagcttgccgtgggcgccgccgagcacgtaaggcgacagcgcctgccgcagcgcgttcgattgcagcagcacggaaagccccgtcatcgtgcgctgctccagcggcgcaccggcgagacttcccagcgccgaccagatggccgctttctcatcggggccgaccgccacgccttcgtgcagcaagcggccttcgatccattcagcggcccaggtgcggtagccctcgcggtcgatgcgcgcgagcggctggaaggcgatttcgccatccgtgcccaggtcgtagtgttcgccgcccagacccaggatggtggcgcgcatggagcggcccatgtcgaaggcgaagatgcgcgaaccgcgatagcggcgaaactgcattgccagcgtggcgagcagcaccgacttgcccatgccggtcggccccgcgaccagcgtgtggcccacgtcgccgatgtgcgtcacaagccggaacggcgtggcgccgtcggtgcgtgtcacgatcagcggggggccgtcgaggtgttcgttcttctccggcccggcccataccgccgataccggcatcatgtgcgccaggttcagcgttga

SEQ ID NO: 351375 - DNA, 1191 bp, Pseudomonas aeruginosa
atgcagcacggccatgacggcggccttgctgtgcatcagctcctccatctcgaagcactgcacgtcggccatgcccagccggtcgtggtcggcgtccagcagcttgccgtgcgcgccaccgagcacatagggagacagcgcttgtcgcagcgtgttcgattgcagcagcacggaaagtcccgtcatcgtgcgctgctccaccggcgcaccggcgagacttcccagcgccgaccagatagccgccttctcgtcggggccgatcgccacgccttcgtgcagcaagcggccttcgatccattcggcggcccaggtgcggtagccctcacggtcgatgcgcgcgagtggctggaaggcgatttcgccatccgtgcccaggtcgtagtgttcgccgcccaggccgaggatggcggcccgcatggagcggcccatgtcgaaggcgaagatgcgcgagccgcgatagcggcgaaattgcatcgccagcgtggcgagcaagaccgacttgcccatgccggtcggccccgcgaccagcgtatggcccacgtcgccgatgtgcgtcaccagccggaacggcgtggcgccgtcggtgcgtgtcacgatcagcggggggccgtcgaggtgttcgttcttctccggcccggcccataccgccgacaccggcatcatgtgcgccagattcagcgtcgagacgatgggctggcgcacgttggcgtaagcattgccggggagcgaggacagccaggcatccacggcattgagcgtttcagggatggtgacgaagccccgaccctggatgacgcgctccaccatgcgcagcttctcgtctgcgacggcggcgtcctcgtccatgacggtgacggtcgccgtcagatagccgaaggcgacttgatcgctgcccaactcctgcaaggcggcgtcggcatcggcggccttgttgttggcgtcggtatcgaccagcgggctttcctgctggaagatcgtttcgcgcagcagcgcgatgacgttcttgcgcttggcgaaccactggcggcgcaggcgggaaagttctttttccgcctcggctttgtcgaggcagagaaagcgcgtgctccagcggtacgcaaaaccgaggcggttgaggtcgtccagaatccccggccaggtcgaggtcgggaagccccgcaccgacaccagccgcaggtgctgatcgcctag

SEQ ID NO: 351376 - DNA, 1386 bp, Pseudomonas aeruginosa
atgaatgacgtgaccatcatcgaccagttcctcaacaccttcgccgcctacatcgactcgggtttcgggctgctgcggggcgaagtggcgttcctcacggccacgctgatcgtcatcgacatgacgatcgccggactgtattgggccatgagccacgccaccggccagggcgaggacgtgatcgccaagctgctgcgcaaggtgctgtacgtcggcgccttcgcctacatcatcaacaacttcaactggctggcgagcatcgtcttccgctcgttcgcgggattgggcatcaccgccaccggctctgccatcacgatggagaacttcttgcagccgggccggctggcgaaaaccggccttgacgcgggcgggccgatcttcctccagctcgacgacatgatgggatttcccgaggtgttcttgaacctcgatgccatcttggtgttgttcctcgcctggctggtcgtggtgctctgcttcttcgtgctggcgatccagctattcatcacgctgatcgagttcaagctgaccacgctcgcgggcttcgtgctggtgccgttcgcgctttggaacaagacctcgttcctggccgaaaaggtcttgggcaacgtggtggcctccggcgtcaaggtgctggtgctggccgtgatcgtcggtatcggctcgggcctgttcactcagttccaagtccatcccgatgagccgtcgctcgaccacgcactggtcatcatgctggcctcgctcaccttgctggcgctggggatcttcggccctggcatcgccacgggccttgtgtccggtgcgccgcagctcggcgcgggtgcgatggcaggcgctgccatcggcgcagccgggacggcggtggctgttggtgctgccgcgacgggcgtaggcggtgccgtggccgctggcgcgcgcatggcaccggctgccgccaagctggccggcgctggtgcgcgtgcggccacgtcggcggctggcagtgcgaaatcggcgttccaggccggctccgccgccgcaggcggtggtgcgaaaggcgcaatcgcgggcctgggcaacgtcgccaagaccggcgcgcaggcagccgggcgaggcgctgcatcccgcgcctccgctgccgggcagcgcatggccgctcccttccgcgctggctggaatggcgctgccgccgatggtggcgcaggtgcggcatccggtcagggtgccgcaggcgaggccgcatccggcgccgctaccgcgcagacgcaggaacagcccgcctgggccaagcggctgcaccgccgccagcaacttacccatgccgcgaccaccgccgcccacacgctgcgcggtggcgatggcggcggttccggccaggggccgagcctgcgcgattccgattcataa

SEQ ID NO: 351377 - DNA, 807 bp, Pseudomonas aeruginosa
gtggccgtagtggctttcctgcaagacggtctgcaccatgccatgcaccagcgcggccagcgcgacgtgcggatgccgtgcgacttcgatttgcagcgccgccgtgcgatgggcgctcaaccactgcgccagccggtcggacaggctcgcggccttgggcgcgtcgtcggcgtcctcgtgctcgtcgttggcggcttcgccttcggtgctgccgaaaccgcgccgcagcttttccagcgtgcgcagcgccttcgcctcggcttcgcgcagcaggccgcgatgaatgacggcttcgccgttgcggtcgatggtgacgatggcaccggccacctcgcgcacatcgggggcatagccgtgcaaggcgtcctccgcgtcttgcagttcgtcgaccacctgatcgcgacgctgttccagcttctcggccttggcctcgtcctcggcgtcgcaagcttcttccagttcggcgtcgatcttttcgaggcgggtttccagcgaggcgatgcggcgggcctcgcgggtggtcggctcgcggcggtggcgcggggcgttctggaacgcctgccgttcctcgtaggccagatgcggtacggcctccacccatgcccagccctcggcgcgcacgtcctcggccagcgttgccagcttgtcgcgcaccagcgtttccagcactgcggtatcggtgaggtaggttccggcatcgccttccgcgaacaggtcgcggcggatgccgccgcctgcctgctggtaggcgtccagcccgacgaagcgcaccagcgcgtgcgtggcgtcgatttcgcgctcggttag

SEQ ID NO: 351378 - DNA, 768 bp, Pseudomonas aeruginosa
atgagccagaacaacgccgctttcctccacatgaccgccgacacgctcggcaagagcctgctgcagggcctgatccaggaaatccgcatcctgccggacgtgtggcagaagctgtccgaagccaagcagaccgatgtgatcgagcgcctggaacagcaggtgcgcaacgccgccaccatcgcggtgcacacgattgccggtgccgagcgcgagaccgtctacggcaagctcgaatccatcgcggccaaggacaagatgaaggccgtcatcgtggtgaatcactccagcccgaacaagcacgaccttctggacgcagtgaacgaggactgcctgctgatcatcggcggcgccgctgagttcctcgacggcatgaaggacgtgaaggctgatccggaccagaacccgctggacctgaatggcggcgacggcgacatggaagaccccggcgcctggggcggtatgcaaccagcagacgacagcgacgtcgtcgatgccgagttccaagagctgccgcaactcaccgtcgagcgctttgccggccacaccctgggcgagatcgccatcggcgtcgccaccaaaaaggacgtgttcgacgcggcctggctccaatcgcgcttcgcactcaccaccgaggaagccgagcgcgtcgttctccaactgctggaccagggcgtcatcgtgctcgagcaggagaacgaggaatcccgcgagttgaacacttaccgcgtcgtcaagaagccgggggatatcgccctcgacctggagtga

SEQ ID NO: 351379 - DNA, 396 bp, Pseudomonas aeruginosa
atgctcaatccgagcaccgccgatgccgcgctcgacgatccaacgatccggcgctgccgcaacttcgcctcggcctggggctgcaacgggatcgccgtcgtcaatctgtacgccttgcgcgcgacgaaccctgccgacctctggaagcacgacgacccagtaggcccagacaacgactggcgcctgcgcgcgatcgcccgagagtacaccgacatcgtgtgcgcctggggcgccaatgcgaagcccgagcgagtagaagccgtaaccagcatcctgaccgccgccggcgggcgcctctggtgtcttggcacgacgaaggatggccacccgcgccaccctctgtacgtgcctggaaatcaagcgctccagccttgggcgccgagggtaacgccatga

SEQ ID NO: 351380 - DNA, 273 bp, Pseudomonas aeruginosa
atgagtgccccggacaccttcgccgccggcttcgaggtgccgctgcatcgctcgctgaccgagccgattctgctgggcggtgcgccgcgcaccgtggcgatcgccaacggcacgctggccgccgctgtcgggctgggcctgcaattgtggataccgggcgtggtgctctggatcgtcggccattcgctggcggtctggggcgcgcgccttgatccgcagttcatggccgtgttcgcccgccacatcaaacacaagccgctgctggatgtttga

SEQ ID NO: 351381 - DNA, 225 bp, Pseudomonas aeruginosa
gtgctccgcaaggtcaagtggccggacaagctccgcaaccttgaactgctgagccggcacgtcggcaccgagtcggctgcgctggaccttgagttgaagcgcctggacgtggcgaagaagcgcgccgagctgaagctgctggagaaccctgaggaagaagcgccgccaaccagcgtcgcggtgacaatcatcgatgcgagggtgcgcgatgccgacgctgaatag

SEQ ID NO: 351382 - DNA, 861 bp, Pseudomonas aeruginosa
atggtcatcgtttgctgcgtttttacacggtctgggccggtagacgaaagaacgcggttcggcggtgtacaccagcgaaccgttgcgcaacaggcggatgtgattgttggtccccgccagcaggatctgccccggtatcggcggctcgccatcgcgcgccaggcgcaccggcagcttcgattcgctggccagccattcggccatgccggcggcgaagacctcgtcgacatgctgcaccagcaccaccgcggcattgaaactggccggcagttgcttgagcaacaccgcgagcgacgccggaccgccagccgaggcgccgatcgccaccagacgctggcgcgccccgccggccttcggcggcaccacctggaccttgccacggttatcgcgctggccgatcagccagccgacgttctgaatcttgcgcaacaacggcgccgccgccgtttgcgggttgccgatgcccagcgccggcgtgttcaccgcatcgagcgcgccatatcccatcgcttcgaaaacccggtgcacattctgctcgatatcgacggtaacaatcacgatcgcgcaaggactttccgccatgatccgacgagttgcctcgacgccgtccatcaccggcatgagcaggtccatcagcaccacgtcgggcgtatcggcggcgcactgggtcaccgcctcggcaccgttgctggcgacccagacgatctggtgctgcggctcgaaggccagcgcgcggcgcagcgcctcgacggccaacggcatgtcattgacgattccgatcctcaaccctgtgcttctccgatcaggacgacgacggcatccagcaaggcctcatcgtggaaactggccttcgccagataa

SEQ ID NO: 351383 - DNA, 864 bp, Pseudomonas aeruginosa
atgcctgccggtatcgctgagcagatagagcgtggccggtgttccggcgcggatgtctttgaggtcggtttcgcggaagttggcgatgacgtaccagtggcacgcatcgatcagagtgaacaccggcttgtaggccgaggcgaactggccgacggtggtgcgcagggccgccacgcggccatcgaacggcgcgcggacctcggtgaactccaggttcagttcggcgatggcgatctgcgcctcaatctcggcacgttgtgccaccagcgcgtcgaccccgcttaccgccgccgccgcgcgttgggcctggagccgagcgctattcagttcggcgccggtggagcgttgcgcggtgcgcgcctggtctaccgactctgccgagacgtagccgccgggcagcagcttttccaggcgccgcagggtgtcgccggcctgcttggcctgggcgcgggcgcgctccactgcggcgaccgcagaggcggcttcgtattcctgggcgttgaccgagcgctgggtcagctcgatctgccggtccagggtgatcaggctggccctggcctgggccagcgcatcccggtaggggcgcgggtcgatgcgcaggagcaggtcgccctgcctgaccaactggttgtcgcgcaccggcagttcgatgatccgcccgttgacctcgggcacgacatcgatggtatcggcgtagacgtaggcatcgtcggtgcttggcgccgtttccagacgatggatcacatagccgagcatgaccaggcagatgagagtgagcagcaacacgggcagtcggctacgccgggcaggaactgtctgggtcatgggcgaaaagtcttagcgatggaaaaagacgagccatag

SEQ ID NO: 351384 - DNA, 216 bp, Pseudomonas aeruginosa
atgtgtggaatcaccggctggaccgactggagccgcgacctcggcgagcagcgcagcatccttgaacgcatgacccgtaccctggccccgcgcgggccggacgccgaaggcctgtggctgtcgcggcacgcgctgctcggccatcggcgcctggcgatcatcgacctggagaacggcgcccaaccgatgcttgccgaggcgggcgggtggcgctga

SEQ ID NO: 351385 - DNA, 744 bp, Pseudomonas aeruginosa
atgcataaggatccgccaaggtctaaggtgttctatcgtcccatcgaagcagccatccgatgggcaggtcttctgagatacaagcaagctattttgtccgcgatttcgtcgctgcaatgtctgcccacgaggctcgaatgcccgcgctgggaagagttaatgctgtgcaacgatcgcatctatgacgcgatcgtcaacggcgatcttccgtacggccgagagggcatcacactcaatgacgagtcgctgcttgacacctgcgatttgacaatcagacacgtcgacctcaaacggtggatgcagatgcactacccggagcaccgtccgggctttctgttcagccgtgctgagcgaatcgttcaccccgttatcacactagaaacaggacaggcgatgctgatcgagcgtcaagcgctgaaggccgagttagaacactgccatcgtaagttgcaggcgctacaagaaagccatgatgggctactgaaacaagcatctcacatccctgcttgcagccaatgtccaatcaccgagcgagctgagtctacatacctcaacatagttggaggcatgctcgatctgatgctgggtcaatcgccagcaggaatggcctactcgagcttcaggacgcaagaggcagtcgtctcagccctgattgctcatcacagcggggctatgggtatcaccgagcgtacgctgaatggcaagttcgctctggcgcgcagaaagcttcgcgactccagctag

SEQ ID NO: 351386 - DNA, 240 bp, Pseudomonas aeruginosa
atgtcgcagacaccggtactgcagccaagcgaacgccgcatcttgcggctcgatgaggtcgaagccaagtcgggcttcaagcgcgcgcacatctatgccctgatgaagaagggccagtttccgcaagccttgcgccttggcgtacgggctgtcggctgggactcggtcgaagtggatatctggatcagcgatcgtctgaagaaccgtgtgcacccgtctccgcatacacacaacgcctga

SEQ ID NO: 351387 - DNA, 861 bp, Pseudomonas aeruginosa
atgcaggttgtctccatcatttcaaccaaaggcggagtcggcaagacaaccaccgcagccaatctcggtggattggtcgcagacgcagggttgcgcgtgctgctgatcgatcttgatgtacagccgaccctatcatcttacttcgaactagcgcaccgagcggtcggaggtatctatgagctactcgccttcaacgagcgccgtccagagcggttgatctcccgcaccgtaattgacggactggacttggtgctgtccaacgatgatcgcggcgaactcagcaccttgttgctgcatgcgccagatggccgattacgcctacgtcatctgctaccaacgcttgccactcggtatgaccttgtgcttatcgacacccagggggcccgcagcgtcatgctggagatggcgattctcgcctcaaacatggcgctctcgcccgtcacacccgagatcctggcggcgcgagagttgcgtcggggtactctgcaactgatagaggatattgcgccgtatcgtcatctaggcatagagccgcctacgctgcatctgctgatcaaccgcgttcaccccgtgtcatcgaatgccaggctgatccagcaggccttgcgcgatgtattcctgggacacgctggtgtacgtgttctggataccaatgtcccggctatcgaggcctatccgcgtgcgtcaacgcggggcctgccggtgcatcgaatcgagtatcggcaacctttgggccgcgtcgcccccgctgcactggacaccatgcgagcgctagccagcgagttgctaccaacttggcaagagcacttcgcattggtcaccggcaagactcctgagagcaagggggccggtaatggctaa

SEQ ID NO: 351388 - DNA, 1686 bp, Pseudomonas aeruginosa
atggctgacatgacccagcaggacatggctgacaaattgctcgctgcgggctttccacgcaacggcccgatcgccactgcgctgagcgacccaatcgccgacacgcccatggtcgtgacgttagaccaactgcgctcgtacgaccatgaccctcgcgtcaaacgcaacccggcctacgaggacatcaaggcatccatccgcgaacgcggcctcgatgcaccacctgcgattacccgtagacctggcgaagagcactatgtcatccgcaacggcggcaacactcggctggcgattctgcgcgagttgtggtccgaaaccaagcaagagcgcttctatcgcatctcctgccaattccgcccatggccgaagcgtggtgaaatagtcgccctcaccgggcacttggcggagaacgagctgcgcggcggtctgacgttcatcgaacgagccctcggcatcgagaaggcgcgcgagttctacgaacaggaggctggcagcacgttgagccagtcggagctagcaaggcggctttcagccgacggttaccccgtacagcaatcgcacatcagccgcatgcgagatgcggttcactatctccttccagccatcccgaacgttctttacggcggcttgggccgccatcaggtggagcgcatcgcggtaatgcgcaaggccagtgagcgcatctgggatcgctacgccgccgatcgaaaaccaaccttgggatttgaggatttctttcaagacgcgctggcacagtttgacgttcagccggacgagttttccgcccaacgcgtgcatgacgagctcatcggtcaaatggcggagcttctgggcgtcgactatgacacgctgagcctggatctcaatgagaacgaaagccgccatcgtgctttgatcagcgagccgtcctcttccccacagcatgagacaggagtgcctagtgaagcaagtgggacaagtcaaacttcgctctccggctcaactgaccatccgattgaaatcccgataagggctcccgatacagttcctcgtcctgcagttcggtcgcccgcaaatacgacaccacctgccacggccacctccgatcagaaatcagccgatgacgagacatcgaccggaaacaatgctgcaggagcatttttacaagatcacattgtctcccgcgcaccgacgactgaacgtttgcaatcgatccagcgcctcgtcgcggggcagttgggcgatgcgcttcctccagacttcgagcaaaacgtattgcaggcgattcccgtccaggcgggtgggctctatccgatttcagatgtctggtatatcgatcccggcctcgacgcccccgagcaccttcgcgtccacattgctcagtttgcgcgcgaaattgcgagcgaggcttcgcttgccgactgtatcgcaccatgcgactacggcattggattccgatgcctgccggaaaaagccggtgaaactgaaaccgtctcgggggcctggatgcttttggcatccctttgcgggcaaggatctgccgcggagttggatcgcctccctcagtccctgccgcagcttctgcacggcaagggcgacccggccaagcggttgagtgacaccgcgctggtcaagctgttccgagtgctgcgcctggctcgccgcctgctggatcttgagtccggtggcgacgatcacggctcatga

SEQ ID NO: 351389 - DNA, 561 bp, Pseudomonas aeruginosa
atgtcgaccccccatccgctcaaccaagccgtcatagctcaggccctccatgacctgcgcaatgggcagttgcgtcgttgcaaggcgatggggtttggcgatgacgacttggacgcactcaagcatccggccctcatcagcgttttggccaatgcatccgtgtcttggtgctccgtctccatcaatcgcgaggtgctacgtcgcctgctcactcaggcgctggacgtagagaaggaaattgcgaccattgaccgtatgctgcgtctgggcgcgagcaccgagatggtcagccgcttctacggcctgacccatcaggaagtcgccttgcgccgcgagatcctcaacctgccgaagcgcaaaggccggcatcctgtactggacgagacacaagacacagagctgtggcggcgctggaaggagctaactgcgcggcagactgttgaccgcgacagtgaggtttcgctcctgtcagtcgccatggatcttgccgaaggtatggcgttacccctgtcggtgatctgggccgccatcaagtcctggatcgaccagggactggtttag

SEQ ID NO: 351390 - DNA, 1179 bp, Pseudomonas aeruginosa
atgtcagtggaaaatgggtctcaacgcagtggccctgttccgctgtcggacctgttcgatggcgcattgaaaactcttgcggcccaacagcaggccgcgcccacctccacggacgcgctcctgtacagcggcaaccgccacgaaagcgtgccccgttcgctgtttcttgatcgacggctcacaccattggaacgaaacgcctggcaagtgtttcgtttgctgctaaacgacgatggactcaccgcattccctacctacgagaaactgcgtccatggctggcgtccatgccttgcggcccgcaagcctcgcatgaaaccgtcgcacgggctctgaccttgctacgcctgacacgctggcttagcctcgtccgccggcgacgcgatgccaagacaggtcgcatccaggggaacctctacgtgttgcacgacgaacccttgacgccattcgaggccatgcaactggatcctgactacctgggcttggtcagccaggcgctgggccattcagccaaggcggttcaggccgttggtgtccagacgctcaaggatattgccgaagacccgatgctcagcgatcgagcgttgccgacgcgcctgcaggtgcttgcacaacgcatggccaagggcggctggcttcccgaaagttattcacaggacggcaccagccccgattccgaagaagggtcggatcgctttcttcggaatgtcgatgcaccggctacggaatccgaagcaggagcgaaacccgcgcaaaacgcctcccttcggaatccgaaggaggaccgtacagtacgtaaggaaagtattaatgaagtacgtactaccgcgcgggcgcatgcgctgaacagcctgcaatggcccaaacgcttctccgacctcaagcccgaacaacaagcaggtgtaatggtggcgcttcaacaggtcgaagagcccatgcgccaagccgtccttgacgaatgggaagcacgctgtaaaggcacctcaatccgtaatccggccggctatctatttggcattgttcagcgcgctattcgaggcgagttcaatgcgtgggctggtcaggtcaagccagccccatctccggcgttacttcaaccggcagagccacgaaatgtcgtgccaccagaactggcccgtaagcatatcgaacgattgcgtgacctgctcaagaagaattaa

SEQ ID NO: 351391 - DNA, 1428 bp, Pseudomonas aeruginosa
gtggcgcgagaagaacccttgaacatgggcaataagctaaatttcttccgcagtttcgaaaaaccttgtttctgcccgctctacgtgagaatcctgattcttgctgccctggcgacgctgagtggctgctctagctttcgtccctgggtcaatgtggcacagaaaactgaggtgcagcaggaggatgactacagaacagggcctgtgctggttgcggtcactctgtcgggaggcggagctcgcgcggctgcatttggtttgggtgtgctcaaggaattgaagcgcactgagtttacgctcgacgggcgaccaacgacgctcctcgatgaggtcgcactcgtcagcggcgtctcgggcggaagtattctcgcagcgcactacgctgcctttggtgatcagacgttagagcgatttgaaccagaatttctgcttaagcccttcgagtcgacgctgctgaaacaagtcttctatccgaatcacctgttcgacctcacctctccttggttcggccgtacgcacatattggcgcagcggctcgacgaactatacgaaggcatgacatttggggatgttcgcaaaaattcgaaagcgccaagcctaatgatcacggcgacagacctcactacaggcgcgcctttcgacttcaccccagagcagtttgcattgatctgttcggatctgaatagtgtgccattgtcttttgcagtggcgtcgtcgtcagccgttccgatcatcctgtcccctatgacgctacacaatttttccgaccgatgcggcaaagcactttttccaccggatcgcagcgcatccggtagcccggattttcgtattcagatgctgcagcaaagctccgagggctacctagatgcgaatgcgcgtccatacatccatttggtagatggcggtgtcagtgacaacctaggcatacgactgatgatcgataggttgatggctaatggctccgtctataattcttttccaggagtgcctcgacattcgattcgtcgcattgtcctggttgcggtcaactcagcccgcgatctggcaacaagagttgacctcagtgacgaagtaccttcgaccggagaagtcctagagacacttctctatggtgctggcgcgcgcgagacacagatgacgctagccctgttggaaaacgacattaagcgaatggcagcagagcttgatgaggcccgaagccgggaagacagtccattctcggccgacgtcgagatccatctgatcaatgtcagcctgcgtgatctcgatgagccagacatacgcacttcgctgcttcgtgtaccaacagcttttacgatcgaagcgtttgacgtacgtgctcttcaagatgcgggctctgccgctctacgttcgtcaaacgcattccagaggctgaagcaatcgttggaccatttggacaagcactga

SEQ ID NO: 351392 - DNA, 618 bp, Pseudomonas aeruginosa
atgagtcaactttgcagattgatccgtgcgggatcaacgctatgcgtcgtcggcctgatctccggctgcgcaactaacggcatgacgcgctccccgtttctcggcgaccacgagatgctcgttccaacgcggtttgaaaatgtcttgctatacagggcgcctggattcaactgggggtgttgcacggaagtagtcgtagaggacgccctggtcgcaacaaacttgggtgtcataaaggggctagatgcggagcagcagcgagagatccttctctataccactgcagagctgcgatcacatatcgcgacaccccgtgttacgagtgcgtcagatcgagtccgagtacgagtggcgatcactgaactgcagacgcctaaccgagcagtcaatgcgctcacaacactactcgttgggcctgtgacaacgggtggtgcgagcctggagttttcggcagaggacgagagaacaggtcgccgtgtattggccgccagttgctttcagcatggcaacccaattgctgattttgcttcttcctactcgttgttgggacatgcgaagaattcaattcgtgcatgtatcgaacaggtcaatagcgtgtggcgcgagaagaacccttga

SEQ ID NO: 351393 - DNA, 684 bp, Pseudomonas aeruginosa
ttggacagtcgtgatcgcaatctgatagcataccgtcaagacggtactaattctaattgtgggagtgcgattttggccgacaaaaaaaatgcagaacctagtgatgctgctgctccgtattcagctcgagctaaacaaacacgtgagcgcatccttcaggccgcgcgtgatgtggtcgtccaagagggagcgaatcgcctgacgatcgacgcggttgttgcgcgggcaggtctaagcaaaggggcattcctctatcacttcaaaacaaagcgggacttgctccttactctgatcgacgaccaggtgcatgcttttgactcctcgcaagaagagcgcgagcggaaatttgccggtgaaccggacccttggctatccagtcaggttgcgtcaatgcccaacaatgaaatggaaaaattgggtgcagcgctgttagcggctgtggcagaagacccgacattgcttgagcccattcgcgcttggtatacgcggcaatatgcgagagcgcgcatttccgcgcggagtgctgaagtggctgcaattgtcctgcttactctggatggcgtcttcttcgcggagatgatgggttttccaacacttgagcttaatgagcgccaacgtctactgcgaactcttcaagagctggcttcaggtgagctcgaactgacaccgtccaagcagtgctga

SEQ ID NO: 351394 - DNA, 786 bp, Pseudomonas aeruginosa
atggcaactaatgaacccttgcagttgaatctcgggtcacttcgcagcgcaatgtcattgacgctgcacacccatcacgcctctcgcatctggcatgggcgtgccgcaggtgaaggccgagcggccatcgttggcctcaacggctacgtctcggtcatgaacaagatgaaacgcggcgccgagcaggatgacccgtactccgactggtggatgctgcgcatcgaagagaagctcgaccagacgaagtcgaccctgcagacattgcgcgagcaggttgatcaggccctggctggtgtgccgacagcactgacactcggcgagaacctaaatgtgcagcccgtcaagcttccactgttcgtcaatgcccaattgggcttcgccgcggtctatctgctggccgactacgacgacatcgcccgcaaattgatcttggcccatcacaccgcgctgattgatcgcagcacgctcgagcgctggctgaatgacggcgcccatgccttgcgcagcctcttctcgctggcgcagcagttccggtactcaggcacgacgcgcgatgactttgccgcgaagaatgctgcagcccgcgcggcactggaaaagctaggggagctgccgcaggacgtgctggaaggcacccgccgttcgcgcttcgcgccaccgatttcgcgccgtggcctgcagcagcgcgagacttccgagtccacggagcccgccgcagtcgagaccacccgcgcagcgccagtgccgcccgtgtccggcgcagatgcagaggacgagccagcatga

SEQ ID NO: 351395 - DNA, 546 bp, Pseudomonas aeruginosa
atgacggacccagacctggggcaatacgcccacttccgtccactggaacaggcggaatttatcaagctggaacaggcagcctatctaaaaggccttttaagaccttttaaaggtaagggggctcttgaggactgggccggccattgccacgcgcaaagggaccaacttatcgccctggcgcaacgtcgcgtgctgcggcaagcagcagggcacccgttccacctgctgcccgcggaactggcccagcagaaaactggcgctgggacgacctttctgcgctggcgcaggccggaccgatcggccatgggcgtaacgctgtggcaggagctcatcgccagcgccaccaccccagtcagcctgctcgacgacttgtatgccctggaacagcagcgcatcgtgctgaacatgcagatcagcctcttgcacacgctgggccgccaggcacaggagtgcgccagcaagatggcccaggccgaactcgcgtacctgcgccgggtacagggcacaagtaccaccgcacggtcaggacatatgctgcctccctga

SEQ ID NO: 351396 - DNA, 399 bp, Pseudomonas aeruginosa
atgagtacccatttctacggcgaaggcaacatcggttccgcccccgacttccgcgaattcgccaacggcaacgatgaacccaaccgcctgctgcggctgaacgtctatttcgacaacccagtgccgaagaaggacggctcctttgaggaccgcggtggattctgggcgccggtggaaatctggcaccgcgacgccggccactggaaggacctgtatcagaagggcatgcgtgtcatggtcgagggacgtacggtcaaggacgaatgggaggatgccgatgagaacgagcgcaccacgttcaagatcgaggcccggcgcgtaggcattcttccgttccgtatcgagtcggtacagctcagcgccaggcctgccaacgagcaggacaacgacgccccgtga

SEQ ID NO: 351397 - DNA, 780 bp, Pseudomonas aeruginosa
atgatcagccatagaacccgctactcgcttgcccagtttctctcgatccaagaaacctccgtctccatcgcactgttcagcaagtacggcgttgagcatctcgcgctgcatccagcccagttgctgcctggcatcatgagtatcgtccgtgaccaggacgatcgaaccttgctaaaggtactccaggagattgttgcaacccctggtaatcttcgcgccaaagtatccccgaaaacacttttcgaggagcgcatgcatgacctgacccaatgcctgctgatcgacggctacattgcgcaagacaagaagctgctgcaggcggacccgtccatcgccgacgcggcacctgtcgaagacgatctgatcaccgcattgcgtggattcggcacgccacaacgggacgcgatcatcgacaagatcaacgactcggccgaagcattccgggccgcgccgcccgactacaacgcagcgctgaccaatgcacgcgtcgccctcgaagcgctcgcggtggatgtcgcagcagaagtcgttcagcagcagcagataaccgcctcctacaatcccgccaaatggggtgaggtcattggcttcttgcgcaacagcggagagatcacgctcgaagaggaaaaaggcttggccggcgtctttggtttcctcagccctggcgctcaccggccggtcggcattcccgaaaaccagatggcccgcctgggacgctcctttgccctcaacatgtgctggttcttgctgcagaatcggatcgcccgccgcagcagttga

SEQ ID NO: 351398 - DNA, 2013 bp, Pseudomonas aeruginosa
atgcggctatttctctgcgagaagccatctcagggtaaggacatcgggcgcatcctgggcgccacacagcgtggcaacggctgtctgagcggccccggcgtaaccgtcacctggtgcattggccatcttgtggaagccgcgccacccgagtcttacggcgaacagtacaagcgctggtctatcgagcagttgcccatcattcccgagcgttggcgcgtcgaagtcaaacccaagacggcgacgcagttcaaggcagtcaagcaactgcttgcacaggccaccgagttggtcattgcgaccgacgcggatcgcgaaggcgaattgatcgcccgcgaaattatcgagctctgcggctaccgcggccccatccagcgactgtggctgtcggcgctcaatgatgcatctatccggaaggcgcttacctccctcaaaacatcggcagacacattgccgatgtacttctcagcactggcacgatctcgtgcggactggctgatcggcatgaatctcagccgactgttcaccgtcctgggtcggcaagccggttacgagggtgtgctttccgtggggcgcgtgcagacgcccacgttgaaactggtcgtggatcgcgatcgtgagatcgcgcgcttcgtctccataccctattgggttgtcgaggtagctctcaacgctgcatcggccgccttcacggccaattggcaggcaccgcccgtagactgtgatcagaacggccgctgccttcaagaggcggttgcccgcaaagcactggagcgcatccgctcggccggctcggctcaggtcagttctgtggaaaccgagcgcgtccgggaggctccgccgcttccgttcgacctaggcacgctgcaggaggtctgctctcgccagttcgggcttgatgtgcaggaaacgctggatatcgcgcaagcgctctacgagacccacaaggctaccacctaccctcgttcggattcaggctacctgcccgaatccatgctggccgaagtacccgctgtcctgagcgcgctggtcgcgaccgacccgactctcggcgcgatggtggccaagctcgatcctgcccaggtctcccgcgcctggaacgacggcaaggtcactgcccaccacggcatcattcccaccatggagccagccaagctgtcggccatgtcggagaaggagcaagcagtctatggcctgattcgcgcccactacctcgcccagttcatgcctcaccatgaatatgaccgcaccgtcgcactcttgtcgtcggccggtgaatcgatgcaggccacgggcaagcaggtcgtggtgctgggttggcgtctggcgttgatcaactgtggcccggacgccccggacgacgagccttcccagcgcgcacagatcctgccgacactatcaaacggcatgcagtgccggatcgcacaggccgaactcaaggccatgaaaacattgccgcccaaaccctatacgcaaggcgagttggtcaaggcgatgaagggcgtggccaagttggtctccgatccaaggctgaagcagaagctcaaggacaccgtgggcattggcaccgaagccacccgcgccaacatcatcggagggctgctcgggcgcggatatctgctgaagaaaggccgcgccatccgcgcatcggatgcggcgtttaccctgatcgataccgtgcccgccgctattgcggatccaggaaccacagcaatctgggaacaggcgctggacatgatcgagtcggggcaactcagcctcgatgcgttcatagaaaagcagtcgtcctggatcgcacagttgatccagcagtatcgcggcaccagcttggcaatcaagatcccgcaggggcccgcgtgtcccgactgcggcgcccccacgcgccaacgcaccggcaagagcgggccgttctggtcctgcagccggtatccggattgcaagggcacgctgcctgtcgagaccggcaaaggcgcacgtggcagcacgcgcaagcgcagcaagccgaaggcaccctga

SEQ ID NO: 351399 - DNA, 1563 bp, Pseudomonas aeruginosa
atgaacaccatccgtcttcagacgaaccagaaccgtcttatcgccaaccttcgccatgctttcaaccagagctcgatgctcggggaactgctgcagaacgccaggcgtgctcaagccagcgccatccacttcaccgtagatgacagcagcctcaccatccgtgacaacggcagcggcatagccaacctgcagaccctcatccacattgccgagtccagctgggacgaacagacccagacgcgcgagaacgctttcggcatgggtgtgttgtccacgttgtacttcgctgaacgcctggccgtccgctccggtggcaaggcattcagtgccgcgacggcggctatcatccgcggcgagccgattgaattggtttcctgcgatctttttgaaggcacggaaatccgcttggatggcatccagccgacgcagccgggagagacccttcctgtttgggctgaccgtcttctgcgcgccctgtgcgaagcctttccagttccagtctggctcaatggcgacgcagtgcttcgccccctggcggaccttgcgctgcaatggcgcgagacacccatgggcaagatcctgctcgacctctccgcttcacgcacgcagtggcggtgcttccttcaaggccttccgattggtcgatcaccgtcgatctgcaggcaccacgttgtacagctgccaactgcaacgctcgccaggcttcccgatcgccagcatctgctgaacgaagcggaagaccacaagcgcatccaagtcgcgatcgacagcgcctttcgccaggcattgatcgagaccaaggagcgcctctcggccagcgacttcatcgtgaactacgcgcgcatctgcatggactcatctaacgccgatttgctcaacgacgttcctttcgttccacaagcctggttccgatcctgggcccttgacccgtccggattccgccgttactgggaccggcacgtggccgagggcatcgtggctcgggaggtactggaagaaactggtgcttggctgatcgaatcggatggcaatgatgcgcctacggctgaggtgtacctggaggctcgcaaagcgttcttgctcgatgagagcgggatcgacggcgggcactggttactggggcttgtaaggcccatcacgccggaggaagtacaggtccgcccaggcgccatcctgcatcatgacgccagcctgtgtctggccgactacgaggtcgagttgaccttggccgactgcctgaacgtcagcatcgaaggcgagccggaagttgcggtcggcgccattcgcaaaggcgtcacgttgttcctcaccgccgatgcaggcggtgcgacggcgctggtctccgactacatcttcgatgatcgctatgacgaggatcgcgaggacgaagaccgccggaccatcgacaccttcatcgccgtaggctgttcgcagtctccggccggggttgtgcaggccctgctgcccttcatcttgcggtatgcaacgcaaccaaggttagcaggtgcggttgttcatctgaccttcgatgctgaaggaaagctggcagcagtcaccgcctga

SEQ ID NO: 351400 - DNA, 213 bp, Pseudomonas aeruginosa
atgtctcaccgcgcctctttcggccatctggccttggtctacgtcggcaaatacctgtcgcttgaagtcatgcaaagcgcagcgggccactacatcggcacccgcgacagcgaaggccccgtgtctcgcgaatcgaacgagtacttccgaagcgcagccagtgcccagcgagccctcgaaagaggcggctggacccagttgcccaacccctga

SEQ ID NO: 351401 - DNA, 393 bp, Pseudomonas aeruginosa
atgaaccagcttctgcctccggaagtcgttgaacagatcatgcgggaagagcagcatttcgcatgtgctccggacgcattctttcaagcctggaagcgcggtgccgaaatcgcaggacccgagtggttcggcaacggtacccacgaaggcctgcagcacgccaccagcaagtgggatctccgtcccaacatgctgacgctcaacgatgccctcggcgttctgagcagcggtcaacgcatgttcctgtccgcgatggtcagcttctacaacgcccgtgagggtgctgcgatgctgcgccgttgtggatttgaagggcttgccgatctcggcggcctggatctggaacgtcgtcaggtcatcgccgacctggtgctgaactacagcggctggtaa

SEQ ID NO: 351402 - DNA, 462 bp, Pseudomonas aeruginosa
atgtcccgaactccctcctttgcggtcgtcctcgaaggtggcctggtccaggccatcgtcgttcaagactggccccgccatcttccgatgccaccatttgttgtcgtggactacgacaccgaaggtgccgacgatgacgaaatcacgcggttttccatcggtcagagtacagccgaggccatctgccgcggcgatacgccgaccgtcttcgagtctctttcggatgcgctgtctccccgcatcgtgctcacggcgctgggcgagtcgatcaccgacgaagcgcccgagcctctggccttggcccgctcggtacgccaggaaatcgtcgatctggacacccacctgaacgacgccgaacaggcaccgacgggcgacgactacaaccagctgtacgtccttgccaactgcggcctcatcgaggtgcagaaggcactgggcgacaccactgacttcggcgactga

SEQ ID NO: 351403 - DNA, 660 bp, Pseudomonas aeruginosa
atggcaaacaactactacgacgccaccggcgttctcgttctcgatcgggtaacccctgtgataaccgccttgttcggcggcttcaagcttgacgcgtcgcaccccggcgacgggcaggcctacatcgccctcgttgccgaggacaacaacccgagctgggtagacctctgcgcagggctttcggagctggctacctcgcttggcctcccgttacccgacgattcccagacagtcgaaccgctgctggcgagcctgtccctgcatttcggcgccgaccaggacgaagcactggcgcatctcatcgagcaccatctattcgaggatgccgcggaccttgatgcactgtttctgatcgcgacccgattcgatgatggccacggccttcaggaaatccgtttcgagggctgctggcactgcagcaagccgcgcctcttcaacttcggaggcgacgcgcagtttttcagccgagagttcgtggcgtactgcacttccggacaggcgctgcagcttggcgattcggttcgccaggcactactcagacaagacctggaagcggtcgcaagccacttcacgcgcgaagttcaacgcttgcttgcaggcattcaggacgaatcggtacgcgttaaaacgcaaaagcggctgtccgcactgctgcactga

SEQ ID NO: 351404 - DNA, 723 bp, Pseudomonas aeruginosa
atgatccagcagatcaatccctttgctcgcggctactacggcttcgagattcgacgcgtggcggtgatcagctatgacgatcgccatccgcaaacctttgttccactgcatcccacgcagcatcacctgcctgatgaccagatggccttgcacgcctgcatattcaatgaagggtacgccctggtcacggagcatcaagtgatacccggagatttggatgccagttgtagtggcagtggaaccattctggcggttttctatagcatctacggcaaggacgtcgaaggcgcgctgattcatcttggagacagccaaacccgggagtttgcgcaggaagtcgtgcgtacgctgacattcgagaccggcttctacagccggtgctgggagatcagcactgcccacatcaccgacgaagcaggccgattcctctgcgagctcgccgacatcgcgacaccgacagcgtttctcttcgtggcatttcgtatcccatacagcccggccataggcatcaagctgatcgccactccctggacggatataaatctgcagcaggtagaaggcaccacagctaccgaccttcgtgcggaacaccgtgccaagggtgtaccagaggaactgatcgacgtgttgcacctggctggccaggctgacgtgcgcatgctggtcctcgatgcggacgcctccattctggagggcctgccggtgattgaggaagaagcgtag

SEQ ID NO: 351405 - DNA, 861 bp, Pseudomonas aeruginosa
gtgactacttgcaacggaggccccggcgataagatgacgtgtgcgcaatgggaagtacagcgcttgctggggcgatgtctgctgcggattcagcagtacgaacgtctgatgaaagccatcgtggcgcatcacgatctctcaggcccggccacagcgttggaggctatccgcgcggcccgagtggaggatgccgcgacgaagacgctaggcaccatggttggtcagttgttcggctcttacgtcgtgaccgattcgggtctagaggaggaactggctgatcctgtcgttggtgaggtcgcgacggtgcgcatgcgccttcaactgagtatgggcgccgaagattatcaacgcacacaggcggagctgcgtgacttggtggcgctgcgcaatggcctggtacatcacttcattgatcaccacgacctgtggtcagtgcagggctgtcgcagtgcgcaggaagcgcttgtcggtgcctacagccgcatcgatcagcattttgagcaactgcgcgggtgggccgagcacatggatcaagcacgtcgcttggcggccgaattcgtacagtccagcgcttttcatgagttggtggtcaatggcatcgcgccagatggctccattgattgggcggcgtcagggatcgttcgaggcttgcgcgaagcaattggtgagcttgcggaagacggttggacacccgctgcgaaggcaggtcgctggatactggccaagtatccggaccaagtgccatccaagtatggctgcagcagttggcggcaggtggtgcacgagtcacgcctgttcgagcttcgctaccgggaggtcgatggccagcgcgcggggtactacagggagcgcggcgcctga

SEQ ID NO: 351406 - DNA, 1848 bp, Pseudomonas aeruginosa
atgctgcgccttgcttctttgttggttttctctaatgtggctgttgcctctattctaatttttggggtctcgctaagtctaaaaaacagccgcaatgcggatatatacgaggcgcaacaggctgcggcgaatcttgcgaacagtttgagtattgagattggcgcgcaaatgcacttgatcgagaactctttgtcgacaattgcatttagggtgagtgatgcaaactcagaggatgagcgaaataagattgtgacgaaagagctggcggagcaagggatgctgctgtcacaagtatctaatctcagatttgccgacgcttcgggagcagtgggaatcacgataaacggaaagacaacggatgtctctgaattctcacactttatatcagctgcgcatacggaaaggatggttttttctgagccagttgtgtgtgatgactcgaatgaatggtgcattgttttggctcgagggctccggaccaaaaatggggatttctacggcctcatttatgctgaggtcgagtcggatgcactgatgacgagattctcccgactggatatgggggctgctggtgcgatcgctttgcgaacaagcgctctaaatctagttgctagattttctaggtctgatccgtggtcaaaaaaaggacttggtgaaaaaatcgtttcagacgagcttttggatcaattggccaagggagacgaaaggggctggtatatcacgccaacggcgcttgatcatatcgagcgaatcaccgcgtactctcgaattgagggctatccgcttatcgctcttacgggtttggctacggatgagtttcttaaaaactggagggctgaggtttttcgtcaggctcttcttgtacttatggttctagggatcaccgcagcatactcctactatcttttccgtacgcagagagcagaaagaaaagcccggcttgaggctgttagtgttgtccaacaacagagcctgatgcttgagaataatctcgttggaatgatgaaagtgcgcgagaggaaaatagcctgggcgaatatggcgacatcgcgaatattcgggtatgaaagcgggcagctggatgggcggccatcacggcatctgtacttgagcgatgaagatcatcagcgtattggaatggctggatatgcggcgctccgtaatgatggccgatattcagtacagctgcaaatgcaacgaaagagtggtgaggttatttggattgatctaagcggcgcagcagtgtctgaaaaagaaagtttgtggatgatggtggatattgactcaataaagcgtagcgaaaagaatgcccaggatttggcattaagcgactcgcttaccggaattgcaaatcggagattgttcgacctacgccttgagggcgctttgtctaatgcgcgtcgcaacaaccatcttattgcagtttgctacatggatcttgatgggttcaagaaaatcaatgatgcctacggccatgatgccggtgatacggtactgtgccagacggccaagcggttagcggaggccgtccgcggtaacgatgtagtcgcacggcttggaggggacgagtttgctgtcctgctgaactctgtcgaaggcactgccggagcaacgctagtaatgcagcgctgccttgagcagattcgcgagagcattgagattgcgcctggtaagtatgtgcaaatcgacgcaagtatcggaatcgttgtcggatccggggactctgctccgcaagacttgctgcgaagagcagacgaaatgatgtatgcagtaaaaaaaggaggcaaaggccggatccaggcggttgcgatcaagtctgtttccaaaaacacggaagaggttaagtga

SEQ ID NO: 351407 - DNA, 798 bp, Pseudomonas aeruginosa
atggatcaccaagccattcgccagcagcttcccttgttggtcgccggccacctgccacgcaacgcgcgtagctttcagttcaacatctttgacggtcagcccaaggaatccgccctgggctttcgcatcgacccccagcccttcgacggcaaggtcgttgcgaccaccgacgaagccatagtcgtcaagatcggccgcacacagttcgccgtgctggaccgcgaactggtcactgacatccctgtcgaaggggccaaagtcactgtccaaccttacgcacgccgacgtttcgatggcttgcgcgccgacactccggaagaagtcgtggaacatacctcggacggcacgccgtataaggtcacccgactgattctcggctcggcgccggcgcacttgccggttgcaaagccggtgtgccttgaactgcagcagctcatcgagcaattggagtccatgcccgcaccggatcagcaccgcaccatcagccacatgctggtcgatgcccacgccagcgaattcacactggtcgatccgtcaccgaaggacatcatccgcactccgccgacgatcagcttcaacgtggtcaccggcaagtttgatggtcgcgtaagcgtgctgtatctgcgcggcgacgacgtctatgccatcgagctgcaccgcgatggcaaatgtgtcgagcggcgcgacgaggtgtacttcgacatgctcggccacaccttggcacacctgatcgacgacggctcctggcgtcgcattcaggtccagcctatctccggccgcaaggccacctcccattaa

SEQ ID NO: 351408 - DNA, 366 bp, Pseudomonas aeruginosa
atgactctgctcttcaaaggcagtgcgcttcgacctgtcctggccgaggccatagccaaccaatgccgcgtcatcctggtcaaggatcagggcgtgtactggctcgccgagcatggcgagcgtaggcccgataaacgccagaagctgattgcctatgcagttggctgcgatccggatgtcgatccgttcgatgactggtgggaactggcgcgcatcaagttgggtggcgacgacttcggcgagttcttcgacccgaacgaaggcgtactcacacgcatcctgaacagcaccgatgacctggtgctgtctgcctcgctcacgcacctgtcgctgcaggccgtgccgcccaccgcacaagaccactga

SEQ ID NO: 351409 - DNA, 921 bp, Pseudomonas aeruginosa
atgaccaccacgtccaacgagaaatcctatttcgacctccacacctccggcatcggctacctgcagcgtgcccgtgaggttcccgtcaagggaggccgccgcgcacagccgttcctggcttgcacgatcgccgccctagttggttccgccaaggagccgtccatccgctacttcgacgtcaaggtgtccggcaccgaggccaagaagctggttcagtcctacgtcggcatcgatgatcccaagcagcgtccgctggtccgtttccggctcggcgacctgtggggcgatgcgttcatccgccccagcggtgaacgtcagggtgaagtggcagcgagcctcaaggggcgcctgctgaaagccgaggtgatcgatcgcgccgaactggcaacgatcgagcagcacgaactcatcacccgcggcatcggctacctgagccgtccgaaggaggtcactcccaaggatcgcgatccgttcctgtcgtgctccatcggagcgctgaccggcccggtcggtgaaccggagtatcgctacttcgacaccatcgtcgctaccaccgacgcccagcatctggtccgtcgctgcgttcaggccatcgaggctgaacgcaaggtcctgatcgccttccgactgaacgacatgcgggctgacccgtacgtgcgcaccaagggcgaacgagccggcgagccgggcgtgagcctggagtccacgctggtccacatcggtctgatcaaggtcgatggccagcaggtctatccggctgctgcagtcaatgccgaagcacctgcaaccccggacgcgcaagcgaccgaggccaagggcactgccgaaagcggcgacgccgcccagcccaccgagcccgccccgcgcgagcccgaagctgaagcggtcgagcacgaaccggcaatggcggcttcgttctga

SEQ ID NO: 351410 - DNA, 828 bp, Pseudomonas aeruginosa
atgtctctcgcaacccgctttgcccatcgttccccagtgctgcgcgcggatcgtccgttgtcggatgaccagatacgcgctgttgccccttccatcttcgctgacgctccccacgaaagccgatccgagcggtatgcctacataccgaccgcgaccgtgctgaccaagctgcgtcaggagggcttcgagcccttcatggtgtgccagacccgtgtccgcaacgaggaccggcgcgagttcaccaagcacatgatccgcatgcgccatgcgagccagatcaacggctcggaagccaacgagatcattctcttgaacagccatgacggtaccagcagctatcagatgttggctggcatgttccgcttcgtttgccacaacggcctggtctgcggtgaaaccactgccgacatccgcgtcccccacaagggagacgtggccggtgaggtgatcgaaggcgcatacgaggtcctccagggcttcgagcaggtgcaggcgtcgcgagacgccatgcgcgtcatcacccttgaaacaggggaagaagaaatcctcgcgcgctccgcactggcgctcaagtatgacgatccgaccaggcctgcgcctgtcacggagactcaactgcttgcgccccggcgcttcgacgatcgacgaccggacctgtggtcggtgttcaaccgcatccaggaaaacatggtcaagggtggcctgtcggcacgtacgtccaatgggcgtcggcagcgcacccgcgaagtgcaaggcatcgaccagaacctgcgcctgaaccgggcgttgtggatgctggccgatggcatgcgccaactgaaggcctaa

SEQ ID NO: 351411 - DNA, 660 bp, Pseudomonas aeruginosa
atggcggccaaatcagccccgaagtccagcgcccccctcatcgtccccgggcagctcacgctgcgcaccatcaacggccgcaatggccggttcaatgtcggccggctggtcaccgccatcggtgagttcgcggtcaaggatgcagagctggagcagtaccccgaaggcaagtacgacggggagttccacatccgcttcatctatcccaaggcctatcccacggccggtggaatgcgtttcgagatccgcgccaacctggacggcatgaccctctcgggcctggaccggctgagcaaggacgaggctcgcagcttcgccacgcaagaggtcgatccgctggacgaggacgtggctcagccatcggctacgccggcggtcaagcctgctgccgatcctgtacaggcctcggccgatccgctgatcgataccacgccctttggtgtggatgcgccatctgcgaccgtggctgcctccggcggccccgacagtgacgatgccgcattgttcggcctgctgtggccgctgagcgaatccgtgaaactggattcgaccatcgaccgccgcaccctgcgtgcccagatcgcccggctgggcgaactgggctacgccctcgacttcaagtcacagcagtggaaccggcccgaacaacaggccgcctga

SEQ ID NO: 351412 - DNA, 399 bp, Pseudomonas aeruginosa
atgggctggcttttctcatcccgcacccggtcggaactgatcctggacctgatccaacccgaagaccgcgaacgcgccagcgtccgtgtcatcgcgcacacgctgcgtggcaatgtgctgtggtccgttgtcgagatcacggccaaggccgaaggcgttcaccaggatctcgcgcccggcgagtccatgtgctacatctgctgcgacctgctccagcacagtggcggtcagtgggggtacaagggcatggacgagtccatgtcgccgtactactacacctgcccgctgcgctatctcgcgatggccaaagaaatctcgcccgattggcgcgagaaggttagggcctatcacgcgcagcggcgccggccggtggcttcttcgcaactggccacggcctga

SEQ ID NO: 351413 - DNA, 261 bp, Pseudomonas aeruginosa
atggacacttcgctgcaatccctctcgcccgagcttctgcgccaggtcgaagaccagctctccaacaacgaggtttcctcggatgaggaactcgttgaggacttcatccaggccggcctgaccgaggcacaggcgcgggaagccatcggctaccgcgactgctatctcatcaacgtgtaccaccaggacttcacgccgattcgtaccccaggacgtgcattgcgtttcaacccgcacgccagggacttcgagccggagtag

SEQ ID NO: 351414 - DNA, 651 bp, Pseudomonas aeruginosa
atgcctgaaccttcatcacccaaccccctgtaccgcatcgatgaatgcagcgacctcatggccgatgcatgcgtttgcagcgatcagggcgatctgatctttctctcaatctgggcgcgggataccgcgatccagcagttcctggcccggctgacgctgggccgcgacgaagatggactggagcaattccacctcatcaccgatcaagggggctccatccccgtgttcgtcggatcggtcgatcgcctggaaaagcgcctaacccgttcctatcgccgcacgctgttcggctcgatggtcaatctatggctgttcgaccgacgctgcacccgtccggacaaagccacggccagcgcgctcgcgctgctgccgcgcgcctcggccgatcccaccttgcgcctgtggcacctggtcaaggacacatgtccactgccgctgctggaccactggcaagcgccggtactggcactgctgcgtgagcgcgacatgctccaaaccctgccggtggcccttggtccgctacaaagcttccggatcgggctcgatgtcccggtcctcaccgatgccctgggcgaactgatccgccgcggcgtcctgaccgcctacccggtaccggctcacgccgagctgccagtggaagcggtggcctga

SEQ ID NO: 351415 - DNA, 1110 bp, Pseudomonas aeruginosa
atggcactgatgttcccgcggcttgcccgcaatttcgccaaaaacgggtattacccgaccgatgaatccacgctcgaacgagcgctccgcgcactggcgcccagcgatgggccaatgtgcatccttgatccctgcgccggcgaaggcgtggccatcgcggaagccgcgcatgccctcgggcatgagcaggtttgcgcgtacgccgtggagtacgaccaggaacgtgccaatcacgcacggctgctggtcgatcactgcatccacggcgacctcatggacacgctggtctcgcgccagtcgttcagcctgctgtggctcaacccgccttacggcgacctgtccaaggatgccaatggcaacatcggctacgaaggcaagggccgcgccaggctggagaagctgttctaccagaagacgctgcagctgctgcagtacgaaggcatcctggttttcatcgtgccgtcctatgtgctcgacgctgaactggtcgggtggctgacgcgacacttcaccgatctgagcatccaccgtgcggtggatacgcagttcaagcaggtggtcgtattcggacgtcggatccgccagcgcgagctggtcggtgacgacaccaaggcagtccgggcccgattgctacagatcgggcaaggcgaagtcgaggcggatgaacttccgtccgagtggacatcgctgccgtatgtggttcccacgacctcggtcgagccggagcatttctaccggatcagcatggagccggcgcagttcgccgaggaagtgaaccggctgcagggcctctggcccgcattcgagacacaccttggtgctgcccagcaatccctgcgtgccccggcacgtgctctgtcccactggcacctggcactggcccttgcggctggcgccatctcgggtgtcgtgcagtccaaaagcggccgcatcctggccgtcaagggcgatacctacaagcgcaaggccaccgccgtcgagcaccgcgagcgcgacgatggctccatcgcagagacacgcatcctcacggacaagttcgtgccggtcatccgcgcatgggacctgtctcccgactcggcctcactgggacaagtcatcaccatccactga

SEQ ID NO: 351416 - DNA, 306 bp, Pseudomonas aeruginosa
atggcgtcgatcaggattgacacctacatccaccaactgcagttccccatcggggcgctgatcatcagcgaaggcgttgaccgcctgattcgtgcaggcaccgaagaaccgttccagttcctgcggcgtcacgcccgcggcgattggggtgatgtccccgctgaccaatgggaagcgaacatcgcgggaatccaatccgaggtcaagctcgaatcgttctatgttgcaaccaacggccagcgcatccgcatcttcaccgaagcggatcgcagtgccacccacatcgtgctggcttccgagaactga

SEQ ID NO: 351417 - DNA, 312 bp, Pseudomonas aeruginosa
atggcaaccgaagcagttttcctcagcgccagtcccacgcggcgtttcaaccccggccagatggtcgtgacctcaggcgtggatgcgctgatccgccagggtcggctcaatcccagcccgtacctgcgccgccatctcagcggtgactggggcgatctcgatgacagcgaccggcaacagaacgacgccgcgctgcaatcgggtgaagatcgcctgttctcttcctaccaggtcaccaccgaactgaagatctgggtcatcaccgagtgggatcgcagcgtcaccacgctgctgctgcccagcgagtactga

SEQ ID NO: 351418 - DNA, 744 bp, Pseudomonas aeruginosa
atgagtccagatgatgtcgccgcgatccagagaatcgtgcacgatgcgatgcaaaacaccgagttcatcaacaaggtttggatcgcgggcgctgccgtcgttgtgtccgtttttgccgctcttgtcgcctcgttcacgcaaatgctggtagctcgctcgcagcgtaagactcagctaaggttggccgctcagctagagcttcagcagaagcaagcactgagcgaacaactgtccatgcaggaactcgcatcgcgtcgaatcgcaaacgccaacgtctctgcaaagcggcagatatggattgacgagttgcgaaaagacatcgccagatatctgtcgctatggcaggagatctcttatcggtgggatgccatcgtgagcgaaccccggaccgaagagatctccgaccaagcgctcaacgcgttcaagcagcctatcgccgaaatgcgcctggaagccttggaactgcagttgcgtatcgagttgcgattgaatatgacagaagtggatcaccaggaactaaaaaacctcatgaagaagctggaaacatccaccatcctgttccaacgtaccgcgagttcgcttccgcctgcagacattcagaaggtcttcggaacgatcaagcaacagctgatcgccaagtctcagaagatcctcaaggacgaatgggaacgggtcaagaaggagtcgtacgcagatcccagcgtaacgagctccagcaagcccacctccgggtcggctgcctga

SEQ ID NO: 351419 - DNA, 576 bp, Pseudomonas aeruginosa
atgcaaacaatcagtctcgtcccccgcgcggtcgcgtgtggcttgttgagcatcgccacactgcttggcggctgcgccaccgcgtcagcacctgctgtcatcgagtcgcttccgaacgaagcggcgatctctgcccacgtgcaactggagccggagttcgttccggtggtgcgctacggccgctacaccctcgtcgaactggcgccacccacagcgcagcgtgacctgcttcagcaggtgattgacgtgcggatgccggaagaggccagagccagcgtaggcgatggtctgcgccacgtcctcaaacgcagcggctaccagatgtgcgagacggcacacgcgatcatccagctgtattcgctcccaatgcccgccgcccatctgcagttgggccccatgacgctgcgtgacgcactgctcacccttatcgggccggcctgggatctggaagtggatgaccgctcacggcaggtgtgtttcgtccagccaagagcccagggggctctacccatcgaagaactaccggccaccggggcaatcccgcctatccaggttgaagagggttcccagccatga

SEQ ID NO: 351420 - DNA, 663 bp, Pseudomonas aeruginosa
atgaccacatcacacccgcttcccgcggcgaagtcatcgcgcgccccatctctcgcccacatcttgctgtgggcgtggcttgtgggcctgacggcgttggtattggtcgcgctccagataaccagtgagcttgctggacagtctcagctcgatagctccgtgcagcgtctgcaagcactggagtcacgcgtgggtgagattgtgcaggccaatcgtgctctgcaagagcgacctgcgccggcgaccgctacggcactacaggaggtgcaccagtcattgaaatcccgcgctgattctctggaccaggcattggtcacgcttgccagccaagaggatctggttgtactgcgggcggatctggaacaaatcaaatcgcgccaagcaacagtacgcagcagcaccgtagcgagcaagccccatcccgtgcagcaggcggtagtaaagccagcggaggctccaatgccatttcggttgattggctcagaactgcgtgcaggccagcacacggtatcgatcgcaccggtaagtggcgatctctccgcttctcaaatccaggtgctactgcctggcgaaagcatcggccattggcgtctgcaagatatcgaccgaaacactgccgtgtttcgtgccggggagcagacccgtcgcgtggccattccctga

SEQ ID NO: 351421 - DNA, 720 bp, Pseudomonas aeruginosa
atgaagcagccactcctgctcaccgcaatgcttctggcagcccttaacggaccatcctgggcacagcaaacaccggccacaccgtcgcatattacccagagccagatcgagcacagtcaggacaacaagttggcccgagactgggggctgctccgggaagagtggacgcgctaccgggagctgatggccggtccgcttggcatttactcgcccaatctggatcccctttccgcccttggaacagaagcacgttccgacgaggagagacggcgctatgccgagcttcaggtccaagctgaagcacgccgcgtagaaaaactactggcctaccagcgcgcttatgacgaagcttggcaacggttgcagcccaatgcccagcgcgtcaacctgccagacgctggcccgcgtcaaaccaacgcctcagttcagggaagcggacgcaccgccgttttcgtgcgcgacaactgcgccccttgtgaccaggccatcgagcggctgcaagcgtcaggctcggcattcgacgtatacgttgtaggtagccgcgccgacgatgcccgcattcgcgactgggcacgccggaccaagatcgacccatcccgcgttcgtgcccgcacgatcaccctcaatcacgatgcgggtcgctggttggcccttgggctgccaggtgagctgcccgctgtcgtgcggcaggtaaatggccaatggcaacggcagccctag

SEQ ID NO: 351422 - DNA, 591 bp, Pseudomonas aeruginosa
atggcaacggcagccctaggtctggcccggcaagccctgatgctctggctggtcagtggggtgatcagcgagaccgccttggcccaagagattccgccgccggcctaccaattggccgccaggcaggctgaaattccctccgctgtgctgtacgccgtcgcgctacaggaaagcggcatgcgccgcaatggacgcgttgtaccctggccctggtccctgaacgtcgcgggcgagtctcagcggttcgccacccgtgtcgaagcatgcgcaggcctgcaactggccttgcgccaagctccgccaacacgcgtggacgcaggcctgggccagatcaatcttggttatcagaagcaccgctatggccacccttgcgatttgctcgatccttacgtcaatttggcgatcgccgcgcagatcttgcgtgagcagcacacaccgggcgaggactggctactggcaattggtcgttaccacagaccggccggtggtgcgcctgccgcccgctaccggcgcagcgtcgcccagcatctggagcgcgtgcaagcctcgtcacgcgcaacatctgatgtccgcaaggagaccccaccatga

SEQ ID NO: 351423 - DNA, 534 bp, Pseudomonas aeruginosa
atgaagctctcccacctctcggtcgtacacgggctggtcgttctgctgaccgtagtggctaccccattacatgcggccaagcctttggtcgttgtccaagaccgtggtggcacgtcggcgctgccttactacgaggcactcaacctgctgccgcgtacgccaaagcctctcattgcaatgcccgtgccaccatcaaaggctgacggtgaagcaaacatgctgccggtgcgcagtaccaagttgactccaggcacggtcattcgccgtgtcatcgaggcaccagggctgcagccgttcttcttgatcggagatgatgaagcttcacatgcctggttgcgccgccatgcagtctccctgcgtgagcgcaacgccgtgggtctcgtggtcaatgtagattcgatgcaagggctagcccgtctgcgggctctcgcgcccggtatccagctcgcaccggtagttgccgacgatctggctgaccggcttggcgttcggaactaccctgtgctgatcaccagcacaggcatcgagcaatga

SEQ ID NO: 351424 - DNA, 750 bp, Pseudomonas aeruginosa
atgagtgatgcggccagcaccgcgaagcgccaagagactcgccgtgacggactgcttgtcggcctgatcagcacgccgttcaggctgttcggcgtcttgattggctcgctgctgatctcgatcgtgatcgaatgcgtggggatgcacttcttctggaaggatcagggctggcgtcactctcaggctatgttgcagtacgagctgacccacctgtctgggcacttcactcgcagcgccatcgtcacggagcccacgcgcacagcgcatgggctcgtggatacaggctaccgcttgatgttcgtgcgcactggtctgctgacgcgcatggagcaaacggctgatcgcgcccgcgcgcccagtcagcatcgcaaacgagacttccgctacttcattagccaagcctacgtgtgggcggaaagctacttgattgccgctgcctttacgacgctcacgtacctggttcgactacttgtgctcgtgctgaccctgcctttgttcgtaacagcagcattcgtaggcttcgtggatggattggttcgccgcgacgtacgcaaattcggtgcagggcgggagtccgggtttctctaccaccgcgcgaaagcctcgctcctaccactggcaatcttgccttgggtgatctacctggctttaccagtttcggttcatccgctgatcattctgcttccgagtgcggctcttcttgggctggctatgaatctcaccgcgggcagtttcaagaagtacctgtga

SEQ ID NO: 351425 - DNA, 810 bp, Pseudomonas aeruginosa
atggaggttgcagcgctcattggaatagtcaacaaatatcgttcgatcaatgctctattcgatgtcgatagtaaaatcatcgtcccgcaacagaagttgcttgacttgctcgatggggggcacacccttgctgatgaggatgagagatataacgacgcattcttcgagcttgccatggcaatcagattcgcagcaagtatgggtgacggagtggaaatcgacctctctaccgaatgcgatgtggtcttgtgtcgacaaaaaatagcgattgagtgcaagtacctacacagcgaaagaaaattcagaaatgagttctccgatgccataaaacagctggacaaacgcataagcaacgggcaggcggaagtggggtatgttgcatacgacctgactaatttggttgacaaggtccgcatttttgaaatggcgcgctctgtttttgattctttcgtcgctaactacgaacgtctagagcagagtcgaggtgtattttctcaaagcatcaaggaacaaggtgtacttcgttctattctcgtcaatcgaaactttcaagcaataattagcaacttgacggcccaccatttggagtcagttttttatagcaacttcaaaaaatccgagatggagaagcttgattctgaaaaggttgccgtcatttttcagttgagccactgccttatatttgaatatgaaaatgaggttattccggtgcctgccagggctatgaattactacatcaacgatggccttcctgagatacgccaagcagaaataaagaaattcattcactccttggctgttgggatctag
